(19) United States
(12) Patent Application Publication
(10) Pub. No.: US 2025/0215492 A1
(43) Pub. Date: Jul. 3, 2025

(54) PREPARATION OF LONG READ NUCLEIC ACID LIBRARIES

(71) Applicant: Illumina, Inc., San Diego, CA (US)

(72) Inventors: Heather Meinholz, Cottage Grove, WI (US); Daniel Gerhardt, Madison, WI (US); Joshua Burgess, Sun Prairie, WI (US); Leigh Graham Monahan, Stanmore (AU); Jennifer Dennin, Mt. Horeb, WI (US); Stephen Paul Bruinsma, Madison, WI (US); M. Maggie O'Meara, Madison, WI (US); Aaron Earl Darling, Hornsby (AU); Johnathan Parker, Dane, WI (US); Chateen Krueger, Oregon, WI (US); Brian Ross, Madison, WI (US); Stewart MacArthur, Cambridge (GB); Ryan Lusk, Minneapolis, MN (US); Aaron L. Halpern, San Carlos, CA (US); Stephen M. Gross, San Diego, CA (US); Denise Raterman, Madison, WI (US); Feng Chen, Castro Valley, CA (US); Brian Hawks, San Diego, CA (US); Susan C. Verity, Cambridge (GB); Andrew Slatter, Cambridge (GB); Esther Musgrave-Brown, Cambridge (GB); Angelica Schalembier, San Diego, CA (US)

(21) Appl. No.: 18/867,185

(22) PCT Filed: May 25, 2023
(86) PCT No.: PCT/US2023/067467

§ 371 Date: Nov. 19, 2024

Related U.S. Application Data
(60) Provisional application No. 63/365,361, filed on May 26, 2022.
(60) Provisional application No. 63/366,222, filed on Jun. 10, 2022.
(60) Provisional application No. 63/366,516, filed on Jun. 16, 2022.
(60) Provisional application No. 63/366,896, filed on Jun. 23, 2022.
(60) Provisional application No. 63/373,685, filed on Aug. 26, 2022.
(60) Provisional application No. 63/483,213, filed on Feb. 3, 2023.

(51) Int. Cl. C12Q 1/6874; C12N 15/10; C12Q 1/6806; C12Q 1/6809; C12Q 1/6853

(52) U.S. Cl. CPC C12Q 1/6874; C12N 15/1031; C12N 15/1093; C12Q 1/6806; C12Q 1/6809; C12Q 1/6853

(57) ABSTRACT

Some embodiments of the methods and compositions provided herein relate to obtaining long read information from short reads of a target nucleic acid. Some embodiments include steps to selectively generate, mark, and amplify long nucleic acid fragments. Some embodiments include enriching for certain sequences in the long fragments with selection probes directed to certain genes throughout the genome and expressed regions with low mappability. Some embodiments also include fragmenting the long nucleic acid fragments into shorter fragments for sequencing, and informatically reconstructing a sequence of the target nucleic acid.

### RELATED APPLICATIONS

[0001] This application claims priority to U.S. Prov. App. No. 63/483,213 filed Feb. 3, 2023; U.S. Prov. App. No. 63/373,685 filed Aug. 26, 2022; U.S. Prov. App. No. 63/366,896 filed Jun. 23, 2022; U.S. Prov. App. No. 63/366,516 filed Jun. 16, 2022; U.S. Prov. App. No. 63/366,222 filed Jun. 10, 2022; and U.S. Prov. App. No. 63/365,361 filed May 26, 2022, which are each entitled “PREPARATION OF LONG READ NUCLEIC ACID LIBRARIES” and which are each incorporated by reference herein in its entirety.

### REFERENCE TO SEQUENCE LISTING

[0002] The present application is being filed along with a Sequence Listing in electronic format. The Sequence Listing is provided as a file entitled ILLINC736WO, created May 23, 2023, which is approximately 121,253,851 bytes in size. The information in the electronic format of the Sequence Listing is incorporated herein by reference in its entirety.

### FIELD OF THE INVENTION

[0003] Some embodiments of the methods and compositions provided herein relate to obtaining long read information from short reads of a target nucleic acid. Some embodiments include steps to selectively generate, mark, and amplify long nucleic acid fragments. Some embodiments include enriching for certain sequences in the long fragments with selection probes directed to certain genes throughout the genome and expressed regions with low mappability. Some embodiments also include fragmenting the long nucleic acid fragments into shorter fragments for sequencing, and informatically reconstructing a sequence of the target nucleic acid.

### BACKGROUND OF THE INVENTION

[0004] Current protocols for next-generation sequencing (NGS) of nucleic acid samples routinely employ a sample preparation process that converts DNA or RNA into a library of fragmented, sequenceable templates. Sample preparation methods often require multiple steps, material transfers, and expensive instruments to effect fragmentation, and therefore are often difficult, tedious, expensive, and inefficient.

[0005] In one approach, nucleic acid fragment libraries may be prepared using a transposome-based method where two transposon end sequences, one linked to a tag sequence, and a transposase form a transposome complex. The transposome complexes are used to fragment and tag target nucleic acids in solution to generate a sequencer-ready tagmented library. The transposome complexes may be immobilized on a solid surface, such as through a biotin molecule appended at the 5′ end of one of the two end sequences. Use of immobilized transposomes can provide advantages over solution-phase approaches by reducing hands-on and overall library preparation time, cost, and reagent requirements, lowering sample input requirements, and enabling the use of unpurified or degraded samples as a starting point for library preparation. However, certain portions of a genome may be underrepresented in libraries prepared using such transposomes.

### SUMMARY OF THE INVENTION

[0006] Some embodiments of the methods and compositions provided herein a method for preparing a nucleic acid library, comprising: (a) obtaining a plurality of transposomes comprising transposon adaptors, wherein the plurality of transposomes is immobilized on a solid support; (b) contacting a plurality of nucleic acid fragments with the plurality of transposomes to obtain a plurality of polynucleotides; (c) amplifying the plurality of polynucleotides to obtain amplified polynucleotides; and (d) adding library adapters to each end of the amplified polynucleotides, thereby obtaining the nucleic acid library.

[0007] In some embodiments, the solid support comprises a bead. In some embodiments, the plurality of the transposomes is immobilized on the bead at a density such that an average length of the plurality of polynucleotides is greater than about 1 kbp, 2 kbp, 5 kbp, 10 kbp, 15 kbp, 20 kbp, or 40 kbp; and/or wherein the average length of the plurality of polynucleotides is in a range from about 1 kbp to about 40 kbp, 1 kbp to about 30 kbp, 1 kbp to about 20 kbp, 5 kbp to about 20 kbp, 5 kbp to about 15 kbp, or 7 kbp to about 12 kbp. In some embodiments, the number of transposomes immobilized on the bead is no more than about 100 transposomes, 50 transposomes, 40 transposomes, 30 transposomes, 20 transposomes, or 10 transposomes. In some embodiments, the number of transposomes immobilized on the bead is no more than about 30 transposomes. In some embodiments, the plurality of the transposomes immobilized on the bead comprise a total activity such that an average length of the plurality of polynucleotides greater than about 1 kbp, 2 kbp, 5 kbp, 10 kbp, 15 kbp, 20 kbp, or 40 kbp; and/or wherein the average length of the plurality of polynucleotides is in a range from about 1 kbp to about 40 kbp, 1 kbp to about 30 kbp, 1 kbp to about 20 kbp, 5 kbp to about 20 kbp, 5 kbp to about 15 kbp, or 7 kbp to about 12 kbp. In some embodiments, the plurality of the transposomes immobilized on the bead comprise an activity in a range from about 0.05 AU/μl to about 0.25 0.05 AU/μl. In some embodiments, the plurality of the transposomes immobilized on the bead comprise an activity of about 0.075 AU/μl. In some embodiments, the transposon adapters comprise the same sequence. In some embodiments, the transposomes of the plurality of transposomes are the same. In some embodiments, the transposomes of the plurality of transposomes are B15 transposomes. In some embodiments, the transposon adapters comprise the nucleotide sequence: SEQ ID NO:01 (GTCTCGTGGGCTCGG).

[0008] In some embodiments, the step (c) comprises a mutagenesis PCR, such that mutations are introduced into amplified polynucleotides. In some embodiments, the mutagenesis PCR comprises amplifying the plurality of polynucleotides with a low bias DNA polymerase, and/or with a nucleotide analogue. In some embodiments, the nucleotide analogue comprises dPTP, and/or 8-oxo-dGTP. In some embodiments, the low bias DNA polymerase is a Thermococcal polymerase, or a functional derivative thereof. In some embodiments, the Thermococcal polymerase is derived from a Thermococcal strain selected from the group consisting of T. kodakarensis, T. siculi, T. celer and T. sp KS-1. In some embodiments, the mutagenesis PCR comprises no more than 12 cycles, 10 cycles, 9 cycles, 8 cycles, 7 cycles, 6 cycles, 5 cycles, 4 cycles, 3 cycles, or 2 cycles. In some embodiments, the mutagenesis PCR comprises no more than 6 cycles.

[0009] In some embodiments, a first end of a polynucleotide of the plurality of polynucleotides is capable of annealing to a second end of the polynucleotide of the plurality of polynucleotides; and/or, wherein a first end of an amplified polynucleotide is capable of annealing to a second end of the amplified polynucleotide. In some embodiments, step (c) further comprises a suppression PCR. In some embodiments, the suppression PCR comprises use of a single amplification primer. In some embodiments, the amplified polynucleotides have an average length greater than about 1 kbp, 2 kbp, 3 kbp, 4 kbp, 5 kbp, 10 kbp, 15 kbp, or 20 kbp. In some embodiments, the suppression PCR comprises no more than 16 cycles, 14 cycles, 10 cycles, 9 cycles, 8 cycles, 7 cycles, 6 cycles, 5 cycles, 4 cycles, 3 cycles, or 2 cycles. In some embodiments, the suppression PCR comprises no more than 6 cycles.

[0010] Some embodiments also include enriching for target nucleic acids in the amplified polynucleotides. Some embodiments also include enriching for target nucleic acids in the plurality of polynucleotides. In some embodiments, the enriching for target nucleic acids in the amplified polynucleotides is performed after performing the mutagenesis PCR, and before performing the suppression PCR. In some embodiments, the enriching for target nucleic acids in the amplified polynucleotides is performed after performing the suppression PCR. Some embodiments also include amplifying the target nucleic acids.

[0011] In some embodiments, step (d) comprises contacting the amplified polynucleotides with an additional plurality of transposomes comprising the library adapters. In some embodiments, the library adapters comprise (i) indexes, (ii) bridge amplification primer binding sites, and/or (iii) sequencing primer binding sites. Some embodiments also include enriching for target polynucleotides in the nucleic acid library.

[0012] In some embodiments, the enriching comprises hybridizing a plurality of selection probes with the amplified polynucleotides, the plurality of polynucleotides, and/or the nucleic acid library, wherein the selection probes of the plurality of selection probes comprise different nucleotide sequences from one another. In some embodiments, an average distance between two adjacent nucleotide sequences of the selection probes on a reference sequence of a genome is in a range from about 300 consecutive nucleotides to about 7,000 consecutive nucleotides; optionally, wherein the range is from about 500 consecutive nucleotides to about 5,000 consecutive nucleotides; optionally, wherein the range is from about 750 consecutive nucleotides to about 2,500 consecutive nucleotides; optionally, wherein the range is from about 750 consecutive nucleotides to about 1,500 consecutive nucleotides; and optionally, wherein the range is from about 900 consecutive nucleotides to about 1,200 consecutive nucleotides. In some embodiments, an average distance between two adjacent nucleotide sequences of the selection probes on a reference sequence of a genome is about 750, 1000, 1500, or 2000 consecutive nucleotides. In some embodiments, an average number of sites in a genome that each selection probe of the plurality of selection probes is capable of hybridizing to is no more than 50 different sites in the genome, to no more than 40 different sites in the genome, to no more than 30 different sites in the genome, to no more than 20 different sites in the genome. In some embodiments, each selection probe of the plurality of selection probes is capable of hybridizing to no more than 50 different sites in a genome, to no more than 40 different sites in a genome, to no more than 30 different sites in a genome, to no more than 20 different sites in a genome. In some embodiments, a selection probe capable of hybridizing to a site in the genome comprises at least 50, 60, 70, or 80 consecutive nucleotides complementary to at least 90% of a nucleotide sequence at the site in the genome.

[0013] In some embodiments, the plurality of selection probes comprise at least 50, 100, 200, 500, 1000, 5000 different selection probes. In some embodiments, each selection probe of the plurality of selection probes comprises a nucleotide sequence capable of hybridizing to a region in a human genome represented in a RefSeq database and having a MAPQ score less than 50. In some embodiments, each selection probe of the plurality of selection probes comprises a nucleotide sequence having at least 90%, 95%, or 100% sequence identity to any one of SEQ ID NOs: 02-122770. In some embodiments, each selection probe of the plurality of selection probes comprises a nucleotide sequence having at least 90%, 95%, or 100% sequence identity to any one of SEQ ID NOs: 02-39954. In some embodiments, the plurality of selection probes is attached to a substrate. In some embodiments, the substrate comprises a plurality of beads; optionally wherein the beads are magnetic.

[0014] Some embodiments also include amplifying the target polynucleotides. In some embodiments, an amount of the plurality of nucleic acid fragments is less than about 100 ng, 50 ng, 30 ng, 20 ng, 10 ng, 5 ng, or 1 ng. In some embodiments, the plurality of nucleic acid fragments is mammalian. In some embodiments, the plurality of nucleic acid fragments is human. In some embodiments, a plurality of nucleic acid fragments comprises genomic DNA.

[0015] Some embodiments of the methods and compositions provided herein a method for preparing a nucleic acid library, comprising: (a) obtaining a plurality of transposomes comprising transposon adaptors, wherein the plurality of transposomes is immobilized on a bead, wherein the transposomes of the plurality of transposomes are the same; (b) contacting a plurality of nucleic acid fragments with the plurality of transposomes to obtain a plurality of polynucleotides, wherein the plurality of the transposomes immobilized on the bead comprise a total activity such that an average length of the plurality of polynucleotides greater than about 1 kbp, 2 kbp, 5 kbp, 10 kbp, 15 kbp, 20 kbp, or 40 kbp; (c) amplifying the plurality of polynucleotides to obtain amplified polynucleotides by: (i) performing a mutagenesis PCR, such that mutations are introduced into amplified polynucleotides, and (ii) performing a suppression PCR; and (d) adding library adapters to each end of the amplified polynucleotides by contacting the amplified polynucleotides with an additional plurality of transposomes, thereby obtaining the nucleic acid library.

[0016] Some embodiments also include enriching for target nucleic acids in the amplified polynucleotides, and/or enriching for target nucleic acids in the nucleic acid library. In some embodiments, enriching for target nucleic acids in the amplified polynucleotides is performed prior to performing the suppression PCR. In some embodiments, enriching for target nucleic acids in the amplified polynucleotides is performed after performing the suppression PCR. In some embodiments, the enriching comprises hybridizing a plurality of selection probes with the amplified polynucleotides and/or the nucleic acid library.

[0017] In some embodiments, the enriching comprises hybridizing a plurality of selection probes with the amplified polynucleotides, the plurality of polynucleotides, and/or the nucleic acid library, wherein the selection probes of the plurality of selection probes comprise different nucleotide sequences from one another. In some embodiments, an average distance between two adjacent nucleotide sequences of the selection probes on a reference sequence of a genome is in a range from about 300 consecutive nucleotides to about 7,000 consecutive nucleotides; optionally, wherein the range is from about 500 consecutive nucleotides to about 5,000 consecutive nucleotides; optionally, wherein the range is from about 750 consecutive nucleotides to about 2,500 consecutive nucleotides; optionally, wherein the range is from about 750 consecutive nucleotides to about 1,500 consecutive nucleotides; and optionally, wherein the range is from about 900 consecutive nucleotides to about 1,200 consecutive nucleotides. In some embodiments, an average distance between two adjacent nucleotide sequences of the selection probes on a reference sequence of a genome is about 750, 1000, 1500, or 2000 consecutive nucleotides. In some embodiments, an average number of sites in a genome that each selection probe of the plurality of selection probes is capable of hybridizing to is no more than 50 different sites in the genome, to no more than 40 different sites in the genome, to no more than 30 different sites in the genome, to no more than 20 different sites in the genome. In some embodiments, each selection probe of the plurality of selection probes is capable of hybridizing to no more than 50 different sites in a genome, to no more than 40 different sites in a genome, to no more than 30 different sites in a genome, to no more than 20 different sites in a genome. In some embodiments, a selection probe capable of hybridizing to a site in the genome comprises at least 50, 60, 70, or 80 consecutive nucleotides complementary to at least 90% of a nucleotide sequence at the site in the genome.

[0018] In some embodiments, the plurality of selection probes comprise at least 50, 100, 200, 500, 1000, 5000 different selection probes. In some embodiments, each selection probe of the plurality of selection probes comprises a nucleotide sequence capable of hybridizing to a region in a human genome represented in a RefSeq database and having a MAPQ score less than 50. In some embodiments, each selection probe of the plurality of selection probes comprises a nucleotide sequence having at least 90%, 95%, or 100% sequence identity to any one of SEQ ID NOs: 02-122770. In some embodiments, each selection probe of the plurality of selection probes comprises a nucleotide sequence having at least 90%, 95%, or 100% sequence identity to any one of SEQ ID NOs: 02-39954. In some embodiments, the plurality of selection probes is attached to a substrate; optionally, wherein the substrate comprises a plurality of beads; optionally wherein the beads are magnetic.

[0019] Some embodiments of the methods and compositions provided herein a method for determining a sequence of a target nucleic acid, comprising: performing any one of the foregoing methods; sequencing the nucleic acid library to obtain sequence reads; and assembling sequence reads to obtain the sequence of a target nucleic acid. In some embodiments, the assembling comprises comparing the sequence reads to a reference sequence. In some embodiments, the comparing comprises determining mutations introduced into the amplified polynucleotides during the mutagenesis PCR. In some embodiments, the reference sequence is obtained from the same nucleic acid sample as the plurality of nucleic acid fragments.

[0020] Some embodiments of the methods and compositions provided herein a kit comprising: a first bead-linked transposomes (BLT-1) reagent, wherein the BLT-1 transposomes comprises a first adaptor sequence; a mutagenesis reagent comprising a first primer, dPTPs, dNTPs, and a polymerase; a second bead-linked transposomes (BLT-2) reagent, wherein the BLT-2 transposomes comprise the first adaptor and a second adaptor; an amplification reagent comprising a first primer, a second primer, dNTPs, and a polymerase; wherein BLT-1 has a lower transposome density as compared to BLT-2; and wherein the first primer hybridizes to the first adaptor sequence and the second primer hybridizes to the second adaptor sequence. In some embodiments, BLT-2 has more than 10, 20, 50, 100, or 1000 times the transposome density as compared to BLT-1. In some embodiments, the first adaptor is B15 and the second adaptor is A14.

[0021] Some embodiments of the methods and compositions provided herein a system for preparing a nucleic acid library, comprising: (a) a first plurality of transposomes comprising transposon adaptors for tagmenting a plurality of nucleic acid fragments, wherein the first plurality of transposomes is immobilized on a first plurality of beads at a first density; (b) reagents for amplifying the plurality of polynucleotides to obtain amplified polynucleotides, wherein the amplifying comprising a mutagenesis PCR and/or a suppression PCR, wherein: (i) the first reagent for performing mutagenesis PCR comprise a low bias DNA polymerase and/or a nucleotide analogue; optionally, wherein the nucleotide analogue comprises dPTP, and/or 8-oxo-dGTP; and/or the low bias DNA polymerase is a Thermococcal polymerase, or a functional derivative thereof, optionally, wherein the Thermococcal polymerase is derived from a Thermococcal strain selected from the group consisting of T. kodakarensis, T. siculi, T. celer and T. sp KS-1, and (ii) the first reagents for performing suppression PCR comprise amplification primers having the same nucleotide sequence capable of hybridizing to the transposon adaptors; (c) a plurality of selection probes for enriching for target polynucleotides in the amplified polynucleotides; and (d) a second plurality of transposomes comprising library adaptors for adding library adaptors to each end of the amplified polynucleotides, wherein the second plurality of transposomes is immobilized on a second plurality of beads at a second density, wherein the first density is less than the second density.

[0022] Some embodiments of the methods and compositions provided herein a system for preparing a nucleic acid library, comprising: (a) a first plurality of transposomes for tagmenting a plurality of nucleic acid fragments to obtain a plurality of polynucleotides, wherein the first plurality of transposomes comprises transposon adaptors, wherein the first plurality of transposomes is immobilized on a solid support, optionally, wherein the solid support comprises a first plurality of beads; wherein: the first plurality of the transposomes is immobilized on the first plurality of beads at a density such that on contacting the first plurality of transposomes with the plurality of nucleic acid fragments the plurality of polynucleotides has an average length of the plurality of polynucleotides is greater than about 1 kbp, 2 kbp, 5 kbp, 10 kbp, 15 kbp, 20 kbp, or 40 kbp; and/or wherein the average length of the plurality of polynucleotides is in a range from about 1 kbp to about 40 kbp, 1 kbp to about 30 kbp, 1 kbp to about 20 kbp, 5 kbp to about 20 kbp, 5 kbp to about 15 kbp, or 7 kbp to about 12 kbp; the number of transposomes immobilized on the bead is no more than about 100 transposomes, 50 transposomes, 40 transposomes, 30 transposomes, 20 transposomes, or 10 transposomes, optionally, wherein the number of transposomes immobilized on the bead is no more than about 30 transposomes; the plurality of the transposomes immobilized on the bead comprise a total activity such that on contacting the first plurality of transposomes with the plurality of nucleic acid fragments the plurality of polynucleotides has an average length greater than about 1 kbp, 2 kbp, 5 kbp, 10 kbp, 15 kbp, 20 kbp, or 40 kbp; and/or wherein the average length of the plurality of polynucleotides is in a range from about 1 kbp to about 40 kbp, 1 kbp to about 30 kbp, 1 kbp to about 20 kbp, 5 kbp to about 20 kbp, 5 kbp to about 15 kbp, or 7 kbp to about 12 kbp; and/or the plurality of the transposomes immobilized on the bead comprise an activity in a range from about 0.05 AU/μl to about 0.25 0.05 AU/μl, optionally, wherein the plurality of the transposomes immobilized on the bead comprise an activity of about 0.075 AU/μl; (b) first reagents for amplifying the plurality of polynucleotides to obtain amplified polynucleotides; and (c) second reagents for adding library adaptors to each end of the amplified polynucleotides. In some embodiments, the transposon adapters comprise the same sequence, optionally, wherein the transposon adapters comprise the nucleotide sequence: SEQ ID NO: 01 (GTCTCGTGGGCTCGG); and/or wherein the transposomes of the plurality of transposomes are the same, optionally, wherein the transposomes of the plurality of transposomes are B15 transposomes.

[0023] In some embodiments, the first reagents comprise reagents for performing mutagenesis PCR comprising a low bias DNA polymerase and/or a nucleotide analogue; optionally, wherein: the nucleotide analogue comprises dPTP, and/or 8-oxo-dGTP; and/or the low bias DNA polymerase is a Thermococcal polymerase, or a functional derivative thereof, optionally, wherein the Thermococcal polymerase is derived from a Thermococcal strain selected from the group consisting of T. kodakarensis, T. siculi, T. celer and T. sp KS-1. In some embodiments, the first reagents comprise reagents for performing suppression PCR comprising amplification primers having the same nucleotide sequence; optionally, wherein the amplification primers are capable of hybridizing to the transposon adaptors.

[0024] In some embodiments, the second reagents comprise a second plurality of transposomes comprising the library adaptors; and optionally, wherein the second plurality of transposomes has an activity such that on contacting the second plurality of transposomes with the amplified polynucleotides a library of nucleic acids is obtained and comprises the library adaptors and having an average length less than about 1 kb, 900 bp, 800, bp, 700 bp, 600 bp, 500 bp, 400 bp, 300 bp, 200 bp, or 100 bp. In some embodiments, the first plurality of the transposomes is immobilized on the beads at a density less than a density at which the second plurality of transposomes are immobilized on the second plurality of beads.

[0025] Some embodiments also include third reagents for enriching for target polynucleotides in the amplified polynucleotides, comprising a plurality of selection probes; optionally, wherein the plurality of selection probes is attached to a third plurality of beads. In some embodiments, an average distance between two adjacent nucleotide sequences of the selection probes on a reference sequence of a genome is in a range from about 300 consecutive nucleotides to about 7,000 consecutive nucleotides; optionally, wherein the range is from about 500 consecutive nucleotides to about 5,000 consecutive nucleotides; optionally, wherein the range is from about 750 consecutive nucleotides to about 2,500 consecutive nucleotides; optionally, wherein the range is from about 750 consecutive nucleotides to about 1,500 consecutive nucleotides; and optionally, wherein the range is from about 900 consecutive nucleotides to about 1,200 consecutive nucleotides; and optionally, wherein an average distance between two adjacent nucleotide sequences of the selection probes on a reference sequence of a genome is about 750, 1000, 1500, or 2000 consecutive nucleotides. In some embodiments, an average number of sites in a genome that each selection probe of the plurality of selection probes is capable of hybridizing to is no more than 50 different sites in the genome, to no more than 40 different sites in the genome, to no more than 30 different sites in the genome, to no more than 20 different sites in the genome. In some embodiments, each selection probe of the plurality of selection probes is capable of hybridizing to no more than 50 different sites in a genome, to no more than 40 different sites in a genome, to no more than 30 different sites in a genome, to no more than 20 different sites in a genome; and optionally, wherein a selection probe capable of hybridizing to a site in the genome comprises at least 50, 60, 70, or 80 consecutive nucleotides complementary to at least 90% of a nucleotide sequence at the site in the genome. In some embodiments, the plurality of selection probes comprise at least 50, 100, 200, 500, 1000, 5000 different selection probes. In some embodiments, each selection probe of the plurality of selection probes comprises a nucleotide sequence capable of hybridizing to a region in a human genome represented in a RefSeq database and having a MAPQ score less than 50. In some embodiments, each selection probe of the plurality of selection probes comprises a nucleotide sequence having at least 90%, 95%, or 100% sequence identity to any one of SEQ ID NOs: 02-122770. In some embodiments, each selection probe of the plurality of selection probes comprises a nucleotide sequence having at least 90%, 95%, or 100% sequence identity to any one of SEQ ID NOs: 02-39954.

[0026] In some embodiments, the plurality of nucleic acid fragments is mammalian. In some embodiments, the plurality of nucleic acid fragments is human. In some embodiments, the plurality of nucleic acid fragments comprises genomic DNA.

[0027] Some embodiments of the methods and compositions provided herein a kit comprising: a plurality of at least 50, 100, 1000, 2000, 3000, 4000, 5000, 10000, 20000, 30000, or 40000 selection probes, wherein the selection probes are different from one another, and comprise a nucleotide sequence having at least 90%, 95%, or 100% sequence identity to any one of SEQ ID NOs: 02-122770; and optionally: (i) a first plurality of transposomes comprising transposon adaptors for tagmenting a plurality of nucleic acid fragments, wherein the first plurality of transposomes is immobilized on a first plurality of beads at a first density; and (ii) a second plurality of transposomes comprising library adaptors for adding library adaptors to each end of the amplified polynucleotides, wherein the second plurality of transposomes is immobilized on a second plurality of beads at a second density, wherein the first density is less than the second density. In some embodiments, each selection probe of the plurality of selection probes comprises a nucleotide sequence having at least 90%, 95%, or 100% sequence identity to any one of SEQ ID NOs: 02-139954.

### BRIEF DESCRIPTION OF THE DRAWINGS

[0028] FIG. 1 depicts an example embodiment of a workflow which includes: fragmenting long input DNA by high molecular weight (HMW) fragmentation and adding adapters, such as by tagmentation using low density bead linked transposomes (BLTs); long range PCR mutagenesis to introduce a signature into long fragments; further library preparation steps, such as additional tagmentation to obtain small fragments with adapters; sequencing and assembly of sequencing reads.

[0029] FIG. 2 depicts an example embodiment of a workflow which includes a long-read (iLR) pathway, and a reference pathway. The long-read pathway includes steps for: tagmentation; mutagenesis; bottlenecking (suppression) PCR. Both the long-read pathway and reference pathway share steps including: standard library preparation, such as tagmentation; sequencing; and assembly of sequencing reads.

[0030] FIG. 3A is a graph which relates to a purified bottlenecking PCR product run on an Agilent Bioanalyzer using a High Sensitivity DNA Kit.

[0031] FIG. 3B is a graph which relates to a purified final library prep product run on an Agilent Bioanalyzer using a High Sensitivity DNA Kit.

[0032] FIG. 4A depicts a graph of results using transposomes in solution at various concentration.

[0033] FIG. 4B depicts a graph of results for size distribution using BLTs.

[0034] FIG. 4C depicts graphs for a Staphylococcus aureus 4 Mb genome view, with samples at 4 million reads, GC content: 32.9%, size: 2.8 Mb. A: Nextera XT (soluble transposomes); B: Flex (BLT): 1 ng; C: Flex (BLT): 100 ng; D: Flex (BLT): colony direct.

[0035] FIG. 5 depicts a schematic for workflow steps including HMW fragmentation; and mutagenesis and suppression PCR in which smaller products form hairpins.

[0036] FIGS. 6A-6C depict graphs related to activity and fragment length. FIG. 6A is a graph of actual activity units (AU)/μl and median AU/μl versus build AU/μl for soluble transposomes (TSM), and BLTs having various densities/activities of transposomes: BLT at low density (BLT-LR) at 0.075 AU/μl, and TDER-BLT comprising A14 and B15 TSMs at 0.1 AU/μl, 0.2 AU/μl, and 0.5 AU/μl. In FIG. 6A, “TDER-BLR” is “TDER-BLT”. FIG. 6B is a graph of fragment size. FIG. 6C is a graph for average size for soluble TSM, and BLTs containing A14 and B15 TSMs, or B15 TSM only.

[0037] FIGS. 7A-7C depict graphs related to mutagenesis PCR for soluble TSM, and BLTs containing A14 and B15 TSMs, or B15 TSM only. FIG. 7A is a graph of mean yield (ng/μl). FIG. 7B is a graph for average size. FIG. 7C is a graph for mean average size.

[0038] FIGS. 8A-8C depict graphs related to bottleneck (suppression) PCR for soluble TSM, and BLTs containing A14 and B15 TSMs, or B15 TSM only. FIG. 8A is a graph of mean yield (ng/μl). FIG. 8B is a graph for size distribution. FIG. 8C is a graph for mean average size.

[0039] FIG. 9 depicts a graph for a sequencing metric (GC coverage) for soluble TSM, and BLTs containing A14 and B15 TSMs, or B15 TSM only.

[0040] FIGS. 10A and 10B depict graphs for a N50 sequencing metric for soluble TSM, and BLTs containing A14 and B15 TSMs, or B15 TSM only. N50 is the length of the shortest contig for which longer and equal length contigs cover at least 50% of the assembly. FIG. 10A depicts a graph for N50. FIG. 10B depicts a graph for N50 by regions.

[0041] FIG. 11 depicts a graph for a sequencing metric (fraction of bases with no coverage, left panel; and fraction of bases with <10× coverage, right panel) for soluble TSM, and BLTs containing A14 and B15 TSMs, or B15 TSM only.

[0042] FIG. 12 depict graphs of various BLT activities (Build AU/μl), and product average size (lower panel), total yield (middle panel), or fluorescent resonance energy transfer (FRET) (upper panel).

[0043] FIG. 13 depicts graphs of various BLT activities (Build AU/μl), and sequencing metrics including SLR coverage depth (lower panels), total bases (middle panels), or N50 (upper panels).

[0044] FIG. 14 depicts graphs of various BLT activities (Build AU/μl), and sequencing metrics including percent duplicated reads (lower panels), fraction of bases with <10× coverage (middle panels), or fraction of bases with no coverage (upper panels).

[0045] FIG. 15 depicts graphs of various BLT activities (AU/μl), and sequencing metrics including SLR coverage depth (lower panel), total bases (lower middle panel), redundancy (upper middle panel), or N50 (upper panel) with three different operators.

[0046] FIG. 16 depicts graphs of tagmentation yield (left panel) or tagmentation fragment length (right panel) for various amounts of input DNA.

[0047] FIG. 17 depicts graphs for various amounts of input DNA and mutagenesis yield (upper left panel), bottleneck yield (middle left panel), library yield (lower left panel), mutagenesis fragment length (upper right panel), bottleneck fragment length (middle right panel), and library fragment length (lower right panel).

[0048] FIG. 18 depicts graphs for various amounts of input DNA and sequencing metrics including: total bases (upper left panel), insert size (middle left panel), percent duplicated reads (lower left panel), total bases (upper right panel), insert size (middle right panel), and library fragment length (lower right panel). The right panels show the same data as the left panels, but without the 1000 ng data point.

[0049] FIG. 19 depicts graphs for various amounts of input DNA and sequencing metrics including: number of MQ0 reads (upper left panel), error rate (upper middle left panel), redundancy (lower middle left panel), N50 (lower left panel), number of MQ0 reads (upper right panel), error rate (upper middle right panel), redundancy (lower middle right panel), N50 (lower right panel). The right panels show the same data as the left panels, but without the 1000 ng data point.

[0050] FIG. 20 depicts graphs for various amounts of input DNA and sequencing metrics including: mode coverage (upper left panel), fraction of bases with no coverage (middle left panel), fraction of bases with <10× coverage (lower left panel), mode coverage (upper right panel), fraction of bases with no coverage (middle right panel), fraction of bases with <10× coverage (lower right panel). The right panels show the same data as the left panels, but without the 1000 ng data point.

[0051] FIG. 21 depicts a graph for various amounts of input DNA and sequencing metric (GC bias).

[0052] FIG. 22 depicts graphs for various input DNAs subjected to shearing for different periods of time, control input DNA, and HMW input DNA, and fragment size.

[0053] FIG. 23 depicts graphs for various input DNAs subjected to shearing for different periods of time, control input DNA, and HMW input DNA, and tagmentation yield (left panel) or tagmentation fragment length (right panel).

[0054] FIG. 24A depicts graphs for various input DNAs subjected to shearing for different periods of time, control input DNA, and HMW input DNA, and mutagenesis yield (left panel) or normalization yield (right panel).

[0055] FIG. 24B depicts graphs for various input DNAs subjected to shearing for different periods of time, control input DNA, and HMW input DNA, and bottleneck PCR yield (left panel) or post-bottleneck fragment length (right panel).

[0056] FIG. 25 depicts graphs for various input DNAs subjected to shearing for different periods of time, and HMW input DNA, and sequencing metrics: N50 (left panels) or redundancy (right panels).

[0057] FIG. 26 depicts graphs for various input DNAs subjected to shearing for different periods of time, and HMW input DNA, and sequencing metrics: SLR coverage (upper left panel), fraction with no coverage (middle left panel), fraction with <10× coverage (lower left panel), insert size (upper right panel), percent duplicated reads (upper middle right panel), insertion per 100 kb (lower middle right panel), or MQ0 (lower right panel).

[0058] FIG. 27 depicts graphs for various input DNAs subjected to shearing for different periods of time, and HMW input DNA, and a sequencing metric (GC bias).

[0059] FIG. 28 depicts an example overview for enrichment of ‘long fragments’ or ‘short fragments’ in a workflow.

[0060] FIG. 29 depicts an example timeline for enrichment of ‘long fragments’ or ‘short fragments’ in a workflow.

[0061] FIG. 30 depicts selection of probes with higher specificity in long fragments.

[0062] FIG. 31 depicts design of probes in regions adjacent to problematic regions of the genome.

[0063] FIG. 32 depicts embodiments including an example work flow for whole genome sequencing (WGS) with optional enrichment steps, and parallel standard short read (SR) library preparation.

[0064] FIG. 33 depicts use of 80mer probes with long fragments in problematic target regions, compared to use of probes with short fragments (upper panel); use of 80mer probes with flanked long difficult regions, compared to use of probes with short fragments (middle panel); and use of 80mer probes with long fragments in regions with infrequent probe coverage, compared to use of probes with short fragments (lower panel).

[0065] FIG. 34 depicts results of sequencing coverage for a targeted region using a method with long fragments and enrichment (ICLR with enrichment).

[0066] FIG. 35 depicts results of sequencing coverage for a targeted a 722 kb region in the MHC locus using a method with long fragments and enrichment.

[0067] FIG. 36 depicts results of sequencing coverage for a targeted a 426 kb region in the MHC locus that covered HLA-A, HLA-G, HLA-F using a method with long fragments and enrichment.

[0068] FIG. 37A depicts a graph for SNV precision and recall for methods which included (i) on market long reads; (ii) PCR free (tagmentation to provide short fragments); (iii) long fragments with enrichment using an MHC selection probe panel (ICLR-MHC enrichment); and (iv) long fragments without enrichment (ICLR-WGS).

[0069] FIG. 37B depicts a graph for Indel precision and recall for methods which included (i) on market long reads; (ii) PCR free (tagmentation to provide short fragments); (iii) long fragments with enrichment using an MHC selection probe panel (ICLR-MHC enrichment); and (iv) long fragments without enrichment (ICLR-WGS).

[0070] FIG. 38 depicts a graph for coverage in ACMG genes using methods which included long fragments with enrichment using an ACMG selection probe panel (enrichment) or long fragments without enrichment (WGS).

[0071] FIG. 39 depicts results of sequencing coverage for a TNNT2, a 22 kb gene which was fully phased in one phase block, using a method with long fragments and enrichment with an ACMG panel of selection probes.

[0072] FIG. 40A depicts results of sequencing coverage for APOB which was fully phased in one phase block, using a method with long fragments and enrichment with an ACMG panel of selection probes.

[0073] FIG. 40B depicts results of sequencing coverage for TMEM127 which was fully phased in one phase block, using a method with long fragments and enrichment with an ACMG panel of selection probes.

[0074] FIG. 41 depicts results of sequencing coverage for MSH6 using a method with long fragments and enrichment with an ACMG panel of selection probes (ICLR with enrichment), and a method with long fragments without enrichment (ICLR WGS).

[0075] FIG. 42A depicts a graph for SNV precision and recall for methods which included (i) on market long reads; (ii) PCR free (tagmentation to provide short fragments); (iii) long fragments with enrichment using an ACMG selection probe panel (ICLR-ACMG enrichment); and (iv) long fragments without enrichment (ICLR-WGS).

[0076] FIG. 42B depicts a graph for Indel precision and recall for methods which included (i) on market long reads; (ii) PCR free (tagmentation to provide short fragments); (iii) long fragments with enrichment using an ACMG selection probe panel (ICLR-ACMG enrichment); and (iv) long fragments without enrichment (ICLR-WGS).

[0077] FIG. 43A depicts a graph for SNV precision and recall for methods which included (i) on market long reads; (ii) PCR free (tagmentation to provide short fragments); (iii) long fragments with enrichment using a PGX selection probe panel (ICLR-PGX enrichment); and (iv) long fragments without enrichment (ICLR-WGS).

[0078] FIG. 43B depicts a graph for Indel precision and recall for methods which included (i) on market long reads; (ii) PCR free (tagmentation to provide short fragments); (iii) long fragments with enrichment using a PGX selection probe panel (ICLR-PGX enrichment); and (iv) long fragments without enrichment (ICLR-WGS).

[0079] FIG. 44A depicts three graphs comparing use of a first selection probe panel (SYD-C2-CMRG-230 bp) and a second selection probe panel (SYD-C2-CMRG-1 kb) for (i) total mutations in bases in region (upper left panel); (ii) percentage DUP mutant reads (upper right panel); and (iii) percentage on target unique mapped reads (lower panel).

[0080] FIG. 44B depicts a graph of normalized coverage between use of a first selection probe panel (SYD-C2-CMRG-230 bp) and a second selection probe panel (SYD-C2-CMRG-1 kb).

[0081] FIG. 44C depicts a comparison between results of sequencing coverage for HBG1 using a method (i) with long fragments and enrichment with an CMRG panel of selection probes (ICLR with enrichment); (ii) with long fragments without enrichment (ICLR WGS); and (iii) tagmentation with short reads (PCR free short read).

[0082] FIG. 45A depicts a graph for SNV precision and recall for methods which included (i) on market long reads; (ii) PCR free (tagmentation to provide short fragments); (iii) long fragments with enrichment using a CMRG selection probe panel (ICLR-CMRG enrichment); and (iv) long fragments without enrichment (ICLR-WGS).

[0083] FIG. 45B depicts a graph for Indel precision and recall for methods which included (i) on market long reads; (ii) PCR free (tagmentation to provide short fragments); (iii) long fragments with enrichment using a CMRG selection probe panel (ICLR-CMRG enrichment); and (iv) long fragments without enrichment (ICLR-WGS).

### DETAILED DESCRIPTION

[0084] Some embodiments of the methods and compositions provided herein relate to obtaining long read information from short reads of a target nucleic acid. Some embodiments include steps to selectively generate, mark, and amplify long nucleic acid fragments. Some embodiments include enriching for certain sequences in the long fragments with selection probes directed to certain genes throughout the genome and expressed regions with low mappability. Some embodiments also include fragmenting the long nucleic acid fragments into shorter fragments for sequencing, and informatically reconstructing a sequence of the target nucleic acid.

[0085] Prior fragmentation methods typically generated a very wide distribution of fragment sizes such that even when aiming for large fragments, inevitably short fragments were included. Such short fragments are ‘wasted’ space, giving very little new information. Some embodiments provided herein preserve long (about 2,000-40,000 bp) fragments, mark them, and carry them through into a short-read portion of a workflow so they can then be reconstructed into their parent long fragments informatically. Shorter fragments are generally much less desirable, and may take up valuable sequencing space and informatics volume if they are included. Use of long fragments enables the use of a smaller number of selection probes to enrich for target sequences in the long fragments.

[0086] In prior short read library preps, most size selection was done by a combination of (1) initial fragmentation and (2) Solid-Phase Reversible Immobilization (SPRI)-based size selection. However, SPRI size selection primarily works on fragments smaller than about 60 Gbp in length. In contrast, suppression (“bottlenecking” or “bottleneck”) PCR acts on larger fragments. Suppression PCR entails appending complementary sequences on S′ and 3′ ends of the same DNA molecule, such that during a PCR annealing step, there is a direct competition between annealing of a primer and annealing of opposite ends of the same DNA fragment. When the PCR primer anneals, extension proceeds as normal, and the fragment is amplified. When opposite ends anneal, for example by forming a hairpin, there is no templated 3′ hydroxyl to extend, and so amplification does not occur. A key to suppression PCR and size selection is that for shorter fragments, the opposite ends of the same fragment are closer together and therefore more likely to find each other and anneal. Under optimized conditions, this leads to preferential amplification of longer fragments. Aspects of suppression PCR useful with embodiments provided herein are described in Dai, Z-M, et al (2006) J. of Biotech 128:435-443; and Rand K. N. et al., (2005) N. A. Res. 33: e127 which are incorporated by reference in their entireties.

[0087] In some embodiments provided herein, complementary 5′ and 3′ ends are achieved by an initial tagmentation step with B15 transposomes only. Typically, tagmentation would be performed with a combination of A14 and B15 transposomes so that the different sequences can be used for read 1 and read 2 primers during subsequent sequencing. However, because the initial tagmentation in certain embodiments provided herein is used to provide a landing spot for PCR, different sequences for read 1 and read 2 primers do not need to be added at this stage. In contrast to SPRI size selection, it was observed that by adding cycles of suppression PCR, the number of smaller fragments under 2000 bp in length can be dramatically reduced.

[0088] In some embodiments provided herein a workflow includes: fragmenting long input DNA by high molecular weight (HMW) fragmentation and adding adapters, such as by tagmentation using low density bead linked transposomes (BLTs); long range PCR mutagenesis to introduce a signature into long fragments; further library preparation steps, such as additional tagmentation to obtain small fragments with adapters; sequencing and assembly of sequencing reads (FIG. 1). In some embodiments provided herein a workflow includes a long-read (“ILR” or “ILR”) pathway, and a reference pathway. The long-read pathway includes steps for: tagmentation; mutagenesis; bottlenecking (suppression) PCR. Both the long-read pathway and reference pathway share steps including: standard library preparation, such as tagmentation; sequencing; and assembly of sequencing reads (FIG. 2).

[0089] Certain aspects useful with embodiments of the methods and compositions provided herein are disclosed in U.S. Pat. Nos. 9,040,256; 9,683,230; and U.S. 2021/0010008 which are each incorporated by reference in its entirety.

### Definitions

[0090] As used herein, the term “nucleic acid” refers to a polynucleotide sequence, or fragment thereof. A nucleic acid can comprise nucleotides. A nucleic acid can be exogenous or endogenous to a cell. A nucleic acid can exist in a cell-free environment. A nucleic acid can be a gene or fragment thereof. A nucleic acid can be DNA. A nucleic acid can be RNA. A nucleic acid can comprise one or more analogs (e.g., altered backbone, sugar, or nucleobase). Some non-limiting examples of analogs include: 5-bromouracil, peptide nucleic acid, xeno nucleic acid, morpholinos, locked nucleic acids, glycol nucleic acids, threose nucleic acids, dideoxynucleotides, cordycepin, 7-deaza-GTP, fluorophores (e.g., rhodamine or fluorescein linked to the sugar), thiol containing nucleotides, biotin linked nucleotides, fluorescent base analogs, CpG islands, methyl-7-guanosine, methylated nucleotides, inosine, thiouridine, pseudouridine, dihydrouridine, queuosine, and wyosine. “Nucleic acid”, “polynucleotide, “target polynucleotide”, and “target nucleic acid” can be used interchangeably. As used herein, “kbp” can refer to kilobase pairs and relates to a length of a double-stranded nucleic acid. The length of a nucleic acid may also be referred to in terms of a number of nucleotides, such as consecutive nucleotides.

[0091] As used herein “transposome” includes a complex comprising of at least one transposase enzyme and a transposon recognition sequence, such as a transposon adapter. In some such systems, the transposase binds to a transposon recognition sequence to form a functional complex that is capable of catalyzing a transposition reaction. In some aspects, the transposon recognition sequence is a double-stranded transposon end sequence. The transposase, or integrase, binds to a transposase recognition site in a target nucleic acid and inserts the transposon recognition sequence into a target nucleic acid. In some such insertion events, one strand of the transposon recognition sequence (or end sequence) is transferred into the target nucleic acid, resulting also in a cleavage event. Exemplary transposition procedures and systems that can be readily adapted for use with the transposases of the present disclosure are described, for example, in WO10/048605, U.S. 2012/0301925, U.S. 2012/13470087, of U.S. 2013/0143774, each of which is incorporated herein by reference in its entirety.

[0092] In some embodiments, the transposome complex is a dimer of two molecules of a transposase. In some embodiments, the transposome complex is a homodimer, wherein two molecules of a transposase are each bound to first and second transposons of the same type (e.g., the sequences of the two transposons bound to each monomer are the same, forming a “homodimer”). In some embodiments, the compositions and methods described herein employ two populations of transposome complexes. In some embodiments, the transposases in each population are the same. In some embodiments, the transposome complexes in each population are homodimers, wherein the first population has a first adaptor sequence in each monomer and the second population has a different adaptor sequence in each monomer.

[0093] As used herein “solid surface,” “solid support,” and other grammatical equivalents refer to any material that is appropriate for or can be modified to be appropriate for the attachment of the transposome complexes. As will be appreciated by those in the art, the number of possible substrates is multitude. Possible substrates include, but are not limited to, glass and modified or functionalized glass, plastics (including acrylics, polystyrene and copolymers of styrene and other materials, polypropylene, polyethylene, polybutylene, polyurethanes, TEFLON, etc.), polysaccharides, nylon or nitrocellulose, ceramics, resins, silica or silica-based materials including silicon and modified silicon, carbon, metals, inorganic glasses, plastics, optical fiber bundles, beads, paramagnetic beads, and a variety of other polymers. In some such embodiments, the transposome complex is immobilized on the solid support via the linker. In some further embodiments, the solid support comprises or is a tube, a well of a plate, a slide, a bead, or a flowcell, or a combination thereof. In some further embodiment, the solid support comprises or is a bead. In one embodiment, the bead is a paramagnetic bead. In some of the methods and compositions presented herein, transposome complexes are immobilized to a solid support. In one embodiment, the solid support is a bead. Suitable bead compositions include, but are not limited to, plastics, ceramics, glass, polystyrene, methylstyrene, acrylic polymers, paramagnetic materials, thoria sol, carbon graphite, titanium dioxide, latex or cross-linked dextrans such as Sepharose, cellulose, nylon, cross-linked micelles and TEFLON, as well as any other materials outlined herein for solid supports.

[0094] As used herein, “tagmentation: includes to the modification of DNA by a transposome complex comprising transposase enzyme complexed with adaptors comprising transposon end sequence. Tagmentation results in the simultaneous fragmentation of the DNA and ligation of the adaptors to the 5′ ends of both strands of duplex fragments. Following a purification step to remove the transposase enzyme, additional sequences can be added to the ends of the adapted fragments, for example by PCR, ligation, or any other suitable methodology known to those of skill in the art.

### Certain Methods for Preparing Nucleic Acid Libraries

[0095] Some embodiments of the methods and compositions providing herein include preparing a nucleic acid library. Some such embodiments include (a) obtaining a plurality of transposomes comprising transposon adaptors, wherein the plurality of transposomes is immobilized on a solid support; (b) contacting a plurality of nucleic acid fragments with the plurality of transposomes to obtain a plurality of polynucleotides; (c) amplifying the plurality of polynucleotides to obtain amplified polynucleotides; and (d) adding library adapters to each end of the amplified polynucleotides, thereby obtaining the nucleic acid library. In some embodiments, an amount of the plurality of nucleic acid fragments is less than about 100 ng, 50 ng, 30 ng, 20 ng, 10 ng, 5 ng, or 1 ng.

[0096] Some embodiments include an initial tagmentation step which fragments the plurality of nucleic acids fragments and adds an adaptor to each end of the products of the tagmentation. The initial tagmentation is limited such that the products of the tagmentation are longer than a tagmentation where the activity of transposomes is not limited.

[0097] Certain aspects useful with embodiments of the methods and compositions provided herein are disclosed in U.S. Pat. Nos. 9,115,396; 9,080,211; 9,040,256; U.S. patent application publication 2014/0194324, each of which is incorporated herein by reference in its entirety.

[0098] In some embodiments, the solid support comprises a bead. In some such embodiments, the transposomes are bead-linked transposomes (BLTs). In some embodiments, the activity of the transposomes on the beads is such that a tagmentation reaction with the BLTs and the plurality of nucleic acid fragments results in long polynucleotides, such as polynucleotides an having average length of the plurality of polynucleotides greater than about 1 kbp, 2 kbp, 5 kbp, 10 kbp, 15 kbp, 20 kbp, or 40 kbp; and/or wherein the average length of the plurality of polynucleotides is in a range from about 1 kbp to about 40 kbp, 1 kbp to about 30 kbp, 1 kbp to about 20 kbp, 5 kbp to about 20 kbp, 5 kbp to about 15 kbp, or 7 kbp to about 12 kbp. For example, the transposomes can be bound at a low density on the beads; and/or have a low tagmentation activity. In some embodiments, the number of transposomes immobilized on the bead is no more than about 100 transposomes, 50 transposomes, 40 transposomes, 30 transposomes, 20 transposomes, or 10 transposomes. In some embodiments, the number of transposomes immobilized on the bead is no more than about 30 transposomes. In some embodiments, the plurality of the transposomes immobilized on the bead comprise a total activity such that an average length of the plurality of polynucleotides greater than about 1 kbp, 2 kbp, 5 kbp, 10 kbp, 15 kbp, 20 kbp, or 40 kbp; and/or wherein the average length of the plurality of polynucleotides is in a range from about 1 kbp to about 40 kbp, 1 kbp to about 30 kbp, 1 kbp to about 20 kbp, 5 kbp to about 20 kbp, 5 kbp to about 15 kbp, or 7 kbp to about 12 kbp. In some embodiments, the plurality of the transposomes immobilized on the bead comprise a tagmentation activity in a range from about 0.05 AU/μl to about 0.25 AU/μl. In some embodiments, the plurality of the transposomes immobilized on the bead comprise a tagmentation activity of about 0.075 AU/μl.

[0099] In some embodiments, the transposomes on the beads are the same. For example, in some embodiments, the transposon adapters comprise the same sequence. In some embodiments, the transposomes of the plurality of transposomes are B15 transposomes. In some embodiments, the transposon adapters comprise the nucleotide sequence: SEQ ID NO:01 (GTCTCGTGGGCTCGG).

[0100] Some embodiments also include steps to add a signature to the products of the initial tagmentation. For example, a signature can be added into the sequence of the library products by steps that include limited mutagenesis. In some embodiments, step (c) comprises a mutagenesis PCR, such that mutations are introduced into amplified polynucleotides. In some embodiments, the mutagenesis PCR comprises amplifying the plurality of polynucleotides with a low bias DNA polymerase, and/or with a nucleotide analogue. In some embodiments, the nucleotide analogue comprises dPTP (such as, 6H,8H-3,4-Dihydro-pyrimido (4,5-c) (1,2) oxazin-7-one-8-B-D-2′-deoxy-ribofuranoside-5′-triphosphate), and/or 8-oxo-dGTP. dP contains the bicyclic pyrimidine analog 3,4-dihydro-8H-pyrimido-[4,5-C][1,2]oxazin-7-one. In some embodiments, the low bias DNA polymerase is a Thermococcal polymerase, or a functional derivative thereof. In some embodiments, the Thermococcal polymerase is derived from a Thermococcal strain selected from the group consisting of T. kodakarensis, T. siculi, T. celer and T. sp KS-1. In some embodiments, the mutagenesis PCR comprises no more than 12 cycles, 10 cycles, 9 cycles, 8 cycles, 7 cycles, 6 cycles, 5 cycles, 4 cycles, 3 cycles, or 2 cycles. In some embodiments, the mutagenesis PCR comprises no more than 6 cycles.

[0101] Some embodiments also include a bottlenecking or suppression PCR step to enrich for longer polynucleotides. For example, shorter amplified polynucleotides form hairpins, while longer amplified polynucleotides may be further amplified. In other words, the bottlenecking or suppression PCR can be biased against the amplification of shorter nucleic acids in a mixture of nucleic acids of different lengths. Some such embodiments can enrich for longer fragments. In some such embodiments, a first end of a polynucleotide of the plurality of polynucleotides is capable of annealing to a second end of the polynucleotide of the plurality of polynucleotides; and/or, wherein a first end of an amplified polynucleotide is capable of annealing to a second end of the amplified polynucleotide. In some embodiments, the suppression PCR comprises use of a single amplification primer. In some embodiments, the amplified polynucleotides have an average length greater than about 1 kbp, 2 kbp, 3 kbp, 4 kbp, 5 kbp, 10 kbp, 15 kbp, or 20 kbp. In some embodiments, the suppression PCR comprises no more than 16 cycles, 14 cycles, 10 cycles, 9 cycles, 8 cycles, 7 cycles, 6 cycles, 5 cycles, 4 cycles, 3 cycles, or 2 cycles. In some embodiments, the suppression PCR comprises no more than 6 cycles.

[0102] Detailed descriptions of certain embodiments of suppression PCR are found in, e.g., U.S. Pat. No. 5,565,340 and Siebert et al., Nucleic Acids Res., 23 (6): 1087-1088 (1995). Briefly, the inverted repeat sequences function as suppression tails by competing with the suppression PCR primer for complementary binding. The inverted repeats tend to anneal each other, thereby preventing PCR primer binding. Since shorter amplicons undergo inverted repeat annealing more often than longer amplicons, the suppression PCR favors generating long amplicons.

[0103] Some embodiments also include enriching for target nucleic acids in the amplified polynucleotides, such as products of the suppression PCR. In some embodiments, the enriching comprises hybridizing a plurality of selection probes with the amplified polynucleotides. In some embodiments, the plurality of selection probes lack sequences capable of hybridizing to a repetitive genomic DNA element. In some embodiments, the repetitive genomic DNA element is selected from a tandem repeat, an Alu repeat, a short interspersed nuclear element (SINE), a long interspersed nuclear element (LINE), an integrated viral sequence, a viral long terminal repeat (LTR), and a transposon. Some embodiments also include amplifying the target nucleic acids.

[0104] Some embodiments also include preparing a library of shorter fragments from the products of the suppression PCR, and/or the enrichment. For example, the products of the suppression PCR, and/or the enrichment can undergo an additional tagmentation. In some embodiments, step (d) comprises contacting the amplified polynucleotides with an additional plurality of transposomes. In some embodiments, the additional plurality of transposomes comprise transposon adapters comprising (i) indexes, (ii) bridge amplification primer binding sites, and/or (iii) sequencing primer binding sites. An example of a bridge amplification primer binding site includes a sequence capable of binding a capture probe on a surface, wherein the capture probe comprises a primer extended during bridge amplification on the surface.

[0105] Some embodiments also include enriching for target polynucleotides in the library of nucleic acids. In some embodiments, the enriching comprises hybridizing a plurality of selection probes with the library of nucleic acids, wherein the plurality of selection probes is capable of specifically hybridizing with the target polynucleotides. Some embodiments also include amplifying the target polynucleotides.

[0106] Some embodiments include methods for preparing a nucleic acid library, comprising: (a) obtaining a plurality of transposomes comprising transposon adaptors, wherein the plurality of transposomes is immobilized on a bead, and wherein the transposomes of the plurality of transposomes are the same; (b) contacting a plurality of nucleic acid fragments with the plurality of transposomes to obtain a plurality of polynucleotides, wherein the plurality of the transposomes immobilized on the bead comprise a total activity such that an average length of the plurality of polynucleotides greater than about 1 kbp, 2 kbp, 5 kbp, 10 kbp, 15 kbp, 20 kbp, or 40 kbp; and/or wherein the average length of the plurality of polynucleotides is in a range from about 1 kbp to about 40 kbp, 1 kbp to about 30 kbp, 1 kbp to about 20 kbp, 5 kbp to about 20 kbp, 5 kbp to about 15 kbp, or 7 kbp to about 12 kbp, (c) amplifying the plurality of polynucleotides to obtain amplified polynucleotides by: (i) performing a mutagenesis PCR, such that mutations are introduced into amplified polynucleotides, and (ii) performing a suppression PCR; and (d) adding library adapters to each end of the amplified polynucleotides by contacting the amplified polynucleotides with an additional plurality of transposomes, thereby obtaining the nucleic acid library. An example embodiment of a workflow is depicted in FIG. 32 which includes whole genome sequencing (WGS) which includes: fragmenting genomic DNA into long fragments by limited tagmentation; land-marking or adding a signature to the long fragments; amplifying the long fragments with a bias against shorter fragments; tagmenting products prior to sequencing. Optional steps include enrichment of the amplified long fragments with a panel of selection probes, such as capture probes with certain sequences. A parallel workflow includes tagmenting the genomic DNA to form a library of short fragments, such as a standard short read (SR) library, and sequencing the library of short fragments.

[0107] Some embodiments also include enriching for target nucleic acids in the amplified polynucleotides. In some embodiments, the enriching comprises hybridizing a plurality of selection probes with the amplified polynucleotides, wherein the plurality of selection probes is capable of specifically hybridizing with the target nucleic acids. In some embodiments, the plurality of selection probes lack sequences capable of hybridizing to a repetitive genomic DNA element. In some embodiments, the repetitive genomic DNA element is selected from a tandem repeat, an Alu repeat, a short interspersed nuclear element (SINE), a long interspersed nuclear element (LINE), an integrated viral sequence, a viral long terminal repeat (LTR), and a transposon. Some embodiments also include amplifying the target nucleic acids.

[0108] Some embodiments also include enriching for target polynucleotides in the library of nucleic acids. In some embodiments, the enriching comprises hybridizing a plurality of selection probes with the library of nucleic acids, wherein the plurality of selection probes is capable of specifically hybridizing with the target polynucleotides. Some embodiments also include amplifying the target polynucleotides.

[0109] Some embodiments also include methods for determining a sequence of a target nucleic acid, comprising preparing a nucleic acid library by any one of the embodiments above, sequencing the library of nucleic acids to obtain sequence reads; and assembling sequence reads to obtain the sequence of a target nucleic acid. In some embodiments, the assembling comprises comparing the sequence reads to a reference sequence. In some embodiments, the reference sequence is obtained from the same nucleic acid sample as the plurality of nucleic acid fragments.

### Target Enrichment

[0110] Certain embodiments provided herein include enriching for target nucleic acids during preparation of a nucleic acid library. FIG. 32 shows an example work flow which includes steps for whole genome sequencing (WGS) with additional enrichment steps. In some embodiments, the nucleic acid library is prepared from a nucleic acids sample with bead-linked transposomes to generate long tagmented polynucleotides. The polynucleotides are marked with methods, such as mutagenesis amplification. In an optional step, suppression/bottlenecking PCR is performed where amplification is biased against shorter self-annealing nucleic acids. Target nucleic acids can then be enriched for in the amplified nucleic acids using selection probes. Additional steps can include a further tagmentation step to generate shorter library nucleic, sequencing the library nucleic acids, and comparing the generated sequence with a reference sequence obtained from the same nucleic acid sample.

[0111] Enrichment efficiency is increased compared to conventional library preparation methods because hybridization of selection probes is to long tagmented polynucleotides. For example, specificity, such as percentage hybridization to target, directly affects the amount of sequencing needed to achieve target coverage depth. High specificity hybridization to target can be difficult to achieve in long repetitive regions and pseudogenes. However, long fragment hybridization has several advantages over short fragment. As shown in FIG. 33, long fragment hybridization allows removal of ineffective probes; allows strategic placement of probes, such as adjacent to problematic genomic regions; and allows the use of fewer probes to cover a region previously covered by many probes. Targeted enrichments can achieve cost-effective human whole genome coverage. For example, genomic regions that may have been typically underrepresented in conventional nucleic acid libraries can be targeted with selection probes. Some embodiments provided herein include the use of certain panels of selection probes, such panels a Major Histocompatibility Complex (MHC) panel directed to the MHC region; an American College of Medical Genetics and Genomics (ACMG) panel directed to genes for which specific mutations are known to be causative of disorders that are clinically actionable; a pharmacogenetic (PGX) panel directed to genes commonly targeted by pharmacogenetic testing assays; a challenging medically relevant gene (CMRG) panel directed to medically relevant autosomal genes that may be under-represented in certain tests due to repeats or polymorphic complexities; and a comprehensive genome wide (dark) panel directed to genomic regions typically underrepresented in sequencing reads.

### Major Histocompatibility Complex (MHC) Panel

[0112] Some embodiments provided herein relate to targeting the MHC region of the human genome. Some such embodiments include generation and/or use of a selection probe panel to target the MHC region. The MHC region is a large locus located on the short arm of human chromosome 6 (6p21.1-6p21.3), and contains highly polymorphic genes that code for cell surface proteins essential for the adaptive immune system. The region is challenging to obtain sequence information due to the presence of a high level of repetitive sequences, sequence homology, pseudogenes, and a wide variety of alleles in the population. Precise genotyping and phasing of the MHC region is challenging but highly clinically desirable for applications such as organ transplantation and drug discovery.

### American College of Medical Genetics (ACMG) Panel

[0113] Some embodiments provided herein relate to targeting a panel of genes, such as an American College of Medical Genetics (ACMG) panel of genes. Some such embodiments include generation and/or use of a selection probe panel to target the ACMG genes. A selection probe panel was generated from a list of genes compiled by ACMG for which specific mutations are known to be causative of disorders that are clinically actionable. Miller D. T., et al., Genet Med. 2022 July; 24 (7): 1407-1414. doi: 10.1016/j.gim.2022.04.006.

[0114] A selection probe panel was designed to precisely call variants and phase in these genes. The panel included 78 unique genes in ACMG SF v3.1, and targeted full genes. The panel size was about 6.8 Mbp. The ACMG genes include those listed in TABLE 1A.

TABLE 1A
ACMG genes

ACTA2, ACTC1, ACVRL1, APC, APOB, ATP7B, BAG3, BMPR1A,
BRCA1, BRCA2, BTD, CACNA1S, CASQ2, COL3A1, DES, DSC2,
DSG2, DSP, ENG, FBN1, FLNC, GAA, GLA, HFE, HNF1A, KCNH2,
KCNQ1, LDLR, LMNA, MAX, MEN1, MLH1, MSH2, MSH6, MUTYH,
MYBPC3, MYH11, MYH7, MYL2, MYL3, NF2, OTC, PALB2, PCSK9,
PKP2, PMS2, PRKAG2, PTEN, RB1, RBM20, RET, RPE65, RYR1,
RYR2, SCN5A, SDHAF2, SDHB, SDHC, SDHD, SMAD3, SMAD4,
STK11, TGFBR1, TGFBR2, TMEM127, TMEM43, TNNC1, TNNI3,
TNNT2, TP53, TPM1, TRDN, TSC1, TSC2, TTN, TTR, VHL, WT1

### Pharmacogenetic (PGX) Panel

[0115] Some embodiments provided herein relate to targeting a panel of genes, such as a panel of pharmacogenetic (PGX) genes. Some such embodiments include generation and/or use of a selection probe panel to target the PGX genes. A selection probe panel was generated for genes commonly targeted by pharmacogenetic testing assays. Kalman L. V. et al., Clin Pharmacol Ther. 2016 February; 99 (2): 172-185. doi: 10.1002/cpt.280. Genetic variation is known to influence the way individual respond to therapeutics. Accurately detecting functional haplotypes, such as haplotypes associated with protein activity levels (“star alleles”) in clinically actionable pharmacogenetic genes is crucial to implementation of personalized medicine. The panel was generated to achieve highly accurate genotyping and star allele calling in such genes. The panel included 98 genes that are important in pharmacogenetics, targeting full genes. The panel size was about 8.1 Mbp. The genes include those listed in TABLE 1B.

TABLE 1B
PGX genes

ABCB1, ABCG2, ABL1, ACE, ADH1A, ADH1B, ADH1C, ADRA2A,
ADRB1, ADRB2, AHR, ALDH1A1, ALK, ALOX5, ANKK1, ASL,
BCHE, BCR, BRAF, BRCA1, CACNA1S, CFTR, COMT, CYP1A1,
CYP1A2, CYP2A13, CYP2A6, CYP2B6, CYP2C18, CYP2C19,
CYP2C8, CYP2C9, CYP2D6, CYP2E1, CYP2J2, CYP3A4, CYP3A5,
CYP3A7, CYP4F2, DPYD, DRD2, EGFR, ERBB2, F2, F5, G6PD,
GRIK4, GRK4, GRK5, GSTM1, GSTP1, HLA-A, HLA-B, HLA-C,
HLA-DPB1, HLA-DQA1, HLA-DQB1, HLA-DRA, HLA-DRB1,
HMGCR, HTR2A, HTR2C, IFNL3, IFNL4, KCNH2, KCNJ11, KIT,
KRAS, MTHFR, NAT1, NAT2, NQO1, NR1I2, NRAS, NUDT15,
OPRM1, P2RY1, P2RY12, PTGIS, PTGS2, RYR1, SCN5A,
SLC15A2, SLC19A1, SLC22A1, SLC22A2, SLCO1B1, SLCO2B1,
SULT1A1, TPMT, TYMS, UGT1A1, UGT1A4, UGT2B15, UGT2B17,
UGT2B7, VDR, VKORC1

### Challenging Medically Relevant Gene (CMRG) Panel

[0116] Some embodiments provided herein relate to targeting a panel of genes, such as a panel of challenging medically relevant genes (CMRG), Some such embodiments include generation and/or use of a selection probe panel to target the CMRG. The repetitive nature and complexity of some medically relevant genes poses a challenge for their accurate analysis in a clinical setting (Wagner J., et al., (2022) Nat Biotechnol. 40:672-680). The Genome in a Bottle (GIAB) Consortium has provided variant benchmark sets, but these exclude nearly four hundred medically relevant genes due to their repetitiveness or polymorphic complexity. Multiple regions of the genome are not fully resolved in existing benchmarks due to repetitive sequence, segmental duplications, and complex variants, such as multiple nearby SNVs, INDELs, and/or SVs. Goldfeder R L et al. Genome Med. 8, 1-12 (2016).

[0117] About 5175 gene symbols have been previously identified from the following sources: (1) 4,773 potentially medically-relevant genes from the databases OMIM, HGMD, and ClinVar which includes both commonly tested and rarely tested genes (Mandelker D et al. Genet. Med 18, 1282-1289 (2016). (2) The COSMIC gene census contains 723 gene symbols found in tumors (Tate J G et al. Nucleic Acids Res. 47, D941-D947 (2019)). (3) A focused list of “High Priority Clinical Genes” that are commonly tested for clinical inherited diseases (Wagner J., et al., (2022) Nat Biotechnol. 40:672-680).

[0118] 5,027 have unique coordinates on the primary assembly of GRCh38 and valid ENSEMBL annotations, and 4,697 are autosomal. 70% of these genes are specific to the list from OMIM, HGMD, and Clin Var, which includes genes associated with disease in a small number of studies and are currently tested more frequently in research studies than in high-throughput clinical laboratories. 395 genes included 90% or less on GRCh37 or GRCh38. Many of the 395 medically relevant genes were not covered well by the v4.2.1 small variant benchmark due to SVs, complex variants, and segmental duplications. A CMRG benchmark for 273 of the 395 genes has been previously created. (Wagner J., et al., (2022) Nat Biotechnol. 40:672-680). To be included in the CMRG benchmark, the entire gene including 20 kb flanking sequence on each side and any overlapping segmental duplications needed to have exactly one fully aligned contig from each haplotype with no breaks on GRCh37 and GRCh38. The total size of 391 of the CMRG gene panel is about 22.5 Mbp. The smallest gene is about 66 bp (SNORD64), the largest gene is about 1 Mbp (PTPRN2). CMRG genes include those listed in TABLE 1C.

TABLE 1C
CMRG genes

A4GALT, ABCG8, ABO, ABR, ADAMTS10, ADAMTSL2, AFP, AGL,
AGRN, ALOXE3, ANKRD11, ANO7, APOBEC1, APOBEC3H, APOC1,
APOC2, APOC4, ARHGEF10, ASIP, ATPAF2, AXIN1, B3GAT3,
BAX, BFSP2, BLOC1S3, BRAF, BSG, BTRC, C1R, C3, CABIN1,
CALR3, CANT1, CASP10, CBR3, CBS, CCL3L1, CD247, CD320,
CD4, CD55, CDH15, CDH17, CEL, CFC1, CFC1B, CFD, CFHR1,
CFHR3, CHL1, CHMP1A, CHRNA4, CLCN7, CLIP2, CNR2,
COL18A1, COL6A1, COL6A2, COX14, COX6B1, CR1, CREB3L3,
CRYAA, CTDP1, CYB5R3, CYP2G1P, CYP4F12, CYP4F3, D2HGDH,
DAXX, DAZL, DCLRE1C, DEAF1, DGCR6, DIP2C, DLGAP2, DMPK,
DNAAF4, DNMT3L, DOK7, DPP6, DPY19L2, DRD4, DSPP, DUX4,
DUX4L1, ECHS1, EEF1A2, EHMT1, EIF2B5, EIF4E, ELANE,
ELOA3, ENO3, ESPN, ESRRA, ETFB, ETHE1, EXTL2, F7,
FAM20C, FAT1, FCGR1A, FCGR2B, FCGR3A, FGF3, FGFRL1,
FKBP8, FLAD1, FLG, FLT4, FOXN1, FSCN2, FTCD, FUT1,
FUT3, FXN, G6PC3, GAK, GALNT9, GALR1, GALT, GCGR, GCSH,
GDF3, GIP, GIPC3, GNPTG, GOLGA3, GP1BA, GP6, GPI,
GPIHBP1, GRIN1, GRK1, GSTM1, GTF2I, GTF2IRD2, GUSB,
GYPA, GYPB, GYPE, H19, HBG1, HBM, HCN2, HCN3, HEATR2,
HES7, HLA-B, HLA-DQB1, HLA-DRB1, HMGCL, HMX1, HNF1A,
HOMER2, HOXB8, HPD, HSD11B2, HYAL1, HYDIN, IFITM3,
IFNL3, IGHA1, IGHG1, IGHG2, IGHM, IGHV3-21, IGKC,
IGKV1-5, IKBKB, IKZF1, IMPA1, INPP5D, INPP5E, INSL3,
INSR, JAG2, KANSL1, KATNAL2, KCNE1, KCNJ18, KCNV2,
KDM2B, KIR2DL1, KIR2DL3, KIR3DL1, KISS1, KISS1R, KLF11,
KLF14, KLK4, KMT2C, KNG1, KRTAP1-1, LAMB1, LBR, LCE3B,
LHFPL5, LIPN, LIX1, LMF1, LMNB2, LPA, LRIG2, LRPAP1,
LZTFL1, MAFA, MAN1B1, MAP2K3, MARVELD2, MASP2,
MBOAT7, MC1R, MDK, MEST, MLC1, MLPH, MOGS, MPG, MRC1,
MST1R, MUC1, MUC16, MUC3A, MUC4, MUC5B, MUSK, MYO9B,
MYOT, MYT1, NACA, NAIP, NAPRT, NBEAP1, NCF1, NCF1C,
NCR3, NDUFA6, NDUFAF1, NDUFB1, NDUFV3, NFKBIL1, NLRP12,
NLRP2, NLRP7, NOD1, NOTCH2, NPM1, NPPA, NSMF, NUTM2B,
NUTM2D, OCLN, OPRL1, OR12D2, OR4F5, OR51A2, ORC6,
P2RX2, P2RX5, PADI4, PAPSS2, PCBP1, PCCB, PCDHA10,
PCMT1, PDE4DIP, PDE6B, PDLIM3, PDPK1, PDSS1, PEX5,
PGAM5, PGAP6, PHKG2, PIGV, PKD1, PKN3, PLA2G10, PLTP,
PMS2, PNKP, POLG2, PPIA, PPIP5K1, PRG4, PRKCG, PRODH,
PROZ, PRSS2, PSPH, PTEN, PTK6, PTPRC, PTPRN2, PTPRQ,
PXDN, RFX2, RGPD3, RHCE, RHOA, RNF212, RNF213, RPIA,
RPL22, RPN1, RPS17, RXYLT1, SAR1B, SBK3, SDHA, SEC63,
SEMG1, SERPINF2, SH2B1, SHANK2, SHANK3, SIGLEC16,
SIRT3, SLC17A5, SLC22A1, SLC22A12, SLC26A9, SLC27A4,
SLC27A5, SLC29A4, SLC5A11, SLC6A18, SLC6A3, SMG1,
SMN1, SMN2, SMOC2, SNORD64, SNTG2, SOHLH1, SPATA31C1,
SPI1, SPRN, SRGAP2, SRR, SSTR5, STK11, STXBP2, SULT1A1,
SUZ12, TAPBP, TAS2R46, TBXA2R, TCF3, TERT, TFPT, THBS2,
TJP2, TM4SF19, TMC6, TMEM114, TNNI3, TNNT1, TNNT3,
TPCN2, TPO, TRAPPC10, TRBV9, TRMT1, TRPM4, TTC37,
TTLL1, TUBGCP6, TWIST2, TYK2, TYMS, U2AF1, UGT2A1,
UGT2A2, UGT2B17, UGT2B28, UNKL, USP8, UTP4, UVSSA,
VANGL1, VKORC1, VPS53, ZAN, ZNF141, ZNF407, ZNF419,
ZNF469, ZNF479

### Certain Selection Probes

[0119] Some embodiments include enriching for target nucleic acids in the amplified polynucleotides, such as products of mutagenesis PCR, and/or products of suppression PCR. In some such embodiments, the enriching comprises hybridizing a plurality of selection probes with the amplified polynucleotides, wherein the selection probes of the plurality of selection probes comprise different nucleotide sequences from one another. In some embodiments, the plurality of selection probes comprise at least 50, 100, 200, 500, 1000, 5000, or 10000 different selection probes.

[0120] In some embodiments, the selection probes are designed such that an average distance between two adjacent nucleotide sequences of the selection probes on a reference sequence of a genome, such as a human genome, is in a range from about 300 consecutive nucleotides to about 7,000 consecutive nucleotides; a range from about 500 consecutive nucleotides to about 5,000 consecutive nucleotides; a range from about 750 consecutive nucleotides to about 2,500 consecutive nucleotides; a range from about 750 consecutive nucleotides to about 1,500 consecutive nucleotides; a range from about 900 consecutive nucleotides to about 1,200 consecutive nucleotides. In some embodiments, an average distance between two adjacent nucleotide sequences of the selection probes on a reference sequence of a genome is about 750, 1000, 1500, or 2000 consecutive nucleotides.

[0121] In some embodiments, the selection probes are designed such that an average number of sites in a genome, such as a human genome, that each selection probe of the plurality of selection probes is capable of hybridizing to is no more than 100 different sites in the genome, no more than 50 different sites in the genome, no more than 40 different sites in the genome, no more than 30 different sites in the genome, no more than 20 different sites in the genome, no more than 10 different sites in the genome, or no more than 5 different sites in the genome, or any number between any of the foregoing number of different sites. In some embodiments, each selection probe of the plurality of selection probes is capable of hybridizing to no more than 100 different sites in the genome, no more than 50 different sites in a genome, no more than 40 different sites in a genome, no more than 30 different sites in a genome, no more than 20 different sites in a genome, or no more than 10 different sites in a genome, or any number between any of the foregoing number of different sites. In some embodiments, a selection probe capable of hybridizing to a site in the genome comprises at least 50, 60, 70, or 80 consecutive nucleotides complementary to at least 80%, 90%, 95%, 96%, 98%, or 100% of a nucleotide sequence at the site in the genome. In some embodiments, a selection probe capable of hybridizing to a site in the genome comprises at least 50 consecutive nucleotides complementary to at least 90% of a nucleotide sequence at the site in the genome.

[0122] In some embodiments, the plurality of selection probes lack sequences capable of hybridizing to a repetitive genomic DNA element. In some embodiments, the repetitive genomic DNA element is selected from a tandem repeat, an Alu repeat, a short interspersed nuclear element (SINE), a long interspersed nuclear element (LINE), an integrated viral sequence, a viral long terminal repeat (LTR), and a transposon.

[0123] In some embodiments, the selection probes target regions of the genome including those which typically under-represented in short read genome sequencing reactions, such as dark regions. Such selection probes can include a comprehensive set of probes distributed throughout the entire genome. In some embodiments, each selection probe of the plurality of selection probes comprises a nucleotide sequence capable of hybridizing to a region in a human genome represented in a RefSeq database and having a MAPQ score less than 50. In some embodiments, each selection probe of the plurality of selection probes comprises a nucleotide sequence having at least 90%, 95%, or 100% sequence identity to any one of SEQ ID NOs: 02-122770. In some embodiments, each selection probe of the plurality of selection probes comprises a nucleotide sequence having at least 90%, 95%, or 100% sequence identity to any one of SEQ ID NOs: 39954.

[0124] In some embodiments, the selection probes target the MHC region of a genome, such as a human genome. In some such embodiments, each selection probe of the plurality of selection probes comprises a nucleotide sequence capable of hybridizing to a nucleotide sequence within human chromosome 6p21.1-6p21.3; to a nucleotide sequence between nucleotide sequences encoding MOG and COL11A2 in a human genome; and/or to a site in a major histocompatibility complex (MHC) locus of a human genome. In some embodiments, the selection probes target a plurality of selected genes, such as a panel including American College of Medical Genetics (ACMG) genes, such as the genes listed in TABLE 1A. In some such embodiments, each selection probe of the plurality of selection probes comprises a nucleotide sequence capable of hybridizing to a gene selected from TABLE 1A; and/or a nucleotide sequence within, no more than 10 kbp 5′ or no more than 10 kbp 3′ of a gene selected from TABLE 1A. In some embodiments, the selection probes target a plurality of selected genes, such as a panel including pharmacogenetic (PGX) genes, such as the genes listed in TABLE 1B. In some such embodiments, each selection probe of the plurality of selection probes comprises a nucleotide sequence capable of hybridizing to a gene selected from TABLE 1B; and/or a nucleotide sequence within, no more than 10 kbp 5′ or no more than 10 kbp 3′ of a gene selected from TABLE 1B. In some embodiments, the selection probes target a plurality of selected genes, such as a panel including challenging medically relevant genes (CMRG), such as the genes listed in TABLE 1C. In some such embodiments, each selection probe of the plurality of selection probes comprises a nucleotide sequence capable of hybridizing to a gene selected from TABLE 1C; and/or a nucleotide sequence within, no more than 10 kbp 5′ or no more than 10 kbp 3′ of a gene selected from TABLE 1C.

### Certain Compositions Kits and Systems

[0125] Some embodiments of the methods and composition provided herein include kits and systems for preparing a nucleic acid library. Some embodiments include a kit comprising: a first bead-linked transposomes (BLT-1) reagent, wherein the BLT-1 transposomes comprises a first adaptor sequence; a mutagenesis reagent comprising a first primer, dPTPs, dNTPs, and a polymerase; a second bead-linked transposomes (BLT-2) reagent, wherein the BLT-2 transposomes comprise the first adaptor and a second adaptor; an amplification reagent comprising a first primer, a second primers, dNTP, and a polymerase; wherein BLT-1 has a lower transposome density as compared to BLT-2; and wherein the first primer hybridizes to the first adaptor sequence and the second primer hybridizes to the second adaptor sequence. In some embodiments, BLT-2 has more than 10, 20, 50, 100, or 1000 times the transposome density as compared to BLT-1. In some embodiments, the first adaptor is B15 and the second adaptor is A14. Some embodiments include population of oligonucleotides, wherein the oligonucleotides comprise at least 10, 100, 1000, 10000 different nucleotide sequences selected from any one of SEQ ID NOs. 02-122770.

[0126] Some embodiments include system for preparing a nucleic acid library, comprising: (a) a first plurality of transposomes comprising transposon adaptors for tagmenting a plurality of nucleic acid fragments, wherein the first plurality of transposomes is immobilized on a first plurality of beads at a first density; (b) reagents for amplifying the plurality of polynucleotides to obtain amplified polynucleotides, wherein the amplifying comprising a mutagenesis PCR and/or a suppression PCR, wherein: (i) the first reagent for performing mutagenesis PCR comprise a low bias DNA polymerase and/or a nucleotide analogue; optionally, wherein the nucleotide analogue comprises dPTP, and/or 8-oxo-dGTP; and/or the low bias DNA polymerase is a Thermococcal polymerase, or a functional derivative thereof, optionally, wherein the Thermococcal polymerase is derived from a Thermococcal strain selected from the group consisting of T. kodakarensis, T. siculi, T. celer and T. sp KS-1, and (ii) the first reagents for performing suppression PCR comprise amplification primers having the same nucleotide sequence capable of hybridizing to the transposon adaptors; (c) a plurality of selection probes for enriching for target polynucleotides in the amplified polynucleotides; and (d) a second plurality of transposomes comprising library adaptors for adding library adaptors to each end of the amplified polynucleotides, wherein the second plurality of transposomes is immobilized on a second plurality of beads at a second density, wherein the first density is less than the second density.

[0127] Some embodiments include a system for preparing a nucleic acid library, comprising: (a) a first plurality of transposomes for tagmenting a plurality of nucleic acid fragments to obtain a plurality of polynucleotides; (b) first reagents for amplifying the plurality of polynucleotides to obtain amplified polynucleotides; and (c) second reagents for adding library adaptors to each end of the amplified polynucleotides. In some embodiments, the first plurality of transposomes comprises transposon adaptors, wherein the first plurality of transposomes is immobilized on a solid support. In some embodiments, the solid support comprises a first plurality of beads.

[0128] In some embodiments, the first plurality of the transposomes is immobilized on the first plurality of beads at a density such that on contacting the first plurality of transposomes with the plurality of nucleic acid fragments the plurality of polynucleotides has an average length of the plurality of polynucleotides is greater than about 1 kbp, 2 kbp, 5 kbp, 10 kbp, 15 kbp, 20 kbp, or 40 kbp. In some embodiments, the average length of the plurality of polynucleotides is in a range from about 1 kbp to about 40 kbp, 1 kbp to about 30 kbp, 1 kbp to about 20 kbp, 5 kbp to about 20 kbp, 5 kbp to about 15 kbp, or 7 kbp to about 12 kbp.

[0129] In some embodiments, the number of transposomes immobilized on the bead is no more than about 100 transposomes, 50 transposomes, 40 transposomes, 30 transposomes, 20 transposomes, or 10 transposomes. In some embodiments, the number of transposomes immobilized on the bead is no more than about 30 transposomes.

[0130] In some embodiments, the first plurality of the transposomes immobilized on the bead comprise a total activity such that on contacting the first plurality of transposomes with the plurality of nucleic acid fragments the plurality of polynucleotides has an average length greater than about 1 kbp, 2 kbp, 5 kbp, 10 kbp, 15 kbp, 20 kbp, or 40 kbp. In some embodiments, the average length of the plurality of polynucleotides is in a range from about 1 kbp to about 40 kbp, 1 kbp to about 30 kbp, 1 kbp to about 20 kbp, 5 kbp to about 20 kbp, 5 kbp to about 15 kbp, or 7 kbp to about 12 kbp.

[0131] In some embodiments, the first plurality of the transposomes immobilized on the bead comprise an activity in a range from about 0.05 AU/μl to about 0.25 0.05 AU/μl. In some embodiments, the first plurality of the transposomes immobilized on the bead comprise an activity of about 0.075 AU/μl.

[0132] In some embodiments, the transposon adapters comprise the same sequence. In some embodiments, the transposon adapters comprise the nucleotide sequence:

SEQ ID NO: 01
(GTCTCGTGGGCTCGG)

[0133] In some embodiments, the transposomes of the plurality of transposomes are the same. In some embodiments, the transposomes of the plurality of transposomes are B15 transposomes.

[0134] In some embodiments, the first reagents comprise reagents for performing mutagenesis PCR comprising a low bias DNA polymerase and/or a nucleotide analogue. In some embodiments, the nucleotide analogue comprises dPTP, and/or 8-oxo-dGTP. In some embodiments, the low bias DNA polymerase is a Thermococcal polymerase, or a functional derivative thereof. In some embodiments, the Thermococcal polymerase is derived from a Thermococcal strain selected from the group consisting of T. kodakarensis, T. siculi, T. celer and T. sp KS-1.

[0135] In some embodiments, the first reagents comprise reagents for performing suppression PCR comprising amplification primers having the same nucleotide sequence. In some embodiments, the amplification primers are capable of hybridizing to the transposon adaptors.

[0136] In some embodiments, the second reagents comprise a second plurality of transposomes comprising the library adaptors. In some embodiments, the second plurality of transposomes has an activity such that on contacting the second plurality of transposomes with the amplified polynucleotides a library of nucleic acids is obtained and comprises the library adaptors and having an average length less than about 1 kb, 900 bp, 800, bp, 700 bp, 600 bp, 500 bp, 400 bp, 300 bp, 200 bp, or 100 bp.

[0137] In some embodiments, the first plurality of the transposomes is immobilized on the beads at a density less than a density at which the second plurality of transposomes are immobilized on the second plurality of beads.

[0138] Some embodiments also include third reagents for enriching for target polynucleotides in the amplified polynucleotides, comprising a plurality of selection probes. In some embodiments, the plurality of selection probes is attached to a third plurality of beads.

[0139] In some embodiments, an average distance between two adjacent nucleotide sequences of the selection probes on a reference sequence of a genome is in a range from about 300 consecutive nucleotides to about 7,000 consecutive nucleotides. In some embodiments, the range is from about 500 consecutive nucleotides to about 5,000 consecutive nucleotides. In some embodiments, the range is from about 750 consecutive nucleotides to about 2,500 consecutive nucleotides. In some embodiments, the range is from about 750 consecutive nucleotides to about 1,500 consecutive nucleotides. In some embodiments, the range is from about 900 consecutive nucleotides to about 1,200 consecutive nucleotides. In some embodiments, an average distance between two adjacent nucleotide sequences of the selection probes on a reference sequence of a genome is about 750, 1000, 1500, or 2000 consecutive nucleotides.

[0140] In some embodiments, an average number of sites in a genome that each selection probe of the plurality of selection probes is capable of hybridizing to is no more than 50 different sites in the genome, to no more than 40 different sites in the genome, to no more than 30 different sites in the genome, to no more than 20 different sites in the genome. In some embodiments, each selection probe of the plurality of selection probes is capable of hybridizing to no more than 50 different sites in a genome, to no more than 40 different sites in a genome, to no more than 30 different sites in a genome, to no more than 20 different sites in a genome. In some embodiments, a selection probe capable of hybridizing to a site in the genome comprises at least 50, 60, 70, or 80 consecutive nucleotides complementary to at least 90% of a nucleotide sequence at the site in the genome.

[0141] In some embodiments, the plurality of selection probes lack sequences capable of hybridizing to a repetitive genomic DNA element; In some embodiments, the repetitive genomic DNA element is selected from a tandem repeat, an Alu repeat, a short interspersed nuclear element (SINE), a long interspersed nuclear element (LINE), an integrated viral sequence, a viral long terminal repeat (LTR), and a transposon.

[0142] In some embodiments, the plurality of selection probes comprise at least 50, 100, 200, 500, 1000, 5000 different selection probes.

[0143] In some embodiments, each selection probe of the plurality of selection probes comprises a nucleotide sequence capable of hybridizing to a region in a human genome represented in a RefSeq database and having a MAPQ score less than 50. In some embodiments, each selection probe of the plurality of selection probes comprises a nucleotide sequence having at least 90%, 95%, or 100% sequence identity to any one of SEQ ID NOs: 02-122770. In some embodiments, each selection probe of the plurality of selection probes comprises a nucleotide sequence having at least 90%, 95%, or 100% sequence identity to any one of SEQ ID NOs: 39954.

[0144] In some embodiments, each selection probe of the plurality of selection probes comprises a nucleotide sequence capable of hybridizing to a nucleotide sequence within human chromosome 6p21.1-6p21.3; to a nucleotide sequence between nucleotide sequences encoding MOG and COL11A2 in a human genome; and/or to a site in a major histocompatibility complex (MHC) locus of a human genome. In some embodiments, each selection probe of the plurality of selection probes comprises a nucleotide sequence capable of hybridizing to a gene selected from TABLE 1A; and/or a nucleotide sequence within, no more than 10 kbp 5′ or no more than 10 kbp 3′ of a gene selected from TABLE 1A. In some embodiments, each selection probe of the plurality of selection probes comprises a nucleotide sequence capable of hybridizing to a gene selected from TABLE 1B, and/or a nucleotide sequence within, no more than 10 kbp 5′ or no more than 10 kbp 3′ of a gene selected from TABLE 1B. In some embodiments, each selection probe of the plurality of selection probes comprises a nucleotide sequence capable of hybridizing to a gene selected from TABLE 1C; and/or a nucleotide sequence within, no more than 10 kbp 5′ or no more than 10 kbp 3′ of a gene selected from TABLE 1C.

[0145] In some embodiments, the plurality of nucleic acid fragments is mammalian. In some embodiments, the plurality of nucleic acid fragments is human. In some embodiments, the plurality of nucleic acid fragments comprises genomic DNA.

[0146] Some embodiments include a kit comprising a plurality of selection probes. In some embodiments the plurality of selection probes comprise at least 50, 100, 1000, 2000, 3000, 4000, 5000, 10000, 20000, 30000, or 40000 or any number between any one of the foregoing numbers of different nucleotide sequences.

[0147] In some embodiments, each selection probe of the plurality of selection probes comprises a nucleotide sequence capable of hybridizing to a region in a human genome represented in a RefSeq database and having a MAPQ score less than 50. In some embodiments, each selection probe of the plurality of selection probes comprises a nucleotide sequence having at least 90%, 95%, or 100% sequence identity to any one of SEQ ID NOs: 02-122770. In some embodiments, each selection probe of the plurality of selection probes comprises a nucleotide sequence having at least 90%, 95%, or 100% sequence identity to any one of SEQ ID NOs: 39954.

[0148] In some embodiments, each selection probe of the plurality of selection probes comprises a nucleotide sequence capable of hybridizing to a nucleotide sequence within human chromosome 6p21.1-6p21.3; to a nucleotide sequence between nucleotide sequences encoding MOG and COLI1A2 in a human genome; and/or to a site in a major histocompatibility complex (MHC) locus of a human genome. In some embodiments, each selection probe of the plurality of selection probes comprises a nucleotide sequence capable of hybridizing to a gene selected from TABLE 1A; and/or a nucleotide sequence within, no more than 10 kbp 5′ or no more than 10 kbp 3′ of a gene selected from TABLE 1A. In some embodiments, each selection probe of the plurality of selection probes comprises a nucleotide sequence capable of hybridizing to a gene selected from TABLE 1B, and/or a nucleotide sequence within, no more than 10 kbp 5′ or no more than 10 kbp 3′ of a gene selected from TABLE 1B. In some embodiments, each selection probe of the plurality of selection probes comprises a nucleotide sequence capable of hybridizing to a gene selected from TABLE 1C; and/or a nucleotide sequence within, no more than 10 kbp 5′ or no more than 10 kbp 3′ of a gene selected from TABLE 1C.

### EXAMPLES

### Example 1—Generation of Nucleic Acid Library

[0149] The following describes the preparation of human genome libraries for sequencing with (1) low-density bead-linked transposomes; (2) random mutagenesis; and (3) bottlenecking (suppression) amplification. The workflow included uniquely encoding long DNA templates with steps including highly uniform random mutagenesis and amplification. The long DNA templates were then fragmented and sequenced on a standard short-read (SR) platform. Reads from prepared libraries were used to accurately reconstruct and decode the original long template sequences using an unmutated reference data set which was generated in parallel.

[0150] Unmutated reference data: to reconstruct accurate long read sequences from mutated short reads, an additional unmutated reference data set was used. This was generated from the same genomic starting material as the sample to be mutated, using standard methods for short-read library preparation and sequencing. Paired end reads were generated at a minimum length of 2×150 nucleotides for the unmutated data set, with a recommended 60× genome coverage for isolated bacterial genomes and 40× for pure human cell cultures.

[0151] Input DNA requirements: the workflow was found to be compatible with genomic DNA samples of relatively poor quality, containing unwanted low molecular weight fragments. These low molecular weight fragments were actively excluded by certain steps in the workflow; and the presence of some higher molecular weight material (>20 kb) was included to generate long templates for sequencing. To quantify input DNA for library preparation, a fluorometric-based method such as the Qubit dsDNA HS Assay Kit (Thermo Scientific) was used. Concentrations of input DNA between 12.5 and 50 ng/μl was used.

[0152] The following outlines a workflow which included: high molecular weight tagmentation; mutagenesis PCR; library normalization; bottlenecking (suppression) PCR; library preparation; fragment analysis of products; and sequencing.

### Reagents, Materials and Thermocycler Parameters

| | |
|---|---|
| BLT Long Range | BLT-LR |
| Long Range PCR Mix | LPM |
| Long Range Marking Mix | LMM |
| Long Range Primer Mix 1 | LRP1 |
| Long Range Primer Mix 2 | LRP2 |
| Library Reducing Beads | LRB |
| Binding Buffer | IBB |
| Wash Buffer 1 | IWB1 |
| Stop Tagment Buffer 2 | ST2 |
| Illumina Purification Bead | IPB |
| PW1 (water) | |
| Resuspension Buffer | RSB |
| Ethyl Alcohol, Pure | |
| Enrich BL Transposome, Lg-LT | eBLT-L |
| Enhanced PCR Mix | EPM |
| Tagmentation Buffer 1 | TB1 |
| Tagmentation Wash Buffer | TWB |
| Nextera DNA UD Index Plate | |

Tagmentation parameters

| Step | Temperature | Time |
|---|---|---|
| 1 | 55° C. | 5 minutes |
| 2 | 10° C. | hold |

Mutagenesis PCR parameters

| Step | Temperature | Time | |
|---|---|---|---|
| 1 | 68° C. | 3 | minutes |

| | |
|---|---|
| 2 | PCR cycles (12 cycles) |

| | | |
|---|---|---|
| 98° C. | 10 | seconds |
| 68° C. | 10 | minutes |

| | | |
|---|---|---|
| 3 | 4° C. | hold |

Bottlenecking PCR parameters

| | | |
|---|---|---|
| Step | Temperature | Time |

| | |
|---|---|
| 1 | PCR cycles (14 or 16 cycles) |

| | | |
|---|---|---|
| 98° C. | 10 | seconds |
| 68° C. | 10 | minutes |

| | | |
|---|---|---|
| 3 | 4° C. | hold |

Index PCR parameters

| Step | Temperature | Time | |
|---|---|---|---|
| 1 | 68° C. | 3 | minutes |
| 2 | 98° C. | 3 | minutes |

| | |
|---|---|
| 3 | PCR cycles (6 cycles) |

| | | | |
|---|---|---|---|
| | 98° C. | 45 | seconds |
| | 62° C. | 30 | seconds |
| | 68° C. | 2 | minute |
| 4 | 68° C. | 1 | minutes |

| | | |
|---|---|---|
| 5 | 4° C. | hold |

### High Molecular Weight Tagmentation

[0153] This step used low density bead-linked transposomes (BLT-LR) to generate long DNA fragments tagged with adapter sequences.

| | |
|---|---|
| 1 | Label a Biorad PCR plate. |
| 2 | Label a 1.7 ml tube and add the following components in order: |
| | BLT-LR; and TB1. |
| 3 | Vortex to mix thoroughly, then briefly pulse centrifuge. |
| 4 | Add 20 μl of mastermix to wells. |
| 5 | Add 30 μl input DNA (50 ng total). |
| 6 | Use a pipette to gently mix then briefly pulse centrifuge. |
| 7 | Place tubes in a thermocycler with a heated lid set to 80° C. |
| | and run the Tagment. |
| 8 | Remove from the thermocycler and add 10 μl of ST2. |
| 9 | Use a pipette set at half of the total rxn volume to gently mix. |
| 10 | Incubate at room temperature for 2 min. |
| 11 | Place the tubes on a magnetic stand or plate for 3 min or until the |
| | solution is clear. Remove and discard the clear supernatant. Note: |
| | If beads become disturbed during aspiration, redisperse solution |
| | into the tube. Maintain tube on the magnet to let the beads settle. |
| 12 | Remove tubes from the magnet and add 100 μl TWB. Gently |
| | pipette mix until beads are fully resuspended. |
| 13 | Place the tubes on a magnetic stand or plate and incubate for at |
| | least 2 min, or until clear. While samples are incubating, proceed |
| | to the next step. Note: Keep pellets in TWB to help prevent any |
| | chance of over-drying the beads. |

### Mutagenesis PCR

[0154] In this step, long templates were uniquely encoded via random incorporation of the mutagenic nucleotide analogue dPTP during PCR.

| | |
|---|---|
| 14 | Label a 1.7 ml tube and combine the following to prepare |
| | mutagenesis master mix: LMM; LPM; LRP1; and RSB. |
| 15 | Use a pipette to mix thoroughly, then briefly pulse centrifuge. |
| 16 | Remove TWB from each well. |
| 17 | Add 50 μl of master mix to beads. |
| 18 | Gently pipette mix to resuspend beads |
| 19 | Place in preprogrammed thermal cycler and run the |
| | Mutagenesis PCR program. |
| 20 | Remove from thermocycler. |
| 21 | Vortex IPB to resuspend the beads. |
| 22 | Add 30 μl of IPB beads to each well. |
| 23 | Mix the total reaction volume by gently pipetting at least |
| | 10 times and incubate for 2 minutes at room temperature. |
| 24 | Place on the magnetic stand and wait until the liquid is |
| | clear (~5 minutes). |
| 25 | Remove and discard all supernatant. |
| 26 | Wash beads as follows: a. keep on the magnetic stand and add |
| | 180 μl fresh 80% EtOH to each well; b. wait 30 seconds; and |
| | c. remove and discard all supernatant |
| 27 | Briefly spin for 10 seconds and return plate to magnet. |
| 28 | With a 20 μl pipette, remove all residual EtOH. |
| 29 | Dry on magnet for 2 minutes. |
| 30 | Remove from the magnetic stand and add 25 μl RSB to each well. |
| 31 | Pipette mix and incubate at room temperature for 2 minutes. |
| 32 | Place on the magnetic stand and wait until the liquid is |
| | clear (~2 minutes). |
| 33 | Transfer 10 μl supernatant to a new plate and leave remaining |
| | supernatant with SPRI beads |

### Library Normalization

| | |
|---|---|
| 34 | In a new 2 ml tube, combine the following to prepare normalization master |
| | mix: Binding Buffer (IBB); and LRB |
| 35 | Vortex normalization master mix until homogenous immediately prior to use. |
| 36 | Pipette 10 μL of prepared mastermix into each well containing 10 μL of DNA. |
| 37 | Seal plate with microseal and put on bioshake for 30 minutes at 1800 rpm. |
| 38 | Remove plate from bioshake and place on plate magnet for 1 minute. |
| | Removing and replacing plate on magnet may help to condense beads. |
| 39 | Gently remove supernatant, taking care not to disturb beads. |
| 40 | Remove plate from magnet. |
| 41 | Immediately add 150 μL of IWB1 to each well. |
| 42 | Using a p200 pipette set to 140 μL, pipette mix each well at least 10 times. |
| 43 | Place on plate magnet for 1 minute. |
| 44 | Gently remove supernatant, taking care not to disturb beads. |
| 45 | Repeat steps 41-44 for a total of two washes. Remove plate from magnet. |
| 46 | Immediately add 150 μL of 80% EtOH to each well. |
| 47 | Using a p200 pipette set to 140 μL, pipette mix each well at least 10 times. |
| 48 | Place on plate magnet for 1 minute. |
| 49 | Gently remove supernatant, taking care not to disturb beads. |
| 50 | Briefly spin down plate and use a p20 to remove excess liquid. |
| 51 | Allow to dry for 2 minutes. |
| 52 | Add 80 μL of RSB to each sample well. |
| 53 | Using a pipette set to 50 μL, pipette mix each sample at least 10 times. |
| 54 | Allow to incubate for 10 minutes. |
| 55 | Place on plate magnet for 1 minute. |
| 56 | Transfer 70 μL of supernatant to new well. |
| 57 | If performing 165 pg input, go to step 62 for next |
| | If performing 55 pg input, dilute 20 ul of eluted material in 40 μl of RSB |
| | in adjacent well. Mix well, then use 2 μl as stated in step 62. |
| | [Optional] Measure DNA on Qubit using 10 μL of DNA diluted in |
| | 190 μL of Qubit buffer. |

### Bottlenecking (Suppression) PCR

[0155] In this step a defined quantity of the purified mutagenesis product was amplified to create many copies of each unique template. The amount of starting material in the bottlenecking PCR determined the number of long templates available for sequencing, and was controlled through careful dilution of the mutagenesis sample. The following protocol was used to generate between about 10× to about 30× long-read coverage of the human genome (see below). For arbitrary samples, a simple calculator or look up table was provided to guide users on sample dilution and indicate the number of enrichment cycles required for a particular genome size or sample type.

| | |
|---|---|
| 58 | Combine the following volumes to prepare enrichment master mix: |
| | LPM; and LRP2. |
| 59 | Use a pipette to mix thoroughly, then briefly pulse centrifuge. |
| 60 | Add 48 μl of master mix to a new Bio-Rad plate. Place tubes on ice. |
| 61 | Add 2 μl of DNA to each well. |
| 62 | Gently pipette mix the 50 μl reaction and briefly pulse centrifuge. |
| 63 | Place in preprogrammed thermal cycler and run the Bottlenecking |
| | PCR program. |
| 64 | Note: Perform 16 enrichment cycles for 10× genome coverage or |
| | 14 cycles for 30×. |
| 65 | Remove from thermocycler. |
| 66 | Vortex IPB to resuspend the beads. |
| 67 | Add 30 ul of IPB beads to each well. |
| 68 | Mix the total reaction volume by gently pipetting at least |
| | 10 times and incubate for 2 minutes at room temperature. |
| 69 | Place on the magnetic stand and wait until the liquid is |
| | clear (~5 minutes). |
| 70 | Remove and discard all supernatant. |
| 71 | Wash beads as follows: a. keep on the magnetic stand and add |
| | 180 μl fresh 80% EtOH to each well; b. wait 30 seconds, and |
| | c. remove and discard all supernatant. |
| 72 | Briefly spin for 10 seconds and return plate to magnet. |
| 73 | With a 20 μl pipette, remove all residual EtOH. |
| 74 | Dry on magnet for 2 minutes. |
| 75 | Remove from the magnetic stand and add 25 μl RSB to each well. |
| 76 | Pipette mix and Incubate at room temperature for 2 minutes. |
| 77 | Place on the magnetic stand and wait until the liquid is clear |
| | (~2 minutes). |
| 78 | Transfer 24 μl supernatant to a new plate. |
| 79 | Keep on ice for same day use or store at −20° C. |
| | (safe stopping point). |
| 80 | Determine the concentration of each purified bottlenecking PCR |
| | product with the Qubit dsDNA HS Assay Kit. Use 1-2 μl of sample |
| | DNA per measurement. |

### Library Preparation

[0156] In this step the long, mutated DNA templates were fragmented and adapters were attached to create a library of short, overlapping fragments that are ready for sequencing. 50 ng of each purified enrichment product can be used as input DNA for internal library preparation. A small amount of bottlenecking PCR product was reserved for subsequent analysis of template size.

| | |
|---|---|
| 81 | Bring TB1 and eBLT-L to room temperature and vortex to mix. |
| 82 | Make a dilution using RSB and 50 ng worth of purified bottlenecking product |
| | into each well with a final volume of 30 μl. |
| 83 | Vortex eBLT-L vigorously for 10 seconds, then visually check the beads for |
| | complete resuspension. Repeat as necessary. |
| 84 | Prepare a tagmentation master mix: eBLT-L; TB1. |
| 85 | Vortex the tagmentation master mix thoroughly to make sure the eBLT-L |
| | beads are evenly resuspended in the buffer. |
| 86 | Using fresh tips, transfer 20 μl of tagmentation master mix to each tube |
| | containing 30 μl of DNA. |
| 87 | Pipette mix the 50 μl reaction mix to resuspend. |
| 88 | Place in preprogrammed thermal cycler and run the Tagment program. |
| 89 | Remove from thermocycler and add 10 μl of ST2 to each tagmentation reaction. |
| 90 | Use a pipette set at half of the total rxn volume to gently mix. |
| 91 | Incubate at RT for 5 minutes. |
| 92 | Place the tubes on a magnetic stand or plate for 3 min or until the solution is |
| | clear. Remove and discard the clear supernatant. Note: If beads become |
| | disturbed during aspiration, redisperse solution into the tube. Maintain tube on |
| | the magnet to let the beads settle. |
| 93 | Remove tubes from the magnet and add 100 μl TWB. Gently pipette mix until |
| | beads are fully resuspended. |
| 94 | Place the tubes on a magnetic stand or plate for 3 min or until the solution is |
| | clear. Remove and discard the clear supernatant. |
| 95 | Remove tubes from the magnet and add 100 μl TWB. Gently pipette mix until |
| | beads are fully resuspended (total of 2 washes). |
| 96 | Place the tubes on a magnetic stand or plate and incubate for at least 3 min, or |
| | until clear. While samples are incubating, proceed to the next step. Note: Keep |
| | pellets in TWB to help prevent any chance of over drying the beads. |
| 97 | Prepare a index PCR master mix: EPM; RSB. |
| 98 | Use a pipette to mix thoroughly, then briefly pulse centrifuge. |
| 99 | Carefully remove the second TWB wash from the samples while on the magnet. |
| | Use a pipette with P10 or P20 tips to remove excess liquid from the tube. Any |
| | remaining foam on the tube walls does not adversely affect the library. |
| 100 | Remove tubes from the magnet and proceed immediately to the next step to |
| | prevent excessive drying of the beads. |
| 101 | Add 46 μl of the PCR master mix to each sample. Gently pipette mix to ensure |
| | the beads are thoroughly resuspended. |
| 102 | To each sample, add 4 μl Nextera DNA UD Index. Use a unique combination |
| | of indexes for each sample. |
| 103 | Using a pipette set to 40 μl, pipette mix a minimum of 10 times to mix the |
| | entire reaction volume. |
| 104 | Place in preprogrammed thermal cycler and run the Index PCR program. |
| 105 | Clean up PCR reaction using IPB beads as follows: |
| 106 | Place plate on the magnetic stand and wait until the liquid is clear (~5 minutes) |
| 107 | Transfer 45 μL of supernatant to a new plate. |
| 108 | Add 55 μL RSB to bring volume to 100 μL. |
| 109 | Perform a double-sided bead purification as follows: |
| 110 | Add 30 μL of IPB beads to the sample. |
| 111 | Mix the total reaction volume by gently pipetting at least 10 times and |
| | incubate for 2 minutes at room temperature. |
| 112 | Place on the magnetic stand and wait until the liquid is clear (~5 minutes). |
| 113 | Transfer 127 μl of the clear supernatant in new wells. Discard the remaining beads. |
| 114 | Add 20 μl of IPB beads to the sample. |
| 115 | Mix the total reaction volume by gently pipetting at least 10 times and |
| | incubate for 2 minutes at room temperature. |
| 116 | Place on the magnetic stand and wait until the liquid is clear (~5 minutes). |
| 117 | Remove and discard all supernatant. |
| 118 | Wash beads as follows: a. keep on the magnetic stand and add 180 μl fresh 80% |
| | EtOH to each well; b. wait 30 seconds; and c. remove and discard all supernatant. |
| 119 | Briefly spin for 10 seconds and return plate to magnet. |
| 120 | With a 20 μl pipette, remove all residual EtOH. |
| 121 | Dry on magnet for 2 minutes. |
| 122 | Remove from the magnetic stand and add 30 μl RSB to each well. |
| 123 | Pipette mix and incubate at room temperature for 2 minutes. |
| 124 | Place on the magnetic stand and wait until the liquid is clear (~2 minutes). |
| 125 | Transfer 28 μl to a new plate. |
| 126 | Determine the concentration of each purified enrichment product with the |
| | Qubit dsDNA HS Assay Kit. Use 1-2 μl of sample DNA per measurement. |
| 127 | Keep on ice for same day use or store at −20° C. (SAFE STOPPING POINT). |

[0157] Libraries were quantified, normalized and sequenced using standard workflows for libraries. Example additional considerations for quality control, sample index selection and sequencing are provided below.

### Fragment Analysis of Products

| | |
|---|---|
| 128 | Run purified library prep product on appropriate |
| | instrument for fragment analysis. |
| 129 | Record the average fragment length for the |
| | purified library prep product. |

[0158] DNA fragment length: assessing the fragment length profile of the purified bottlenecking PCR product was performed to evaluate the size distribution of long templates as well as to evaluate the final short-read library. To assess the fragment size of the purified bottlenecking PCR product, the following products from Agilent Technologies® were used: Bioanalyzer 2100, TapeStation 4200, and Fragment Analyzer 5300; or equivalent technologies from other providers.

Purified Bottlenecking Product

| | | | Expected |
|---|---|---|---|
| | | | average |
| | | Recommended | fragment |
| Instrumentation | Kit | Region (bp) | length (bp) |
| Bioanalyzer | High Sensitivity | 3,000-10,000 | 7,000-8,000 |
| 2100 | DNA | | |
| Fragment | DNF-464 HS | 3,000-49,000 | 7,000-8,000 |
| Analyzer 5300 | Large Fragment | | |

[0159] The peak template length after bottlenecking PCR was expected to be around 7,000-8,000 bp, with virtually no products below ˜3,000 bp. FIG. 3A illustrates purified bottlenecking PCR product run on an Agilent® Bioanalyzer using a High Sensitivity DNA Kit.

Final Library

| | | | Expected |
|---|---|---|---|
| | | | average |
| | | Region | fragment |
| Instrumentation | Kit | (bp) | length (bp) |
| TapeStation | High Sensitivity | 150-1,500 | 800-900 |
| 4200 | D5000 | | |
| Bioanalyzer | High Sensitivity | 150-1,500 | 800-900 |
| 2100 | DNA | | |

[0160] The peak template length after bottlenecking PCR was expected to be around 800-900 bp. FIG. 3B illustrates purified final library prep product run on an Agilent® Bioanalyzer using a High Sensitivity DNA Kit.

### Sequencing

[0161] The final library or library pool was sequenced on a NGS instrument, generating 2×150 nt paired end reads. The aim was to produce at least 400 Gbp of sequence data for mutated samples targeting 10× long-read coverage of the human genome, or at least 1200 Gbp for 30× coverage. This was in addition to the unmutated reference data that was also required for long read reconstruction.

### Example 2—Effects of Immobilizing Transposomes on Beads at Low Densities

[0162] This example illustrates improved long read coverage by changing initial tagmentation from soluble transposomes to low density bead-linked transposomes (BLT-LR); and changing from an A14/B15 mixture of BLT-LRs to B15 BLT-LR only. Nucleic acid libraries were generated and sequenced with a protocol substantially similar to that of Example 1. Different amounts of input DNA were tested. A protocol using bead-linked transposomes was compared with a protocol using transposomes in solution. As shown in FIGS. 4A-4C, a switch from low concentration soluble transposomes to low-density BLT (BLT-LR) provided increased robustness to changes in transposome: input DNA ratio; and a more uniform coverage with BLT vs. soluble.

[0163] FIG. 5 outlines steps of high molecular weight tagmentation followed by mutagenesis and suppression PCR to enrich for longer fragments.

[0164] Protocols were compared that included (i) soluble transposome (TSM) (0.4 AU/μl); (2) BLT-LR made with A14/B15 (0.1 AU/μl build); or (3) BLT-LR made with B15 only (0.075 AU/μl build). Quality control and sequencing metrics were compared for each protocol.

[0165] As shown in FIGS. 6A-6C, soluble TSM had a greater activity than BLT-LR and soluble TSM created longer fragments than BLT-LRs. A14/B15 could not be melted off of the beads due to 5′ attachment of TDE1. In mutagenesis PCR, A14/B15 BLT provided a lower yield than B15 only (FIGS. 7A-7C). The yield with soluble (MTE) yield was also lower and may have been accounted for because only 50% tag product was taken into PCR; 100% used for BLTs. Fragment sizes of BLT-LR were smaller than with soluble TSM. Average sizes of products were 1-48 kb (FIG. 7B). There were larger fragment lengths with soluble TSM (FIGS. 7B and 7C). In bottleneck (suppression) PCR, yields and fragment sizes were more similar, while BLT-LRs still produced smallest products of ˜8 kb in length (FIG. 8A). Average sizes were 1-48 kb (FIGS. 8B and 8C).

[0166] In a sequencing metrics comparison, GC bias was comparable between soluble and BLT-LR with A14/B15 BLT slightly worse (FIG. 9) A higher N50 was achieved with soluble TSM, slightly higher N50 with B15-only compared to A14/B15, slightly higher N50 (350) with eBLT-L compared to BLT (FIGS. 10A and 10B). Sequencing redundancy, SLR depth, and error rate achieved using with A14/B15 BLT or B15 only BLT were measured. Fraction of bases with no coverage achieved using with A14/B15 BLT or B15 only BLT is depicted in FIG. 11.

[0167] BLT-LRs had better coverage than soluble transposomes (fraction of bases with <0/10× coverage). BLT-LRs created shorter fragments, which generated lower N50s in workflow. N50s were still above 5 kb mark so this decrease in performance was acceptable when paired with better coverage metrics and a more robust tagmentation reaction. B15-only TSM BLTs gave a better yield and lower redundancy than A14/B15 BLTs. The change to B15 BLT-LRs created a more efficient mutagenesis suppression PCR.

### Example 3—Effects of BLT Activity on Fragment Size

[0168] BLT-LR activity was investigated for high molecular weight tagmentation. BLT-LR activity should provide: tagment large fragments to provide for mutagenesis PCR; maximize fragment size, ideally >8 kb; yield >4 ng post-high molecular weight (HMW) tagmentation; reproducibility; ease in QC tested; and good sequence quality. A goal was to maximize fragment size while maintaining good yield and downstream sequencing metrics.

[0169] BLT-LRs having different levels of activity were compared. As transposome activity (AU/μl) decreased, yield decreased and average fragment size increased (FIG. 12).

[0170] BLT-LRs were compared with builds/activities of 0.0025, 0.005, 0.025, 0.05, 0.1, 0.15 AU/μl. N50s were compared. “N50” was the length of the shortest contig for which longer and equal length contigs cover at least 50% of the assembly. Lower build activity maximized N50s but sequencing metrics started to drop at 0.025 AU/μl (FIGS. 13 and 14). There was no apparent cliff-edge on high activity side, but N50s continued to decline, and at 0.075 AU/μl, were well above cliff edge while maximizing N50.

[0171] Results were compared from studies with three different operators testing activities from 0.05 AU/μl to 0.25 AU/μl. Consistent performance between operators was found for BLT-LR activities from 0.05 AU/μl to 0.25 AU/μl (FIG. 15). A BLT-LR activity of 0.075 AU/μl was chosen for BLT-LR which balanced fragment size and yield. It was found that a fluctuation of +/−100% in activity would still provide good sequencing metrics.

### Example 4—-Effects of Quantity of Input DNA

[0172] Changing the amount of input DNA used in the initial HMW tagmentation reaction could impact any of the following: amount of DNA tagmented (test BLT-LR saturation); fragment sizes after initial HMW tagmentation (and downstream); biases in what is tagmented/amplified; sequencing metrics including percent duplicates, redundancy, N50, GC bias. Effects of input DNA quantity were tested for a protocol substantially similar to the workflow of Example 1 for amounts: 1 ng, 3, ng, 5 ng, 10 ng, 20 ng, 30 ng, 50 ng, 100 ng, 300 ng, and 1000 ng. Yield and fragment size plateaued after 20-30 ng of input DNA (FIG. 16). Yields reached maximum around 20 ng of DNA input, fragment sizes were unaffected by increased DNA input (FIG. 17).

[0173] Sequencing was performed for input DNAs of 1 ng, 10 ng, 20 ng and 1000 ng to determine cliff edges for metrics. A workflow with 1 ng input DNA provided slightly higher insert sizes and percent duplicated reads compared to workflows performed with higher amounts of input DNA (FIG. 18). Minimal differences were observed in error rates, read quality, redundancy, or N50s (FIG. 19). Similar coverage across all DNA input amounts were observed with all points within normal variation with a slight decrease in mode coverage as fraction with <0/10× increased (FIG. 20). A very slight increase in GC bias between 60-80% was observed in higher inputs, but well within normal variation (FIG. 21).

[0174] In sum, similar sequencing metrics were observed for input DNA amounts of 1 ng to 1000 ng. Inputs as low as 1 ng were found to work within the workflow. BLT-LR saturated at about 30 ng input; input above 30 ng did not bias coverage. DNA input amounts less than 10 ng resulted in low yields in the workflow. There was a slight increase in percent duplicated reads for 1 ng DNA input.

### Example 5—Effects of Quality of Input DNA

[0175] Effects of input DNA quality was tested for a protocol substantially similar to the workflow of Example 1. Preliminary data indicated that vortexing and up to 3 freeze/thaw cycles for input DNA were tolerated; and FFPE DNA was not suitable, or was too degraded, to be used as input DNA. Input DNA was prepared by shearing for 1, 3, 10, 30 and 60 seconds, and compared to control BLT-LR tagmented DNA and HMW DNA.

[0176] Input DNA was sheared for 1, 3, 10, 30 and 60 seconds. There was a noticeable change in size distribution profile after even 1 second, while Control BLT-LR and HMW DNA gave similar size profiles (FIG. 22). In the tagmentation step of the workflow, 1 second sheared DNA had similar fragment size and yield to control, and >1 second shearing quickly reduced size and yield (FIG. 23). In the mutagenesis step of the workflow, mutagenesis PCR yield sharply reduced at >1 second shearing (FIG. 24A). In the bottlenecking PCR step of the workflow, yield also sharply reduced at >1 second shearing (FIG. 24B). For sequencing metrics, N50s declined and redundancy increased at >3 seconds shearing (FIG. 25). Coverage metrics declined >3 seconds shearing (FIG. 26). GC bias correlated with post-tagmentation sizes (FIG. 27).

[0177] In sum, HMW DNA gave better yields and larger fragment lengths coming out of initial Tagmentation but did not result in final higher N50. Highly sheared DNA (30s or longer) did not amplify well in either PCR step which resulted in not enough DNA to continue with library prep. N50s and coverage/redundancy metrics worsened with DNA sheared >3 seconds. GC bias was impacted by fragment sizes. PCR steps were not suitable for highly degraded DNA, but tolerated mild shearing (1-3 sec) reasonably well.

[0178] BLT-LRs were investigated to create large fragment sizes suitable for the workflow outlined in Example 1. B15-only transposomes improved mutagenesis PCR small fragment suppression and overall yield The workflow gave improved coverage of low MapQ regions of the genome. The workflow was robust to changes in DNA input amount. The workflow tolerated mildly sheared DNA, DNA that has been through freeze/thaw, and DNA that had been vortexed.

### Example 6—Enriching for Long Fragments

[0179] A workflow was performed, as described in Example 1, with an added enrichment step. The workflow included: high molecular weight tagmentation; mutagenesis PCR; library normalization; bottlenecking (suppression) PCR; library preparation; fragment analysis of products; and sequencing. FIG. 32 depicts an example workflow which includes enrichment for long fragments. The additional enrichment step for long fragment enrichment of certain fragments was performed on the products of the bottlenecking (suppression) PCR, and prior to the library preparation step. The fragments that were products of the suppression PCR, are referred to as ‘long fragments’ to differentiate them from fragments that are the products of the library preparation step and referred to in Example 7 as ‘short fragments’.

[0180] An example overview and timeline for long fragment enrichment in the workflow is depicted in FIG. 28 and FIG. 29, respectively. The enrichment step included hybridizing the products with selection probes, capturing the products hybridized to the selection probes with bead-linked capture probes, and amplifying the captured products. An example protocol is described below in the following. However, it should be realized that other protocols using similar enrichment for long fragments are contemplated.

### Hybridization

Bring DNA libraries (HYB Plate), EHB2, and probes to RT.
Vortex and briefly spin down EHB2 and probes before use.
NOTE: Vortex EHB2 thoroughly and allow enough time to
bring up to RT.
Ensure that crystals are fully dissolved. Heat tube in hands if needed.
Preheat NHB2 to 50° C. for 5 m and vortex for 30 sec, ensure solution
is clear and free from precipitate.
NOTE: Vortex NHB2 thoroughly and allow enough time to thaw to
RT and get up to 50° C. prior to use.
Ensure that crystals are fully dissolved. Use while warm to avoid
precipitates from reforming.
Prepare Hyb Master Mix and add 17.5 uL to HYB plate wells. (or add
components individually in order: Library, NHB2, Probes, EHB2)
Pipette mix. Seal HYB plate with Microseal ‘B’.
Centrifuge HYB plate briefly at 280 × g for 30 sec.
Place plate on a thermal cycler and run the LCE HYB program
overnight. (holds at 58° C.)

| | | |
|---|---|---|
| Program name: LCE HYB | Rnx volume: 25μ | Lid: 100° C. |

| Step | Temp | Duration | | Cycles |
|---|---|---|---|---|
| Heat denature | 98° C. | 5 | min | 1 |
| Ramp down | 96° C. | −2° C./min | | 19 |
| | 58° C. | | | |
| Hybridize | 58° C. | 30 | min | 1 |

### Capture

Bring SMB3, EEW, EE1, HP3, ET2, and RSB to RT.
Vortex and briefly spin down ET2, EE1 and HP3 before use.
Vortex EEW and SMB3 thoroughly.
Leave the thermal cycler running at 58 C.
Remove the HYB plate from the thermal cycler.
Centrifuge HYB plate at 280 × g for 30 sec.
Vortex SMB3 thoroughly for 1 min before use.
Add 75 μL of SMB3 to each sample.
Pipette mix 20×
Seal HYB wash plate with Microseal ‘B’
Incubate plate on thermal cycler running at 58° C. for 15 min.
Centrifuge HYB wash plate briefly at 280 × g for 30 sec.
Place on a magnetic stand for 2 min.
While on the magnetic stand, use a pipettor set to 100 μL to
carefully remove and discard the supernatant.

### Post-Hybridization Wash

Vortex EEW thoroughly for 1 min before use.
Vortex and briefly spin down EE1 and HP3 before use.

| | |
|---|---|
| PERFORM | Remove the HYB plate from the magnetic stand |
| 2X | and add 100 μL of EEW to each sample. |
| | Pipette mix to fully resuspend the beads. |
| | Seal HYB wash plate with Microseal ‘B’ |
| | Incubate in a thermal cycler at 58° C. for 10 min. |
| | Place HYB plate on a magnetic stand for 2 min. |
| | While on the magnetic stand, use a pipettor to |
| | carefully remove and discard the supernatant. |

Use a P20 pipettor to remove any residual supernatant from the
final pellet.
Remove HYB plate from magnet.
Add 100 μL EEW to each well.
Pipette mix to fully resuspend the beads.
Transfer 100 μl of resuspended bead solution to a new PCR plate.
Seal HYB wash plate with Microseal ‘B’
Place on the thermal cycler at 58° C. for 5 min.
Turn off thermal cycler at 58° C.
Remove from thermalcycler and place on magnetic stand for 2 min
or until the solution is clear.
Prepare EE1 + HP3 Elution Mix.
Set pipette to 100 μL and discard all supernatant from each well.
Centrifuge at 280 × g for 30 sec then return to magnet for 10 sec.
Use a P20 pipettor to remove any residual supernatant.
Immediately proceed to Elution to prevent excessive drying of beads.

### Elution

Vortex and briefly spin down ET2 before use.
Vortex EE1 + HP3 Elution Mix to mix well.
Remove the HYB plate from the magnetic stand and add
23 μL of EE1 + HP3 Elution Mix.
Pipette mix to fully resuspend the beads.
Incubate at RT for 2 min.
Centrifuge at 280 × g for 30 sec.
Place on a magnetic stand for 2 min.
Add 4 μL of ET2 to a new 96-well PCR plate to wells
corresponding to sample layout.
Label the plate, “ELU plate”.
Carefully transfer 21 μL of eluate from the HYB wash
plate to corresponding wells of ET2 in the ELU plate.
Set pipette to 20 μL and gently pipette mix each
well 10 times.
Centrifuge at 280 × g for 30 sec.

### Enriched Library PCR

Bring MM reagents to RT.
Prepare RED Master Mix. Mix and spin.
Briefly spin down ELU plate to collect
condensation if needed.
Pipette mix.
Seal ELU plate with Microseal ‘B’
Briefly spin down plate to collect droplets.
Place plate on a thermal cycler and run the
SYD_EN PCR program.
(# cycles depends on Probe Panel used)
(same PCR conditions as Bottleneck PCR)

Enrichment PCR

| Step | Temperature | Time |
|---|---|---|
| 1 | PCR cycles (depend on panel) | |
| | 98° C. | 10 s |
| | 68° C. | 10 min |
| 3 | 4° C. | Hold |

### PCR Clean Up

Bring IPB and RSB to RT for at least 30 min.
Prepare fresh 80% EtOH wash solution as follows. Vortex to mix well.
Remove ELU plate from thermocycler. Briefly spin down PCR plate to
collect droplets.
Vortex IPB to resuspend the beads.
Add 30 ul of IPB beads to each well.
Mix the total reaction volume by gently pipetting at least 10 times and
incubate for 2 minutes at room temperature.
Place on the magnetic stand and wait until the liquid is clear (~5
minutes)
Remove and discard all supernatant
Wash beads as follows: a. Keep on the magnetic stand and add 180 μl
fresh 80% EtOH to each well; b. Wait 30 seconds; and c. Remove and
discard all supernatant
Repeat wash for a total of 2 washes.
Briefly spin for 10 seconds and return plate to magnet.
With a 20 μl pipette, remove all residual EtOH.
Dry on magnet for 2 minutes.
Remove from the magnetic stand and add 25 μl RSB to each well.
Pipette mix and incubate at room temperature for 2 minutes.
Place on the magnetic stand and wait until the liquid is clear (~2
minutes).
Transfer 24 μl supernatant to a new plate.
Keep on ice for same day use or store at −20° C. (SAFE STOPPING
POINT).
Determine the concentration of each purified recovery product with the
Qubit dsDNA HS Assay Kit. Use 1-2 μl of sample DNA per
measurement.
Proceed with 50 ng to BLT prep (next tab)

### Example 7—Enriching for Short Fragments

[0181] A workflow was performed as described in Example 1, and included an enrichment step for short fragments. The workflow included: high molecular weight tagmentation; mutagenesis PCR; library normalization; bottlenecking (suppression) PCR; library preparation; fragment analysis of products; and sequencing. The additional enrichment step for short fragment enrichment of certain fragments was performed on the products of the library preparation step. An example overview and timeline for short fragment enrichment in the workflow are depicted in FIG. 28 and FIG. 29, respectively. Of course, other workflows for such short fragment enrichment are also contemplated.

[0182] The enrichment step included hybridizing the products with selection probes, capturing the products hybridized to the selection probes with bead-linked capture probes, and amplifying the captured products. The enrichment step was substantially the same as that performed in Example 6.

### Example 8—Selection of Probes for Under-Represented Genomic Regions

[0183] This example relates to the generation and use of selection probes to enrich for regions of the genome including those which are typically under-represented in whole genome sequencing methods. Such regions of the genome may provide sequencing data that are systematically impacted by lower quality—such as elevated error rates, low mapping quality or depth anomalies—may fail to deliver consistently accurate variant calls even for SNVs and indels. Many of the reference characteristics that cause these systematic errors are well known, such as, highly repetitive regions have poor mapping quality and homopolymers are known to result in low base accuracy. This knowledge has been used to classify the genome into ‘easy’ and ‘difficult’ regions (Krusche P, et al. Nat Biotechnol. 2019; 37:555-560). Though these classifications can be helpful, they are not a perfect representation of the actual performance within these regions. For example, a large segmental duplication may be comprised of regions of high and low similarity, leading to very different variant calling accuracy.

[0184] Selection probes for use to enrich for targets in long fragments were identified by methods which included: selecting target regions of the genome; designing a probe set within the target regions; and identifying suitable probes within the probe set to generate a panel of selection probes. Briefly, for a panel that was focused on under-represented regions of the genome, target regions included those with low mappability (non-unique) portions of protein-coding regions, including introns and untranslated regions (UTRs). Such regions included those having a low mapping quality score (MAPQ) score, less than 50, in the HG38 reference sequence of the human genome; and those represented in the RefSeq database which includes non-redundant, well-annotated set of sequences, including genomic DNA and transcripts. MAPQ scores quantify the probability that a sequencing read is misplaced in a reference sequence (Li H, et al. (2008) Genome Research 18:1851-8). More regions of interest included certain groups of genes and regions of the genome. Examples included: (i) protein coding regions with low mappability, e.g., low mappability RefSeq sequences; (ii) CMRG genes, e.g., Wagner J., et al., (2022) Nat Biotechnol. 40:672-680; (iii) deCODE Icelandic dark matter regions; (iv) regions with short tandem repeats (STR), e.g., Stevanovski I., et al., Sci Adv. 2022 March; 8 (9): eabm5386; (v) MHC locus; (vi) ACMG genes; (vii) regions reported in Wenger A. M., et al., (2019) Nat Biotechnol. 37:1155-1162; and (viii) PGX genes.

[0185] Probe sets were designed to hybridize within such target regions using software tools including DESIGNSTUDIO (Illumina, Inc., San Diego). Probes were designed to hybridize to target regions having about 1 kb+/−0.2 kb between corresponding sequences in the linear reference sequence. A 400 bp window centered around the 1 kb target spacing was searched. Within the 400 bp window, probes were identified using several parameters including GC bias (e.g. <25% to <75%) and uniqueness or hits in the genome. Suitable probes were predicted to hybridize or to hit less than 20 other regions of the reference genome. A hit was at least 80 consecutive bps of the 120 bp probes match >90%. 198,451 probes were identified. As depicted in FIG. 30, selection probes were identified having increased specificity for a target fragment.

[0186] In an example selection process for a fixed panel, probes were selected using the following steps: (1) Target regions were selected based on several inputs, including focusing on low mappability (non-unique) portions of protein-coding regions (including introns and UTRs), and certain identified groups of genes and genomic regions including: ACMG genes, CMRG genes, PGX genes, MHC locus, deCODE Icelandic dark matter regions. (2) Probes were designed to capture the above regions, aiming for about 1000 bp spacing between probes with the following sub-steps (2A)-(2D). (2A) To select better probes, 500 bp spacing was initially used. This provided two opportunities to find good probes for each region, which was useful to maximize the power of the data in a limited time. (2B) To achieve 1000 bp spacing, the algorithm jumped from one probe to the next in 1000 bp increments, but allowed a window of +/−200 bp to find the ‘best’ probe. (2C) There were multiple parameters within that window to find the ‘best’ probe. Mostly these were typical parameters such as GC content. However, a primary parameter for the panel was number of hits in the genome (minimize this number), and requirements on this parameter were relaxed to permit selection of probes in all regions. (2D) Probes were manufactured as double stranded DNA 80-mers or 120-mers. (3) At least 2 probes were selected per region, even for ‘small’ regions (e.g. 1000 bp, where 1 probe may target based on the above). (4) After probe selection was complete, additional rounds of selection were performed, based on the following sub-steps (4A)-(4D). (4A) Discarding region types that did not belong in the panel, for example, regions that were not low mappability portions of protein-coding regions. (4B) Discarding regions that were identified as “failed to cover” using the following sub-steps. (4B) (i). Regions that “failed to cover” included those that neither of the two panel designs covered at least half of the region 5×. This was calculated from the median of many samples, each with mean coverage in the 30× range. (4B) (ii) There were two designs for this panel which provided a choice of which probes to keep. ‘Panel A’ was kept as a default, because it had more replicates and typically saw better coverage overall, and slightly more probes were in this panel. ‘Panel B’ was kept if panel B gave at least 20% better coverage (calculated by fraction of bases covered >10×). (4C) To be even more rigorous about probes that hit multiple times in the genome, all probes were discarded that hit at least 20 times elsewhere in the genome. A hit included at least 50 consecutive bps of the 120 bp probes match >90%. This resulted in some gaps larger than desired. If there was a gap >1.5 kb or a region with a single probe, the other panel was examined probes from the other panel were added to cover those gaps. (4D) Any corrections that were needed were then made to align probes with coordinates of genomic sequences.

[0187] Additional “spike in” probes were identified in target regions using the following steps. Gaps between probes were identified in the remaining target regions that were larger than 1.5 kb, and target regions were identified that had gaps of larger than 1.5 kb between the first or last remaining probe and the target region start or stop location on the chromosome. For each identified 1.5 kb gap, unselected probes which targeted the region from panel A or panel B were identified and selected to fill the gap, making sure that such selected probes did not bind excessively (more than 20 times) in other parts of the genome. Separately, target regions were identified that were left with a single probe after going through the previous selection criteria. Targets could be left with a single probe because all the other probes assigned to that target region were liable to bind to >20 other places in the genome and had been removed, or because many target regions only had one probe from each uber panel A and uber panel B and only one of the panel batches to use for those targets had been picked. For these single-probe targets, unpicked probes were added that hit that same target from the non-picked panel, provided that those probes were also not labeled to bind excessively in other parts of the genome and that those probes had also met the same coverage criteria in the previous steps. Initial probe panels including ‘Uber A’ and ‘Uber B’ were generated. Probes within these panels were excluded with criteria that included having at least 20 hits in the genome, to generate a ‘final’ panel. TABLE 2A summarizes steps used to generate different batches of selections probes using steps described above.

TABLE 2A

| Step included | Batch | | | | |
|---|---|---|---|---|---|
| in batch | | | Uber A and | First | Second |
| generation | Final | Spike-in | Uber B | order | order |
| (1) | Yes | Yes | Yes | Yes | Yes |
| (2A) | Yes | Yes | Yes | Yes | Yes |
| (2B) | Yes | Yes | Yes | Yes | Yes |
| (2C) | Yes | Yes | Yes | Yes | Yes |
| (2D) | Yes | Yes | Yes | Yes | Yes |
| (3) | Yes | Yes | Yes | Yes | Yes |
| (4A) | Yes | Yes | No | No | No |
| (4B)(i) | Yes | Yes | No | No | No |
| (4B)(ii) | Yes | Yes | No | No | No |
| (4C) | Yes | No | No | No | No |
| (4D) | Yes | Yes | No | No | No |

[0188] TABLE 2B lists certain probes generated by the foregoing methods.

TABLE 2B

| | Characteristic | | | |
|---|---|---|---|---|
| | Size | Approx spacing | No of | |
| Batch | (bases) | in genome (kb) | probes | SEQ ID NOS. |
| Final | 120 | 1 kb | 39953 | 02-39954 |
| Uber A | 120 | 1 kb | 81325 | 39955-121279 |
| Spike-in | 120 | 1 kb | 1491 | 121280-122770 |

[0189] A series of selection probe panels were developed using methods substantially similar to the foregoing methods. Panels included: (la) uber A; (1b) uber B; (2) intermediate/dev; and (3) final. Panels (1)-(3) were progressive iterations of a selection probe panel. The panels were used to prepare libraries with a method with long fragments with enrichment, and substantially similar to the WGS with enrichment workflow depicted in FIG. 32. A control included a library prepared with a method with long fragments, without enrichment, substantially similar to the WGS workflow depicted in FIG. 32. TABLE 2C lists certain metrics for data obtained using each method/panel which show that in methods that included enrichment, compared to methods without enrichment, median coverage levels and N50 values were much greater despite a smaller number of paired end reads.

TABLE 2C

| | With enrichment | | | | | Without |
|---|---|---|---|---|---|---|
| | Panel | Panel | Panel | Panel | Panel | enrichment |
| Metric | (1a) | (1a) | (1b) | (2) | (3) | None |
| Level of input reads | Low | High | High | Low | Low | High |
| (# paired end reads) | 1.0E+09 | ~5E+09 | ~3E+09 | 6.0E+08 | 5.9E+08 | 5.4E+09 |
| target region size (Mbp) | 76 | 76 | | 40 | 40 | N/A |
| median coverage | 32.2 | 72.2 | 67.5 | 34.4 | 41.9 | 27.3 |
| percent bases with | 5.2% | 2.3% | 3.7% | 2.3% | 2.4% | 2.0% |
| no coverage | | | | | | |
| percent bases with less | 20.1% | | | 15.3% | 12.3% | 11.5% |
| than 10x coverage | | | | | | |
| N50 (bp) | 6089 | 4198 | 4192 | 6677 | 7116 | 7054 |
| percent reads on target | 72% | | | 85% | 85% | N/A |
| f-measure non-SNP | 0.737 | 0.784 | 0.732 | 0.841 | 0.841 | 0.881 |
| type 2 | | | | | | |
| f-measure SNP type 2 | 0.885 | 0.902 | 0.882 | 0.905 | 0.911 | 0.947 |
| precision non-SNP | 0.841 | 0.878 | 0.847 | 0.848 | 0.869 | 0.889 |
| type 2 | | | | | | |
| precision SNP type 2 | 0.923 | 0.92 | 0.892 | 0.952 | 0.947 | 0.96 |
| sensitivity non-SNP | 0.656 | 0.709 | 0.644 | 0.834 | 0.814 | 0.874 |
| type 2 | | | | | | |
| sensitivity SNP type 2 | 0.849 | 0.884 | 0.872 | 0.863 | 0.879 | 0.934 |

[0190] The data in TABLE 2C show that in methods that included enrichment, compared to methods without enrichment, median coverage levels and N50 values were much greater despite a smaller number of input paired end reads.

### Example 9—Major Histocompatibility Complex Region (MHC) Panel

[0191] The MHC region is a large locus located on the short arm of human chromosome 6 (6p21.1-6p21.3), and contains highly polymorphic genes that code for cell surface proteins essential for the adaptive immune system. The region is challenging to obtain sequence information due to presence of high level of repetitive sequences, sequence homology, pseudogenes, and a wide variety of alleles in the population. Precise genotyping and phasing of the MHC region is challenging but highly clinically desirable for applications like organ transplantation and drug discovery.

[0192] Panels of selection probes were prepared which targeted approximately 5 Mbp of the MHC region. A first panel of selection probes was designed such that probes were spaced about 230 bp from one another on the HG38 reference sequence of the MHC region. Probe sequences were designed to hybridize within the target region using software tools, DESIGNSTUDIO (Illumina, Inc., San Diego). Potential probe sequences were evaluated by several criteria including number of hits within the genome, and percentage GC content. Probes having more than about 20 hits within the genome were discarded. A second panel of selection probes was prepared such that probes would be spaced about 1 kb from one another on a reference sequence of the MHC. The second panel was prepared by removing probes from the first panel. Probes included 80-mers and 120-mers. A batch of clinical probes was designed by a method including: targeting a 1 kb window in a reference sequence; identifying potential probes within the 1 kb using software tools, DESIGNSTUDIO (Illumina, Inc., San Diego); selecting a probe within the 1 kb based on criteria including less than 20 hits within the reference genome, and GC content. A hit included probes having at least 90% sequence identity along the full length of the probe with a target complement in the reference sequence. TABLE 3A lists probes generated by the foregoing methods.

TABLE 3A

| | Oligo characteristic | | |
|---|---|---|---|
| | | Approx spacing | |
| Batch | Size (bases) | in genome | No of probes |
| Clinical | 120 | 1 kb | 4966 |
| Final design | 120 | 1 kb | 5153 |
| Final design | 80 | 1 kb | 5155 |
| Input4_120_designs | 120 | 230 bp | 21608 |
| Input4_120_designs | 80 | 230 bp | 21608 |

[0193] The panels were used to prepare libraries with a method with long fragments and enrichment, and substantially similar to the WGS with enrichment workflow depicted in FIG. 32. Use of the MHC probe panel generated highly specific and efficient enrichment over the target region, with 98.3% long-reads on-target. FIG. 34 depicts an example of coverage for the targeted region. TABLE 3B lists certain sequencing metrics.

TABLE 3B

| Parameter | MHC panel |
|---|---|
| Read N50 | 5932 |
| Error Rate | 0.71% |
| Mean Coverage | 43.05 |
| % 0 Coverage | 1.06% |
| % Low Coverage (1-3×) | 0.64% |
| % On Target Reads | 98.3% |

[0194] Use of the MHC selection probe panel resolved haplotype in polymorphic genes. Phasing worked well with use of the MHC probe panel in methods with long fragments and enrichment (e.g. WGS with enrichment workflow depicted in FIG. 32), and was comparable to such methods without enrichment (e.g. WGS without workflow depicted in FIG. 32). TABLE 3C lists certain sequencing metrics. As depicted in FIG. 35, a 722 kb region in the MHC locus was analyzed, and a 580 kb region was encapsulated in one phase block. As depicted in FIG. 36, a 426 kb region in the MHC locus that covered HLA-A, HLA-G, HLA-F, was fully phased.

TABLE 3C

| Parameter | MHC panel |
|---|---|
| % Biallelic Het SNVs Phased | 95.88% |
| Block N50 | 274,215 |
| Switch Error Rate | 0.14% |

[0195] Use of the MHC selection probe panel achieved accurate variant calling in the MHC region. FIG. 37A depicts a graph for SNV precision vs SNV recall for sequence information obtained from nucleic acid libraries prepared by (1) on market long read kits; (2) short read (SR) PCR-free sequencing methods, such as those including simple tagmentation of gDNA; (3) method with long fragments and enrichment, such as the WGS with enrichment workflow depicted in FIG. 32 (ICLR-MHC enrichment); and (4) method with long fragments without enrichment, such as the WGS workflow depicted in FIG. 32 (ICLR-WGS). Use of the MHC panel with long fragment with enrichment methods achieved levels of SNV precision greater than methods without enrichment.

[0196] FIG. 37B depicts a graph for INDEL precision vs INDEL recall for sequence information obtained from nucleic acid libraries prepared by (1) on market long read kits; (2) PCR-free methods; (3) method with long fragments and enrichment, such as the WGS with enrichment workflow depicted in FIG. 32 (ICLR-MHC enrichment); and (4) method with long fragments without enrichment, such as the WGS workflow depicted in FIG. 32 (ICLR-WGS). Use of the MHC panel with long fragment with enrichment methods achieved levels of indel precision greater than methods without enrichment.

### Example 10—American College of Medical Genetics (ACMG) Panel

[0197] A selection probe panel was generated from a list of genes compiled by ACMG for which specific mutations are known to be causative of disorders that are clinically actionable. The panel was designed to precisely call variants and phase in these genes. The panel included 78 unique genes in ACMG SF v3.1, and targeted full genes. The panel size was about 6.8 Mbp. The ACMG genes included those listed in TABLE 1A.

[0198] Panels of selection probes were prepared which targeted the ACMG genes. A first panel of selection probes was designed such that probes were spaced about 230 bp from one another on the HG38 reference sequence of the ACMG genes. Probe sequences were designed to hybridize within the target region using software tools, DESIGNSTUDIO (Illumina, Inc., San Diego). Potential probe sequences were evaluated by several criteria including number of hits within the genome, and percentage GC content. Probes having more than about 20 hits within the genome were discarded. A second panel of selection probes was prepared such that probes would be spaced about 1 kb from one another on a reference sequence of the ACMG genes. The second panel was prepared by removing probes from the first panel. Probes included 80-mers and 120-mers. A batch of clinical probes was designed by a method including: targeting a 1 kb window in a reference sequence; identifying potential probes within the 1 kb using software tools, DESIGNSTUDIO (Illumina, Inc., San Diego); selecting a probe within the 1 kb based on criteria including less than 20 hits within the reference genome, and GC content. A hit included probes having at least 90% sequence identity along the full length of the probe with a target complement in the reference sequence. TABLE 4A lists probes generated by the foregoing methods.

TABLE 4A

| | Characteristic | | |
|---|---|---|---|
| | | Approx | |
| | | spacing in | No of |
| Batch | Size (bases) | genome | probes |
| Clinical 1 kb | 120 | 1 kb | 6935 |
| 120mer_1 kb_Optimized- | 120 | 1 kb | 7513 |
| Final | | | |
| 80mer_1 kb_Optimized- | 80 | 1 kb | 7520 |
| Final | | | |
| Clinical 230 bp | 120 | 230 bp | 29954 |
| ACMG_120mer_designs | 120 | 230 bp | 29954 |
| ACMG_80mer_designs | 80 | 230 bp | 29954 |

[0199] Use of the ACMG selection probe panel was highly effective and achieved comparable coverage performance with long read whole genome sequencing methods without the use of the panel (FIG. 38). TABLE 4B lists certain sequencing metrics.

TABLE 4B

| Parameter | ACMG panel |
|---|---|
| Read N50 | 7497 |
| Error Rate | 0.26% |
| Mean Coverage | 59.47 |
| % 0 Coverage | 0.04% |
| % Low Coverage (1-3×) | 0.22% |
| % On Target Reads | 87.4% |

[0200] 99.5% of heterozygous SNVs were phased using the ACMG panel. For example, as depicted in FIG. 39, TNNT2, a 22 kb gene was fully phased in one phase block. TABLE 4C lists certain sequencing metrics. Phasing metrics were in target genes only, hence a shorter block N50.

TABLE 4C

| Parameter | ACMG panel |
|---|---|
| % Biallelic Het SNVs Phased | 99.5% |
| Block N50 | 85841 |
| Switch Error Rate | 0.17% |

[0201] 99% of heterozygous SNVs were phased using the ACMG panel. For example, as depicted in FIG. 40A for APOB and in FIG. 40B for TMEM127, genes were fully phased in one phase block.

[0202] Use of the ACMG panel covered and phased highly repetitive MSH6 (70.76% contains repeat elements), and enrichment achieved comparable coverage and phasing compared to long read whole genome sequencing methods without the use of the panel (FIG. 41). 27 kb was fully encapsulated in one phase block. Use of the ACMG panel covered and phased highly repetitive NF2 (45% contains repeat elements), and enrichment achieved comparable coverage and phasing compared to long read whole genome sequencing methods without the use of the panel. 99 kb was fully encapsulated in one phase block.

[0203] Use of the ACMG selection probe panel achieved highly accurate variant calling in the ACMG. FIG. 42A depicts a graph for SNV precision vs SNV recall for sequence information obtained from nucleic acid libraries prepared by (1) on market long read kits; (2) PCR-free methods; (3) method with long fragments and enrichment, such as the WGS with enrichment workflow depicted in FIG. 32 (ICLR-ACMG enrichment); and (4) method with long fragments without enrichment, such as the WGS workflow depicted in FIG. 32 (ICLR-WGS). Use of the ACMG panel with long fragment with enrichment methods achieved levels of SNV precision greater than methods without enrichment. FIG. 42B depicts a graph for INDEL precision vs INDEL recall for sequence information obtained from nucleic acid libraries prepared by (1) on market long read kits; (2) PCR-free methods; (3) method with long fragments and enrichment, such as the WGS with enrichment workflow depicted in FIG. 32 (ICLR-ACMG enrichment); and (4) method with long fragments without enrichment, such as the WGS workflow depicted in FIG. 32 (ICLR-WGS). Use of the ACMG panel with long fragment with enrichment methods achieved levels of indel precision and indel recall greater than methods without enrichment.

### Example 11—Pharmacogenetic (PGX) Panel

[0204] A selection probe panel was generated for genes commonly targeted by pharmacogenetic testing assays. Genetic variation is known to influence the way individual respond to therapeutics. Accurately detecting functional haplotypes (“star alleles”) in clinically actionable pharmacogenetic genes is crucial to implementation of personalized medicine. The panel was generated to achieve highly accurate genotyping and star allele calling in such genes. The panel included 98 genes that are important in pharmacogenetics, targeting full genes. The panel size was about 8.1 Mbp. The genes included those listed in TABLE 1B.

[0205] Panels of selection probes were prepared which targeted the PGX genes. A first panel of selection probes was designed such that probes were spaced about 230 bp from one another on the HG38 reference sequence of the PGX genes. Probe sequences were designed to hybridize within the target region using software tools, DESIGNSTUDIO (Illumina, Inc., San Diego). Potential probe sequences were evaluated by several criteria including number of hits within the genome, and percentage GC content. Probes having more than about 20 hits within the genome were discarded. A second panel of selection probes was prepared such that probes would be spaced about 1 kb from one another on a reference sequence of the PGX genes. The second panel was prepared by removing probes from the first panel. Probes included 80-mers and 120-mers. A batch of clinical probes was designed by a method including: targeting a 1 kb window in a reference sequence; identifying potential probes within the 1 kb using software tools, DESIGNSTUDIO (Illumina, Inc., San Diego); selecting a probe within the 1 kb based on criteria including less than 20 hits within the reference genome, and GC content. A hit included probes having at least 90% sequence identity along the full length of the probe with a target complement in the reference sequence. TABLE 5A lists probes generated by the foregoing methods.

TABLE 5A

| | Characteristic | | |
|---|---|---|---|
| | | Approx spacing | No of |
| Batch | Size (bases) | in genome | probes |
| Clinical 1 kb | 120 | 1 kb | 8153 |
| PGX_80mer_1 kb | 80 | 1 kb | 8693 |
| PGX_80mer_230 bp | 80 | 230 bp | 35205 |
| PGX_80mer_230 bp_v1 | 80 | 230 bp | 33089 |

[0206] TABLE 5B lists certain sequencing metrics for methods with long fragments and enrichment with the PGX panel, and shows highly effective target region coverage.

TABLE 5B

| Parameter | PGx panel |
|---|---|
| Read N50 | 7279 |
| Mean Coverage | 57.17 |
| % 0 Coverage | 0.12% |
| % Low Coverage (1-3×) | 0.32% |
| % On Target Reads | 88.3% |

[0207] Star Alleles are a nomenclature system used to describe allelic variation. In the case of PGX genes, star alleles describe haplotype patterns associated with protein-level interactions, with * 1 usually referring to the wild-type or “fully-functional” haplotype. TABLE 5C lists star alleles called by methods which include long fragments, and enrichment (ICLR PGX enrichment) which were 100% concordant with on market long read methods.

TABLE SC

| Gene | ICLR PGx Enrichment | On-market Long Reads |
|---|---|---|
| CYP2C19 | *1.002, *1.002 | *1.002, *1.002 |
| CYP2C8 | *1.001, *1.004 | *1.001, *1.004 |
| CYP2C9 | *1.001, *1.001 | *1.001, *1.001 |
| CYP2E1 | *1.002, *7.002 | |
| CYP2J2 | *1.001, *1.001 | *1.001, *1.001 |
| CYP3A4 | *1.002, *1.002 | *1.002, *1.002 |
| CYP3A5 | *3.001, *3.001 | *3.001, *3.001 |
| CYP3A7 | *1.001, *1.001 | *1.001, *1.001 |
| CYP4F2 | *1.001, *4.1001 or | *1.001, *4.1001 or |
| | *2.001, *3.001 | *2.001, *3.001 |
| NUDT15 | *1.001, *1.001 | *1.001, *1.001 |
| SLCO1B1 | *1.002, *1.002 | *1.002, *1.002 |
| TPMT | *1.001, *1.001 | *1.001, *1.001 |
| UGT1A1 | *1, *1 | *1, *1 |

[0208] Use of the PGX selection probe panel achieved highly accurate variant calling in the PGX genes. FIG. 43A depicts a graph for SNV precision vs SNV recall for sequence information obtained from nucleic acid libraries prepared by (1) on market long read kits; (2) PCR-free methods; (3) method with long fragments and enrichment, such as the WGS with enrichment workflow depicted in FIG. 32 (ICLR-PGX enrichment); and (4) method with long fragments without enrichment, such as the WGS workflow depicted in FIG. 32 (ICLR-WGS). Use of the PGX panel with long fragment with enrichment methods achieved levels of SNV precision and indel recall greater than methods without enrichment. FIG. 43B depicts a graph for INDEL precision vs INDEL recall for sequence information obtained from nucleic acid libraries prepared by (1) on market long read kits; (2) PCR-free methods; (3) method with long fragments and enrichment, such as the WGS with enrichment workflow depicted in FIG. 32 (ICLR-PGX enrichment); and (4) method with long fragments without enrichment, such as the WGS workflow depicted in FIG. 32 (ICLR-WGS). Use of the PGX panel with long fragment with enrichment methods achieved levels of indel precision and indel recall greater than methods without enrichment.

### Example 12—Challenging Medically Relevant Genes (CMRG) Panel

[0209] A selection probe panel was generated for genes that are medically relevant autosomal genes that are excluded from the GiaB v4.2.1 variant benchmark due to repeats or polymorphic complexities (Wagner J., et al., (2022) Nat Biotechnol. 40:672-680). These genes have <90% bases included in the benchmark and pose a challenge for their accurate analysis in a clinical setting. The selection probe panel was generated to rescue coverage gap in these genes. The panel targeted 389 genes, with a panel size of 22.5 Mbp. The average overlap with repeat: 36.6%, and the average overlap with segdup was 19.7%. The genes include those listed in TABLE 1C.

[0210] Panels of selection probes were prepared which targeted the CMRG genes. A first panel of selection probes was designed such that probes were spaced about 230 bp from one another on the HG38 reference sequence of the CMRG genes. Probe sequences were designed to hybridize within the target region using software tools, DESIGNSTUDIO (Illumina, Inc., San Diego). Potential probe sequences were evaluated by several criteria including number of hits within the genome, and percentage GC content. Probes having more than about 20 hits within the genome were discarded. A second panel of selection probes was prepared such that probes would be spaced about 1 kb from one another on a reference sequence of the CMRG genes. The second panel was prepared by removing probes from the first panel. Probes included 80-mers and 120-mers. A batch of clinical probes was designed by a method including: targeting a 1 kb window in a reference sequence; identifying potential probes within the 1 kb using software tools, DESIGNSTUDIO (Illumina, Inc., San Diego); selecting a probe within the 1 kb based on criteria including less than 20 hits within the reference genome, and GC content. A hit included probes having at least 90% sequence identity along the full length of the probe with a target complement in the reference sequence. TABLE 6A lists probes generated by the foregoing methods.

TABLE 6A

| | Characteristic | | |
|---|---|---|---|
| | | Approx spacing | No of |
| Batch | Size (bases) | in genome | probes |
| Clinical | 120 | 1 kb | 22545 |
| CMG_80mer_1 kb | 80 | 1 kb | 21333 |
| CMG_80mer_230 bp | 80 | 230 bp | 96721 |

[0211] Methods using long fragments with enrichment with either the first selection panel (230 bp spacing), or the second selection panel were compared. As depicted in FIG. 44A, use of the second selection probe panel (SYD-C2-CMRG-1 kb) compared to use of the first selection probe panel (SYD-C2-CMRG-230 bp), resulted in increased identification in sequence data for (i) total mutations in bases in region; (ii) percentage DUP mutant reads; and (iii) percentage on target unique mapped reads. FIG. 44B compares normalized coverage between use of the first selection probe panel (SYD-C2-CMRG-230 bp) and the second selection probe panel (SYD-C2-CMRG-1 kb).

[0212] Coverage of certain genes, including CFC1, HBG1, OR51A2, RGPD3, and CYP4F3 was compared using methods with long fragment and enrichment (ICLR with enrichment), methods with long fragments without enrichment (ICLR WGS), and PCR free short reads (SR). FIG. 44C depicts an example with respect to HBG1 and shows that enrichment with the CMRG panel rescued a SR coverage dip in the gene. With regard to other genes, for CFC1, enrichment with the CMRG panel increased coverage in the gene. For HBG1, enrichment with the CMRG panel rescued a SR coverage dip in the gene. For OR51A2, enrichment with the CMRG panel rescued a SR coverage gap in the gene. For the RGPD3 gene, enrichment with the CMRG panel rescued an SR coverage dip in the gene. For the CYP4F3 gene, enrichment with the CMRG panel resolved SVs missed by SR in the gene.

[0213] TABLE 6B lists certain metrics which shows that methods with long fragments and enrichment with the CMRG panel achieved highly effective target region coverage.

TABLE 6B

| Parameter | CMRG panel |
|---|---|
| Read N50 | 6432 |
| Mean Coverage | 47.68 |
| % 0 Coverage | 2.74% |
| % Low Coverage (1-3×) | 0.92% |
| % On Target Reads | 80.5% |

[0214] Use of the CMRG selection probe panel achieved highly accurate variant calling in the CMRG genes. FIG. 45A depicts a graph for SNV precision vs SNV recall for sequence information obtained from nucleic acid libraries prepared by (1) on market long read kits; (2) PCR-free methods; (3) method with long fragments and enrichment, such as the WGS with enrichment workflow depicted in FIG. 32 (ICLR-CMRG enrichment); and (4) method with long fragments without enrichment, such as the WGS workflow depicted in FIG. 32 (ICLR-WGS). FIG. 45B depicts a graph for INDEL precision vs INDEL recall for sequence information obtained from nucleic acid libraries prepared by (1) on market long read kits; (2) PCR-free methods; (3) method with long fragments and enrichment, such as the WGS with enrichment workflow depicted in FIG. 32 (ICLR-CMRG enrichment); and (4) method with long fragments without enrichment, such as the WGS workflow depicted in FIG. 32 (ICLR-WGS).

[0215] The term “comprising” as used herein is synonymous with “including,” “containing,” or “characterized by,” and is inclusive or open-ended and does not exclude additional, unrecited elements or method steps.

[0216] The above description discloses several methods and materials of the present invention. This invention is susceptible to modifications in the methods and materials, as well as alterations in the fabrication methods and equipment. Such modifications will become apparent to those skilled in the art from a consideration of this disclosure or practice of the invention disclosed herein. Consequently, it is not intended that this invention be limited to the specific embodiments disclosed herein, but that it cover all modifications and alternatives coming within the true scope and spirit of the invention.

[0217] All references cited herein, including but not limited to published and unpublished applications, patents, and literature references, are incorporated herein by reference in their entirety and are hereby made a part of this specification. To the extent publications and patents or patent applications incorporated by reference contradict the disclosure contained in the specification, the specification is intended to supersede and/or take precedence over any such contradictory material.

The application's sequence listing, which the Patent Office published only in electronic form, follows.

SEQUENCE LISTING (122770 sequences)

SEQ ID NO: 1 - DNA, 15 bp, synthetic construct
  source 1..15: mol_type = other DNA
gtctcgtgggctcgg

SEQ ID NO: 2 - DNA, 120 bp, synthetic construct
  source 1..120: mol_type = other DNA
tatttcccagtgccccccccaaaaaaaattgctcctaggtggacacactaatcaaagacttcctgagaaatgcaggaagaagttttgtcctctgaccacgctacgccctttccttgatgg

SEQ ID NO: 3 - DNA, 120 bp, synthetic construct
  source 1..120: mol_type = other DNA
ttttctctttttctgcggcttcttctcagcaacttctcaatgaggagaatttacggaagcaggaggagtccgtgcagaagcaggaagccatgcggcgaggtaggctgtctgctctcctgg

SEQ ID NO: 4 - DNA, 120 bp, synthetic construct
  source 1..120: mol_type = other DNA
tgtccctaccaaggtctgtgtgtgtctgtggcacgggcctgtccatggactgggcttgtccgtggagtgggtcggtccatggccttagcctgttggtggcgtgggccggtccacggcatg

SEQ ID NO: 5 - DNA, 120 bp, synthetic construct
  source 1..120: mol_type = other DNA
ctggtcctgggcttcccagctcctcggccctgctgggcactcaggacgcccttggtcagcactgtgcctcgctgaggaatgcgggccccaccggcacagcctggagcggccaacgaatca

SEQ ID NO: 6 - DNA, 120 bp, synthetic construct
  source 1..120: mol_type = other DNA
tggtcttcctctcgctgtcgctgatgtcctgtaagtcggacagcaggtccctttcttccattttctcttcttttacttatgagataaaccataaaggtgaatttggggaaatgtttttaa

SEQ ID NO: 7 - DNA, 120 bp, synthetic construct
  source 1..120: mol_type = other DNA
tgggtatggtgcttcccccaactcccagggccccactccaaacccatggattcagagcattgcaggagaagaggataaaacgagcaattaattccctttccatatgtcaggttttcctct

SEQ ID NO: 8 - DNA, 120 bp, synthetic construct
  source 1..120: mol_type = other DNA
cttcccctgcctttgtggggtgaggggaccccacccacctgttttcttgtcttttgctctgtagaccactccataggtgccctcctcgatcctgttcaggcactggaactcctcgacgct

SEQ ID NO: 9 - DNA, 120 bp, synthetic construct
  source 1..120: mol_type = other DNA
aaactttccttcaaagatgagggagaaatgaggatattctcagataaacaaaagcagagggagttcattactactagacctagacctgccttgaagaataagctccagggagttgtgtgg

SEQ ID NO: 10 - DNA, 120 bp, synthetic construct
  source 1..120: mol_type = other DNA
aaagaaaaataattcagcctacatcaggacacagcaagctatggtgctgaacacttgaacctagtcacttttgagggattcagaataaatcctcattaagaataagaagttgtgcccggc

SEQ ID NO: 11 - DNA, 120 bp, synthetic construct
  source 1..120: mol_type = other DNA
caaccagaataacaacacctacgtgatagtatcgatcgcggattaaagatcatccgtttaaaggctcttaactcaggacctgccactcatcaaacactgcttttactgtcagaatctgct

SEQ ID NO: 12 - DNA, 120 bp, synthetic construct
  source 1..120: mol_type = other DNA
agcctggaacagctctcacaaccccaggtgagcatctgacagcccggaacagcacgctgcacccccaagtgagcacctgacagcctggagcagcaaccacacccccaggtgagcatccaa

SEQ ID NO: 13 - DNA, 120 bp, synthetic construct
  source 1..120: mol_type = other DNA
accctgcacccccaggtgagcatccgacagcctggagcagcaaccacactcccaggcgagcatccgatgacctggagcagcacccacaaccccaagtgagcatctgattgtctggagcag

SEQ ID NO: 14 - DNA, 120 bp, synthetic construct
  source 1..120: mol_type = other DNA
ccgaacggagcagcacccacaatcccaggcgagcatctgacagcctttaacagcacccacaaccccaggtgagcatctgacagcccgcagcagcacccacacgcacaggtgagaatctga

SEQ ID NO: 15 - DNA, 120 bp, synthetic construct
  source 1..120: mol_type = other DNA
ccgaggtgagcatctgacaacagggagcagcacccatagcccatggtgagcacctgacaacctggagcagcacccacacacccaggtgagcatctgatggtctggagcagcacccacaac

SEQ ID NO: 16 - DNA, 120 bp, synthetic construct
  source 1..120: mol_type = other DNA
catggagcagcacccatagcccaaggtgagcatctgacaacctgaagcagcacccacacaccgaggtgagcatctgacctcccggagcagcaccagtacccccaggcgagcatctgaact

SEQ ID NO: 17 - DNA, 120 bp, synthetic construct
  source 1..120: mol_type = other DNA
atggagcagcacccacacccccaggggagcatctgacatcctggagcaacactgacaaccccaggtgagcatctgagaggctggaacagcacccacacccccaggtgagaatctgacagc

SEQ ID NO: 18 - DNA, 120 bp, synthetic construct
  source 1..120: mol_type = other DNA
tcccggcgagcatctgacggcctggaacagcacacacaccgccaggtgaccattggacaccctggagcagcacccacaaccacaggtgagcatctgacatcgtggagcagcaccccaaac

SEQ ID NO: 19 - DNA, 120 bp, synthetic construct
  source 1..120: mol_type = other DNA
gcctggagcaggcgcccacaatcccaggttagcatctgacagcctggagcagcacccacacccccagttgagtagctgacatcctggagctgcacccatacccccaggtgagatctgaca

SEQ ID NO: 20 - DNA, 120 bp, synthetic construct
  source 1..120: mol_type = other DNA
tgacagcctggagcagtacccacacacccaggtgagcatctgacagcgtggagcagcacccaaacccccaggcgagcatctgaacgcacggagcagcacccacaccttcaggcgagcatc

SEQ ID NO: 21 - DNA, 120 bp, synthetic construct
  source 1..120: mol_type = other DNA
gacaacattaaaacagcaccctgcacccccaggtgagcatctgacagcctgaaacagcacccttcaccttcaggtgagaatatgacagcctgaaacagcaccccacaacccaggcaaaaa

SEQ ID NO: 22 - DNA, 120 bp, synthetic construct
  source 1..120: mol_type = other DNA
gtacccacacccccaggtgtgcatctgacagcctgaaacagcaccctccaccaccagatgagcatctgacaaccagaacctgcaccacacaccccaaggtgggcatccgatggcatggga

SEQ ID NO: 23 - DNA, 120 bp, synthetic construct
  source 1..120: mol_type = other DNA
agcatggcagcctctctatagcatctcccctgactgatccctctgactctattgggagggttgcatgatacccatttcaggacagggccgccaacaggacaatgcatggacattctagtg

SEQ ID NO: 24 - DNA, 120 bp, synthetic construct
  source 1..120: mol_type = other DNA
catcatcctcattttacaggaagctgaggctctaggctaacatccctgacagcaacaccagcccctgagtacacagcaggatccttcacttgggtgcccattatgcagaattcctcagca

SEQ ID NO: 25 - DNA, 120 bp, synthetic construct
  source 1..120: mol_type = other DNA
catccctgggccacaggagcccagtggagattcaggcataaaggacaaacccagacaggatcctgcaacatcagctacggtgggcgggctgcaggcgtccctgacatgcctgtatcatca

SEQ ID NO: 26 - DNA, 120 bp, synthetic construct
  source 1..120: mol_type = other DNA
aaccatccttgcaggggtaagtcctgcatcactctagaacttcaggttccatttctaagtctaggacacaggtccctgaaggcctcattgatgccaagtcagcatttttacccagtcctg

SEQ ID NO: 27 - DNA, 120 bp, synthetic construct
  source 1..120: mol_type = other DNA
gtcaagactctccagaggggcaggatacaactccaggcctaacttgctcagcccacgtgtgtgacgcagcaggtctttcagagcattcatggaggtctcatttccatgaaagttgaaggt

SEQ ID NO: 28 - DNA, 120 bp, synthetic construct
  source 1..120: mol_type = other DNA
acatccctgggccacaggagcccagtggagattcaggcataaaggacaaacccagacaggatcctgcaacatcagctacggtgggcgggctgcaggcgtccctgacaagcctgtatcatc

SEQ ID NO: 29 - DNA, 120 bp, synthetic construct
  source 1..120: mol_type = other DNA
acccagttaatcctgattggatttttggctttcttccagatttactgatggaattagatattcacccatcaaagtgaaagatttagggatggggtggaagcccaggactcattcactgat

SEQ ID NO: 30 - DNA, 120 bp, synthetic construct
  source 1..120: mol_type = other DNA
ggaatcatgatgaaattgtggcagagagtagaagttgagccccattgcatgccctgagttcttgttgcctctctattatcaggaaaaggaggtgagattgaaagatgaaaagtgctggga

SEQ ID NO: 31 - DNA, 120 bp, synthetic construct
  source 1..120: mol_type = other DNA
ccctcatgtattctcaagcctgaactccactctagacattcagattcccattttcgactctacaggatacaggtccccaaagtcccatcgaatccatggcaacatttcccccaagtcctg

SEQ ID NO: 32 - DNA, 120 bp, synthetic construct
  source 1..120: mol_type = other DNA
acccatagaaggaggtaggtgaggtattcatccagagtcctgttcttgagccaaagttctacgaacacagtcaagggctgctgtcctctcatccttggacagtcctgcactggtgttttg

SEQ ID NO: 33 - DNA, 120 bp, synthetic construct
  source 1..120: mol_type = other DNA
cccacgcccttccacgtgtgcactgctagcttccaatcaaaaagccatatctgattgcatttctgaagctccacccagttaatcctgattgggtttttggctctccccagattaatggat

SEQ ID NO: 34 - DNA, 120 bp, synthetic construct
  source 1..120: mol_type = other DNA
agttagaagtatgtgtgttacaccccatgtcagtgtgctgtgtggggcagttcaacaaaaatctaacaatgtatttttgtgaatgagagttggcatgtcaaatgcatcctcagaaaaata

SEQ ID NO: 35 - DNA, 120 bp, synthetic construct
  source 1..120: mol_type = other DNA
cctaggtcccataagctgttggacatcatcatcctcattttacaggaagctgaggctcttggctaacatccctgacagcaacaccagcccctgagtactcagcaggatccttcacttgga

SEQ ID NO: 36 - DNA, 120 bp, synthetic construct
  source 1..120: mol_type = other DNA
gctgggattacaggcatgcaccccacacccatgtctccattcaggtggaagaattaccgagaggatgtgattggtttaaaattaaggtcgaagatccttttttgttaagattttgttttt

SEQ ID NO: 37 - DNA, 120 bp, synthetic construct
  source 1..120: mol_type = other DNA
ctacaaaatcagaataaaaatctcaatttatcgaatggtcttggggattttatataacctaaggtagcagattatatgctcgttctggtggaggagaggtgccactgagggcgtgagtgg

SEQ ID NO: 38 - DNA, 120 bp, synthetic construct
  source 1..120: mol_type = other DNA
ggacctcacaattaattgtccagtcccagacactttggagagaatagacatgctgttataataattattattatttttggagatagtgtctggctctgtggccaggctggagtgcaatgg

SEQ ID NO: 39 - DNA, 120 bp, synthetic construct
  source 1..120: mol_type = other DNA
aaaatcaaagcttcaaagtgttcatatgaaaaaaagaaaaaaaagacaggatatagctctgctctgtcgtaggctgcactgtcaccatgctacatcggctgactgtaggtcccatgggag

SEQ ID NO: 40 - DNA, 120 bp, synthetic construct
  source 1..120: mol_type = other DNA
accttcatagccctgggtgtgaggcagggaaggggttgatctgttctggacattagacagaaaaataaaacctgagaatagtgttgttgggagatctttggccacatcaatattttaaaa

SEQ ID NO: 41 - DNA, 120 bp, synthetic construct
  source 1..120: mol_type = other DNA
tttactcagagacaggatgtaagccaagcgaaagaccttccataggtggtgaatttggaagcctgcccaatgtgacctgcaagtcttgcttcactcccaggttcccattaaaaacccagc

SEQ ID NO: 42 - DNA, 120 bp, synthetic construct
  source 1..120: mol_type = other DNA
gattaactgggtagagattaagaagtctagtcaaatgtagctctctctgtctctcagttcaatctagcctattccccaggctggagtggagtagtataatgtcagctcactgcaacttct

SEQ ID NO: 43 - DNA, 120 bp, synthetic construct
  source 1..120: mol_type = other DNA
cagctttgtgccccatagtttggtgaacatgaatgatcccatctctaattccctgttgtaaaagtgttttgagctccaggtaaattaattacctaagcaatgcatgattctgaaacagag

SEQ ID NO: 44 - DNA, 120 bp, synthetic construct
  source 1..120: mol_type = other DNA
aaaggtcctcacaataactaactgtgtgcttttggaatcagacttgaagcatctatcccagtgcccgagtatcagtcaactaaagaccctggacctgagtggcatcagactgaccaatta

SEQ ID NO: 45 - DNA, 120 bp, synthetic construct
  source 1..120: mol_type = other DNA
agaatgttccaggtcccaggcatgcatcttttgtggatgaacccagtaaataaccacaggagaaagtaaggaagagatgactggagaggtaaagaatgggcataaattaatcaaagttta

SEQ ID NO: 46 - DNA, 120 bp, synthetic construct
  source 1..120: mol_type = other DNA
gagtctcagtgactccattcaactttttccccagtgctgccccctgctgggattttttgttttttgttttccactcacagaaagcacatgcctgaaacagaggtttctctgttcccttta

SEQ ID NO: 47 - DNA, 120 bp, synthetic construct
  source 1..120: mol_type = other DNA
aatacttgcagagtttgaggcactcatgaactcaccatgagattctttactcagggacaggatgtaagccaagcaaaagaccttccacaggtggtgaatttggaagcctgcccaatgtaa

SEQ ID NO: 48 - DNA, 120 bp, synthetic construct
  source 1..120: mol_type = other DNA
agcaggggcaggacttgggggaagtgttgccatggattcgatgggactttggggacctgtgtcctgtagagtggaaaatgggaatttgaatgtctagagtggaggcttgagaatacttga

SEQ ID NO: 49 - DNA, 120 bp, synthetic construct
  source 1..120: mol_type = other DNA
gaaaccaagggtctggaacattactgggcaagaacagtgagccaatccacgtggaaagcaccttcttctcagggtctttcactgctagccagatgctgagaccctgcccactccttgtga

SEQ ID NO: 50 - DNA, 120 bp, synthetic construct
  source 1..120: mol_type = other DNA
caactttcatggaaatgagacctccatgaatgctctgaaagacctgctgcgtcacacacgtgggctgagcaagttaggcctggagttgtatcctgcccctctggagagtcttgactacaa

SEQ ID NO: 51 - DNA, 120 bp, synthetic construct
  source 1..120: mol_type = other DNA
agtttgaagcactcatgaactcacgatcagactctttactcagggacaagatgtaagccaagcgaaagaccttccacaggtggtgaatttggaagcctgcccaatgtgacctgcaagttt

SEQ ID NO: 52 - DNA, 120 bp, synthetic construct
  source 1..120: mol_type = other DNA
cttactgtgggaatatgactcccatctggaagaccaggtggagacttgttcccatcaaagtaagaaacctattgtccacgtcaagggcgaagctgatgtgctgttcctcaaatgagtaaa

SEQ ID NO: 53 - DNA, 120 bp, synthetic construct
  source 1..120: mol_type = other DNA
ttaagcagttcttccttgcacacagaaacattcctctgtccaatcctaacacaggtacatcagtctggtcagtgtgagaacaggagactttgagagaaatattccagcaggcctgaggtc

SEQ ID NO: 54 - DNA, 120 bp, synthetic construct
  source 1..120: mol_type = other DNA
acatcacacggcgaggggcttcatctcattttggaaagcagttttaagtgttcccacatttgaatgcttcagacccttgcaagagacaatttgccatggagagagagaaactcaggaaag

SEQ ID NO: 55 - DNA, 120 bp, synthetic construct
  source 1..120: mol_type = other DNA
aaggctgggccctgagatttttaccccatgagtggccaatgtttctgtgtagcacaaaagattgcattttcctttttcgatatttttctcttttggttttttgttttttgtttgagacgg

SEQ ID NO: 56 - DNA, 120 bp, synthetic construct
  source 1..120: mol_type = other DNA
agtcatcctcccacttgggccttccaaagtgctgtgattatatgtgtgagtcacagaacctagctccatcctagtttctgactaaaagaataacaatatgtgtatatacagcctgtcctc

SEQ ID NO: 57 - DNA, 120 bp, synthetic construct
  source 1..120: mol_type = other DNA
tggaatatggtaaaagacactgaaatgtatgcttaaaaatggtgaattttgtgatgtataaattctactgtagaaataataataacaacaaaagtaataaagcaaggtgtctttccacat

SEQ ID NO: 58 - DNA, 120 bp, synthetic construct
  source 1..120: mol_type = other DNA
gccaaaacacaacagcagaacaagaatattttcaatgcagtctctgaagcagaggagaaacttttgagggaacctagaagtaaaggacatctggcttgctgggctccatttaaactttga

SEQ ID NO: 59 - DNA, 120 bp, synthetic construct
  source 1..120: mol_type = other DNA
ttttccagaccatagcaagccactagaaccaaggcccagctggcagtgctgatcgatcccacatcctgaataaagaataaagatctctcagaaaattccaagttgaatctttctttcttt

SEQ ID NO: 60 - DNA, 120 bp, synthetic construct
  source 1..120: mol_type = other DNA
cacttcttatcacccctgaacaccttagagcccatcagcttatcaaaccagcagctgatgtgagtgcagagcagactgtgagaggtggaggctgataccagtgaggatgctccaagctgg

SEQ ID NO: 61 - DNA, 120 bp, synthetic construct
  source 1..120: mol_type = other DNA
atgcagcaagaaggccctcaccagatggtggcaccatgcttttggacttcccagcctctagaactgtgagctaaatcaatttattttctttataatcacccagtttgatattttgtcata

SEQ ID NO: 62 - DNA, 120 bp, synthetic construct
  source 1..120: mol_type = other DNA
caagggcacccatctcatcctccgaaggtttatgaaaatgcactcatcatttgctaattcattccactacgtgtattacctaatttgtgacacgatgtgaagtaccagagagataattct

SEQ ID NO: 63 - DNA, 120 bp, synthetic construct
  source 1..120: mol_type = other DNA
ttttcctactttaaaagctggctctccttgtgttgttgaacaagcgtttgttgggcccttactgtgtctctagaacatttatttgaaatcagaagtaggggtgataccactgtgacaaga

SEQ ID NO: 64 - DNA, 120 bp, synthetic construct
  source 1..120: mol_type = other DNA
agtgtgagccactgcacctgacctatccagcaaatatttattgcaactcaagtgactgagctggagatttctcctgtttgtgctgtccttggttgattagcatagtacttggtatagaat

SEQ ID NO: 65 - DNA, 120 bp, synthetic construct
  source 1..120: mol_type = other DNA
aaattatatacttttgtgataccctaacttgtattaacttgattgactctctcttagctaagaaagccggagggattccattcggctccttcatttgcaagacgttaagggctccttacc

SEQ ID NO: 66 - DNA, 120 bp, synthetic construct
  source 1..120: mol_type = other DNA
accatacccagcctaaatatgtacaattgattgtatgccagttacacctcaaaaagctatttgaagaggaagaagaagagaaaggagaggaaggagaaggaaaagaaggggcagggtctc

SEQ ID NO: 67 - DNA, 120 bp, synthetic construct
  source 1..120: mol_type = other DNA
tggggcaaattgatagcatgtcttctgatatgatatactaagaagggcacacacggctcttggagaattcctaccaaaaatgcatacccacaatctaatcatgaggaacagcagacaaac

SEQ ID NO: 68 - DNA, 120 bp, synthetic construct
  source 1..120: mol_type = other DNA
ttgaacaagtgttcggtcacttgttcaatcctcacaacagccctaggaagtagccttattcttatccccattctatagatagggaaactgaggcacagagaggtcaacgaaggggcccaa

SEQ ID NO: 69 - DNA, 120 bp, synthetic construct
  source 1..120: mol_type = other DNA
tcagtatcaggaaatttcacccatgcacggagtgaagaggctccattgcactcccatctttatcatgaaagccgggaaataacctacatgtctatgatgagccaatatcaagtcaattac

SEQ ID NO: 70 - DNA, 120 bp, synthetic construct
  source 1..120: mol_type = other DNA
gtcactggcagtaggactctgggtctcctgtgaagtaggagctgcagggtcactgtaaggacccaatgaggtgatccatgggaaaaatcttccaacttgtaaaacacttcacaaatgtta

SEQ ID NO: 71 - DNA, 120 bp, synthetic construct
  source 1..120: mol_type = other DNA
atcccagagaggagggcctaagtgtctggtgtgaatgatgcaggaacaattcaaatgaagctgagaaaactcatctagtcccttggttagggttctagaactcctcctgtcctaggctgt

SEQ ID NO: 72 - DNA, 120 bp, synthetic construct
  source 1..120: mol_type = other DNA
atgtcttccaatcacaaactcacatctttgctcgcctatttctcactgcagtagtaaaatgtcccttcaggtgtactctgggttgagtgattttctccctcgtcagtttttatctccatt

SEQ ID NO: 73 - DNA, 120 bp, synthetic construct
  source 1..120: mol_type = other DNA
ccagtggaggttgtcatctgctctccacagaggttctggttaccagtggaggtcatcatctgcccccagtagagggtctggttaccagtggaggtcatcatctgccccccgtagagggcc

SEQ ID NO: 74 - DNA, 120 bp, synthetic construct
  source 1..120: mol_type = other DNA
gaggtcatcacttgctctccacagaggttctggttaccagtggaggtcatcatctgcccccagtagagggtctggttaccagtggaggtcatcatctgccccccatagaggttctggtta

SEQ ID NO: 75 - DNA, 120 bp, synthetic construct
  source 1..120: mol_type = other DNA
atagtaagttgtaaaataaacaaacacttttttccatttacttatcatgtggtgccaattctcacttatcatatggtgccaattctcagatatgagtcatgagacatgtttcttaatgtt

SEQ ID NO: 76 - DNA, 120 bp, synthetic construct
  source 1..120: mol_type = other DNA
cccttcttggtaataagttatatcacctagtgtttgcacacactcatacacacatcaccttttctgcccatgcacacagttttagagatcccttttcagtgtattaccatcatcttgcct

SEQ ID NO: 77 - DNA, 120 bp, synthetic construct
  source 1..120: mol_type = other DNA
ttctcaccgtctaaaagcatcagcaatcataacggagctgtgggtatttctaagccaatcaacaaacagccataaatatacttggaatatacagagacattatcctacttcacttttaat

SEQ ID NO: 78 - DNA, 120 bp, synthetic construct
  source 1..120: mol_type = other DNA
ctgtcttagtccatttgtgctgctataaaaaatggtacagactgggtaatttctaaacaacagaatgtttttgtctcagttctggaggctgtgaagtccaagatcaaagtgctggcaggt

SEQ ID NO: 79 - DNA, 120 bp, synthetic construct
  source 1..120: mol_type = other DNA
taaaacctcagtatttttataattccatattgaagtgaatgattaaccaacacagggaggaagctagtgtggggcaccattctgccctggagcacccaccatgctgatacatttaggatg

SEQ ID NO: 80 - DNA, 120 bp, synthetic construct
  source 1..120: mol_type = other DNA
aggaaatactaaagtgggtgactttggtagaagtctttggtgataatgtgggatagagaaggctttaaacatgaccttttgtaagtgtagtattcacaaattcaaaatgaaattcatgga

SEQ ID NO: 81 - DNA, 120 bp, synthetic construct
  source 1..120: mol_type = other DNA
tctcctaatcctgtcagcatttggtgatatcagtgttctgcattttggctgtttggtctcctctgaatgtttgtgtctacgcccccatttcattcaattcgtatgttgaaaactaaccac

SEQ ID NO: 82 - DNA, 120 bp, synthetic construct
  source 1..120: mol_type = other DNA
taacctggctttaaaagattatatgcaaacatcagtcaaatccagtatattcatcttgtacgcagacagaaactcctagggtaagtttagcgttcctaggcatactgtcttgtgacagac

SEQ ID NO: 83 - DNA, 120 bp, synthetic construct
  source 1..120: mol_type = other DNA
attctgatcatgtcgtggccacaaaagtttactggaaagaaacactacccatacaattgtcattgtggaggtgtggaggtctggggactttcataagcctgaagctgtgtgtcatcaggg

SEQ ID NO: 84 - DNA, 120 bp, synthetic construct
  source 1..120: mol_type = other DNA
gagaaaacaaggcttaagaaacaactacaacccataacttactaagatgactgttctctgttttataaatatttgtgtgacacgtgcctgccatgtaaatgcctgccgttgtcctggccc

SEQ ID NO: 85 - DNA, 120 bp, synthetic construct
  source 1..120: mol_type = other DNA
agatgacacaaccaggattctccgaagctgggcttgaagtcctcaagaaaaactcccatgaacaaggaaggaagagtgaagaaaaaaacagggatacctggaactggacaaaagtaaaaa

SEQ ID NO: 86 - DNA, 120 bp, synthetic construct
  source 1..120: mol_type = other DNA
cacttggagggtagggaatatagaaggcatttcagtgaaatagggtgcctttgacaaatcattaagaatgagttctacattaaaaaggggaagagagggtgatagctgaggaggcagcat

SEQ ID NO: 87 - DNA, 120 bp, synthetic construct
  source 1..120: mol_type = other DNA
ttacctaaaggaaggataacaaaactcagtactggccacagaaataggagatggccccatcctcaatacctcattgacatcagcgagctcttgcgtggagaagacctcaactctttgcat

SEQ ID NO: 88 - DNA, 120 bp, synthetic construct
  source 1..120: mol_type = other DNA
atagacctctggtgatagaaacaagtcaatactacttctgtttcctctaaatgtaacacacacatatattctgggaaacattttattaattgtggccttgctataaatatctgttgatgt

SEQ ID NO: 89 - DNA, 120 bp, synthetic construct
  source 1..120: mol_type = other DNA
gtagctaaaatggctaaaggagaaaacagggtggtgaatagctatagtggtagtgaggtaactggccacagcctcttcacccctcccagagctgcataagataagcatggcggagcaagg

SEQ ID NO: 90 - DNA, 120 bp, synthetic construct
  source 1..120: mol_type = other DNA
gggcattattagatgactcttcattctcccatatgggaattatgcaccttctaaataatggcaaatttttaaacgtgggtgggctttgctcagctttgctcctgaactattacaccaccc

SEQ ID NO: 91 - DNA, 120 bp, synthetic construct
  source 1..120: mol_type = other DNA
ggtgacagtacattttccacgagtatatctcaggttagctacagagtgatgggatcttgagtgaattatttaacttctcttagcttccatatagtctctctctcacatggggactaaagt

SEQ ID NO: 92 - DNA, 120 bp, synthetic construct
  source 1..120: mol_type = other DNA
cagaaggccacattatagtcagtttttttcatacttggctttactctgaacctctctaagaagcccaagttaatgaactggtaattattttatgacttcccaaagaagtgtgaaataata

SEQ ID NO: 93 - DNA, 120 bp, synthetic construct
  source 1..120: mol_type = other DNA
gctgccttgatattgttcttgctttttctttgtccacttatgttgaccctgccactcctaaatatgctaatattacttttgctgaggtagggaatcactctctttatacaagttttgttg

SEQ ID NO: 94 - DNA, 120 bp, synthetic construct
  source 1..120: mol_type = other DNA
caactaaggcaccaaatgccacaaaaagactaaacaagatttcagtggcctactctaaggtattaagttccctcccttattatctccagttgtatctccattcttagaggagaatgcacc

SEQ ID NO: 95 - DNA, 120 bp, synthetic construct
  source 1..120: mol_type = other DNA
aggcagcttcatgcttataaagtaaaaaaagaaacattaatcataccatagagaattgatgtttaaactgatgctttaatagactccaagaaactagtcactcacaaagagtcacattta

SEQ ID NO: 96 - DNA, 120 bp, synthetic construct
  source 1..120: mol_type = other DNA
taagctcagaaactagcactgtgagggaaatatctaaatatggagattataaatgcctatcattgccatttccagagaacacacctgaggccaaaaaccttggaacagaggaaagcagat

SEQ ID NO: 97 - DNA, 120 bp, synthetic construct
  source 1..120: mol_type = other DNA
gacagcaaagacagaaaattttgtatatattaagtgaccatattggaacttaaaactttccatgtttgtgtctttaagcacagaagagaactctaggtttctccatttgcagcaacacct

SEQ ID NO: 98 - DNA, 120 bp, synthetic construct
  source 1..120: mol_type = other DNA
cgtggtcatgatctgcagtgtaaaaaacaatggactaaagcatgcagtaaagaatgtggcttggcaattagacaggcccaataccacttttttttttttttttttttggagacaggatct

SEQ ID NO: 99 - DNA, 120 bp, synthetic construct
  source 1..120: mol_type = other DNA
ccaggacaaagcagaaaatttctgaaagcttcaaaggagaaaaatgagaatactcatcaacctatgtttttaatcaacagcttcacctgctggttaagcctctcagtgcacagtgtgggc

SEQ ID NO: 100 - DNA, 120 bp, synthetic construct
  source 1..120: mol_type = other DNA
tgttaatccatcttagcaacctaattacctcttaaaagtaccatctcccaacactattacattggcaattgaactacaacatgagttttggaggggccaaacaacatgcaaaccatagca

SEQ ID NO: 101 - DNA, 120 bp, synthetic construct
  source 1..120: mol_type = other DNA
taatagtctagttagaggtgaaagaagaaagcagaggagtctaatgcaatgcgtgacttgtagctcaggtaaaggggtggcaggtgacgcttaaatactagaaatataagaagcagcaca

SEQ ID NO: 102 - DNA, 120 bp, synthetic construct
  source 1..120: mol_type = other DNA
ctgtgctagtctactttatcccatataggaattgcaagtctgtatgacaaaaccttacacactcactcactcaaaatttggtatttaaagagtgtgaaggtaaatgaataactgctcact

SEQ ID NO: 103 - DNA, 120 bp, synthetic construct
  source 1..120: mol_type = other DNA
acaatgccttacaaataacaagctctcaataacaatggctgactgacggaaaaataagtcagactggatcttatcttgtagtcccagatttaaaagtttttcagaggaatgccttgatga

SEQ ID NO: 104 - DNA, 120 bp, synthetic construct
  source 1..120: mol_type = other DNA
aaatcttaatttaagtgtgctgtacccctttcatttgcctctttagatctcctctctgccctcctgcaccttgctttctgcactgggaagctgacttggatgaagcgcctcaagactcct

SEQ ID NO: 105 - DNA, 120 bp, synthetic construct
  source 1..120: mol_type = other DNA
ggccaaaagcattctgcaatttcaggaatttgcaaacagcaatgtaaagactgccaatatacaacactggggatgtatttatagggattatggtatgccaaccaacaccttaccatgctg

SEQ ID NO: 106 - DNA, 120 bp, synthetic construct
  source 1..120: mol_type = other DNA
tcaaactttttagcctctaagctaaaaagggaggaactaggatctgaatgcaggcaatctggccctggagcccctactcctaagcattatgctaccctaactctataattgaaattgttt

SEQ ID NO: 107 - DNA, 120 bp, synthetic construct
  source 1..120: mol_type = other DNA
tgtgtgtgtgtgtgtgtgtgtgtgtgtgtatattcaccgttttgaagattatcatctccaaatagggaatatatatatatatatatttatcatctccaaatagggaatatatatatatat

SEQ ID NO: 108 - DNA, 120 bp, synthetic construct
  source 1..120: mol_type = other DNA
atgatgggtcaaaaacccgcatttgcttagccacagtatgtgaaatataacccagcttagacacagggtgcggtagctgtcatgtttctctatgtgtgccgagtgtcatgtctgtaccgt

SEQ ID NO: 109 - DNA, 120 bp, synthetic construct
  source 1..120: mol_type = other DNA
gtgtctcccaggtaatgttgtggaattgttggctgttaattcagtagtgacatctggagattgtagatttagggaaaatgaggaagtgatgaatagaactatttcttccattcacccagc

SEQ ID NO: 110 - DNA, 120 bp, synthetic construct
  source 1..120: mol_type = other DNA
ctcactctgaagtctaatactgtttctgggaggaagtaagagaattattatgcccacactgtgcactgagaggcttaaccagcaggtgaagctgttgattaaaaacataggttgatgagt

SEQ ID NO: 111 - DNA, 120 bp, synthetic construct
  source 1..120: mol_type = other DNA
cttaaagtataataataaaataaaagaaatatcctggctatgagtcaagggtttaggaccttttgaggcacttgggtttagacaattctcagtgatgtgtactggaatttgggtacagga

SEQ ID NO: 112 - DNA, 120 bp, synthetic construct
  source 1..120: mol_type = other DNA
tttgagtatttttaaaagtggacactcaagcgttcatatagtcatagtcagtgtgtggttcctcagacctgtggtatcaacatcacctgggaatttgttaggaatgcagattcccaggct

SEQ ID NO: 113 - DNA, 120 bp, synthetic construct
  source 1..120: mol_type = other DNA
acaaaacttgtataaagagagtgattccctacctcagcaaaagtaatattagcatatttaggagtggcagggtcaacataagtggacaaagaaaaagcaagaacaatatcaaggcagcca

SEQ ID NO: 114 - DNA, 120 bp, synthetic construct
  source 1..120: mol_type = other DNA
tgagatatactcgtggaaaatgtactgtcaccttgagtctcagtttgcctgtcaataaaatgggacagaattacctgttttaagttggtagttcaaatggaaccttctgaaaaggaagtg

SEQ ID NO: 115 - DNA, 120 bp, synthetic construct
  source 1..120: mol_type = other DNA
ttctgcaactttcaaatggttgcttccactgcatttcacgtcttggcacttctaattgagggttactctaaccaccctatttaaaattgtaactgtcccccacccccttaattactaacc

SEQ ID NO: 116 - DNA, 120 bp, synthetic construct
  source 1..120: mol_type = other DNA
ttcaatatctcttgtcatctgtgattaagtcatctgtccctgaacaatgtccatggagtttctatgcctgtttaaggaagctggcagccttgcctttgtatttggaaatattgttcacca

SEQ ID NO: 117 - DNA, 120 bp, synthetic construct
  source 1..120: mol_type = other DNA
ctaaacatataccggtgacattctgtgattatcatcttgcccctaccttggttttggtttttggtgcagttccaggctcttggtgtctttgtttgggacaccaagagcctggaactgcac

SEQ ID NO: 118 - DNA, 120 bp, synthetic construct
  source 1..120: mol_type = other DNA
cgctttgtcattgacatatctttcctgtttttgtaaacttggcataaagtgggtttcctgtacttgttatatgatttttggattgtgtattcaaattaaaagtattaaattaaaattaaa

SEQ ID NO: 119 - DNA, 120 bp, synthetic construct
  source 1..120: mol_type = other DNA
ccaaccaaaattattattattatacaatggtgaatattttattaaagactcaatcacagtgccagctggagacaatggcttataaggttgtactcatgctagacgatgtggtggtgtatc

SEQ ID NO: 120 - DNA, 120 bp, synthetic construct
  source 1..120: mol_type = other DNA
tccgtcgtcttttttgacatcaccgtcgacggcaagcccttgggccgcatctccatcaaactgtttgcagacaagattctaaagacagcggaaaactttcgtgctctgagcactggagag

SEQ ID NO: 121 - DNA, 120 bp, synthetic construct
  source 1..120: mol_type = other DNA
ctaatgtaaactgggggtgggataaaggtgacagtatgtgagaactctgtactttctgctcgatctttccataaagctaaaactgctcaaaaaataaagtctattattttgttaaatgaa

SEQ ID NO: 122 - DNA, 120 bp, synthetic construct
  source 1..120: mol_type = other DNA
ttggaggcacaaatgtcttagctaaagtgttcattctaacctcacaggaaaattgaaatatgaaaatatacagaaaaatcttaggcagtatttgtcaattttaagaaacaactatttaca

SEQ ID NO: 123 - DNA, 120 bp, synthetic construct
  source 1..120: mol_type = other DNA
ctgctgtcatgaattgactaacatattttgggcctaatacctttacatttagaatctttttgttttgtattggaaagtattgtaactcctccatttattggtcaaaagcactgcttattt

SEQ ID NO: 124 - DNA, 120 bp, synthetic construct
  source 1..120: mol_type = other DNA
catagcctttgaaggcatgagctgaacggaaaccagatgaactctattgaattttaaatttgccacatttcctagtctagtattaaacttttcttctctagttgagcaagttaaccaaag

SEQ ID NO: 125 - DNA, 120 bp, synthetic construct
  source 1..120: mol_type = other DNA
gggagttcagataagtccttacatgaaaatggccttcttaacataccaaagttttaaattaagaccccataaatgatagattgagagccacagttgagtcccagataaaaaaatcaaatc

SEQ ID NO: 126 - DNA, 120 bp, synthetic construct
  source 1..120: mol_type = other DNA
ggtggtctggaattgaacctacaatatctccacttgtgcctgtacaacatactttatactttggtgtcaaatatttcccttgactaaaattctgtcataacgtattaacatagatgtcga

SEQ ID NO: 127 - DNA, 120 bp, synthetic construct
  source 1..120: mol_type = other DNA
aaacccagagctatccagaatagtgccacaaattaccattttaaacatgcgatgtccttcagtttacatttgcagattttggtgaaatagcatcttccagtgaagtccactgcgctggag

SEQ ID NO: 128 - DNA, 120 bp, synthetic construct
  source 1..120: mol_type = other DNA
tgctaataattaattacggaaatgcctcatggaagcacttgaacttacccctgcatcttacagatatatctgcctgttggtgaagtgtatgccagcgttgacatttcttgtgagtactgg

SEQ ID NO: 129 - DNA, 120 bp, synthetic construct
  source 1..120: mol_type = other DNA
atatgtaattaaaataacaagtatacctagcgtgaactaactactgaccctgaagcagccaacctggctggtgggagtagatgtgagtaatacacaaccagcctccagtgtgctatgcaa

SEQ ID NO: 130 - DNA, 120 bp, synthetic construct
  source 1..120: mol_type = other DNA
cgtcctagccatgcaagcatgcaagcaaacagaatttgttcacacctaggccatatgtggatgtcactcttcttcagtttcatatccagtttctgcttgcctgagctagaaatgaagtca

SEQ ID NO: 131 - DNA, 120 bp, synthetic construct
  source 1..120: mol_type = other DNA
acagacttccttttctacctctgctggttataccaggtacaaatagggatgctgcagtagagcagaggagctaaacgtggcttcctctgacttacataataaaataagaatctccccaat

SEQ ID NO: 132 - DNA, 120 bp, synthetic construct
  source 1..120: mol_type = other DNA
agggattctgacatcatcctgagaatctttggggaatacatatagcctgtagacccattcctctttgaccctataaagattctttaaagagtaataccctgagtggttttctggccagct

SEQ ID NO: 133 - DNA, 120 bp, synthetic construct
  source 1..120: mol_type = other DNA
tactctggctctgtatcattggcaaagggatttaaggttagatgataggctgcagttttgttaaatggaacaatatgaagagatggcattataaagaggcttggcagcagggcccatttg

SEQ ID NO: 134 - DNA, 120 bp, synthetic construct
  source 1..120: mol_type = other DNA
tccaggtgctgggaacctagggggtgagtgaataagacagtctctgccctcatggagcttacattctaatagtggtagagtagtgtggtggtaggaaagcagactatatatatatatata

SEQ ID NO: 135 - DNA, 120 bp, synthetic construct
  source 1..120: mol_type = other DNA
taggttttggtatattgatttaacttaaattgagacctctgccattcaggggataaagctctggacattctacatccttagacttcagttcttgcctcttaaataggtaaactctcctat

SEQ ID NO: 136 - DNA, 120 bp, synthetic construct
  source 1..120: mol_type = other DNA
gaaagtaagaatttagtggatgggttttatgcagagtgaatagaaaagagtgatggatgaattctcaatagaaaaaaaggaatccagaaaaaaatggatttatatcttcaaaataaggaa

SEQ ID NO: 137 - DNA, 120 bp, synthetic construct
  source 1..120: mol_type = other DNA
gtggtggctgccaatcctaccttgcagataacttctccctcatgaaaacagaggaggatctgatattattaatttatcctggtagtttgaccattgtaatgctgtccgtgaacatttgca

SEQ ID NO: 138 - DNA, 120 bp, synthetic construct
  source 1..120: mol_type = other DNA
cataggctgagatctttcaagttgcagaggaagagagatgtctgaaccttttttacacttgagtgatgactcagcttctcctaatattcttggatcacagttgctctctatcagaatttt

SEQ ID NO: 139 - DNA, 120 bp, synthetic construct
  source 1..120: mol_type = other DNA
atatataacaacattgccttgtggtgtttagatcagcaacttctttgctccaaaggtacagtgaatgatgacggttgctgggcctcaaaataaggaagacgaaactaagagaacaggcca

SEQ ID NO: 140 - DNA, 120 bp, synthetic construct
  source 1..120: mol_type = other DNA
atctcattaattggtgttatgtacaacatagatctgatgagaggtcagagatggttaaaggttctggaatagtctggaaagttgtcatgaagcaggtgggacctaggcttgagaggtaga

SEQ ID NO: 141 - DNA, 120 bp, synthetic construct
  source 1..120: mol_type = other DNA
ggatgctaaatatgctctttgtaactgaagtaccattatttatagtccctttcagcagacagaggtagtagatatatgtatgtacacatagacacatacacacacacacccatgtacttc

SEQ ID NO: 142 - DNA, 120 bp, synthetic construct
  source 1..120: mol_type = other DNA
tcctgagtagccaggagtacaggcacgtgtcaccatacctggcttccatttactttttaaaacaggtgaagagattttgagacccagaatgcatttgtgacttgcccaaagttatctggc

SEQ ID NO: 143 - DNA, 120 bp, synthetic construct
  source 1..120: mol_type = other DNA
tgggtcctgggtctcttgctcatgtcagtgagggttgctcatttgaatggatgtgtcaccgttttttaaattgaaatgtgattttctgctaattccagagtatctcagaacacagtttaa

SEQ ID NO: 144 - DNA, 120 bp, synthetic construct
  source 1..120: mol_type = other DNA
caatgtaaagtctcatgagatctgcccctttaaaaagcatgcttactgaggacatgggtatcttgccgagagacaccacttgattaaaatgtaaattaggttatttagaattttgtaact

SEQ ID NO: 145 - DNA, 120 bp, synthetic construct
  source 1..120: mol_type = other DNA
tagcaaactcatatacgtttatgtttttagtttagttttcttcccagggtcttatcttggccaaggtagactcaaaagtgtggttattcttatcgtggtatgtctttgtctttgggtctc

SEQ ID NO: 146 - DNA, 120 bp, synthetic construct
  source 1..120: mol_type = other DNA
caagccacagactgaagcattatgagccccaaacaggagaaatacaaagaaaatacaaacagctagaggtaaaaaagacgtattatcttcagtggagcaacagcatggttgacagctgac

SEQ ID NO: 147 - DNA, 120 bp, synthetic construct
  source 1..120: mol_type = other DNA
gttacaaaacaggatttataatgcaatcccaattttgtaaaactagaaaagattagaaaaatacataacaacacttagagtggtgatttcttagtggtaggaatttaagagttacttttg

SEQ ID NO: 148 - DNA, 120 bp, synthetic construct
  source 1..120: mol_type = other DNA
ctttattgccaagaactcttttcttgttctctacatgttcccttttttgttgcatccaacttttgtttcatgatgcagtatcgttttatttctcatttatctctccagggctattatgga

SEQ ID NO: 149 - DNA, 120 bp, synthetic construct
  source 1..120: mol_type = other DNA
gaggaccaaagaatagatggatcttctaggcctaggaattatactaggagtagaaggtgtatcctaaatccatgtatgtgattctgctttggtcttaccagagtgaatgtaatttgcttt

SEQ ID NO: 150 - DNA, 120 bp, synthetic construct
  source 1..120: mol_type = other DNA
gtgacctagatagaggattaaaccagccatgatattctcttaagcgaaaacctaatccagagctaggtcttaactctctgcaattctatgaagggcaagaaagttgaggaaactgtagaa

SEQ ID NO: 151 - DNA, 120 bp, synthetic construct
  source 1..120: mol_type = other DNA
tatactttgcctgtgcgctgtcaatgaaacaacaaagcctggacgacagcaaatctgtttacagcatgttttactaactattttaagcccattgttaagacctactgctcagaaaaatcc

SEQ ID NO: 152 - DNA, 120 bp, synthetic construct
  source 1..120: mol_type = other DNA
ctattgggaattttactcaggtattgatagagaaatgttacaggaatgtccaagtcaattgtttcttacctgtggagtctagtctgttaatatcataaactgcctggctgtgaaacatcc

SEQ ID NO: 153 - DNA, 120 bp, synthetic construct
  source 1..120: mol_type = other DNA
tcatgccagcacctaaaaactgtttcaacagatggagaggtaggaagacagcatgagtccctgtaaaccaaatacaatctggctgctctaattttagtctcagtgtttttgaaggaactc

SEQ ID NO: 154 - DNA, 120 bp, synthetic construct
  source 1..120: mol_type = other DNA
ccactagccacatgtggctgttgtacacttgcagtggggctggcctgaattgagatgtgctgttaagtgtaaaatgtacaccagatttcaaagagtaagaccaaaaaatggaatataaaa

SEQ ID NO: 155 - DNA, 120 bp, synthetic construct
  source 1..120: mol_type = other DNA
catgttcaaatacatttgggaaatgctgagcatttcacacttttagagactcaaaacaggcagcacatttttaaaaaataaaaataaaaccaaatagcattgcatttggagaatggtaca

SEQ ID NO: 156 - DNA, 120 bp, synthetic construct
  source 1..120: mol_type = other DNA
acaggtgaggaaactgagggacagacaagacaagcaacttggatggagcccagtagacaggcccacagtccctgctctgtacactgcactgttatctccacacattctcggatgcgatct

SEQ ID NO: 157 - DNA, 120 bp, synthetic construct
  source 1..120: mol_type = other DNA
tagaggcctgccccgctagtcatgaggtgattcagtgactgctacaaacgctcctcatgtgcatcctggacttggtacacccggcttgcccatcaccagcctggagaaaccgccaggagc

SEQ ID NO: 158 - DNA, 120 bp, synthetic construct
  source 1..120: mol_type = other DNA
tttggacttttaggttgttttttttttttttttagggttgtctccctgtattttgttgcagtccataatgcattgcaatcatggtcagctcgggggcttttcaagtatttgacttatgac

SEQ ID NO: 159 - DNA, 120 bp, synthetic construct
  source 1..120: mol_type = other DNA
aacagcatctcattagacatcccaagtttttttcatttggaacacacactcattccccagtatactaggggtaataataatttagagtttaattactttttactactagaaaactaattt

SEQ ID NO: 160 - DNA, 120 bp, synthetic construct
  source 1..120: mol_type = other DNA
gcgcaaaaagccgcggtgggcataaacccgaggcggcgggggggggggggtgcaaaaaaccgccgtggggaaaaagccgcggcggtggggggcaaaatcccgcggcgggcaaaaagccgc

SEQ ID NO: 161 - DNA, 120 bp, synthetic construct
  source 1..120: mol_type = other DNA
gaactccagttaggaccttaaactatgagaagcccaaggatgtataaaacacaaatatacttaattgcaaaacttttatagagaggtaggctaggagataccacaacagggacaccagag

SEQ ID NO: 162 - DNA, 120 bp, synthetic construct
  source 1..120: mol_type = other DNA
gcctaatccaagatcacgaagacttacacctatattttcttctaagagttttatagttttggctcttgcatttatgcctttgatccattttgagttaatttttttattatttccaggttt

SEQ ID NO: 163 - DNA, 120 bp, synthetic construct
  source 1..120: mol_type = other DNA
gaaaatggaagggtcagactatcacagccctattctagagggtgccaatattagcatcactatcggtagactaactagatgttatgtatttcctgctctgatgctacatgaagtactaac

SEQ ID NO: 164 - DNA, 120 bp, synthetic construct
  source 1..120: mol_type = other DNA
cccaggcccagtaaggaattctcttgaggacagggtatatttagaatgtttaatgaacacctatcaccaagaataggtgggtccttaatcagtattgactaacaacagatgccagagcca

SEQ ID NO: 165 - DNA, 120 bp, synthetic construct
  source 1..120: mol_type = other DNA
attataatttgcatagataaatccagcatgtacctgaacttctagaagcctatccctcaagggcttctcttgaagacagttcctacaatgtctgttcacagtgggcacccaataaccact

SEQ ID NO: 166 - DNA, 120 bp, synthetic construct
  source 1..120: mol_type = other DNA
gcctgggttagtaattctgaaacaactttctgtacactctaggactgagcaattaagtgaaaatgtgtgttatggataataggaaccaggtttctcactgttcagagaacaggaaagggg

SEQ ID NO: 167 - DNA, 120 bp, synthetic construct
  source 1..120: mol_type = other DNA
attcattcattcatttatttattccacaatatttagtgagcatctactatacaccacatattatactaggcactgtgggacaccagaagatcaaacaaacttatacagtccactcagaga

SEQ ID NO: 168 - DNA, 120 bp, synthetic construct
  source 1..120: mol_type = other DNA
aaaaagagaggacaaggcaaagtcccatgaagttccagaagtaggccactccagagttagcctgtccaaggaacaagtacttaataggaggcctctgagatatgtgatttaatataagaa

SEQ ID NO: 169 - DNA, 120 bp, synthetic construct
  source 1..120: mol_type = other DNA
ctcaaaaagataaaataaataaaataaaagatatataaaaaagaaacaaacaaaaaaaccactttgccttggatttttggtcccttgcaaaggggctgtaatggataaactgaggatttc

SEQ ID NO: 170 - DNA, 120 bp, synthetic construct
  source 1..120: mol_type = other DNA
aggccgcagagaaaattctgaccctggaactggactgcctgggctcaaaatgccagctccaccacctactagctatgtgtgaccttgggcaaattacttatctctctatgcaagaatgtc

SEQ ID NO: 171 - DNA, 120 bp, synthetic construct
  source 1..120: mol_type = other DNA
tcaagctgcctgatcatttcacacctctgaaaaaacatcctactgttcaaatccatagatgggcatattcagaatttgcttgaggcaggaacaaaattcagagccaagtcagctagcagt

SEQ ID NO: 172 - DNA, 120 bp, synthetic construct
  source 1..120: mol_type = other DNA
ctccaggttccctgggcaggtgtgtattatgtcaacttgatttaaaaaattttttgacattagaatacttttagaggaaaagacacaaaataacacaatagcttgactggatgaacctga

SEQ ID NO: 173 - DNA, 120 bp, synthetic construct
  source 1..120: mol_type = other DNA
tagattcatttctggcagtgagtgggtttgtaaagattgcatttgtagtatctgctgggtcccaaaagtgtggaaggacaaaagaccatagccttctcttaaattcagctcagaaccaac

SEQ ID NO: 174 - DNA, 120 bp, synthetic construct
  source 1..120: mol_type = other DNA
ggggaaggaaagaggaagattaaagccaaggaccgtgaagggactttttggggtgatagaaatgttcaacctattgattataattgtggctacacaagtatataccatttgtcaaaactc

SEQ ID NO: 175 - DNA, 120 bp, synthetic construct
  source 1..120: mol_type = other DNA
ggggtgagatgaaagagtgaactgggaggggcaggactagaaaaggacaacatgagtgatccttgcagtgatggaactgtttagaattttgactgtatcaatgtcaaggtcctgattatg

SEQ ID NO: 176 - DNA, 120 bp, synthetic construct
  source 1..120: mol_type = other DNA
attcctacattcagaagtctggtagaagaaaaaagaatgaaatacaaatattccaaacataaggcagtatgagatcaatgccatatgagatctattaagagaagcactatgtgggtgaaa

SEQ ID NO: 177 - DNA, 120 bp, synthetic construct
  source 1..120: mol_type = other DNA
atacaatatgattccacttacctgcagtatctggagttatcaaatagagacaaagtacaatggtgcttgccagagacaggggcaggagggaatagggagctgttgtttaatgggtataaa

SEQ ID NO: 178 - DNA, 120 bp, synthetic construct
  source 1..120: mol_type = other DNA
gactagactccacaggtaagaaacaattgacttggacattcctgtaacatttctctatcaatacctgagtaaaattcccaatagatcatttcaggattccttttagatcttcttagctgg

SEQ ID NO: 179 - DNA, 120 bp, synthetic construct
  source 1..120: mol_type = other DNA
acctctgctagcttcaaactttcttctacagtttcctcaactttcttgcccttcatagaattgcagagagttaagacctagctctggattaggttttcgcttaagagaatatcatggctg

SEQ ID NO: 180 - DNA, 120 bp, synthetic construct
  source 1..120: mol_type = other DNA
ctggtaattaagtatacctaagaacaatgaagtataaaagagttactgccttgacaggaagattgtaaaaactgtaaaaagataaataaataaagagtcaaaactgtagctctgtgaggc

SEQ ID NO: 181 - DNA, 120 bp, synthetic construct
  source 1..120: mol_type = other DNA
aaagaatatggatctaaagaaccaaagaagttccagggggctgaacacatgagtttgctaggcagcaggggcatgataagaagctaaagtagtctgtgctaaactactgagtttacactt

SEQ ID NO: 182 - DNA, 120 bp, synthetic construct
  source 1..120: mol_type = other DNA
agtgctgggattacaagtgtgaggcaccgtgcctggccactgactccttttctatttgcaaacttctctggctcatataatgattatcataagattatggcaaaatatgtacttccattt

SEQ ID NO: 183 - DNA, 120 bp, synthetic construct
  source 1..120: mol_type = other DNA
gaggatgctggtaatagtgactcaagattcagaagtgccacctatattgatctttttctttagctccaggcaagttgctgttgtggccctacttccaatgacttgagaatttcctcaaaa

SEQ ID NO: 184 - DNA, 120 bp, synthetic construct
  source 1..120: mol_type = other DNA
ccttgtcaaaaatcaattgaccatacatgtgtgggtttatttctgggttctttattctgttcccttggtcaatgagtttgtgcttatgcttgtatcatgctgttttaattactattgctt

SEQ ID NO: 185 - DNA, 120 bp, synthetic construct
  source 1..120: mol_type = other DNA
gttatttaaaaagtacttttaaaatgtgtattttcaaggtgggatttcatagaaatctatatcacagtgtataaaagcataggctctgaaatcagactgtgtatgaatttgaatccttga

SEQ ID NO: 186 - DNA, 120 bp, synthetic construct
  source 1..120: mol_type = other DNA
ctagaagcaaaagatccacagagaggataagccctaaaatatgactatagaatttgtccagactaccactaccctacacaagctcaagctcagcagagaatatcagggagttaggctaaa

SEQ ID NO: 187 - DNA, 120 bp, synthetic construct
  source 1..120: mol_type = other DNA
gttttcccccaggagagaatagaatactccaaaaccttcaaggggaaatattttaattttcttggttactttttctctatttactgtgtttggaaaattttcatggtaagtatgttattt

SEQ ID NO: 188 - DNA, 120 bp, synthetic construct
  source 1..120: mol_type = other DNA
tattttttatgtacagtatttgtctttacctctgactcaggtattaatggatttcaatgtgattacagaaaaggctgatttgacttcctagtttgatgactttcctactgggtttgtgtt

SEQ ID NO: 189 - DNA, 120 bp, synthetic construct
  source 1..120: mol_type = other DNA
tatatttatgtacaactgggtacgttttgacatacatatatacctatgcaacaaccatcaccacggtcaagacagagaacacatccatccatcactgccatgagattcctgagattcctg

SEQ ID NO: 190 - DNA, 120 bp, synthetic construct
  source 1..120: mol_type = other DNA
gctctgagattctttcctctgcttagtctcttcagctattgatatttgtggttgcattgtgaatttcacattgtgtttttcagctccatcacattgtttatgttcctttttaaacgggtt

SEQ ID NO: 191 - DNA, 120 bp, synthetic construct
  source 1..120: mol_type = other DNA
ggaacttggtcgtcttaggcaatctccagcctgctgctgctggctgcaacctcagtggccactgagcatctgggcagctctgtgcttgggatccaaggccctgttggcctgggctcacaa

SEQ ID NO: 192 - DNA, 120 bp, synthetic construct
  source 1..120: mol_type = other DNA
agatatgggtctgttttgttcactgatatgttatcagtatctagaacagaacctagcacatggtaggcagatattcagcagatatttgagactggaagaatagttgtgagagtcacttac

SEQ ID NO: 193 - DNA, 120 bp, synthetic construct
  source 1..120: mol_type = other DNA
cacacgttctcatttgtaagtaggggctaaatgaggaggacacatggtggggaacaacacacactggggcctgttgagggagcctcaggaagaatatctaatggatgctgggcttaatag

SEQ ID NO: 194 - DNA, 120 bp, synthetic construct
  source 1..120: mol_type = other DNA
tgcaaatacccttatagcagtctactcaggtagctgtcatgtcaagctaatctgtcagaaatattttctatttatcctttatcttactgcaagataatttttttaattatatatgtaggg

SEQ ID NO: 195 - DNA, 120 bp, synthetic construct
  source 1..120: mol_type = other DNA
gtgcacctaagtatcattttacaatgggatatacttaggtaaactgagacggtcagatgactcagcgagaagtcacccgaagaattttagaacaaagattaataactccaatataccctc

SEQ ID NO: 196 - DNA, 120 bp, synthetic construct
  source 1..120: mol_type = other DNA
cctggaccagacggactcacagccaaaccccaccagacacgaagaagagcttgtaccaatcctactgaaattattccaaaaaatcgaggagggactcttccctaacccattccatgaggc

SEQ ID NO: 197 - DNA, 120 bp, synthetic construct
  source 1..120: mol_type = other DNA
acttcttgataggattgtattgaatctgtgggttgctttgagttgtatttttatcttaaccatgttacaacttccaacccatggacacaagatgtctgtccattgatttaggtcttcctg

SEQ ID NO: 198 - DNA, 120 bp, synthetic construct
  source 1..120: mol_type = other DNA
gcccttcagggattccatttagccctatactggggcgtttaaagttttgatgccgatggtgtttttatgttttcaagtcatttgttactgtgtgtttcatttatgttagtttcaacttct

SEQ ID NO: 199 - DNA, 120 bp, synthetic construct
  source 1..120: mol_type = other DNA
tttagaaacaacttttttttacacaatttgtttttttttatccccaaaggaaaaaaattcacctgaacctcaatactaactcaaaaactaactcaaaatggattatgcaactaaatataa

SEQ ID NO: 200 - DNA, 120 bp, synthetic construct
  source 1..120: mol_type = other DNA
cacagagccccagctagatttcagaagcaacataaggaagtggttagaaaagaaaaaggatagaaccattaatgaggtaaaaaaaaaatttattgcctttatgttgggatagaacagggc

SEQ ID NO: 201 - DNA, 120 bp, synthetic construct
  source 1..120: mol_type = other DNA
tctaaatacagggtggagggtgactgctctggggacagagcaaaaatgggcagcatgtgctcagtacatttgccacagatgagccaactcagggcacccggactctccctgtaaactacc

SEQ ID NO: 202 - DNA, 120 bp, synthetic construct
  source 1..120: mol_type = other DNA
tgaatgagagtgggaggatcatctcagcccatcctcccacctaagtctcctgagcagttgggactataggcgtgcagcaccatgcctgcctaattttttgtattctttgtaaagatgggt

SEQ ID NO: 203 - DNA, 120 bp, synthetic construct
  source 1..120: mol_type = other DNA
cagccagcccaacgtgcacagagacatgaacatctatgtatggttcagcattgtactgaaaactctcatgttttatctttcacaaaatgccctggcatggtttcctgctccatcgggcaa

SEQ ID NO: 204 - DNA, 120 bp, synthetic construct
  source 1..120: mol_type = other DNA
tcgggccacttaactgattaatcatggcaatgagggcagggaccagaaaagagtctttagaacctgtcatccccacacagaagagcaactttcagggaaacacccttatctttccatttt

SEQ ID NO: 205 - DNA, 120 bp, synthetic construct
  source 1..120: mol_type = other DNA
tgactgagttgaaatgaggtcagaacaagggacagggagtttctagcgtgggtatttgggatgtacatggttgctacgtatttctgtcaacaaggtgagctgaaagtacctgtagaatat

SEQ ID NO: 206 - DNA, 120 bp, synthetic construct
  source 1..120: mol_type = other DNA
aaagttcatagcactgaaaccaaagatggcatgcaggtgactgtgaggagtctgtatcaagaaggtcagaaggtctggtttggagttctggtgctgtgaccttggacaagttacttatct

SEQ ID NO: 207 - DNA, 120 bp, synthetic construct
  source 1..120: mol_type = other DNA
ctcttcattctcccatatgggaattatgcaccttctaaataatggcaaatttttaaacgtgggtgggctttgctcagctttgctcctgaactattacaccaccctaacactatcatgtgg

SEQ ID NO: 208 - DNA, 120 bp, synthetic construct
  source 1..120: mol_type = other DNA
gtagatggttggagaaaaaggaaaaaaaaatgctcttaagccaagaactagcctacattttccttcatccttactcttttatccccatataataatacacacccaaagcccctgctcccc

SEQ ID NO: 209 - DNA, 120 bp, synthetic construct
  source 1..120: mol_type = other DNA
ccccatgagtaggttcactaatacacatcggcagaacaataagcaccaacgagatccaaatgacactgaccaacatgatcacagtttacatgtccaaaaggttcaggatctcagtgtaat

SEQ ID NO: 210 - DNA, 120 bp, synthetic construct
  source 1..120: mol_type = other DNA
ttatcacctcaccatgctgaaaatctacagcctggcccctgatccaaatcagcaatatactaatattaaggaaaaagtaacagaaaccaaaatcacccacctaatgaagatatatgatct

SEQ ID NO: 211 - DNA, 120 bp, synthetic construct
  source 1..120: mol_type = other DNA
aactgatagaaggttaaaagccatcaatgtatcggtcagctaatgtccatccacttcttacttattcagaagatacaaaagagttctaactggctgacccttcaaagaaggtagtttttt

SEQ ID NO: 212 - DNA, 120 bp, synthetic construct
  source 1..120: mol_type = other DNA
ttgtgaggattaaaggagatcattgtgtaagaatactctataaactataaatttccaacagaaatgttggaggttgtttgattctacagaagcaatttttatattaattgtatttactgg

SEQ ID NO: 213 - DNA, 120 bp, synthetic construct
  source 1..120: mol_type = other DNA
ccacggcccttgtgactccatccagcctcacaagaacatcaaaatcacatttgaggaagacaaagtcaactcaactgtggttgtagacagaaaatcctctcatgatgaatgtcaggatgc

SEQ ID NO: 214 - DNA, 120 bp, synthetic construct
  source 1..120: mol_type = other DNA
ctcatctgtggcaaatgtactgagcacatgctgcccatttttgctctgtccccagagcagtcaccctccaccctgtatttagaaggatagttttatttctcttaaaggaaaaatgccttt

SEQ ID NO: 215 - DNA, 120 bp, synthetic construct
  source 1..120: mol_type = other DNA
ataaaggcaataatttgttacctcattaatggatctgtcctttttcttttctaaccacttccttatgttacttctgaaatctagtgaggctctgtggtgtctgactttccctggctgctt

SEQ ID NO: 216 - DNA, 120 bp, synthetic construct
  source 1..120: mol_type = other DNA
ccattttgagttagtttttgagttagtattgaggttcaggtgaatttttttcctttgggtataaaaaaaacaaattgtgtaaaaaaagttgtttctacacaatttgttgacaagagaatg

SEQ ID NO: 217 - DNA, 120 bp, synthetic construct
  source 1..120: mol_type = other DNA
gagcttagggaaaaggtgtacatgtatcagtcctcatagagatgactccaggaatctaaacaactagaaatcatcaactaaatgccattaggtgaagctggggaaattggtgagatcacc

SEQ ID NO: 218 - DNA, 120 bp, synthetic construct
  source 1..120: mol_type = other DNA
ctcaggactggcaaagcagttgaaaatttaggagagatccctagaagcaaaagatccacagagaggataagccctaaaatatgactatagaatttgtccagactaccactaccctacaca

SEQ ID NO: 219 - DNA, 120 bp, synthetic construct
  source 1..120: mol_type = other DNA
ttgtctttctataagctagcaacggacatatgaacatcaaatgtttaaatacactacttacaatcactcacaaaatgaaatacatagaagtctaacaaaacatgtatataggacttgttt

SEQ ID NO: 220 - DNA, 120 bp, synthetic construct
  source 1..120: mol_type = other DNA
agccattatggacatgccattaaaactacatcgagataatcactacacacctatcagaatagctaaaataaaaattagtgacaacaccaaatactaataagaatgcagagcaactggatc

SEQ ID NO: 221 - DNA, 120 bp, synthetic construct
  source 1..120: mol_type = other DNA
tttattttgatcctcactaggaccctgttgatacctttgtggtgagctgggacatgccagcagctaccactgtactagtcggtcctccacagactgagaggaccaggagtggtaggtttc

SEQ ID NO: 222 - DNA, 120 bp, synthetic construct
  source 1..120: mol_type = other DNA
ctgaggctttatattttctttcatttcaggatggcaatggcacggagaacaatgttccagaagggggaagtgcataacaaaccatcaggtttctggggaatgataaaaagtgttaccact

SEQ ID NO: 223 - DNA, 120 bp, synthetic construct
  source 1..120: mol_type = other DNA
catttacatttccacctgcactgtgtatgagtttcagttgttcacatcctcaccaacactctatatggccagtcttgctaatattagacattctaatagatacgaggtgatattgcattg

SEQ ID NO: 224 - DNA, 120 bp, synthetic construct
  source 1..120: mol_type = other DNA
tccttcttcttatcctttttctcctgctccttctccagccttattgcactgactaaaaccttcagtacaaagttgaatagaagtggtaggattagtcatcctattgttattcctgctctt

SEQ ID NO: 225 - DNA, 120 bp, synthetic construct
  source 1..120: mol_type = other DNA
tgggcctggagttttctttgcaggaagatttttttaaactaccaattcatttttttaaagatacagggtttatgcaggttatctatttcttcttgagtgagctcttgcaatttgggtctc

SEQ ID NO: 226 - DNA, 120 bp, synthetic construct
  source 1..120: mol_type = other DNA
tgacaggaatattctagggtgccctagattaactttggtgagaattagatgaccctgctttccagacccacaggccaaaatctccctctacgtgtagaccataatgccatattccctgcc

SEQ ID NO: 227 - DNA, 120 bp, synthetic construct
  source 1..120: mol_type = other DNA
actgaatcgaagttaggaggcctgacagatactgcctgtgcacctcctgcactgaggtgactatgagattgtcacacttgcctggggtcgagtaacttgatactggggactggcaaacaa

SEQ ID NO: 228 - DNA, 120 bp, synthetic construct
  source 1..120: mol_type = other DNA
attcctggtctagagatagcgtttaagttgttaaacaacaacataataaggagaagctttttaaaaatgaagtgcaattcgcttgatttcttattgtggtgagtgctacagtatctagtc

SEQ ID NO: 229 - DNA, 120 bp, synthetic construct
  source 1..120: mol_type = other DNA
gcagtggaatagcatttcagaaatttgtgccaaacataaaattagttttctagtagtaaaaagtaattaaactctttaaattattattacccctaatatactggggaatgggtgtgtgtt

SEQ ID NO: 230 - DNA, 120 bp, synthetic construct
  source 1..120: mol_type = other DNA
gtctgggcttccaaatggaactgtactttcattcaaatcttcacttgcctataggtcctgcctgcaggaatgacatctctcggattactaagggctgcttattgtgggaatatgactccc

SEQ ID NO: 231 - DNA, 120 bp, synthetic construct
  source 1..120: mol_type = other DNA
gctgggtgaatggaagaaatagttctattcatcacttcctcattttccctaaatctacaatctccagatgtcactactgaattaacagccaacaattccacaacattacctgggagacac

SEQ ID NO: 232 - DNA, 120 bp, synthetic construct
  source 1..120: mol_type = other DNA
atttcacatcaaaaattacttgtttgaaaaagagaaaacaaggctctgagaaacaactgcaacccatacatttttactatccttcttctctgataaatatttgtgtgtagcgagcctgcc

SEQ ID NO: 233 - DNA, 120 bp, synthetic construct
  source 1..120: mol_type = other DNA
gaaggcccctaggactatgggactgatggcttcccttttactgggtatttcaaggacaaatatgtcaaggactttaaaaatatttcacttttaaatcaatattcagatatggttttaaga

SEQ ID NO: 234 - DNA, 120 bp, synthetic construct
  source 1..120: mol_type = other DNA
tgactcagatgtgcagtcagtttggggacccgctgataccatcgaccttatagtttatgggatgattctgttttgctgataaagaaactgaggcatagacagtctgtaacttgcccaagt

SEQ ID NO: 235 - DNA, 120 bp, synthetic construct
  source 1..120: mol_type = other DNA
gatagttatgtgggccttttgttttcttttttccaggattcaatggtttggcatattcctcagtatagggttatttccaggcttcttcacctttttagtggtgcttctatgcttaacagt

SEQ ID NO: 236 - DNA, 120 bp, synthetic construct
  source 1..120: mol_type = other DNA
gagtatgagactagcagcccaacagtccaacaaagaactattggacttcttcccaacagtgacccttaggtgtcctctcctggtaagtgctcagagattagtctcccctagaaaccttct

SEQ ID NO: 237 - DNA, 120 bp, synthetic construct
  source 1..120: mol_type = other DNA
ataagctcagaaactagcactgtgagggaaatatctaaatatggagattataaatgcctatcattgccatttccagagaacacacctgaggccaaaaaccttggaacagaggaaagcaga

SEQ ID NO: 238 - DNA, 120 bp, synthetic construct
  source 1..120: mol_type = other DNA
tgtcttgtgcaagtatgttcagagaaagataacattatttttcagttgtttacccacagtgttaccagttcgatcttcctctttactcactaaagataattcatagtgacttggctgcat

SEQ ID NO: 239 - DNA, 120 bp, synthetic construct
  source 1..120: mol_type = other DNA
ctttattccatcttagggtgatttttgtatgtggtgagagagatggatccagtttcattcttctatccagtggctctccagttttcacagaaccatttactaaatagggtgtccttttcc

SEQ ID NO: 240 - DNA, 120 bp, synthetic construct
  source 1..120: mol_type = other DNA
aatttccgaagagctattggtggtagagggattgaatcacattagaatctcttaggaggacagaacaaccgatgcaagcgagttgttgggaggcgagttatggctcagtgtaaagaaaaa

SEQ ID NO: 241 - DNA, 120 bp, synthetic construct
  source 1..120: mol_type = other DNA
gacaaactgagtatactcatgggatgggcattcagatagagaaagggaacattaccagcatccctgaagccctcctgatgacttcaaggataatcattatcctaatttttaacaccatag

SEQ ID NO: 242 - DNA, 120 bp, synthetic construct
  source 1..120: mol_type = other DNA
aggtgctccacatcactagttatcagggaaatgcaaattagaaccacaacaccatgctgctatatacatatcagaatggctgaaattaaaaagatagaaagtagcaaatgctggcaaggt

SEQ ID NO: 243 - DNA, 120 bp, synthetic construct
  source 1..120: mol_type = other DNA
tatactcatttttaagaaaaggaaattgagcttcagaaagattaaataattttcccagagtgacacacacagccgagaaagaaatatagccttgaactgtttcattccaaaatctatgct

SEQ ID NO: 244 - DNA, 120 bp, synthetic construct
  source 1..120: mol_type = other DNA
tacaagagatgtcatattgacccaaggtggctctatgtgattctattttaaaacactcaaatgcactgaggacttgttttcctctgcctcagagcattttctgagttctgtggccagcaa

SEQ ID NO: 245 - DNA, 120 bp, synthetic construct
  source 1..120: mol_type = other DNA
acatgctgtggatttacagtgtcttttaaatcattacgcctaacccaaaggatgtagacttccaatttttaactattataaataatacttgataaatgtctaggtgcataaagcatcttc

SEQ ID NO: 246 - DNA, 120 bp, synthetic construct
  source 1..120: mol_type = other DNA
aatatttttttttagaggtgggagtcttgctatattgctcaggctggttttgaatgtctgacctgaagcaatacacccactccagctttccaaagtgtgtgagagaaattggcacttggc

SEQ ID NO: 247 - DNA, 120 bp, synthetic construct
  source 1..120: mol_type = other DNA
ccacaaattccaagggttactgtgctcaacattttaaatgtcaatattctacattttgaggcaaaaattgaaggactagggcaaaaatgtgaggggaatggataaaatgcttactacata

SEQ ID NO: 248 - DNA, 120 bp, synthetic construct
  source 1..120: mol_type = other DNA
ccgaaacagtaccaggcaaggttagtggctattgaaaatatcattaaggacagggttatctaaagacacactggatactacattaattttgcaaaaataaaaagacagtatacagtgttc

SEQ ID NO: 249 - DNA, 120 bp, synthetic construct
  source 1..120: mol_type = other DNA
gcgatatatacagcctggatgtgctggacaaagggatgattcaagggtgagatagagtggatggcacgagatttcatcatgctgctcagaacaatgtgcaatttaaaatttatgagttgt

SEQ ID NO: 250 - DNA, 120 bp, synthetic construct
  source 1..120: mol_type = other DNA
gcttttgaagactaaacctccgaacagctgtgtggtgctggtgggggaagcaaggatgctaacaccccaaccccctcctttttttgttttttttttttcaccttttggatctgctgtgat

SEQ ID NO: 251 - DNA, 120 bp, synthetic construct
  source 1..120: mol_type = other DNA
gaatgagtgagtgatttaattaatttcccaaccttaccaacttcgttatgtaggcgcttttccccactcagagaatccactgatgaagggattctctgtgggtttagtgtattgagcagt

SEQ ID NO: 252 - DNA, 120 bp, synthetic construct
  source 1..120: mol_type = other DNA
ttttactatgtgcagcataccttaagcattgcagatacaatattgaataggcaaacatggttcctgccttcatagagtctacagattagcaaattccaacagaatgtaattattattgta

SEQ ID NO: 253 - DNA, 120 bp, synthetic construct
  source 1..120: mol_type = other DNA
atgtactaggagaaaaaggaagaacaaagatagaagcacttccccttgctcaagaatctgcagtgttttatttcctaagcaatgcagaggttatcaacatataggcctgtttgccatgag

SEQ ID NO: 254 - DNA, 120 bp, synthetic construct
  source 1..120: mol_type = other DNA
tttactatttgtacagttcatattgtcctttataatttgtcatatacgattccatatttgttcggaactgttgtagaaagtccagattctgcatggtgtattaaaatgagtctgttagag

SEQ ID NO: 255 - DNA, 120 bp, synthetic construct
  source 1..120: mol_type = other DNA
gccaacaggtggaagcaactcaagtgttcattgacaaatgagtggataaacaaaatgtgggctatatagacactggatattatttagccttagaaaggtatgaaactctgacatgtgctg

SEQ ID NO: 256 - DNA, 120 bp, synthetic construct
  source 1..120: mol_type = other DNA
gagaaatgcttcttccctttgaatacttaggaatttttctttcaaccactggaaaacaaatcccagactaaattctgggccctaatttaattctaatccactttcagttatccccctaac

SEQ ID NO: 257 - DNA, 120 bp, synthetic construct
  source 1..120: mol_type = other DNA
ctttttcttggtaagtctcagatcttctccctgagaccacacaggtagcttcctctctcagagttactccgtcagacctcacactccagattctcatcagtcaagttcagtatctgccca

SEQ ID NO: 258 - DNA, 120 bp, synthetic construct
  source 1..120: mol_type = other DNA
gtgtttactataagccaggcaccatgttatgcattttacacatatttaatctcaatcaagtaatagtcctacgaagtgggggtcttgccccacttcaaaaatgagcaaaggtgtggtggc

SEQ ID NO: 259 - DNA, 120 bp, synthetic construct
  source 1..120: mol_type = other DNA
agtatgcagttagataaattttaacaaatgtataccactgtataacaaacaccacacaatcaagataaaaaaatacttccatcacaccaaaaaagtttccatatgtcctactggtgccac

SEQ ID NO: 260 - DNA, 120 bp, synthetic construct
  source 1..120: mol_type = other DNA
aagacttcagcttttactcagagtgacatgggaacctattgaagggttttgagcagaggaggggtctaacaaatgccagtcctgtctgacttgttgaaatgataaatctggttacagtat

SEQ ID NO: 261 - DNA, 120 bp, synthetic construct
  source 1..120: mol_type = other DNA
tatggcaagtctccagaattttgctcatgcttttccttctgtgggaaacatctgccaactttttcccttctagtgaacctcactaaggcatcaatcgtcatttctttgaaggctttgtga

SEQ ID NO: 262 - DNA, 120 bp, synthetic construct
  source 1..120: mol_type = other DNA
actactctgatcgttgatctgccactaaaccacccctgcctcagtaagcatggttttgccaaccctagaagcttgctatatttaaccttttatggagccagaatcccctgctaaagtgca

SEQ ID NO: 263 - DNA, 120 bp, synthetic construct
  source 1..120: mol_type = other DNA
caactatagaggattagatgtatggatggatgaacctggtcattcaaaaatccccaacatctctctttacctacaggctagcactgtgtttaacccaagttccgtggcttttaatgaagc

SEQ ID NO: 264 - DNA, 120 bp, synthetic construct
  source 1..120: mol_type = other DNA
tctgtctatctgcagaagttctgatctgttgtctgatacagcttaggatagttctcattcagtggttttcaaagtgtgattcccagatagcagcatcaacatgatctgggaacttgtcag

SEQ ID NO: 265 - DNA, 120 bp, synthetic construct
  source 1..120: mol_type = other DNA
gcttcatcacctcagaaaatttctttgtgcccctttgcaatcacttctcaccctgtctctcaccgttcaaccacttcctgacttatatcacaatagatctgtttttcctatagtctgtta

SEQ ID NO: 266 - DNA, 120 bp, synthetic construct
  source 1..120: mol_type = other DNA
cttgtgattgtgatttctactctcttttcagagctcagagggtacttctccagctcagcaacaggtagctctgcttgatcttcagagtgctttattctgcagccaacttgaaatacagaa

SEQ ID NO: 267 - DNA, 120 bp, synthetic construct
  source 1..120: mol_type = other DNA
gttcagtaagagagacagtcacataagctgagtttcagtgtggtaaattctgaaggggatgtatatatggggtcctacaggaatatctaggaaaggagtcaaggaaaaggaatcaaggaa

SEQ ID NO: 268 - DNA, 120 bp, synthetic construct
  source 1..120: mol_type = other DNA
gtgctgcatttcagataccagtagctcagaatccccgtagtcagtttttagaggaagatagactcttttttgcctatgttatttgaccccataatattttcttatgttttcttatgttgt

SEQ ID NO: 269 - DNA, 120 bp, synthetic construct
  source 1..120: mol_type = other DNA
tgtgtcatcatctgtcttagaaaactgggatttgaaatgaaacaagctgagttgggtgattttgaggttgagattatcctaatcatgtggtctgataaacatgtttatgtgcgtaattga

SEQ ID NO: 270 - DNA, 120 bp, synthetic construct
  source 1..120: mol_type = other DNA
ttcccaatattctgcctatgagactttctttccattcacttaactctgtttttccctgtaaactgaaagcaaggaaactatttcctaaggacccactgttttttgttgttgtcattgttg

SEQ ID NO: 271 - DNA, 120 bp, synthetic construct
  source 1..120: mol_type = other DNA
tgcacagcagggccatgagctgacaccttttcctgggtatcgtttcaagtctggggccactcactgtaacttgacatcacctactaatgttatatatatatataatgttagcatagtttg

SEQ ID NO: 272 - DNA, 120 bp, synthetic construct
  source 1..120: mol_type = other DNA
caaaactctagtatataaaatgatatactcagatgtccaatattttcctgttccttctctcctgtttccactcatctcctgcaggtaatcagtttcatttctgggttattcttcctgtat

SEQ ID NO: 273 - DNA, 120 bp, synthetic construct
  source 1..120: mol_type = other DNA
tccatactgttttccacaccagctgtactaatttacatacctattcacaatgtctgtgttccgtttcctctgcattatctctaacatatcattcacctttttgataaatgccactccaac

SEQ ID NO: 274 - DNA, 120 bp, synthetic construct
  source 1..120: mol_type = other DNA
tgaagttagaacataatattaaatattcttttccatatacacatgcgccctctttatcccctttccacatcccagttttggtaaaatacctatcccctttttctttattgagaaactatc

SEQ ID NO: 275 - DNA, 120 bp, synthetic construct
  source 1..120: mol_type = other DNA
actcaaccctagtatgagtttgttgttgtggaaagaatttatctggaatgtcttggtgcaaattagctgttttggtcaattttatttcttcaacaaatatgaatgatttatgtggcaggc

SEQ ID NO: 276 - DNA, 120 bp, synthetic construct
  source 1..120: mol_type = other DNA
gcataggatgatgttccagtatctgggagataccgggtctcagggatttcctcttagggatatattagtaaagatggtatagtatagtagtaatactggaatcagactacctacctctgg

SEQ ID NO: 277 - DNA, 120 bp, synthetic construct
  source 1..120: mol_type = other DNA
agcctggttagtattgccagagacccgagtgggcagatgcccacaccaaagacagaacctgctgcgtgcccaccttgctgatccctccctccttctagacaaaggcttcataagccaggg

SEQ ID NO: 278 - DNA, 120 bp, synthetic construct
  source 1..120: mol_type = other DNA
ttctcatacaattatttctgtgaagatacatacttattttcctgggtatctatagctagggatggagttgcttggtgaatgggtagaaaatgttggacagagttttgcaaagtatttgta

SEQ ID NO: 279 - DNA, 120 bp, synthetic construct
  source 1..120: mol_type = other DNA
tgacctccagcctgcagaggagaggtgccacaggacctttacacgcacaccgctgttcccctcacccatgcatttcttaatgccttggtgaggagaatgcctctgggtcttccttgatgg

SEQ ID NO: 280 - DNA, 120 bp, synthetic construct
  source 1..120: mol_type = other DNA
aaaagataaataaataaagagtcaaaactgtagctctgtgaggctcaaataacatctaattcaagtcacaatgaacatctagcaatcactgtgaacaccacatacttcccttaatacatt

SEQ ID NO: 281 - DNA, 120 bp, synthetic construct
  source 1..120: mol_type = other DNA
atgcctaatacattgcttttttgttctcattagagtaaatgtttaggtttccatttcttcctacccttatcatttactaacctagtgaaagttgaccatacctcaaaagctgtattctca

SEQ ID NO: 282 - DNA, 120 bp, synthetic construct
  source 1..120: mol_type = other DNA
tttcctcctataaatattgctattggaatattatttggtatggctcccgtgaaagatacatttgcggaatgtactcaaattagaagcatcatgtaaaccctataatgtagcaatagtgca

SEQ ID NO: 283 - DNA, 120 bp, synthetic construct
  source 1..120: mol_type = other DNA
taatgatccactccaaatacttgtctcttgtctctgagattctaggtttttgcagaattagtacccaaagggagagtcttagcagtattccattttacaatccatccttcgttagaggat

SEQ ID NO: 284 - DNA, 120 bp, synthetic construct
  source 1..120: mol_type = other DNA
attgtccatcaaatgctagaagactactctgcttttgttactatgtttgccccatttttctagctcttcttacatgaatttaaacctacatcaatggctatttcctcaacatttggaaac

SEQ ID NO: 285 - DNA, 120 bp, synthetic construct
  source 1..120: mol_type = other DNA
caagattttatccgaggtgatcagtgctgctagatgagaggctacactttgagaaccactaattcagacaatggacgtgttttctcccccactccctttctgctttatcttcaaattttt

SEQ ID NO: 286 - DNA, 120 bp, synthetic construct
  source 1..120: mol_type = other DNA
ccagtgtctactgtctctgactgcagatgaagcttgtccacgcggaatgcctgagtgtctggagctgtctgctgactgctggtggcgggatccgtgtctctctcctggacttgatcttgc

SEQ ID NO: 287 - DNA, 120 bp, synthetic construct
  source 1..120: mol_type = other DNA
tctttctcctgcacttgatcttgcctgttcatgggatgatgcagcctgtccaccagaggaagtctgtgtgtgacgagtgcctgattgtctggagctgtctgcagagtgcccatgaccagc

SEQ ID NO: 288 - DNA, 120 bp, synthetic construct
  source 1..120: mol_type = other DNA
tctcagcttgctgagtggatgacaaaaagaggggaattgttaaaggaaaatttaaatggagactggaaaaatcctgagcaaacaaaaccacctggcccttagaaatagctttaactttgc

SEQ ID NO: 289 - DNA, 120 bp, synthetic construct
  source 1..120: mol_type = other DNA
aaaatcacctattcactgcttatgcagtcggaagctccagaagaacaaagagcccaattaccagaaccacattaagtctccattgttttgccttgggatttgagaagagaattagagagg

SEQ ID NO: 290 - DNA, 120 bp, synthetic construct
  source 1..120: mol_type = other DNA
gcttgtggggaagtggctataaggaggaaactgtagagaggattgataaaaacaaccacagggattcactgagcctgtggtcaggatattaagaggaagagaaacaaaattcaaccaagc

SEQ ID NO: 291 - DNA, 120 bp, synthetic construct
  source 1..120: mol_type = other DNA
agaaaaaggaagaagagagcagtttcatcacttggcttgaatgaaaatcttggggaaaggagagacagacggtcttgctctgaagctgtctggacttcacttaattcagtctgtcttagg

SEQ ID NO: 292 - DNA, 120 bp, synthetic construct
  source 1..120: mol_type = other DNA
ttttattctgcatgagctggggctagtgatggtcccattaccagtctactacaaatacagaaacctagagtaagcattagaaacctttatagcagttttgtcactggaaggagggccttg

SEQ ID NO: 293 - DNA, 120 bp, synthetic construct
  source 1..120: mol_type = other DNA
cttccaccatcaagttatttataaaatcaaaagtttcctccgaggccttggagatgccctttctctgcatctgcgaacacctactttcctatacttacagtaggaaacacaggaacgtta

SEQ ID NO: 294 - DNA, 120 bp, synthetic construct
  source 1..120: mol_type = other DNA
ttttttttttttaactaatcctcttatgaccatggttgatatttgcctttccagagtcaaaatggtcctgggcagtttgcctcttagaatctcagagagctcccgtgagcgctggcagct

SEQ ID NO: 295 - DNA, 120 bp, synthetic construct
  source 1..120: mol_type = other DNA
ccttcaacagagggaaatatattttactgaaacaatagaaaatatcatttatatataaaccagtgaactgtcaagaaattgcttcttctgagctcttaaatgttgagaatgaagtaatgt

SEQ ID NO: 296 - DNA, 120 bp, synthetic construct
  source 1..120: mol_type = other DNA
tccagtctctgggagaaacttcagtgaaattctatctaaaggttgcctagatgttaaatgatctgtaagtgtgtgttacactgtcatttaggtgtctactgagagacctgccaaacagca

SEQ ID NO: 297 - DNA, 120 bp, synthetic construct
  source 1..120: mol_type = other DNA
ggactcacagagttctatcctttcctcaacttactgtgtactccctgaaggcaagtgtgagcatgtcattgtacaattcttgccacactattggagaataatacaggtgtgttgaattga

SEQ ID NO: 298 - DNA, 120 bp, synthetic construct
  source 1..120: mol_type = other DNA
gggaattttactcaggtattgatagagaaatgttacaggaatgtccaagtcaattgtttcttacctgtggagtctagtctgttaatatcataaactgcctggctgtgaaacatccagaag

SEQ ID NO: 299 - DNA, 120 bp, synthetic construct
  source 1..120: mol_type = other DNA
gccagcacctaaaaactgtttcaacagatggagaggtaggaagacagcatgagtccctgtaaaccaaatacaatctggctgctctaattttagtctcagtgtttttgaaggaactcagaa

SEQ ID NO: 300 - DNA, 120 bp, synthetic construct
  source 1..120: mol_type = other DNA
ctggcctgaattgagatgtgctgttaagtgtaaaatgtacaccagatttcaaagagtaagaccaaaaaatggaatataaaatattacattagtagtttatgttggttacatgttgaaata

SEQ ID NO: 301 - DNA, 120 bp, synthetic construct
  source 1..120: mol_type = other DNA
attgcttgagcccaggagttcgagattgcagggagccatgattgattgcaccattgcagtctagcctaggtgatagagctaataattatgttatagaagaggcattaacttcaagataac

SEQ ID NO: 302 - DNA, 120 bp, synthetic construct
  source 1..120: mol_type = other DNA
gtcactcaacttctcttccaagcctccttttctgtgatgtggagataatgagacctgccttgctattaattgcagttgtgttaagagtactggctcagtgtatggcaaatattaaatgct

SEQ ID NO: 303 - DNA, 120 bp, synthetic construct
  source 1..120: mol_type = other DNA
acttaacactggtgtgaagctgaaatgaaagaattcagttgaaactatgagatgctgtacacactcagttgattgtcctcatttcctagtaacttggtacaataaagaattaatgcagtg

SEQ ID NO: 304 - DNA, 120 bp, synthetic construct
  source 1..120: mol_type = other DNA
catcttgttccagtgacccaatctataaatggtcagttccttcatttgcagaacttgaaatagtttaaagaagagacttgatgaattgaactcatgtttttgctgctgtggccacaccct

SEQ ID NO: 305 - DNA, 120 bp, synthetic construct
  source 1..120: mol_type = other DNA
cacacacaatcataaggatattcttctatattttcacctacacattttgcctttcacataacgtcttgaataaacaaggagtaaattttcgtgaacagcgtgaggtagggatctaacttt

SEQ ID NO: 306 - DNA, 120 bp, synthetic construct
  source 1..120: mol_type = other DNA
ctctgatttattgtttattctttcacattgaggttgaacctgatttgcctttgaaagttaagagcaggactaggactagaactagaaatgcctgatgtatactgtagcacacagtggagc

SEQ ID NO: 307 - DNA, 120 bp, synthetic construct
  source 1..120: mol_type = other DNA
gacaactgttaacttggtgaacagcatgttcttgtttatgttaactgtgtactttgactgttcaagatccccattacttttcacttgtcatgccacatcattgctgcaagttagcctcct

SEQ ID NO: 308 - DNA, 120 bp, synthetic construct
  source 1..120: mol_type = other DNA
tcttaataaacactgggctcatggtgtttcctttaacatgccaggcatgcttgaccctgtcctgtctcagggccctgctgttccctctgcctggaacattcttcccatagtgtctgcatg

SEQ ID NO: 309 - DNA, 120 bp, synthetic construct
  source 1..120: mol_type = other DNA
agggagggacatggtcagaatggctctgtctgtgtgggatagtttttcttagtataatcccagaagactcctattggggttaagccacagatttagcgttattagtaccactctttaatc

SEQ ID NO: 310 - DNA, 120 bp, synthetic construct
  source 1..120: mol_type = other DNA
aattgaggttagaaggagctttgatcatatgtcaaggaggtgtcatatttaattctactccctgtggcctctcttacaataccagtcatgcataaagcccgtggttttgctgcatctagt

SEQ ID NO: 311 - DNA, 120 bp, synthetic construct
  source 1..120: mol_type = other DNA
ctgccatcaaacacagaatgccctgatccttagaggcagaggcagctctttagcctatagggtaaataaccgggaatggaattctcaccaattcttatcttctatgctaaaagttttact

SEQ ID NO: 312 - DNA, 120 bp, synthetic construct
  source 1..120: mol_type = other DNA
agcattccatttatctgaaacccttcctcacctcatcaagatcttatctggtctttaatgatttactctgctgcttcctgggttctaaagaacccagttcaggagttcctctttcagttc

SEQ ID NO: 313 - DNA, 120 bp, synthetic construct
  source 1..120: mol_type = other DNA
ggttatggacctttacttagtgaaaaactcaaatgaacttcctttctagaactcatggttttcattcagtgacactggactttgccctggagcagtgactggtcagggagctgtatctaa

SEQ ID NO: 314 - DNA, 120 bp, synthetic construct
  source 1..120: mol_type = other DNA
gaatattaggcatatctggatctagtctagccccgacctccttacaagtctttgtgctacaaagtccagcgttggtgtggtttttcaaggaaggatatagaatggtttattttggatgag

SEQ ID NO: 315 - DNA, 120 bp, synthetic construct
  source 1..120: mol_type = other DNA
tgagacatgtaaaatcatgacaaattctacagaagttctatcaaagcaagtcatgtagtgtgttcagggtccagaacctgagttcaccagctccaggctgattcacttttgtcagctgca

SEQ ID NO: 316 - DNA, 120 bp, synthetic construct
  source 1..120: mol_type = other DNA
catttaaattctatgcttcagttaccctgaatttcttcgattatttcggttccttgcatgcagcttcttttctgttgcctctgggcctttgaacatgctgttggctggagtacttttcct

SEQ ID NO: 317 - DNA, 120 bp, synthetic construct
  source 1..120: mol_type = other DNA
tcacactctagaatgactgcttcttacatgtaatttttaagttttgtttctacatggtagcggttaccacagagagtttcaactgcatatctacaagggagtaacaccttgtagctatgg

SEQ ID NO: 318 - DNA, 120 bp, synthetic construct
  source 1..120: mol_type = other DNA
tctggggtgttcacagtctattgcttggtcaggagccttagaaaacttagacatatgtgttaggagaccaggttttgaaacttgctcagggttgcataaacttctacattaagttccatg

SEQ ID NO: 319 - DNA, 120 bp, synthetic construct
  source 1..120: mol_type = other DNA
tccatttctggctgcttgagatccaaactactctattggcctttggagctattcctcctcttgcacctttatctttgaccaagcctcagtgccaccttttgttccagtaaggacatcttc

SEQ ID NO: 320 - DNA, 120 bp, synthetic construct
  source 1..120: mol_type = other DNA
gggattacaggggtgagccactgtgcctggcctgttttgtgccttacttaatagagtaaagtaatgcagaaaaagactatcagtcacactctttgaggaagaatatttgctgtttcctag

SEQ ID NO: 321 - DNA, 120 bp, synthetic construct
  source 1..120: mol_type = other DNA
ccttacagactacctgtgagaattaaatgagatgatacatagaaaggcctataaaatgtattcaataaacacatgctcccatcccttcagggttccagagggagtacctgtgatgcagca

SEQ ID NO: 322 - DNA, 120 bp, synthetic construct
  source 1..120: mol_type = other DNA
gcataaagcagtaatgatctcattaattggtgttatgtacaacatagatctgatgagaggtcagagatggttaaaggttctggaatagtctggaaagttgtcatgaagcaggtgggacct

SEQ ID NO: 323 - DNA, 120 bp, synthetic construct
  source 1..120: mol_type = other DNA
agtaaactttcttgtttggctggttatcagttgtgtcactattggaagtgatgtgagggagcagggcctaggtatcttaagaatttggtagacattcaacctgcaatactcctttcagtg

SEQ ID NO: 324 - DNA, 120 bp, synthetic construct
  source 1..120: mol_type = other DNA
tggagaagctgaaaggctagggaatgagtgaaaagaaagcaaacactaggaagaagcttgctttacaacaactcactctctcaggaactaatccagtcccacaagagtgagaattcattt

SEQ ID NO: 325 - DNA, 120 bp, synthetic construct
  source 1..120: mol_type = other DNA
ggcgaggcgaaggtctctggtgcgggcggcgcggctctgtgtcctccctctacctccgtctctatttatttattttttaagagacaggtcctatgttgcccaggctggtcatttacaggc

SEQ ID NO: 326 - DNA, 120 bp, synthetic construct
  source 1..120: mol_type = other DNA
ggcctctcatttcaatgacgttgtaggcaatagaagttatttggggtcactggaaaaaggaaaccaaggatataagaaacccacccagttttttcatgtccttcacatctgctcctaatg

SEQ ID NO: 327 - DNA, 120 bp, synthetic construct
  source 1..120: mol_type = other DNA
gaagtcaggctccttgaagagatacttgaattgaatctttattgccaagaactcttttcttgttctctacatgttcccttttttgttgcatccaacttttgtttcatgatgcagtatcgt

SEQ ID NO: 328 - DNA, 120 bp, synthetic construct
  source 1..120: mol_type = other DNA
ttttctttatctccagtgaaatcctgtgatgacttcatgggccaacttcttaatggccgtgtgctatttccagtaaatctccagcttggagcaaaagtggattttgtttgtgatgaaggg

SEQ ID NO: 329 - DNA, 120 bp, synthetic construct
  source 1..120: mol_type = other DNA
cattttttaaaaaaatccagccatatatcatctggttaatcatgggctctgggctctgagctggggtcctgatggctgctgttaatatttccagcaagctcattaccttgtttatgtcca

SEQ ID NO: 330 - DNA, 120 bp, synthetic construct
  source 1..120: mol_type = other DNA
aagagatttactgccaagaaaccagggaaactttcagaacactctccttttcatatttgtaacaagattcaattgtacaaatacttctgtgaaactagccatgaagtgtgtacatgaatg

SEQ ID NO: 331 - DNA, 120 bp, synthetic construct
  source 1..120: mol_type = other DNA
ttgagccaagctaatatgcacacctagaggctccaggtacacattaaaggataagcaaagacacaaaaattgtaccatttaagtatgtttcccaggcaattcataagcaaatttttaaaa

SEQ ID NO: 332 - DNA, 120 bp, synthetic construct
  source 1..120: mol_type = other DNA
ggacattgaaattggggttgggaatcagtctaaaaaggggagatttggtgtggcacacacacacacaccttcagagagatgaactttcgaaagtatacctaggaagaaaggaaagaaaca

SEQ ID NO: 333 - DNA, 120 bp, synthetic construct
  source 1..120: mol_type = other DNA
agagttaggagggcatcggggtccagcagacattgagaattttcgacaattgcatgcaaaaaataagtcctctcttctttcctttttcccctagaatattcatgcttactcttcagcagc

SEQ ID NO: 334 - DNA, 120 bp, synthetic construct
  source 1..120: mol_type = other DNA
taattgtatcaaaggttatttgaaaactcagaccttgagtagtctatcactagtaaagctttctgggacccgctttctgtttcccccctttttctcccacttctgccttctctggctaaa

SEQ ID NO: 335 - DNA, 120 bp, synthetic construct
  source 1..120: mol_type = other DNA
cagagacccaagcgctgaacccactctcattctcatgtaggttttatgcttggatatcactgcgtgaatttaaaatctgagcctctaagcaacattttggaaagcctgtttcatagttct

SEQ ID NO: 336 - DNA, 120 bp, synthetic construct
  source 1..120: mol_type = other DNA
tgacttagaaggtgactcgctacctatgtggcagattcactgaccacctctagacatggaaatagttgatacagacctagggaccttgctttatttcagctgagatgtatatttcacttt

SEQ ID NO: 337 - DNA, 120 bp, synthetic construct
  source 1..120: mol_type = other DNA
agatttggaatggagtatcttttaaatctgagttgctgggctgagattcacacccaccacacacacatagtacttgatcttcttaggatgggtcatatggttactgtgatcctgaacctc

SEQ ID NO: 338 - DNA, 120 bp, synthetic construct
  source 1..120: mol_type = other DNA
aacccacaccattgaattctgacaactaaattaaattggttcctaccaacaaaacaataaaagcacaaagcttttaataatgtagtaaaattacaagtaatttggttttttactgttaag

SEQ ID NO: 339 - DNA, 120 bp, synthetic construct
  source 1..120: mol_type = other DNA
actgtagaatgtaatgctgattctgaaattccaattatatctggattctcataaatttaaacgtgtgagatctacacaaaattaaaagctccaaataaagttctaactataatcataaac

SEQ ID NO: 340 - DNA, 120 bp, synthetic construct
  source 1..120: mol_type = other DNA
ggatcagttagaaatgaagaacagggcctggagcatacagcaaccagcacgtgatattagtaatgcctctgcattctggcaaatggggcaccacaccagagggactagccaacagcatca

SEQ ID NO: 341 - DNA, 120 bp, synthetic construct
  source 1..120: mol_type = other DNA
tccttgtagaaagcattcattcttgaaaatcacctcgaggttgaagtcagtttctagaggacctccttgtagaaagcattcattcttgaaaatcacctcaaggttgaagtcagtttctgg

SEQ ID NO: 342 - DNA, 120 bp, synthetic construct
  source 1..120: mol_type = other DNA
gaaagcactgcactagcctgagtgtgttcatcctatcctgaagtgtttcctagtgttatcatcatgggtaaagcactgcactagcctgagtgtgctcatcctatcctgatgtgtttccta

SEQ ID NO: 343 - DNA, 120 bp, synthetic construct
  source 1..120: mol_type = other DNA
actgcactagcctgagtgtgctcatcctatcctgaagtgtttcctagtgttatcatcatggagaaagcactgcactagcctgagtgtgttcatcctctcctgaagtgctccctaatgtta

SEQ ID NO: 344 - DNA, 120 bp, synthetic construct
  source 1..120: mol_type = other DNA
gatttaccgacaatgaatggaagccaggtgttcccatgcctatcgcatcttcgagagaaatgacaagtacttgctttacatgacacatcgaccgaacacttttgcttctcactgaaaatt

SEQ ID NO: 345 - DNA, 120 bp, synthetic construct
  source 1..120: mol_type = other DNA
tgggggaatagtgtaggataagagtccaatttcgttcctctgcatgtatgtatctggttttcccaatgccatttattgaacagactatcctttcttcatgctgcatttttggcaccctca

SEQ ID NO: 346 - DNA, 120 bp, synthetic construct
  source 1..120: mol_type = other DNA
cttttttctcttttccttccctttaactctcttcaggaagtaatccttttatatcatcagtaggtatagacttggttgctacaagccaagactgactcccacagtttggagtttagattc

SEQ ID NO: 347 - DNA, 120 bp, synthetic construct
  source 1..120: mol_type = other DNA
aaatatttgagttgattctttataatggtcaatggacagactgtctaaaggggaaaagtcgagagaagtcagggaagtagttgaagatgaccgtttttgtcatgactgagcagagccaga

SEQ ID NO: 348 - DNA, 120 bp, synthetic construct
  source 1..120: mol_type = other DNA
ggccagcacccacccagggcatcccccgcacggccagcacccacccagggcatcgcccgcacggccagcacccacccagggcatcgctggtgttgctgcattcctttccttggcagcact

SEQ ID NO: 349 - DNA, 120 bp, synthetic construct
  source 1..120: mol_type = other DNA
acacaacacacacaacacacaccccacacaacacaccacatcacacacacatcacacaacacacaacacaacacacacatcacacaccccacacaacacaccacatcacacaaaacacat

SEQ ID NO: 350 - DNA, 120 bp, synthetic construct
  source 1..120: mol_type = other DNA
tggtgggagagaacagagcgaaattgagtccacatccacattggatggtgggcgagaacagaaggaaactgagtccacgtccacattggacggtgggcgagaacagggaaactgagtcca

SEQ ID NO: 351 - DNA, 120 bp, synthetic construct
  source 1..120: mol_type = other DNA
agcaaaactgagtccacgtccacattggatggtgggagagaacagagcaaaactgagtccacgtccacactggatggtgggcgagaccagaaggaaactgagtccacgtccacatttcac

SEQ ID NO: 352 - DNA, 120 bp, synthetic construct
  source 1..120: mol_type = other DNA
agtgattctgacgtgtttccttaacaatatgccatagcattctcccattagcttagtcatttattctgttttggtggggtgtggcatgacttggtcatcttattaaatacaacttctttc

SEQ ID NO: 353 - DNA, 120 bp, synthetic construct
  source 1..120: mol_type = other DNA
tttgaataagagtggtggttgattagctaacccttggtctgtgatctctgtagattgacaaccaaagaggacttttaaaaggagacagggttttgccctgtcgcccaggctggagtgcaa

SEQ ID NO: 354 - DNA, 120 bp, synthetic construct
  source 1..120: mol_type = other DNA
tataattccttttttgggagtaggagatattgtaattttaaataacttactgttaggttccctcctaaattttggtggaagtgtggttcttggtaattgtagcttttttctctgggatta

SEQ ID NO: 355 - DNA, 120 bp, synthetic construct
  source 1..120: mol_type = other DNA
agattggtactagattggtaccagatcaatacttcagtgggaagaaatggggaacatcatacaatttttctcaatcacagtcttaggtcttatcttttctccagctcttttctagccaag

SEQ ID NO: 356 - DNA, 120 bp, synthetic construct
  source 1..120: mol_type = other DNA
tcagcctcctgaatagctggctaggaccacaggtgttcgccaccatgcctggccaactttttattctttttacctagagagggatttcatttttatcccttatagataacctttattgtg

SEQ ID NO: 357 - DNA, 120 bp, synthetic construct
  source 1..120: mol_type = other DNA
agaattcacataccataaaattcagtcctttaaaaagtatacaatttggtggtttttactgtactcaaagttttataatcacggccactgtctaatgccagaagattttcatcagttcat

SEQ ID NO: 358 - DNA, 120 bp, synthetic construct
  source 1..120: mol_type = other DNA
ggggtcagaatactgtatcattgcccatcaacattattaggttaaatgaaaaggtgtgaaaactgatatcttactgtttttgcaactcttggtttacaacgaggttaaagtttcatcatg

SEQ ID NO: 359 - DNA, 120 bp, synthetic construct
  source 1..120: mol_type = other DNA
tattttcctttaagcatttcatgtatttaggctaactacctcctttgtatatattttttccaattttgctttatagtttatttttcttagaaaagaagtttcaaagaagtgaaaagcaca

SEQ ID NO: 360 - DNA, 120 bp, synthetic construct
  source 1..120: mol_type = other DNA
aaaaatttttttaattatacatagtagtgtgtacctttggaaaaattagaacttaacagataaggctaagtttgagccttccagtcctttccttctctgcatactcttcagaggtaactg

SEQ ID NO: 361 - DNA, 120 bp, synthetic construct
  source 1..120: mol_type = other DNA
caccttccctctcaggaaagaagcctagacacatggcagctgtcatgtctgagtcacttgtgttttatactgacctgatattttaaaaactgatattcctgttaaccagcaactttaatt

SEQ ID NO: 362 - DNA, 120 bp, synthetic construct
  source 1..120: mol_type = other DNA
ttatgatatttctaggccacatggtttgtctgcaagatttttcaaattgttgcaaatgtccaaaaaaattttcaacatattactgagaaaacatttgtgtagaagtggacctgtgcagct

SEQ ID NO: 363 - DNA, 120 bp, synthetic construct
  source 1..120: mol_type = other DNA
tgctagtaatccttttactacaaaagtctgagtctggcctttagaaagcgtttaaggaattcccacccagctgtgctcatgccttcacatcaaggaactcccaagcatatataatttgtg

SEQ ID NO: 364 - DNA, 120 bp, synthetic construct
  source 1..120: mol_type = other DNA
tttgtgatactctctagtggatttcagcgtttagtcactgctaaacattgaggagcacttctcaaaccttcatgtttaggaaatcacccaggcaccctgtgaaatgcaggttctgattca

SEQ ID NO: 365 - DNA, 120 bp, synthetic construct
  source 1..120: mol_type = other DNA
gggcagggggaatggagagtgatggctcataggcatggcggttctttttggggtcatgataatgttgtgcacttaggttgtagtgatattgcacaactcgatgagtatattaaagaaaac

SEQ ID NO: 366 - DNA, 120 bp, synthetic construct
  source 1..120: mol_type = other DNA
tggagtcagatttcatctatttcaaaggtctttcctgtttgctttcaactgtgtaaggtcaactaatggcttgggtgtttgggtggtaggtggattcctgtaggtgcagtctagaagaaa

SEQ ID NO: 367 - DNA, 120 bp, synthetic construct
  source 1..120: mol_type = other DNA
ttgacagactctggccttgcaggtgaggttcagctttcgttcataggcccggtttctattacccatatggccaagatgcagccattttagacaatttttttttcttcagactttccttat

SEQ ID NO: 368 - DNA, 120 bp, synthetic construct
  source 1..120: mol_type = other DNA
cagtggggacagaatagtcttcagcagatgtgccaggatgctgattatctacatgcaaagggatgaagttggacccattaataaataaactcagatccaatgtaagatccaaatgtaaga

SEQ ID NO: 369 - DNA, 120 bp, synthetic construct
  source 1..120: mol_type = other DNA
gctgctgcaagtgtggaacagtacaaccactttggagaacagtttgctgttcttcaaattcttataacataaagctaccacacaatccggaattttattcctgggtacatatccaagaga

SEQ ID NO: 370 - DNA, 120 bp, synthetic construct
  source 1..120: mol_type = other DNA
actgcttttctctttccttgcttcagcaagctcgactccatctaccctcttggatctctttgtcggcagccacaccaaaaaatgtatttttatacactaattagttgaattcaccactgc

SEQ ID NO: 371 - DNA, 120 bp, synthetic construct
  source 1..120: mol_type = other DNA
ctacagaatatccaaagctaacataatttaatggtgaaagactgaatgccttctccctaagatcaggaacaaaataagtatatttactctcatttatattcagcattgtctggccagggc

SEQ ID NO: 372 - DNA, 120 bp, synthetic construct
  source 1..120: mol_type = other DNA
tcagcaggtggatcactaggacattcttcctctttccaacagccattgctgaagccataaagaaagcccaggagtcaggggacaaaaagatgaaggaaatcaccgagacagtgaccaaca

SEQ ID NO: 373 - DNA, 120 bp, synthetic construct
  source 1..120: mol_type = other DNA
ctgtttccccagaaactatatacagctttcaggtgcctcagtgcttcaagacatgctaagggaggaccctcatttgtcttgcatgtttttgggatttttcttgagatgttcttgcaggac

SEQ ID NO: 374 - DNA, 120 bp, synthetic construct
  source 1..120: mol_type = other DNA
tctgtgagttagcgtcaggagtcacatggcatcacttccccggtgccctatcagttgaagacaccacaagccaccccagcttcaaggaaaggggacacagacccaatctgtcaatgagaa

SEQ ID NO: 375 - DNA, 120 bp, synthetic construct
  source 1..120: mol_type = other DNA
tacttttataatggaaaaaaaaaggccacatcaatactttaaaaaagaaaggctagcattaggcagggttttagcactcacagccaggacgtgataaagttttgcatcttccaagggttc

SEQ ID NO: 376 - DNA, 120 bp, synthetic construct
  source 1..120: mol_type = other DNA
ggtgtgtttgtcaaagtgtctctgatgaaccacaacaagtttgtcaagtgcaagaagacttcagctgtgctgggctccatcaaccctgtgtacaatgagaccttcagcttcaaggccgat

SEQ ID NO: 377 - DNA, 120 bp, synthetic construct
  source 1..120: mol_type = other DNA
tcctccacagattacaacttctgtacattattataatctaatacaaattttactttttattgtttcccagacaatgctatgatctcacaatactcaatctctatttacctccattctact

SEQ ID NO: 378 - DNA, 120 bp, synthetic construct
  source 1..120: mol_type = other DNA
agattccagttctttgatgaaagtctctattccacccatcaagtctgtgtctgataacaccaatatctgggtcattagtggctccgttttgttgtgtctgttttcccctccttcctgttt

SEQ ID NO: 379 - DNA, 120 bp, synthetic construct
  source 1..120: mol_type = other DNA
ctataatggtgcataacaactaatcacaacatgtcaatgccatacttaaataagcactcatttctaacacatctgtgggttggctggaggtggtctgagctagggtaggcaactcacttt

SEQ ID NO: 380 - DNA, 120 bp, synthetic construct
  source 1..120: mol_type = other DNA
catccaatatcccattggccaaagcacgtcacatagccaagctccaaatcaagggtcagagaagtaaatgatatctttttcctgaggggaactgcaacactacagggcaatggacacagc

SEQ ID NO: 381 - DNA, 120 bp, synthetic construct
  source 1..120: mol_type = other DNA
atgaagaaacattagacatggggtccatctttaaaggggaatcttaccctggtgatatagtttggatatttgtcccatctaaatctaatgttgggctgggtgcgttggctcatgcctgta

SEQ ID NO: 382 - DNA, 120 bp, synthetic construct
  source 1..120: mol_type = other DNA
ttgtcacaccttcagggtatctggattcaccaaagtggctcaggtcaggaccaatgaatagaggtttgttcgtcaagataaaaagattctggcttcctgttttcaggcaatgccaacgat

SEQ ID NO: 383 - DNA, 120 bp, synthetic construct
  source 1..120: mol_type = other DNA
gggaagaattgaggtcttaaaaatattgagtgtttctatacatgaacatgaaatatctctccatttgtttagatatttgctttcctttgtcaaagtttggtagagtttctcatatagatc

SEQ ID NO: 384 - DNA, 120 bp, synthetic construct
  source 1..120: mol_type = other DNA
aaactatgagctccttggaggcagaagttattgcatcatccctggatccacatctctgatacagtgactagcacattgtagacactcaaagcctgctgaattgatttagcgttttacttt

SEQ ID NO: 385 - DNA, 120 bp, synthetic construct
  source 1..120: mol_type = other DNA
gcaactctacaattaccctgcaaccatagtttttaaaatttaaactatattattatataggttaagacatattctgacataggattaatagttgtctaatatttcattgtatggaaatac

SEQ ID NO: 386 - DNA, 120 bp, synthetic construct
  source 1..120: mol_type = other DNA
tatgactggacagttataccagcactattcactaagtaaaccacatttcccaaatgaatttatatatacttttatcacatattaagtttccaaaaatgtttgatccttttgtattctcta

SEQ ID NO: 387 - DNA, 120 bp, synthetic construct
  source 1..120: mol_type = other DNA
tgtggatatccagcttcccagcaccatttgttgtaaagactgtgtttttcccattaaatggccttgacaacttttttgaaaataatttgggttttatttctggactctttcttctattcc

SEQ ID NO: 388 - DNA, 120 bp, synthetic construct
  source 1..120: mol_type = other DNA
ggaaggggaacttaccgacatgaatgaccaaagtgcttgtgaggaaaaggataaaggcaacctaggggaagcaatgatggtagaaaacttgacattaaagaaactttggagctatttcac

SEQ ID NO: 389 - DNA, 120 bp, synthetic construct
  source 1..120: mol_type = other DNA
catttcacaacttacaaagcagtttgaaggctaataaaagagcgagtcacacaggttccccaactcctggcctaatattttttctgttacttatctatcagggacctattcagaactaat

SEQ ID NO: 390 - DNA, 120 bp, synthetic construct
  source 1..120: mol_type = other DNA
acttcagcattataatatagatagatgggaaaacaagctcttcaaggcagagatttaacaagcttctttctgtacttcttgaggttgctctatgtttgtttctgctactaccacccacta

SEQ ID NO: 391 - DNA, 120 bp, synthetic construct
  source 1..120: mol_type = other DNA
ccctggtgaccagcacccaacaccatgcaggaacccaaatctcctgccagctcccacttacccaggatttccaccaggccatctctttcacctcgggggcacctttcccagggagatgaa

SEQ ID NO: 392 - DNA, 120 bp, synthetic construct
  source 1..120: mol_type = other DNA
tggcttgctccctggggcatcaggaggggcttctctgtagcttctctgaacccctctctgcttctggctggggcacctacatctgagcttccagtggtgcttctgagcagctgtagtaag

SEQ ID NO: 393 - DNA, 120 bp, synthetic construct
  source 1..120: mol_type = other DNA
tactatgtctaaatgtttacgatgtcttccccctcaaaactcatatgctgaaatcctcagtcttaatgtaatgatattaaggggtggggcctttgggaggttgaaattagcacccacata

SEQ ID NO: 394 - DNA, 120 bp, synthetic construct
  source 1..120: mol_type = other DNA
cgagtccagggtgagggttcagagcagagccgctgccctcccagtccagggtgagggctcagagcaggcccactgccctcccagtccagggtgagggctcagggctggcttatcctcaca

SEQ ID NO: 395 - DNA, 120 bp, synthetic construct
  source 1..120: mol_type = other DNA
gaaaggaaatgatttaaatatcatgagggaaataaaaggagacaagaagtagtggaacactctactgtgctcctgctgtttgggaagatgtactatacagagttaattcaacaataaaca

SEQ ID NO: 396 - DNA, 120 bp, synthetic construct
  source 1..120: mol_type = other DNA
agatgtccattatcatcacttgtattcaatactttcctggtattcctaacaagagtaataaggcaaaaaagttgaaataaaaatactaagattggacctaagatacaaaactatgtatgt

SEQ ID NO: 397 - DNA, 120 bp, synthetic construct
  source 1..120: mol_type = other DNA
gagagagagagagagagagagagaagttgcatggttaggtggtaaaagcagtgtttgccataaaaatcaggtcgttggttattttggtggggagggagaggtagtgtttggaaggggaca

SEQ ID NO: 398 - DNA, 120 bp, synthetic construct
  source 1..120: mol_type = other DNA
tgaactacttttcccttcaggaaacgtgctgattttagctaagaggccgagcatttgggcagacggccatagctaagaggcagcaaaggcagcagagtcttcagctggagagacaagaaa

SEQ ID NO: 399 - DNA, 120 bp, synthetic construct
  source 1..120: mol_type = other DNA
aaaacaaaaactaacaaaactcaaaggagaaataaacaaattcataataacagtggcaggctttatcctctctcagtaatttatagaaaaacagacaaaaatatcagtaaagacgtagat

SEQ ID NO: 400 - DNA, 120 bp, synthetic construct
  source 1..120: mol_type = other DNA
atcctataacaaccatcaaacttcatggtgaatattgacaactctccacatgccacacccaccacccctgagattgaggatggacaagaatacccactatcactacttatagtcagcatt

SEQ ID NO: 401 - DNA, 120 bp, synthetic construct
  source 1..120: mol_type = other DNA
agcagagagccagctagtctcttgccatttagatttttcagggatgagtcagagataccagtctactctgtcctgcagaaaaggatacttatcaacttttccaagcggccctagaaaagt

SEQ ID NO: 402 - DNA, 120 bp, synthetic construct
  source 1..120: mol_type = other DNA
tgtagatattcagtccttgttgccagcccagctcgattgaatccaaatccatgttttatcaggatcccaggttaattgtgtgcacattaaagtttgagaagctctgctctaagaaacagg

SEQ ID NO: 403 - DNA, 120 bp, synthetic construct
  source 1..120: mol_type = other DNA
cctgagtccagggtgagggttcagagcagagccgctgccctcccagtccagggtgagggctcagagcaggcccactgccctcccagtccagggtgagggctcagggctggcttatcctca

SEQ ID NO: 404 - DNA, 120 bp, synthetic construct
  source 1..120: mol_type = other DNA
aaaaacaaaatacgcatctgctgccatttagaaagaggacacaaactcaggcaagactttttcacacgatgacccatgagtggggcctggctgggcctccccacacatacctgctgacct

SEQ ID NO: 405 - DNA, 120 bp, synthetic construct
  source 1..120: mol_type = other DNA
cctgcccccaggagacctccccaggtctgcacccctcaactccgtgctgacttggtagagcaggagaccagggttcctgaggggccaaggcctccccgcaggtcctcgcctgcctacgta

SEQ ID NO: 406 - DNA, 120 bp, synthetic construct
  source 1..120: mol_type = other DNA
gtgtttatctaaaacaataagcagctttaatgggtgacctcgtcattttgccagtagccttccctaaacagaacagttccgtcctcttcttaatcccactgagcaagggagttttcctta

SEQ ID NO: 407 - DNA, 120 bp, synthetic construct
  source 1..120: mol_type = other DNA
ttctccccacccagacccataccacatgttagggcacaagtccaactgtctagtttctttgactacatggaaaaaacccaacaggattgaatgcattaaaaagcttatatcttctcactg

SEQ ID NO: 408 - DNA, 120 bp, synthetic construct
  source 1..120: mol_type = other DNA
aatggccatttccattaaggtaacatcacatcacagatattaattaggaggcactataataaagttaagtggatgtgggggaaaatgctgagttaaaagtcaccccatatgtccttagcc

SEQ ID NO: 409 - DNA, 120 bp, synthetic construct
  source 1..120: mol_type = other DNA
agaccccgaaactcatctccaagcagtaacagattctaagtggaaataaaaaatccactttttcaggaaaaaaaaatagtaccagcaactcatggtgcattaacggcacttatgtgggaa

SEQ ID NO: 410 - DNA, 120 bp, synthetic construct
  source 1..120: mol_type = other DNA
cacagagaaggcaccatccagccctcccagtcaactggggtcagtcagtcagtgcacagctactttctcaatggctaaaaacatttataattcataatgttactacgtagtttgataagt

SEQ ID NO: 411 - DNA, 120 bp, synthetic construct
  source 1..120: mol_type = other DNA
ttatagagactcagtggctatgaatgatgaggtactcttcatctgcctctagtcatgtgctctgactttaaaaccagagacccttcaagtaaagtccatgttaataagtgctgaaatggg

SEQ ID NO: 412 - DNA, 120 bp, synthetic construct
  source 1..120: mol_type = other DNA
aaaaaaaaaaaaaacaggtggtctaatacccctccccctgggtactggctagcttccaatgaacagaaaaacagcagaagtgatgctaggtaccttgagaaaaataggtcatagaagaca

SEQ ID NO: 413 - DNA, 120 bp, synthetic construct
  source 1..120: mol_type = other DNA
gcttggtactgtgacgtgcctgggcatctaacaaaggcaaaatggaagaaaggagaaaaaggaaaaaaggaaggggggcactatgaattaaagaataaaagactgatcaggttatttgaa

SEQ ID NO: 414 - DNA, 120 bp, synthetic construct
  source 1..120: mol_type = other DNA
tgggtatctaagaaagaaacattaactatagagattatttgatggtagagatggtagatattagagagatataatgacggtacaggatggtttgggttttctttgtgggagggtgggaga

SEQ ID NO: 415 - DNA, 120 bp, synthetic construct
  source 1..120: mol_type = other DNA
aaagtaggagttagggatgagagttaaagcttacatcaatctaccatttagtttacatttatctctcttacacattattaagaaaatcctgattcatccatctatacagttgcaaatggt

SEQ ID NO: 416 - DNA, 120 bp, synthetic construct
  source 1..120: mol_type = other DNA
aaaactacccagcaagtgatggaaatctaaaactggattatggtgatggtcacatagctcaaaaaatggactcaatatcaccaaatcgagcacttaaaatgggtgaatttttatatacct

SEQ ID NO: 417 - DNA, 120 bp, synthetic construct
  source 1..120: mol_type = other DNA
tgctccattctgtagaattctcagtattttatatatgcagaaaacagaagaactttctaagccttggtctgtttctcacttaataaatatcacaataaataaggacttccagtcttctct

SEQ ID NO: 418 - DNA, 120 bp, synthetic construct
  source 1..120: mol_type = other DNA
tgcaaacacatgtaacaatcaggagctggattaactctaactggattaacttaaagaattttgttgcaatgtgacattttgttttctctctagtaactggtatgaaccctctgtgtcctt

SEQ ID NO: 419 - DNA, 120 bp, synthetic construct
  source 1..120: mol_type = other DNA
gagggtcttatgaaagtttttgacagtttctaaaccctgcattaacatctcagtatgtgtagactctcgttaggagaattatgaaacttaactctttagaagttttataaacactttgag

SEQ ID NO: 420 - DNA, 120 bp, synthetic construct
  source 1..120: mol_type = other DNA
atgaaatgaataatgaaatgctgggtgaaatgaaatgaaataaatgaataatgaaatgccagatgcagtggcgcactccagcctgggtgatagagcgagtctctgtctcgaaatgaaatg

SEQ ID NO: 421 - DNA, 120 bp, synthetic construct
  source 1..120: mol_type = other DNA
tatgaaaaatttggaaatatttgtcactagctgtatgaccttttgaaaaaggtccgcctaataccttgctcatctataaaattgcggtatgatgattatcaatttacaggattgtgatgc

SEQ ID NO: 422 - DNA, 120 bp, synthetic construct
  source 1..120: mol_type = other DNA
gatgtaacagctccttaagaaaacctcagtttaccttccctattttttaccatttgtaaaactaaggctcagtgatgtaaaatataacacattctgtgctgtggcataactgcagcttag

SEQ ID NO: 423 - DNA, 120 bp, synthetic construct
  source 1..120: mol_type = other DNA
ctggcagattaaatgctttcttctcttcttgctttacttgatatcaatctcttgttcatttcttgataatatgtttggttatttttgttttcattgcttttagtgtcagagatggctttg

SEQ ID NO: 424 - DNA, 120 bp, synthetic construct
  source 1..120: mol_type = other DNA
gtttgaaccatggccagtctatgttggttaatatgttatttaaatcaacttgtgaagtcttcattttaaatatagaatttgtgttaatggactggaaaataacattctattgcttggaag

SEQ ID NO: 425 - DNA, 120 bp, synthetic construct
  source 1..120: mol_type = other DNA
ttgcatcccatggactcttcttctgtggccacatgtctctgtggctctttccttcccccttctcttccactgttaaggactcatgtgcttacttagtcctgaatggagacaccgtcatca

SEQ ID NO: 426 - DNA, 120 bp, synthetic construct
  source 1..120: mol_type = other DNA
tgccttgtctacctgtgccttacagagtgacaccattgtggtgtggttgatcagaggtttgtttgcccacggatgaaagcaaaagtgagttggcttcccaagaacttttaccagtagcct

SEQ ID NO: 427 - DNA, 120 bp, synthetic construct
  source 1..120: mol_type = other DNA
aacagctgtttttcccccaagtattgtagcatttatcacatgcctttcaaagatattttccatctgcaaaagcacatctgtttctttttatgtgtgtgtgtggggcaactttctttggcc

SEQ ID NO: 428 - DNA, 120 bp, synthetic construct
  source 1..120: mol_type = other DNA
gaaatcacaaattcagctaatattagcattttcagtacttttcgtaaactaagtaaatacacaaaatgttgatttttctgaccataagacgtattttatgtccttctgccaaggtggatt

SEQ ID NO: 429 - DNA, 120 bp, synthetic construct
  source 1..120: mol_type = other DNA
tttggttttgtcagatgagaaagttccggagattggttgcatggcaatgtgaatataccctacattacccaacccaagggctctccttgaccctgttccaactgtcacttagaagtggtt

SEQ ID NO: 430 - DNA, 120 bp, synthetic construct
  source 1..120: mol_type = other DNA
atcttcttgtcctatttaattgttcggctcttgtgtattgaagtttatcttcccaagggaatagatgtcccattttatgtttctacttcatgtaggtcaacttgcaggtctttctttgca

SEQ ID NO: 431 - DNA, 120 bp, synthetic construct
  source 1..120: mol_type = other DNA
acttgaaagaagctggtcacagaaaaccacatattgtattgttccatttatatgaaatgtatagataaaccacagagacagaaagtagattagtggttgccagggcctgtggggcagggg

SEQ ID NO: 432 - DNA, 120 bp, synthetic construct
  source 1..120: mol_type = other DNA
tagaaaaccctaaagactccatacaaaaactcttagatttgataaatgaattcagtaaaatttcaggatacagagtcagtgtacaaaaatcagtggtgttcttatacaccaataatgatc

SEQ ID NO: 433 - DNA, 120 bp, synthetic construct
  source 1..120: mol_type = other DNA
ttcttcacagaaagatgcctcacatccatcctgattttcctaaaaggcttctcagtgcctacagatagagggaaagtggagatgggaagatacatgtatttgcagacttgcattttgaaa

SEQ ID NO: 434 - DNA, 120 bp, synthetic construct
  source 1..120: mol_type = other DNA
ttcctaacatcaccaagcagagtataagtttacacaagtacttatgtgctttgtgtataaaggtacaatcaattaattcacataatacatttgtttattctaaagcaatccttaaatatc

SEQ ID NO: 435 - DNA, 120 bp, synthetic construct
  source 1..120: mol_type = other DNA
ttgacatttcatgtcttttgaaagtgttgaccatgaaccaatccccacctctcttttagaacaaggaggtaaataaagtctgttaagtcaccagcataaatctggagacacattttctgt

SEQ ID NO: 436 - DNA, 120 bp, synthetic construct
  source 1..120: mol_type = other DNA
ccgcacccggcctatcaatattctttatatgttttgctattcccatttaaaagagggaaactgtagctatacactttctagtcatgttctttggtgattttcctgcacaaaccaacattg

SEQ ID NO: 437 - DNA, 120 bp, synthetic construct
  source 1..120: mol_type = other DNA
ggttgcaattgcttcagtaaaaaggacagtttacactcaaattgaagcaaccattatgtttccacaaacaacattccttattatcccacctcaccttttcattcttcctatgctgtctaa

SEQ ID NO: 438 - DNA, 120 bp, synthetic construct
  source 1..120: mol_type = other DNA
ggctgtaagtcctctcagcttttgtctgcagtcttttgacttcattttcccaaggtattttcactggctatagaattctggatgggctcaagtttgtttcccttaaagctgtcactcatt

SEQ ID NO: 439 - DNA, 120 bp, synthetic construct
  source 1..120: mol_type = other DNA
agcatgttttccctttctcacattcctgtctgacttcatttttctgctgagactctccatctgtgtattctgttaccaccttcaccagttgccttccccttttaatcacagttctgtgaa

SEQ ID NO: 440 - DNA, 120 bp, synthetic construct
  source 1..120: mol_type = other DNA
tacttaccagctgaataaaaaataaatttttaaaaggagagaagtcttaaaaaccagttatttaccccatcattaagttataatgaactttcttatgggaattctttgataaggaagctc

SEQ ID NO: 441 - DNA, 120 bp, synthetic construct
  source 1..120: mol_type = other DNA
agggagttttttcactccctggtaataagaggggaaaagcactctcttttaatgatacatgttttgtaataagcattttttttagttgcagtgttctgcaaagacaaaacctgctgatac

SEQ ID NO: 442 - DNA, 120 bp, synthetic construct
  source 1..120: mol_type = other DNA
tatagttgttaacaacgaggtaacattctctctggtggctgaaatgcaatttacttaaccattttcctattataagacatttagatgatttctatgaacattttttttaaaaatcagatt

SEQ ID NO: 443 - DNA, 120 bp, synthetic construct
  source 1..120: mol_type = other DNA
catgcatcctgaatgttggatcatgaaaagtcttgaatgctgtactagctcttcctggctaggcagtggggaaccactgttttttagtaagtcacctgaactcattaatgctctgatata

SEQ ID NO: 444 - DNA, 120 bp, synthetic construct
  source 1..120: mol_type = other DNA
tcagtacctgggtgacaggatcacttgtaccccaaagttcagtatcacgcagtattcccaggtaacagacctgcacatgtacacccgaatctaaagtaaaagttgaaaagaaaagacttc

SEQ ID NO: 445 - DNA, 120 bp, synthetic construct
  source 1..120: mol_type = other DNA
tacataaatcaatcagcaaactgaataagagaaaactctcattgattatttttctaagactcagtcaaatatttattaggaatccacgtatgttcacatatcacatatgtactgtggatg

SEQ ID NO: 446 - DNA, 120 bp, synthetic construct
  source 1..120: mol_type = other DNA
cctttcccagtgcacaggcctaacctgcaaggcatgctcatgtttcttaaataaatgaatggtttaggcacagagaacagtgaaaactggctaaccagtttaatctttatcttctgagca

SEQ ID NO: 447 - DNA, 120 bp, synthetic construct
  source 1..120: mol_type = other DNA
ctcattacatcggggcccagagtttcacattaatttctattcaagaaaccaagtttagagaactaggaactgcccaactctagcaatagcctctttctgttatcgaccctcatgagatca

SEQ ID NO: 448 - DNA, 120 bp, synthetic construct
  source 1..120: mol_type = other DNA
aagatttaaattcacatagctgcatatggctagcggctaccatagtggacagcatagctctagaacatgggcccagtttttggcgattatgaataaagccactataagcattcacgaaca

SEQ ID NO: 449 - DNA, 120 bp, synthetic construct
  source 1..120: mol_type = other DNA
actgagtgtcagactcgcccatttctttccctcctcattccagttttgtcgacttctgtgtaacattcctgatctgaccttctcttctctttctcacagcttcccagtcccagccgacac

SEQ ID NO: 450 - DNA, 120 bp, synthetic construct
  source 1..120: mol_type = other DNA
ctaaaattaaaaaagaaattctgtagtgttggtgttacttttccctttcattgaagaattcaccagtgaagccatcaggaactgggaattgtttttgtgggaaagttttaaattacagat

SEQ ID NO: 451 - DNA, 120 bp, synthetic construct
  source 1..120: mol_type = other DNA
tggaaggtgcccagattcatgaatcatgaataaaagccaattaaatctataaatttgttgtagtcctctgataatataaaacctaatttgtaatttagtcttttgacgaacctaatatat

SEQ ID NO: 452 - DNA, 120 bp, synthetic construct
  source 1..120: mol_type = other DNA
agcataattatcttgtgatccgtcaaagttgttttgatatattttatcatttttctttttatatttcatgggacattacttctattgttttatacgtttcacgtttgtttagttttatcc

SEQ ID NO: 453 - DNA, 120 bp, synthetic construct
  source 1..120: mol_type = other DNA
gtgcgctgatgtgtgctgtgtgtgcgcttgtgtgtgctgtgtgtgcgctgatgtgtgctgtgtgtgcgcttgtgtgtgctgtgtgtgctgatgtgtgctgtgtgagtgctgatgtgtgct

SEQ ID NO: 454 - DNA, 120 bp, synthetic construct
  source 1..120: mol_type = other DNA
tgtgctgtgtgtgctgtgtgcgctgatgtgtgctgtgtgctgatgtgtgctgatgtgtgctgtgtgctgacgtgtgctgtgtgctgatgtgtgctgtgtgcgctgatgtgtgctgtgtgt

SEQ ID NO: 455 - DNA, 120 bp, synthetic construct
  source 1..120: mol_type = other DNA
atgcacccctgaacctaagataaaagttaaaaaaaaggttttgtgctaagaaaaagcttattttttcattcccctccagctgttaactcacggggaggccctctttcagggaggcacaga

SEQ ID NO: 456 - DNA, 120 bp, synthetic construct
  source 1..120: mol_type = other DNA
gggtgtggatctcgttcgttttcatgtagaaaacgagagcgaaactgcagagaaaagaaacgtcgggtgcatcacggcctgaccacggattcctgtttcctgcaacaaggggagtctcca

SEQ ID NO: 457 - DNA, 120 bp, synthetic construct
  source 1..120: mol_type = other DNA
cactatggtgaccccaacaccaacaatcaccagcacacagaccccaaccccgacacccatcaccaccactacggtgaccccaaccccaacacccaccagcacacagagaacaacaccgac

SEQ ID NO: 458 - DNA, 120 bp, synthetic construct
  source 1..120: mol_type = other DNA
ccggcacacagaccccaaccacggtactcatcaccaccaccactacgatgaccccaaccccaacacccaccagcacaaagagtacaaccgtgacacccatcaccaccacaactacggtga

SEQ ID NO: 459 - DNA, 120 bp, synthetic construct
  source 1..120: mol_type = other DNA
actcacctcactcactcacccactcacccattcacccattcactcactcacccactcacccattcacccattcactcactcacccactcacccattcacccattcactcactcacccact

SEQ ID NO: 460 - DNA, 120 bp, synthetic construct
  source 1..120: mol_type = other DNA
tcaccgactcaaccattcactcacccattcgcccactcattcacctcactcactcacccactcacccactcactcatccattcacccattcacacactcactcacttactcactcactca

SEQ ID NO: 461 - DNA, 120 bp, synthetic construct
  source 1..120: mol_type = other DNA
tgtcctcctccccagcaatttctgcatcagagttttcactctactttcttcactgaataaaagctcacaaagtggaggatccattgggttggtaaggatcctctttcttttttcttttgt

SEQ ID NO: 462 - DNA, 120 bp, synthetic construct
  source 1..120: mol_type = other DNA
tgcttcgctccattgtagctgatttcaacccagttgtaagcctggagcacctggagaaatcagacccaggtgggatctcaaaggtggagagggtgggaaaggagcaaaagaaagagaagc

SEQ ID NO: 463 - DNA, 120 bp, synthetic construct
  source 1..120: mol_type = other DNA
gtaagataatttcaggtaatgataagggccttggcaaattaattaatgggagcatggggaacaagaagattgagagggggcaaatttagataaagtggtcacggaaggcctgttggcaga

SEQ ID NO: 464 - DNA, 120 bp, synthetic construct
  source 1..120: mol_type = other DNA
agaaagataagaactgtgaggaatgaaggaaaagatggagaggcagactgaggagatgacccagagacagcccctagggaggccctgacagagagaccccgttccgtgaactgccctgtc

SEQ ID NO: 465 - DNA, 120 bp, synthetic construct
  source 1..120: mol_type = other DNA
cctggatgtttatcacccagcgcctatcacggctgaatcggtgtcccagctccacttttattctccttttctccagagcgaggggagctgcatcagtggcttccagggcatgaacctccc

SEQ ID NO: 466 - DNA, 120 bp, synthetic construct
  source 1..120: mol_type = other DNA
cgagactccatctcaaaaaaaaacaaaaaaagaaaagagatcatgaggaaaggaaagcaatcaggagagtcacgagaggtagacactaatggtgatgtccctaagtagataggacagggc

SEQ ID NO: 467 - DNA, 120 bp, synthetic construct
  source 1..120: mol_type = other DNA
ctgtcacaatctaaagacgttcctcatcagacagatcatttgaccagaaagccctgtgccaacatatctgatttcatcctcctcatgttgctgcacaacagaagatgaattcacaatcct

SEQ ID NO: 468 - DNA, 120 bp, synthetic construct
  source 1..120: mol_type = other DNA
atagcgggtatattgatgcagaggaataatacacagcaatgaaaatgactgagtaacaactccacacaccgccattcgtggatgcctctcctaaacatgattttgagcaaagaagcgcaa

SEQ ID NO: 469 - DNA, 120 bp, synthetic construct
  source 1..120: mol_type = other DNA
tctctccatctgcctctgtctctgtctctctccaccttcccacctctctctatctgtctctctgtctctgtctctccatctgcctctgtctctctctccgtctcccccacctctctgtct

SEQ ID NO: 470 - DNA, 120 bp, synthetic construct
  source 1..120: mol_type = other DNA
tgtctctctatctctgtctctccatctgcctctgtctctgtctctctctccacctccccacctctctctgtctctgtctcagtctctctccctctttccctccctcccccttctctctct

SEQ ID NO: 471 - DNA, 120 bp, synthetic construct
  source 1..120: mol_type = other DNA
atgttgttttgagatacatgtgcataaggaaatgattactataatgaagaaaattaacaaatcgatcatatcacttagctctgcttcttttttatgataagaacatcaaaaatctagtcc

SEQ ID NO: 472 - DNA, 120 bp, synthetic construct
  source 1..120: mol_type = other DNA
tggacaagcatccttttaaagtgtatgggcccacgaaagaccacacccacttcctgaggttgattagattgcgtagaaaggggtaaattggctgattaggtttataaagtattgaaaacc

SEQ ID NO: 473 - DNA, 120 bp, synthetic construct
  source 1..120: mol_type = other DNA
actaggttcttatgaaatacttttcaacacactactattagctatcataccctcagagtatacatccacaaagagaaaatcatttttaatatttttctgaagtcctcagagttctcctta

SEQ ID NO: 474 - DNA, 120 bp, synthetic construct
  source 1..120: mol_type = other DNA
gataatgagtgttctaagatagttggaaataaaaaaaaaaaaacacaatttgaatttctctattccaacccatatttatggaaaagtaagaccagttcatgcttaagagttggagtatag

SEQ ID NO: 475 - DNA, 120 bp, synthetic construct
  source 1..120: mol_type = other DNA
ccttaaaagtctccaggcattcaaggataccactatgtggaaactcaggccttctactgcattattgaaggagcacatttgagactcacagctctggttccaggagtctgttaacaggtc

SEQ ID NO: 476 - DNA, 120 bp, synthetic construct
  source 1..120: mol_type = other DNA
ttgagtctcaatcttattaaactgtgaaaaatttcttaaaatgtcttagatgagttctggaaaatatttgcaattctaagatttttcactgctttcacttaaattcagaagtgatataaa

SEQ ID NO: 477 - DNA, 120 bp, synthetic construct
  source 1..120: mol_type = other DNA
ggctaagctcaagtctgaaagcttcagaacaagtttcaggagagagacggaggaagttgccttttttctgcctttttctttatatctgaggtgtcagctgattggatggtgcccacacac

SEQ ID NO: 478 - DNA, 120 bp, synthetic construct
  source 1..120: mol_type = other DNA
aggcccactgttacactccttattcaccctccatttaagattcggttttatttaatgttgtatgtattcgtacacaattttatttatgtgaggcttagtcttagaatagaagatcatcct

SEQ ID NO: 479 - DNA, 120 bp, synthetic construct
  source 1..120: mol_type = other DNA
ggagaatctataattcagtcttttatcacaggttcacattcccttataaaaaggtaacagttggatgcatgtctggaggagctcttgggcttgtccgattgtatctttaacttctcatct

SEQ ID NO: 480 - DNA, 120 bp, synthetic construct
  source 1..120: mol_type = other DNA
gatgggcacactcttggcatcaactctcttggtccaatggcaaccctatatattgcacacgggacactttctgtggggactctgagatgcagagggaccagataacaagcaggaaaggta

SEQ ID NO: 481 - DNA, 120 bp, synthetic construct
  source 1..120: mol_type = other DNA
tttcctcatttgtaaaaggaggttacaaagtctaatctagggggttcttagaaggattagagaacatgtatgtgaggtgcagggcctagcgcttgaagaaggtatgtgacgaaaggcttc

SEQ ID NO: 482 - DNA, 120 bp, synthetic construct
  source 1..120: mol_type = other DNA
ctgcttctggaaaagcacaaagtgcaggttcccacagaggctccaaagggctgcttatttccatggaagaaaggggtggtcatctttatttcagtcaatgagggcattaacaaaaagaaa

SEQ ID NO: 483 - DNA, 120 bp, synthetic construct
  source 1..120: mol_type = other DNA
ctgaaacagctgctcagagtaaaagaggactgggtgctatgaaaagagatagggcttagaatctttttcagatgagtgtgtttctctcactgttgtatgtgggttgttgagttatggggt

SEQ ID NO: 484 - DNA, 120 bp, synthetic construct
  source 1..120: mol_type = other DNA
tgacagaatgctgctggaaatggtgtgaaaatagctcaggtaggaggaagcgcagtcagatgcggcatggcggcgggcgcatcgggaaaccactgggcgcccaccccggggagggtttcc

SEQ ID NO: 485 - DNA, 120 bp, synthetic construct
  source 1..120: mol_type = other DNA
agctgggtgtcctgaagccactgggcgcccaccctggagagggtttccacctcagctgggcatcctgaagccactgggtgctcaccctggagagggtttccacctcagctgggcatcctg

SEQ ID NO: 486 - DNA, 120 bp, synthetic construct
  source 1..120: mol_type = other DNA
cacttcatttcagttagaatcaacatttacacccaggtctcatcctgcttcttgcatgaattggacccaggacaacagccaaaatttgaagctccaggcttaaaatttgggcccaatggc

SEQ ID NO: 487 - DNA, 120 bp, synthetic construct
  source 1..120: mol_type = other DNA
atgacccagcttccccaacaaatcaaaggcataaaaatggggagtggcattactatagattaaagacacacaagaaacattaatagaaaaacagcaaggcaggaggggtgggcaggaaga

SEQ ID NO: 488 - DNA, 120 bp, synthetic construct
  source 1..120: mol_type = other DNA
gtgttggtaatgatggtggtgacagtggtgttggtaatggtgttagtaatagtggtggtgataatggtagtgatgatggtggtgtttgtaatggtgatagtgatgatggtgatggaggtg

SEQ ID NO: 489 - DNA, 120 bp, synthetic construct
  source 1..120: mol_type = other DNA
gtctaggatttccagtactatgttgaataggagtggtgagagtgggcattcatgctttgctcctgttcttaagaagaatgcttccagcttttgcacattatatatgaagttggctgtggt

SEQ ID NO: 490 - DNA, 120 bp, synthetic construct
  source 1..120: mol_type = other DNA
gattacacaatgactcagtgacatctggaacactggtctacagctcttaacccagaaaactttacctcctggttcatactaagctaggtaatcaaatctgtttcctactgatggaagtag

SEQ ID NO: 491 - DNA, 120 bp, synthetic construct
  source 1..120: mol_type = other DNA
cagggaagccttcattgagtaaaaacctgaaggaagtaagagagctagctttactgatactgtgagaaagagtgttctatgcagacaaacagcaagtataaaagccctgagatggaagga

SEQ ID NO: 492 - DNA, 120 bp, synthetic construct
  source 1..120: mol_type = other DNA
gggagagggagagggggctgtcaaaattcttatccaaggtcacacaactaacctaagcttgtgctgtaccaagtaagactgaagtattttaaatcttaatgtttggccaatctacacata

SEQ ID NO: 493 - DNA, 120 bp, synthetic construct
  source 1..120: mol_type = other DNA
gtcattggagctgggacccggagactgggaatcaggcagcttccaaacaaactgtgtggggtagagccaagatttgaacccagggtcctagaggagaggtggacaggaggagagagcaga

SEQ ID NO: 494 - DNA, 120 bp, synthetic construct
  source 1..120: mol_type = other DNA
aaaaaacaaaaaaaaaagctagtcccacatggcttacagatgaaatgtatcagctgcataatttggggtgttctacttggcatttataggtggagtctggcagtcccccttctcagggta

SEQ ID NO: 495 - DNA, 120 bp, synthetic construct
  source 1..120: mol_type = other DNA
agataaagcaaaacttcccttttctttacgtataggctacaggtagcgacttccagaaagcacagtagagaaagaggtgggaaaatcactttatggtggagaaacctaatcaacactgcc

SEQ ID NO: 496 - DNA, 120 bp, synthetic construct
  source 1..120: mol_type = other DNA
gaaatttctctcccaccagggaactttctcctcctctacctccctgagtctcagtctaacagcaccctgcgcccaaccccgagggctgcaatagccttcttgcctctcctgacttattct

SEQ ID NO: 497 - DNA, 120 bp, synthetic construct
  source 1..120: mol_type = other DNA
acagtgagtgggtggtgtgagtgtgagaacatctagaggtgctatacttcagaatctgaggtccctcaggaatcttacagctggggctggcttcctgcagccttctcagcatggacacca

SEQ ID NO: 498 - DNA, 120 bp, synthetic construct
  source 1..120: mol_type = other DNA
gctggccagtatagtagatgctaaaatgtcatagtaaaaataagaaataaaattgtcttccctatagaaattatgcttttgtagaagatatatgatattatccaaagaaatgattaataa

SEQ ID NO: 499 - DNA, 120 bp, synthetic construct
  source 1..120: mol_type = other DNA
cagggtccatcaccacctgcacagtaattcagtgcagcccgcgcagcttcccagtggggaccatcaccacgtgcgcaataattcagcgtagcacgtgcagcttcccagcgggatccatca

SEQ ID NO: 500 - DNA, 120 bp, synthetic construct
  source 1..120: mol_type = other DNA
agatgtcagtgtgcctggggtgtggcctcctggagggagtcagtgtggagatgcccgtgtgcctggggcatggcctcctggagggaaccagtgtggagatgtcagtgtgcctggggcgtg

SEQ ID NO: 501 - DNA, 120 bp, synthetic construct
  source 1..120: mol_type = other DNA
actttgtcctgggttgtgagtgggctcagcccctgtgtacacccatgcttggattctggcacacatggcacccacaggaggcaacgccccctccaggagaccggttggcaggaccctgtc

SEQ ID NO: 502 - DNA, 120 bp, synthetic construct
  source 1..120: mol_type = other DNA
ataaatgatattactattgcaaatgtattgccctactctacaggagttttctttaaaaatattgaactcccaagctgtgttcatccattgttttcaatccgtttagtcatcagacataag

SEQ ID NO: 503 - DNA, 120 bp, synthetic construct
  source 1..120: mol_type = other DNA
agctctcttattccatagtacttttaagaactaaaatttaaatgctggtcatctgactggaaccgccccagacctgttacattataacatattctacttaatgtaaggcaccagagattg

SEQ ID NO: 504 - DNA, 120 bp, synthetic construct
  source 1..120: mol_type = other DNA
aataggtgggtaatgtaaggggaaacccttgagcagggggaatatcaagtaattaactgacttagtatcctcttctggtagaagtggccaattagagcctcagctctgctttcaaatcta

SEQ ID NO: 505 - DNA, 120 bp, synthetic construct
  source 1..120: mol_type = other DNA
agctgtgtttatggtggttttgttcatttatgttgggtggatgaatttatgagggaatttttaacatgtgtgtatgtcttcaatctggtgacatctgatgtctccccaagtggttttttg

SEQ ID NO: 506 - DNA, 120 bp, synthetic construct
  source 1..120: mol_type = other DNA
tcctttgtcatgtatctatatctgtacatataggagaaagccatgttcttaattcaactccatttgcctgcaacagtcgagtagtgaccttcacaatggcctcaatccaaaggagaagca

SEQ ID NO: 507 - DNA, 120 bp, synthetic construct
  source 1..120: mol_type = other DNA
ttgaatctttgcctaaatactttttaattttgttttatttagaatgatcagccttcgcggccccccttttttgtaccccaacttggggtgtatgaaggcttttggtctccctgagagtgg

SEQ ID NO: 508 - DNA, 120 bp, synthetic construct
  source 1..120: mol_type = other DNA
aagctgacaaggggtagaagaggtgcctcagcacagcacagccacgctacgaaaacatggccagactcttgtttaagtcagtccccgaacacatttctagtcagtgggtgaagtctttca

SEQ ID NO: 509 - DNA, 120 bp, synthetic construct
  source 1..120: mol_type = other DNA
gcaggtgttgcactcctactttctgacaaaacagactatgcgaataaagataaaaaagagaaggacattacaaaggtggtcctgacctttgataaatctcattgcttgataccaacctgg

SEQ ID NO: 510 - DNA, 120 bp, synthetic construct
  source 1..120: mol_type = other DNA
tttttttatataagtggtctcatctacataacaaggccatcttttgctagcaaaggccaaactgaaggagtaatggtggggaccgaatgttaagattctgccctgttcactacagaaacc

SEQ ID NO: 511 - DNA, 120 bp, synthetic construct
  source 1..120: mol_type = other DNA
actgagttctattaacaggaataaagagagagaaatgcagaaaataatcttattttataaatgaagtttttaaaattatatgaagtcactgtggaaaaatatggtgaggtgaatactcaa

SEQ ID NO: 512 - DNA, 120 bp, synthetic construct
  source 1..120: mol_type = other DNA
attgtgaaataatcagtataccctagatctaacctcatttttcaaaaacggttgcataatacattattttgggggtatggacattgagctatttcctattgataagggagtagactagct

SEQ ID NO: 513 - DNA, 120 bp, synthetic construct
  source 1..120: mol_type = other DNA
ccatggttttaagtgtgtaaaactgccatgctgattatgccaaagctctacatacttaaagagacacactggacagtccacaatacagcttcaattgataaaaaacagtttagaatttgc

SEQ ID NO: 514 - DNA, 120 bp, synthetic construct
  source 1..120: mol_type = other DNA
gcatgtcgacatatctctatgtactgacaccctcaatagttacatattattccgtcctatggatgcactgaaatttgttcatgaaatctttatatgggcttttctaaatacactgctatt

SEQ ID NO: 515 - DNA, 120 bp, synthetic construct
  source 1..120: mol_type = other DNA
acaccacaggtgctttggtgtgggaggaaaaatggattctgagcctggacaccaacctgctcttaccaaaagaagtagaggaaaagccaatcacaagtgcaaaaaaaaaaaaaggtacta

SEQ ID NO: 516 - DNA, 120 bp, synthetic construct
  source 1..120: mol_type = other DNA
aagctgtcaatgatttcaagttcccaagttctccacaaattgacttcaaatgactttcttggtgttatttttccctactctcttttgcagataaattagacagtagacagcatttcattc

SEQ ID NO: 517 - DNA, 120 bp, synthetic construct
  source 1..120: mol_type = other DNA
ttctgaggtataggctggagactgaggtattcagactgtactcacactgtttcctccctccttacatggatgagaattggagagacgcagcaaaatgcatcactagaacctgaaacaaat

SEQ ID NO: 518 - DNA, 120 bp, synthetic construct
  source 1..120: mol_type = other DNA
tgacacatgtttacaaaactcaggttgatgatctacaatccaaatgaaaagaatgaagagttttactaagccccaaactccccttgcctaaggagttactttcttccccagtgagctggg

SEQ ID NO: 519 - DNA, 120 bp, synthetic construct
  source 1..120: mol_type = other DNA
gtcctatcttccagctccgcttctagttctcttgctatttccaccacatctgcagttccttcctctgatgcagtcttgaacccttccacgtcatccatgagggttggaatcaacttcttc

SEQ ID NO: 520 - DNA, 120 bp, synthetic construct
  source 1..120: mol_type = other DNA
tgaggtataggctggagactgaggtattcagactgtactcacactgtttcctccctccttacatggatgagaattggagagacgcagcaaaatgcatcactagaacctgaaacaaatgaa

SEQ ID NO: 521 - DNA, 120 bp, synthetic construct
  source 1..120: mol_type = other DNA
tgtttacaaaactcaggttgatgatctacaatccaaatgaaaagaatgaagagttttactaagccccaaactccccttgcctaaggagttactttcttccccagtgagctgggtgaactg

SEQ ID NO: 522 - DNA, 120 bp, synthetic construct
  source 1..120: mol_type = other DNA
ttacgttttgagggtggtcttttcgtgaagcaatagagaaacggaacggggagacggacagtgagcagacaagcaataatacgaagcagaagggggaaaaacgtggaccaagggatagag

SEQ ID NO: 523 - DNA, 120 bp, synthetic construct
  source 1..120: mol_type = other DNA
tccggagctggggtagttgaccaggccacggccacatccacccaccagcaccaagggcaaagtgagagtctgagtgacagctgcgacctggggggtcacagaggtccaactagaacagtc

SEQ ID NO: 524 - DNA, 120 bp, synthetic construct
  source 1..120: mol_type = other DNA
tcccgtatcttcttctcctgctcccttatcttctcctcctgcctccacatcgtctcctcctgttcttgcatcttctcttcctgctcacacatcttctcctcctgctcccccatcttctct

SEQ ID NO: 525 - DNA, 120 bp, synthetic construct
  source 1..120: mol_type = other DNA
gggctgcagctgctcacctgtggcagcaggagcttggccctctccagtttcctttttagctcctttacgttgagctggatctcagacttttcagattctacaagttgaagtttttcttgt

SEQ ID NO: 526 - DNA, 120 bp, synthetic construct
  source 1..120: mol_type = other DNA
ggtcacaaaattgggagccaggtccttggagacgtgaccccaaagagccccgggaggtcaggcttggggcggcaggaggtgagggccaattaaggagcaaggagctccaggagtcacatc

SEQ ID NO: 527 - DNA, 120 bp, synthetic construct
  source 1..120: mol_type = other DNA
ctgtcctgctcctgtttccactaaaatcactaacttaaaatgtgttcattcagcaggataaaaattaagtgaaatttgactttggtgctttgctagcaaaaaataaataaataaagtgaa

SEQ ID NO: 528 - DNA, 120 bp, synthetic construct
  source 1..120: mol_type = other DNA
atttgccagcagaaaactgtaattacttttaaatgaggtaaagatgtataagaatatcactgttattgtactgagaagaaagtgaatgagaaaaggaatttaaaaagagagtatcactac

SEQ ID NO: 529 - DNA, 120 bp, synthetic construct
  source 1..120: mol_type = other DNA
agaattgatgaaaagggaagtttttaaaaaccaggactatcaattcccagtctatgacactcatctagactgcagatgagggtggctcagatgtacaagatatgactgacttctggacat

SEQ ID NO: 530 - DNA, 120 bp, synthetic construct
  source 1..120: mol_type = other DNA
ccaagtgaagatgccgttagggaggagatgccctccattggctcaaatattgctgacagattaaataaaatgaggtggaagaaaagggcctagatttattacagaaaaaaaaatagtgat

SEQ ID NO: 531 - DNA, 120 bp, synthetic construct
  source 1..120: mol_type = other DNA
tatatcaaaaacatgatggtgctcactgaaacatgaaaaccaaagtttgccacaacacaaggagcagagtgaaactgctgaggtgcaagcatggaattccaggaaattagatgttcccca

SEQ ID NO: 532 - DNA, 120 bp, synthetic construct
  source 1..120: mol_type = other DNA
tggtaggaccacccagagcaggggtccacaactcccaggtcacagactggtaccagtccatggactattatgaaccacaccacacaggaggaggtgagcagcaggcaaaccagggaagct

SEQ ID NO: 533 - DNA, 120 bp, synthetic construct
  source 1..120: mol_type = other DNA
aaaacagtgtttacccaagtcttatacattttcaaaagggcagttaagggttatcttttactattttccaccttcagaagtgcttttgtttgaaaggagggaggaaaagcttcaattgag

SEQ ID NO: 534 - DNA, 120 bp, synthetic construct
  source 1..120: mol_type = other DNA
tcatatagatatttcggtataatggaacagatgggtaaaaggcatacacattttaaaaatgtggttcttaccatcaaagtgtctatttgaaaagtcgcagcaacttaaactttcagcagg

SEQ ID NO: 535 - DNA, 120 bp, synthetic construct
  source 1..120: mol_type = other DNA
agctgaaatcaacaccaaagaggaagaaatgcaaattcttaaattttaattgaaattatatgctgtaatatgatagtgttatgtatctagatgatctgcttaagtccagttctaatatat

SEQ ID NO: 536 - DNA, 120 bp, synthetic construct
  source 1..120: mol_type = other DNA
ccagtaaatcagcaggcattagcatgacataatagaaagtgtcccaactctgcataagtcctagctccataatgaacagctatttgttcttggacaactttcttctcttaggctcaatgt

SEQ ID NO: 537 - DNA, 120 bp, synthetic construct
  source 1..120: mol_type = other DNA
agatagcagaatatgcctgccatataataggtgtctggcttatgtttgatgactaaacggattgaaagaatggataaacataggttggaagttcaatatttttaaaagaaaactcctgtt

SEQ ID NO: 538 - DNA, 120 bp, synthetic construct
  source 1..120: mol_type = other DNA
gagctggatgcaaatggcctcaaaatctccgagcacaagacgcccacggagcccagggcctgcctgaggcgccttccacacctgctcctccttggtccgcacccagaacacagggccatc

SEQ ID NO: 539 - DNA, 120 bp, synthetic construct
  source 1..120: mol_type = other DNA
cattctacaggatttcagtttttaaaaaattcttaatgtttgttaaaatccaggatacagtccattttggtttatgttctgtgggtacctaaatgttctgctgtattctgctgctagggg

SEQ ID NO: 540 - DNA, 120 bp, synthetic construct
  source 1..120: mol_type = other DNA
tgggttgaaatttcttttctttaagatgttgaatatcttttctggcttgtacagtttcagttgagaggtctgctaagtctgatggaatttcctttgcaggtgatgttgcctttctcccta

SEQ ID NO: 541 - DNA, 120 bp, synthetic construct
  source 1..120: mol_type = other DNA
ttttgtgatcaaaaattccttacttttatttttttatctatggtaggaccacccagagcaggggtccacaactcccaggtcacagactggtaccagtccatggactattatgaaccacac

SEQ ID NO: 542 - DNA, 120 bp, synthetic construct
  source 1..120: mol_type = other DNA
accagaataggatactaagttggttaattacttgttattccttctactcaagggtttcccactacattaccacatattcactgccagtctggttcctcagaggcctcctaaaattgatct

SEQ ID NO: 543 - DNA, 120 bp, synthetic construct
  source 1..120: mol_type = other DNA
ctgttctgttcacttatgtcttttcagctgttagtaaacaatttgtggaaataacacacgcacattttgatatctggaaaagcaagtctttttccattctgttacaaaaaatcaatttat

SEQ ID NO: 544 - DNA, 120 bp, synthetic construct
  source 1..120: mol_type = other DNA
tgctagctcctgctgtggtgccccctgcctggtgtccaaaccagggccaacagctgtggggcttctggcccggggtgcttcgcttcactggcatgcagtagggttgaggtgcaggccgct

SEQ ID NO: 545 - DNA, 120 bp, synthetic construct
  source 1..120: mol_type = other DNA
agtgggatgaatgtctaggtgtgcagtcactggagtaaacgtcactgggacatgctgtgtaattctttgtgtacattgctgagttctactgctaatgttagcccatttcattcatgaaat

SEQ ID NO: 546 - DNA, 120 bp, synthetic construct
  source 1..120: mol_type = other DNA
atggaaaagaggggaagagtccctagtaccttggataaagtatgagcacttactaccatatgtattctagttctgtagttttcaaacttcagggagcatctcaaggcttattaaagcaca

SEQ ID NO: 547 - DNA, 120 bp, synthetic construct
  source 1..120: mol_type = other DNA
gttagaaaaactggataaaaatgtgccccgcccccaatcaaaaacaattgttggaaggtaattggagacctcagtcaggacttgagtgaccaggcctaggaggtgatcctgacagtctgt

SEQ ID NO: 548 - DNA, 120 bp, synthetic construct
  source 1..120: mol_type = other DNA
cttttacatgtttattgtctttgccttcttgtcatgtgctcattagatggcagcttccaggtgctcctaaggggccaggaaagagagtgagaaggcacggaggttgccagatcatccccc

SEQ ID NO: 549 - DNA, 120 bp, synthetic construct
  source 1..120: mol_type = other DNA
gggaaatatctccccccaacactgtgcctctatcctgagttttttaatgaatccttacaaacgtgttttatgtatgttaccataatacgtacacacacacacatatacacctgccccctc

SEQ ID NO: 550 - DNA, 120 bp, synthetic construct
  source 1..120: mol_type = other DNA
tagtgccattatttattttcttctttttggtgtcgcttgctgctgtaccaacactagggttggtctggggatgatggtctgtcaactgtggaaaggaagagcagtgatactcatgagaac

SEQ ID NO: 551 - DNA, 120 bp, synthetic construct
  source 1..120: mol_type = other DNA
cacacacacacacacacacacacacaaggctttccatttaataagcactcaaagttctttacaaggttaaagcaaatacaggacccttctaaagtaaggctaaatgctaagtgatggggg

SEQ ID NO: 552 - DNA, 120 bp, synthetic construct
  source 1..120: mol_type = other DNA
ctgactcgagtccattaaaatatatatagaaggaaatccacctctggggtggcaatgactcacttaacatacatccagtgatgatgccagggtatatttctccatagaaacatgcttaaa

SEQ ID NO: 553 - DNA, 120 bp, synthetic construct
  source 1..120: mol_type = other DNA
tgacctgatctcttatcctctgtttaatgataccttccagttgaaaggtgtttcctctgtaatcacgggtgccaaaggaaatacaacatgtattcattaggtggatccactaaaccacgg

SEQ ID NO: 554 - DNA, 120 bp, synthetic construct
  source 1..120: mol_type = other DNA
ttactcattctgatcacctgctccaccctaactcattctgatcacctgctatctgctctcccctgactcccgccaaagcacttaccctgtcagtctctttaaattagcccattggaagta

SEQ ID NO: 555 - DNA, 120 bp, synthetic construct
  source 1..120: mol_type = other DNA
tagggaggtggggatgggtagggaggtggggatgggtagggaggtggggatgggtagggaggtggggatgggtagggaggtggggttggggccacatcagcatgatccaggtgaggacaa

SEQ ID NO: 556 - DNA, 120 bp, synthetic construct
  source 1..120: mol_type = other DNA
cacacacacacacacacacaaggctttccatttaataagcactcaaagttctttacaaggttaaagcaaatacaggacccttctaaagtaaggctaaatgctaagtgatgggggagagaa

SEQ ID NO: 557 - DNA, 120 bp, synthetic construct
  source 1..120: mol_type = other DNA
ggagagagcacaggacgtagagcttggaggccaagtgcctgccatgcctttacctggctgtggtcttggccaagtcctcagtgggtattgggtacttgtactgtgaaggtacagaagagt

SEQ ID NO: 558 - DNA, 120 bp, synthetic construct
  source 1..120: mol_type = other DNA
acaatacttcccttgttgagttgtctgaggacccctctggccaccacccccacccccaggagatggaggaggacatctggacagtgagggggaggaggcacctcggcccattcctagcat

SEQ ID NO: 559 - DNA, 120 bp, synthetic construct
  source 1..120: mol_type = other DNA
cccggtgtatatattgtgtctgtgtaaggttttgtatattccagagggtagggccacccctgtatcatacctagcggtggttggaggtggcacatggggaggaggttctaataattattt

SEQ ID NO: 560 - DNA, 120 bp, synthetic construct
  source 1..120: mol_type = other DNA
ttaaactgacataaaatggagatgatcttctaaccagatgcttagtgtaagaaaaaacttcaaactgcaagaggagtccctccaaatacagaaaggaccagtattttaagaggtatgtta

SEQ ID NO: 561 - DNA, 120 bp, synthetic construct
  source 1..120: mol_type = other DNA
aggcacctgatgaacacattattgtcagattggttacagatgctcgtagttgtctttaaactgaactcaaagaatgcaaaaacatcaagttcagaaaataaaaggcaaggacaggacttt

SEQ ID NO: 562 - DNA, 120 bp, synthetic construct
  source 1..120: mol_type = other DNA
actacaagaaaaacttcaacttgtagaatctgaaaagtctgagatccagctcaacgtaaaggagctaaaaaggaaactggagagggccaagctcctgctgccacaggtgagcagctgcag

SEQ ID NO: 563 - DNA, 120 bp, synthetic construct
  source 1..120: mol_type = other DNA
ggagccccctcttcctgcctgcccacaccacctgagggctgtactcaccaccatgcttgtctgcagccccaagctcctggggagctggggctcctggaccgggctcatcagcagagttgt

SEQ ID NO: 564 - DNA, 120 bp, synthetic construct
  source 1..120: mol_type = other DNA
cccaggctggaagctgcctctggcctggtacctcccctccccagaggctgctgcccgcctcccagcccttcttggatggggtggaggtttccgactccttcacctcgccaagcttctcct

SEQ ID NO: 565 - DNA, 120 bp, synthetic construct
  source 1..120: mol_type = other DNA
gctccttattggttatgctatggccggaggcagtagagaaaggaatgaacgaagaacagaaaggaccgctttggtgatcgaccctctaccctcgccccacaaccacagaaccgtggcact

SEQ ID NO: 566 - DNA, 120 bp, synthetic construct
  source 1..120: mol_type = other DNA
tttggttgggggtaggggcacagataaggaggaggaaattaatcctttgttgatttttgaaagaatgatacattggcatagtccaaacctcagaaggtacagaagggaaatatcttcccc

SEQ ID NO: 567 - DNA, 120 bp, synthetic construct
  source 1..120: mol_type = other DNA
aacttcttgggctcaaagtgatcctccaatgtcagcctgtcgagtagctaggactataggtacgtgccaccaccaagcccagctatttttaaaattttagtgtagagatcaggtctcact

SEQ ID NO: 568 - DNA, 120 bp, synthetic construct
  source 1..120: mol_type = other DNA
agggtttttgcattcaaaaggccctttgccttaagacctaaagaggttttggaacatcagcaagcatccatctcgaggtaaataactggaatcccaatgggctgtgtgtgtgtgtctgtg

SEQ ID NO: 569 - DNA, 120 bp, synthetic construct
  source 1..120: mol_type = other DNA
agaaaaaataatgttgaacatcacaaaaatgtactcaatctttcccaaaacccatttctttccagttagttttcataactgtaggttcttaaaaaaaaaaaaatgaacactttggccggg

SEQ ID NO: 570 - DNA, 120 bp, synthetic construct
  source 1..120: mol_type = other DNA
tctatacgactcctgaggcacactggactggtcccccctaccccggtgcctctgggctacccccaccaaagttttgtcagtcagccccaccccttcagcaagcagcccagtccttgccct

SEQ ID NO: 571 - DNA, 120 bp, synthetic construct
  source 1..120: mol_type = other DNA
gggaggtacgaggccagaggcagcttccagcctgggggctggtgaccacagcaccccccagggcagtcctgtttcttgcttcctgcctctgacttttaaaggtgggtagccctgggatcc

SEQ ID NO: 572 - DNA, 120 bp, synthetic construct
  source 1..120: mol_type = other DNA
tgtgtgtatgggtatttatagatatttatagaacaatgcgagggcataccacagaggggggcacaagtttcacaacagtcacacctggacgtgtcagctcaccactacaacagactaagt

SEQ ID NO: 573 - DNA, 120 bp, synthetic construct
  source 1..120: mol_type = other DNA
gatgccatcctttctgttttcatccgtttccttttatcccttcccccttctgcactggtgacaattagtctttgtttcatagacttctggttggatgatatccctagatgtactgaacgt

SEQ ID NO: 574 - DNA, 120 bp, synthetic construct
  source 1..120: mol_type = other DNA
ccacgatgatcatggtgctggcgaagtactgggctgtggagagaacagatgcagggtgagacccggggatcctgtggcactgcacgtcacaggacaggcacaccctgatcaggttctctg

SEQ ID NO: 575 - DNA, 120 bp, synthetic construct
  source 1..120: mol_type = other DNA
ggatactagaaccattctcctggctgatacagagggatgactgttctcggaaatgatttggaatgtctgtctgaaaatgtcagcagggagcaccccattcaggtatataacacgttttaa

SEQ ID NO: 576 - DNA, 120 bp, synthetic construct
  source 1..120: mol_type = other DNA
agattgagaaaaagataatcatttggccaagtcttataggcaacaggaacccagagccttctaacacttgatctacggtgctttccacctggtatgttgcttctataaaaagtaaggaca

SEQ ID NO: 577 - DNA, 120 bp, synthetic construct
  source 1..120: mol_type = other DNA
atagacacacgccaactatcaaaaaaagcaatcttaataccatcctggaagcaagtgaacttacatttttttcaagccaattcccaaatgagggcccactacagaaaacacctccgaacc

SEQ ID NO: 578 - DNA, 120 bp, synthetic construct
  source 1..120: mol_type = other DNA
gaggagcctggtggccacctcctggtgaccagccaccactcacaaacagcaaaggagattaagcttggctcaggaggtccccgagctcttctcactggagtcgatctgcgagcacacttg

SEQ ID NO: 579 - DNA, 120 bp, synthetic construct
  source 1..120: mol_type = other DNA
agtgccctctgactgcttctgccttcaaaacacatcagagactagaatacttagagtgattcacattagtgcagatggagaaacgatgggactgagagctaaggtctgaggtcaagaggc

SEQ ID NO: 580 - DNA, 120 bp, synthetic construct
  source 1..120: mol_type = other DNA
cgggctcccacctcgaggcgcagcgacaggggccgagaggggccagcagcccccaagccagccccgcgctaggagttggagagacgcgccctccgccttctcccacccaagcctctgcct

SEQ ID NO: 581 - DNA, 120 bp, synthetic construct
  source 1..120: mol_type = other DNA
actagagtcagaactaagaggagactgaatcaggggagtctggggtcctgagaggcagatacctgaaaccgtctagagcgtgtggggagctcggtgcatgttcacgccagttgtttttct

SEQ ID NO: 582 - DNA, 120 bp, synthetic construct
  source 1..120: mol_type = other DNA
ttgaatgaagcgaagttcttgttttttcagcagctcactcaggtctgccttctccttcaggtggtccataaagctgctctggagccaaaatattgcagtcacatctcggcagcgacctgc

SEQ ID NO: 583 - DNA, 120 bp, synthetic construct
  source 1..120: mol_type = other DNA
cgaatcctctcttcttgtcgccggttcaggagacttatgtgctgattgtttttgacctgggactggagctctcctgccactctctctagttccttcctcaggtgctgcagctccacctca

SEQ ID NO: 584 - DNA, 120 bp, synthetic construct
  source 1..120: mol_type = other DNA
ccctcggaaaacctcacctgtgtcagctgcgctttcagcagtgcctggtcctgtagggactgctctaactcccactctgtatgtgctttgctgcagctggacaactggatggtgaagagt

SEQ ID NO: 585 - DNA, 120 bp, synthetic construct
  source 1..120: mol_type = other DNA
actcttccatctgcaaaaccaggctcccaggggatggggcaggtggctggactcacctggtttgccttcttcttctctgtggcgatgacagcagacagagccctctctaactctccttta

SEQ ID NO: 586 - DNA, 120 bp, synthetic construct
  source 1..120: mol_type = other DNA
caggggaccccaccggactcttaccaaagatttgatggtgttcttcagtcgactgatttttacggacgttgaatccaggactactgctcgttcttggcacgggctctgaggtgcatgcag

SEQ ID NO: 587 - DNA, 120 bp, synthetic construct
  source 1..120: mol_type = other DNA
ggagtcaccagcccaaagtcacccaaggatgactggcgagggtggggcctggctccttggagatgagagcccaaagagcccacggagatcaagcttggggcggcaggagatgagggccca

SEQ ID NO: 588 - DNA, 120 bp, synthetic construct
  source 1..120: mol_type = other DNA
cacatgtcttacagaaggaaaacttaacactgaacacagattctcaccatctgctctttgtcctgaggctccaatagaaatacagtgaagaataaacattgtataagcacaccattacaa

SEQ ID NO: 589 - DNA, 120 bp, synthetic construct
  source 1..120: mol_type = other DNA
gccaaaaataagaattggctaccttcttggagaaagaaaagccacatgaagagatccgagaggatgagatgctatgcagagagaaaggccacatcaagaatcaccaaggcagcagacctg

SEQ ID NO: 590 - DNA, 120 bp, synthetic construct
  source 1..120: mol_type = other DNA
tgaatagatcatggacttaatgcatatagagctactttgtttttcatgattgtgccttcaattatatgtagaaatataatttgtgaattgcctgatgaaattttcctaattttgaattat

SEQ ID NO: 591 - DNA, 120 bp, synthetic construct
  source 1..120: mol_type = other DNA
aggtcttaattatttccccctttttgtttgttttgcttttcctagtttagtggatcaatgtaatttaaattgctttttaaacaaacgtgtaagggtatacattttcgttggctgctgttt

SEQ ID NO: 592 - DNA, 120 bp, synthetic construct
  source 1..120: mol_type = other DNA
aaggaggttgtggctgtaggggctgacggttctcatgaatattactgctcttctttccaacagttaaaagaatattggcagaaaaacagacctagagttccagcaggagtgaacagaaac

SEQ ID NO: 593 - DNA, 120 bp, synthetic construct
  source 1..120: mol_type = other DNA
aaggagagttagagagggctctgtctgctgtcatcgccacagagaagaagaaggcaaaccaggtgagtccagccacctgccccatcccctgggagcctggttttgcagatggaggagtga

SEQ ID NO: 594 - DNA, 120 bp, synthetic construct
  source 1..120: mol_type = other DNA
ggcgctgtacaggcagtgactgcaacagacccagctaatgaaccagctgcagcagtagaaagcttggggcaaagcagtggccgagatggcctgccaaaagttgcaggagacccaggggag

SEQ ID NO: 595 - DNA, 120 bp, synthetic construct
  source 1..120: mol_type = other DNA
atagaattttaaactgtgagttccactgaatacattttgatttctgtaggaagaatcaaaatacctatttaaagatggcaatgtataataatcattttaaaagtatttgattaaacctga

SEQ ID NO: 596 - DNA, 120 bp, synthetic construct
  source 1..120: mol_type = other DNA
agaacggaaacctcagggctaagggctcctgtctgtccttttccatcctatatctgctgtaaagaaccgtacctggtccatacatgctcagtaaatgtttattgaatgaacccacttctc

SEQ ID NO: 597 - DNA, 120 bp, synthetic construct
  source 1..120: mol_type = other DNA
ggccccatctcaactttctcattacagaaaagtccaaggatctggctgtctgcctgcaacattcattgcagcgtaaaggagagttagagagtgttctctctaatgtcatggccacacaga

SEQ ID NO: 598 - DNA, 120 bp, synthetic construct
  source 1..120: mol_type = other DNA
cccaggggagggagctgctgaggatggggctgtgagggggacgacctggcaaactccaccccttctcactctgtcctggccccttaggagcacctggaagctgccagccagcagaaccag

SEQ ID NO: 599 - DNA, 120 bp, synthetic construct
  source 1..120: mol_type = other DNA
taatacattgataaattattgcaaaggtacttttatcgttgaaatcacttcacttttaccctgataaatatcagtgactagaatgaccttcggatagtgtttagcatctgtaaccaatct

SEQ ID NO: 600 - DNA, 120 bp, synthetic construct
  source 1..120: mol_type = other DNA
attagattttggtttacctttctattgtttatttttgaaaatataagtaagtatccatttgtatatgtatctctaccaccccgtataccaaaggcagcatactatatacactcttttatg

SEQ ID NO: 601 - DNA, 120 bp, synthetic construct
  source 1..120: mol_type = other DNA
aggattgcttgagcccaggaggtggaggctgcagtgagccttctagccagggaaatgaagaagaagagagtaagcatttcaaactggttttagagagtttaaaagaaatagttgattaaa

SEQ ID NO: 602 - DNA, 120 bp, synthetic construct
  source 1..120: mol_type = other DNA
gttgctctgtgtcagaacttccctcttacagggcacattggattagggcccacccaaatgacctcattttaactcgagtacatctgtaaagacacgaattccaagtatggtcaccttcat

SEQ ID NO: 603 - DNA, 120 bp, synthetic construct
  source 1..120: mol_type = other DNA
ctgttttctcctggctccactcaagacccagctcaaatgccatgtttgtcacgaagcttacctaagaacagcctttgacccaggggtcctgtctcccatgctggacttggtcccctgccc

SEQ ID NO: 604 - DNA, 120 bp, synthetic construct
  source 1..120: mol_type = other DNA
agtttattattcatttgcataaaatccagatcctgcacaaaccagcaacattttaatgagcacttactatgctaggaggtgtaggccacgaggcagaaataaagttgagtggttttgccg

SEQ ID NO: 605 - DNA, 120 bp, synthetic construct
  source 1..120: mol_type = other DNA
gctgagttggaagtgggggcactgcccagcaagctgtgtttgcaccagccctctggggtggagaaccactcatctaaaggctaccgaggcctgggccccagcctctgctaatagcttcat

SEQ ID NO: 606 - DNA, 120 bp, synthetic construct
  source 1..120: mol_type = other DNA
gttctgcctgtttgtcctcattgtttatggatgactgtgagactgatgttttgcacgtgtttggggagggggctctgatgttagagctgctcatgtagcaataatatgcttatgtgacca

SEQ ID NO: 607 - DNA, 120 bp, synthetic construct
  source 1..120: mol_type = other DNA
gtagaggcctgcatcatgaacactggatggttcccatgccctcacatccagtatttacccacaggaacaagcttatcaccatcctgccaggcgatgctagctcttattgactgacaagtc

SEQ ID NO: 608 - DNA, 120 bp, synthetic construct
  source 1..120: mol_type = other DNA
cactgctgtctaatctaactgcagagtagagtaaggctctcaaactggctgccctgtgtgttctatcaatcagcacggtgttttgagaagctagtttgttttttgatgcatgccgtgaag

SEQ ID NO: 609 - DNA, 120 bp, synthetic construct
  source 1..120: mol_type = other DNA
actctttcttgtcttctctccaccgtcacgtgtaacattttgcactgctttctaaatttcctttttttctgccaatggccttcctaccatttcctctgctgctgtgttagagttctgtgt

SEQ ID NO: 610 - DNA, 120 bp, synthetic construct
  source 1..120: mol_type = other DNA
acatgtcttacagaaggaaaacttaacactgaacacagattctcaccatctgctctttgtcctgaggctccaatagaaatacagtgaagaataaacattgtataagcacaccattacaaa

SEQ ID NO: 611 - DNA, 120 bp, synthetic construct
  source 1..120: mol_type = other DNA
ggccagcagtgtgtttcagggcctgtgaaatgtgttctctatccgggcttttgcttaatctctgttttcagtcttgcctatcagtcccactgtcgggggtacctcgtgtctgagtctaga

SEQ ID NO: 612 - DNA, 120 bp, synthetic construct
  source 1..120: mol_type = other DNA
catgttttttcatctccacaatagagggaatcatagtaactgtctcctatggtggttgcgaggattaaatgggattgttagcacggtacctggtgaagcattccacaaaggttcaaacag

SEQ ID NO: 613 - DNA, 120 bp, synthetic construct
  source 1..120: mol_type = other DNA
gattagggcccacccaaatgacctcattttaactcgagtacatctgtaaagacacgaattccaagtatggtcaccttcataggaactgggggttaggacttaaacataggttttttggag

SEQ ID NO: 614 - DNA, 120 bp, synthetic construct
  source 1..120: mol_type = other DNA
tcactgatggcatctctctctccggtactggatgaatccaagttccagtttctccacatgctccctcaggtccgccttctcctccaggaggtccataaggccgctctggagccaaaataa

SEQ ID NO: 615 - DNA, 120 bp, synthetic construct
  source 1..120: mol_type = other DNA
aagcagatcataagggcctctggattctcaaaacaaaaatcaaaacagaaaaaacaacaaaacaccctcctgttggcgcacagctcctctcaggctcccaaacttggcttcactgctaac

SEQ ID NO: 616 - DNA, 120 bp, synthetic construct
  source 1..120: mol_type = other DNA
tctaactctcctatacgctgcgatgaacgttgcaggcggccggccagatccttggactcttctgtaatgacagagttgacatggggctcaaaggactccgccttacagacctgtcaaagt

SEQ ID NO: 617 - DNA, 120 bp, synthetic construct
  source 1..120: mol_type = other DNA
ggtgtcacaatcatttagggactgagagggatcgacatcatggctagaaaaaaagaaaaaagaaaaaagcgatactggaacttggaaactcagtcttcccactctaagctctggggtttt

SEQ ID NO: 618 - DNA, 120 bp, synthetic construct
  source 1..120: mol_type = other DNA
aaatttctgctgtgaccagaagaaccagaaacggggtgacaacgtttaggggactgggtcataagaccagggccagtcttccagtaatgacagttagtaggcagactgtgacatcactac

SEQ ID NO: 619 - DNA, 120 bp, synthetic construct
  source 1..120: mol_type = other DNA
aaactgttgtagctgaaggatgtttgggctaggctcatagaagctgttccactcctgcagtgtcaacagctgcctgtggtccaggcttctgtctggtcctgggttttttttttttttttt

SEQ ID NO: 620 - DNA, 120 bp, synthetic construct
  source 1..120: mol_type = other DNA
aacgtcacgctaagtcaaagaagccagttggaaaaagacaaatgattgtatgatttcactcacatgtggcacctggagtcgtcaaattcagagacagaaagtagaatggtggctgccagg

SEQ ID NO: 621 - DNA, 120 bp, synthetic construct
  source 1..120: mol_type = other DNA
tgtgtcgcagaagacacccctcctcccaccctagaagacaggttcaatttcttgcccactgccctgggtctgctcatggtggggcagtatgtgtgggagagcccctcaatcctcaggggt

SEQ ID NO: 622 - DNA, 120 bp, synthetic construct
  source 1..120: mol_type = other DNA
ggtcagattcactaccttacctggagctgctcaggtcgcttgagttttaatttccctgtcttgtagccaccatgtttttcaaacagagcaaaaaacctgaagaagtaacgagaagcttca

SEQ ID NO: 623 - DNA, 120 bp, synthetic construct
  source 1..120: mol_type = other DNA
aataataataataatagaagacaaatgcccaagttcagaaaacctgttcagggaaagaggtctagtgtggttgggaggttgagaatacaggcatccatacagtagtctccagcccactct

SEQ ID NO: 624 - DNA, 120 bp, synthetic construct
  source 1..120: mol_type = other DNA
tcccgtttttttccacaggaccacccttcctctgcttgtgaagaggtcccttcttgtttgtacgtgctatacaatttacaaagttctttcaggtgttatctcatttgatcctacaacaag

SEQ ID NO: 625 - DNA, 120 bp, synthetic construct
  source 1..120: mol_type = other DNA
taactggggtaatactggtaattcttatactccctctgaagatgaaaaatgtaggccaaaatcatagaccatgcatagaagctggataatgaagacagctctggaggaacatgtagacac

SEQ ID NO: 626 - DNA, 120 bp, synthetic construct
  source 1..120: mol_type = other DNA
cccagcatcgccagtcatcccggggtgactttgggctggtgactcctggggttccctgagcagactctgctctcccctcctgctgacccaagcccgacctccctgggctctctggactgg

SEQ ID NO: 627 - DNA, 120 bp, synthetic construct
  source 1..120: mol_type = other DNA
gtctttcaaacttgttttttagctgaagtccccttagttcaagtgaactcttactcaggagtctgtttttttttaatggaggtggaggtctggagctctaccagattcatcgcccatgtc

SEQ ID NO: 628 - DNA, 120 bp, synthetic construct
  source 1..120: mol_type = other DNA
aactatagtattacaggtattgagactgtgcaaatgctgggcacgcttggcatgagataatcagtttttatttttacaaaattgtaattaactatgcaagtgtgtttattaaaagaatac

SEQ ID NO: 629 - DNA, 120 bp, synthetic construct
  source 1..120: mol_type = other DNA
tggagtttgtgccactgaatgaggagccccagagttgtctgagcatgtccagctgggctgttggtgaccttccaggcctgttacctttatgctgcctagtgacacctggtggatttcatt

SEQ ID NO: 630 - DNA, 120 bp, synthetic construct
  source 1..120: mol_type = other DNA
tggtagggacagagactccagccccacttctccaggcttatgctgacaggggcctgcttttatttatttttatcccatgacttattttttaatcccataatttctttttcataatacttt

SEQ ID NO: 631 - DNA, 120 bp, synthetic construct
  source 1..120: mol_type = other DNA
tgcgagcctcccctgcccctgcctgcccaccccgcctgagagctctactcaccatcctgctcaccggcagccccaagttcctggggggctggggcccctggagtgggctcatcagcaggg

SEQ ID NO: 632 - DNA, 120 bp, synthetic construct
  source 1..120: mol_type = other DNA
gtcctcagcaactccctcccctgggtctcctgcaacttttgtccggccatctcagccaccgctttgccccaagcttcctgctgctgcagctggtccacgaactgggtctgcagcagtaac

SEQ ID NO: 633 - DNA, 120 bp, synthetic construct
  source 1..120: mol_type = other DNA
cctcctgtttgcgtagcctctgctcctgctttcgcagcctctcaccctgctcctgtagcgtcttctgctgctcccgaagcctctcgttttgttcacacagtctctcctgctcccgcactc

SEQ ID NO: 634 - DNA, 120 bp, synthetic construct
  source 1..120: mol_type = other DNA
gaatgtcctgaatctacaggaggtgacaagggaaaaacaagggcagggggtgaaagacagaagtggcttagagagaagcaagaaagtcagggtaggaggaagatgtgggttcaggaaaag

SEQ ID NO: 635 - DNA, 120 bp, synthetic construct
  source 1..120: mol_type = other DNA
gttaatcattgccaccccagaagtaaattttcttatatatatattttaatggacgcaagcaagcattttggggctgaagtcatagaagtagaatttctggagaaaaataacataaaatag

SEQ ID NO: 636 - DNA, 120 bp, synthetic construct
  source 1..120: mol_type = other DNA
gtgctcccccattggacaagtggaaggtgaggcagtgccaagacccctctctggcttgctgtctacagctgtgcatggccctgaggcttctctggcttgggggatgcttggcctctgcct

SEQ ID NO: 637 - DNA, 120 bp, synthetic construct
  source 1..120: mol_type = other DNA
tgtgtgtgtgtgtgtactatgataatatacaaaaacatgtctgcaagcattcataaaaaactcaggagagagtaacagggtgcctggagacacctcccttctgtaccttctgagttttgg

SEQ ID NO: 638 - DNA, 120 bp, synthetic construct
  source 1..120: mol_type = other DNA
agagagtgcgggagcaggagagactgtgtgaacaaaacgagaggcttcgggagcagcagaagacgctacaggagcagggtgagaggctgcgaaagcaggagcagaggctacgcaaacagg

SEQ ID NO: 639 - DNA, 120 bp, synthetic construct
  source 1..120: mol_type = other DNA
actcacatttatttgtgtttctaatttaccgtttaaatttatttgtaaaaagttaagggagagttggtctttccctgatgttctttctggcatcctttagcatttttatttttaatttga

SEQ ID NO: 640 - DNA, 120 bp, synthetic construct
  source 1..120: mol_type = other DNA
gagtttgtgccactgaatgaggagccccagagttgtctgagcatgtccagctgggctgttggtgaccttccaggcctgttacctttatgctgcctagtgacacctggtggatttcattgg

SEQ ID NO: 641 - DNA, 120 bp, synthetic construct
  source 1..120: mol_type = other DNA
ctttttaggctgaatctctgattgccgtttgttttcttatttaactcataaaaataaaacacattggatggagggtaggagcaggaaggagatttatgtcttttaattgcatgccattgt

SEQ ID NO: 642 - DNA, 120 bp, synthetic construct
  source 1..120: mol_type = other DNA
gtgagccaccacacccggcccaaaagctttgtgtttttaaagatattagacatgtttcttgttttttaaaaaatcttaataatgtaggagaataagagaaatgttttttccaaagccgag

SEQ ID NO: 643 - DNA, 120 bp, synthetic construct
  source 1..120: mol_type = other DNA
cttcagcaagcagcccagcctctgccctcgccaatcaccctgcggtgactttgggcggatgactactggggatacctgctccatattcagccctcacgtcctgccaccccaagcccaacc

SEQ ID NO: 644 - DNA, 120 bp, synthetic construct
  source 1..120: mol_type = other DNA
tttgaggatgtatgactctaaaccacacagcgtgtagttcatgcctatgtaatgtttacttttctacctctgcgtctggttttggtccccggcagctgctgattcatggcaaaaccccag

SEQ ID NO: 645 - DNA, 120 bp, synthetic construct
  source 1..120: mol_type = other DNA
tatagcttcaccatttttggttcaagcagtgttccctttctatcaggcctggtggctgttgggtggggctccccaagcaagaggtggccctgggccgtgagttggaagacagggtgacca

SEQ ID NO: 646 - DNA, 120 bp, synthetic construct
  source 1..120: mol_type = other DNA
gctttggactggaattggcatttctttctctacttttccttcccctagattctttgttttaagctacagtattcgtattttaaaatgttttaaattattttaagacattaatttaacagt

SEQ ID NO: 647 - DNA, 120 bp, synthetic construct
  source 1..120: mol_type = other DNA
agagggcagcctccccaggtggggcaacgtaccagctcctcgaagccgctgcgtggctcggcccgctgctcgtacagggcttcccaccccagctccagcatcctctccagctcccgcagc

SEQ ID NO: 648 - DNA, 120 bp, synthetic construct
  source 1..120: mol_type = other DNA
ctatgtgtctgtcatccccaagtacattaatgcattttctcaagagaatcaagggaaaatgatgcttcagaaagatgtcccgcatttatcctgtggcactcaaagtaccccaggttgaga

SEQ ID NO: 649 - DNA, 120 bp, synthetic construct
  source 1..120: mol_type = other DNA
tagtagacagtattatactacatttgaaaatcaaggagcagtttatgcaacgtaaaacgtttacaaactgcagcacaatctactgttcgtgaatgtcaaagtgtcatgaggaaagtgtct

SEQ ID NO: 650 - DNA, 120 bp, synthetic construct
  source 1..120: mol_type = other DNA
tgctatattaacgtcttaaaataatttaaaacattttaaaatatgaatactgtagtttaaaacaaagaatctaggggaaggaaaagtagacaaagaaatgccaattccagtccaaagctg

SEQ ID NO: 651 - DNA, 120 bp, synthetic construct
  source 1..120: mol_type = other DNA
gggctacaagactccacaaacacagcacggggactgattcccagtgctagaggcgaggcagttggccacgtatatatatgtatatatgtgtgtgtgtgtgtgtgtgtgagagagagaatt

SEQ ID NO: 652 - DNA, 120 bp, synthetic construct
  source 1..120: mol_type = other DNA
tatagaaagtcagagcatggttttgagttttggagacaacaagagaaaagagggagggatttggacaactatggagaggactgggctgtggagagaaatgtttagagatttggaagatgg

SEQ ID NO: 653 - DNA, 120 bp, synthetic construct
  source 1..120: mol_type = other DNA
cccttttccccctttgctttgggcaggttcgcacatctaaggaggagaagaagcatgagatacatctggtacagaagcttgggaggagcttgttcaaactcaaaaaccagacgggtaaga

SEQ ID NO: 654 - DNA, 120 bp, synthetic construct
  source 1..120: mol_type = other DNA
ctcaggctgccctgaagagccaggactcttaattctgggccactgtaagtttctccccaacacctgcctgcctaaagctcagggtctgtgatcttaagtcaaccaagcctttgtcaacta

SEQ ID NO: 655 - DNA, 120 bp, synthetic construct
  source 1..120: mol_type = other DNA
cctacagccgccatcccctcctctgggatgctttagccaggacccccatggaatcctctagaagaatatttcaaaagcaaagacactaagtcagtcccactggactagtcagaagccagg

SEQ ID NO: 656 - DNA, 120 bp, synthetic construct
  source 1..120: mol_type = other DNA
gccaacgacagagtcagagacgaaagactcagagccaatgacagagtcagagccaatgacagagtcagccaacgacagagtcagagccaacgacagagtcagccaatgacagagtcagag

SEQ ID NO: 657 - DNA, 120 bp, synthetic construct
  source 1..120: mol_type = other DNA
gacagagtcagagccaacgacagagtcagccaacaacagtcagccaacgacagagtcagccaatgacagagtcagctgacagagtcagccaacgacagagtcagccaacgacagagtcag

SEQ ID NO: 658 - DNA, 120 bp, synthetic construct
  source 1..120: mol_type = other DNA
caccacacagggactgccggccaacaccgcagagacctcagcagcgtggagcacaccacacagggactgccggcctacaccgcacagagacctcagcagcatggaacacaccacacaggg

SEQ ID NO: 659 - DNA, 120 bp, synthetic construct
  source 1..120: mol_type = other DNA
gtggagcacaccgcacagggactgccggccaacaccgcacagagacctcagcagcgtggagcacaccgcacagggactgccggccaacaccgcacagagacctcagcagcgtggggcaca

SEQ ID NO: 660 - DNA, 120 bp, synthetic construct
  source 1..120: mol_type = other DNA
tagagagaagggacacagcagggatgagccagggagggagaggtgggaggggctggcagggagggagaggtgggaggggctggcagggagggagaggtgggaggggctggcagggaggga

SEQ ID NO: 661 - DNA, 120 bp, synthetic construct
  source 1..120: mol_type = other DNA
ctggtagctttaaggacctaacctgttgatggtgcttattctcccagccacattctgttgagaacattggcctttccctgttctcagtagacctgtgccgtggcacgtctttcacatttc

SEQ ID NO: 662 - DNA, 120 bp, synthetic construct
  source 1..120: mol_type = other DNA
gtaagtgtgaagtatctggaggtttccggtaatggggatggacgtttgccgcttgcaggggaatctgtatctgggatccatttattgtcggtcttaagtcctcttggaaaaggaggctac

SEQ ID NO: 663 - DNA, 120 bp, synthetic construct
  source 1..120: mol_type = other DNA
ggcctgggatgcccggcagatccagtgacatgactgtcttgggccacaggtactttcagtttgcactgaattaaaaattcttatcagacttttaaggttagttttccaaaaatgactttt

SEQ ID NO: 664 - DNA, 120 bp, synthetic construct
  source 1..120: mol_type = other DNA
atccggcatctctctgtgacagcagcagcatttgtggccataattggcctaaattcatgaactcattagagagtgcagaaaggtcacagcctgatacattcatgagatgcaattcattaa

SEQ ID NO: 665 - DNA, 120 bp, synthetic construct
  source 1..120: mol_type = other DNA
gagtgaatttggtggcctttaagtagctaagcatacttgggaagaaattagcatttcgcattttaaggcgtattttccgtggcgtacacacacgtgatgcgttagtgttgtgttctaagc

SEQ ID NO: 666 - DNA, 120 bp, synthetic construct
  source 1..120: mol_type = other DNA
ggcaagggttggtgagaagtctgaggtgctgtctagggtggctgggaggcaggtggcaggctgagaggcagcatcagagtctggagtttcaagtctagggagcagttttgtggaatgagg

SEQ ID NO: 667 - DNA, 120 bp, synthetic construct
  source 1..120: mol_type = other DNA
tcaggttctctggagggatagacactgaacggatgatggtagttgtctatggggtgagggaacaggtttatgaggaaggcatttctgcatctctttttatgcttttgaattttttaatca

SEQ ID NO: 668 - DNA, 120 bp, synthetic construct
  source 1..120: mol_type = other DNA
ttcctcggtgtggatttcaggaagtggcatgacttgttctaactgaacgtttatttgatacgcccttggtacatgtgttttccagaagtgtaatactggcttccccttccatttttgtat

SEQ ID NO: 669 - DNA, 120 bp, synthetic construct
  source 1..120: mol_type = other DNA
taagctgccctggcacacagtgagcttccagaaatggtcccttgacctctaaatgcaccaagacccagggaacacgccctgtctgagcaccctgacaatgtcccagtcccaacaccgtac

SEQ ID NO: 670 - DNA, 120 bp, synthetic construct
  source 1..120: mol_type = other DNA
gacaggtggaatgaagggtaagttcgcggaccccagatcaggacaaccgggaggcttccgggctgccggagagggtcacagccggttaggggagggagccaggagaggactctgcgcccc

SEQ ID NO: 671 - DNA, 120 bp, synthetic construct
  source 1..120: mol_type = other DNA
aactgcagaacctttaataacaaacactttaaggagtcaggaaggacaaggtgaccatcttgattctccatgagtccatggttaacatcggacttgcgtgctctgaatatcagttgtttc

SEQ ID NO: 672 - DNA, 120 bp, synthetic construct
  source 1..120: mol_type = other DNA
tagtgccaacatgtcaagtttctaggctctctctccctgatcggccctggtgaccctgttggactgtatgccaacaaacacattgtcatgaattaagaatattcacaaatagtttacaaa

SEQ ID NO: 673 - DNA, 120 bp, synthetic construct
  source 1..120: mol_type = other DNA
gtagttcattgatctgggttatcagaaaaccatgttcaagaggatttgttagagttttctccatgcaaagcaaatttgggggccgggcgcggtggctccacggctgtaatcccagcgctt

SEQ ID NO: 674 - DNA, 120 bp, synthetic construct
  source 1..120: mol_type = other DNA
ggtagttcattgatctgggttatcagaaaaccatgttcaagaggatttgttagagttttctccatgcaaagcaaatttgggggccgggcgcggtggctccacggctgtaatcccagcgct

SEQ ID NO: 675 - DNA, 120 bp, synthetic construct
  source 1..120: mol_type = other DNA
ctgtaagatgagaggtttccataggcctacactttctaattggtggctttcaatcctctggtgatttgcataaaaggcatctatttcaattgtggttataaataacaaaccccaataagt

SEQ ID NO: 676 - DNA, 120 bp, synthetic construct
  source 1..120: mol_type = other DNA
caatccgcaggtttcacattaaaaaccgggttctttatttctctggaaagccagccgatctttaggctgccacacttggcttgggttttgtagtgatctgaatccttttggatgaatgtc

SEQ ID NO: 677 - DNA, 120 bp, synthetic construct
  source 1..120: mol_type = other DNA
gtgtaacatgtgtagttaattcccaaaggcaatgttatgatttctgttttccttccttcctttccagataaagctgtacaccaagcatgggactttgaaataccagacagactgtgcccc

SEQ ID NO: 678 - DNA, 120 bp, synthetic construct
  source 1..120: mol_type = other DNA
gatggagtcagtgacatctgcacaaagggtggggacatcaactttgtcttcactgggttctctgtgaatggcaaggtttgtctttggaacttgattatttttcctgttcactctataatg

SEQ ID NO: 679 - DNA, 120 bp, synthetic construct
  source 1..120: mol_type = other DNA
ttcagatcctgattcagcctctttgggtgagttcatgcccgtcagagtgctgagttccccacatgtgaaatggaatccatttgacccatcttgcctagcattgatgagatgattaaatat

SEQ ID NO: 680 - DNA, 120 bp, synthetic construct
  source 1..120: mol_type = other DNA
aatctgcaacagttatgatgaatgtttctcttggtctgtctgaaccccttgtcatttgtgggctgctagatcgattattaatattgctgattgatcatgttagtggttcttagtgattaa

SEQ ID NO: 681 - DNA, 120 bp, synthetic construct
  source 1..120: mol_type = other DNA
ggcttatcttctgtttgtgtgtttttgttttacagttaaaacaaaagctgatggctcattccgccttgagaacataaccacagggacatacaccatccatgctcagaaagagcacctcta

SEQ ID NO: 682 - DNA, 120 bp, synthetic construct
  source 1..120: mol_type = other DNA
attttctgttatggcagggcttggcagactacaaaaactgccttttataagcgtagtttccttagaatacagccttgcccatttgtttatggattctctatggctgctcgtgtgtaacag

SEQ ID NO: 683 - DNA, 120 bp, synthetic construct
  source 1..120: mol_type = other DNA
ggcttattgagtctcttatttggaaaagcgctcgccttgtggatgtcaagaaagactaacatcccaggaatattgtaaacgtaggcaagttagatttccttttctgcctctccactcgcc

SEQ ID NO: 684 - DNA, 120 bp, synthetic construct
  source 1..120: mol_type = other DNA
aaacctttcccttccagcagtggagtggatttccagctctcttgtaataagatccttttttttttttttttgacacttccttaaccccttctttatctcctcccactgtcccctcactcg

SEQ ID NO: 685 - DNA, 120 bp, synthetic construct
  source 1..120: mol_type = other DNA
tattttgccccataattgttggtaaacgggaaacacttgggtccttcagataaccatgagaatatctcattcgtgcctgttcttgccatactagttgctatggcacagtgtcttccttaa

SEQ ID NO: 686 - DNA, 120 bp, synthetic construct
  source 1..120: mol_type = other DNA
actgcccttgtcctgcaggtggctgggagcccgagccccacacctgccgggcagcaggtgctggacgtcgacagctgcctggactcatccgtgctggacagctccttcctcacgttctga

SEQ ID NO: 687 - DNA, 120 bp, synthetic construct
  source 1..120: mol_type = other DNA
ctggtcatgggacaggaaccgtggggtcaggacaatagagagcttcaccatttgcagaatgagaacaggggctcatgatgagtgccaacctattagacaattttaaaaaaaaaagtgttg

SEQ ID NO: 688 - DNA, 120 bp, synthetic construct
  source 1..120: mol_type = other DNA
ctgttataaaaatttatagaaggaaggaaggagcttggctgggtggacagaacttggctttggagccaggagactgtggttccaatgcctgctctgtctcctctcctctgagccttagtg

SEQ ID NO: 689 - DNA, 120 bp, synthetic construct
  source 1..120: mol_type = other DNA
tctaccctttagttctagtgttgggtgacctgtaattttcatgttggctggggatgccaggagttggcagaggctccttccagagcccctgtggactggattctgccacttccgtaaaat

SEQ ID NO: 690 - DNA, 120 bp, synthetic construct
  source 1..120: mol_type = other DNA
aaaaccttgctttgcttctcaaaaggaaggacactgcataacgaagaaattagatccttgacaatatccctcggcaaatgttgtgaagacagacctgtcgtgcgatttttgtcaggtgct

SEQ ID NO: 691 - DNA, 120 bp, synthetic construct
  source 1..120: mol_type = other DNA
ccactgtgaccatccaattttcaacatatttgtttaattttgtgaccagtgtctggttcccctgcttgaccagtagctacgtgagaacagaaactctatctgcttgttcaccatagatcc

SEQ ID NO: 692 - DNA, 120 bp, synthetic construct
  source 1..120: mol_type = other DNA
taggctacatgtttttctctttacagagaaaatgacccatcatgtctcctaatagagaaacgctgcttccggccgaatgacaagagctcacgcctgtaatcccgacactttgggaggcca

SEQ ID NO: 693 - DNA, 120 bp, synthetic construct
  source 1..120: mol_type = other DNA
gggggtacccagacccctgctgttctcaggaagcacaggctcagcaggctggtggcggcaggttcaggctctgtctggttccagacctgagggaacacaaagaggacccttaggatggta

SEQ ID NO: 694 - DNA, 120 bp, synthetic construct
  source 1..120: mol_type = other DNA
ctcctcctggtttcacaactcaccggctgtgcaaactttaacctctctgtatctcagtttccttccctgtaaaagggggaaaacgagactctacctctatgagttgtattaaatggatta

SEQ ID NO: 695 - DNA, 120 bp, synthetic construct
  source 1..120: mol_type = other DNA
tcctaatatctcagtggttgtaccgcgtcacagtgggtgtgcactgtgtgatattattcatagtatccaagggagattttactcctgatatcacagtgagtgtacaccctgtgatattat

SEQ ID NO: 696 - DNA, 120 bp, synthetic construct
  source 1..120: mol_type = other DNA
gcttccttttacagacatggaaactgagcctcagagtggttgagctgtgcaggtacatttaggaaattttccttgagcccagtatgttccctacgtattacactgtgttgcctttttctt

SEQ ID NO: 697 - DNA, 120 bp, synthetic construct
  source 1..120: mol_type = other DNA
tttggcaatgtctagagacgtttttgttgtgacatctgtggctgtgcgctacagtcacccagtgagtagtggccaggcgtggagctaaatgtgctacagtgctgcctacgacagcccaga

SEQ ID NO: 698 - DNA, 120 bp, synthetic construct
  source 1..120: mol_type = other DNA
caataggatttattctgcagtttcattttttcccctgtgttaatgctttcaataccagagggacatttggttttttcctcttgcatgctttcaacattagcatagatagatctactgact

SEQ ID NO: 699 - DNA, 120 bp, synthetic construct
  source 1..120: mol_type = other DNA
tggtgctgttgataagctttttaattgaattatactttcagaaaagtgccttggatgaattttcactaagtgaacacacccatgtatccaccatccagataataagatagcacttcacca

SEQ ID NO: 700 - DNA, 120 bp, synthetic construct
  source 1..120: mol_type = other DNA
ctccacatcctaacctacacttgatatcgtcagttttttttaattttagcccttctggtgggggtgtggtattatctcactgtggccttgatttacattccactgatggccaatgaggtt

SEQ ID NO: 701 - DNA, 120 bp, synthetic construct
  source 1..120: mol_type = other DNA
ctaaatcaacaacagaaggccctgacgagatttatttgttgttcttttttcagcctgaaacagaaatctgtaaatatactaaacattctagaaactgtggtacgcgtgaccaaggagaat

SEQ ID NO: 702 - DNA, 120 bp, synthetic construct
  source 1..120: mol_type = other DNA
ttagctggttagaaggtatgtaagtgttctttagcatatctttttttgtttgactgaaatagtttatagtcaaagatcaaaaaaggaactccacctagtaggtgaggttctgtaatagcc

SEQ ID NO: 703 - DNA, 120 bp, synthetic construct
  source 1..120: mol_type = other DNA
ttgcgtgattggaaagggtttatggacagaaaaagaaagtgacggacagaaagtggaagtgaggtacagaaacagttggattggttacagctggacgtttgtcttatttgcacatggttt

SEQ ID NO: 704 - DNA, 120 bp, synthetic construct
  source 1..120: mol_type = other DNA
aaaggcgtgaagtttcttctcttttcttctttagtaactaaagaggtaagcaaagaaaagaacaaaagagatggtgtgaagggtaggagggtgggggattatagaccagaacgtactgtt

SEQ ID NO: 705 - DNA, 120 bp, synthetic construct
  source 1..120: mol_type = other DNA
aaaattttcctataatgtggctaattgatggtattcagaacatgtaaatggaaaaggaagtcttgtcttttttaccccctggcataggatgtcctgggctgcaatgtctcaccagtgcct

SEQ ID NO: 706 - DNA, 120 bp, synthetic construct
  source 1..120: mol_type = other DNA
agtccctgtctccatgaggtaacatgctagtgggagggagacaactaagaaatcgaacgaggacatttcagatactggtaagtttgatgaagatattaaaataggttagcagtggtgacc

SEQ ID NO: 707 - DNA, 120 bp, synthetic construct
  source 1..120: mol_type = other DNA
gcacaggagcaccttcgagcaccttcttgttctttgttttctagcccgtgttccacgtcatgggattctccgtcaccgggagggtcttgaacggacccgaaggagatggtgttccagaag

SEQ ID NO: 708 - DNA, 120 bp, synthetic construct
  source 1..120: mol_type = other DNA
tgggaggtttttaattttcctgtggcacccaactgctccaatgattaatgggcaaaacagatgactggtttggaaagagaaatattattaatcatcttggtgtctccatctctcttagta

SEQ ID NO: 709 - DNA, 120 bp, synthetic construct
  source 1..120: mol_type = other DNA
taatccctgtttctagccatggccagccactgatctattttctgtccccatggattggctttttttggacgtttatcatacgatgctggtattttgtttggcttcttttatttaacatgt

SEQ ID NO: 710 - DNA, 120 bp, synthetic construct
  source 1..120: mol_type = other DNA
ctcataataattttttgtgtttcataaagtcagatcctcagaggaccgtaattgtcaaggttgggtactcataaaaaggctgcaggctctgacagccttatcagaagccacagtctcaga

SEQ ID NO: 711 - DNA, 120 bp, synthetic construct
  source 1..120: mol_type = other DNA
actttacaggaaatagggaggacccaggagcacgcaaatgactccacagggatgcaggacaaccacctggagcctgatttgtttgacaaataaattgcaaggaaaaaaaaaccaacaaca

SEQ ID NO: 712 - DNA, 120 bp, synthetic construct
  source 1..120: mol_type = other DNA
tctgtgaagagtgattcatgctcagtgagcctgtaaatatgatcttacctgaacaagagagtttttctcatgacccacgaggaaacacttccttgttactcacagtagagacctggttag

SEQ ID NO: 713 - DNA, 120 bp, synthetic construct
  source 1..120: mol_type = other DNA
tccagtgctgcagccagagggaaaggcgtccaccaaaggctgctcgggaagggtcaacacacttgagcagccttagctagactgaccagggagaaagagagaagactcagaagccagaat

SEQ ID NO: 714 - DNA, 120 bp, synthetic construct
  source 1..120: mol_type = other DNA
gctcagtgacccgtccattgtgggtagcaatctgcggcacaacccccacttactgggtctctccttttacaaccaacacaaccgaaatctagggcttctttttttttttttttttttttg

SEQ ID NO: 715 - DNA, 120 bp, synthetic construct
  source 1..120: mol_type = other DNA
cacctcagcgtggaggcctgagaacgtgaggaaggagctgtccagcacggacgagtccaggcagctgtcgatgtccagcacctactgcccggcaggtgtggggctcaggctcccagccac

SEQ ID NO: 716 - DNA, 120 bp, synthetic construct
  source 1..120: mol_type = other DNA
attaagcccatgtgctattattgtcccttgatttgaaatgctgcttaggccttaagttccttaacttgcagaataatgatcagagcttacagggcaagttgcggggaggatacaacagtt

SEQ ID NO: 717 - DNA, 120 bp, synthetic construct
  source 1..120: mol_type = other DNA
gggtgatcagaaaacaagaagcgcgtgtggaagggaacatgaatcagcagcattaagttcgagtaagagcaatactctaatgaccgtgggcccccaagaaactgaaaccactccacattg

SEQ ID NO: 718 - DNA, 120 bp, synthetic construct
  source 1..120: mol_type = other DNA
gcattgctggtgggaatatcaaatgacacagcctctgtggaaaacaatttgacagtttcttaaaaggttaaacataaatttattacacaatgcagcaattccattcctaggtatcgaaac

SEQ ID NO: 719 - DNA, 120 bp, synthetic construct
  source 1..120: mol_type = other DNA
tagaaaaaaatgccttcaaaaccatcctctggtgcctttccatttttctaattcatggcacatcaatccttccaaacttaccaggcttggacaggcagaatcggttgactcctttggaga

SEQ ID NO: 720 - DNA, 120 bp, synthetic construct
  source 1..120: mol_type = other DNA
tgtcaagtttttgtaattaagcagttaggggagtaagttggcacatgaaacaccagttccaattcttctagtttctctacagagaaactaagacctgacgatgacatctgccgccactca

SEQ ID NO: 721 - DNA, 120 bp, synthetic construct
  source 1..120: mol_type = other DNA
ggccaataaaaaaaagagattttccaaaaatgttcaacaaatgctatttttctttctttgacccaaatactctactttaaaggagaaaataaatatatttcctccatctctgtgaacagc

SEQ ID NO: 722 - DNA, 120 bp, synthetic construct
  source 1..120: mol_type = other DNA
atttttttttaaaacatgtttgcaatacctgtgcctagggatgggaactcaaacacctgtccctccagaagacagaaaagccttacctcgattttcaagctgtcatgctccactgtgaag

SEQ ID NO: 723 - DNA, 120 bp, synthetic construct
  source 1..120: mol_type = other DNA
tcaaggaaaatttcctaaatgtacctgcacagctcaaccactctgaggctcagtttccatgtctgtaaaaggaagcagttgggtctgatgcacctaaaagcctcacctccaaaatgttaa

SEQ ID NO: 724 - DNA, 120 bp, synthetic construct
  source 1..120: mol_type = other DNA
agagagacagggatttagcttccccataatttccatcagtttccaccaaaaccagctcagataagcagacatgatttacatggaaacagtagacctgccacactgagcttcatgacaaat

SEQ ID NO: 725 - DNA, 120 bp, synthetic construct
  source 1..120: mol_type = other DNA
ggacttaacatgttaggaagcagttttttcatgtctaccaaagttaaataaaacgtcattaagttcatgtgcttttattataaattttgatttatgtttggcattattaaaaactaatca

SEQ ID NO: 726 - DNA, 120 bp, synthetic construct
  source 1..120: mol_type = other DNA
taactttaaaactattttctcaaatacctattttttcttttgatcctccagcaagtagattgatattttctcctggtaacaattctaactgctcggtacattcaacaaattttccagact

SEQ ID NO: 727 - DNA, 120 bp, synthetic construct
  source 1..120: mol_type = other DNA
cagcctccatgtgatccacgtcctttgagggtttctttcttttatatctgaacagtcttggcctttgcttttcagacgtagctatgctttactttgggggaaacataaagaacctgaatt

SEQ ID NO: 728 - DNA, 120 bp, synthetic construct
  source 1..120: mol_type = other DNA
tacataaaggcggctgctcctctgtctcttgcattgtatccaaatagtctcatgtcagtaatatgtatgttgcaccttcaggactaaaatgcaagaatagcagcctgagtccttcaaaag

SEQ ID NO: 729 - DNA, 120 bp, synthetic construct
  source 1..120: mol_type = other DNA
catatccactagcatggctataatcaaaaagacagtaacacaataacaggtgttggtgaaaatatagagaacttggaacctccatacactgctgatgagaatgtaaaatggtgcagccac

SEQ ID NO: 730 - DNA, 120 bp, synthetic construct
  source 1..120: mol_type = other DNA
ctatagatgaaactagattagtggttgtcaggggctggagaaaggggagaatcagtgacttcaaatggctacagggcttctttttggagtgataaaatgttctggacttagagagtggtg

SEQ ID NO: 731 - DNA, 120 bp, synthetic construct
  source 1..120: mol_type = other DNA
ccaggcattgtgacaactgagaattacgaagtccatcaatcattacccgttatttgatgaacaatacagtgccaggttgctgcagcagcccctttgaggccttgcaaaaaaaaaaaaaaa

SEQ ID NO: 732 - DNA, 120 bp, synthetic construct
  source 1..120: mol_type = other DNA
tgcagactttttattactggcacacaaaggaggatattggcacaaaatgaaaatctggacccaatggtagagagcagccatttcaatttgtcccaggaaaagactgtcctatgtcagctt

SEQ ID NO: 733 - DNA, 120 bp, synthetic construct
  source 1..120: mol_type = other DNA
ccgtcttcagcctagaggcaaggcatttgcaatctccacactaagactgtttcatagtgtagggaacttaggacatcatgtcataatcgtgactctttttgagcaccaatgtattaagtt

SEQ ID NO: 734 - DNA, 120 bp, synthetic construct
  source 1..120: mol_type = other DNA
cattaccttctccatgtcagcccagtgatccaacacatcactagcaaagttaaacttggccggcacttcctggtggccccactgcagggacaccagttgcctactattaatgtagagagt

SEQ ID NO: 735 - DNA, 120 bp, synthetic construct
  source 1..120: mol_type = other DNA
gtgttgggattataggtatgggccaccatgcctgaccctagagactatttttaatactagttttaggttctcagaaaaatggagaagatagagatttcccatatctctctgaccccgtac

SEQ ID NO: 736 - DNA, 120 bp, synthetic construct
  source 1..120: mol_type = other DNA
aggacacactgtgatgtaaatggcagaaattcaataatttaattcaaactaaagagaacgggaatgtattgaattcaggaatggaatgtaacgggaaactccactggtggtcttcaggca

SEQ ID NO: 737 - DNA, 120 bp, synthetic construct
  source 1..120: mol_type = other DNA
aaatacaaaatggaaaatgccattcactccgctatgcatattgctttctaaaagttaactgtcttagagtggttgccttcagcctcagctgcacattagaatcacctggggagattccaa

SEQ ID NO: 738 - DNA, 120 bp, synthetic construct
  source 1..120: mol_type = other DNA
gtatcccttaccttgtatctttccagtatcgtaaatggtgataagtctttatacttcttgacatgtgatgaatcaacatggtctgattgtttttaatgtatatttctttaattatgactg

SEQ ID NO: 739 - DNA, 120 bp, synthetic construct
  source 1..120: mol_type = other DNA
atttatttctcacagttctggggggtgagaaatcaaaaattgaagcactggcagatccagtatctggtaaggacttgtttttcatagatggtgctttctcactgtgtcctcacatggtgg

SEQ ID NO: 740 - DNA, 120 bp, synthetic construct
  source 1..120: mol_type = other DNA
ggtgaacatatttctgtaggaccacagaggaagaaaaaatcattaaggggtaaacatatttctgtaggaccatagaggaagaaaaaatcattctggctgaaacctcatgaagaaggtgac

SEQ ID NO: 741 - DNA, 120 bp, synthetic construct
  source 1..120: mol_type = other DNA
tgggagatcagtcaggagactacagcaacagcttatttatcccctcaggcctggggaccttgatcattcctggatggtttatcttttattcttactattttttaggctgaatccattttg

SEQ ID NO: 742 - DNA, 120 bp, synthetic construct
  source 1..120: mol_type = other DNA
atttgaaagtgtgtaaattgaagttccttctgggcatgcgtttcactgtaggaggccaatcagggctaatgtgacccacattttttttttctgagttgatgaaggaacttgattccccag

SEQ ID NO: 743 - DNA, 120 bp, synthetic construct
  source 1..120: mol_type = other DNA
cccagagaagtcagaggacttggtgcttgactaaaacctccactccaccttttcctgacttgaatgtctccctgtcctgccttcacatagggatggtgaattggagtattccccatttct

SEQ ID NO: 744 - DNA, 120 bp, synthetic construct
  source 1..120: mol_type = other DNA
ctttggagggagttctgtatctgtgcacaggagctgtgccattgttggttttatggctatgccgtaactgtattcaaccagaggtctgtagatggaccttgcagttgtttctattttttt

SEQ ID NO: 745 - DNA, 120 bp, synthetic construct
  source 1..120: mol_type = other DNA
aatcagaatctccaggggatcctggaattggtgtttctaacaagctccctagtacatgctgactgacacaatctcatttaattctcactcccccacccctcctcctctttggggatcatt

SEQ ID NO: 746 - DNA, 120 bp, synthetic construct
  source 1..120: mol_type = other DNA
aaattactgttgactatagtcatcctgttgtgctatggaaaagtaggtcttactcatctttctgttttttttgtacccgttaaccatctgcctcctccccaccaactctcccattaccct

SEQ ID NO: 747 - DNA, 120 bp, synthetic construct
  source 1..120: mol_type = other DNA
tgcaaactattcatccatcaaaggattaatacccagaacatataagaactcaaaaacaaaaatcccaaataatcccattaaaaaatggacaacagccacggcgggccgggccagcaggtc

SEQ ID NO: 748 - DNA, 120 bp, synthetic construct
  source 1..120: mol_type = other DNA
agacagggcaaacagaccccagcgtgacctgccccacctatgttggcacagagggagtgttttgcttggttataagcagtgctcatgcctgccccatacctagaaccctccctctatagg

SEQ ID NO: 749 - DNA, 120 bp, synthetic construct
  source 1..120: mol_type = other DNA
tatattaattatgaactcaggcccccaaatacaatcctaagacaagccaggaaggtaagacatggtacgccatagtaactggaattcagggtagacaaagtgcaaaagttctacggctag

SEQ ID NO: 750 - DNA, 120 bp, synthetic construct
  source 1..120: mol_type = other DNA
aaacatatacatgaccaggagaggacaaatctgtagggggatgtggctgtggacactgggctcagctcactcgtcaagccctcctgtgggccaatgtcacaggaagggcgcagctcaatt

SEQ ID NO: 751 - DNA, 120 bp, synthetic construct
  source 1..120: mol_type = other DNA
ggaaggttttgagcaaacaggtaatatgatctgacataactgaacagggttaatctgtattatgaacagaacaaagggactgaagggacacaaaggcagatgatggtggcttagagcaga

SEQ ID NO: 752 - DNA, 120 bp, synthetic construct
  source 1..120: mol_type = other DNA
agtagccaatatcaatagtcaccagggaaatgcaaactaacaccacaatgagataccattagacaaccaactaaaatttaaaagacctttgagtggccggttgcggtggctcatgcctgt

SEQ ID NO: 753 - DNA, 120 bp, synthetic construct
  source 1..120: mol_type = other DNA
cgagtcctcgccctcattttctgcctggtcttgctcagactggggaggaagggaggttatttgcaaaggagatccagctttaaaaggcacaggctctagcaactaaagatgagactctat

SEQ ID NO: 754 - DNA, 120 bp, synthetic construct
  source 1..120: mol_type = other DNA
acttagtataatcctcacaaagctctaaacctagtaatattccccacaattttcctctcagcaaagcccacgcttgctcaggctcaccttgggagtgagggtcagtattttgcattattt

SEQ ID NO: 755 - DNA, 120 bp, synthetic construct
  source 1..120: mol_type = other DNA
tgtgcatgaaacaaagttttgactgcaacctgtcacatgaggtcagatgtggaattgtccacttatggtgctccagaagtttcagactttggaattagagatgcccaatctttagaagac

SEQ ID NO: 756 - DNA, 120 bp, synthetic construct
  source 1..120: mol_type = other DNA
ctgggtctcccaccacgaagcacgaggcccaaaaaataccaaccagctgagcccgcgagtcacaccgcagggccctgacagcggaaacgccgagagagaaggcgggtcctcgcgtcactt

SEQ ID NO: 757 - DNA, 120 bp, synthetic construct
  source 1..120: mol_type = other DNA
attggacaaactacttagcctgtctaatcttcagttttctcatctgtaaaataaggcagggaaccctcccttccagaatagctgcaggaatacagggaggtgtgatgtaagaaagtagtt

SEQ ID NO: 758 - DNA, 120 bp, synthetic construct
  source 1..120: mol_type = other DNA
atgcaaataagtttacttttatttttggtaatactttactggattgtctgaatattgacaatcagtatgcatcatgaagctacatggctaacattgagtactgactgtgtgtgccaggcc

SEQ ID NO: 759 - DNA, 120 bp, synthetic construct
  source 1..120: mol_type = other DNA
ctgttgcttgtgaggaaatgaaccaaccatcacttacagggtaggcatcttttaaactgcaggtccaaagataaaaataacgagggaggctgggcatggggactcacgtctataatccca

SEQ ID NO: 760 - DNA, 120 bp, synthetic construct
  source 1..120: mol_type = other DNA
gtgactcaatcaatcactgctgatgctcccaggacctgcaccagcttagtcctaggggcaaggattttaactgtccacctcagtttcttcatttgtaagatgcaaataacagtcacccct

SEQ ID NO: 761 - DNA, 120 bp, synthetic construct
  source 1..120: mol_type = other DNA
tagcccctggtaccagcttagttgctcaatgggctgtgtttgttctggagcccagatggactgtggccaggcaagtggatcacagacctggccggcctgggaggtttccacatgtgaggg

SEQ ID NO: 762 - DNA, 120 bp, synthetic construct
  source 1..120: mol_type = other DNA
agccagatactggacatgatctaccagggcggcgacctagagaagtgtaaccgggctcccatctacgtacgggtgcccttccttgaggtcaatgatccaggggaaccctcaggtgcatgg

SEQ ID NO: 763 - DNA, 120 bp, synthetic construct
  source 1..120: mol_type = other DNA
agcttctactctgcctggaaaccccatgcctcagctttcccctacttgcctctgagctcatgcaattcttggaagcctgggagacttaccttgaaattgaatgcaaataggacaaagacc

SEQ ID NO: 764 - DNA, 120 bp, synthetic construct
  source 1..120: mol_type = other DNA
aacagctatgttgctgctgaccagctgtgtgaccctgggctggtttccttccacacaatgggagtgccaatggctgcatgcatgcaaagaccgtctgaggataggaggaagcaatctgtt

SEQ ID NO: 765 - DNA, 120 bp, synthetic construct
  source 1..120: mol_type = other DNA
tactccacactctgtgatgcagactagcctgccgtcagaacacgaactggtggtcagacacaggtaggtttcagttccagctctgcctcttattgactgcaacctcaggcttaactttca

SEQ ID NO: 766 - DNA, 120 bp, synthetic construct
  source 1..120: mol_type = other DNA
agggtattaatagaagttgctctgaatgtctgggagacgacgcgtgtgtgttgcccccaccggcggagtgtcatcgcaccagggccaatggtagtcagagcctgtgcagtcccgctccct

SEQ ID NO: 767 - DNA, 120 bp, synthetic construct
  source 1..120: mol_type = other DNA
acacagatgcccccagctctctctacctcccgcgaaggcgctgagccccctgatccctgcccgggcactggcgcaaggtcgcctgcgagcgccaggccttcctgcccggtgggagacggg

SEQ ID NO: 768 - DNA, 120 bp, synthetic construct
  source 1..120: mol_type = other DNA
agttaggtcccttctctccatgcagtgtggcctcttttctgtacacagagtaacttctgtgtctgtggcatcttcagggaagaaatggcgtaggtgaatctctgaacttcctacataatt

SEQ ID NO: 769 - DNA, 120 bp, synthetic construct
  source 1..120: mol_type = other DNA
gatttggagatggaggctcagtcgtgagaggagctgggctcctcctggagggacatcagacaacaccagtgcttcctccagcaggactcctcatccagtgctctctttgccacctgacct

SEQ ID NO: 770 - DNA, 120 bp, synthetic construct
  source 1..120: mol_type = other DNA
tcatgtggtgactgagcatggttctatgagaatgagtggaaatggcaaggtctcttaaggcctaggttcaaaatcggctcagtatcacttctgtggcattctggtggccaaaccagttac

SEQ ID NO: 771 - DNA, 120 bp, synthetic construct
  source 1..120: mol_type = other DNA
gcagcccacagatgaaggagtcattttgactttcaagtcttgttatttaagaaatacatttcatagggcaatagttgccatagataatgattcttctgatgggtctgggcaaggtaaact

SEQ ID NO: 772 - DNA, 120 bp, synthetic construct
  source 1..120: mol_type = other DNA
ctctctcattctcttcttcccagagaatgttatgttatgtttagaacagttgctgtgaagtctgcctgctaaatccaacatctggcccgtcttggagtcagtttccattgactgcttttt

SEQ ID NO: 773 - DNA, 120 bp, synthetic construct
  source 1..120: mol_type = other DNA
agccccatgcattccatgaacacttcctcagagaagggagggacacgcttcttcggggcaaagatgacttccagtttacagacttctttgggcttcagtgtgatgttgtggaagggcgcc

SEQ ID NO: 774 - DNA, 120 bp, synthetic construct
  source 1..120: mol_type = other DNA
ttctgttatagaagcacaaaacagatgaagacaggttccagtggttttacacccatctttctatcaatcaccttcttcctgaggatttgataaagatgatgtgttaggctgggcatccca

SEQ ID NO: 775 - DNA, 120 bp, synthetic construct
  source 1..120: mol_type = other DNA
ccttcttttgtgttaagtagatattttctagtgtaccatttaaattcccttgccatttgttttactatattcttttgagttgttgtattagtggttgcaaggaagattacaattaacatc

SEQ ID NO: 776 - DNA, 120 bp, synthetic construct
  source 1..120: mol_type = other DNA
caataaaaaacaaacaggctgagcaggaaactggaaagagacatgaagagacatttcactgaggaggatccatagaaggaaaacaagcacatatgtgttgtatgaaaggagagaaggtta

SEQ ID NO: 777 - DNA, 120 bp, synthetic construct
  source 1..120: mol_type = other DNA
tacatgaaagtttatagtagctttattcataacagcccaaaccaggaacaatccagatgtcctccagtgggtgaatagttcaactaactgtggtgcatccctactatggaatggtagcca

SEQ ID NO: 778 - DNA, 120 bp, synthetic construct
  source 1..120: mol_type = other DNA
gcccactgaaggcattgctgaaacccaactcctacaatgagccctgttcaaacgtcatttacagtgaattttcccttcattgtctagatgggaatagatctttttcaaaagtcctacagt

SEQ ID NO: 779 - DNA, 120 bp, synthetic construct
  source 1..120: mol_type = other DNA
tagcctcaaagatgcactggtagttctgcatgatctgcggggtgaaggacaccgtggcaaaggcatgggaatgactggcaatgcacatcttgctgggttccacttcaaaaatgtcgacga

SEQ ID NO: 780 - DNA, 120 bp, synthetic construct
  source 1..120: mol_type = other DNA
gatgagaaagctggatgagagaatggagcagtggaaaccctgtgagagagacatgtggctcttgagagatggacagagcatccgctggtcttctaaagggcggacttcaggtgatggtgc

SEQ ID NO: 781 - DNA, 120 bp, synthetic construct
  source 1..120: mol_type = other DNA
tccagggatcctatcgtcaaagcatgaggcattctctttgcacctcatctgccctcctgctgggttacagattttgcatgctcagtaactgaacattgttctctgtggacatgttgccca

SEQ ID NO: 782 - DNA, 120 bp, synthetic construct
  source 1..120: mol_type = other DNA
ccacacagtcaacgttgatgacctgctgtcctccggaaggaatggagccaaacccagggtacacggtgaacatgccatgggcgaagcgggcctgcaggacaagggtgggagggataggag

SEQ ID NO: 783 - DNA, 120 bp, synthetic construct
  source 1..120: mol_type = other DNA
ttagactgggcagaataatggcctccgaaagatgtccacatcctaatctctggaacctgtgaatatgttaccttatacagcaaaaggacttggttgacatgattacattaagaaccttga

SEQ ID NO: 784 - DNA, 120 bp, synthetic construct
  source 1..120: mol_type = other DNA
gctcattgaaacattttcagataattctaacacctctctcatctcagtgttgtcatctagcatttatctattttccttcagtttcagttcttcctggttcttggtatgatgagtgatttt

SEQ ID NO: 785 - DNA, 120 bp, synthetic construct
  source 1..120: mol_type = other DNA
agagcacagctaatgcccctgtcttaatctaaaagaaaactcaccaacaggcaagattccacttagcactaattccaaactgacaggggaaaagtctctttgtcatctgtgaattcttgg

SEQ ID NO: 786 - DNA, 120 bp, synthetic construct
  source 1..120: mol_type = other DNA
aggtggaattccattcttttgaagccaagggaggcaaaaaagcagagacggttcttatgatttccttgactgactgataagtttcccagacacgctattccccacggtggacttgacggc

SEQ ID NO: 787 - DNA, 120 bp, synthetic construct
  source 1..120: mol_type = other DNA
acggcagggaacgttttgaagtgtattcccctgtaggtattttatcttcgccaagcatttggtaggatttgtgctcctcttaatactctggggaatgctggtacaaagaatacaagaatg

SEQ ID NO: 788 - DNA, 120 bp, synthetic construct
  source 1..120: mol_type = other DNA
ggatggtccctccctcattgttctctggcacctctaaactgctgcagctgtcagcctgacctgattgctgactctttttttccctcttctttatatatacatatattttattttgatagc

SEQ ID NO: 789 - DNA, 120 bp, synthetic construct
  source 1..120: mol_type = other DNA
agagtgcgttaggtggggcataacctgtctgaatgacattgtaaagatccctctggacactgtggcgaatgccaacagggaagccagttaggaaacctctgtagaagtccaggtgagaga

SEQ ID NO: 790 - DNA, 120 bp, synthetic construct
  source 1..120: mol_type = other DNA
agcagacccacccagttcaaacctgcattgttcaaaggtcaaccgtattttcctttagcacattaaaaatgccattctattgtcttccagcttcctttgttactgatgaagcgtcagtca

SEQ ID NO: 791 - DNA, 120 bp, synthetic construct
  source 1..120: mol_type = other DNA
caggaagtacgtgtttgctttgacatcattctgaaaatagaaggatgcctccaccaccattaaggaagtgttcaggattgttagcgtctccatgttgcctgggaataaggatgacttgta

SEQ ID NO: 792 - DNA, 120 bp, synthetic construct
  source 1..120: mol_type = other DNA
gcccggcctcacttgagtaattttttatttcacatctgttttagagatgacctcattcacctccttctcccaaaccctcagagaatgttactgttctgacatgaattcatttggccttgt

SEQ ID NO: 793 - DNA, 120 bp, synthetic construct
  source 1..120: mol_type = other DNA
gccatttgaagataccttgcagacatgatgactccttgcctctaaatacacctcctcaagaaaggactttctcctgcaatcctgcacaatactgtcatcacacctaagaaaatgaacaat

SEQ ID NO: 794 - DNA, 120 bp, synthetic construct
  source 1..120: mol_type = other DNA
tgtgaaacatctatgggtctctcagtcatggacaccagcacctcttctggcggaggtggcaggggggtgaaatgaactctgtgaggattcttagctttggtggtttaatgctctatttct

SEQ ID NO: 795 - DNA, 120 bp, synthetic construct
  source 1..120: mol_type = other DNA
tcaccgatgaggccacacagcaaggctccacagatgcaaaagatcaatatgacatagagcatgtactctgcggatagttatcaaaatcaggactaaaaagagaaggcaaaatgaagctgt

SEQ ID NO: 796 - DNA, 120 bp, synthetic construct
  source 1..120: mol_type = other DNA
atacttggcatctaaagagacaaaaccatgtgaccataaagcaagagcaaaagacagacgggagaccagactgctggggatctacgtatggcactataagacaaggactttaaaacatat

SEQ ID NO: 797 - DNA, 120 bp, synthetic construct
  source 1..120: mol_type = other DNA
atcatgccgacagccgacatctcaacagccacatggaagacaaagatagaaaaataatatcatcaaagtgctgaagaaaaatggctggcaacctagaggcctgcctagaaaaaaacaccc

SEQ ID NO: 798 - DNA, 120 bp, synthetic construct
  source 1..120: mol_type = other DNA
atttgcttttatagatttggagtaagaaatgatggctggcaagggcttatttgagggaggaaggcaaattgagagggatggaattgggtttaagattgagctggaggatagagaggaaga

SEQ ID NO: 799 - DNA, 120 bp, synthetic construct
  source 1..120: mol_type = other DNA
gcaggcacatggcactctccagtgagagtgaaagccagcactgtggccaaaatggtgtttaacgaagcactcctttccagctgggtttggatttaggcgaatctaagccagaactttcgg

SEQ ID NO: 800 - DNA, 120 bp, synthetic construct
  source 1..120: mol_type = other DNA
ggggggcaaactggaagcaatttgtaattaaggtctaaagaatggaactgacatcttagtcactgaccactgcagatgcaaaagaccaaaacttgatccaaccaagcttaattgtctgtt

SEQ ID NO: 801 - DNA, 120 bp, synthetic construct
  source 1..120: mol_type = other DNA
gtttgttttgtttttgcttttgtcttattcaattttaaatagagtggccagggaaggccttgctgggatgtttaaataaaatcctgaagaggagttcagtggccaaccagcatgtttttt

SEQ ID NO: 802 - DNA, 120 bp, synthetic construct
  source 1..120: mol_type = other DNA
aaatacaactcctggccaccttacagggcagaggtgaggcgccaacggaatagcaaatgtcaaagtttcacttaagcccaatggaaaggtaggaggccttgccttcttgctcctttttgg

SEQ ID NO: 803 - DNA, 120 bp, synthetic construct
  source 1..120: mol_type = other DNA
agtgttactcaaagtgtagcccatagactggccaccagtgaatgagcgttaggtttttgatgagacaagaagcttgtgtcagaatgtaaatgacctgtatcactaaacacactatttggt

SEQ ID NO: 804 - DNA, 120 bp, synthetic construct
  source 1..120: mol_type = other DNA
agctttatttccctgtccagatggacagaacaaaacccaaggaaatgagttttgataacaccctatatggtaacagagaaataagttttagttcatccataaacgtttgggtaaagaaca

SEQ ID NO: 805 - DNA, 120 bp, synthetic construct
  source 1..120: mol_type = other DNA
aaaaaatttaagagaaccagcattagggcatagccagaggttctcactaaagagctatttctcttatcttcccagcaaagaatcttccatttccctaagtgtcccacgcagaggtattga

SEQ ID NO: 806 - DNA, 120 bp, synthetic construct
  source 1..120: mol_type = other DNA
cccatctttgcctactaatattctcttgcttcttcaaacccatttccttgaaaacttcccacatcacccttgttggaacccattcatcccaaagtcgctctttcaaagaagctggtattt

SEQ ID NO: 807 - DNA, 120 bp, synthetic construct
  source 1..120: mol_type = other DNA
ccatgatggaaattaagtcctgataccttaatactataagctctgacaatatagataaaatacaagtaggaaatatgggggaagggtacatgagatgactactcagctggtattaactgg

SEQ ID NO: 808 - DNA, 120 bp, synthetic construct
  source 1..120: mol_type = other DNA
taaaatcctataatcttaaattggaatttgaaacatcattatgtgttatgatttttttcccctcttaaaaatcacatttcctaattctatttactaaaaagacctagaaagtcacaatcc

SEQ ID NO: 809 - DNA, 120 bp, synthetic construct
  source 1..120: mol_type = other DNA
ctcatagggtgacccacttgatcctggcttgcttggggttttcttggttctagcacttaaacccctacaccctggagctctcccagtgctggacaaacccagacagccggtcacccttta

SEQ ID NO: 810 - DNA, 120 bp, synthetic construct
  source 1..120: mol_type = other DNA
ttgtggctcaacacctgtaatcttagtgctttggcaggctgagatgggaggatcacttgagaccaggaatgcaagactagcctgggtaacaaagtaagatcctatcataaaaaaaaaaaa

SEQ ID NO: 811 - DNA, 120 bp, synthetic construct
  source 1..120: mol_type = other DNA
cagcaaaactttggaagccaactcagtgcccatcaatagggggtcactttaaatgaagtgtgtgtggtacacctatccatgaaggataatgcatgtatatttatggatagggatgatgtg

SEQ ID NO: 812 - DNA, 120 bp, synthetic construct
  source 1..120: mol_type = other DNA
cttaattcagctgatatttactggggacttactaagaaccagttctatatcctgaggatatgacgatgaacaaaacagaaaaaaaattcctgccctcatgaagattaaattccagagata

SEQ ID NO: 813 - DNA, 120 bp, synthetic construct
  source 1..120: mol_type = other DNA
atgcaagtgcagaggtgtatctggaggataatttctagaagggggacaatgcattttaaattttgatctacttgcaaagttgtatgttatagaggttatgccaattcatactcctaccca

SEQ ID NO: 814 - DNA, 120 bp, synthetic construct
  source 1..120: mol_type = other DNA
ccacttgtgcactatggggcctgggggctgtgttagtaagagaaccctccgcatctgattgctgtgagccatagttcacataatgagccccatggtgccagggtcatagcaaatgtccaa

SEQ ID NO: 815 - DNA, 120 bp, synthetic construct
  source 1..120: mol_type = other DNA
ctgtaaaggaaataggattccccagggacagggaagaagtctgttgtgggagcagcgtatgtgtaggtgccaaacggaagcaggtgatggtgatgacaatgatgatgcagaatacagaag

SEQ ID NO: 816 - DNA, 120 bp, synthetic construct
  source 1..120: mol_type = other DNA
atggcctgaaatctttatgtctgtgacctggtttaatgggttttggtataaaaattaagttagttttataaaataagttgggtaatattgtcttttatatttttctctgaaaagagttta

SEQ ID NO: 817 - DNA, 120 bp, synthetic construct
  source 1..120: mol_type = other DNA
gggcccttgggcagaacaaggaactgcctctaagccaaggtctgggcttatctggctgcagggaggagtgacaggtagggaggggaggcctgcctggccctggcccccttaagccacaca

SEQ ID NO: 818 - DNA, 120 bp, synthetic construct
  source 1..120: mol_type = other DNA
aaaaatcagtgtgagaataacatgttcctttgctgcaggacttggctccctttaggcccttgtattcgatttatttataatctgattcacaaacgaagagccaaagctgtccgtggagac

SEQ ID NO: 819 - DNA, 120 bp, synthetic construct
  source 1..120: mol_type = other DNA
caatgaaataagccagtcacgggaagatactgcatgacgtggtttggctctctgtcctcatccaaatctcatctcaaaatgtgttccccacatgctgagggagggacctgatgagaggtg

SEQ ID NO: 820 - DNA, 120 bp, synthetic construct
  source 1..120: mol_type = other DNA
gaggatggatcgtgattttaagctccttgttaattctgtcaataattagtggtcaaaatggaaaatattcatgaatggccagtacatggaatacagaaaaccccatgaaaagcctgaaag

SEQ ID NO: 821 - DNA, 120 bp, synthetic construct
  source 1..120: mol_type = other DNA
gtttttggacttttcaagtaaatataacaaatacatattcaacggctctgaggtccaggtgttgtgggaaatacataaacaccccgaggagctgacagcaatgacattagtgagaccaat

SEQ ID NO: 822 - DNA, 120 bp, synthetic construct
  source 1..120: mol_type = other DNA
tgtgaatctcccaggaagcttcgtgaagctccctgagtttggtaccgcagaagaagccctccaaagtaacgcatacagtagaaaacaatggatttgaaaacaaatgcaaattttactatt

SEQ ID NO: 823 - DNA, 120 bp, synthetic construct
  source 1..120: mol_type = other DNA
agctcagaaacccacctaggcacatattaagtctgaagtataacagaggaagcaatatcaatgcatgaaaaaaggaaagagtatgcaagaactggtgataggacgaatggctttcttcat

SEQ ID NO: 824 - DNA, 120 bp, synthetic construct
  source 1..120: mol_type = other DNA
ctcctggaagggcacattgatataatcactttggagagtaatttggcaacatctaatgaggttgaaaatgtacctatctgaagagtcaacaaattccactcctagatatactccctattt

SEQ ID NO: 825 - DNA, 120 bp, synthetic construct
  source 1..120: mol_type = other DNA
caccgatgggacagtaagatcaaccccttctctccctcctcctcctcagcctacttaatgtgaagatgatgaggatgaagatctttatgatgattacctgcacttaataactaagtatgt

SEQ ID NO: 826 - DNA, 120 bp, synthetic construct
  source 1..120: mol_type = other DNA
ggaagtatattttgcatttatttcttacacaaaaatatacatttttacattgaatcatgcttgctgtttttatttgccagtgtgtgaaagaaaaagcctgcatggttttgccccctgggt

SEQ ID NO: 827 - DNA, 120 bp, synthetic construct
  source 1..120: mol_type = other DNA
agtaatgactgttgctgtcggggctattttgagttgatctacttctgcctcatgtctcagcttttgtctacacattaggccattggaggaaacacattcatgtatcctttgtgataacac

SEQ ID NO: 828 - DNA, 120 bp, synthetic construct
  source 1..120: mol_type = other DNA
gtatgcttagaacagccaagtgatatttctaattcattatcatcattttaacaccttgtgacattttatgttccactgtcttctgttgctgtttagcttttgtatctttaatgctttttc

SEQ ID NO: 829 - DNA, 120 bp, synthetic construct
  source 1..120: mol_type = other DNA
ctagccactcccctcacccagaacaggagtacaagtaatgcccagccttgagtttctaagtgttagtataaattttagggtcacattacaaatgctacttttccacaagattttctaagc

SEQ ID NO: 830 - DNA, 120 bp, synthetic construct
  source 1..120: mol_type = other DNA
ccatgctccaaacaatgatgaatttcactgcatgtaaatcctaactcagtaaacttaggaaggggaaaaacctaggaaccgaaaagtgaactaaaccctcatctttcatactggggcgtc

SEQ ID NO: 831 - DNA, 120 bp, synthetic construct
  source 1..120: mol_type = other DNA
gttctcactgcatcctggcatgtgatctgagaggttgatttgctgtattattactgggataaaccaagatagcatctcccaggcttcttcactgcaaagttagttttctccccttcataa

SEQ ID NO: 832 - DNA, 120 bp, synthetic construct
  source 1..120: mol_type = other DNA
tttctgaaagtagccaattacacttgattttctggaaggcacaaaacatgcataacagaacttcaacttggcagttcttttccaaaggggaaaaaaacccatatggaaataggtggcttg

SEQ ID NO: 833 - DNA, 120 bp, synthetic construct
  source 1..120: mol_type = other DNA
tggtactgtgcagtgacatcaatgcccaggatgcccaagactaactcctcaaggcttgagcaatggaccctacagccttgttaaatgatgagcatgatgagaaggtgacggaagggacac

SEQ ID NO: 834 - DNA, 120 bp, synthetic construct
  source 1..120: mol_type = other DNA
ctaatgtctagcctgtggaagaaagaataagaaatgaagagcataaggattgaacaaaataaaaactattattatctgcagatgacctgtttgtgtatatacaaaatccaaaatcatcta

SEQ ID NO: 835 - DNA, 120 bp, synthetic construct
  source 1..120: mol_type = other DNA
aaagttaagcatatgatgactatatcactcagcaattctacttttaaatatttacccaagagaaataaaaacatatgtatatctgcacacacacacatacacgcacacacacacgatgtg

SEQ ID NO: 836 - DNA, 120 bp, synthetic construct
  source 1..120: mol_type = other DNA
ccttaaatcttcccttagatgatgaactcagtttcagaaaatctaagctttctgctataaggatacagagtttatgtcaggggtagcactgggtggcatctgagagtattactacaggac

SEQ ID NO: 837 - DNA, 120 bp, synthetic construct
  source 1..120: mol_type = other DNA
tttgggtgtttcgatgagttcaagcttttatcattcccccctcactccttcacactgctctagagagagtgtaaaaaacacacacaggtcataacacatcaatctcttgttcaaacacct

SEQ ID NO: 838 - DNA, 120 bp, synthetic construct
  source 1..120: mol_type = other DNA
caacctagctgttaagtaactaacttgctctaaatcacagttattaagtggcagggcctgtattcaaatgcaggtgggctgacttcagattcaaattgtttgcttttgccagtggttctc

SEQ ID NO: 839 - DNA, 120 bp, synthetic construct
  source 1..120: mol_type = other DNA
gtgactggaggcgccccagtttctctgggtgtggcctgcggaccccctcgggagcaggtcgtcccgcaccagtgtctgcccccggcccccagggacacctgcacccgccccactcacgac

SEQ ID NO: 840 - DNA, 120 bp, synthetic construct
  source 1..120: mol_type = other DNA
agagtgagctggagcagatctgcaccatgggccaagtttctcagaaaatacatggcttcctgcgggctgcagcctaatgcccacgttcctctcggggcagaccgaaggttattcaaccag

SEQ ID NO: 841 - DNA, 120 bp, synthetic construct
  source 1..120: mol_type = other DNA
attcctcagaattatttatttaaaccctactttgttacaaaatgatttaagacaggatttcctcaataaatgggaggagagccaggcgccgtgactcacgcctgtaatctcagaactttg

SEQ ID NO: 842 - DNA, 120 bp, synthetic construct
  source 1..120: mol_type = other DNA
ctcaccaccaggtcccatgtcctcaccagcaaggtcccatatcctcaccaccaggtgccatgtcctcaccagcaaggtcccatatcctcaccaccaggtgccatatcctcaccagcaagg

SEQ ID NO: 843 - DNA, 120 bp, synthetic construct
  source 1..120: mol_type = other DNA
ccaggtcccatgtcctcaccagcaaggtcccatgtcctcaccaccaggtcccatgtcctcaacaccaggtcccatgtcctcaccagcaaggtcccaacacaagttagaatgtgccatcag

SEQ ID NO: 844 - DNA, 120 bp, synthetic construct
  source 1..120: mol_type = other DNA
ctcagccaaggctcctgactccacccaaggctcctgacctcagccaaggctcctgaccctacccaaggctcctgaccccgcccaaggctcctgacctcagccaaggctcctgaccctacc

SEQ ID NO: 845 - DNA, 120 bp, synthetic construct
  source 1..120: mol_type = other DNA
cccaaggctcctgaccccacccaaggctcctgacctcagccaagactcctgaccccacccaaggctcctgaccccacccaaggctcctgaccccagccaaggctcctgacctcagccaag

SEQ ID NO: 846 - DNA, 120 bp, synthetic construct
  source 1..120: mol_type = other DNA
gttctagtacacagcagggactctcaactctcgcgctcagacgttctagtacacagcagggactctcaactctcgcgctcagacgttctagtacacagcagggactctcaactctcgcgc

SEQ ID NO: 847 - DNA, 120 bp, synthetic construct
  source 1..120: mol_type = other DNA
tctagtacacagcagggactctcaactctcacgctcagtcgttctagtacacagcagggattctcaactctcacgctcagtcgttctagtacacagcagggactctcaactctcacgctc

SEQ ID NO: 848 - DNA, 120 bp, synthetic construct
  source 1..120: mol_type = other DNA
gtggaatcggggtgtaagggttgggggcaggggccccatatcttagaatggtggaatcggggtgtaagggttgggggaaggggccccatatcttagaatggtggaatcggggtgtaagag

SEQ ID NO: 849 - DNA, 120 bp, synthetic construct
  source 1..120: mol_type = other DNA
ttagaatggtggaatcggggtgtaagggttgggggaagggaccccatatcttagaatggtagaatcggggtgtaagagttgggggaagggaccccatatcttagaatggtggaatcgggg

SEQ ID NO: 850 - DNA, 120 bp, synthetic construct
  source 1..120: mol_type = other DNA
tggctaatgtctttttagccgagacatgaaggaccacaaaaagccagtcttgtaacacaataggcaaagagctttgcagaaaaacagccaccctgagcagagcccctgagcagggaaagg

SEQ ID NO: 851 - DNA, 120 bp, synthetic construct
  source 1..120: mol_type = other DNA
aaagacagaggcatattttttaaatgactgagcttgatatcaaacaatataaaggctgttaagaatgctgagatggatttgtttaatagatgtcaaaccggccttctttcacaggaagcg

SEQ ID NO: 852 - DNA, 120 bp, synthetic construct
  source 1..120: mol_type = other DNA
cagaaattttatgaacaacaaaaagaaacgtgtatcaaaactgtgagcagtatgtactaaatactttggagcataaagtaacagaagaaattcaaagaaatgcaagccaaagaagactgg

SEQ ID NO: 853 - DNA, 120 bp, synthetic construct
  source 1..120: mol_type = other DNA
caaatattcagtgggtggcaagcttgtctctggttgagaaacactgccttaaagcatccataggagccttttcaaaaggtaggtattttttaggtatttgtggacaaactacactggggc

SEQ ID NO: 854 - DNA, 120 bp, synthetic construct
  source 1..120: mol_type = other DNA
ctaacacagctcatgcaacttctcctcctacctgattttggcttttcttggtctattagtcgtctcctcttccgcatcaaacagtgaaacatcttcagtgtcatcattactatcctggtt

SEQ ID NO: 855 - DNA, 120 bp, synthetic construct
  source 1..120: mol_type = other DNA
gcatgagtcagcgaaaatacagtgagcacggatgccgtgctgctcaccatttcaagcattttgtggattaccccacaccatccttgccatacccatactagctgtaaaccagaaataaaa

SEQ ID NO: 856 - DNA, 120 bp, synthetic construct
  source 1..120: mol_type = other DNA
agaacactttcataactaaaacgtgtgggtttttttccacatgaagccattctccaacaacagctgggtgtcctaagatgtaactcaattctgacactccctacttggagatggaagaga

SEQ ID NO: 857 - DNA, 120 bp, synthetic construct
  source 1..120: mol_type = other DNA
atgggttttatggccaaacaagtttttctcctagtgttggcctctaacgagtttaggcttacatcttcctgtgttgaaggccagagaaaaagggcagattctcttctagtcattcttgca

SEQ ID NO: 858 - DNA, 120 bp, synthetic construct
  source 1..120: mol_type = other DNA
gtgaaatccagttttcccctctcttgtttatgtcagagctttgttgtaagcctctcactttgtaaggaaattcttattgggtaggttaggctgagggcttacatccttatcatcaggaag

SEQ ID NO: 859 - DNA, 120 bp, synthetic construct
  source 1..120: mol_type = other DNA
ctatgctgtgtccatttgagaaaaagccccagggatattgaaggtctgagaagttgagtggttcagtgtgttattatatttagggtcccagtaaagaagaactgaagcaactgtgagaca

SEQ ID NO: 860 - DNA, 120 bp, synthetic construct
  source 1..120: mol_type = other DNA
gaaccaacaccctgaattaagaatttattatgtccattcccttttaaaacattttattacatatgtgtatggtcataaataatatgtagaatttgttttcatgtcctaaaattgtatata

SEQ ID NO: 861 - DNA, 120 bp, synthetic construct
  source 1..120: mol_type = other DNA
aatgactataatgacatttaggaattttaacactaagatttttttcttcccgagacatttccttgatttctttcatgtaatatgtgcctgttatttttaagacttggtttaatctgttta

SEQ ID NO: 862 - DNA, 120 bp, synthetic construct
  source 1..120: mol_type = other DNA
ctcttaaactacacattgtatcataattgcatattacctggtttttgaggcaggaaatatatatttctttatatgttgataattcataactgtgttttttgaattaatgaattgagatgg

SEQ ID NO: 863 - DNA, 120 bp, synthetic construct
  source 1..120: mol_type = other DNA
acgtagagttttatggtaagagtttgttccttcagcattggttcagaaatgtaacatattagcataactgaacctgtgaatggtgacctaaaatttaaactatcatatgcagattgtttt

SEQ ID NO: 864 - DNA, 120 bp, synthetic construct
  source 1..120: mol_type = other DNA
caatgtgggttcatctgctatcatctctctttaaaacacttgaaaataaatgttaccttcacagcatatcatgaagcacatgtttttgaggcagaattcttaggtttgagttctgggtct

SEQ ID NO: 865 - DNA, 120 bp, synthetic construct
  source 1..120: mol_type = other DNA
tgttctacattcatggattcattgtcttcaaataaacttatgaagttttgggaatttatgctctatgaggtttgaagtttcgatagaatatttttttccagttggatatccacttatggc

SEQ ID NO: 866 - DNA, 120 bp, synthetic construct
  source 1..120: mol_type = other DNA
gtgtatttttgtttttatacctgtgcttttttttgcatatgcccgtgataacttagctataaaatctttgccttgaccaatgtcctgaagcattttccatatattttcttgttagtagtt

SEQ ID NO: 867 - DNA, 120 bp, synthetic construct
  source 1..120: mol_type = other DNA
ctcaaaaacaggctgtgtgtgctatatctcgtttatcccttcccgaacaaaatttctgttatttgggcaaattcttaaatcatgatttaaaccgtaatggttacaaaccacaaacacatc

SEQ ID NO: 868 - DNA, 120 bp, synthetic construct
  source 1..120: mol_type = other DNA
tgtggtgaaacacatttattgatttgtgtactttgaaccaattgcatcacaaaaataaagctgacttgattgtggtgaagtaagtttttgatgtgttgctggattttgtttgctgatatt

SEQ ID NO: 869 - DNA, 120 bp, synthetic construct
  source 1..120: mol_type = other DNA
ggatcatgccactgaacttttatactgggagatgtgattgcttcttaactccaagtatcattactctttgaaatgtaactcaaattagcgtaagacatttgcagttcagcaaaaggctta

SEQ ID NO: 870 - DNA, 120 bp, synthetic construct
  source 1..120: mol_type = other DNA
tgttttactcatgcagattgaccttacagaagcacaggaaactgtaccttcacgatgtctacatctggatgcagagaatgaagttcttcaacttcaacagacattattctctatgaaagc

SEQ ID NO: 871 - DNA, 120 bp, synthetic construct
  source 1..120: mol_type = other DNA
tatcagcagtgtgaaaatggactaatacacaccctaatactgaaacagactaatagacaccctaataccaaaagcaaggaaggacataatgagaaaagaaagctacagaccaacatccct

SEQ ID NO: 872 - DNA, 120 bp, synthetic construct
  source 1..120: mol_type = other DNA
tgaatgtgaatggccttttaagtaaccactttaattgacattcagccagagtgacaccaccatacagataacatgaccatttccttgtaagggtgttacccatggctgtgtagtctcctt

SEQ ID NO: 873 - DNA, 120 bp, synthetic construct
  source 1..120: mol_type = other DNA
gttgactgtggcttctttaattcatttggagacattttggaatctgtggaatcaggcggaggggctgctgagaggagtgggatgggagagcatggactccctttgggcagggggtcctga

SEQ ID NO: 874 - DNA, 120 bp, synthetic construct
  source 1..120: mol_type = other DNA
tgattgccaggcaatgagataattttagagaaataagtgaccagacacatagttcttaaaagcagccgcacacgtatttctggagtgtggcaagaggcctcatgaccaatcattcatcaa

SEQ ID NO: 875 - DNA, 120 bp, synthetic construct
  source 1..120: mol_type = other DNA
ttacacttaaatttggccaatatctcatccaggaatgggcctaataccccattagagtcaatcccagcacttctgcaagaatgactagaagagaatctgccctttttctctggccttcaa

SEQ ID NO: 876 - DNA, 120 bp, synthetic construct
  source 1..120: mol_type = other DNA
aggtttggtattaaccacaatttgaggcatctgctgggggtcttggaatgtatcccctgcagataagggaggactactatactttatgaatttattaatggtaagatctagtggcaggtc

SEQ ID NO: 877 - DNA, 120 bp, synthetic construct
  source 1..120: mol_type = other DNA
ggtacatttgtgcattggttgtctgcctctcttcacctctttccctgaggaaggagttggtatctgttagtcactgttgtattaccagcacatagtagatgctcagtaaatatttgttga

SEQ ID NO: 878 - DNA, 120 bp, synthetic construct
  source 1..120: mol_type = other DNA
caacgaggagtgttggctttgtttttccacttaaaaactttatttataaaaaggaaaagtagttttcatattaagtttttatttcctttccagcagttggggctagaaagtatgtgttgg

SEQ ID NO: 879 - DNA, 120 bp, synthetic construct
  source 1..120: mol_type = other DNA
agagctcacttcacagacacagagaactcccctggggagctctcactctcccggatcaggaaggctcccagatggttccgcttcatcagaatctcttcggccagctgccgggaaatcctg

SEQ ID NO: 880 - DNA, 120 bp, synthetic construct
  source 1..120: mol_type = other DNA
tcactggactccagcttgaggggacatctctcctgtgaggggacatctctcctgtcagtcctggagcaggttccaatgtcagctcaatccttcaggggtacttgagagaaaaaattgggc

SEQ ID NO: 881 - DNA, 120 bp, synthetic construct
  source 1..120: mol_type = other DNA
ctgcctgggtttgaaccccagccctgccacctaccaactattggtcacttacctctttgtaaaggacttggcagagaataaatacttctaaaacacataaaaataaacccggcatctgtc

SEQ ID NO: 882 - DNA, 120 bp, synthetic construct
  source 1..120: mol_type = other DNA
atttctgttccattaatctttaggctttttcccaaagtggtgaagattccaaacaaaatgggccatttagaaaacgttttcaggctggtcaccgtggcttacgcctataatcccagcact

SEQ ID NO: 883 - DNA, 120 bp, synthetic construct
  source 1..120: mol_type = other DNA
aaaagaaatggtaactacctggacaaaacatttcacgtgcattgttttagtaaacagacacaaccttggcttcaggtcttttttgttttctgtcacccaggctggagtgcagtggtgaga

SEQ ID NO: 884 - DNA, 120 bp, synthetic construct
  source 1..120: mol_type = other DNA
ccctaatggcaatcactgttacagtgtaacagagattctgacataatcttattgtatgtatttccttcacccccacgcatggaaacagtaactccctccacacactacctcatgcttata

SEQ ID NO: 885 - DNA, 120 bp, synthetic construct
  source 1..120: mol_type = other DNA
agatcttagttgtattcatccagtgccctcccaatcatgttttgtgtggaatagcaaatcactttctgcttgtattccaaaaatgttgcagaaagacttgccaccctgctggggactgtc

SEQ ID NO: 886 - DNA, 120 bp, synthetic construct
  source 1..120: mol_type = other DNA
gtaaggtcatacccaaaggctgacatgtttttagactaatcaacacagtagggaggcacttcgaggcacagtgccaggccactgagagttctgacttcggcacccttcagtcaccacaat

SEQ ID NO: 887 - DNA, 120 bp, synthetic construct
  source 1..120: mol_type = other DNA
aactggctgggcaggcactgttagattcaggccttgagggtgggagaaggggtcggatcctaaatagactcttcagagccctcagtgtgggagtgaggtgtggagctgaggtttttggct

SEQ ID NO: 888 - DNA, 120 bp, synthetic construct
  source 1..120: mol_type = other DNA
gggaaggctctgcaggtggtggctgggagtacaggctgagggcctgaattcctttgtgacagtgggagaattaccacattaactacttctctggaatagtaacaacaatagttccaacct

SEQ ID NO: 889 - DNA, 120 bp, synthetic construct
  source 1..120: mol_type = other DNA
tgagcccatggtcaaggagacccccaggtctttctgaacagagacagctggcctgggggcctccctctcactgcgtgcaagaggctgttaggatgcaagactcaaggcgctgagggaggc

SEQ ID NO: 890 - DNA, 120 bp, synthetic construct
  source 1..120: mol_type = other DNA
caggcctgagccaccgcacccggctagcctgtgtctgttctttaaaattgttttgttttccttactctcagattcttcttgctgcttattgtgccttgttgctgcctgttgtgcaatttc

SEQ ID NO: 891 - DNA, 120 bp, synthetic construct
  source 1..120: mol_type = other DNA
aatctgaaactttttgagtgccaacgtgatgctcaaaggaaatgctcattggaacattttagattttggatattgcaattatagatgctcagctagtaagtataatgcaaatattccaaa

SEQ ID NO: 892 - DNA, 120 bp, synthetic construct
  source 1..120: mol_type = other DNA
ctttctgcatcctgtagaaaactgacccactattctcatactggtgcaacttcttccattacctcaaaactggacaacgtgaacttgtttcttgtctcttcttgctagggctgtcactgg

SEQ ID NO: 893 - DNA, 120 bp, synthetic construct
  source 1..120: mol_type = other DNA
catggaaggataaccaccttcatgttttgaaataaatgtttcctgttgaaatgattttagattttagacagaaatattgaaaaggcactatagtatcctcctataccttccatccagctg

SEQ ID NO: 894 - DNA, 120 bp, synthetic construct
  source 1..120: mol_type = other DNA
agtggatggacatgaatggaggtcagtgtaggctgtgaattatggaattgtaagacctttagaagtaatactcaggcttaattttacagaatccggaggataaaagactatgatgccaac

SEQ ID NO: 895 - DNA, 120 bp, synthetic construct
  source 1..120: mol_type = other DNA
gttctctcaaggaatctacttagtccgtcaagtagagctgggaccaccagcatctgccaccacacccagctaattaaaataaacttttttttgtagagacaaggttttgctgtgttgcct

SEQ ID NO: 896 - DNA, 120 bp, synthetic construct
  source 1..120: mol_type = other DNA
caatttccagtggcctgaggccctcaggcccacccttctagagagagcccgaagccccaaagttgcccttcccttaaccagctacagggccgggaccctaaggacttagacccaataatt

SEQ ID NO: 897 - DNA, 120 bp, synthetic construct
  source 1..120: mol_type = other DNA
attgcttaaccgctgctctcctcccattttcgcttcaccctctttacagcagcctgtccctctcccgatctcaatgatgatgctctaagtcgttaagagttgattccggagccaggctgc

SEQ ID NO: 898 - DNA, 120 bp, synthetic construct
  source 1..120: mol_type = other DNA
ggagtacagtctaggcaaacgcatggctacaggtatggttggaatttagtagaccaatgtggctacaaagaattaggtgagggagcaatgaagatacgattctgtaaaaccttgattatc

SEQ ID NO: 899 - DNA, 120 bp, synthetic construct
  source 1..120: mol_type = other DNA
agagtgaatcttcactcctcttttttccatctgccagcatgtttggtcttctggcacctggtgttctatacagtacaacatgcttctttgtgttacattgagacttgatccacgtaccat

SEQ ID NO: 900 - DNA, 120 bp, synthetic construct
  source 1..120: mol_type = other DNA
tatttggtagattcaccagtgaggctgcctgctggtcttcagcttttcttagtggaaagttttttgattactacctcaatctctttacttgacataggtctgtctattcagattttctgt

SEQ ID NO: 901 - DNA, 120 bp, synthetic construct
  source 1..120: mol_type = other DNA
gtttcaaattcctgtggacatcttattcctcagcttttcctattaagctttttgattaggcttttttcccccaaactgttattcattgccgaatacagttgccatgttaaaacacttgtc

SEQ ID NO: 902 - DNA, 120 bp, synthetic construct
  source 1..120: mol_type = other DNA
ctttgagtccaggaattctgggctgtagcatgctatgctgattgggtgtccgcactaagttcagcatcagtatggtgacctcccgggaaaaggagaccaccaggttgcctaaaaaggggt

SEQ ID NO: 903 - DNA, 120 bp, synthetic construct
  source 1..120: mol_type = other DNA
cctttttcttcatacagattaaacacgagttcaaattacagctttgctgcttaatagcttggtgacctaggacaagttatctaacctctctgtgcctcagtttcctcatttaaaaatagg

SEQ ID NO: 904 - DNA, 120 bp, synthetic construct
  source 1..120: mol_type = other DNA
ttgagcactcactgtgcaccaggcatttttcaggtattgattcatttgatcctcaaaattcattagaggtaggtactattataatgacaaggccaaggaacagagattaaacaatttgcc

SEQ ID NO: 905 - DNA, 120 bp, synthetic construct
  source 1..120: mol_type = other DNA
acccattgctctcgtccccaggtgatcagtttgaaattcagctaacccagcagctacagtcccttatccccaacaacaatgtgagaaggctcattgctcatgttatccggaccttgaaga

SEQ ID NO: 906 - DNA, 120 bp, synthetic construct
  source 1..120: mol_type = other DNA
tcagcctcccgagtagctgggattacaggcatgcaccactagtctcgcgacgttttaattagaattttagaattagaggagggcttagaactctgccctcatttttcagtgaggaaactg

SEQ ID NO: 907 - DNA, 120 bp, synthetic construct
  source 1..120: mol_type = other DNA
cgaagaaccacttcatctcccatcccccatcaaatgatgcctgtgagactaagtccgaaggggactgatataaaatgcttctgcccagcatggttgtgcagtttgttcactgcacaaggg

SEQ ID NO: 908 - DNA, 120 bp, synthetic construct
  source 1..120: mol_type = other DNA
agaaaggggtgaaatgagtgtcacgagcagccaccactctgcatcacacctccacatccaggtgtgctggagagccccacttacacttggagtgtcctggtgccctacccacttttggta

SEQ ID NO: 909 - DNA, 120 bp, synthetic construct
  source 1..120: mol_type = other DNA
tgtgccccgccaggaaattcagtttctgaaaatacacctgtggatctctagcctagaaaaagggacctcttttattctttttttttttttttccagagacgggcctcactttgttgccca

SEQ ID NO: 910 - DNA, 120 bp, synthetic construct
  source 1..120: mol_type = other DNA
ttgccaaaggtaacagctaaaacaatgatataaaatataaagggacagtcgacttgggtatttcatctggaaagactgacgaatatgtaagtctttactatcaagtacatgcaggagaat

SEQ ID NO: 911 - DNA, 120 bp, synthetic construct
  source 1..120: mol_type = other DNA
ttaacttacctactgtagggacggcaggcacagtctcccccagcttcaatttatacaagatggtggtttttccagctgtatccaaactcaatataagaatccgcatcttttttttcccaa

SEQ ID NO: 912 - DNA, 120 bp, synthetic construct
  source 1..120: mol_type = other DNA
aaatttcagaggcaaagaaattcagcgttgggaagcttcactgccaagagagataacttggcagagttgaggaggcaccacagcatccagttttcgtttgagttttttgttttgttttga

SEQ ID NO: 913 - DNA, 120 bp, synthetic construct
  source 1..120: mol_type = other DNA
tacagtctctttgagatcagcctacttgaaatgtgagcttgacattctaagtaaagacttacaagcagtgctgggtctacacctctaactaagctcttggaagtctgtaaagatcttcag

SEQ ID NO: 914 - DNA, 120 bp, synthetic construct
  source 1..120: mol_type = other DNA
taatagtgccatggaaggaaatttaccgcggttgagttaaacgtagacattagtttggggcggtgttccgcgtaggaaataccacacactgacactgaaattaggcataaggaagttttc

SEQ ID NO: 915 - DNA, 120 bp, synthetic construct
  source 1..120: mol_type = other DNA
aggcttcttcccatctcctcattcagatgccctgtgattattaaactctttctttgctgcagccaggtgtctctgtatgctgactcactgtgcattgagcaaacaaaactattaaattac

SEQ ID NO: 916 - DNA, 120 bp, synthetic construct
  source 1..120: mol_type = other DNA
gctgggtattctccaactttttgctgaagttatggatgaataaaagggattccatctaaatgtgaatttttctgattactcatgaatttaatttagtatctttatatgtttattgaacat

SEQ ID NO: 917 - DNA, 120 bp, synthetic construct
  source 1..120: mol_type = other DNA
ggcttctgtcagtttgattacagtatgtttagatgtggatccctcagtttttcctacttgtagttccttgagcttcttgaatatgcagattgtttttcatcatgtttgggaagtttgggg

SEQ ID NO: 918 - DNA, 120 bp, synthetic construct
  source 1..120: mol_type = other DNA
attgccagcattaaaatatctgtaagtactatagtactctcatgagtcaagagatgatttatgctttttaaatttttcatcaaagcttaagtattttgcatttaggctaaaatgtcataa

SEQ ID NO: 919 - DNA, 120 bp, synthetic construct
  source 1..120: mol_type = other DNA
aaatgttttctgaagagcagaagtttttaattttgaccagctttaagttagcatttttttcttaaatggcttgtgattttttgtttcttacctaagaaatctttaagaacctgttgtcta

SEQ ID NO: 920 - DNA, 120 bp, synthetic construct
  source 1..120: mol_type = other DNA
gctttctcacttagttctctaagatagtgaggatctgtctgcttttttcttgaccattattggataggaaaaatgctctcatcctctgtaatgatttgtcaccaaggccataaagacatt

SEQ ID NO: 921 - DNA, 120 bp, synthetic construct
  source 1..120: mol_type = other DNA
atagttttgtctcttcctttccaatacttctactctttccttcctttcccttttcctttttcctttcctttcctttccttttttttcccttctcagggccttgttgtcacccaggctgga

SEQ ID NO: 922 - DNA, 120 bp, synthetic construct
  source 1..120: mol_type = other DNA
tcaaagcagtgttacacagcatacaattcctgtcttcaaaaaagttacctcatcaggtagatgagacttataatgaataaaaggaatcaatacagatttggagacggtggttgttgtcat

SEQ ID NO: 923 - DNA, 120 bp, synthetic construct
  source 1..120: mol_type = other DNA
aagcggtggatgcaggtacggccaatagtctatctatcccggtgagtgaggagacctgctttgagggttgcacaacctggatctgcttttacagtggtgtctgtcactatgaagactcca

SEQ ID NO: 924 - DNA, 120 bp, synthetic construct
  source 1..120: mol_type = other DNA
taaattatttccaccagcccccagaagtgactattcaatgtccaactatgtcaggcccaggctaataaaagtagaggcatgaggaacctagggttgttctgaagtgccttgattatggta

SEQ ID NO: 925 - DNA, 120 bp, synthetic construct
  source 1..120: mol_type = other DNA
gcaagacgctgagtctttaacaaaaaaaaaaaaaattttaaagtcagctgctaagacacactagccacatatcaagtgctcaactgccccgtgtggctaatggcttccaaactggcagca

SEQ ID NO: 926 - DNA, 120 bp, synthetic construct
  source 1..120: mol_type = other DNA
attaagcaagaagagaagggagccaggaaataaaggccccaacccaggaagcagttaagcaaagttccaggatgacccatgtgacaagtttaggggataacttgagcacatggaggacag

SEQ ID NO: 927 - DNA, 120 bp, synthetic construct
  source 1..120: mol_type = other DNA
agccttgaatatccaaggattttggtatctatgggaggtcctggaactaatcccccacagataccaaaggatgagtatacaccttttcttactttcgaattttgaaccagacagatacgc

SEQ ID NO: 928 - DNA, 120 bp, synthetic construct
  source 1..120: mol_type = other DNA
cagctcccaactgctattttatgaaaagtccaaatttcccaccccaaggtcctagagtacagccagctccctaccatcaaaaacaatagctaccaaaactcagtaaaattaggcttgtta

SEQ ID NO: 929 - DNA, 120 bp, synthetic construct
  source 1..120: mol_type = other DNA
gttacagaaatgaatggtggtgatggttgcagaatattatgactgactatacacttaaaaatgtttaagatagagctgggtgcagtgttgcacacctgtagtcccagttatgcaggaggc

SEQ ID NO: 930 - DNA, 120 bp, synthetic construct
  source 1..120: mol_type = other DNA
agaataaaggctaatgaggggtgggggagaagagaatgggcagttattgctaatggatacaaagtttctgttggggatgatgaaaaaattgtggaactggacagtggtgatggttgtaaa

SEQ ID NO: 931 - DNA, 120 bp, synthetic construct
  source 1..120: mol_type = other DNA
cttatcaattcaaccccttcaacaactaatagtcaccctaacccaacagaccatcatttctagcctcaattcctgaaaccatataactaatttcacctcagccactctccctctctccat

SEQ ID NO: 932 - DNA, 120 bp, synthetic construct
  source 1..120: mol_type = other DNA
aatgccattccaatcctataatgatggtaggggcaggggcaggaaacttagcaaaattatctaaaatttaacctggagaaataaacaagtaagcataaccaggaaatctctgaaaatgag

SEQ ID NO: 933 - DNA, 120 bp, synthetic construct
  source 1..120: mol_type = other DNA
ggtgacagagcaagattccatctcaaaaaacaaaaaagttcagttcctcagttgcattagccacatttcaagcacatgaacagtcacatggctattggctacgacactaaacagcacaga

SEQ ID NO: 934 - DNA, 120 bp, synthetic construct
  source 1..120: mol_type = other DNA
tggccaccttaatctttttaagcaaatacagaatggaaactgccctcacaggattaaggagagttacaagccaggctttaggcagcattatatatagttagctgttatccagggtgcaca

SEQ ID NO: 935 - DNA, 120 bp, synthetic construct
  source 1..120: mol_type = other DNA
aaaatgttaagtcaaaccattgtaagtcagggaccatctgtacctatccagtgagataggaatatctcactgaatgataccatcatccacccagttatataggctgggaatctgagggag

SEQ ID NO: 936 - DNA, 120 bp, synthetic construct
  source 1..120: mol_type = other DNA
ctttccactcattctcttactctgtgtgctcaggttatatggtaaacgagcctttcaattccttgaacctgtagtttctcttaccacaaggtctttgcgagtggtgtttcctttctttgt

SEQ ID NO: 937 - DNA, 120 bp, synthetic construct
  source 1..120: mol_type = other DNA
tttcttggctagatccttattgatgtatagaaatgctactgatttaaaggttttctaaacctacagatatataatcagcaaagagacaatttgactttctcttgtccagtttggatgcct

SEQ ID NO: 938 - DNA, 120 bp, synthetic construct
  source 1..120: mol_type = other DNA
tttccaatgaagcaccgtatatagtttatctgggaaattggctgaagaataaaatgtgtgatgttattcagtgtacagtttctaggtcatcagaagataccactaccttcccactactgg

SEQ ID NO: 939 - DNA, 120 bp, synthetic construct
  source 1..120: mol_type = other DNA
tggcagaagagcgaacccttacaaataccttcattgggcaatacactaagcacttgctgtaatgctttttaaaacatctatactctggctgtggtattttaagtgaaaatctctcagtga

SEQ ID NO: 940 - DNA, 120 bp, synthetic construct
  source 1..120: mol_type = other DNA
ctaagtgtcgactctattccgtttcataattctttttgtccatatttgcatcaataacactgttttaattgctgtagctttaaaattattcttgttatttcatagggcgtactttcatta

SEQ ID NO: 941 - DNA, 120 bp, synthetic construct
  source 1..120: mol_type = other DNA
aattgtgaagtgtttttagtgttatgtgctgacaaatatttttgtagttgctttgacaagcaatgaaactaccaattatcactaattctgagtcttccaatgaacctctgtgtcaaattt

SEQ ID NO: 942 - DNA, 120 bp, synthetic construct
  source 1..120: mol_type = other DNA
tatgaactcacattcacaaaatgcagaaagaaataagatgcaatgaatgagaggaagcagaaacaataaagagcagaatcagaacctgcaaagagttcacatattggagttagcagacac

SEQ ID NO: 943 - DNA, 120 bp, synthetic construct
  source 1..120: mol_type = other DNA
ttgtatatcttgtgaagaatgggggcaaaattagacactttaaaacagacaaacactcaatgttgtaaccatcaaaccttccctactagtggaaattcagatcaatttcctgaaggctaa

SEQ ID NO: 944 - DNA, 120 bp, synthetic construct
  source 1..120: mol_type = other DNA
aagatctcaccatctctcttccttttcttataaggccacagtcttgtcagattagggcccttcgcttatgacctaatttagcctcaattatctcccaaagtccctatctccaaaatagtt

SEQ ID NO: 945 - DNA, 120 bp, synthetic construct
  source 1..120: mol_type = other DNA
ttagtggttgagaaggagtgagagaagggatgaattgagattaacggctagtagggacagagtttctttttggggtgatgggactgttctggaattagatagtgattatggttgtacaac

SEQ ID NO: 946 - DNA, 120 bp, synthetic construct
  source 1..120: mol_type = other DNA
ggagatattctatcttactaggaaccagggagtttcacaaacttggctttgcaaggtgggaaagattttcacaggtggaaggggtttgaaatagggaattcagtcaaaaggaatagtgtg

SEQ ID NO: 947 - DNA, 120 bp, synthetic construct
  source 1..120: mol_type = other DNA
tgatatatataatcaagtgcgggtacgttgtagtttacagaaccattactttgaaacaagacctttaggttactcctaattcatcactgttaaaataatgctgtagggaaaaaattacac

SEQ ID NO: 948 - DNA, 120 bp, synthetic construct
  source 1..120: mol_type = other DNA
aggaatatgtagcacagagggattccataggcctgaagattagtactgatggcctttcttgcattattctaggctagtgctatccgatgaaactttctgcagtgataaccactagccaca

SEQ ID NO: 949 - DNA, 120 bp, synthetic construct
  source 1..120: mol_type = other DNA
agttgtccagggatggaacaggggttagtggcggagattatataaaagaaagaagcttgcaggtgaaaatgaccctgggaaagtgggaaactgaaaaagttcagtacatttctgtcatat

SEQ ID NO: 950 - DNA, 120 bp, synthetic construct
  source 1..120: mol_type = other DNA
gtgatacagctgctcagagggctgtttctaaattcagtttattttgatactttaatggcagtcaaagcctggatcaaaatggaagaatttggctgcactttctaaatcatattctttctt

SEQ ID NO: 951 - DNA, 120 bp, synthetic construct
  source 1..120: mol_type = other DNA
cccagcaaataccctaagatgaaagaatcatctgtatttttatccaattgtatagcaaaccccacacactgtatttgtcctgatatcttcaagtctttagggttttctaagagcttttga

SEQ ID NO: 952 - DNA, 120 bp, synthetic construct
  source 1..120: mol_type = other DNA
agtctgtaattatttttgttgaaagatatttggaagatggtttttctcaatctataggagatacagttcgtagccacctgggatctcttataaaaagatactttttcatagtatactctt

SEQ ID NO: 953 - DNA, 120 bp, synthetic construct
  source 1..120: mol_type = other DNA
tggcaaactcagattgtttgagttttcctggctctaccaattacaaactgtgtgaccatttctgtacctctatgtcctgatctgtaaaatggagatgatctcttcctcaaggtagctatg

SEQ ID NO: 954 - DNA, 120 bp, synthetic construct
  source 1..120: mol_type = other DNA
aaacattagccattgatgtgaaaaattacagcattctgaaaagataatgtttaaaaagatagtgagctaggcatgttagggcatgcctgtagtcccaactactttagagactgaagcagg

SEQ ID NO: 955 - DNA, 120 bp, synthetic construct
  source 1..120: mol_type = other DNA
gacctctcccaatcacaggtacacatttacactgaagacacatccatcggtggttccagggagcattgcattcagtttacctcaggtaactcagatgttaatttgttctcttctgttttt

SEQ ID NO: 956 - DNA, 120 bp, synthetic construct
  source 1..120: mol_type = other DNA
atccagagaattagattgcttagtgctgtcccaggcacatcatacataatataaagcaccaagaatactagtctgtatcctcttctcccttatcattttactcaggctgctgactgtccc

SEQ ID NO: 957 - DNA, 120 bp, synthetic construct
  source 1..120: mol_type = other DNA
cactttcacgtttgtttctatagattaaaagtttgggatattccagggttctccagcttttacagagttccatttgggattctgattgttagcaatagcttgaggtgtgacagtttctcc

SEQ ID NO: 958 - DNA, 120 bp, synthetic construct
  source 1..120: mol_type = other DNA
tttgaatctataccaagcaaaccccagattcctgcctaaacacaatctggcctgccttcatacttcttgccattgtaaacagtagggatttgggaaagcctgaaatctagctgtaaatgt

SEQ ID NO: 959 - DNA, 120 bp, synthetic construct
  source 1..120: mol_type = other DNA
ttactattagccgtaaaataagaaaacattctcaatcttctttgatccaggatgaaatcttcaggactcttgtccctttgggactgaccatggtgctgactgtggtgctgcctgggatac

SEQ ID NO: 960 - DNA, 120 bp, synthetic construct
  source 1..120: mol_type = other DNA
ggcatgagccaccgtgcctggccattctaggaaatgttaagaaggagcaagccatccagaattggagacaggagagtattctgaaacttttagccaaaatttgaacttattatttgatct

SEQ ID NO: 961 - DNA, 120 bp, synthetic construct
  source 1..120: mol_type = other DNA
ctgcttttgtggtgagaactgtagaagctcacttacccaatgtgacttggactggtaattaagtgaaaagttggttaaaggctttttcttggaggtgtggtccatggattggagttctgt

SEQ ID NO: 962 - DNA, 120 bp, synthetic construct
  source 1..120: mol_type = other DNA
acttctgccaggttccttaggctaagcttaagttcctccagtgacaggaatctcactccctcctaaggctacattcctcttttggacaactataggtttaagtttagtcttccttatgtt

SEQ ID NO: 963 - DNA, 120 bp, synthetic construct
  source 1..120: mol_type = other DNA
ttgatacagaaagtaaatccattggaagtgttaatttggctacattaatataaagaaaattctgtatgacaaattacactgaatacaaatgtctcaaactgggagaagatatttgcagtg

SEQ ID NO: 964 - DNA, 120 bp, synthetic construct
  source 1..120: mol_type = other DNA
agcaaagaatttccagttcgatattaattatagccagccttttcagttatacctttctcacatccagaaatggcttgatgtactcagctaatgacctcatgcaggatatatatgtgtgtt

SEQ ID NO: 965 - DNA, 120 bp, synthetic construct
  source 1..120: mol_type = other DNA
cacaggacaagagggggagcttttataacagttcaggcaagaaataaaagcctgaacagttaggttgagtatgtagatatttgggtatatcctatcactggttctagaccaggaatccag

SEQ ID NO: 966 - DNA, 120 bp, synthetic construct
  source 1..120: mol_type = other DNA
gagtattctagaatattgccacataatggaaaatataagatccatgaacacagggaccttttctgttttatttactgctatgactccagttcctcagatagtgcttggtgtctggtaggt

SEQ ID NO: 967 - DNA, 120 bp, synthetic construct
  source 1..120: mol_type = other DNA
aaatcttggcaagttgccaagtctcaaatgttcatgagtaagactgcaatatcacaatatcatagtcacacaggaatctgatagaaaagcatcacatttataaagccttctttcctgtac

SEQ ID NO: 968 - DNA, 120 bp, synthetic construct
  source 1..120: mol_type = other DNA
ttcttactctctattgaagcatagatatctattttagattttgtcatcttcagggaaattcttaggatcattgtttaaggttctcattgttttctcaagatttggttcaccgatgctttt

SEQ ID NO: 969 - DNA, 120 bp, synthetic construct
  source 1..120: mol_type = other DNA
tattcctattcacactttttgtttttttagagacagggtctcattatgttgctgaggctggaatatagtgactattcacaggcgtgcagtcatagcacactacagccttgtatggagatc

SEQ ID NO: 970 - DNA, 120 bp, synthetic construct
  source 1..120: mol_type = other DNA
ggaaccagtgtatgcctgaccatgtgatccctgaaattaagagaactagtttgacatctgtagttctgaccttaaagtgccttgccatacacgatgtcataaggtatgtagacaactaga

SEQ ID NO: 971 - DNA, 120 bp, synthetic construct
  source 1..120: mol_type = other DNA
aggcgtgagccaccgcgcccggcccttgctgggattttaattgggattatgttttaattaagatagattaagttgcgaagaaatgacatcttgacagtattgtcttcctatccatgtaca

SEQ ID NO: 972 - DNA, 120 bp, synthetic construct
  source 1..120: mol_type = other DNA
gtttgatatttgtttacagttaattttaggtaaaatttacatatagtgaaatgcataaattttaggtgtataattcaatgaattctgtaaaatgcttatacccatgtaacccaagccctg

SEQ ID NO: 973 - DNA, 120 bp, synthetic construct
  source 1..120: mol_type = other DNA
tactcgaaggagggcataaaagggggctgttgagatgctggtgatactgtttgttgatctgggtacattggtatgttgtgtttgtgaatattatatgagctacacacttacgtcctgtgt

SEQ ID NO: 974 - DNA, 120 bp, synthetic construct
  source 1..120: mol_type = other DNA
tggtttatgggtagtgtgactggggaacattgaacttttacatgatattcttttataccattacatttttttttctgtaagcatggattactcttataacaaaactaatttaaaaagtaa

SEQ ID NO: 975 - DNA, 120 bp, synthetic construct
  source 1..120: mol_type = other DNA
ataataataattaaaaaaaaagaaaaaaaagatttgagtctcttcccagctttggaactcagaacacatcacgccgaaagatgccctatccagccatggaagcccgtcctcttttgtctc

SEQ ID NO: 976 - DNA, 120 bp, synthetic construct
  source 1..120: mol_type = other DNA
agttagttcaatgtctttatggccttggtgacaaatcattacagaggatgagagcatttttcctatccaataatggtcaagaaaaaagcagacagatcctcactatcttagagaactaag

SEQ ID NO: 977 - DNA, 120 bp, synthetic construct
  source 1..120: mol_type = other DNA
tggtatggaacttgtaggtaaaaaagaaaaaaatgtttcctgtctttacctaagaaatcaccattagactccgtaaagcactattcctatgggaactaccgaggtctctagaagataaag

SEQ ID NO: 978 - DNA, 120 bp, synthetic construct
  source 1..120: mol_type = other DNA
tgggattacaggtgcccgccaccatgccctgtcatccccgtgcctggcatgatgtctgaaatgtattaggcatttaacaaatgtttattgaataaacaaatgacattttgttcatatgtc

SEQ ID NO: 979 - DNA, 120 bp, synthetic construct
  source 1..120: mol_type = other DNA
tgaccagaataaactttttcagaactctagaaatgtaaccaaagtcttgcagcaacccaaggagcatttattcaagaaaaatttctgtaagaatagtgagatttgtgttaacttgcctta

SEQ ID NO: 980 - DNA, 120 bp, synthetic construct
  source 1..120: mol_type = other DNA
gcattccgtgccaggcctgaaatgttccaaagctgagttctgtaattacattgcaactaagatttctaaaaaaaaaagacacaagccaaagaaaaaaaaaattatttcagaacatttatc

SEQ ID NO: 981 - DNA, 120 bp, synthetic construct
  source 1..120: mol_type = other DNA
tacaacataatagactttggaattaatttttcctgagagcagtagacttgattagatgcccttttgtagtgtcatcaaatcttagattatgagctcaaagattttatctctatatacaca

SEQ ID NO: 982 - DNA, 120 bp, synthetic construct
  source 1..120: mol_type = other DNA
agaactgagttctaacgtgccctctcaatgactgtgatgcagatctaccttacagcgctgctgtggtaacacggttccccatgttggctcctcagcttggcattcaaagctctagaagat

SEQ ID NO: 983 - DNA, 120 bp, synthetic construct
  source 1..120: mol_type = other DNA
aatactggagggatagcaggccttcaaatgaatccttgtgtaattcagtcaagttattttctctgagaattctggaaaatgaagaagttatttctagattaaaatgcaaactacaactat

SEQ ID NO: 984 - DNA, 120 bp, synthetic construct
  source 1..120: mol_type = other DNA
gaagcaaagaaatctaaggcatatcatgaagtgaaagaatcaagttgcaagatgttaccctttatgcgaagaaaaaattttaaaaccacaaaacaaatctattttgctttatgtaaatat

SEQ ID NO: 985 - DNA, 120 bp, synthetic construct
  source 1..120: mol_type = other DNA
cggggtcactggcacaaatgatgaggcatctcctggaagcttaacttcttatccatcccatctcttggacagatgatgccagttaattactttgaatgtaagtattttatctaaaagcac

SEQ ID NO: 986 - DNA, 120 bp, synthetic construct
  source 1..120: mol_type = other DNA
acatgttggttaaaaaataaaaatgcatccacgaatcttagctcataatcttcgtgattaaaggcagacagcacaagggtatggttgaacgtctctgttataggtacatcctggcagggc

SEQ ID NO: 987 - DNA, 120 bp, synthetic construct
  source 1..120: mol_type = other DNA
aaaatgataccaagtaactgtttcatcatctttaccgtacctttaccatatttgagtggctatgtgaaatggtcacaggttagaaacacatcatagtccaaaagttgaagaatattccac

SEQ ID NO: 988 - DNA, 120 bp, synthetic construct
  source 1..120: mol_type = other DNA
aatcactagaacaagcagacaggaaatcagcaaggatagggaagaccttaacacgatcaaccaacttgacctaattattatttatgaaacactttacctaaaggcagcagaacacatctt

SEQ ID NO: 989 - DNA, 120 bp, synthetic construct
  source 1..120: mol_type = other DNA
gtagaggtgatggtggtgaaggtgatggtgatggtggacgtaatggaggtgatggtggtgatggtggtcatggaggtggtggaggtgatggtggtggtggaggtgatggtgattgtggtg

SEQ ID NO: 990 - DNA, 120 bp, synthetic construct
  source 1..120: mol_type = other DNA
actggaggtgatggtggaggtaatggaggtgatggtggtgatggtgatggtggaggtactggaggtgatggtggtggtggtggaggtaatggaggtgatggtggtggtgaaggtgatggt

SEQ ID NO: 991 - DNA, 120 bp, synthetic construct
  source 1..120: mol_type = other DNA
atggatggttgggtgggtgggcagacggatgggtggatggatacatggatgggtgggtgggtgaatgggtgggtggatggatggatggaaagataggtgggtggatagatggtagatgga

SEQ ID NO: 992 - DNA, 120 bp, synthetic construct
  source 1..120: mol_type = other DNA
gcggtgcccgccagcaatcaaggggcagaggtgccgatcctaaaggccgccccatggacagtcacaaatgacagtttttccttcttttctctgttttccaaacagctgagacagtcatgg

SEQ ID NO: 993 - DNA, 120 bp, synthetic construct
  source 1..120: mol_type = other DNA
atcacccatcacgtggttagtggactgtgagtcctacgaagaggtctgaggaccagggaggaggagacatgggaacccacgatcacccatcacgtggttagtggactgtgagtcctacga

SEQ ID NO: 994 - DNA, 120 bp, synthetic construct
  source 1..120: mol_type = other DNA
gtaacaccaggaatctctggataacattggtacattgtatcaatgtcagtatcctggttgtgatattacagtcaaccccctgtagcctgaggttctgcatctactgattcaaacaactac

SEQ ID NO: 995 - DNA, 120 bp, synthetic construct
  source 1..120: mol_type = other DNA
caatgccatattggcatgaaggtaaatctatagatcaatgaaatgtaaaaaagactctggaaatagaaaattggaggcaaagtaatgtggaaaagaataatctttccaaccaatgctgga

SEQ ID NO: 996 - DNA, 120 bp, synthetic construct
  source 1..120: mol_type = other DNA
actctaaggatagtatcaggcagggcccaggaaaggtcgtggttaccctgtctgagaagccagagcccacaggtatgggctccagacatcccagagaaaagttaagaaaacaaattcctt

SEQ ID NO: 997 - DNA, 120 bp, synthetic construct
  source 1..120: mol_type = other DNA
aaacaggtaactccttccttgaggtagccttaggacctcactgatttttctactgcacctttaccacctgaactgtacattattcttccacaggtctgtcccctctactccaagactgca

SEQ ID NO: 998 - DNA, 120 bp, synthetic construct
  source 1..120: mol_type = other DNA
aaggaagggacaaaaaggaaacctcttatctcagtggggtattgcatagcagaagctactaatttaaagtcctttgatgggcaagaaacaatgctagggccacttatctgaagtggacaa

SEQ ID NO: 999 - DNA, 120 bp, synthetic construct
  source 1..120: mol_type = other DNA
ttagttcttaaaagaactatggaataagagggctgaggtgaaaacaaaaacaattttctaaaataatctatttcttactttggttttcaaaaactttaagccaaagaaaacttgaaattc

SEQ ID NO: 1000 - DNA, 120 bp, synthetic construct
  source 1..120: mol_type = other DNA
gaaaagtcgcagcaacttaaactttcagcaagtaatataagtaccactgttcttcaccctcacaaactttgtggacagaaaacagtatttcattcctctatatttatttatttattttta

SEQ ID NO: 1001 - DNA, 120 bp, synthetic construct
  source 1..120: mol_type = other DNA
tggtaatttatgacatcccttttttctttatcattattagttaaggtttgtcaattttatagatattttcaaagaaccagctttatttctttgcttttctttgttgttttcttttggctg

SEQ ID NO: 1002 - DNA, 120 bp, synthetic construct
  source 1..120: mol_type = other DNA
aggagaaggctgacatagcattctacagaattaagttagcagtaaggtgataatacctggcatagtatggtggctgagaaaggaaaggatataagtcatttcaaagaattaggcctggtt

SEQ ID NO: 1003 - DNA, 120 bp, synthetic construct
  source 1..120: mol_type = other DNA
aattccaaagggatgataatactttattttatatatatatttcttttaaaaagcagttaccagacttgactttgaatatatattttgttgaatatgttttgccttttctcctgctagtcg

SEQ ID NO: 1004 - DNA, 120 bp, synthetic construct
  source 1..120: mol_type = other DNA
catttccctgtatctcagcagtatggagcttgttatcaatgagaacctgctcgctgactttaaattgcttttcttaccttctcagttcagtttctccgtacctcaattgatgatttctgg

SEQ ID NO: 1005 - DNA, 120 bp, synthetic construct
  source 1..120: mol_type = other DNA
tcaataaaaaaataaattaaaaaaaaaaaaaaaaaagaaaataaaactacaccccagtatctcttatgtatatgcaaaaaccttcaagaaagtaccagcctaccaaatctagcaatgtat

SEQ ID NO: 1006 - DNA, 120 bp, synthetic construct
  source 1..120: mol_type = other DNA
gggcagatggcgcttcatcgtgagtgagatagtgagtgagagatagaggaggccgggcagatacacggcgccccattgtgagcctgtgattgagtgagtgagtgagatcctgagtgagat

SEQ ID NO: 1007 - DNA, 120 bp, synthetic construct
  source 1..120: mol_type = other DNA
cacctttccctggttgtcaatgtccaccagccccggccccggccccggccccggccccggccgcagctccacgtgccccagcagctcaccttcccctggctatcaatgcccaccagcccc

SEQ ID NO: 1008 - DNA, 120 bp, synthetic construct
  source 1..120: mol_type = other DNA
gcagctcaccttcccgtggctgtcaatccccaccagggccagtgacgtccacgatagctgcatagcctttaagtggacggcggggcccgcggtgcgggggcgcttcatggccggctcatc

SEQ ID NO: 1009 - DNA, 120 bp, synthetic construct
  source 1..120: mol_type = other DNA
attacagaatttcatttcatttttaaaggatttcatttgaaaattaaattggaatttttgttttgagacaaagtttcaccaaggctggagtacagtggcaccattttggctcactgcaac

SEQ ID NO: 1010 - DNA, 120 bp, synthetic construct
  source 1..120: mol_type = other DNA
ggaagggaaaagtgtgacaattcagagtaggaatgaggatgggcattaaaagaaagggaccgaaagcccaggactgcgcttcatctacatgtcagcatttctgcctgcctggccagcctg

SEQ ID NO: 1011 - DNA, 120 bp, synthetic construct
  source 1..120: mol_type = other DNA
cattattgcttcctgtgtatttcctttgcctagagggtgtggagtcaattgcatctgtgggttgatgtctttcattggtttggaaggtgcatatgtatccttcacttctgatatccattc

SEQ ID NO: 1012 - DNA, 120 bp, synthetic construct
  source 1..120: mol_type = other DNA
caggaataccgccttgtatactgggaatttgccgaaagagtagatttcagctactctttctacacacacgtacacaaaggtaattacatcaggagacggatatgttcctttgcttcattg

SEQ ID NO: 1013 - DNA, 120 bp, synthetic construct
  source 1..120: mol_type = other DNA
aagtgtgacaattcagagtaggaatgaggatgggcattaaaagaaagggaccgaaagcccaggactgcgcttcatctacatgtcagcatttctgcctgcctggccagcctgtctgcctgc

SEQ ID NO: 1014 - DNA, 120 bp, synthetic construct
  source 1..120: mol_type = other DNA
tattttgttctgggtagttgtcaaacactggttaagtccattgtaacattctttgtgcaccttacactcatccatgcttttacagtattttcttaactgtaaattttcacgtccacattt

SEQ ID NO: 1015 - DNA, 120 bp, synthetic construct
  source 1..120: mol_type = other DNA
gccagttgttgccagcacatagttacaggtgccctggaagtcaaacttccggccatcgaaggagtggtagtgtgggtcgccccacagccagcacgtggcctcatagttgggcaggcacac

SEQ ID NO: 1016 - DNA, 120 bp, synthetic construct
  source 1..120: mol_type = other DNA
tttccatggtgcccttgcttgagatttcaccctgttcttgtattttaagttttataggaacctcaccgtcttcacttacataggctacggctgctttcacaccacagtggcagagtgagt

SEQ ID NO: 1017 - DNA, 120 bp, synthetic construct
  source 1..120: mol_type = other DNA
caagcactcacgtaggcatggatgttgctgcagagaatgctcaggttcccaccacccaggcagagatcaaagatgcaatctttcaagggaccctggggatccaccagcttgtggcaggag

SEQ ID NO: 1018 - DNA, 120 bp, synthetic construct
  source 1..120: mol_type = other DNA
ttaacatgctttcttacccttccttatcacagacagtgcacaccggattcttttggaaatgtgaagaatcagaggagaaggcaggagaaagacatgctcctggctgagtctcctaaaaag

SEQ ID NO: 1019 - DNA, 120 bp, synthetic construct
  source 1..120: mol_type = other DNA
gtcagctgtatagaaactatagctgctgttgttgttgttaaggcggtgagagtgtcacccacagattgtcctctgtccatgaagcttctcaaactcggactttctcaacctctgatggca

SEQ ID NO: 1020 - DNA, 120 bp, synthetic construct
  source 1..120: mol_type = other DNA
tcaccttggagatgaccagggtcttgcatcctgagtcctgatctgttcccaaacacaagtgtgtactgacaagggcttggctcttaaatcacttctctgctgtgcccaccctggcccacc

SEQ ID NO: 1021 - DNA, 120 bp, synthetic construct
  source 1..120: mol_type = other DNA
ctgtagatatgggcctgaagtagagatatgggcctggagtagagatatgggcctggaactgtagatatgggcctggagtggagatattggcttggagtgcagatatggacctggaattga

SEQ ID NO: 1022 - DNA, 120 bp, synthetic construct
  source 1..120: mol_type = other DNA
aaccacagtcatgaccctgacattccagatcttctaataggggctcagttgtttattatggttcatgcattagctgatcatgccctccatcctgtgtctaccttgtgttcttttatgtaa

SEQ ID NO: 1023 - DNA, 120 bp, synthetic construct
  source 1..120: mol_type = other DNA
tgatgttcttggtgacttttgcctctatgtcgtatctctcttcatccaccttgtccacacgggcgtggagctgtcggcacaagtcctggaggaggaacgtggtgtgtgttgttgggggaa

SEQ ID NO: 1024 - DNA, 120 bp, synthetic construct
  source 1..120: mol_type = other DNA
ctggactccagggtctgagggaggaggggctggggcttgggcttctgtctgggataggagggccacatggtcctgaaggagtaggttggagccaagactccacagacctgcacacaaagg

SEQ ID NO: 1025 - DNA, 120 bp, synthetic construct
  source 1..120: mol_type = other DNA
atgcacacctggtggcccctgaccccgaggcctctcaccttgctccttggtaatagtgggcgcacactgtcattggggtgcagggtatggagagctccttggtaataatggacacgtgct

SEQ ID NO: 1026 - DNA, 120 bp, synthetic construct
  source 1..120: mol_type = other DNA
gtgctggatcgctgtagaggaaagcggtgcagtgatggagggcgtctccctgtcctgcctgctggtggaggtgctggatcgctgtagaggaaagtggtgcagtgatggagtgcgtctccc

SEQ ID NO: 1027 - DNA, 120 bp, synthetic construct
  source 1..120: mol_type = other DNA
caatcacccctggattaatcccccaatcacccctggattaatccccccatcagccctggattaataccccatcaccccaggattaataccccatcacccctgaattaatccccccaccac

SEQ ID NO: 1028 - DNA, 120 bp, synthetic construct
  source 1..120: mol_type = other DNA
tggattaatcccccaatcacccctggattaatccccaccacccctggattcatcccccaccacccctggattcatccccccatcagccctggattagtacttccacccctggataaatcc

SEQ ID NO: 1029 - DNA, 120 bp, synthetic construct
  source 1..120: mol_type = other DNA
gccttgtcttctacctctctgctgtttgcttctcatgaggagagtccgttttccacacatcgggacactgaaaagaagactcctgctctggaagttgacaagaaggaatattcacgaatg

SEQ ID NO: 1030 - DNA, 120 bp, synthetic construct
  source 1..120: mol_type = other DNA
ttagtgctgttacacctttcctaccacctctgccagccaatcctgtcttgtggggaatctgacctccctattggctatcgcagacctttaaactgcctgctttgtgacatcattctccca

SEQ ID NO: 1031 - DNA, 120 bp, synthetic construct
  source 1..120: mol_type = other DNA
gagtactgggttctaaggaggcaggtattctagggtaagtaatttggtattttaatttaagcagaaagacatggtcccctacttttccccttgggatatgccctggagaatgacaaaatg

SEQ ID NO: 1032 - DNA, 120 bp, synthetic construct
  source 1..120: mol_type = other DNA
tatcacagttacaagagaagttagtgagaaaagcactaactaggaaaatgaaaaccaaggcaatccaagtcaacttgggctcactgcagacatctgttccttatgcttgggcacacagca

SEQ ID NO: 1033 - DNA, 120 bp, synthetic construct
  source 1..120: mol_type = other DNA
ttagataacgtttattctctcataaaatctgtttcctcatctattacactaggataatagactggttattccccctggcccttttcttttctaatactgagtcttaaagggtatatgtat

SEQ ID NO: 1034 - DNA, 120 bp, synthetic construct
  source 1..120: mol_type = other DNA
ggaaacaggctacattacatatccctaggaaaagcagcttatcagaagtcatattcagtcacttttttctgttgcctttttgaacatagatgacacttgacagtttgtaatataaacatt

SEQ ID NO: 1035 - DNA, 120 bp, synthetic construct
  source 1..120: mol_type = other DNA
ttagaacaactgtaattgctcaacttagacatccccttcctttctccccaaggatattgtgtatgtactgtataattataaatgcatagtattatataatatgaaatgtaacacattaaa

SEQ ID NO: 1036 - DNA, 120 bp, synthetic construct
  source 1..120: mol_type = other DNA
caccagtgaagagagagagcccttagaaagaactgcatgggagtagatgggcattatttcaactgaactttagatcacctcatcagtagttattaatcaccatttataggtagaactaag

SEQ ID NO: 1037 - DNA, 120 bp, synthetic construct
  source 1..120: mol_type = other DNA
agatgaggctgttgaggttaggtgtgctttaggtacagaaagatcagaaatggccagaacagagctgctgaagcaattagatgcttttggtccaagaaatctgtggaacaccttttaaac

SEQ ID NO: 1038 - DNA, 120 bp, synthetic construct
  source 1..120: mol_type = other DNA
tcgcctggaaaggtgagtggatctcgaagagaccgacggcctcgacctggccgggcggcggcctcgacctggccgggcggcggcctcgacctggccgggcggcggcctcgatggctcagg

SEQ ID NO: 1039 - DNA, 120 bp, synthetic construct
  source 1..120: mol_type = other DNA
agatcgtatactggggttgctaagatctacggtaagaacaaatcttttgtccatgaaattgtgaagaaggaaaaagaaatttgtgctagttttgttgtgacaccccaaactgcaaaagtt

SEQ ID NO: 1040 - DNA, 120 bp, synthetic construct
  source 1..120: mol_type = other DNA
tcttagtagttcttcctaagtgtattctggaataagggatttatcactcagactgatgctaaggaccagcctagattccattgagattgaaaccgtaattagtgttttctgcatgctgct

SEQ ID NO: 1041 - DNA, 120 bp, synthetic construct
  source 1..120: mol_type = other DNA
tctgatggtaatactgtcaaggaacctagaggatatttacttattttagttgttacttgatttgagaaatggaaatttcctgtatttggtactgtaattagtaatttgtcttctgttcga

SEQ ID NO: 1042 - DNA, 120 bp, synthetic construct
  source 1..120: mol_type = other DNA
tgtagatactgagaatattaaacctgtactcttttcatttgctacataagcacccgttttgttgtccagctgtattttttgggttggagggttaggtctgcaataatcatgttatttccc

SEQ ID NO: 1043 - DNA, 120 bp, synthetic construct
  source 1..120: mol_type = other DNA
tgaaactagttcagtagcccagagtggatctgaaagcaaagtggaacctaaaaaatgtgaactgtcaaagaactctgatatcgaacagtcttcagatagcaaagtcaaaaatctctctgc

SEQ ID NO: 1044 - DNA, 120 bp, synthetic construct
  source 1..120: mol_type = other DNA
agtaacagtttttatttaattttatctagtatcatgcttgaacacaggcaaactagatgcaactctagtcaccttccattcttggcaattgttaactttccttacaggaactaatcacag

SEQ ID NO: 1045 - DNA, 120 bp, synthetic construct
  source 1..120: mol_type = other DNA
atgaggtatttccaccctggctcactgataaatcacccctcagaatatagtcatactgcttattgaggagttcttatgacccaggccctgggctctacatacattatttaatctcatcac

SEQ ID NO: 1046 - DNA, 120 bp, synthetic construct
  source 1..120: mol_type = other DNA
ttatattcctgaattttcactgtgtctgaactttttaagtgccgttcactgtggacgtcttaactgcctgggacttcaggaacagcgtaggggcagggggttagtggaggctaccgatgt

SEQ ID NO: 1047 - DNA, 120 bp, synthetic construct
  source 1..120: mol_type = other DNA
ggagtctgcagctaacgtggaacacttgaagaacgtcttgctgcagttcattttcttgaagccaggtagtgagagagagagccttcttcctgttataaatacgatgttgcagctcagccc

SEQ ID NO: 1048 - DNA, 120 bp, synthetic construct
  source 1..120: mol_type = other DNA
ctgcatcttaagaattatggtttcatttttgttttagttttaaattacttttatttttgacatttacaagcacaaggaagacgctataatctctcttgagttgtcacccatctctaacgg

SEQ ID NO: 1049 - DNA, 120 bp, synthetic construct
  source 1..120: mol_type = other DNA
caaaaatacaccatagatggtattgtgtgctttctaagacatcaggaggcccagaatgtccagacatcttacttttgactgattgaccttatctagttggtgctctttaacatgttcccc

SEQ ID NO: 1050 - DNA, 120 bp, synthetic construct
  source 1..120: mol_type = other DNA
tgccacagtggaagtctctatgcatccacccctgtctatacctgagcaactcattcctctttgctgctctcttacaggctacagagtgcggtggcgccagcacagaactctgctcaatgt

SEQ ID NO: 1051 - DNA, 120 bp, synthetic construct
  source 1..120: mol_type = other DNA
ctcgtaacctgattgactcccaaaagccccacctcagtactatcacattgaggattaagtttcaatataacttttgaggagacacaaacattcagaccatagctttatctatcatgaatt

SEQ ID NO: 1052 - DNA, 120 bp, synthetic construct
  source 1..120: mol_type = other DNA
tctagaacttaacctttaagtggctttattaaagcaatccagctatgaaaattatgcagaaatgattatctacaatcttaccagcacataagaaattcttcctctattctgaaataccat

SEQ ID NO: 1053 - DNA, 120 bp, synthetic construct
  source 1..120: mol_type = other DNA
agaagaagaacatatttagacagagtaacagaccaagtttagtttcgggagaattaagcagctgctctaaagactgtgtgtatgtgctggcggaagacacagactccgtaatcagttgtc

SEQ ID NO: 1054 - DNA, 120 bp, synthetic construct
  source 1..120: mol_type = other DNA
caccatcaatgcaaagggcaaaaaattagaaacagaaaaaacttctatatgcaacctgttctgatctattaatgtaaagaacaacttctggctaaaggagtttaataaagtaagccagtt

SEQ ID NO: 1055 - DNA, 120 bp, synthetic construct
  source 1..120: mol_type = other DNA
gaaactgtacgcaagtatacatccacttttaagttaacacttttcacatttctcaaagaccgtatctttaaaataaaagattaagagctaccttagctggtaataaaactggtatactta

SEQ ID NO: 1056 - DNA, 120 bp, synthetic construct
  source 1..120: mol_type = other DNA
ccactgaactgtacactttaaatgggtgaagcgtatggtacatgaattatatttcaattcaactttttttaaaaaccctcctttgagttaattctgctgggcaattaggtttggttacca

SEQ ID NO: 1057 - DNA, 120 bp, synthetic construct
  source 1..120: mol_type = other DNA
tcataagatatgccttaacagaaattcctttttctttttaaattaaattagtttaatattactattacctgattggctcagtcggtcacaggccatcatttccagcagattttgtccagc

SEQ ID NO: 1058 - DNA, 120 bp, synthetic construct
  source 1..120: mol_type = other DNA
actcagcacctctcaccctctcaggctcagctgtctttggggtgaaaaagagccagtccttgcaatggccaaggccctgcctatgtagtccttgttagctttctgacctccccactccag

SEQ ID NO: 1059 - DNA, 120 bp, synthetic construct
  source 1..120: mol_type = other DNA
cacaagtccactcctcctgtgctcttggctcagtcaggggtccccttctcttcagttgctcaagccagaagtcaaggtcatgtccttgatacttccctctcccccatgcctcacatccag

SEQ ID NO: 1060 - DNA, 120 bp, synthetic construct
  source 1..120: mol_type = other DNA
taaactataactcctacgctaatcatggaaataaagctttatggaattgtgcaactagatttccatacaacattttctaccacaagcttcctcctccagcacatttcattaaaactctgg

SEQ ID NO: 1061 - DNA, 120 bp, synthetic construct
  source 1..120: mol_type = other DNA
aatccgtctcccttaggaaaatagttgctacaccaggggtctccttagttctcctaacagtgtctacgggttgttacaacaagctttctatcttttcttggcagtacgatctgaagtgtg

SEQ ID NO: 1062 - DNA, 120 bp, synthetic construct
  source 1..120: mol_type = other DNA
atgggttattacaacaagttttctgtctgttcttagcagtacgatgtgacatctgtaaaatcgatacttcctctctttctccttccacccttactgagaacaagctggagaattaaagca

SEQ ID NO: 1063 - DNA, 120 bp, synthetic construct
  source 1..120: mol_type = other DNA
atagcctaaaacacattttattttgcattatctatgaacacagcattcactagataaaatataagacatcactttactgaaattttaaaaagtgaggatgaaattttctttccatttaga

SEQ ID NO: 1064 - DNA, 120 bp, synthetic construct
  source 1..120: mol_type = other DNA
tttatgggtgactgtatttaacattctgttttacatttaaaaatagccaggagagaataacttcaatatttctagtttaaataaaacatacatatttaaggtaatgtgtatctctgttac

SEQ ID NO: 1065 - DNA, 120 bp, synthetic construct
  source 1..120: mol_type = other DNA
aagtacctatttttatagaatcgtaaggaaagaaatattgccaacagagtacacagaattatctctggaatattactttttacttttaaaattatctcctacagttgggacattttgtgt

SEQ ID NO: 1066 - DNA, 120 bp, synthetic construct
  source 1..120: mol_type = other DNA
cgtcatcttttttggcttcatccagctgattcacattggtagaaatacttttctatgttacttgtagtcatgtgaaacctaatctcacccttgcaatctggactgcatgttttatagaat

SEQ ID NO: 1067 - DNA, 120 bp, synthetic construct
  source 1..120: mol_type = other DNA
aaagcaacttaataaaaattctctagagaataacatgatactttaaccagactattttagaagtgaaaataatgttgaattcattacttgactcccaaatggttattttcagggaatatt

SEQ ID NO: 1068 - DNA, 120 bp, synthetic construct
  source 1..120: mol_type = other DNA
tacaggcagaaggatacagcttgatgctaacactgcatgaatgtatggacgactttgtcatatttacatatgatgaattatatatttcttttacttttcagtgtctcctcagaaacaatc

SEQ ID NO: 1069 - DNA, 120 bp, synthetic construct
  source 1..120: mol_type = other DNA
taactgtatgttttgaagcttgtattcctattttcttcattgcatttctatcatattactgtcccaaagaaacaaactagaaaaatatgaaaccctacactaatacaggcaagagtattc

SEQ ID NO: 1070 - DNA, 120 bp, synthetic construct
  source 1..120: mol_type = other DNA
aggagtaattactgtgaagaaaagataatttttatcttgtaactttactgaataattttcaacgtcctttttcataatatttgctagagttactagtaatagaaacttatgcaggatgtt

SEQ ID NO: 1071 - DNA, 120 bp, synthetic construct
  source 1..120: mol_type = other DNA
gatcttatttgttggaatagtcctttttctagttagtctagatacggattggttgattttgtttatcgccttaaaaagaagttcagtattaattctttccattgggtttctcatatctat

SEQ ID NO: 1072 - DNA, 120 bp, synthetic construct
  source 1..120: mol_type = other DNA
ctttttgtttcattcttcgctttctttcatcagatatggacatttctggaattaagagccccctctacattgagcacaagacagtgacgaatccacattcttcagccagaaagtcacctc

SEQ ID NO: 1073 - DNA, 120 bp, synthetic construct
  source 1..120: mol_type = other DNA
aactacgtgccagggagaattcagatctctgtcagccctggaacaccagcgggggtggctggaggccatggttgggaggtccctcactgggccagaccctgaggccttcatggcagggag

SEQ ID NO: 1074 - DNA, 120 bp, synthetic construct
  source 1..120: mol_type = other DNA
attctctttgggatggaggtcttgaggttccattcagcgagggacctcccaataggggccttgagacactcccgccagtgttctggggctgacagagatttgaattctctctggcatgga

SEQ ID NO: 1075 - DNA, 120 bp, synthetic construct
  source 1..120: mol_type = other DNA
cccagtcatttgggactctccaaagctggccccatcctctcccccaggccccagttggaaggactcccactgggcaggaactccagaactccctcccagggagaattcaaattcctctca

SEQ ID NO: 1076 - DNA, 120 bp, synthetic construct
  source 1..120: mol_type = other DNA
gaaaagtgtagggccagaaaaaaagggatacacagatttcttgcgatttttttaaagctatgaaacatgatgaattaacaaagcataagtacacccttcactatgaatgtttatgttttc

SEQ ID NO: 1077 - DNA, 120 bp, synthetic construct
  source 1..120: mol_type = other DNA
aggaccctggtacataactcctttaaaaatctatttgtattctagtttccaattcattcttacctaacttattttattttaggtaaaatatcaatcagaaataaaaatacaatggcttat

SEQ ID NO: 1078 - DNA, 120 bp, synthetic construct
  source 1..120: mol_type = other DNA
acgagtctcctaaaccttccatgttgagacaatttgtagacgcaaactaaacacatgtatgggacacatttggactatataccttgtatttttatatttgctatggatatgtctccaagc

SEQ ID NO: 1079 - DNA, 120 bp, synthetic construct
  source 1..120: mol_type = other DNA
ccttacattatcgtacctgccatatccctaccccgctcccagcctggctaactcttatccttcctttaagactgcaatcagatgtcactttctctaggaaatcatccctaaaataccatg

SEQ ID NO: 1080 - DNA, 120 bp, synthetic construct
  source 1..120: mol_type = other DNA
aattaaaggaagtcacttacaaggattggttctcaaaagcagctatgccatgttctggggaaggaactaccttcaatgaaaggaacacaaataagagagtcctggtgttacccgctgagc

SEQ ID NO: 1081 - DNA, 120 bp, synthetic construct
  source 1..120: mol_type = other DNA
ttacttcaagttgaaacttttaaaatacatctgtcatatagatgtacaaatatatgtaaatgcaaacatatacacactttttgacaaaagaatgatggtaatacacatgaaccatttttg

SEQ ID NO: 1082 - DNA, 120 bp, synthetic construct
  source 1..120: mol_type = other DNA
aagctatttggggttggaggaaggaagaggggtgaagtagaaaaggaacaagctaataaatgttttttaaaaagtagaatttaaaacaaaaccacgttcagctgaacaccagaacgcaac

SEQ ID NO: 1083 - DNA, 120 bp, synthetic construct
  source 1..120: mol_type = other DNA
ggtatcattattcaaactttacagacgatgaaacaggctcacagttgacaggtaatttttgcagaaatcacaaagtcaaattggcttctggagtctgctgctctatcatgatgcctccat

SEQ ID NO: 1084 - DNA, 120 bp, synthetic construct
  source 1..120: mol_type = other DNA
ctttacctctgcagcttcgtaattgttgctgctcacacctacagtgctcatacagttaagagcccagaatccagggcacggaactaatcaattacattgcctagcaagactttgctgttt

SEQ ID NO: 1085 - DNA, 120 bp, synthetic construct
  source 1..120: mol_type = other DNA
ttgcaaatactgctgatcacactgtaataatcgccacacatcagcatatctttgatgtaactttagcagtataatttagttcttgcctgataaacatgaaagaacctacttttatttcca

SEQ ID NO: 1086 - DNA, 120 bp, synthetic construct
  source 1..120: mol_type = other DNA
atcatttccacccaaagaagatttcgcagactgaagagcactatcaaaactgtaatatgaaaatatcaaacagatgatacacacttactgcactgtgaataatcatggttcatttaattc

SEQ ID NO: 1087 - DNA, 120 bp, synthetic construct
  source 1..120: mol_type = other DNA
ctctgctgcaaccactcaactccaatcttatagtatgtaagcagccacagacaatacataaacagaggcatgctgcattccaataaatattaacaaaattaggcaggggccatatttggc

SEQ ID NO: 1088 - DNA, 120 bp, synthetic construct
  source 1..120: mol_type = other DNA
acaggttgttttctgcagagttatttgtaaaagtaaaacacaggaaacaatcaaaaggcccactgatgacaagtaactcatggtacatccatgctgtcagatgttactctgctggaagaa

SEQ ID NO: 1089 - DNA, 120 bp, synthetic construct
  source 1..120: mol_type = other DNA
gcatgaactagatcagtggctcttaacttttgtaggtcacagacccctttgaacatacgatgaaaataacggacctctccccacagaaatgcacccaggagcatacttttgcctacaatt

SEQ ID NO: 1090 - DNA, 120 bp, synthetic construct
  source 1..120: mol_type = other DNA
aaagtagtatccaactcaggttttcagtgagcattaaggggattaaaatgtgtaaagtgtttgggccagggtctgggaccagggaggtgggctgaggtgtcagctgcccctgtgacaatc

SEQ ID NO: 1091 - DNA, 120 bp, synthetic construct
  source 1..120: mol_type = other DNA
tcagtggtcatgactagagattaagattggaagcatctgcatgtagatagtaactaagaccatttaaattttttgtttgcatatctgcagttaagcaaataaatgctgttcctgtatttt

SEQ ID NO: 1092 - DNA, 120 bp, synthetic construct
  source 1..120: mol_type = other DNA
ctgatcacataatccgttcaatttcagcttaaaacattgattgattgattgattgtctacctggaatacccttactaaccgacttctccaacctggattgggttttcttcctctttgcta

SEQ ID NO: 1093 - DNA, 120 bp, synthetic construct
  source 1..120: mol_type = other DNA
ttacgtggttttacttacctgcgtcacccgtggtccaaaaatattgaatggaagattatataaataaacatttcatgagttttaaattgcaaacagttctgaataacatgataaaaatct

SEQ ID NO: 1094 - DNA, 120 bp, synthetic construct
  source 1..120: mol_type = other DNA
ccctgaggacagcccttggccctcagagggggaggctcaggaggggagatgaccatgggaatggagtcactcgggagaatctggaccatgaggggttacttgggggcctgaagggaggac

SEQ ID NO: 1095 - DNA, 120 bp, synthetic construct
  source 1..120: mol_type = other DNA
aactatcctctcacccttccaagaaactgacagtttcagtttattcctcttgatgaagtaatgctaaatttttgtagtgatgttttggtatattttattacctgtaattaatattactgt

SEQ ID NO: 1096 - DNA, 120 bp, synthetic construct
  source 1..120: mol_type = other DNA
ttttcaatagttttcaatacaacaatgatattatctcaaaatactgagcatgtctaacagccctcttttaaaagctcagcatgtttaatgtagatgttgctaatgtccaggtggctccta

SEQ ID NO: 1097 - DNA, 120 bp, synthetic construct
  source 1..120: mol_type = other DNA
aacccaataaaatctcaagcagtattaaaaaaaaaaagaagaaatctacttctagtcacataagagtaaaactgcccctaaaaaagacagacagaaatctcaaaagcagccagagaaaga

SEQ ID NO: 1098 - DNA, 120 bp, synthetic construct
  source 1..120: mol_type = other DNA
gcgtaagatagagaaaagctagaagtcccaccacagattgtatttcagtgaaagggattcattttaactgcttataaaactaaagaaaacttataaacatggaaaacaattattaaaccc

SEQ ID NO: 1099 - DNA, 120 bp, synthetic construct
  source 1..120: mol_type = other DNA
caatatggtatttagttcttcctattaaggaggagtctctaaacttcagtctgtgggccaaatctacctcctgtttctgtttaattattttattgggggggtgatatttatcccctcaag

SEQ ID NO: 1100 - DNA, 120 bp, synthetic construct
  source 1..120: mol_type = other DNA
agattgttgaaacttttgccaacaaaagcgggcagtctgcattatatgatgctctgttttctagtcagtcacctaaggatacatcttttcttggtagcgatgatattggaaacattgatg

SEQ ID NO: 1101 - DNA, 120 bp, synthetic construct
  source 1..120: mol_type = other DNA
gcagattagtcatggatgtaagagggagctccgggaggtcggagagccagagggagcttagtaaactcttcacactacccaaatggactgaaggctcatagctggcagagattagagcaa

SEQ ID NO: 1102 - DNA, 120 bp, synthetic construct
  source 1..120: mol_type = other DNA
gtcaacattttgtttcttactttgtgtgctcttttcaacatatagatgacaaactttgacatgatgtttagaaaacttgtgagtaaaaggataggcgatacgaatatttctaaaattcaa

SEQ ID NO: 1103 - DNA, 120 bp, synthetic construct
  source 1..120: mol_type = other DNA
tcttcttttgatgatttcttttataaaataattttaatatttgaaggcagctgtcacgtcttcccttcgccattctattcatcatgctttttttttcttccataggttattgcatgagga

SEQ ID NO: 1104 - DNA, 120 bp, synthetic construct
  source 1..120: mol_type = other DNA
gctggacaaaatctgctggaaatgatggcctgtgaccgactgagccaatcaggtaatagtaatattaaactaatttaatttaaaaagaaaaaggaatttctgttaaggcatatcttatga

SEQ ID NO: 1105 - DNA, 120 bp, synthetic construct
  source 1..120: mol_type = other DNA
tttaagaatctgccttcactggaaattcttaatgatgtacttcaagcaaaaagaaaatttcctaggtaaaaggtctaagatgctagaaagaaagacatgcaaaggaaacttaccaccata

SEQ ID NO: 1106 - DNA, 120 bp, synthetic construct
  source 1..120: mol_type = other DNA
tatatttcactttgactttagaccttttgaagtctgtataaacttgttttgaaatacagtctccacttacgaatgtcataacaaaatacttttttgcatgataaaaaattactttgatta

SEQ ID NO: 1107 - DNA, 120 bp, synthetic construct
  source 1..120: mol_type = other DNA
aaaaaaacccagcacagagtaggcatgccagcattctctcacttctcagcctgcaaaaagatttaccaatttacctcattttcttctgttccttgttctgacctcagtgcatgacccaca

SEQ ID NO: 1108 - DNA, 120 bp, synthetic construct
  source 1..120: mol_type = other DNA
gtgcagctgattaaccctgacttagtacatgctcagggctgggttctttgttggtgcttcacatttctctctccttagtttggatttcacaaatgtgtcccttttttcccatcacaaaat

SEQ ID NO: 1109 - DNA, 120 bp, synthetic construct
  source 1..120: mol_type = other DNA
gagcaactcacagagctcagggaaacacttttactggtttattattagtattatgtttatttgtttgttttgagacaaagtcaagctctgtcacctaaactggagtgcagtggaacaatc

SEQ ID NO: 1110 - DNA, 120 bp, synthetic construct
  source 1..120: mol_type = other DNA
tatatatatgtatatatatgaatgggatacagagattgctcagagagactgggtgattgtagggcatctgcaaagatttcccaaaggtggtgaaggctgcactggggtttgaaagacatg

SEQ ID NO: 1111 - DNA, 120 bp, synthetic construct
  source 1..120: mol_type = other DNA
cactggctagtacagctgtgagaagagctgtcctgtagaccccagaatggtaggttcactgacagtttgcactggtcaccttgaaaaagcacagacactcaatgccagtttgtgaaagca

SEQ ID NO: 1112 - DNA, 120 bp, synthetic construct
  source 1..120: mol_type = other DNA
aattccagaaattaacaattaaatgtgtgcctttctgagtacaatgatgaaatcttgcactgtcccgccctgttccacctgggatgtgaatcagacatttgtctagcatgtctacactgt

SEQ ID NO: 1113 - DNA, 120 bp, synthetic construct
  source 1..120: mol_type = other DNA
ttgaactcttgctttgtaggaatctgtcttccttatttggctatatttagtcttcactctgtcttcggcattctgcagtttgtgaaacagtgataccatgtgtcgagatgtggatatctt

SEQ ID NO: 1114 - DNA, 120 bp, synthetic construct
  source 1..120: mol_type = other DNA
cacaatcatagctttatggggtgggaaaacaactccagcagcgtggccacctcttaaagcaccagttctggtagcaaattcctccttaacaatcaacatccaagtgaattttggaagtcc

SEQ ID NO: 1115 - DNA, 120 bp, synthetic construct
  source 1..120: mol_type = other DNA
cctacattaaacatgctgagcttttaaaagaggcctgttagacatgctgagtattttgagatagtatcattgttgtattgaaaactattgaaaactttaattttaaaatgcaaacgttct

SEQ ID NO: 1116 - DNA, 120 bp, synthetic construct
  source 1..120: mol_type = other DNA
catgttacattcagagaaatggaaaatttaattacattacttttctaccctgcataaataggacaacagcagatgttgtcctatttgagtagatatgacaccctactttaaaaagcacag

SEQ ID NO: 1117 - DNA, 120 bp, synthetic construct
  source 1..120: mol_type = other DNA
atatgatgggggtaggaggaagctaaaggcaaatatacatttataattttatattgtacacacacaataaagtatacattaatatataaaacattacaatatacattttaaatgtttgcc

SEQ ID NO: 1118 - DNA, 120 bp, synthetic construct
  source 1..120: mol_type = other DNA
tagccagtgcaggagagtaaaggcttcacctcctcctctatcctccaggccctgcatgggcatctcccactggaagactctcatctgacactacatagggaaaacagctggaagctaagg

SEQ ID NO: 1119 - DNA, 120 bp, synthetic construct
  source 1..120: mol_type = other DNA
cagcaaagctcgcactggcatttttagctgcttaaatttgaagagcagttcagcaaagcttgtgctccctaaaatggaaatggggtgggaaggtcacatctctaaataaattcagccata

SEQ ID NO: 1120 - DNA, 120 bp, synthetic construct
  source 1..120: mol_type = other DNA
aatataatgtgcaaaagtgcctgtctaccttcaaatactatctaagtggtattttactggttctaatacagttgaccattgaacaaccctgtttgtccagcctggcctgaaaagaagtct

SEQ ID NO: 1121 - DNA, 120 bp, synthetic construct
  source 1..120: mol_type = other DNA
gccaaaaattgcattgcaatccactgctggtgggaaagtaaaatggcacaatttggaaaattgagtgtggcaatgggtgaaggtacaaatgacgcaaaaataggagaatgctggcaacta

SEQ ID NO: 1122 - DNA, 120 bp, synthetic construct
  source 1..120: mol_type = other DNA
ccaccaaatgcgctaaagagcaacaaggcaatcagggccctgttttagagaatgttctaatcactgccaaagttccatacattatatgaaatgtgcaaatcagggaatctgcaaagattt

SEQ ID NO: 1123 - DNA, 120 bp, synthetic construct
  source 1..120: mol_type = other DNA
gcatgaggccacatgtcagaagtgtattaacttaacaatattcttgtgctgcacctaccatcagagtgtggtcttcagattaggctacttttgtaaaacagctatctttcttctgtcgtt

SEQ ID NO: 1124 - DNA, 120 bp, synthetic construct
  source 1..120: mol_type = other DNA
aatagtaaggcatactgataagatgccctcataatacaagagtgtcagtggtgtgaacattccacttttcatttagtccttgggccatttcaagatcatcactatttaaagccaaagtaa

SEQ ID NO: 1125 - DNA, 120 bp, synthetic construct
  source 1..120: mol_type = other DNA
tggtgtaggacatcacataaaaccacttctaaaactattgagtataaatacttttcttacacacaaacatgcacacacatatacccaaatctctttccctgtcttttaaaataattggag

SEQ ID NO: 1126 - DNA, 120 bp, synthetic construct
  source 1..120: mol_type = other DNA
caccaatgagatcttttcattggaaaaatacatattcacttaccttcctcctcccaaaaatagaagtccaagggccatgtggtgggctaagtgaaaaccatagttcatttcaccacccgt

SEQ ID NO: 1127 - DNA, 120 bp, synthetic construct
  source 1..120: mol_type = other DNA
atataattgaaactggaactgtaaatacctgaatactgtcattattgtacttaagaacttttccaacaataactatgataataatagtaatttattaaatgcatgctctgtgtcaggcac

SEQ ID NO: 1128 - DNA, 120 bp, synthetic construct
  source 1..120: mol_type = other DNA
taagggacaatattcaggtttaggtgtcaacgttatttgtctcaacatgtagatgtcctaactgaagcatgggaaggcataggctatgcttacccccaagcagaccatgcccagggccaa

SEQ ID NO: 1129 - DNA, 120 bp, synthetic construct
  source 1..120: mol_type = other DNA
gatacaaaattcatacttttaaaaggcaccctataactctaacactaccgtgttgaaaacgataaaatgtactatgtattaaaacccttccctctgaaaaaatgttcacattcctgaaat

SEQ ID NO: 1130 - DNA, 120 bp, synthetic construct
  source 1..120: mol_type = other DNA
ctggaaaaaccttcactgtctaaacagttcattgtcctttttgttaaaatgtatgaggctatataatgagataactgataccaatttaacattatacagagatgactgggataatcactc

SEQ ID NO: 1131 - DNA, 120 bp, synthetic construct
  source 1..120: mol_type = other DNA
tagatgcagtgtcttatttgtagcatgtacacatacacacacaaagcacaaagtaagacttatttgtctttactatatgctttttgtacctaaaagctaactcaactgctagtgttagca

SEQ ID NO: 1132 - DNA, 120 bp, synthetic construct
  source 1..120: mol_type = other DNA
ctcgccactgtcccaattatcctgactgaagttggcaacaatatctatcctgacaaataagttcattttattcatcttactaccagactaatgtcttgacatcaaggactagtataggaa

SEQ ID NO: 1133 - DNA, 120 bp, synthetic construct
  source 1..120: mol_type = other DNA
tgaatggcccgctgctactgctacatgagtcgacatggatgaatctttaaaaaacaaagttgagtgaagaaaaaggaacacatatttacatctatatattttcaaaactacataagacct

SEQ ID NO: 1134 - DNA, 120 bp, synthetic construct
  source 1..120: mol_type = other DNA
ccctcccgcctctctccacgccagtgtccctcccgcctctctccaggccagtgtccctcccgcctctctccaggccagtgtccttcacgcctctctccaggtcagtgtccctcccgcctc

SEQ ID NO: 1135 - DNA, 120 bp, synthetic construct
  source 1..120: mol_type = other DNA
agattttactgggtttttgaatctgtggatagatatccttcaacagttctgaaagatttccagccattctcttcatatattatctgtgctgtattcttgtctctccttttagaacttcga

SEQ ID NO: 1136 - DNA, 120 bp, synthetic construct
  source 1..120: mol_type = other DNA
ggtatcattattcaaagtttacagatgatgaaacaggctcacagttgacaggtaattttttcagaaatcacaaagtcaaattggcttctggagtctgctgctctatcatgatgcctccgt

SEQ ID NO: 1137 - DNA, 120 bp, synthetic construct
  source 1..120: mol_type = other DNA
atcccatccatccatccaaccatccaattagttctgtccctctagagaaccctaatacaaacaggtagtggaatattgaaagaaattttattggagcagcccaaaaaagcatatgtacct

SEQ ID NO: 1138 - DNA, 120 bp, synthetic construct
  source 1..120: mol_type = other DNA
caccaggagtagattccatctcaagaaaccacgttcttttcccgtccataagaaacaacttctcattagttaaagttttcttatgagattgcaggaattgagtcacatcttcagactccc

SEQ ID NO: 1139 - DNA, 120 bp, synthetic construct
  source 1..120: mol_type = other DNA
agtcttttcaagttacaggtactgcatgcattctttgggttcttatacacttcattgattcaaaatatttgtcttttgtttttatattacttgaaggattacttggctaggtataaaatt

SEQ ID NO: 1140 - DNA, 120 bp, synthetic construct
  source 1..120: mol_type = other DNA
ctgagcatgtaccctggaacttaaaatttaaaaagtacatattgaagaaaatcaggatatacacataggattagtaagaagactctctccattaaaaggcatcttgcatcgcttcttggt

SEQ ID NO: 1141 - DNA, 120 bp, synthetic construct
  source 1..120: mol_type = other DNA
atcatatttcttgcaaaatgcttatggaggtagcaaaaaagccccaaattattcattttgaatgtttattataggcatgtttgaatctacctcttccataaatttattacaaaatttgat

SEQ ID NO: 1142 - DNA, 120 bp, synthetic construct
  source 1..120: mol_type = other DNA
ttaatagaaaatagagcttctgattattatcatctactttgttatctagcattcagtcaactggattctttacagagataatatacagtatatttatagtgataaagaagacatttgggc

SEQ ID NO: 1143 - DNA, 120 bp, synthetic construct
  source 1..120: mol_type = other DNA
cattctcttactcagttttaaaatgctggtaatggtcttttttttcttttttttttttcttggtgattttaatgctttggaaaagatctcatggttttatctccaaaggaggaaattaat

SEQ ID NO: 1144 - DNA, 120 bp, synthetic construct
  source 1..120: mol_type = other DNA
tgatcatttttctaattctgtacatctaaaatgcccagaatttgagttgctgttatagtctactaacatagaactttggagtaataagatgggaatttgtctctcttttgccaagacaag

SEQ ID NO: 1145 - DNA, 120 bp, synthetic construct
  source 1..120: mol_type = other DNA
aatgaatgaaatcaaatcacgtgaagatcagggtcctagagtaacttaatattttgtacattggttatttgactcctcatttttatattacatgttatatcaagggagggggcataaaag

SEQ ID NO: 1146 - DNA, 120 bp, synthetic construct
  source 1..120: mol_type = other DNA
ctataggaacctgagcacctggtatacagagcttcgggagttcaggccagagatcccatgcatcgtggtggccaataaaattgatggtggggccatccctgcacctgggtgttagcaatt

SEQ ID NO: 1147 - DNA, 120 bp, synthetic construct
  source 1..120: mol_type = other DNA
ggcagctcgtagctcttctctagggaggagctggaggccaccgtggccatctcctgctcgaagtccagggcaacatagcacagcttctctttgatgtcacgcacgatttcccgctcggcc

SEQ ID NO: 1148 - DNA, 120 bp, synthetic construct
  source 1..120: mol_type = other DNA
tactattttcatgcaagatgtctttttctttcttacaactaagagaaagctaagtaaacaaagagaacttttagttagcactcaatagattgacatatcatgatttcttctgaaattcaa

SEQ ID NO: 1149 - DNA, 120 bp, synthetic construct
  source 1..120: mol_type = other DNA
cattcgattctcataaggagtgaacaacctatatccccctgcatgagcaacttacaacagggttcaggtcacactcaggacaatctaatgccaccgctgatctgacaggaggaggagctt

SEQ ID NO: 1150 - DNA, 120 bp, synthetic construct
  source 1..120: mol_type = other DNA
ttctggttaagatgatgtatcaaaaaaaaaaaatcttcgtgagagctattattaaccaagtcatcataaccaaaactttaaatccacaattctggaatattaaaaagtttctttttgaac

SEQ ID NO: 1151 - DNA, 120 bp, synthetic construct
  source 1..120: mol_type = other DNA
gctaggcctctttctaggaagtgaggatatggtaatgaacaataaaaaccctattcatgagagtgagataaacacacaataacaacagacagatacggcaaaatacacagtacgttagag

SEQ ID NO: 1152 - DNA, 120 bp, synthetic construct
  source 1..120: mol_type = other DNA
cttgactgagagagaaagatcagacactgaggtttttggcagagcaactggaagagttgctgttaaccaaagtaggaaagactacatgaggtgtagatttcaggaaggacatcagtagcc

SEQ ID NO: 1153 - DNA, 120 bp, synthetic construct
  source 1..120: mol_type = other DNA
tggaaaaaaaacggtaactgattgtttgctgattttcatttttctgattaacaggcaaggctcaatatcctaataaaagtataaaatttgttcatcatgaatattagctcaaattaggat

SEQ ID NO: 1154 - DNA, 120 bp, synthetic construct
  source 1..120: mol_type = other DNA
acttacaaaagctctttgataaatagatgactaaattaaaggtgtcctcacacagtttggacaatataatgtattaggtgtccacaaccaggtagcatactagcatttttgttagcgtga

SEQ ID NO: 1155 - DNA, 120 bp, synthetic construct
  source 1..120: mol_type = other DNA
agaaaacacccagcccacccaagggaatgccaaacccagcagagaaaaggtcaagcccagcaaaggaacacgagagagaaaacgtcaatccaagcaggaaacgtcaatccaagctaccaa

SEQ ID NO: 1156 - DNA, 120 bp, synthetic construct
  source 1..120: mol_type = other DNA
ttgttttcctgcaactagatggtcccatttgggggtgacggaagatggtgacagatcagaaaggcattcgattctcataaggagtgaacaacctatatccccctgcatgagcaacttaca

SEQ ID NO: 1157 - DNA, 120 bp, synthetic construct
  source 1..120: mol_type = other DNA
cttttccctctattacctaatttccaaattggccttgatatttctgattgctctcttttccgctttccacttctgcctcatgagcaatcagaaatatcttaagccttgccactgacaggc

SEQ ID NO: 1158 - DNA, 120 bp, synthetic construct
  source 1..120: mol_type = other DNA
tgctgggataacaggcgtaagccactgcacccggcctttcattcctcttctaacttaaatagaaagcagtatttcattcctcttctaacttaaattccttcttctaccaggaacactgta

SEQ ID NO: 1159 - DNA, 120 bp, synthetic construct
  source 1..120: mol_type = other DNA
atttcctattctgttctattcattgatgtcttttcagctgttagtaaacaatttgtggaaataaataacacatgcacattttgatatctggaaaagcaagcctttttccattctgttaca

SEQ ID NO: 1160 - DNA, 120 bp, synthetic construct
  source 1..120: mol_type = other DNA
cctattcatactaatattgaacagttctcagttttccttttaaccacaactgtgacctctcaagttccatttcctaagtgcacctactgaaaataaggcagtgtcttttttgcctgccag

SEQ ID NO: 1161 - DNA, 120 bp, synthetic construct
  source 1..120: mol_type = other DNA
cagtcatgactcctaagcatgatgtccttaaaagaactgtccacactcacgaactcaaattttcttttcattcactcttaatctcacaccggcgtcttcaatttcagcagtcctccaaca

SEQ ID NO: 1162 - DNA, 120 bp, synthetic construct
  source 1..120: mol_type = other DNA
tcattggagaaatttgagcaggggagtcacaagattaaatttgagtattaaggcgttctggttatggtgtaaaatgggttagcaggctttttctttaaaggaccaggtgggcaatatttt

SEQ ID NO: 1163 - DNA, 120 bp, synthetic construct
  source 1..120: mol_type = other DNA
taaggtactattaggaagtggagaacagtacactgtgtcaccttatatgtttctactgtattttaaagctgtgtttctggtggttttgttcatggatgttgggtggatgaatttgtgagg

SEQ ID NO: 1164 - DNA, 120 bp, synthetic construct
  source 1..120: mol_type = other DNA
tgaagcagtgtattgatctgtttgtaacatatggaaacacaatatgtgcaacattagtaatgcacacatacacacaaagaagagagtagcgctatgtaagagtaaagtttctatatctga

SEQ ID NO: 1165 - DNA, 120 bp, synthetic construct
  source 1..120: mol_type = other DNA
tgcgcacctactaacaggacccaaaatacatgaagctgaaacaggcagaattgatgggagaagcaaacaatgtaacaacaatagttggagatcaccctttcattcgttgatagagcaact

SEQ ID NO: 1166 - DNA, 120 bp, synthetic construct
  source 1..120: mol_type = other DNA
gctgtgtgtattttaaggcaaagattcacaaccaaaaacaaggctttattaacttttgtatctaagaacctgcagtgtcgagccctcttttattcctagtattactactttaggtgtgaa

SEQ ID NO: 1167 - DNA, 120 bp, synthetic construct
  source 1..120: mol_type = other DNA
cctttctattcctgaagccgcacagtgtgtcatcctctaaatctgactgtttaatgtaaaatctaggtggtaaagacggaagaggacacattttgcatctttgtctttttatttgtgtgt

SEQ ID NO: 1168 - DNA, 120 bp, synthetic construct
  source 1..120: mol_type = other DNA
gccagtcatatcttgtacatctgagccactgtcatctgcagtcatgagtgtcatagactgggaattgatcgtcctggcttttaaaaacttcccttttcatcaattcttaactcagtggat

SEQ ID NO: 1169 - DNA, 120 bp, synthetic construct
  source 1..120: mol_type = other DNA
gggtgttgtgtaccaaatatattgttagtatgtatgttaaaaattagagaatggcaacttacaacttcttcgtggaacctaaaaaaaaataaaagtagggttttcgtctcccatgtcagc

SEQ ID NO: 1170 - DNA, 120 bp, synthetic construct
  source 1..120: mol_type = other DNA
gtacatggggatctatatttaatataaacatttcagtatatttggtaaaacttttattaaaatacatcaaagaatctttgatctactaaaccaggagttggccagctttttctgcaaaga

SEQ ID NO: 1171 - DNA, 120 bp, synthetic construct
  source 1..120: mol_type = other DNA
ccacctggtatgtaaaatttggaagctactatttcttgtctatcacttttccatgactgtggatgaaaattacatcattctcagtcatgagcgttaagtatattgtccttaaagaactgt

SEQ ID NO: 1172 - DNA, 120 bp, synthetic construct
  source 1..120: mol_type = other DNA
tttaaataaacatttgtatagaatcatatcatcaatgaagacagagaatctgacttcttcttctcctatttggatgccttctatttcttttttttgtttgtttgtttgtttgtttgtttt

SEQ ID NO: 1173 - DNA, 120 bp, synthetic construct
  source 1..120: mol_type = other DNA
tcaatagctgaatatttagatttgaaacctagtaaaatgctcaatactatccagactgcattggaactaaaaaggtgaactatttcaactgatactagtttttataatatgtcagaagta

SEQ ID NO: 1174 - DNA, 120 bp, synthetic construct
  source 1..120: mol_type = other DNA
caagtgttagacatacaaatctttagctgaaaaataaagcacatggggttgaagggataggtgcaggagattgtacttccaaaaaagtaagacctgagatctcacatgattcagggtttt

SEQ ID NO: 1175 - DNA, 120 bp, synthetic construct
  source 1..120: mol_type = other DNA
gtgctgctaacttttcaaattaagtttgaggaagatggtcctgcccttctttgattcatagctgaaggaccatggacattcttctgtttaagaaactgccccagcactttgggaggccaa

SEQ ID NO: 1176 - DNA, 120 bp, synthetic construct
  source 1..120: mol_type = other DNA
agggtcttccttggcgctgcgacagccaatgtaatggcctttctgtttctcataagcagttttgtacagatactggtagatgtgaacagaaaatagaagagtaatttttccaaacccact

SEQ ID NO: 1177 - DNA, 120 bp, synthetic construct
  source 1..120: mol_type = other DNA
agtgacattgtgaagatattgaaaagaaaatcaaaatctgtgcttaaacgcaagagttgcagaaccaaacatagatgcaaaaggatcctcagattgtaagagttgttcttgaatttagga

SEQ ID NO: 1178 - DNA, 120 bp, synthetic construct
  source 1..120: mol_type = other DNA
ataggcaagtttgaacaaagagagagaaaactgggaatcaagcagataacgtggactagctatggttattagaggcaaaaatgaagaataagaaggaggaaacaactggctacatgatga

SEQ ID NO: 1179 - DNA, 120 bp, synthetic construct
  source 1..120: mol_type = other DNA
acacaaaattcttgaaaaatagtctccctgctcgttttgtagaaaagaaaaaccacaagaaaagagaaggaagcgtacctcactggcaatttctctggaggccttggcgtgcttgatttc

SEQ ID NO: 1180 - DNA, 120 bp, synthetic construct
  source 1..120: mol_type = other DNA
cagcatctccggagtatcagaaggaatggtgatgttgcttttatctttattccaggcttcctgatacagtttctgtggagaggagggaaatagggaatcaatatctgaaacattaagcct

SEQ ID NO: 1181 - DNA, 120 bp, synthetic construct
  source 1..120: mol_type = other DNA
ctttgggagcctcaggcacttgaaagatattagtgaaattacatttaggcattatgaagaccactagaaaaatattttccagcagcacatcaaaaagcttatccaccatgatcaagtggg

SEQ ID NO: 1182 - DNA, 120 bp, synthetic construct
  source 1..120: mol_type = other DNA
gggtgagctctacctcctccacctcgggtgacctctacctcctccacctcgggtgacctctacctcctccacctggggtgagctctacctcctccacctggggtgagctctacctcctcc

SEQ ID NO: 1183 - DNA, 120 bp, synthetic construct
  source 1..120: mol_type = other DNA
gtgagtaggaagaggggggagaacttggggagatgggagccccgggctgagggagtaggaagaggggggagaagttggggagatgggagccccgggctgagggagtaggaagagggggga

SEQ ID NO: 1184 - DNA, 120 bp, synthetic construct
  source 1..120: mol_type = other DNA
gaagttggggagatgggagccccgggctgagggagtaggaagaggggggagaagttggggagatgggagccccgggctgagggagtaggaagaggggggagaagttggggagatgggagc

SEQ ID NO: 1185 - DNA, 120 bp, synthetic construct
  source 1..120: mol_type = other DNA
cctttattttcaacatctgaagcattgctacttatctatattgattaacttagctgagttctcctctaccatctaattagatttggtttcttcacagtggagcacaggctatcttcagtg

SEQ ID NO: 1186 - DNA, 120 bp, synthetic construct
  source 1..120: mol_type = other DNA
atccttccctttagttgtgtccatttcccctccctgacttctcctcctgcagcatccttccctttagttgtgtccatttcccctccctgacttctcctcctgcagcatctttcctagttg

SEQ ID NO: 1187 - DNA, 120 bp, synthetic construct
  source 1..120: mol_type = other DNA
tggacaagtgttcatgaaaccccctccctggctcattcactgtttcttccagtgaagaaaattctcatctgtgttatcaggcttctgtctaacttcgagggaaactaaacagctgaaaaa

SEQ ID NO: 1188 - DNA, 120 bp, synthetic construct
  source 1..120: mol_type = other DNA
cacaatgggccgcctcccctctgacccagccttggcaccgtgtaccctctgtttcttgaccagcagggtctggcatctctcacaatctgtttccctcccctgcagcaaacttcagcgtgc

SEQ ID NO: 1189 - DNA, 120 bp, synthetic construct
  source 1..120: mol_type = other DNA
cctaacagcccctggctggccacgcaggcctctgacaccaggctgaggggtgggtggggccagtgggaaaggatttaggtttcctcaggaaaaaagcctgtgggtcaccgtgcacggaag

SEQ ID NO: 1190 - DNA, 120 bp, synthetic construct
  source 1..120: mol_type = other DNA
cctcctgccctactggttcggcctgcagtcatttccagtagcacaggaaatcaggccaccaagcactcagcaacagctgaccagttacgtaaacagtaacctgtctaggacccagaaata

SEQ ID NO: 1191 - DNA, 120 bp, synthetic construct
  source 1..120: mol_type = other DNA
gcattagattctcacaggagtgcgaaccctattgtgaacgacacgtgagggatctaggttgcaccctccttctgagaatctaatgcctggtgatcttgatctgaggtgaaacagtttcat

SEQ ID NO: 1192 - DNA, 120 bp, synthetic construct
  source 1..120: mol_type = other DNA
gagacttttaaaacccacaatgtccaatggtgccatcacctggttccgctctgagccagcaccacccttagatgcttccgcttcctgagaatcaatgtctttttcacaaaaggaacaagt

SEQ ID NO: 1193 - DNA, 120 bp, synthetic construct
  source 1..120: mol_type = other DNA
gactcctgttaatgtcgacactttgccctcattgaatgaatcatgaaatgacaactagaatggcgactccttcccagaaagctttttattggcttttcccagatccattacaggaatcac

SEQ ID NO: 1194 - DNA, 120 bp, synthetic construct
  source 1..120: mol_type = other DNA
aggtagggccttgctgtgcattaggctttgacttgcttaaaggaatgttgtggctggtttgatcttctatctggatcactcaaacttttatccgtatctgcaataaggctattttggctt

SEQ ID NO: 1195 - DNA, 120 bp, synthetic construct
  source 1..120: mol_type = other DNA
taaaataaagttattgattagtgaatgaacttcaaagggctatgttggcatggctgttgtgtggctacatgctgagtgaatggctacatgctgagtgaatgaggctggattctcacagcc

SEQ ID NO: 1196 - DNA, 120 bp, synthetic construct
  source 1..120: mol_type = other DNA
gtcttctgagtcatctctgcggttttgctgtctctaagaacaaagcagtagcctccgaggtcctggctgtggctgccgctggcttagtggcttgaggctgtctgacagggaggccaaacc

SEQ ID NO: 1197 - DNA, 120 bp, synthetic construct
  source 1..120: mol_type = other DNA
ccatggggggagcatcgtctcttcaacaagagacgctgagacagacagacatccacaaactcccatgttaaaccatctacaaaaattgactcaaaatcgaacaatgagctaaatctgtac

SEQ ID NO: 1198 - DNA, 120 bp, synthetic construct
  source 1..120: mol_type = other DNA
tttaggaagccatgtgttaacgaggggagacggatgctctgtgccgtgtgcagggataacggtgccaggccaggcagttaccaatcacgcgtgtgtttagggctcaggaaagcgaaggag

SEQ ID NO: 1199 - DNA, 120 bp, synthetic construct
  source 1..120: mol_type = other DNA
tcctggaatagaaaagggcagtgaggagaaaactctgcaaatctgactcaagcgcggactttggttaatgtcaacaatggttatgtgatcgtggaattggctcattaattgtaacaaata

SEQ ID NO: 1200 - DNA, 120 bp, synthetic construct
  source 1..120: mol_type = other DNA
gtcttgggaccacggacttgtctgaaaatccgaaggcgttggatcttctcttccccagaaaaatgcacccgctttcagaggttcgtgtcccacgcttttctttctatcccaaccttgtaa

SEQ ID NO: 1201 - DNA, 120 bp, synthetic construct
  source 1..120: mol_type = other DNA
gagactgtctccagaaaaaaaaaaaaaaaaaaaaaaatcctgtccagtctttataagaagagagacgtggacacagacacgcggagagaaaaaggccatgtggagatggcggcagagatg

SEQ ID NO: 1202 - DNA, 120 bp, synthetic construct
  source 1..120: mol_type = other DNA
caaaattatttcaagtggcttttatattcttcctttttaaaaacaatctgcctggccctagcacctgtataaaagcttaactctatctgccactggtggaccgcctggactcatttcact

SEQ ID NO: 1203 - DNA, 120 bp, synthetic construct
  source 1..120: mol_type = other DNA
aaaaaagtttgtactttttttggaaacatgtcgagtataaggacataaacgaaacggcccacatcgccaaacactgccactaacccatctaaaattaccatttgcccaccacccacatca

SEQ ID NO: 1204 - DNA, 120 bp, synthetic construct
  source 1..120: mol_type = other DNA
acattttaaatccttccaaacagatacagaagatcaacaggtctatcagtcacagagttcagttctctcacctcaaaaaactcatcatagtgttcctgcatctccacatcgctcacggca

SEQ ID NO: 1205 - DNA, 120 bp, synthetic construct
  source 1..120: mol_type = other DNA
cttctgatgtgattaaaatccaagcaaccatgaagattcagtaggacagttcacgcaaccttacggtattgtggacgccctcaagtaaagggaatgttacaatgttttgctgatgaaagc

SEQ ID NO: 1206 - DNA, 120 bp, synthetic construct
  source 1..120: mol_type = other DNA
tttagtatttcccagtacaggaagatattggtaccatctactgaatgcccagttttgatctatttctaaatggagcaaaccaattccatctcctagagctggagactgtatccaggcagt

SEQ ID NO: 1207 - DNA, 120 bp, synthetic construct
  source 1..120: mol_type = other DNA
ggaacttgtatgaacttacagcgcaaaccgtcagcagactgggaagagttttgagggttacggtaaatgttcaagagggcaatggtctgaaatacaaaacgcaacaactttatattatgg

SEQ ID NO: 1208 - DNA, 120 bp, synthetic construct
  source 1..120: mol_type = other DNA
agggttctattcctctcctgcgttttaaccccatcaagcagccattttcatctggtttcccacattcatcaactcacctgcgatttacctaatttccaacgcaactatcaactctgatta

SEQ ID NO: 1209 - DNA, 120 bp, synthetic construct
  source 1..120: mol_type = other DNA
gaaatccacagctctattacaaggaattaatctggttactagaaccagggtagatgatcagaccaggcagggccaccagtaccatccacccatttttcctgagaaaagaaaaatagggta

SEQ ID NO: 1210 - DNA, 120 bp, synthetic construct
  source 1..120: mol_type = other DNA
cgcagtgagccgagacggcgctatcgcactccagcctgggcgacaagaaggaaactgcgtctcaaaaaaacccaaaacaacaacaacaacaaaaataaaaaataaaaaataaaagaaata

SEQ ID NO: 1211 - DNA, 120 bp, synthetic construct
  source 1..120: mol_type = other DNA
cataaggaaaagtacagcttcccttctccagggtgacagatgagccttttctgaagttctcagctttctcttctatcgatatttcccatgtcagttaaagtgtttgtagagacagctgat

SEQ ID NO: 1212 - DNA, 120 bp, synthetic construct
  source 1..120: mol_type = other DNA
cttcaccctgtgatggtgtgaactagttctccctaatatactccctttcatatatatgtctattctgttagttctgcccctctggagaaccctaactaatgcagacccttgtgtaacttt

SEQ ID NO: 1213 - DNA, 120 bp, synthetic construct
  source 1..120: mol_type = other DNA
ttcagatatgaccagactgctctgaggaattcaggttggctttatagagtcaataaaaagctacctggaaagagtggccatgtaccttatctatacagttcccttacaaggttcctgatc

SEQ ID NO: 1214 - DNA, 120 bp, synthetic construct
  source 1..120: mol_type = other DNA
cataaagggagccaaaacaatttgcatttttctatgaggccttctttgaaaggtcttgatgaaaaggggagaaatggggaaaaaaatagcacagagcagtctgagctatgtgaggtgtgc

SEQ ID NO: 1215 - DNA, 120 bp, synthetic construct
  source 1..120: mol_type = other DNA
agctagttgtggttggaaaaagccactggtgtgaacggtgtatgctagtatgcaagggaacatatactgggaactcgagccatgttttctgcatggtttaataatcctttgtatcagtgc

SEQ ID NO: 1216 - DNA, 120 bp, synthetic construct
  source 1..120: mol_type = other DNA
aactgcacgagcactttgacctaaaacaattcttgaaaccgaacctggagataaagcccatctatggcagaagaaggtgatagcaaaccgcattattgaccctcaaagtttatcaaccaa

SEQ ID NO: 1217 - DNA, 120 bp, synthetic construct
  source 1..120: mol_type = other DNA
agacaaaaaaaaggaaaagaagtgagctaatttcagatagtgcttagagctgtggagagaatgcgtggcactcggaggccctgagcagcccagatggtgaagcagctgtggttgtggtgt

SEQ ID NO: 1218 - DNA, 120 bp, synthetic construct
  source 1..120: mol_type = other DNA
acactagagggcggagttccccatctttcaggcaatgtgaaggctcagtccacttctccacttctgcaactacagaggtgattatttgggaccactggattggggggagaaagtcagtgt

SEQ ID NO: 1219 - DNA, 120 bp, synthetic construct
  source 1..120: mol_type = other DNA
gtgcgtctgtgcggcgtttgcatgtgtccaccgtcctgaccgggggcagggccacgtcccacacatctttctgcctaacttatgatgtggcaaagacacatcccgatacctctcccgggt

SEQ ID NO: 1220 - DNA, 120 bp, synthetic construct
  source 1..120: mol_type = other DNA
aagttctttatagcagtgggaaaatggacgaatccaggcttgcatcagtgttccggggcagcccaacaaagtaccacaaaatgaggggcttaaaccatagacatgtgctctgtcgtggct

SEQ ID NO: 1221 - DNA, 120 bp, synthetic construct
  source 1..120: mol_type = other DNA
tctaactgcatttaggaaaattcacgtgtacatttttcccaaggggagcgagaggatgtgagcgttctacttgttcatttcatatctgcttttacaaattcatagggagggtgaggaagg

SEQ ID NO: 1222 - DNA, 120 bp, synthetic construct
  source 1..120: mol_type = other DNA
ctcaagaagggttccctagatgtggtctattcccacgggagactatcattcagccgtcgaaaggaagggaattctgatgcaggctagacaggaatgaggacattaggctgagtcaaagag

SEQ ID NO: 1223 - DNA, 120 bp, synthetic construct
  source 1..120: mol_type = other DNA
gtgattttggcaccagtttaaacagtgtcacttcattctgtgcttctcctgattagtctgccttctggccgatatatccctgggaggcaggtgcagacccctcttgactatgtactgtgt

SEQ ID NO: 1224 - DNA, 120 bp, synthetic construct
  source 1..120: mol_type = other DNA
ggacatggacatcttggggtcggggtcattattctgcccaccacagccaacaattacaatcaatggggatgagaactggaaatggtcctgtatgattctcttgctgccaggcttgagagc

SEQ ID NO: 1225 - DNA, 120 bp, synthetic construct
  source 1..120: mol_type = other DNA
aagcacaatacaagagagagctacaggccagctgcattcagagcacaggtggaaaatcctaaacgtaacagagctgaacccatcgtcccatctagcgctcctgggaggcaagcctgggct

SEQ ID NO: 1226 - DNA, 120 bp, synthetic construct
  source 1..120: mol_type = other DNA
aatgcgtgggaagttttcctctttaattgtagagtgacaccaacccatgtgaccactcgggccagtcttgcttgtgacagttttttctgccatcaggaacaaagtctgcccaaaccttcc

SEQ ID NO: 1227 - DNA, 120 bp, synthetic construct
  source 1..120: mol_type = other DNA
ctcataggctgccctcccataccctcctttctcgtcttttcctcctacaggtgctacacccctgtgagagtgttttggagtgttttcattgttagggtggagggaggctgtgtgtgtcca

SEQ ID NO: 1228 - DNA, 120 bp, synthetic construct
  source 1..120: mol_type = other DNA
atgtttaataggggtagtctttttctataaaaatgaaaaagacaaccacagattcttacaacagacatcggcagcagccccaaacctaaatagggaggtgttgtcccagctgcaagtggc

SEQ ID NO: 1229 - DNA, 120 bp, synthetic construct
  source 1..120: mol_type = other DNA
atgggaattgcagatgctacccataaaaatgctactttgacatcacttctgcaataggtctgagacagaggttggcaatcttttaatagtaatgagcctacccatttggcttaagatggg

SEQ ID NO: 1230 - DNA, 120 bp, synthetic construct
  source 1..120: mol_type = other DNA
tttttttccctcacacaggggttttcttggagctcaagtttggatgaccccagacagtaagataatctcatcatggtaaagttaatatgaaatatgtggtctccaaacagcctctcccag

SEQ ID NO: 1231 - DNA, 120 bp, synthetic construct
  source 1..120: mol_type = other DNA
ccgagaacagtggaatagtgctcctccccagagcacaggttttgccagtgaagattgaatttggctagaaaccgctgccctgctctctcttctcgaagcacctggaagtctgagaaggaa

SEQ ID NO: 1232 - DNA, 120 bp, synthetic construct
  source 1..120: mol_type = other DNA
tttaaatcagccagctataaaaactaatttacatttttttcaatgaatgaaagctttatatgcacaaagcccagctgggacttgctgggctttgcagagtgtgtgggctgggggttcttc

SEQ ID NO: 1233 - DNA, 120 bp, synthetic construct
  source 1..120: mol_type = other DNA
taaaaaaaattaagctatttcataccataaaaccaacaggcagatgacaaagtgcaatttatatcactgattttctaaatagccttcggttctgtaagaaaaagtttaaaactgcagtag

SEQ ID NO: 1234 - DNA, 120 bp, synthetic construct
  source 1..120: mol_type = other DNA
ggcataaagcataaaatcaaggccaatgttacgtgctgccttgacatgtggtaaaatgtgaagggcctcaagtggcctaaatgcaagctcctgtcccacctctgctcccataaatagggt

SEQ ID NO: 1235 - DNA, 120 bp, synthetic construct
  source 1..120: mol_type = other DNA
tgataaaaagatctgagtctagggatacctaggaggtggaatctcttctccatgcatagcatgagtgatcacaggcctgaaaccaaaagggacttaggtctgggggagagattattttcc

SEQ ID NO: 1236 - DNA, 120 bp, synthetic construct
  source 1..120: mol_type = other DNA
gatggaaatataaacactgaatactcagagagtcaggccagcgagctggtgaggagactccatcaaactcaatatgaaaacatgggtgggcgtttggggatggataatgaatgacagctg

SEQ ID NO: 1237 - DNA, 120 bp, synthetic construct
  source 1..120: mol_type = other DNA
agaccatcttgctcacctttgtccccactccagcacccagaatgtttcaataaggttttcctgaattaagtgggaagcaaagtattagattcaataccactacaatgggaaagtgagtga

SEQ ID NO: 1238 - DNA, 120 bp, synthetic construct
  source 1..120: mol_type = other DNA
caaaaaccccacaaaactcaaggccttaaattgtaaatatgagatgccaggcattattcccaaaatctataaggaagcacaccaaccaccatgttaacattgtctattagtggtaggcct

SEQ ID NO: 1239 - DNA, 120 bp, synthetic construct
  source 1..120: mol_type = other DNA
tgtactgttcccaggatctgcatgtgggggtgccttcctgcatctccccatcagtggtaggtgctcctcccagccgcctctttcaggcctggagacagcggcctgcacctcaaccctact

SEQ ID NO: 1240 - DNA, 120 bp, synthetic construct
  source 1..120: mol_type = other DNA
tgtgctagatgcccactggaagcttataattatgatttattatatattaattatgtgccagacgtatgtgatgaggaatgaaagttttgaaaaaaagtaggtatgattcaaggtaagcac

SEQ ID NO: 1241 - DNA, 120 bp, synthetic construct
  source 1..120: mol_type = other DNA
gtgatgccaacatgtttgttccttttgcttggcatgtctgttgctattcaggctcttttgtggttctacatgaatggcagctttttaaaataactctgtgaagaatgacattggtacttt

SEQ ID NO: 1242 - DNA, 120 bp, synthetic construct
  source 1..120: mol_type = other DNA
gatgaatagttcagtatgtttcccctatttcacacttactactacaatgtttcaaacattataaagaggaaagaaaagttattgcaatggcaaataatctcatgatttctaagaaaagcc

SEQ ID NO: 1243 - DNA, 120 bp, synthetic construct
  source 1..120: mol_type = other DNA
ggctgcaaaaaaaaaaaaaaaaaaaaaaaaaaaaatccgttagcagaaatgattttttttaacttttttatttttattttttacataagtggttgcatcttttgctagccaaggccaaac

SEQ ID NO: 1244 - DNA, 120 bp, synthetic construct
  source 1..120: mol_type = other DNA
aaaaaaaaaaaaaaaaatcctgtccagtctttataagaagagagacgtggacacagacacgcggagagaaaaaggccatgtggagatggcggcagagatgagatgtgctgccaccagacg

SEQ ID NO: 1245 - DNA, 120 bp, synthetic construct
  source 1..120: mol_type = other DNA
cctctcctgcgttttaaccccatcaagcagccattttcatctggtttcccacattcatcaactcacctgcgatttacctaatttccaacgcaactatcaactctgattaggtagaagtca

SEQ ID NO: 1246 - DNA, 120 bp, synthetic construct
  source 1..120: mol_type = other DNA
aactgaactgaaatccacagctctattacaaggaattaatctggttactagaaccagggtagatgatcagaccaggcagggccaccagtaccatccacccatttttcctgagaaaagaaa

SEQ ID NO: 1247 - DNA, 120 bp, synthetic construct
  source 1..120: mol_type = other DNA
tttgagttataaatctaaaaagaaaagtgttctataaattctagcagtttggcaagaattttaactgccccgcccctgtgggtggtacaataactctaagaccactgctgacccgtcccc

SEQ ID NO: 1248 - DNA, 120 bp, synthetic construct
  source 1..120: mol_type = other DNA
agacactgagcaaactgtcgtaagctccaccaatactgctacttttattttcaatctagtgcagaggcttttgggggataatttcgaatcataattctctctcctaccacactgtacacc

SEQ ID NO: 1249 - DNA, 120 bp, synthetic construct
  source 1..120: mol_type = other DNA
gcgaaggtattttttaagcctgaggacccatttgggagttagattctggatcgagcctagggtcagttttccttgtgttaaataacactacttcacagaagggggaacgagaattcaggg

SEQ ID NO: 1250 - DNA, 120 bp, synthetic construct
  source 1..120: mol_type = other DNA
ttaaaagaaaaatgaagttactctaaaatgccatatgcaacaaaacagcttattcttgtagatggggctgccactggtggggtgcacctgcatttgttttgctcttacagcatgcccaga

SEQ ID NO: 1251 - DNA, 120 bp, synthetic construct
  source 1..120: mol_type = other DNA
ccaaagggcccagaacagtttaaggaagagttttttttccaccaaccaagagtagcatggtaatatgcagaaatctaacttcctaatatcaagtttagattttagacagcaagggtcgta

SEQ ID NO: 1252 - DNA, 120 bp, synthetic construct
  source 1..120: mol_type = other DNA
aggacctaaatccagaatacacatacatctctgaaaactcagtaacacaacagcccaataaaaatagggaaagtgtttgaaaagacacttcaccaaaggagatacacaaatggcaagcac

SEQ ID NO: 1253 - DNA, 120 bp, synthetic construct
  source 1..120: mol_type = other DNA
ttcgtcactactagactggccttacaagaaatgctcaaggaaatcctacatctggaagtgaaaagatgataaacactctcttaaaaacccacaaaagtataaaacatactggtacagcag

SEQ ID NO: 1254 - DNA, 120 bp, synthetic construct
  source 1..120: mol_type = other DNA
cagtgctaagagggaaatttagagcaataaatgtctacatcagaaaagtggaaagattttaaataaataagctaataatgtatttcaaggaaatacaaaagcaagaacaaaccaaacccc

SEQ ID NO: 1255 - DNA, 120 bp, synthetic construct
  source 1..120: mol_type = other DNA
gaggaggaaggacttcttccaaacttatgctataaggccaacattaccttgataccaaaaccagataaggacacaacaacaaaaacaacaggccaacatccatgataaacacggatgcaa

SEQ ID NO: 1256 - DNA, 120 bp, synthetic construct
  source 1..120: mol_type = other DNA
caaagggatacccccatgtttattgcagcactgttcctaatagacaagagacaaaatcaacctacaaatgtctgtcaacaggtgaatggataaagaaaatgtggtatatatacacagtgg

SEQ ID NO: 1257 - DNA, 120 bp, synthetic construct
  source 1..120: mol_type = other DNA
cagtaaacttctgcctagacaaccaggcatttccatacatcctctaaactcttggcagaggttcccaaaacccaatttttgacttctgtgcactgacaggctcaataccacatggaagct

SEQ ID NO: 1258 - DNA, 120 bp, synthetic construct
  source 1..120: mol_type = other DNA
cgtgtccgagggcaccaaggccgtcaccaagtacaccagcgctaagtaaacttgccaaattgatgcctgcagctcctggggaaagtggaagtcagataactcctttatgaaaaggcagca

SEQ ID NO: 1259 - DNA, 120 bp, synthetic construct
  source 1..120: mol_type = other DNA
cagtcagtcacgagagcagaaggagcaggttccaggattctggggagataagggtccaagctgagaactcccctgagaagtctgtatgcagacagccccgggtgatcctggctgtccaag

SEQ ID NO: 1260 - DNA, 120 bp, synthetic construct
  source 1..120: mol_type = other DNA
gctacggccagacccaccaggaggaagccccttgcaggctctaaggttaacgccgccaaaccaagtcctgatcctgagaggctggctcaggatgaggatgggcggtggtgtcatgcacag

SEQ ID NO: 1261 - DNA, 120 bp, synthetic construct
  source 1..120: mol_type = other DNA
catgttcaagaagacggtgtcattctgcagagcctggtccagcaggctgttgtccgtcttattgatccagtacacgttgggcctggggtagccgtttatggatgtacacgtgaaggtgag

SEQ ID NO: 1262 - DNA, 120 bp, synthetic construct
  source 1..120: mol_type = other DNA
ttctctgtgtggtcaagcctcactttgcccctctcttatgaggacctttgggatgacacgtagaacccacctggatgatccagggaggccttccacctcaatttaatcccgtcagcaaag

SEQ ID NO: 1263 - DNA, 120 bp, synthetic construct
  source 1..120: mol_type = other DNA
ctgtcccaagatgggagaggcgttcagtcatgttcactcaagtgaaggcttctattctacttccagatacacctttttaaccttcaaagggtccaattttaacctttcttccacaaagca

SEQ ID NO: 1264 - DNA, 120 bp, synthetic construct
  source 1..120: mol_type = other DNA
agtgatgagtgagtggtgagtgagtggtgagtggtgagtgagtggtgagtgatgagtgagtggtgagtggtgagtcagtggtgagtggtgagtgagtgatgagtgatgggtgagtggtga

SEQ ID NO: 1265 - DNA, 120 bp, synthetic construct
  source 1..120: mol_type = other DNA
attgtatgcagctacgccaaaatattttctttgtttttataagaatttttcatgtttaagatccccttccccttccccctccccgtcccctgcccctcccctccctctccctcctccccc

SEQ ID NO: 1266 - DNA, 120 bp, synthetic construct
  source 1..120: mol_type = other DNA
ctgccctgtgcaggcctcagggaggagagggagaaagagagatgacaaaagcaagacagaagaaatgcagcaaaagcacacacacacacacacacacgcacacacacactgacactcatc

SEQ ID NO: 1267 - DNA, 120 bp, synthetic construct
  source 1..120: mol_type = other DNA
atacacattttatgcatgtaacaagtatttgtatgtaccctacaaagaggtaaaatattatgtgtcagtaagatggagaggttatgcccaagcctccagagaggggctccttggatccac

SEQ ID NO: 1268 - DNA, 120 bp, synthetic construct
  source 1..120: mol_type = other DNA
gggctttccccaggtgggtgtgggttttccctgggtggggtgggctgggctcccctgctggggttggcaggttttggtcgggacttttctcttcaaacagattagaaacccggagttatc

SEQ ID NO: 1269 - DNA, 120 bp, synthetic construct
  source 1..120: mol_type = other DNA
caacacaaaaacaaaactttagctgatttccaatcaaatcataatttccttcctagaacacgaatagactgttttgaagtgatttaactcgcaacgttgtcgatgcagcagattattttt

SEQ ID NO: 1270 - DNA, 120 bp, synthetic construct
  source 1..120: mol_type = other DNA
accagaattatatgtaagcaaacaggcatgactgagctcctataaaactttactcacaatgccataatgcagattggatttagtctgtagcctatagtttgctgggattgatggaaggtt

SEQ ID NO: 1271 - DNA, 120 bp, synthetic construct
  source 1..120: mol_type = other DNA
ctgcagtcctggaagcccagaggcctgggcagcaggaacagtggagacagcagtgtgggggacgtccccctcctctccccaccatcctcgtcaggcagaggccagggtgcagggaccacc

SEQ ID NO: 1272 - DNA, 120 bp, synthetic construct
  source 1..120: mol_type = other DNA
aagtggcctaaatggtcagtgcaaaggccctgaggcaggtggcataggctggtgagcgataggcagagagtgaatggagtagggtggggagaagaggatgaagatgcaggctggggccca

SEQ ID NO: 1273 - DNA, 120 bp, synthetic construct
  source 1..120: mol_type = other DNA
caagactctgtctcagaaaaaaaaaaaaaataagggggtgagaggggctataaaggctctgaggtccacgctctggaggcccacaaagtcttttctgcatcatcttgtttgtcagagcaa

SEQ ID NO: 1274 - DNA, 120 bp, synthetic construct
  source 1..120: mol_type = other DNA
ttttaaattgggctggtaagtctattatgtttctccttttctgccttcttttggattagtatcttttaaaactccttttaacttatacgctgactcatattttttattaagacagtctca

SEQ ID NO: 1275 - DNA, 120 bp, synthetic construct
  source 1..120: mol_type = other DNA
agccaccccgcttggctttcctttccttcacactgcatgtttggtcatttcactattctgatcactgattttctcttcttacctgctgctgtttagctgatcttttggagtttctctttt

SEQ ID NO: 1276 - DNA, 120 bp, synthetic construct
  source 1..120: mol_type = other DNA
acacacacacacagctgcagaagaaacatacacacacacacatactgagctgaaggaatacacacatacactgagctgcagaagaaacatacatacacacactgaactgaagaaatacac

SEQ ID NO: 1277 - DNA, 120 bp, synthetic construct
  source 1..120: mol_type = other DNA
tgctcacacgtgggtcacaggacccagaaacaccgagcgtggctaagacagagacaccccagcgaggtccccttgctcaggcctctgccccagagaccgagtctctcaggaacctctgac

SEQ ID NO: 1278 - DNA, 120 bp, synthetic construct
  source 1..120: mol_type = other DNA
gaacaggatgggtctgaaacatatcaaagatcacccaagtggcaggcggggcagaactggggacctgaacaccatcactgggcttatccacatccgctctgagagaaccatcagaaaaca

SEQ ID NO: 1279 - DNA, 120 bp, synthetic construct
  source 1..120: mol_type = other DNA
actacctgagaccagggcagccccacatcttcttcaggtgaggagatccttcgaggatttagaaacctgcaccagtaacacatacacttgtaccccctgtgaaagactcaaccaaatgtg

SEQ ID NO: 1280 - DNA, 120 bp, synthetic construct
  source 1..120: mol_type = other DNA
ggcttctcaaagcctctgctcctgctctccgtgaagacagcaacagagtgagaccctgtctcaaaacaaaaattatgtattttcagatagcttgaaggagaatattgagtgttcgtaatg

SEQ ID NO: 1281 - DNA, 120 bp, synthetic construct
  source 1..120: mol_type = other DNA
caaggcccacggagtttctttggggtccggaaatactctggggctagagagtggtgatgtttgctcaaccttgtgtatagactaaaaaaccattcaatatctcaataaagctgttatatt

SEQ ID NO: 1282 - DNA, 120 bp, synthetic construct
  source 1..120: mol_type = other DNA
caccctctacagcagaacagcttggtggccgacagttcggacctcagagctggaccctgacactcctggcagggtggtcctgggcattctcctctctgtggggtggggatccctatccac

SEQ ID NO: 1283 - DNA, 120 bp, synthetic construct
  source 1..120: mol_type = other DNA
tggtatatccatacagtggaatattatttggcaataaaaaggaatttgaggtgataccaatgttctaaaatgtattgtggtgatggctacgtaactgtgcatattctaaaggcaattgaa

SEQ ID NO: 1284 - DNA, 120 bp, synthetic construct
  source 1..120: mol_type = other DNA
tgctgggattacagatgtgagccaccgtacctggcctacatagcaacttttatttatgtttttccttgaagcggagtcttgctctgttgctagtctggagtgcagttgcgcaattctcct

SEQ ID NO: 1285 - DNA, 120 bp, synthetic construct
  source 1..120: mol_type = other DNA
caggcctggagaactgcataggtgcaggactgccagtagttcttcctgctctttgatcattgaaatgttttcttttgtgaagtaatgatggtagaagatgatagggtttctgtttgtttc

SEQ ID NO: 1286 - DNA, 120 bp, synthetic construct
  source 1..120: mol_type = other DNA
cctgtgaaagcctctgtctggaggtttcattggaagtaaagtttacatacaattaagggcctaaaattgtattttcatttaccttaacccagattcccagcaagctagagagctgccctc

SEQ ID NO: 1287 - DNA, 120 bp, synthetic construct
  source 1..120: mol_type = other DNA
aggaaaggagagcagttggcatgttggctgttccgtaaacagggccgtgtgtctgctctaacagatggcctgggaaggtaaccccgaggctttgtgttccttcctgcagaccttcaggat

SEQ ID NO: 1288 - DNA, 120 bp, synthetic construct
  source 1..120: mol_type = other DNA
ccccagctcactcggggtctcagagctgatccatgagcggaggctgagatcctgggatcttgtcccccagcctccctgcaaccttaatccctttctgctgaaagagatggggccggacct

SEQ ID NO: 1289 - DNA, 120 bp, synthetic construct
  source 1..120: mol_type = other DNA
atttattttttttatacgtgcacccatgctcttcaggtctgatgaagtatccaaaatcaagctcctgaccatcctcaaacctgccccttctgcagggtttacctcgctagtcggcgccat

SEQ ID NO: 1290 - DNA, 120 bp, synthetic construct
  source 1..120: mol_type = other DNA
tagaggctcttttcagctagcatttgttgaacaaatgcgcaacagtggaaaaatgttcccttgtcttctcttctaatacccttcagtctgggagtggagaggccctgcggctcagaaaag

SEQ ID NO: 1291 - DNA, 120 bp, synthetic construct
  source 1..120: mol_type = other DNA
cagaaggtgtcgtagagatgccttagagtccaacttcctttttattgtagatgagaatactgggtggccaagtgacttagattgaagacagcacttgttagaaggaagactaatgggttt

SEQ ID NO: 1292 - DNA, 120 bp, synthetic construct
  source 1..120: mol_type = other DNA
aggtaggagcagctcagtttctagatcgagggaaataatagtcttgctgagctctgtgcttgccagaccagatctgtcttgtatctgtgcccacttccgaggtgcctgtcatactttgat

SEQ ID NO: 1293 - DNA, 120 bp, synthetic construct
  source 1..120: mol_type = other DNA
ggagagctactttttattcccccaaaccttgactttcctggactagaggtctcagtgatgtgtgctgatgtgacacccttgagcaaagttggagaagagagagtggtaatttccaccact

SEQ ID NO: 1294 - DNA, 120 bp, synthetic construct
  source 1..120: mol_type = other DNA
ctctcaagaaacagaaccgatagcatatatatatatctctccagtaggacagagagcgagatgtttatatatatagtatatttaactatatttaaccaatatatatgattgtgtcatgcg

SEQ ID NO: 1295 - DNA, 120 bp, synthetic construct
  source 1..120: mol_type = other DNA
ggggaaaaaaggctatacatgctagtcagaccaatagaagcaccaaagtcaatttaatcatttgatggctcatgtaatatttgctgagtattcatcaggcccagggtggggagagagcat

SEQ ID NO: 1296 - DNA, 120 bp, synthetic construct
  source 1..120: mol_type = other DNA
ggggccgggcatttgctctggaggtgaacctggaggagggcagggggcgcggacgctgggcaggggccgggcatttgctctggaggtgaacctggaggagggccgggggcatggatgctg

SEQ ID NO: 1297 - DNA, 120 bp, synthetic construct
  source 1..120: mol_type = other DNA
acctggaggagggccgggggcatggatgctgggcaggggccgggcatttgctctggaggagggccgggggcatggatgctgggcaggggccgggcacttgccctggaggtgaacctggag

SEQ ID NO: 1298 - DNA, 120 bp, synthetic construct
  source 1..120: mol_type = other DNA
gagttgtggctgcagcacagcctcataggcatatgtgtgcacatttgttctctgaacacacaggggcttcacatgtgtgcacgtgtgttctgaataaccaggtatgaattgggtacatct

SEQ ID NO: 1299 - DNA, 120 bp, synthetic construct
  source 1..120: mol_type = other DNA
gtcccctctgggagagttgtagctggccaggctgggaccgtcctgttgtagctgccggagtcccctctgggagagttgtagctgccggagtcccctctgggagagttgctgctggccagg

SEQ ID NO: 1300 - DNA, 120 bp, synthetic construct
  source 1..120: mol_type = other DNA
tcccctctgggagagttgctgctggccaggctgggatggtcctgttgtagctgccggagtcccctctgggagagttgctgctggccaggctgggaccgtcctgttgtagctgctggagtc

SEQ ID NO: 1301 - DNA, 120 bp, synthetic construct
  source 1..120: mol_type = other DNA
actttattaatgtatgccaacaatggtggcaacctgtccatcccatgtgttcttttaaccatatgattctggttccccactgagagatgccatctgtttcttccctctgtgactatggac

SEQ ID NO: 1302 - DNA, 120 bp, synthetic construct
  source 1..120: mol_type = other DNA
gcctgagaacccagccagggaattcacgggtaggaacttctacaggacacaggtatacagagctcctttttcctttctcagccctttcctcggctgcatttttctcttggagcgactgct

SEQ ID NO: 1303 - DNA, 120 bp, synthetic construct
  source 1..120: mol_type = other DNA
attacaaagaggaaatcgtaaatttaaaatgaaatctggcagacaccaacctaagcggtgaacagagttaacaacattaatgggaccaactgacattatatgctgattacgacgcactga

SEQ ID NO: 1304 - DNA, 120 bp, synthetic construct
  source 1..120: mol_type = other DNA
tcccaaatatgagtgagaacatgtgatatttgcttatccatgcttggcttatttcacaacacagtgacttccagttccatgcctgttgctgcaaatgacaggatctcattctttttcatt

SEQ ID NO: 1305 - DNA, 120 bp, synthetic construct
  source 1..120: mol_type = other DNA
ttgatgggccatcctgggtcttcccttggcacccttgtgcaatcggctacatcgttttctttccagtagagagaactgtgcctcttctaggtcagacaccagagttcttggaaccttctg

SEQ ID NO: 1306 - DNA, 120 bp, synthetic construct
  source 1..120: mol_type = other DNA
gatttagggggtcaggaaaatagcagggtctagcaagacaatacaccaccgggatatactgacctttgacctaccacttggtgtgtgcatcacagagcacattagaaagggggaagagat

SEQ ID NO: 1307 - DNA, 120 bp, synthetic construct
  source 1..120: mol_type = other DNA
agtggcagaacttgtcagaatccagcctacaaaagaagtatttatcaaaggctctctttgttttttaaacattaaaaaaaaaactccctctccctctccccctccccctccctctccctc

SEQ ID NO: 1308 - DNA, 120 bp, synthetic construct
  source 1..120: mol_type = other DNA
agtcgttggatagagtcatgaaaacaaattggtttccagtgcacagttctcttttagtaatttctttgtattgcacatcttcagttattcatcagctgaaagggcaaagagttaccacac

SEQ ID NO: 1309 - DNA, 120 bp, synthetic construct
  source 1..120: mol_type = other DNA
attcacgtctgtttgctttagtctgtgccataaaattgatggcagcaagcccacagtttcagggatgagtctaggaactgccagaaaatgtcctggaaacttagttttgtagtagcatat

SEQ ID NO: 1310 - DNA, 120 bp, synthetic construct
  source 1..120: mol_type = other DNA
tggtatatgtgtgtgtgggtgagggtgaggtgtgtgtatgtgtgtggtgtgtggtgtatgtgcgtgcgtgtgtgctgtataagtgtgtgtggtgtgttatgtgtgtataagtgcgtctgt

SEQ ID NO: 1311 - DNA, 120 bp, synthetic construct
  source 1..120: mol_type = other DNA
attgtgtgcacttagaccctgggatgagtcctctaaccgccgctaccggaccgtccatctatcccttgctgaatggcactggggtcatttctctgtctccagctcctggcccagtgccat

SEQ ID NO: 1312 - DNA, 120 bp, synthetic construct
  source 1..120: mol_type = other DNA
gctgcggaagtgtcggtgacaggaagagaggtggcgtgacctgtggatgctgaggaagggctggtgacatgaagagaggtggcgtgacgtgtggataatgaggaagcattggtgacagga

SEQ ID NO: 1313 - DNA, 120 bp, synthetic construct
  source 1..120: mol_type = other DNA
gtcatttcctgctctatggtctccatccccccctcaggccgaccccatcagtcacttcctgctgtatgtctccatcccctcctcaggctgacccccccaccccatcagtcatttcctgct

SEQ ID NO: 1314 - DNA, 120 bp, synthetic construct
  source 1..120: mol_type = other DNA
ccccatcagtcacttcctgctctatggactccatccccccctcaggccgacctccccgatcagtcacttcctgctctatggtctccatctccccctcaggctgacccccccgatcagtca

SEQ ID NO: 1315 - DNA, 120 bp, synthetic construct
  source 1..120: mol_type = other DNA
tcagactgtcccacactctgactgacagctggcttcagactgtcccacgctctaactcgacaactggttccagactgtcctatgctctaactcgacacctggcttctgactgtcccacac

SEQ ID NO: 1316 - DNA, 120 bp, synthetic construct
  source 1..120: mol_type = other DNA
atggtgatgatagtgatgatggtgatgatagtgatggtgatgatgtgatggtgatgatggtgatggtgatgatagtggtgatggtgatgatgtgatagtgatgatggtgatgatggtgat

SEQ ID NO: 1317 - DNA, 120 bp, synthetic construct
  source 1..120: mol_type = other DNA
gtggtgatggtgatggtgatgttggtgatgatggtgatagtgatgatgtgatggtgatggtgatggtggtgatgatgctgacagtgaaagaagctagatttgactgatcactcaaaatat

SEQ ID NO: 1318 - DNA, 120 bp, synthetic construct
  source 1..120: mol_type = other DNA
ccagtagccctccatcactgaggcagaggttaacccagtagccctccaacaccaaggcagaggctaaccagtatccctccatcaccgaggcagaggttaacccagtagccctccatcact

SEQ ID NO: 1319 - DNA, 120 bp, synthetic construct
  source 1..120: mol_type = other DNA
gttaacccagtagccctccatcactgaggcagaggttaacccagtagccctccgtcactgaggcagaggctaacccaatagccctctgtcaccgaggtaaaggctaacccagtagccctc

SEQ ID NO: 1320 - DNA, 120 bp, synthetic construct
  source 1..120: mol_type = other DNA
ggagagtgaaacatagaaatatctggggagaacatcctaggtaaaaggaacagcatgtgcaaaggccttgaaaagcagcaagccgctctccctctccctctccctctccctctccctctc

SEQ ID NO: 1321 - DNA, 120 bp, synthetic construct
  source 1..120: mol_type = other DNA
ctctcagaagcaaaaaaaaaaaaaaaaaaaaaaaaaaaagcaatcttgcagatatctgacgagtctaagctgttcaaagatatgttgcatggagaaaatagaatagtagaaacctagaca

SEQ ID NO: 1322 - DNA, 120 bp, synthetic construct
  source 1..120: mol_type = other DNA
ataaaaccccctaagaatactaaataattgtttttaagcaaaaacaagaaatattttgatgtctggttactgctttatctagtttttaatcataaatgactgccctatccattcctcatt

SEQ ID NO: 1323 - DNA, 120 bp, synthetic construct
  source 1..120: mol_type = other DNA
gattgctgcacattctttttggcacaagttgcctttgtcaatcaagatatttactgtgctggcgactataagaatagggcgtccggggaggagccaagatggccgaataggaacagctca

SEQ ID NO: 1324 - DNA, 120 bp, synthetic construct
  source 1..120: mol_type = other DNA
attcagccatcttggctcctccccatgatttttctttataataacaattaacctaacataaacgaagactggaactcctatctcctgtttccatgttcagtgcttgtttcaagtattcca

SEQ ID NO: 1325 - DNA, 120 bp, synthetic construct
  source 1..120: mol_type = other DNA
cctattcggccatcttggctcctccccactaaaacttgcatcttaatgatatttttaccaatgttccatgagcaatgtccatggcatgacagaaaggaactggcacgctaaaaaaaatcg

SEQ ID NO: 1326 - DNA, 120 bp, synthetic construct
  source 1..120: mol_type = other DNA
cataatgaaactgaacttcaaaatgagccagtattcaaaaaaccaggagattcacagcaaccaatcagaaagggcctggtttacctaactaagggatctctgttttttgttttttttttt

SEQ ID NO: 1327 - DNA, 120 bp, synthetic construct
  source 1..120: mol_type = other DNA
gtgttttcccacgcttgcagtcagaaattgtgtcttttcatctttgtacatgcaacattgagtcccatgtctggcacctaacaagtgttgcatagaaatgaagtcctctggtttataaag

SEQ ID NO: 1328 - DNA, 120 bp, synthetic construct
  source 1..120: mol_type = other DNA
acataagaactttgatgtctcttccttgaggcataaactatcttcataactatttcccttatgactgtgttttctgatccccacttattatagtttaaaaaaagaaaaacaaagaaaaac

SEQ ID NO: 1329 - DNA, 120 bp, synthetic construct
  source 1..120: mol_type = other DNA
cccaataggtttggtcataggaaattttactttcatacaccagacaccataaacaaagttgaagataagcaaaaattatatgcaatatatacataacaaaggatcagtagccctaagaga

SEQ ID NO: 1330 - DNA, 120 bp, synthetic construct
  source 1..120: mol_type = other DNA
tcttttgcctttggaccctggaacttgcatcagcagccttttgggagctctcaggcctttggcctcagactagtggctgcactgtcagcttccctggttttgagactttcaaatttggac

SEQ ID NO: 1331 - DNA, 120 bp, synthetic construct
  source 1..120: mol_type = other DNA
atcagctagaatatttaagaaaaaaaataaagaagactcaacttcttttaggaacaaaagagaagacattgcaacagatattacagaaataaaaaggattctaagagtctactatgaatg

SEQ ID NO: 1332 - DNA, 120 bp, synthetic construct
  source 1..120: mol_type = other DNA
ggttttgactatgagtacaaatatacatattcctccaagttgcctaactgttcagcacgatgttagggactacctgctgcaattttctttgtgaacatctgcaagactctgcatggtcca

SEQ ID NO: 1333 - DNA, 120 bp, synthetic construct
  source 1..120: mol_type = other DNA
ctaatgctctgacggggcggggctcacagtactcctctgacggggcggagctcacactaatgctctgacggggcggagctcacactaatgctctgacggggcggggctcactaatgctct

SEQ ID NO: 1334 - DNA, 120 bp, synthetic construct
  source 1..120: mol_type = other DNA
acattaaaaaacaaacagtcctattaggaaacggctgaaaggcaagaatactcatttcatcaggaggatacgctgatggcaatgagcacgtgaagaggtgctcgacatcacaccctggag

SEQ ID NO: 1335 - DNA, 120 bp, synthetic construct
  source 1..120: mol_type = other DNA
gcacccacacggccccgcccaggcctgcgggctggccttgctgatggtgaacggggaagagcaggccagatttaaatcaactcccgacagattcgaggcaccgctgaaaaaggcactccg

SEQ ID NO: 1336 - DNA, 120 bp, synthetic construct
  source 1..120: mol_type = other DNA
acccagttgctccccacaagctgttccccccagctgctccccccagctgttccccctccgctgctcccccccagctgttcccccccagctgttctcaggtttctcatccttcctggatga

SEQ ID NO: 1337 - DNA, 120 bp, synthetic construct
  source 1..120: mol_type = other DNA
catgttgcactactttgcctgggtagttgaccaacaaggtgatggatggcaaacacctgctttcgctgtgggtggctggaacttccctgactgacccccaggttcaggagagcctccctg

SEQ ID NO: 1338 - DNA, 120 bp, synthetic construct
  source 1..120: mol_type = other DNA
aggtgtgactgaggcatggactgtgagttgtgaatgtgaggtgtggactgagagttgtggactgtgagatatgacctgtgtgcagtgtgaccaggggagagaggtgcatgagagatggtc

SEQ ID NO: 1339 - DNA, 120 bp, synthetic construct
  source 1..120: mol_type = other DNA
cagattaataacaagtagcgagattgaaacagtaataaaaaaattgccaactaaaatatccaggatgtattcacagctgaattctaccaggcatccaaagaaggactggtacctatctta

SEQ ID NO: 1340 - DNA, 120 bp, synthetic construct
  source 1..120: mol_type = other DNA
aggaggctttgcaaggtagactctacaggcaggaccttgatggagggtggggtttcagggtagaagacctggatcacaggggcacctgagctcctgcaggacaaaacaaagtcactcttt

SEQ ID NO: 1341 - DNA, 120 bp, synthetic construct
  source 1..120: mol_type = other DNA
tgtctagaattttatttccccttcttggattcactgggctttatgaatctgtgagttggtgtcttctaacaatgttggcaaattctcagccaaatctccttaaatatgacatcttcccaa

SEQ ID NO: 1342 - DNA, 120 bp, synthetic construct
  source 1..120: mol_type = other DNA
acaatggttgactaagccacggtatatgcacatcatgagagggtgaatttcctgacaagaataaaacacatctatatgaaacgtcatgagtgtaatctatgccatattgttgaagaaatt

SEQ ID NO: 1343 - DNA, 120 bp, synthetic construct
  source 1..120: mol_type = other DNA
tgggactccctgcagtgatgggaggaatatggcaggcaggctggggactgagatgtgaggtgaaggcaggaaggaggctgtgtcagtgtgagagagtgtgactgtgtgcgagtgtgtgtg

SEQ ID NO: 1344 - DNA, 120 bp, synthetic construct
  source 1..120: mol_type = other DNA
aggactgagaaaacagtaacacaaattaaaaaaccaaggtattcaggcaacaactagcatgatcaataaaacagtacctcacatccaaatgctaacactgaatgtaaatggcctataagc

SEQ ID NO: 1345 - DNA, 120 bp, synthetic construct
  source 1..120: mol_type = other DNA
gcctgaacagcgggagactgagcttgcagcagaaccatgattacggctctggacggggctcacccatggcgggaggaggcggtcccagggttcgcccttggaaagctaatggccctcaca

SEQ ID NO: 1346 - DNA, 120 bp, synthetic construct
  source 1..120: mol_type = other DNA
tgctcagatctccagccacagcacgagcctctcaaggccccacggtttacacctctgctttgcacatggtgggatttctcaagcacatgaaaacactctgtttggtggacagggcctcag

SEQ ID NO: 1347 - DNA, 120 bp, synthetic construct
  source 1..120: mol_type = other DNA
atactaaccttgaatgtaagtgggctaaatgccccacttaaaaggtaaaggggggcaagctgaataaaaaagcaagactcaatggtatgctgtctttgagacctatctcacatgtgatga

SEQ ID NO: 1348 - DNA, 120 bp, synthetic construct
  source 1..120: mol_type = other DNA
actaatctctaatgcttgtgagtagattctgaactcatcatttagaaagctaaactgggggctttcttcccagagcaaagacataaaacaaacctcaattgagcgtgggacagggagtca

SEQ ID NO: 1349 - DNA, 120 bp, synthetic construct
  source 1..120: mol_type = other DNA
ctgaatgcagatgccatgttttcattatttgatagagataaataaacatggaaattgtattacaatttataccaaactgcaaggggccaggtgagtcaaccaaattatacggacatgtca

SEQ ID NO: 1350 - DNA, 120 bp, synthetic construct
  source 1..120: mol_type = other DNA
agcacaaaccatgtagtttaattgccaggaggtctgtcattaaacatgacaatgtttaataggagattagacttctcactgaatgtgtttgtttcccaggagcactgccttgcgaaaggg

SEQ ID NO: 1351 - DNA, 120 bp, synthetic construct
  source 1..120: mol_type = other DNA
atggtctgtaaaggggaggcatgaataatctgaataatctaccccttgtttagtatataatcaagaaaataatataaaaacaagcaaccatcagccctcagggctgctctacttatggag

SEQ ID NO: 1352 - DNA, 120 bp, synthetic construct
  source 1..120: mol_type = other DNA
ggagcatggtgaataacgaatttttaccttaggagttcacttgagtagtcatttttatatttgtgactgcaagtcacttttaggggctgtacttccttagtactggtagcattattatcc

SEQ ID NO: 1353 - DNA, 120 bp, synthetic construct
  source 1..120: mol_type = other DNA
aattgcatttgccgtatacttttattagtcccttattgactgaaatgtctttatgactttgtgactgtaattctagaactctaagttcctttggagactgaaaaagcccaaaaaatttcc

SEQ ID NO: 1354 - DNA, 120 bp, synthetic construct
  source 1..120: mol_type = other DNA
tccaagcaggagtcaccaaggcacatacacctttctttaaggaaacatcatcttccatgtttcacttattttcttcctgtcttttaaatcaacagtttatgggttttttttttccctccc

SEQ ID NO: 1355 - DNA, 120 bp, synthetic construct
  source 1..120: mol_type = other DNA
aatgccccagtaaacatattcctttgtgtctgtcgttaataggctgctgctgatgaatacaatagactgaagcaagtgaagggagtaagtatccgagattgttcttttaggaagaacttt

SEQ ID NO: 1356 - DNA, 120 bp, synthetic construct
  source 1..120: mol_type = other DNA
aaacccaggttagaagacagaactgagcaaatagaatcagctgcctgtgtggttagtgatactgccaggcaccttgcgtattttacttcaattaacactcccagcaattctcttgactaa

SEQ ID NO: 1357 - DNA, 120 bp, synthetic construct
  source 1..120: mol_type = other DNA
tcaattgtgacttgaactgtatcttacaggaatgttcaatttctatacatattttataaggtattaaacctggtgttttctttccataataacctgtttgatgttattagtgctgttaac

SEQ ID NO: 1358 - DNA, 120 bp, synthetic construct
  source 1..120: mol_type = other DNA
gagcttgtgaaggcagaggaaggtaactttcgtctggggagccgcagagtagggagggaagctgcaggccgtctctccctaagtaaaagcgcgacttttagaaatgatggttcagggttc

SEQ ID NO: 1359 - DNA, 120 bp, synthetic construct
  source 1..120: mol_type = other DNA
ccaacaggctggtgaaaccccgtctctactaaaaataaaaaggttagctgtggtggcgtgtgccttaatctcagctattcgggagacagaagagacagtagaatcgcttgaaccctggag

SEQ ID NO: 1360 - DNA, 120 bp, synthetic construct
  source 1..120: mol_type = other DNA
gcataaaattacctttacatgactcaaggactttgctttatttacccaacctcgtagccctgtttatatggctgcttaataagtaacgtgaagggtggttcctctgtcttctctaggtga

SEQ ID NO: 1361 - DNA, 120 bp, synthetic construct
  source 1..120: mol_type = other DNA
gttgtgagtaaccaaaagaatgtcacactagcttaagtgcagaaggaaaattttgggctatgttcaaaggtgggccaattccatatatagttgctgcatatgttggggtcctggctttgt

SEQ ID NO: 1362 - DNA, 120 bp, synthetic construct
  source 1..120: mol_type = other DNA
tagagagccaggagatctaggtttgggtgctgctggtcctgcagttaagcaggcatatgtctttgggcaagtcatttcacttgtttagattaattttctcacttatgaagtgagggattt

SEQ ID NO: 1363 - DNA, 120 bp, synthetic construct
  source 1..120: mol_type = other DNA
gacgtgaatcatcccttggtcctgtagatcctcacagtatatgctgcccacccatgtaatggcctaagtcatcagattaactgttgttattgactgtcaaaactattgcagtgtttgtgt

SEQ ID NO: 1364 - DNA, 120 bp, synthetic construct
  source 1..120: mol_type = other DNA
ttacatagaacgtacagttcgttatgtctatgaaggtgtttttttttcccttttcatcttgttaggcacgtaccatgttattttagatgaaagccattacaaagagttgctcacacatca

SEQ ID NO: 1365 - DNA, 120 bp, synthetic construct
  source 1..120: mol_type = other DNA
gagtcctttaggaatgttaacccttctcagtcacccgatgcaaatatttttcttgttggttatttgcctttacttttatttatttgttttgatatgtagatacatttacattttttatgt

SEQ ID NO: 1366 - DNA, 120 bp, synthetic construct
  source 1..120: mol_type = other DNA
caaaagataggcaatgaagactatctctatatacttgtatggagtgatcttcaggataaattactaagtaaaacagtagtttgagagaattttgtagtatgctgctaatcacctaagaag

SEQ ID NO: 1367 - DNA, 120 bp, synthetic construct
  source 1..120: mol_type = other DNA
gtctctctgcttaatgtgttaggtcttactttggtgtctgctccccacttggcacggtcttaccatcatttgtttcctttggatgcttttcaagaaattcccctagaagaatataatgga

SEQ ID NO: 1368 - DNA, 120 bp, synthetic construct
  source 1..120: mol_type = other DNA
cctgggtaacaagagcgaaacttcgtctcaaaaaaaaaaaaatctggcataacataatttatctaaaatctttaagtatttttacgaatgctatttgtgtgaaatacaacaaataaggtc

SEQ ID NO: 1369 - DNA, 120 bp, synthetic construct
  source 1..120: mol_type = other DNA
ctgtgtgccaaaatgttttctgtgtggactgtgatgtttttgttcatgattctctacactgttgccctggctgtattcataagattccagctccttcaggtgtttgattccagcatgtag

SEQ ID NO: 1370 - DNA, 120 bp, synthetic construct
  source 1..120: mol_type = other DNA
catcaagcagtcctcattagcagtggaagtccttgtagcagtccactagtacaatttgggtgcaaggagataagatcctccacaggcatcaaggaaccaatatctcttaacaattccata

SEQ ID NO: 1371 - DNA, 120 bp, synthetic construct
  source 1..120: mol_type = other DNA
ctggtttagaaggaaggccttcattagttaccttttgagaagttactagaactctctattagagacttaccctcctgacctgataaaaagggatacccatgtctctattaacagctttat

SEQ ID NO: 1372 - DNA, 120 bp, synthetic construct
  source 1..120: mol_type = other DNA
taggaagtagaacctgaggcaaagatgaaagtattgttactttattagggagggacagatctaggggggtgagagtgtggaagaaaagggaaagcaaagcaaggaaaaacgtgatgcatt

SEQ ID NO: 1373 - DNA, 120 bp, synthetic construct
  source 1..120: mol_type = other DNA
gcttcagtgtggcttgttaggggttctcaatcctggctgcacattagaatcacctgggaaaccttgacagctactcaagccttgcgttatgctcagttttgattttttgtttttttaaaa

SEQ ID NO: 1374 - DNA, 120 bp, synthetic construct
  source 1..120: mol_type = other DNA
gcttgacacacagtagatgttgaatgcatggccgtttagtctgtttttaaaatatgggtccatggactcatgaatcacctaacccaggtagtctggtcatagttcacagtttatatggca

SEQ ID NO: 1375 - DNA, 120 bp, synthetic construct
  source 1..120: mol_type = other DNA
cttatagacttttccctcattgtagggactctgagatcatgcaagaaaagcagaaggcagctaatgagaagaagtctatgcagacaagagaaaagtgatgactggctatttggaaaacct

SEQ ID NO: 1376 - DNA, 120 bp, synthetic construct
  source 1..120: mol_type = other DNA
ctcagcctcttctaaaacttgagtcttgatggtagttataaatttggaaatatgtaacctagagaaattaaggtttgagaccttgctgcactctgaagtaaacacaaaactatgtcagag

SEQ ID NO: 1377 - DNA, 120 bp, synthetic construct
  source 1..120: mol_type = other DNA
tgtaccacaaagattctttgtgggcctggtttctgtaattctgtctccagaatttctacacagactaataagccataagtacaaaaaaacttttcatgctttaagctcttttctttgcct

SEQ ID NO: 1378 - DNA, 120 bp, synthetic construct
  source 1..120: mol_type = other DNA
acttggacaagactgcttgctggtacataagttctggaacacttccttgcagcagtctggctgagccttggtatttaaaagaaatttacctaccagcctggctataattgacataatcct

SEQ ID NO: 1379 - DNA, 120 bp, synthetic construct
  source 1..120: mol_type = other DNA
tatcaggttgaacttctgacatgtatatttagtttttatgtcacttggagtgcctccaactgaagttacatgggttaggtacccatccctcagcaagaggagggcaagttgatggtaaaa

SEQ ID NO: 1380 - DNA, 120 bp, synthetic construct
  source 1..120: mol_type = other DNA
tatttgggaagtctgaaatgaggtctcctggccctggtgtgcccttaatgcctgtgacagttggcctctgtgaatattggtataattgtaaataatgtcaaactccattttctagcaagt

SEQ ID NO: 1381 - DNA, 120 bp, synthetic construct
  source 1..120: mol_type = other DNA
ctacaaacaattctgcgatgtggattatcgtacttattcccatttattggtgctttcatttctataagaatggatttttaaagatagaattccttgggaatagttatgtcaaagccaaat

SEQ ID NO: 1382 - DNA, 120 bp, synthetic construct
  source 1..120: mol_type = other DNA
ggcattaggccagggtgaagcaggggaaccacttaggagtctgttaagatgatctgaacttcagaacaagatgttattaacagagtgaaagtatttggattctgggtatattttgaaatc

SEQ ID NO: 1383 - DNA, 120 bp, synthetic construct
  source 1..120: mol_type = other DNA
gtcgctgggcctaaaggagtgagccaccacgaaattttattataaatggagggtagagaaattgggcaataaatggagggggaagtgagttaagaggaattttaattatgtgtgtgtggt

SEQ ID NO: 1384 - DNA, 120 bp, synthetic construct
  source 1..120: mol_type = other DNA
atcaatgtactgccagtcctaatgaagtggaatgattgtccccatcaaatcactagtaggagtaagttgcagagcctagaaggtgatggttaagagagtgggattcttgaaactgcattt

SEQ ID NO: 1385 - DNA, 120 bp, synthetic construct
  source 1..120: mol_type = other DNA
agctacagtagctggggactgagcagctagggattggcaggctatctctttttttcatgtagtctcatgaagatttctttatgtggtttcaatgtgtgggctggtttggatttccttata

SEQ ID NO: 1386 - DNA, 120 bp, synthetic construct
  source 1..120: mol_type = other DNA
attttgtaacttagtctttttgcttagaggctctctgaggatgggagggggttcttcctcccatccctaggaatttttcttttttttaaattcctaatcactagaccaccaggaagattg

SEQ ID NO: 1387 - DNA, 120 bp, synthetic construct
  source 1..120: mol_type = other DNA
agtatgttcatgttgttgcgcaatagatcttcggaagtttttcgtcttgcaacctgaaactctacccattagcaaattcccatttctccttacacttagcccttggtaatcatcattctt

SEQ ID NO: 1388 - DNA, 120 bp, synthetic construct
  source 1..120: mol_type = other DNA
ggagggtcatttgaacacaggaatttgaggggagaaaaaaagaagagagaaagagaagtgaaggaaggaagaaaggaaggagggagggagagaagaaagaaacgaaagaaaggaaaagaa

SEQ ID NO: 1389 - DNA, 120 bp, synthetic construct
  source 1..120: mol_type = other DNA
ccttggggacatgtcatcaggacctcctgtggctgtgtcataggagcgtctttaactttggcaaaataaactttctaaattgattgaaacctgtcttagctacttctggtttacagtctt

SEQ ID NO: 1390 - DNA, 120 bp, synthetic construct
  source 1..120: mol_type = other DNA
gctttctgaggtgacggagccttgagactagcttatagtagtaactgggttatgtcgtgacttttattctgtgcaccaccctgtaacatgtacatttttattcctattttcgtagcatgc

SEQ ID NO: 1391 - DNA, 120 bp, synthetic construct
  source 1..120: mol_type = other DNA
tctgtctccagataattcccccaccacctcccatatgtccagattctcttgatgatgctgatgctttgggaagtatgttaatttcatggtacatgagtggctatcatactggctattata

SEQ ID NO: 1392 - DNA, 120 bp, synthetic construct
  source 1..120: mol_type = other DNA
tttatatcactagtaggcagaccagcagacttttttttattgtgatatgggataacctaggcatactgcactgtacactctgacatatgaagtgctctagtcaagtttaactggtgtcca

SEQ ID NO: 1393 - DNA, 120 bp, synthetic construct
  source 1..120: mol_type = other DNA
tggtaggggtgaatttggctggagtgagttggagagtaggagaagagaaatccaaggcaacatttgaccagcctgggcaacatagtgtgactccgagtctgcaaaaattagacgggtgtt

SEQ ID NO: 1394 - DNA, 120 bp, synthetic construct
  source 1..120: mol_type = other DNA
caatggctagagcaatgtcctagagtaggtaagaagggatggatttggcctttgttggaaacattagcggttcttttggtgacagctatatagttaacacatctatgatacgtgaatggg

SEQ ID NO: 1395 - DNA, 120 bp, synthetic construct
  source 1..120: mol_type = other DNA
gagatttgggtaggaacacagagctgcaccacatcagaggatgtacaagattgtggtggagaggagtttagagacctgcaaatatagggtaattgaagggatcatctacatggatattta

SEQ ID NO: 1396 - DNA, 120 bp, synthetic construct
  source 1..120: mol_type = other DNA
attactcaagggagcacagtggaagtttcaggaagtggtaggagaaggtagaagatggcagggtgttgggaataatttgagaaatctgagctactggaaatgactgagaatcagatataa

SEQ ID NO: 1397 - DNA, 120 bp, synthetic construct
  source 1..120: mol_type = other DNA
tggttttgagagaggaggtaaaaaaagactaggtaagccgatagttagacagagtcctcggtagaacttcccttctaacaaaaagcagcccaagaaatcacttctcttctaacaaggagc

SEQ ID NO: 1398 - DNA, 120 bp, synthetic construct
  source 1..120: mol_type = other DNA
tattgatgtcagtactacacttttaattactattgcttcagggtatgtcttgtaaaccaaaaataaaattataggccccccccgcccctgcacaaccaactgaatggacccatcctctca

SEQ ID NO: 1399 - DNA, 120 bp, synthetic construct
  source 1..120: mol_type = other DNA
gtatgtggataggaattaaattgtaggggcattcacttgatggcattcattcttagaacatttacctatgtctagcttttggagtaaagtcacataacctctaaccaggtaagtttcctg

SEQ ID NO: 1400 - DNA, 120 bp, synthetic construct
  source 1..120: mol_type = other DNA
attcaagtgttcctattgggtaggaatatacagttcttttaggaaatgtagtatggttctgtgtctcaaacaggacacttacacagttggccaacatcatcaccttctccattctctgag

SEQ ID NO: 1401 - DNA, 120 bp, synthetic construct
  source 1..120: mol_type = other DNA
atggaaccttaaggcttgtccctttctagttcttttgtgtaaagcggtgatttcttccatggagggaatggtatttaggcaattttttttttttttcgagatggagtcttgctctgtcgc

SEQ ID NO: 1402 - DNA, 120 bp, synthetic construct
  source 1..120: mol_type = other DNA
tgaaaatgaaagccaagtttcaacagatgaaagtgagaactccaggtctcctggaaataaatcagataacatcaagcccaaatctgctccatggaactcttttctccctccaccaccccc

SEQ ID NO: 1403 - DNA, 120 bp, synthetic construct
  source 1..120: mol_type = other DNA
accgccaccaccaccaccccacttactatcatgctggctgcctccatttccttctggaccaccagtaagtaaaaaagagtataggttagattttgctttcacatacaatttgataattag

SEQ ID NO: 1404 - DNA, 120 bp, synthetic construct
  source 1..120: mol_type = other DNA
tgtttaaactttttatgtcacttgctgtcttttcgtcctcgttaaatttaattttgttggtcttttgttgttattggttggttttctccaaatgctagctatgttaagaaatttaaggcc

SEQ ID NO: 1405 - DNA, 120 bp, synthetic construct
  source 1..120: mol_type = other DNA
gtcagtggttttggttttcagttatgcaaccatcactacaatttaagaacattttcatcaccccaaaaagaaaccctgttaccttcattttccccagccctaggcagtcagtacactttc

SEQ ID NO: 1406 - DNA, 120 bp, synthetic construct
  source 1..120: mol_type = other DNA
aggtgtagattagtaatgaagtgggaagccactgcaagctagtatacatgtagggaaagatagaaagcattgaagccagaagagagacagaggacatttgggctagatctgacaagaaaa

SEQ ID NO: 1407 - DNA, 120 bp, synthetic construct
  source 1..120: mol_type = other DNA
acatggaaaccaaggagatcattgtggagtttcatgatttaatgactgccatgctgggttttgaacttgcatggggcctatagcccccttttttggcaggtttttccctaatgggaatat

SEQ ID NO: 1408 - DNA, 120 bp, synthetic construct
  source 1..120: mol_type = other DNA
gcttgagggctggacagtccagggccatactttactgaccgctgcttgaactaaacgctgttagaagcagctctggaaaaataatttgcatggaatcttatgattttttttttttttttt

SEQ ID NO: 1409 - DNA, 120 bp, synthetic construct
  source 1..120: mol_type = other DNA
attttgcaaggaccctggttcctttacggaaggacaggatttagaaatcagtatctaggcacttggtgtgttcattattactgcagtgccttctagtctctccattgagctgagaaatat

SEQ ID NO: 1410 - DNA, 120 bp, synthetic construct
  source 1..120: mol_type = other DNA
aagggaagaggaggatcctggcaatctttatgtacgcttatgtttgagaagcactttgaatagcacagctctacagtccctatctccactgcctccctttattttttttttttcctgtta

SEQ ID NO: 1411 - DNA, 120 bp, synthetic construct
  source 1..120: mol_type = other DNA
atgaaaaattttctaaatttggtaaatgtcaacccacacattccaaaaaagttcagtgcacctcaagcaagatacatacaaagcaaagcacacctaggcatataacagtcaaactgctta

SEQ ID NO: 1412 - DNA, 120 bp, synthetic construct
  source 1..120: mol_type = other DNA
ggagttgatcgattccagagtaagttctaaataagactagactgcatcctagcttatccttccaagaattaagtagaatgtccccattgttctcaataatttattatacactaagcccaa

SEQ ID NO: 1413 - DNA, 120 bp, synthetic construct
  source 1..120: mol_type = other DNA
ggcgatgaaagtgttttggaactagatagagggggtggttgcacaacattgttgttggtgggaatttaaaatggtgcaagcactgtggaaaaaacagtttagcatttcctcaaaaagtta

SEQ ID NO: 1414 - DNA, 120 bp, synthetic construct
  source 1..120: mol_type = other DNA
atagtgaaagcctattcagtctccagttgggttttgtgacagtcagaagttggttaccagtgaggcaattttctatataagactctgtccaccaatggggtaactggcaagtagtcattg

SEQ ID NO: 1415 - DNA, 120 bp, synthetic construct
  source 1..120: mol_type = other DNA
acaagaggaagacacagtagagtagggagaaatggcaaacactctttccaaaggcttaagattgtgaggcagtcagattttttttttccaatggcacatgtctgttaggtagagtgacaa

SEQ ID NO: 1416 - DNA, 120 bp, synthetic construct
  source 1..120: mol_type = other DNA
tgcccggcccatccaactaagttctgattaaagaaatataagcagaagtgtcctgtgacagtttctaggagcactttgtcaggggacaagaggtgaggagagtaatgtgtagaaagaaaa

SEQ ID NO: 1417 - DNA, 120 bp, synthetic construct
  source 1..120: mol_type = other DNA
gctgcacaaattaaagagaccagtaggctttgatattgcaagtatcagcgttcaagttgtcccttcacagttacagatggaatgatgtctagagtttgcttcaaaataaacggggcgggg

SEQ ID NO: 1418 - DNA, 120 bp, synthetic construct
  source 1..120: mol_type = other DNA
gcccagcctgattgtttgacttatgaagtatatacctatctatgaacaagaactgaaggaactttaccccagaatgaagagtttcactggatggaacggcagagtcggaggagaattatt

SEQ ID NO: 1419 - DNA, 120 bp, synthetic construct
  source 1..120: mol_type = other DNA
gcacacaatgcacggggtggttccctgtcctcatgatttatatggattgaggaggaactcagtaccttaaaaagttaccataaaatcatcttacatttatggagtgccacattttaaaaa

SEQ ID NO: 1420 - DNA, 120 bp, synthetic construct
  source 1..120: mol_type = other DNA
gtgaaaatccatcactacttcaccccctgacaaatccagatccagaagtatctacagtttggtttacatattttcataaggttttctatatattttcaagcaactccatatatagtttga

SEQ ID NO: 1421 - DNA, 120 bp, synthetic construct
  source 1..120: mol_type = other DNA
tccttcactattgtagtatactgtagagtttcaagaaaaaaattaaaggccaaaactgtcttacattaccattgctgtttctgcaatcttcaacaaaccaaaattttctctgtaattgtg

SEQ ID NO: 1422 - DNA, 120 bp, synthetic construct
  source 1..120: mol_type = other DNA
gtgctggcaggctgttgtttctgtttaatatccttctgagtaagcgggtaccaagtatggccatggcagtcttgtgagtttgaatgtttaatgtaaagtgacttctgttggtcatagcca

SEQ ID NO: 1423 - DNA, 120 bp, synthetic construct
  source 1..120: mol_type = other DNA
acatgctggaatcaaacacctgaaggagctggaatcttatgaatacagccagggcaacagtgtagagaatcatgaacaaaaacatcacagtccacacagaaaacattttggcacacagca

SEQ ID NO: 1424 - DNA, 120 bp, synthetic construct
  source 1..120: mol_type = other DNA
acataggtgggtttagtgaaattatttggtttctggagattcagatctatttagcaacgagtcatttcaatcataactatggcattctttatctcatcttccatattagaagtactcttg

SEQ ID NO: 1425 - DNA, 120 bp, synthetic construct
  source 1..120: mol_type = other DNA
gaaatagcctcctaatgtaagccctggctcagtattgccatccaaatgcctgtagggggaaaaagggtaatatataatgatctgaaaagttagagcgggaaagcatgctatcttgacctt

SEQ ID NO: 1426 - DNA, 120 bp, synthetic construct
  source 1..120: mol_type = other DNA
aaatgtaaatgtatctacatatcaaaacaaataaataaaagtaaaggcaaataaccaacaagaaaaatatttgcatcgggtgactgagaagggttaacattcctaaaggactctaataaa

SEQ ID NO: 1427 - DNA, 120 bp, synthetic construct
  source 1..120: mol_type = other DNA
acatgatgtgtgagcaactctttgtaatggctttcatctaaaataacatggtacgtgcctaacaagatgaaaagggaaaaaaaaacaccttcatagacataacgaactgtacgttctatg

SEQ ID NO: 1428 - DNA, 120 bp, synthetic construct
  source 1..120: mol_type = other DNA
attcacgtcctgggcaggacagagagggaaggtgtaggatctcatcacgctacccagaatggcacacaacttaaatcttatgaattatttattactgaagttttcaatttaatattttca

SEQ ID NO: 1429 - DNA, 120 bp, synthetic construct
  source 1..120: mol_type = other DNA
tctattccatatagctgaacttgccatatctattaatttacagatatatgacattggtgcaaaaggaactgtggttttggccattactttcaaaataaattaataaatgttaataaaggt

SEQ ID NO: 1430 - DNA, 120 bp, synthetic construct
  source 1..120: mol_type = other DNA
tactaggacttttccttcttaatggcttataaaagtatcttgtaattgatggaatctgagtttcaatgaaatatagtattccgtaaacattttccatttcagcactgtcttcgtatcaat

SEQ ID NO: 1431 - DNA, 120 bp, synthetic construct
  source 1..120: mol_type = other DNA
aaagaagcaacaggtgagaaactttttctcatgctgtttttggcaaataaatttagctatgagttcacattacgtttaacttttagagttattacgcttttcatttttaagtataccaga

SEQ ID NO: 1432 - DNA, 120 bp, synthetic construct
  source 1..120: mol_type = other DNA
tggaatgccaggtcatcttattctttgtattttactcaataattgtcttaaaaatcttcatagaactccatttctcatttccaagaaataatatgaacttatacacaaacttggtaccaa

SEQ ID NO: 1433 - DNA, 120 bp, synthetic construct
  source 1..120: mol_type = other DNA
tgggattacaggcgtgagtcaccacacccagcctcaactgaacattttgctcctccctgttttctgttacgtattgtgaactttaaaaatgaaaaactcgcataacgttctcaacgtttt

SEQ ID NO: 1434 - DNA, 120 bp, synthetic construct
  source 1..120: mol_type = other DNA
taaaaaaaaaaaaaaaagaattcatgggagccatgaaatattcagaatgtggagaatgtggagagctgtgcctctacagtcattacacaggtgcctccttgtccccagtcggtatccccc

SEQ ID NO: 1435 - DNA, 120 bp, synthetic construct
  source 1..120: mol_type = other DNA
ctcagcagtatggagcttgttatcaatgagaacctgctcgctgactttaaattgcttttcttaccttctcagttcagtttctccgtacctcaattgatgatttctggtatgacctagcaa

SEQ ID NO: 1436 - DNA, 120 bp, synthetic construct
  source 1..120: mol_type = other DNA
aaaaaaaaaaaaaagatcaaggccccagaaccttgcttctgaaagggagactgctgtggtcaacccttaggaacttcccaaggccaattcttaaaagcagaaacagagaccaccaaatat

SEQ ID NO: 1437 - DNA, 120 bp, synthetic construct
  source 1..120: mol_type = other DNA
tgtatgatgtgtggggtgtgtgggtatatgtgtatagtgtggggtgtggggtgtgtggtaggtttgtggtgtgtgtgtgtgtatagtatggggtgtgtgtgtgtgatatgtgtgtggggt

SEQ ID NO: 1438 - DNA, 120 bp, synthetic construct
  source 1..120: mol_type = other DNA
tacttacaacagagcctataaatgtactgcacaactttctcccagatcaccaagaccatccaagtttcaaccattctaactcatcagaattttccaaattctccatgcctttgcacatgc

SEQ ID NO: 1439 - DNA, 120 bp, synthetic construct
  source 1..120: mol_type = other DNA
agctctggtctttttgctggagaaggaccagctggtgagcttgtcccatgaaaagggctagcgggtgtggagtgagggaagaggtgttaagaaggggtctggaggttttgtttttttttt

SEQ ID NO: 1440 - DNA, 120 bp, synthetic construct
  source 1..120: mol_type = other DNA
gtaagcacctgggcaaggtagataggtgtgtgcataacctctcccaacacactgccaaaaaggtagcattccttacacaacttgcttcctatggtaaatatgtataggaaatcatttctt

SEQ ID NO: 1441 - DNA, 120 bp, synthetic construct
  source 1..120: mol_type = other DNA
tataaaggttccccagcatttctgtgcctattatgacatcaacatttttgaagaatgcagttgatggaccgtttttacagttccttctctcacctagaaattctctcttaggagctgatc

SEQ ID NO: 1442 - DNA, 120 bp, synthetic construct
  source 1..120: mol_type = other DNA
atatagctacaactaaggaaaccacccagcaccttccccagaagagtagtatccagagtaacacattgagctctcttgagctcttctccactggcagctggaaagtttttgcaaggatcc

SEQ ID NO: 1443 - DNA, 120 bp, synthetic construct
  source 1..120: mol_type = other DNA
cacatcctgggctggatagagggtgctgacggtttcactgtgcttctcggaatggcacactaaaacttatgacctctttatttctggagttttccgtgtatatttttggaatacagttga

SEQ ID NO: 1444 - DNA, 120 bp, synthetic construct
  source 1..120: mol_type = other DNA
aaaacaggtcaaatgtgtcttttccacacatacagtggacaaggggtactactgtatactctgtttgaactgcccgtcatgttttggtcctgaaatcatgctctttgacactgttcattc

SEQ ID NO: 1445 - DNA, 120 bp, synthetic construct
  source 1..120: mol_type = other DNA
cagttaaaccatcagcctgtctggcttccagatcccttatcttgctcctcagcatagattgatagaaatctgtgcagcacttggatcaaggtacacgtctgaatcagattaatttagaca

SEQ ID NO: 1446 - DNA, 120 bp, synthetic construct
  source 1..120: mol_type = other DNA
gagggtcattaccaggtaagaaatgatctcagatggcattcttagatgacaccttcagttatgaactgtatggcagaaagaatttttgttaggggaaaagctttcttcttacaacattgt

SEQ ID NO: 1447 - DNA, 120 bp, synthetic construct
  source 1..120: mol_type = other DNA
accatatacactataggtgactgacagaatttcttggtgggcaaatgccagagttcattatcaactaaacagtggtttcagatggcatccacacttacaaactgtgtgtcaacaggcatt

SEQ ID NO: 1448 - DNA, 120 bp, synthetic construct
  source 1..120: mol_type = other DNA
ttggtgggattgggaacatttgattgtgttttcagagaaggcctctctgaagagttaatatttgacctgagactaaaatgacaacaaattagttataagatctagatgaataaggcattg

SEQ ID NO: 1449 - DNA, 120 bp, synthetic construct
  source 1..120: mol_type = other DNA
tttagtaaataaaatcaacaggtcctgataacttggatgtggataacaagggaaaggaaggaatgaagaaggatgccctgagttctggcttgagcaactgaatgcatgttggtgtcatgc

SEQ ID NO: 1450 - DNA, 120 bp, synthetic construct
  source 1..120: mol_type = other DNA
tgagaagcttccacaggaaaactctacctcaaaatatgaaattaccattctaaatgaagaagattcattttaaaactgatattagagaaaggaagactaaaaaacaaacaaaaaagctgc

SEQ ID NO: 1451 - DNA, 120 bp, synthetic construct
  source 1..120: mol_type = other DNA
ctctcacccaggctggagtgcagtggcacaatcgcataagttagtgaacttattaatataatattcactacagctgtatggagctgccatagaatagaaaggaaaattcatctacatttt

SEQ ID NO: 1452 - DNA, 120 bp, synthetic construct
  source 1..120: mol_type = other DNA
aggaaaaaaaatgtttgtaggacaagttccttgcagtggaattttgaggataaagagtaatatgtctttttttattttaatatataccactattgtggacattatgtcattccttgtgac

SEQ ID NO: 1453 - DNA, 120 bp, synthetic construct
  source 1..120: mol_type = other DNA
atacaggtcctgtgggaatgccgggcttgtgagggctgttaattacaaggccataactaacaattaaagatctctgttggatttttttttttcctctagaacataccctcccccattctt

SEQ ID NO: 1454 - DNA, 120 bp, synthetic construct
  source 1..120: mol_type = other DNA
cccctcaggatccacatgtgctgctgctgttcatcatccctcctaaaacattttgtactgcataaaagcaacctttcttcaaaaaaatttaacctttggtgatcaagcctggcaactact

SEQ ID NO: 1455 - DNA, 120 bp, synthetic construct
  source 1..120: mol_type = other DNA
aaggaagcacttctcctatggaaaatgcttactgccctagagtttttaagtgaacctgtcatcttgaattcattcttgctggtaattgactctgactttacagctgcccaccaagacatt

SEQ ID NO: 1456 - DNA, 120 bp, synthetic construct
  source 1..120: mol_type = other DNA
tgatgtgaaatgccttccccaccaatttctactattcctgagtcaccagagagtcctagcttcaacaattctaaactagctccaaattacatttaaaatgcattagtgtaacttcaattt

SEQ ID NO: 1457 - DNA, 120 bp, synthetic construct
  source 1..120: mol_type = other DNA
gaaaaaataatataacgaaagaccaagaaaagcagagaagaaagttttacaacatcaagacaggattatagaaatgtcatggaaaaaggaaaaagtctaaaaaaaagtattatggaatta

SEQ ID NO: 1458 - DNA, 120 bp, synthetic construct
  source 1..120: mol_type = other DNA
aagtagccagcattgcaacacaggatggatcatgcaagagaaactagtaccaggttaccttatcttataatattatttgctgttaaaatgaaattttaaaacagcaccaaaagttaagtt

SEQ ID NO: 1459 - DNA, 120 bp, synthetic construct
  source 1..120: mol_type = other DNA
gccctctgaggccccatcccaggggctgcggggaagccgggcctggggaccccctcccaccctgggctgagcccccaccccactgcctgtgctgcctgtccccggcttccaggtctctgc

SEQ ID NO: 1460 - DNA, 120 bp, synthetic construct
  source 1..120: mol_type = other DNA
acacccacgtcctactccagagcaccctctcctgcccctcagcctctgggacacacacgtcctactccagagcaccctctcctgcccctcagactctgggacacccacgtcctactccag

SEQ ID NO: 1461 - DNA, 120 bp, synthetic construct
  source 1..120: mol_type = other DNA
gacacctgtgttgatttcatatttgggtattgtgaataatgctgcaatgaacatgagcctggagatatctcttcagcatattgacttaaattcctttggatatatacaaggaagtgggat

SEQ ID NO: 1462 - DNA, 120 bp, synthetic construct
  source 1..120: mol_type = other DNA
tcatattgttttgattactatggttttgtgatatgtacttgttttgggggggatcgatttttatttgggtttctcacagtggttagagaacaaccacagcacaggaaatgcctcaccaag

SEQ ID NO: 1463 - DNA, 120 bp, synthetic construct
  source 1..120: mol_type = other DNA
gagaaccaccacgcaccgagcgccgacactcaccgtccacactcggagacgagaaccaccacgcaccgagcgccgacactcaccgtccacactcggagacgagaaccaccacgcaccgag

SEQ ID NO: 1464 - DNA, 120 bp, synthetic construct
  source 1..120: mol_type = other DNA
acccaccgagcgccgacactcgccgtccacactcggagacgagaaccaccacccaccgagcgccgacactcgccgtccacactcggagacgaaaacaaccacccaccgagcgccgacact

SEQ ID NO: 1465 - DNA, 120 bp, synthetic construct
  source 1..120: mol_type = other DNA
tgaggaaccccactgggggtatgttaatttattctagctaagcagttatgttattagaagctgagaagggggtgtttgttaaagtaacagggcagaagaaaggcggatttaagatacgag

SEQ ID NO: 1466 - DNA, 120 bp, synthetic construct
  source 1..120: mol_type = other DNA
gctgggattacaggcatgagtcactgcgcctggcccaccatgagtcttttaaatgccattgaccttctgattgctccacacaaatgtcaataaatcatctcaaacttaaacaaaactttt

SEQ ID NO: 1467 - DNA, 120 bp, synthetic construct
  source 1..120: mol_type = other DNA
ggcagaaagttcttccttgaatgtggtcatctgcatttcagctcaggaatcctgcaaaagacagaggagagtgttgttttcaacctggctctactaacagtttcttttcccctctttcaa

SEQ ID NO: 1468 - DNA, 120 bp, synthetic construct
  source 1..120: mol_type = other DNA
ttccccacctcagtagttcctcttgcacatatccagtttagaatcattgtcagctactggtgttattgttggagatgtgttttagcaatagggatatgaaacatcttcatgtttttctcc

SEQ ID NO: 1469 - DNA, 120 bp, synthetic construct
  source 1..120: mol_type = other DNA
caacaacagacttttgtcatcattttggaggctggtgggggcctgcttcctggtttgcagatggctgtcttctcattgtatcttcaaatggttgagagcagagaaagaagcagcaaactc

SEQ ID NO: 1470 - DNA, 120 bp, synthetic construct
  source 1..120: mol_type = other DNA
taagttttgaaattaggtagagtcagtgtttcaattttgatctttttccaaaaattgttttggctcttctaggtcttgtaactatgctaaacttattaattttagtagcctcttggtaga

SEQ ID NO: 1471 - DNA, 120 bp, synthetic construct
  source 1..120: mol_type = other DNA
agtccaggaagaatcatcttgttaaacactaaagatctgtagaaatgtaagctactgttgttgaaacatcactaagtgttaccctggttttttttgtttttgtttttgtttttctttttg

SEQ ID NO: 1472 - DNA, 120 bp, synthetic construct
  source 1..120: mol_type = other DNA
cccacctcagtaccagcatgcatgaagaagaacatgtgaagtactccttggtctactatagcattaggaaggctatcaacccgttattctgcttccattaaatgttttccaatgcctgat

SEQ ID NO: 1473 - DNA, 120 bp, synthetic construct
  source 1..120: mol_type = other DNA
gaacacagttttacatgaaagaataactaatattcagctatggttatgcattcttgggttattgggtagacattttctcaaaaagaaaatgggtctggccgggcacggtggctcacgcct

SEQ ID NO: 1474 - DNA, 120 bp, synthetic construct
  source 1..120: mol_type = other DNA
gataattcctcctctgtacccatcatcaccactcttcctttaaattgtgggatatgtttttctgagactgtggctttagtgtgtacgagaaaaattcagttgttatcccctcattttggg

SEQ ID NO: 1475 - DNA, 120 bp, synthetic construct
  source 1..120: mol_type = other DNA
acaggtacttagaaaaactgggattgacaaagtgatacagtttgagttatatgttgccatagaaagaggcaagttggcaaatattttggtaaatcatttcaagatagctttgaggaggtc

SEQ ID NO: 1476 - DNA, 120 bp, synthetic construct
  source 1..120: mol_type = other DNA
tgttaccataaatgactcataaccattgacaaatctataggtattcacttcctaagggaaagaaaaatcacacattttttacatggtcattttctgtttaaccttagttagacgttgaat

SEQ ID NO: 1477 - DNA, 120 bp, synthetic construct
  source 1..120: mol_type = other DNA
ttagttccatacagtgtgatctctgacttgctaaggtttagaataaactcaaagggcaatgtggcacagttattaaggtttgagagtatgcccatctgtgctctgactctacacatccac

SEQ ID NO: 1478 - DNA, 120 bp, synthetic construct
  source 1..120: mol_type = other DNA
atgacatgtttcccatggcataagaagctgctacaacttttaagtgtgtaggtggtggattttgaaatctttctagatttttctttcttgagaaatctgggtttatcttgaaaaccctga

SEQ ID NO: 1479 - DNA, 120 bp, synthetic construct
  source 1..120: mol_type = other DNA
ccctatgacagaggaaatcaagttaatgctcatggtttaggagaagtgtttaaaaacagattcattttaacttgttcggcactctttggtgaagtagaaaagtgttcagacagctgcagt

SEQ ID NO: 1480 - DNA, 120 bp, synthetic construct
  source 1..120: mol_type = other DNA
gaaggtttaattaagggcgggctatactaaggttcgacataccatcagccaaatacaccagtggtcattcacctcttaaactttccactcttgcactgatcatcacctccacagcatata

SEQ ID NO: 1481 - DNA, 120 bp, synthetic construct
  source 1..120: mol_type = other DNA
gctaaggagtcacagaaggaccaaaatggcatgtatacacccatttctaggttctttctctctcccatatggtacattgacccccaattcctaaccaatttagcagctttgaactctatt

SEQ ID NO: 1482 - DNA, 120 bp, synthetic construct
  source 1..120: mol_type = other DNA
caagagcagtggtaatggaattgaaaaggattaaaagtgtttaccaggttttagcaataaatccaatgcgaggaagaggaacgtaagatgacattttaaatttgagagtggtagtaccat

SEQ ID NO: 1483 - DNA, 120 bp, synthetic construct
  source 1..120: mol_type = other DNA
aggtgtttctgtgagggtgttttatatgagattgacatttaaatcaatcagtgaactctgagtaatgcagactgtcctcctcgatgttagtgggcttgatccagtcaggtgaaggtctga

SEQ ID NO: 1484 - DNA, 120 bp, synthetic construct
  source 1..120: mol_type = other DNA
ctcatcacagtgccccagtgtgtgctcacctagcctcatcatagtgtcccagtgtacactcacctggcctcatcatggtatcccagtgtgcgctcacctagcctcatcatagtgccccag

SEQ ID NO: 1485 - DNA, 120 bp, synthetic construct
  source 1..120: mol_type = other DNA
cacctagcctcatcatagtgttccagtgtgcgctcacctagcctcatcatagtgttccagtgtgcacgcatacggcctcatcatagtgtcccagtgtgcaatcacctggcctcatcatag

SEQ ID NO: 1486 - DNA, 120 bp, synthetic construct
  source 1..120: mol_type = other DNA
cggaaatctcccgtgctgtggtgacacaggacctgtcatgtgcgaattcacccctccttgttccctctaccagcgtgattaagtcctttatagaataaggacttgtctcctgccagagag

SEQ ID NO: 1487 - DNA, 120 bp, synthetic construct
  source 1..120: mol_type = other DNA
ccagatgttaggaactcaccacccctgtacctgagctccaaccagatgttaggaactcaccaaccctgcacctgagctccaaccagatgttaggaactcaccaaccctgcacctgagctc

SEQ ID NO: 1488 - DNA, 120 bp, synthetic construct
  source 1..120: mol_type = other DNA
agatgttaggaactcaccaaccctgcacctgagctccaaccagatgttaggaactcaccaaccctgcacctgagctccaaccagatgttaggaactcaccaaccctgcacctgagctcca

SEQ ID NO: 1489 - DNA, 120 bp, synthetic construct
  source 1..120: mol_type = other DNA
gcatggcggctgtcccctgagccttctctcacggagcagaatggcaccgtcacgggggtcgcacggcggctgtcccctgagccttctctcacggagcagaacggcactgtcacggggtca

SEQ ID NO: 1490 - DNA, 120 bp, synthetic construct
  source 1..120: mol_type = other DNA
ctactgggaagtgaggagcccctctgcccggccagcacacatgcacgcacatacgcacacgggcacacgaatgcacgcgcacacatgcacacatgcatacacatacaccacgtgcacagg

SEQ ID NO: 1491 - DNA, 120 bp, synthetic construct
  source 1..120: mol_type = other DNA
atcagactgcagtggaaaaggcgactgcgttttacagtgatgtccactggggatgatatgagggaaagcttcgttacatagtgtcgtaggcttccctcatgaggcaggttaatttccacg

SEQ ID NO: 1492 - DNA, 120 bp, synthetic construct
  source 1..120: mol_type = other DNA
ctttgtcaaaaaaaaacaaacaagaaacacacacacacacacagagtgaacttttaagtacccagcctgatgcccctcatggatgcgaaggcttctctacgctggcgactggaaatgcaa

SEQ ID NO: 1493 - DNA, 120 bp, synthetic construct
  source 1..120: mol_type = other DNA
accttcatcggcaactctctgctgtggctaggagtccacttcctggatcatggccaggaaacacatttcccctaacttaaaaaaatctatatacacttccaaaatgtgaaaaagacatct

SEQ ID NO: 1494 - DNA, 120 bp, synthetic construct
  source 1..120: mol_type = other DNA
cacacgtatttacctctctatcccttctctagtgcctccaaaataacagcagagtatttgttggcatcagaacaggacatagaacatgggagaccagaacacggtccaggtgtgaaatat

SEQ ID NO: 1495 - DNA, 120 bp, synthetic construct
  source 1..120: mol_type = other DNA
aactgaatgaaaaaaagagaatccacagatgccatctccaagatgacaaagatgttacaattgactgacagagactgtgagacagtcatcacaaaaatgcttccatgaggctgggtgtgg

SEQ ID NO: 1496 - DNA, 120 bp, synthetic construct
  source 1..120: mol_type = other DNA
aatctttctccaactttaagcacctatggccacagaatgtgtcttattaaactacgctagtgaccagcagaacgcccatcacacaatacagactccctgattttttttttgagacggagt

SEQ ID NO: 1497 - DNA, 120 bp, synthetic construct
  source 1..120: mol_type = other DNA
aaaataaaaagtatcacattaaggcacagaatgactgtattcatcatattcgagtatattcattctatccagtaactattagtcaattaagtacctagagaaatcctgtctgttgccacc

SEQ ID NO: 1498 - DNA, 120 bp, synthetic construct
  source 1..120: mol_type = other DNA
aggtggcttcccggcccaaacttgactccgtttccatcattgcctgtgtgttatttgaataagtgcgttatgcgcatgtgttttaaatgtcatcattaccatttataaacaccatctgtt

SEQ ID NO: 1499 - DNA, 120 bp, synthetic construct
  source 1..120: mol_type = other DNA
ctgcgaagccttctccctcatacagcccacgaaccttttccccttcatagctacaaagaaataaaggtaattcaaggtaatgaacaatgtgaataaacccaagtgacagtgggttaaact

SEQ ID NO: 1500 - DNA, 120 bp, synthetic construct
  source 1..120: mol_type = other DNA
cagatcatcaggcatcagattctcataaggagcgtgcaacctacatccctcgtgtgtgcagttcacaatagggctcgtgctgctatgagaatctaatgcccaccgctgatgtgacaggag

SEQ ID NO: 1501 - DNA, 120 bp, synthetic construct
  source 1..120: mol_type = other DNA
agccacatctgtcatctctgggcccccaagagggcatctttacttccattttcagccaagttcaaacaggacaaggttccatgaaaactatttgaaaagacagacagggattcttatatt

SEQ ID NO: 1502 - DNA, 120 bp, synthetic construct
  source 1..120: mol_type = other DNA
ccctattaggtctttatccaagaaacactgtggctagaagtcagactctgggccctcttctaattaaactctgcccttgagtcatttcatctaatctcatggctgtaaattacacctgaa

SEQ ID NO: 1503 - DNA, 120 bp, synthetic construct
  source 1..120: mol_type = other DNA
atgtttgcagagccacacataaagatatccttcattctgcttagtggccacatagggattcatcaggcctgccaagggaaaaagaaagacagccagagaggcttgagtacagggaacaag

SEQ ID NO: 1504 - DNA, 120 bp, synthetic construct
  source 1..120: mol_type = other DNA
gtgtgtgtatgaggatggttttggtttgcaagtaacagagaatctagtgtcgtctgccatgtgaaatacagaataatggtttgattcagcaactcagagctgtcaggatttctcctccat

SEQ ID NO: 1505 - DNA, 120 bp, synthetic construct
  source 1..120: mol_type = other DNA
cacttcaggaaacagaagtcctctgtgagcaactccttttttaaaaaaaaattttagacaaaatctcgctctatcacccaggatggagcaggatacgatcactgttcactgtggcctcaa

SEQ ID NO: 1506 - DNA, 120 bp, synthetic construct
  source 1..120: mol_type = other DNA
ttgtgatgtagacggtctggtccaccaagcctaaaatatttactctctggccctttacagaaagtttgcctccctctctccccctgaccagcgatctatagtaaaagagcactaaattgt

SEQ ID NO: 1507 - DNA, 120 bp, synthetic construct
  source 1..120: mol_type = other DNA
cgtgagccaccatgcccagcctcagcagtctttttttaacatactcttgaaatgaaggactcagaacacaacctttccacaaatattaaccacaaagccatgacatactggatcaaaact

SEQ ID NO: 1508 - DNA, 120 bp, synthetic construct
  source 1..120: mol_type = other DNA
gtgttaatatttcacacctggaccgtgttctggtctcccatgttctatgtcctgttctgatgccaacaaatactctgctgttattttggaggcactagagaagggatagagaggtaaata

SEQ ID NO: 1509 - DNA, 120 bp, synthetic construct
  source 1..120: mol_type = other DNA
agcccaagatcaagaagtctgtaagtcatgaaagagtctccaaaatgaattttaaattgactggaaaagggatcacctttttctcatctgagagcagtgagtattttaattgtagaacct

SEQ ID NO: 1510 - DNA, 120 bp, synthetic construct
  source 1..120: mol_type = other DNA
tgcctcatgagggaagcctacgacactatgtaacgaagctttccctcatatcatccccagtggacatcactgtaaaacgcagtcgccttttccactgcagtctgatgaacattttaaatg

SEQ ID NO: 1511 - DNA, 120 bp, synthetic construct
  source 1..120: mol_type = other DNA
tgtttctttcgagacctctagttttgtttttgcagccatatttaacaatgagggaaccagaaggctgaccagagatggaggcttcactctgagtgtaggatgaaggtctcagttctgtct

SEQ ID NO: 1512 - DNA, 120 bp, synthetic construct
  source 1..120: mol_type = other DNA
cctgggctcacgcaatccttcctgcctctgcctctgcctctgaaaatgctaagcaaaaattggtaaattctttcatctgaattttatataatataaagtagtaagaactgtagaacttcc

SEQ ID NO: 1513 - DNA, 120 bp, synthetic construct
  source 1..120: mol_type = other DNA
acccctacaggatgaccggtatgcactcccatacttgcgcagcattttttttttttaagaaacggtttcatcatgttgccctagctaatcttaaactcctgggctcacgcaatccttcct

SEQ ID NO: 1514 - DNA, 120 bp, synthetic construct
  source 1..120: mol_type = other DNA
ggtcgttgagttttaggagttctttatatattctagatattaatcccttatcatatatgaggtttgcaaacattttctcccattttttaggttgcctttttactctgttgattgttttct

SEQ ID NO: 1515 - DNA, 120 bp, synthetic construct
  source 1..120: mol_type = other DNA
ccattacatctgtgggcacatttttacaggttggtttttactgaggaagggactatttatacttttctttctctttccctaccctttgggccttcagctatgacagagactccactttca

SEQ ID NO: 1516 - DNA, 120 bp, synthetic construct
  source 1..120: mol_type = other DNA
cttggcttcaaaacctcaagaaatgaataacaccaaccccaagcctgttgagttgtaaagtacttcctaaatcctgtgtcccgtttaatcatcttctcccattccattctagggaaagac

SEQ ID NO: 1517 - DNA, 120 bp, synthetic construct
  source 1..120: mol_type = other DNA
cttaatgccaagagagctgggctctagcccctgtctgtggtgcactagctgtatgactttggatagtgtttgactgccttggacttcatttttccctattccagcaactttgtcaagtag

SEQ ID NO: 1518 - DNA, 120 bp, synthetic construct
  source 1..120: mol_type = other DNA
tatacccattcatcaaggagatgtagagggaggtgcttcctggttcaccccaccctcagcagagacagaccccagatctgggcccaggactttgtgcagggaggggaaatgcaggtgact

SEQ ID NO: 1519 - DNA, 120 bp, synthetic construct
  source 1..120: mol_type = other DNA
tgagacgctgtctcaaaaaaaaaaaaaaaagaaggaagggcgggcccagaagtcaggaaggagcacgtgaggagggtgtgtgggaagaatggaggtactgaggcagggttcagtggctca

SEQ ID NO: 1520 - DNA, 120 bp, synthetic construct
  source 1..120: mol_type = other DNA
tccaagatgtgacctctccctctctgtgttcctttctctccatcagtatctccttgctatggtcatagcgtatttcagccgagccggcttcccctcctggcaataccaacgccttcattt

SEQ ID NO: 1521 - DNA, 120 bp, synthetic construct
  source 1..120: mol_type = other DNA
tgatggtggtgatgatggtggtgagaaaataatgatgctgatgatatgatgatgatggtgaagatggtgatgatggagatgatggtgatgatgatgacagaaatgataatgatggtgatg

SEQ ID NO: 1522 - DNA, 120 bp, synthetic construct
  source 1..120: mol_type = other DNA
acttcctgtgcttcaggaaaatggtcagatggaccattttgtttttctgggttgaaaccttaacaacatcactccttgagaaatagtggcctgctttgtctctatcaggctataccactt

SEQ ID NO: 1523 - DNA, 120 bp, synthetic construct
  source 1..120: mol_type = other DNA
attgtagggtttctcttcagtattaattctcttatgtataataagggttcaagactagttaacagctttaccacattctttgcttttgtagagtttctctctagaatgaatgatcagata

SEQ ID NO: 1524 - DNA, 120 bp, synthetic construct
  source 1..120: mol_type = other DNA
tttgcctgtttgtattgatgtagtttaactggtaccaaaactaagaatgaggttactgactgatttttctgatttaataattctagtcctgccctgccctttagcctttgttttgtattc

SEQ ID NO: 1525 - DNA, 120 bp, synthetic construct
  source 1..120: mol_type = other DNA
gactaacagatttctggcttaaaaaatctaacaattactttaagaagcaaaagacatttccagaataaagtagggggatatatagaaaagttggtaccttttttaaacagagtcttcttt

SEQ ID NO: 1526 - DNA, 120 bp, synthetic construct
  source 1..120: mol_type = other DNA
aagaacgtgggcgaaataaagttaaatttcactgctcagttgtgcctcagttttcagaaagtgattttattttagacacactgttccgccagaccctgattgacttcagtagggatagca

SEQ ID NO: 1527 - DNA, 120 bp, synthetic construct
  source 1..120: mol_type = other DNA
ccataattatgtgtctctgtttattgtcttatcttcctctgccatgtgtcctccaatggctgtgttctcagggaggatttttctgtgtaatggcagaaaaggtcctagcaactccaggtc

SEQ ID NO: 1528 - DNA, 120 bp, synthetic construct
  source 1..120: mol_type = other DNA
tcgagaataactcataggttttcagtttgggcagttgacacaatgctgctgtgtcttttggtaggatggggaaacctggggtggtggagtgaacaacggccacccagagagagcaggtcc

SEQ ID NO: 1529 - DNA, 120 bp, synthetic construct
  source 1..120: mol_type = other DNA
actggagctatgggtgtggaggggtagacagccagaagaggagcctggaggccctcagaccataagtggtgaggacgagaggctgaatcctcaaaggagaccgaggagaggcaggaggag

SEQ ID NO: 1530 - DNA, 120 bp, synthetic construct
  source 1..120: mol_type = other DNA
ccgtctcaaaaaaaaaaaaaaaaaaagagaatattctgcattgacagcaggaacttcccaggcataagagggtctcgatgtcacccctgtgcatgacatggagacagtcactaaatgtta

SEQ ID NO: 1531 - DNA, 120 bp, synthetic construct
  source 1..120: mol_type = other DNA
gctgggaaacagttctttctgaatctcaatctcttgctcttatatccttttttggggggggtggggggctggggggcaggggaagacagtgtcttgctctgttgcccaggctggagtgca

SEQ ID NO: 1532 - DNA, 120 bp, synthetic construct
  source 1..120: mol_type = other DNA
cctgcaatcacatgctgcatcctttttcctgaacctgccccacgtgccccaccacgcagccactccgagggctccttcaagggcggcagccctgtcactcacgtgttccaaaagtgcttc

SEQ ID NO: 1533 - DNA, 120 bp, synthetic construct
  source 1..120: mol_type = other DNA
gcctggctttcattctccatcagtccctgtacgagcggttaagtcagaggatgctggacatctcgggggaccggggcgtgctgaaggacgtcatccgagaaggagctggagacctagtgg

SEQ ID NO: 1534 - DNA, 120 bp, synthetic construct
  source 1..120: mol_type = other DNA
tgaattgactttgctgaggctgggttttggtaaaacagccatgttctctccccttgagacctaggcatttgggagatggcttaatgggcaaggtataatctttgcactctgacttaactc

SEQ ID NO: 1535 - DNA, 120 bp, synthetic construct
  source 1..120: mol_type = other DNA
tctccatggcccgtgtcaatgccgatatttctgtctgttgcacatttgatttccttgttgttggcatttagaaggccccctgtttcccagatcacaccacgggcatggaccgcagagatt

SEQ ID NO: 1536 - DNA, 120 bp, synthetic construct
  source 1..120: mol_type = other DNA
ataggtgcacatcaccatgccaggctaaattttaaaatttttttgtagagatggggtctctgatactgcccaggctggtttcaagcttctgggctcacatgatcctcctgcttcagcctt

SEQ ID NO: 1537 - DNA, 120 bp, synthetic construct
  source 1..120: mol_type = other DNA
gagccaccatgcctggccagatcttatttggaaatggtattctgcattgtaatttttgttctgttttatttttacattttctttttatgacatatctaggatttgctttaaaacatccca

SEQ ID NO: 1538 - DNA, 120 bp, synthetic construct
  source 1..120: mol_type = other DNA
ctgatttccactctccttaaggctgtgctgtccaattcagtagctcctagctacatgcagctctttacatttaaattgattaaaattaaaggaaggccaagttcgctggctcaccctgta

SEQ ID NO: 1539 - DNA, 120 bp, synthetic construct
  source 1..120: mol_type = other DNA
aagtagactaagatactcagtcacgctgctcacaattccagtgcctacaagggccaggaccacatgtgttcaagtggccagcatattggatggtgcattcatagaacatttccatcacca

SEQ ID NO: 1540 - DNA, 120 bp, synthetic construct
  source 1..120: mol_type = other DNA
tatccaggctccatgggcctcaggattcctgaagtaggaggctctgatggggccaccctgctctggacagaaattccctagcctcagggacatgttgaatcttgtcacccagaggaacca

SEQ ID NO: 1541 - DNA, 120 bp, synthetic construct
  source 1..120: mol_type = other DNA
gaggaccctgctcccacctgccttttgctctgctatcgggcagatggcattgtctctgctttgcaactgatgaaataggaactctggcttctgggctaggctgagagggtgcttgctgct

SEQ ID NO: 1542 - DNA, 120 bp, synthetic construct
  source 1..120: mol_type = other DNA
actgcactccagcatagacaatgaagcaagaaaaaaaagaaaagaccttgtctctaaaaagagagagagagaaaccctgcatggacctccattcatatggccgttctgttactagaaggg

SEQ ID NO: 1543 - DNA, 120 bp, synthetic construct
  source 1..120: mol_type = other DNA
ctaaagtctgataatcccaattattgatgggtgtgtagaaaaaggagattctgacacatgctggtagagtgtcagttggtataagcccttggagagcaaaacagagatattcaccaccct

SEQ ID NO: 1544 - DNA, 120 bp, synthetic construct
  source 1..120: mol_type = other DNA
gggccacaaacccttcatggaaggtggtgtgaaccatgtgcctctgcactctgccacagtagggctgtactttgtgctttctttttatttttctttttcctttttgagacagaatctcac

SEQ ID NO: 1545 - DNA, 120 bp, synthetic construct
  source 1..120: mol_type = other DNA
ccctggacacacacccgtttccttcctttcctccttcataagtcaggaaagagtacagaatacaagccacaaagggagcctgcccttaagcaagactgccaaagaattgctttgtccacg

SEQ ID NO: 1546 - DNA, 120 bp, synthetic construct
  source 1..120: mol_type = other DNA
tgaaataaatatggatctgtcagcctgtacaagggtcagaggccatgagagagtatggaagagggagagagatctttcactggagggtaaagtactaggctgggaatggtggcagatggg

SEQ ID NO: 1547 - DNA, 120 bp, synthetic construct
  source 1..120: mol_type = other DNA
ctccagcctgagtgacagagtgagactgtctcaaagaaaattaatttttttttgtacactatcacagccaagaagagcccaagaagacattactactaactgtcacatggtgtcacggat

SEQ ID NO: 1548 - DNA, 120 bp, synthetic construct
  source 1..120: mol_type = other DNA
ccagcattcaggtctttccaagtaaaggccagataccacagagcaaagacaaactgttctcacaggccctgtctgaattagcaacctatagaatttgtgagttcaggccaggcatggtgg

SEQ ID NO: 1549 - DNA, 120 bp, synthetic construct
  source 1..120: mol_type = other DNA
agggtttattgaggggacttacagggtagtccagacatggcaggtggaacaggagaaccacacctgcttataaaaagcatgcagttgggcccagcacggtggctcatgcctgtaatccca

SEQ ID NO: 1550 - DNA, 120 bp, synthetic construct
  source 1..120: mol_type = other DNA
agcctgaatcctcaggacttggcaactcagaggtcaatttccttaacaccccaacatgaatttcggaagttagtttcacagaaatcttaagcaccaaatacaactgagcgaaagcaattc

SEQ ID NO: 1551 - DNA, 120 bp, synthetic construct
  source 1..120: mol_type = other DNA
aaaattttttttgtgtttttttttgccgggaatttttccattttgttgaagagacgatgtcactctgttactcaggctagagtccagtggtacaataatagttcacagcggccgggcaca

SEQ ID NO: 1552 - DNA, 120 bp, synthetic construct
  source 1..120: mol_type = other DNA
gggataaatggccacctcattagctctgcacacatgaccctcccgacctgactcctggtgactatgcctgccttatctcttttctctcctccctcacattttccgctgcaacaaagccaa

SEQ ID NO: 1553 - DNA, 120 bp, synthetic construct
  source 1..120: mol_type = other DNA
tgtttgaaaggaaatatggtatgtctaaataggaaaattcctgtaatactttgttcatgagcatttacacaatggcgttactgttcatcatgggggtgatgtggacaagcccagcccagg

SEQ ID NO: 1554 - DNA, 120 bp, synthetic construct
  source 1..120: mol_type = other DNA
tgactatttactttgccattaactagcaagcggtaaaattgtatgatatgcagttttaactgaattgctataagtgaaaatttaaatgcaataaaccatattgatggtatttgtgttaac

SEQ ID NO: 1555 - DNA, 120 bp, synthetic construct
  source 1..120: mol_type = other DNA
tgaggatacatgctccatgaagcaccttatgagacaacttgcaattattagtttgctttttactctgtagaaacctcaaattaagatttagttgtgggctgggtgtagtggctcacacct

SEQ ID NO: 1556 - DNA, 120 bp, synthetic construct
  source 1..120: mol_type = other DNA
tggcataatgcattgaacagtttattattgaagtctacacgagtcaatggaacaagcattcattgaatgtccatgatatgcaggacataagaaggtttccttttagagcatggagccatt

SEQ ID NO: 1557 - DNA, 120 bp, synthetic construct
  source 1..120: mol_type = other DNA
tcttttaaagatctcagagctattaagattgtcttaggaccaggacacttaaatctgcccaaatctggctgttgatgatcggtcatctctacttgtctttgctgtattaagtctattcaa

SEQ ID NO: 1558 - DNA, 120 bp, synthetic construct
  source 1..120: mol_type = other DNA
aggcttacctgagggtgtgccattccgaagaccatcgacttttggcattccgaggctggagaagatactcagaaacaaagccaaaattaagttcatcattaaaaagtaaggaaactggat

SEQ ID NO: 1559 - DNA, 120 bp, synthetic construct
  source 1..120: mol_type = other DNA
aatgttagagttttactgtttgatcagcacattttttttctcttttgtctataggcccgaaatgtttgagacggcgattaaggagagcacctcctctaagagccctcccagtgagtgtat

SEQ ID NO: 1560 - DNA, 120 bp, synthetic construct
  source 1..120: mol_type = other DNA
aatgtgcctgcttctgttagtatttcagcacagtgcctggcacacatggggctctcaaatattgctgagcgagtgaacaaatgtcctttcaattccttaacgttgatgtcattttcaata

SEQ ID NO: 1561 - DNA, 120 bp, synthetic construct
  source 1..120: mol_type = other DNA
accccaggattaatgggtaggatgaaatggcagagcaagagggccgtcactttaacctgactctgccatccatttctaatgtctgccataagtcagtgagcaaaatgttcttcagtagaa

SEQ ID NO: 1562 - DNA, 120 bp, synthetic construct
  source 1..120: mol_type = other DNA
gtttctctttagaatcagctgaaccaagccagttggaagttccagccacagaaggtaaaagggtggggtggtcctgcaagtccttaagacttcttctttcttcttcttcttttttttttt

SEQ ID NO: 1563 - DNA, 120 bp, synthetic construct
  source 1..120: mol_type = other DNA
atcaaggaaggcttctcggaagaggtgacatttgagcagagaaatggaggagagttatggagggaagatggtgaatggggggaacatggtcaagaccaggaatatggtcaaggggggaaa

SEQ ID NO: 1564 - DNA, 120 bp, synthetic construct
  source 1..120: mol_type = other DNA
aattaacatggacaaaacaccattatccacccacagactttactgaggtttccccgattatcctgcttgtcctctgcagtgaaaacttttttcaggtctaggatccagtcaaggatcaat

SEQ ID NO: 1565 - DNA, 120 bp, synthetic construct
  source 1..120: mol_type = other DNA
ctctgtctaagaaaaaaaaaagaaaagaagaaagaagatggcctgggagcccgcaagagcattttccaggcttagggcatcctttgggtctgcagaaggctatgcagtgtcctcctcatg

SEQ ID NO: 1566 - DNA, 120 bp, synthetic construct
  source 1..120: mol_type = other DNA
ccgcaagcttatcttaaagctgggaccacaacatgcatacctgcagccgggcccggggccagagggctttgaggcagcatttctcagccttttagacacacactctgttaacccccatcc

SEQ ID NO: 1567 - DNA, 120 bp, synthetic construct
  source 1..120: mol_type = other DNA
ttcttgccaatgtcttatagcaaatacctgtcccctgcggtgacctggatctgctaacctccacccctgcctagactgtggaaggattgctggaagggtctcagttgcacagaccaggaa

SEQ ID NO: 1568 - DNA, 120 bp, synthetic construct
  source 1..120: mol_type = other DNA
caagactccgtctcaaaaaaacaaacgaaaaacctttcccagccattcagtcattcccacagtctcaactcagtcctatgagtgacagtgcatgtcagtggccatcatatctcaagccat

SEQ ID NO: 1569 - DNA, 120 bp, synthetic construct
  source 1..120: mol_type = other DNA
ttcccacttttgacagagacagggagacaaagatatttcacttttctcttatcactactatgaggaaaacaacagcaaatgcttgatgacgcacgagagggaggaagcggggcggggcag

SEQ ID NO: 1570 - DNA, 120 bp, synthetic construct
  source 1..120: mol_type = other DNA
cccaccaagacacttcccatggcccaacattgccggaacgttcttctcacctgtagaatactcaccattactgagctcaagccctggaagcggcctgaagagaaagacacattgataaat

SEQ ID NO: 1571 - DNA, 120 bp, synthetic construct
  source 1..120: mol_type = other DNA
aaaacaaaacacaaaacaaaacaacaaattaaaaaaacaacaacacaaataaaactagctgagtttgttccttacgtttcctaaaccaggatttttctttaatgtcaggatttagaagca

SEQ ID NO: 1572 - DNA, 120 bp, synthetic construct
  source 1..120: mol_type = other DNA
tcccaagaaagctgttgggagaaatgcctgttagcacccgagaaagtgctttacctggattgttattcagtctacttttagcaataattaagcatcttggaaatttggaaatggaagcca

SEQ ID NO: 1573 - DNA, 120 bp, synthetic construct
  source 1..120: mol_type = other DNA
gtgctgggattacaggcttgagccactgagctctgccatcctccctgcaattaatcctgttagaaagaatgaaaaccatacttggcaatggggctttgggcaactaaccttcgattttca

SEQ ID NO: 1574 - DNA, 120 bp, synthetic construct
  source 1..120: mol_type = other DNA
acaattattgccaagatgcactgcttcattaggtggtgcaaaatcatgacagtcgtgacaatttatgacttctttttaaaagccttatgggtcaggtgtggcggctcatgcctgtaatcc

SEQ ID NO: 1575 - DNA, 120 bp, synthetic construct
  source 1..120: mol_type = other DNA
ttgatctgtggtttcgcggtcctcggtttgctccccaaggtcaaccaaagtctgcaaagagtaaacggaaaattccagaaataattcagaagtttgaaatcacacgttgttctgagcagc

SEQ ID NO: 1576 - DNA, 120 bp, synthetic construct
  source 1..120: mol_type = other DNA
ctgtattattgtttttctatgatgatgatacaagtcagttgggacaacaatccatggccacctgccaccctgcccctctcatttgtcctttaatgtgagttagaggatgacaggaactca

SEQ ID NO: 1577 - DNA, 120 bp, synthetic construct
  source 1..120: mol_type = other DNA
gaggtttcacctcacacagtccctctgcaacgcctgcaaatggatgattggcattaggtcagtttctaagcatttgtgctgtacacttccgtactttgtttctggtattgaaagaaaaaa

SEQ ID NO: 1578 - DNA, 120 bp, synthetic construct
  source 1..120: mol_type = other DNA
agtggagaccttaatttgggatctcggaagtaaatttgaatcaatctatcactcaattctcccctctctcatctctctctctctctctctatccattcatctaatctatctatatacata

SEQ ID NO: 1579 - DNA, 120 bp, synthetic construct
  source 1..120: mol_type = other DNA
cagagtctgaaacccacatttagagatgtgagggtgctcaccaaagatctagttcaaactttcctcttgagatgaagaaactgaaatttaaaggcatttagtgacttgcccatgagctcc

SEQ ID NO: 1580 - DNA, 120 bp, synthetic construct
  source 1..120: mol_type = other DNA
agaatatattttccactaaacctacacatggcctccccgtaaaacaaactcaggtattatgtgagaggagcatgctgtttcccagatgaggagaggaggatttgtaccttattgatccaa

SEQ ID NO: 1581 - DNA, 120 bp, synthetic construct
  source 1..120: mol_type = other DNA
ccaaagtgttgggattacaggtgtcagtcacctgcctggcccctgtgaattctgacatatataaagttacataggtaaaattaaggtataaaacagttctgtcatccccagaatattata

SEQ ID NO: 1582 - DNA, 120 bp, synthetic construct
  source 1..120: mol_type = other DNA
gaagggccaggattctcccccttatcttcagcagactcattccaagaccctcagcggatgcctggaactgcagatagtgccaaaccctaaatctattatgttctttttcttttttgagat

SEQ ID NO: 1583 - DNA, 120 bp, synthetic construct
  source 1..120: mol_type = other DNA
caaaggtgacaggtatggaattttcaacttgcatcaggtcagcggcattcaataagttttggattttggaacggttcaaattttggatttttggattagagatgttcaacctgtacatac

SEQ ID NO: 1584 - DNA, 120 bp, synthetic construct
  source 1..120: mol_type = other DNA
tcacagcgtgcaatttaaaacttacgaattgtttatttccggaattttccatgtagtattttcagaccacggttgacctcaggtaactgaaacagcgggtaaggggggacaactgtactt

SEQ ID NO: 1585 - DNA, 120 bp, synthetic construct
  source 1..120: mol_type = other DNA
ttaaaacgtgaattttacaatggatctcaacgaagctgttattaagaaacaagaaagcttgggcttgagggatggagaatacagccttgcgagcctttttccccctagaactcgaaacca

SEQ ID NO: 1586 - DNA, 120 bp, synthetic construct
  source 1..120: mol_type = other DNA
gtaaagtgtaactcatttcactcttctcaaaaatgtccatttcagagtaaaggtcctaatttacgcttctgtccacgacgaagtgacaaagaccagatataccctcccagctgcaacaat

SEQ ID NO: 1587 - DNA, 120 bp, synthetic construct
  source 1..120: mol_type = other DNA
tgcacagaccgctgtgtgaccccagatctaggtgggatcccggtgtgccccatctgcctggcttaccccaacccctctggaacctgaacctactcccagagtcccctctgtttttttatt

SEQ ID NO: 1588 - DNA, 120 bp, synthetic construct
  source 1..120: mol_type = other DNA
agtttctgtcccgtgggaggaaaagacgtgagtcctgtatgttctccagcaaaggtagagggtgagaggaccagaggcccacacagggggcatggctgggagtgcaggggcaggggggag

SEQ ID NO: 1589 - DNA, 120 bp, synthetic construct
  source 1..120: mol_type = other DNA
gaaattcaatggatgttttgaggtgccctctacttgatgcaagcctcggcgaggtggcagtggtggcctctgtccccatggcacagatggtctgttctgctttggaagcactggaagagc

SEQ ID NO: 1590 - DNA, 120 bp, synthetic construct
  source 1..120: mol_type = other DNA
gtgtgtgtgtatgtacagagagaggggtctctatggattggcagagggtatataaagtgtgtgtgtgtgtgtgtgtctgtgtgtgtataagtagattagataggtagatagataagagag

SEQ ID NO: 1591 - DNA, 120 bp, synthetic construct
  source 1..120: mol_type = other DNA
aaacaaaaaaaaaaaactggtagaacgttaggttcacaccatccaaagacgtttgcgtcttcttgtaggtaaagccttagggacaacagtgatggtgcctgttccctatgagaagatgct

SEQ ID NO: 1592 - DNA, 120 bp, synthetic construct
  source 1..120: mol_type = other DNA
tagttgagctcttgccctaagatataacatgaagggctctatcacttcttgtgcttctgatctgtgagtgattctacttaaagcacccgaatatggaagttaactttgcagtggtgctgt

SEQ ID NO: 1593 - DNA, 120 bp, synthetic construct
  source 1..120: mol_type = other DNA
ctacccgaaatacaagcaccattgcgcaaagattctttccatgttcgggagcacctacatctgcgaacagctgttctccattatgaaactgagcaaaacaaaatactgctcccagttaaa

SEQ ID NO: 1594 - DNA, 120 bp, synthetic construct
  source 1..120: mol_type = other DNA
aaatggatgtgcatttttttcctggaccgttcaagggaaagttacgtatatcatttacccctaaatacttcagtgagtattttcagagaacagggatattctcttacacaataacgtttc

SEQ ID NO: 1595 - DNA, 120 bp, synthetic construct
  source 1..120: mol_type = other DNA
cagctctcctctctgcatgctcagaaggcccagctccatgccccacaatgtaatatctgtaagaagggacaaagaaggtgggtgaagcttgctcagtatcctgcttaatgctatcagttt

SEQ ID NO: 1596 - DNA, 120 bp, synthetic construct
  source 1..120: mol_type = other DNA
acgccaccataatatcgagtctctcatgatcacacagaaacaatgcgatcagatgagcttaagctgcccgacaccacgaggtacaggaataaatctctctgcattttaggagcctaccct

SEQ ID NO: 1597 - DNA, 120 bp, synthetic construct
  source 1..120: mol_type = other DNA
ggggcgtcgtccccttccaggactccctggtttaacgcgcttccccccatgtcctagctgccctccctgtggcgtgagccttcggcctggtgcgccccgctgcccttcctggctgtgact

SEQ ID NO: 1598 - DNA, 120 bp, synthetic construct
  source 1..120: mol_type = other DNA
agaaagaatcctcagagcaggaacaccggctgagtgtggcctcccggaaatcagagagacagactgaaggaggagatcacgtgtgtgaaatgtctctgaggactgaaaagtgttaaatgt

SEQ ID NO: 1599 - DNA, 120 bp, synthetic construct
  source 1..120: mol_type = other DNA
acgatccaagccaaaaattctgtacattgcatgggtataaaccgacgggggctctggtcaagtcatggagtagatggtggtccaggagtcctggttggcacccccaaggctaggtcagat

SEQ ID NO: 1600 - DNA, 120 bp, synthetic construct
  source 1..120: mol_type = other DNA
cctggtttccctgggagtgcttgtggccattgggatactcccaagaaggtgatccaaggagctgagaaggggagggatcagctgctcatggggccatggcctgttgcctccaggaggagc

SEQ ID NO: 1601 - DNA, 120 bp, synthetic construct
  source 1..120: mol_type = other DNA
aaagtgttgggattataggtgtgagccactgtgcttagcctcccataaccctttgattcacgatactcataggctaagtgggtcctggaagctccggggtagccttctaaccaagatgct

SEQ ID NO: 1602 - DNA, 120 bp, synthetic construct
  source 1..120: mol_type = other DNA
tgggattacaggtgtgacccactgcgcttctccctataagagaggccttcctctgcctctctcttatagggatacttgtgatgccatgcaggacctgcccagataatccaggataacctt

SEQ ID NO: 1603 - DNA, 120 bp, synthetic construct
  source 1..120: mol_type = other DNA
ctggggtactgggaagagaagtggttggatagttgtgactttgctctctgggctttgttcctacctttccagcagtttctccatctccaaggtttgttttcctcgcatcccttaaacatc

SEQ ID NO: 1604 - DNA, 120 bp, synthetic construct
  source 1..120: mol_type = other DNA
aactctacttcggattttcccagagaaacccatttttccaaacaccaaaataaaaccaaagaaaacagacacctgaaacctctcgagagtgcaacgatctgtgctccttaccactcttgt

SEQ ID NO: 1605 - DNA, 120 bp, synthetic construct
  source 1..120: mol_type = other DNA
ccctcatcagactataaacttctgaaggagaggaaatctctctctttgtatctaacatgccttagacatagcaatgctcaagaccttttttcaataggtattaatctctacatcctccac

SEQ ID NO: 1606 - DNA, 120 bp, synthetic construct
  source 1..120: mol_type = other DNA
atataataaaatactataaagcagctgaaaattaatccttccagctgcaggttagtcctcccaccataaacaactgtagacatggacaaaatgtattgattaataaatttgttaaaaaaa

SEQ ID NO: 1607 - DNA, 120 bp, synthetic construct
  source 1..120: mol_type = other DNA
caaatagtttggaagtcactaaacgtatgtactactacagccttcaatgattaaaaacagacacactcacaaatacatagcaaataaaatgagaagaatcatctaaatgccagagttact

SEQ ID NO: 1608 - DNA, 120 bp, synthetic construct
  source 1..120: mol_type = other DNA
gtcagttaatatggtaggcactgatgacgtattcatgacacaaagctggtcccaatgctagaatgatctttgttcgagatccaggttgctgctgccactagagggcagccgaagctcatc

SEQ ID NO: 1609 - DNA, 120 bp, synthetic construct
  source 1..120: mol_type = other DNA
cgtctatttcatcctcccaatagtcctactccatgtccagcaaggagtgaaaaggctgaggcgagtcacagggagaagagggccccagtgaacagacgaaatgaggaagaagatctggag

SEQ ID NO: 1610 - DNA, 120 bp, synthetic construct
  source 1..120: mol_type = other DNA
ttgactacacacaccctactctaggaaaacagcctgaaaaaagctgcaccttcccctgccccagatactgtagacactgtggaacaaagacctgttgaccctccccaccttgggccaaca

SEQ ID NO: 1611 - DNA, 120 bp, synthetic construct
  source 1..120: mol_type = other DNA
cagacaggtcacaaatgagcattggggaaagaggggaaagctgagggagcgctacatcatcacatcaactgagcatggacttggggaaataaggtacaccacaagctgtgactcaattca

SEQ ID NO: 1612 - DNA, 120 bp, synthetic construct
  source 1..120: mol_type = other DNA
tttaaaagcaaagacacaatgaagacatttgcagacatataataattcatcatcaactagaagaaatgttacagaaagtccttcaggcagaagtaaaatgacagcaaataaaaatttaga

SEQ ID NO: 1613 - DNA, 120 bp, synthetic construct
  source 1..120: mol_type = other DNA
aaataggttaaaagtaaaaggatggaataagatataccatgcatgtattactcaaaagaatgctacataaataacaaagtacatttcacagcctggaatattagcagggataaggaaggc

SEQ ID NO: 1614 - DNA, 120 bp, synthetic construct
  source 1..120: mol_type = other DNA
tcggttccagttaggccgttccatgaacccgagggccaggaagaaccgctctcgcatacccttgctccgtaagcgtcggttccagttaggccgttccatgaacctgagggccaggaagaa

SEQ ID NO: 1615 - DNA, 120 bp, synthetic construct
  source 1..120: mol_type = other DNA
tggagtcgtcaccaaagtgtgagtttcacagttgaacaccaaggttcagaagcagggtatagaatgaaaggcagcagataaaattgcatttctcaattgctctgaactctagacttgaca

SEQ ID NO: 1616 - DNA, 120 bp, synthetic construct
  source 1..120: mol_type = other DNA
ccttcaaaggtaggattgatgatgcctcagtagactatgtcccatggcacaaagaaggaacaaccctatttcagagcaatagggtggctgggcacggtggttcacatctgtaatcccagc

SEQ ID NO: 1617 - DNA, 120 bp, synthetic construct
  source 1..120: mol_type = other DNA
aattttagccctgcctgaaatatgaagggaaactgacctggggacgggccaaggctagactgagccctggctctgtcagaatggcccctagccccagcagcaggatggaatgtcagtcta

SEQ ID NO: 1618 - DNA, 120 bp, synthetic construct
  source 1..120: mol_type = other DNA
aaggcctttgatactctaagtgtggtctgtgaacgttggcatcacctgagaatttgttagaaatgtatcatttaaagccccatcccagacctagaaatttgcatcttaaatcccagggtg

SEQ ID NO: 1619 - DNA, 120 bp, synthetic construct
  source 1..120: mol_type = other DNA
aaaaaaaaaaaaaaaggtctctggcaaaatgctccaggcttggggtccgacgggtacttctacccctgacaatctgtttacttatcaccatcctcttttcagatggggaagttctttcca

SEQ ID NO: 1620 - DNA, 120 bp, synthetic construct
  source 1..120: mol_type = other DNA
aagttaggcatacccttctatgccctcctttatccaaacattttccccactatatcgtaattgtgtgtttaagtgccggactttccaactagatacaaagctttcccaggaaagaaatcc

SEQ ID NO: 1621 - DNA, 120 bp, synthetic construct
  source 1..120: mol_type = other DNA
tggcgtcttgccactgcttctcctgtttaactaactagtcttagaagatgctttccactttaagacatgctttatgggatagaagacacaagtcacgatttctgcatttgaagtggcagt

SEQ ID NO: 1622 - DNA, 120 bp, synthetic construct
  source 1..120: mol_type = other DNA
tgttagaagtggccacttctgcctgtggagcgggagcgaacttaggaaagatctcacagggcagagtcttgagctaggaattaagagatgagtaagtggacaagtgcgatgggcattctc

SEQ ID NO: 1623 - DNA, 120 bp, synthetic construct
  source 1..120: mol_type = other DNA
aatctcagtctgataagaattctgctggaagagctccatcaggttcaggtaatagggctgctcccggcaatacagcttcagcaggcagtagatacatgcttccagaaggatagcatcatt

SEQ ID NO: 1624 - DNA, 120 bp, synthetic construct
  source 1..120: mol_type = other DNA
ttcagcaggtctgcagtgatcagatgggtttctcacatattgttaagttgaaagtagccgtggctcagtatgagttgagtacctgtttaaaatctgcattcaaagccttcttcccagagg

SEQ ID NO: 1625 - DNA, 120 bp, synthetic construct
  source 1..120: mol_type = other DNA
aataaataaacaaatagcagcatgactgtgtacctactgtgttcctatttgtttattttggcggttgaaaaaagaatttgaacgttccctgtatcttggggatgctagcagactaacctt

SEQ ID NO: 1626 - DNA, 120 bp, synthetic construct
  source 1..120: mol_type = other DNA
ttccgctcttagccgggaagactcaccccaattcctgcagatgcggctcctgccccctaggtggtcctgccgtggcatctcatttgcatgtggcatgtgggtgccgaggtgccgtggcca

SEQ ID NO: 1627 - DNA, 120 bp, synthetic construct
  source 1..120: mol_type = other DNA
taaaaaagataaaatgaggaacccccccaggatttccctggatttggccaaggtgaatgggctggccgtagccctctgactgtctgggtgacttggggcttcgtcattcattattgagaa

SEQ ID NO: 1628 - DNA, 120 bp, synthetic construct
  source 1..120: mol_type = other DNA
ctctggatccttgtacggttcagttcctagaggtcacagcagggacacacaccggggaggaactgcgattatatgggggaagtggtgacatttttagagctttctacagaacattctcct

SEQ ID NO: 1629 - DNA, 120 bp, synthetic construct
  source 1..120: mol_type = other DNA
agagcaagaagctgctctttgcttagcacggccacagaggcaatcctgtttgagaacagtcaacaaacaaactcaaacaggccatgcacagtggctcatgcccataatcccagtgctttc

SEQ ID NO: 1630 - DNA, 120 bp, synthetic construct
  source 1..120: mol_type = other DNA
taaggatccttaaaaatacctactgctggcccccacacccattctgttttagcagcctggctagcagggttttcagaagctccacaggtggcaggattttttttcttttttctttttttg

SEQ ID NO: 1631 - DNA, 120 bp, synthetic construct
  source 1..120: mol_type = other DNA
cgtgtgtgaattcatttcgtccttaaatcactgaggtggaggcttttgttcccattttcattagaggaaactgaggctcggagaatttaaaaattctctgccagcccttggcagagctga

SEQ ID NO: 1632 - DNA, 120 bp, synthetic construct
  source 1..120: mol_type = other DNA
tcagccagacgggccagagataagcaccatgccagttgcacctgagcatctttcagctttcatcagtttatgcctaatcctgctcagtaggtgccacccccatgttgcccacgaggactg

SEQ ID NO: 1633 - DNA, 120 bp, synthetic construct
  source 1..120: mol_type = other DNA
aagtgttgggattacaggcctgagccactatgccaagccagattatcttaacaactgctatatttcccctacatgcctaattatgtctcagtagaagcctaggatgacagcagatctacc

SEQ ID NO: 1634 - DNA, 120 bp, synthetic construct
  source 1..120: mol_type = other DNA
agacttgagtttgatggctcactctttgggcaagcttccctgggcttttcttccttgcacatacctctgctattagtcaagcctacgtcagtctcccttcacctgtaagggatatgacga

SEQ ID NO: 1635 - DNA, 120 bp, synthetic construct
  source 1..120: mol_type = other DNA
gtaaattcagacttttagaaacaagccagtttagcagttgtccagctgcccatcttagccacctgccctgcaagtaagaagcttccaaggccctgttgtctattccacaaaggaaatgta

SEQ ID NO: 1636 - DNA, 120 bp, synthetic construct
  source 1..120: mol_type = other DNA
gcgagactctgtccaaaaaaaaaaaaaaaaaaagtacacagggtcttgctctgttgagggcaatagcaccatcatagctcactgcagccttaaacacctgaactctgatcctcccacctc

SEQ ID NO: 1637 - DNA, 120 bp, synthetic construct
  source 1..120: mol_type = other DNA
gacccaagaagcccccagaaggtagggggataagctgaagaattgttaaagattttatttatttattttttgagacagtgtctcccaggctggagtacagtggcgtgatcatagctcact

SEQ ID NO: 1638 - DNA, 120 bp, synthetic construct
  source 1..120: mol_type = other DNA
tcttgcataaaggtccacagcctaaggggcagtggcaggagcagcggcaggaaatattcctggcaggggttctttgtctgaaattttccgcctagagatggtgtcttttttttttttttt

SEQ ID NO: 1639 - DNA, 120 bp, synthetic construct
  source 1..120: mol_type = other DNA
gtagggagatcccgctgggctgaagaggcagagatgaggaggcagagatcaggctgagacagctgaaatggcagagaaatggggcagaaaaaagaaaggagggcactatgcaaagaggga

SEQ ID NO: 1640 - DNA, 120 bp, synthetic construct
  source 1..120: mol_type = other DNA
agatgattggctcatggcggctgacgtcccccttgctggtctcgtgatagtgagtgagcgctcatgggatctggttgtttagaagcatgcagcacctcctgcttcactctctctgtctct

SEQ ID NO: 1641 - DNA, 120 bp, synthetic construct
  source 1..120: mol_type = other DNA
aactgaactcccaggtgccgacagagtccggtccctccaatcaggaaggtcggaatctctgatgtcatcgctcatgccaacctggcaaccagtttgaaaaaaaacacatgtaactgccag

SEQ ID NO: 1642 - DNA, 120 bp, synthetic construct
  source 1..120: mol_type = other DNA
tttacataatgcaatggtttggtaagcacatgcaccccagggaggtagtggcagattcagtcaaccttcccagcagcgtggagacgcagtcaggcatagcaggtgttgatgtggtttgaa

SEQ ID NO: 1643 - DNA, 120 bp, synthetic construct
  source 1..120: mol_type = other DNA
ctggaacagggctatctgagagcggttcttcctggccctcgggttcaagcaacggcataactggaaccgacggttacggaccaagggtatgcgagagcgggtcttcccatacaggaagta

SEQ ID NO: 1644 - DNA, 120 bp, synthetic construct
  source 1..120: mol_type = other DNA
gcatagctgaaattttgtactctttaactattactccccagtttctcctaccccaagtccctggcaaccaccatcccactctgcttctatgagtttgactgctttaagttccatatataa

SEQ ID NO: 1645 - DNA, 120 bp, synthetic construct
  source 1..120: mol_type = other DNA
agctccattacccattttttaatgggattatttgagttgttgctattcagttgtataagttccttgtatgttttggatgttaaccccttgtcacatatatagtttgcaaatatttcctcc

SEQ ID NO: 1646 - DNA, 120 bp, synthetic construct
  source 1..120: mol_type = other DNA
ggaaccgatgcttacggagcaagggtatgcgagagcggttcttcctggccctcgggttcgtggaacggtataactggaaccgacgcttacggagcaagggtatgcgagagcggttcttcc

SEQ ID NO: 1647 - DNA, 120 bp, synthetic construct
  source 1..120: mol_type = other DNA
ccttctgggacccagaaacccagtgaaccctcaggaaaaaagggaatgaaattactgaagacaactctgtggcagggagagggaaaagaggctctttgtttttgttttttattttttatt

SEQ ID NO: 1648 - DNA, 120 bp, synthetic construct
  source 1..120: mol_type = other DNA
gggtaccttggtgtccttgttaatggtgatcctaggaagacacagaggccacagatgaggagcaggggctcccctcctcccaccctgagtctaaaccctgtctcctcccggccaggtgtg

SEQ ID NO: 1649 - DNA, 120 bp, synthetic construct
  source 1..120: mol_type = other DNA
agggcaactatgctgacagtaaaatctcacacaggtgagaggtatcaagttgaatatccttttttctaaggtggtttctccaggctgacaccacacacattttagggtgcatcattcttt

SEQ ID NO: 1650 - DNA, 120 bp, synthetic construct
  source 1..120: mol_type = other DNA
gcccacagatacagagtgagcccaagctctctcccctggactccttcaacccgcaggcagcgaggagccactgcggcttttacgcaggccgctgacagatcggaggggatgaaggatgga

SEQ ID NO: 1651 - DNA, 120 bp, synthetic construct
  source 1..120: mol_type = other DNA
gcacaacgtgtggcctgggtaccacagggccagaagagagggacaggggccctgctcctgtcacctgctgcttctgccaccccaggaccaagtcattggtgtgagccggtggccagacat

SEQ ID NO: 1652 - DNA, 120 bp, synthetic construct
  source 1..120: mol_type = other DNA
tgggactcaccacagcatggcctccacgcccagcaggtgccggtagatgagctgggcctcaaggtcatggtcaagagggtcattccactcctgcagggtcacccgtgaccgggtcttatc

SEQ ID NO: 1653 - DNA, 120 bp, synthetic construct
  source 1..120: mol_type = other DNA
ctttatgaccttgccaagtcatctgccttccctaagcctcagcttctcctccatacagtggaataacaggccctgtctcttgggccagggtgggtcccaccttgccgataatgagagtat

SEQ ID NO: 1654 - DNA, 120 bp, synthetic construct
  source 1..120: mol_type = other DNA
caggctgggcaaaaggcagagctgccctagacacctcccctgggttccccacagcctcctcgccttggaggttctgccacagcagaggttaaaatgtcctgtccaagctcccacccattt

SEQ ID NO: 1655 - DNA, 120 bp, synthetic construct
  source 1..120: mol_type = other DNA
gaggaagattggatcatcgacttgtccctgagccccccctcccccacttgtcaccaccattatgtaaccacagcgggccaaaaggcctgggcacattccgtccctggcaagctgactgtg

SEQ ID NO: 1656 - DNA, 120 bp, synthetic construct
  source 1..120: mol_type = other DNA
cacacgtgtgcatgcctgtcccccagacagcctggtgcctggaaaggataaggatggaggaagcgggtgagttggggtggggcgggggggaatgaatggcagaggccagagagtgagcga

SEQ ID NO: 1657 - DNA, 120 bp, synthetic construct
  source 1..120: mol_type = other DNA
catgctgcagaacagaggccaggagtacagaacgtggccccggcttctggggagagtagaaatggctttccctgagcaggagaccagacggagcctagaggggaggtctccgagtgggag

SEQ ID NO: 1658 - DNA, 120 bp, synthetic construct
  source 1..120: mol_type = other DNA
ggctttgggtccacagtcttcacagttcccaaggcatgttcaccttggtttagccttactgtggccttgtgggttcagggttaccatcctcattttacagatagggacagtaaggctggc

SEQ ID NO: 1659 - DNA, 120 bp, synthetic construct
  source 1..120: mol_type = other DNA
ctctccccctccaccctccacacctcaggaccccgctcaaacattatctgcctgtctcccctgatcaaaacccactcccggctcccataggctgcaggatacagcccagttcctcagcta

SEQ ID NO: 1660 - DNA, 120 bp, synthetic construct
  source 1..120: mol_type = other DNA
aagtgcctgggctgagggcagtgatgggggccgcacaggcgggcaggaaaagaaattttacctgaccggaaggggcccttgggcagaatccagaccaatcaccgccctgcctcccctact

SEQ ID NO: 1661 - DNA, 120 bp, synthetic construct
  source 1..120: mol_type = other DNA
tcccagctaccccctcctctcaaacaactggttggacaggtttgggggcagaatctgccagcccagtgaatctggcatcgccagggaggggtctgaagagaacatacagttgcaagacaa

SEQ ID NO: 1662 - DNA, 120 bp, synthetic construct
  source 1..120: mol_type = other DNA
gggaccggctgtctcttcctccttcatccccagcctctgtcagggcagggtagttcctcctcgagacagaaaattaccagatggaagtccaggcatggtggctcacgcctgtaatcccag

SEQ ID NO: 1663 - DNA, 120 bp, synthetic construct
  source 1..120: mol_type = other DNA
tccagactcccagaggggccacagggatggccacgccaagctctggggagtagccgattccccagcacctgcctgcccatgcacctttggggtgactcatgagacagggtggggctccca

SEQ ID NO: 1664 - DNA, 120 bp, synthetic construct
  source 1..120: mol_type = other DNA
agttggacaacagtatcttctcagagctgttctctactcctgacttctcctaggcttgagaattgataacatactcttctggatcctagaagtgtccagaagaaggccatggacagaacg

SEQ ID NO: 1665 - DNA, 120 bp, synthetic construct
  source 1..120: mol_type = other DNA
gacgaggactccaaacaaaacatcttccacttcctgtataggaagaaccgctctcgcatacccttgctccgtaagccttggttccagttaggccattccatgaacccgagggccaggaag

SEQ ID NO: 1666 - DNA, 120 bp, synthetic construct
  source 1..120: mol_type = other DNA
catttctacagactcacaagatgcaatctctgtggtccatgcccgtggtgtgatctgggaagcagggggccttctaaatgccaacaacaaggaaatcaaatgtgcaacaaacagaaataa

SEQ ID NO: 1667 - DNA, 120 bp, synthetic construct
  source 1..120: mol_type = other DNA
attgatatctttaccagttgcacaggggcttttccatgccagactgaaaacgcagaagatcaatgatcaaccttcaactatttactagcagaacactgaggggactgtgcggtcaccaat

SEQ ID NO: 1668 - DNA, 120 bp, synthetic construct
  source 1..120: mol_type = other DNA
gcctccactctccctgccagaccttctggtgtccttgtgggaaggctgggggtggcccagcatgggcctcctgggctagaggtggctctgggggtgatggcagggctgactctttcagtc

SEQ ID NO: 1669 - DNA, 120 bp, synthetic construct
  source 1..120: mol_type = other DNA
catgaagcaggcatggccctgacccttggggcctctgtcctaacctgagctggcctcgtgctgcagagaggtactcctggtgccctccccagatgtggccaattacaagagaggtgacca

SEQ ID NO: 1670 - DNA, 120 bp, synthetic construct
  source 1..120: mol_type = other DNA
tgtctgccaagactcagttttcctacctataaagtgggaagtgtaaccccggctcacaagggagcttccctgggtcctgagacgatagagaaggtcttggaggtgctcagtaaatgttag

SEQ ID NO: 1671 - DNA, 120 bp, synthetic construct
  source 1..120: mol_type = other DNA
tagtgttgaggcccctaggctgcccacctctctcatttctcctttcccgagccagttgccactggcctgtctggctactttcggggcctctatatttagggccttggcagtttctaggct

SEQ ID NO: 1672 - DNA, 120 bp, synthetic construct
  source 1..120: mol_type = other DNA
gttgtcaccccgtctggtgctcgcagaaaatgtcactgtccccattttccccgccgatcccccaccacggccgcactcccgcaccctctccgctgctcttgtgggtggaccccggaaagg

SEQ ID NO: 1673 - DNA, 120 bp, synthetic construct
  source 1..120: mol_type = other DNA
caaagggctgggaccacagatgtgagcccaccatgcctagtcaaacaggagtataatagtaatgaatatgtaataatgaatctgacctgactggtatcagtcagtctttatgccaaagca

SEQ ID NO: 1674 - DNA, 120 bp, synthetic construct
  source 1..120: mol_type = other DNA
ctcaattgacatgggacgtgaataactttcctgtctagagagctgcctccttgaagtgtgacattgtctctctcgcttccagaacaccggacccaggggagatgtggattttcagcggga

SEQ ID NO: 1675 - DNA, 120 bp, synthetic construct
  source 1..120: mol_type = other DNA
ttggaaatactggtatttttgaatagatgctgtttctataaagctgtgtgatggatattataactgttatatacacatacatataattttgttttcctttttaagagaggattcttttca

SEQ ID NO: 1676 - DNA, 120 bp, synthetic construct
  source 1..120: mol_type = other DNA
aaagcatggttttcttgtatttttattcatcttgaaattcttcactaacttttttggtgtaggatagtcagtagacttagcactctgtggttctaccacaggttgctctttacctacttt

SEQ ID NO: 1677 - DNA, 120 bp, synthetic construct
  source 1..120: mol_type = other DNA
attcacacagctgtacaaacaaataatgactgaaaaaaaaaaagaatgttttctattcttatggctccagcttccaattctgtatgaaagatttctaaatctacattttctgttgtggct

SEQ ID NO: 1678 - DNA, 120 bp, synthetic construct
  source 1..120: mol_type = other DNA
taggaggttggcaattttctttttagcacctgcctgtctgctatcattcaaactcacatttaaaatgtggctatgtgagatgagagaactataatattccaggtttgtgattagtttgga

SEQ ID NO: 1679 - DNA, 120 bp, synthetic construct
  source 1..120: mol_type = other DNA
agtaggtattgcatatcatcagaaagttctaagaagatatattacctctctcgtgaaaaaatgggacaggctactctaaaagattattgattaggctgggcgtggtggctcacgcctgta

SEQ ID NO: 1680 - DNA, 120 bp, synthetic construct
  source 1..120: mol_type = other DNA
ggctacttgacaccaaatagcttgtgtcagattcaccctcccaccataaaaaactatacaatctggccaaaatatagaaaaaattcttggcaggtgtattagtctgttctcatgctgcta

SEQ ID NO: 1681 - DNA, 120 bp, synthetic construct
  source 1..120: mol_type = other DNA
aaacttcctggaaagctactggagttcagatccagccaaatggggaaatgttggcaaacaactgagaaactcagttgggactctaaaaattctcttaggagaggtgcagtatcccaggag

SEQ ID NO: 1682 - DNA, 120 bp, synthetic construct
  source 1..120: mol_type = other DNA
ggaagtttcaggtgaggaaacagggacacaccttcccggaggaggggcagggcccctccgcgcgcgagccccattggtgtgaaagaagctcccgcgtcagagctgggaagtgccgggccg

SEQ ID NO: 1683 - DNA, 120 bp, synthetic construct
  source 1..120: mol_type = other DNA
gatggctcaacactgaaaatttggaaatggggtcaacagataaagtgtcctctatgtattccgtatgttttttgtgagtactcactctgtgctaggaatgtataggtgtaaagagatgaa

SEQ ID NO: 1684 - DNA, 120 bp, synthetic construct
  source 1..120: mol_type = other DNA
aaaccctgatttcttttacaggactgggttgttaacacactccttgtgaacaaggaaaaggtgctctcacttttgtaatcctgacagtaaatacttactgtgtggacaaattaatcaata

SEQ ID NO: 1685 - DNA, 120 bp, synthetic construct
  source 1..120: mol_type = other DNA
ataccgattacagtaggcaagatttaagcaagccagaaattccagattcagtccaaagacggtaaaaaaacaaacaaacaaacaacaacaaaaaaaaaaccaaaaaatgatatttaggca

SEQ ID NO: 1686 - DNA, 120 bp, synthetic construct
  source 1..120: mol_type = other DNA
tcctttcgggaggggaggaaagaatcctctccaaggcagcttcctctagcagtttcctgcctcttgtgggatgagaagatttgctgtctaagatattatcatatttatttgtattttgct

SEQ ID NO: 1687 - DNA, 120 bp, synthetic construct
  source 1..120: mol_type = other DNA
tcttaaagtggaaggtttaattaagggcgggctatactaaggttcgacataccatcagccaaatacaccagtggtcattcacctcttaaactttccactcttgcactgatcatcacctcc

SEQ ID NO: 1688 - DNA, 120 bp, synthetic construct
  source 1..120: mol_type = other DNA
tttattagtcatcaaataatttgccaaatttttaaatggctaacttgtacatatatatcacttaaagcaagcttgtccaaattgcaggtggcccaggacagctttgaatgtggcccaaca

SEQ ID NO: 1689 - DNA, 120 bp, synthetic construct
  source 1..120: mol_type = other DNA
cttgaatctgatatgtcaaaactacagtgagccgtaatcacaccaccgcattccagggcaggtttcacagggaaaccgtctcaaaaaaataaataaataaataaagatgtttataaggtg

SEQ ID NO: 1690 - DNA, 120 bp, synthetic construct
  source 1..120: mol_type = other DNA
gtgcactggcaaaatactggatttctacatggtatattgaggaaaatgttatctaggacttaaggacaaaaacccaaatattatttggcacatcaccaattcacaaataccaattacctg

SEQ ID NO: 1691 - DNA, 120 bp, synthetic construct
  source 1..120: mol_type = other DNA
tgtattgtgaaaaatgttgacagagtagattttaagtgttctcaccataaaaatgacaagggtgttagataattcatatggtaatttgcccaatttagtcattccacaatgtacatacat

SEQ ID NO: 1692 - DNA, 120 bp, synthetic construct
  source 1..120: mol_type = other DNA
aggcaaaagacaaacacatacagactgcagcaggcagacaggccggttccagagtcaggctccggtgaagctccgaagaaacaaacacgcagggagatttcggaggcgtccgaggacacc

SEQ ID NO: 1693 - DNA, 120 bp, synthetic construct
  source 1..120: mol_type = other DNA
actttctgtctcgttgatctgtctaatgttgacagtggggtgtgagtttggaaaattcatttaaaggagttcatttctttttcaagttttcaattatccatcatcctagcctgaagcttt

SEQ ID NO: 1694 - DNA, 120 bp, synthetic construct
  source 1..120: mol_type = other DNA
atggatgtaatggatcaatggagtggatggatggagcagacagatggagcagatggatagagtgaacagatggaatggatggatggagtggacagatggaatggatggatagatggagtg

SEQ ID NO: 1695 - DNA, 120 bp, synthetic construct
  source 1..120: mol_type = other DNA
cagaattcggaccccaccttgtatagaccaatttgtaaagtagctctccctgtgctgagctgaaatctggtacccacctggccctggtttctctctttccttggcactgctcaccgtcta

SEQ ID NO: 1696 - DNA, 120 bp, synthetic construct
  source 1..120: mol_type = other DNA
cctgcatttggaaccagcctcagcatgtggctgccacacaaaatggcccaaccactggacaatggcatgttcttgtttctctctatatatttttttaaaaaactaggtgtctgatgtata

SEQ ID NO: 1697 - DNA, 120 bp, synthetic construct
  source 1..120: mol_type = other DNA
tttatggtgatactgtaagcataaaatagatacacatgaacaaaaggaacgggaggaatggcttttttccctttggatgtaacaaatacagccagctcccagtttcaaactgccactcct

SEQ ID NO: 1698 - DNA, 120 bp, synthetic construct
  source 1..120: mol_type = other DNA
agccatcaaccaatgtcatgggggaaaaagccttgtcattttaaggtattaaccagacaatgaaatatgccacaattttggtatttcttctccatgagaacataataaattaatggagct

SEQ ID NO: 1699 - DNA, 120 bp, synthetic construct
  source 1..120: mol_type = other DNA
tgatgaagcagcaaaaatcattaatgttttaagtcttgatccatgaatacacatcttttaattatctatgtgacaaaacgagaaataaagagtaaaataattgttacaccatagtttttc

SEQ ID NO: 1700 - DNA, 120 bp, synthetic construct
  source 1..120: mol_type = other DNA
gagaggaagtcaaaatatcaacatgaacaggtgtctggaagaagttgattccaactctcatggataactttgaggggttcaagactcaagtggaggaagtcattgcagatgtagtggaaa

SEQ ID NO: 1701 - DNA, 120 bp, synthetic construct
  source 1..120: mol_type = other DNA
ttttcttcactctgaagtaagtatttccaacagtgtattatgtcagaagttctcagttttgggggtgctgtatcttaatttttctgtactctattttcaacttcactgaaataatacaag

SEQ ID NO: 1702 - DNA, 120 bp, synthetic construct
  source 1..120: mol_type = other DNA
taagactccatcaaaaaagacaaggacaaagacatgacaagagagaaaaaataagtataaaagacagagagagagagacttcaaaaaggaggacagggcagggcacagtggcccatgcct

SEQ ID NO: 1703 - DNA, 120 bp, synthetic construct
  source 1..120: mol_type = other DNA
tagaagttttcattatcatcccccttcccactttacagaaagaaacacggacctggagaggtgaaaagtgacttgcttaatgacttgaaaaccatcttccaggaactgtgcttagcactg

SEQ ID NO: 1704 - DNA, 120 bp, synthetic construct
  source 1..120: mol_type = other DNA
tgtctacttataaactaggcactactgcttcaatatattaaaaaaattattctagaagatagtttatcgtactcagggttccccccacctatagctgcagaccaataccactcggtagcc

SEQ ID NO: 1705 - DNA, 120 bp, synthetic construct
  source 1..120: mol_type = other DNA
atggcagggcccacacaagaaaaaaaagagcattttatttcgtgcaacttttatggcccagagaatctctgaccccccaccccctcaacacacaataatcagttgatctccctctccctc

SEQ ID NO: 1706 - DNA, 120 bp, synthetic construct
  source 1..120: mol_type = other DNA
ttttttttttttttttctgaaacccattacacatagaccactgctcctctttaagtaggagattgtaggagatgatatctgtgattttttttttctggttccatcagattctttttctga

SEQ ID NO: 1707 - DNA, 120 bp, synthetic construct
  source 1..120: mol_type = other DNA
atgtttgcatattttagtataatttgatatatttaccctgtatttgtttaggggtaactatctccttcctgctgtaatcagtgaccaggttggtattgccacatgttcttgcctcccctt

SEQ ID NO: 1708 - DNA, 120 bp, synthetic construct
  source 1..120: mol_type = other DNA
aaaaggatggccaattattgtggctttggcaattttcaattcatggtggcatatttttacagtcagaatgtcagagaatgtccaggatgtctctggatcttcagagcctctgcttgatcc

SEQ ID NO: 1709 - DNA, 120 bp, synthetic construct
  source 1..120: mol_type = other DNA
taccaatgcctttaattccttgaaggttaggtatcactgcagaggaaaggcttaatggtcgatgggcctacagtcagggagaaaaaagccagcctcccgcccccataccttgtactcctg

SEQ ID NO: 1710 - DNA, 120 bp, synthetic construct
  source 1..120: mol_type = other DNA
tgtctggtttgggattctacatataatacaatcctaaggttatattttgcgtattaatttaaccctagtttttttctcttgtggttaaatattctgtgaaaatacatttaagaagtacat

SEQ ID NO: 1711 - DNA, 120 bp, synthetic construct
  source 1..120: mol_type = other DNA
gactgagagccagtccctcttccccccctggctcttaggacgcccatcacaggagggggacgcaccccccatgaggcagggactgagagccagcccctgttcccccactggctcttagga

SEQ ID NO: 1712 - DNA, 120 bp, synthetic construct
  source 1..120: mol_type = other DNA
ggactcccatcacaggggggggaggcacccgctgcgaggcggggactcagagccaacccctcttccccccctggctcttgggaccaccatcgcagggggggaggcaatccccgcgaggcg

SEQ ID NO: 1713 - DNA, 120 bp, synthetic construct
  source 1..120: mol_type = other DNA
ttttctgggagattcgatgattaggatgattcttgaagagttaatgggagataaccttgagaaggaggagaaagctatctcaggtggaggcaacaaccccatggttatcagagaagcagc

SEQ ID NO: 1714 - DNA, 120 bp, synthetic construct
  source 1..120: mol_type = other DNA
attctattgttgattcttggagtaataagaattgagagattacccagaagcaatgggcagtgtaataagaggagagggctggagaacaagctgggtgactcccatgtttacaggcttctg

SEQ ID NO: 1715 - DNA, 120 bp, synthetic construct
  source 1..120: mol_type = other DNA
ttcctatttgactaaggtgatttaaaatgcctttgcattgttgcactgtttgtgtagtgattgtaactctgtactaaagccaattaactttgtagttggatgggttataaaatactcact

SEQ ID NO: 1716 - DNA, 120 bp, synthetic construct
  source 1..120: mol_type = other DNA
tccttccttcatgatctcaactctctgtaaattacatgtgaatgcattcaggactgtattttatatatcatctctttcatgttttgatttgctttttccaagcagacattaagtgtgctg

SEQ ID NO: 1717 - DNA, 120 bp, synthetic construct
  source 1..120: mol_type = other DNA
ggtaaccaccgcctgtggaccctcaccccttcctccactgtcagaggcagcataatggctcagtttgcatttcaaggctgatagaatcaagtttgctaatgctggtcctgctgccaccta

SEQ ID NO: 1718 - DNA, 120 bp, synthetic construct
  source 1..120: mol_type = other DNA
agaacagggatctcatgttttctcaccagccatgcatgcccaaggcatcttcctatgagagccctgaggagggaacggccaatcccaggttccatgcagtgcctccagcctgttcctggg

SEQ ID NO: 1719 - DNA, 120 bp, synthetic construct
  source 1..120: mol_type = other DNA
tgttttctggaactgtgatgttgtttatgtcgagtcccagaagttaaggcagaagggaattgagaaactgaccctgaaattatgtcataaaaaactgagagttaaaaaagaagccatggc

SEQ ID NO: 1720 - DNA, 120 bp, synthetic construct
  source 1..120: mol_type = other DNA
aacccctttctcattctgttccatctgctgccctacacgatgttccatttcagggctcgtttctgagcatggaccagttgctaggcacagttctgcagatatacagtgagcagaaacaac

SEQ ID NO: 1721 - DNA, 120 bp, synthetic construct
  source 1..120: mol_type = other DNA
cacagctcctgcaggacagggggaggaagagcagggggttagtggcattggggacacccagcaggacgagggccacggcacccacgtggcacaaccccttctcctgctaagatccaaggt

SEQ ID NO: 1722 - DNA, 120 bp, synthetic construct
  source 1..120: mol_type = other DNA
ggacagacggcgcctccactgtgtgtgtgaccgggacagatgacacctccactgtgtgtgaccaggagccttttggcttgtgtttcctgtggggtttccatacccagggctgtagaagca

SEQ ID NO: 1723 - DNA, 120 bp, synthetic construct
  source 1..120: mol_type = other DNA
ggtgtgcatgggtctgtgaggtgtgcacgtgcctataatgtgtgcacgtgcctatgaagtgtgctgggtctgtgaggtgtgcacgtgcctatgaagtgtgctgggtctgtgaggtgtgaa

SEQ ID NO: 1724 - DNA, 120 bp, synthetic construct
  source 1..120: mol_type = other DNA
aggtgtgcatgggtctgtgacatgtgctgggtctgtgaggtgtgcacgtgcctatgaagtgtgctgggtctgtgatgtgtgcacaggtctgtgaggtgtgcacgggtctgtgaggtgtgc

SEQ ID NO: 1725 - DNA, 120 bp, synthetic construct
  source 1..120: mol_type = other DNA
ctagttttagttcagcgtgtgtgtgtgtgtgtggttgttaggaggggaactagtttcggttcagcgtgtgtgtgtgtgtgtgtgcgtggttctgttaggaggggaactagttttggttca

SEQ ID NO: 1726 - DNA, 120 bp, synthetic construct
  source 1..120: mol_type = other DNA
tgtgtgtgtggttgttaggaggggaacttgttttggttcagcgtgtgtgtgtgtggttgttaggaggggaactagtttcgtttcagtgtgtgtgtgtatgtagttgttaggaggggaact

SEQ ID NO: 1727 - DNA, 120 bp, synthetic construct
  source 1..120: mol_type = other DNA
cacttggcagcttttaaaaatacagcgtgcgtgagtgcagtgtctatcccatagtggtctacactcgagaaactcggcagctttaaaaatagagcgtgtgcgagtacagcgtctctccca

SEQ ID NO: 1728 - DNA, 120 bp, synthetic construct
  source 1..120: mol_type = other DNA
agtgtaaaatcgctgatcactccaggtggtgaagggtggatgtgaagtaaggagattaaggcgacttactcgtcgtcctgcgtagtgaagagattgtaaaaagagggctacatccaagtc

SEQ ID NO: 1729 - DNA, 120 bp, synthetic construct
  source 1..120: mol_type = other DNA
tttgttcttgaaagacaacattactgagtacccaattctatattaacagttatgttctctcaacgtttgttgatactagtttattcatttttagtttgtgcttcactatgatattcagat

SEQ ID NO: 1730 - DNA, 120 bp, synthetic construct
  source 1..120: mol_type = other DNA
aatgatgaactcattgctcatccttaatctgccatcattctacagtctgaaataagaatgctattattcaaacttcctctgtgaaactgactcaatcctttatctcaatatagaagttcc

SEQ ID NO: 1731 - DNA, 120 bp, synthetic construct
  source 1..120: mol_type = other DNA
tctgcacaggtcactgcttattattttccagcccttttctcctctctttgtactatttcttcattcatttgtagtaatataaactcaggtttactgatctttattttggaatatatgcca

SEQ ID NO: 1732 - DNA, 120 bp, synthetic construct
  source 1..120: mol_type = other DNA
tgtgccaacacacaagctaattattctgatgtgcatcatactcatgaatggaaaagaagagtgtaaggagaagagaggaaagataactttgggtttgcaaacatttgatagtagaaaaaa

SEQ ID NO: 1733 - DNA, 120 bp, synthetic construct
  source 1..120: mol_type = other DNA
gttgaagtttcttttaatgaaagattcatgtgagtgtctcagagtcatacaaagtggtagaccagtagctgtgccctgatattacctcactaatgacctcatgtagcatccagatggcag

SEQ ID NO: 1734 - DNA, 120 bp, synthetic construct
  source 1..120: mol_type = other DNA
caagtataaaaacatgcacctaacaacagagtgccaaaatacatgaagagaaaattgacagaattgaagggagaaatagagaagtcaacagtaatagcaggagactttaatataccactt

SEQ ID NO: 1735 - DNA, 120 bp, synthetic construct
  source 1..120: mol_type = other DNA
taggaaatgcagaaaggcttcctgggaagtagtatttgttttgcacatttggaaataggcaagactagaactaaagaacagagccagggaacaatgtccccatgaaagtttcagtgactc

SEQ ID NO: 1736 - DNA, 120 bp, synthetic construct
  source 1..120: mol_type = other DNA
taaaaaagtggggagaaaccccagctgactttttcatcatcccaaaaggagacaccagtaagcagccactggatttgccagctgtgcacatttcatatatatggaatcatacaatatgtg

SEQ ID NO: 1737 - DNA, 120 bp, synthetic construct
  source 1..120: mol_type = other DNA
taggattggctatactggctcattgacataaattagggtagattttagagcaaggggtattatcagtaatagggagagatatttttcctaatgataaagtggttacatcaccaagaacag

SEQ ID NO: 1738 - DNA, 120 bp, synthetic construct
  source 1..120: mol_type = other DNA
acctcaagctctattgctgtcaaacacacagaactagtttatctcactagagatgtgttcctttattcaaaaaatattatctttcttttttagcaagaaagactgtaaaataagcaaaag

SEQ ID NO: 1739 - DNA, 120 bp, synthetic construct
  source 1..120: mol_type = other DNA
agtgaaataatatagtaattgtcattctgtggttggcctatttcatataacctaatgccctccaagtccatccatgttgtcacaaatgacagggtttcgttattatggaacactgaacaa

SEQ ID NO: 1740 - DNA, 120 bp, synthetic construct
  source 1..120: mol_type = other DNA
attttgatattcgaggaagagtttacatggtaataatattaagggttacagctggttacactgaagctttgtcggcattctctaatatcttattttttttgaaggaatatctgttctgct

SEQ ID NO: 1741 - DNA, 120 bp, synthetic construct
  source 1..120: mol_type = other DNA
accacgttagtgaaacatcagattgagctgctaaatttctcccacccctatgtcattttgtattttctgagcatcctagacgattgtgactgtatacacaggacagaaacaccatgactc

SEQ ID NO: 1742 - DNA, 120 bp, synthetic construct
  source 1..120: mol_type = other DNA
tcatcacaggttgatctgaaaattgtgcacaagactggtgtctcacatgttctttctccaacctcagcttttcttagtgcctaaagtgtctgcaagtggaaatccagaggaagacagaga

SEQ ID NO: 1743 - DNA, 120 bp, synthetic construct
  source 1..120: mol_type = other DNA
gaaggctccaaattcaaaggggaaaggctgggatattgagaagtacacaattttcatgtaaaaggtgggtagaaaaaatagtcattcatgcatttttctggctcagtgaatctggatttt

SEQ ID NO: 1744 - DNA, 120 bp, synthetic construct
  source 1..120: mol_type = other DNA
taccttagacggcacaagatgactcacactggagagaggccatatgcatgtcatctatgtggaaaagccttcactcagtgttctcaccttagaagacatgagaaaactcacacgggagag

SEQ ID NO: 1745 - DNA, 120 bp, synthetic construct
  source 1..120: mol_type = other DNA
gttgacagtgctggagatcagacacattgctctactttatattgtattatctgtcactgaacttctttagtaaatggccaatactgtatggtaaaatcgagagtattatccgaaagaaaa

SEQ ID NO: 1746 - DNA, 120 bp, synthetic construct
  source 1..120: mol_type = other DNA
agggtatttatgacttttaaagtctcttaatgtcatttaattatcaaagaatctctaatgtgctacactggataatgtagtggcacataacttaagatggcaaagaagagaggatgtaaa

SEQ ID NO: 1747 - DNA, 120 bp, synthetic construct
  source 1..120: mol_type = other DNA
acaagcaaaaaataaataaagtggggaaaagacatgaaaaacatgaacagactcttctcaaaaaaagataatagaagcagccagcaaacatgaaaagtagctcaacaccactaatcacta

SEQ ID NO: 1748 - DNA, 120 bp, synthetic construct
  source 1..120: mol_type = other DNA
tcgtggaccctaaggatgcaactatgagtcttgaagggttttctgtactatttgtcttatgcttaaaattttgccattaaagcttcatgccactgtttattcttttcccaattcccttgt

SEQ ID NO: 1749 - DNA, 120 bp, synthetic construct
  source 1..120: mol_type = other DNA
tagatatatactaagtaatgggattgctgtgtcaagtagtgcttttattttaagtgttttgagaaatcttcagactactttccactatagctgaactaatttatatttccactagcagtc

SEQ ID NO: 1750 - DNA, 120 bp, synthetic construct
  source 1..120: mol_type = other DNA
ggaatagagattctgttgcaatggtccatgtgtctgcttttgtaccagtcccatgttgttttagtttctgcagctttgtcatatagtttgaagtcaggtaatgtgatgcctccagtgatg

SEQ ID NO: 1751 - DNA, 120 bp, synthetic construct
  source 1..120: mol_type = other DNA
tgtttccaggccgaaggcgaatctggcttgaaaacttacctgaggctttctgcctcccgactgacaaagaaatgggcttcagttcttaccccgcctgtgaagtctgcaagcctgattcac

SEQ ID NO: 1752 - DNA, 120 bp, synthetic construct
  source 1..120: mol_type = other DNA
gcctatttcatataacgtaatgccctccaagtccatccatgttgtcacaaatgacagcatttcattattatgtaacactgaataatattccattgcatatatgtattagccatttatcct

SEQ ID NO: 1753 - DNA, 120 bp, synthetic construct
  source 1..120: mol_type = other DNA
caataagccccaggacaatgtcattcccagcaacctggctgtcatctgtctttcatggcccctctctactggtacctctagacattggcatgtcctccagaggctgtaggagggcatgat

SEQ ID NO: 1754 - DNA, 120 bp, synthetic construct
  source 1..120: mol_type = other DNA
ttctacaggacaccaagcagtacagtaggattcctggggttgctgtggtatttatgttttaaggttgtcttttaatcatcttcagcaaattcaacagtcttcaggaacataaaacaatta

SEQ ID NO: 1755 - DNA, 120 bp, synthetic construct
  source 1..120: mol_type = other DNA
tctcaaacttttctgatcctgcaggcaagctaagccagttctggaagaacctgcaagagtctcagcagctctgatgggatgagagctgggtgcagactgtgctccctttggttatggaca

SEQ ID NO: 1756 - DNA, 120 bp, synthetic construct
  source 1..120: mol_type = other DNA
gcagaaagggggcacccacacgcctagacagctaatgtcttattagagggcagttttgattcctgatttggagtttaataatctccaaacattccagtccaatgaaagttttatccactt

SEQ ID NO: 1757 - DNA, 120 bp, synthetic construct
  source 1..120: mol_type = other DNA
aaacctggatgggagggctttcaacaagaggtgttgagagggtagggttaggtgtagtctagggcaggagacaaggattccgtgagagctgccacatgaccatgacagagagctctgtgt

SEQ ID NO: 1758 - DNA, 120 bp, synthetic construct
  source 1..120: mol_type = other DNA
tggacaagagcaggaaactccaaaccctttggtgggcaggacagagggtgtgggtgatggttccagtgctgtgggctggtccagcctggtaggaatgagaatccatatgctaggagctga

SEQ ID NO: 1759 - DNA, 120 bp, synthetic construct
  source 1..120: mol_type = other DNA
cagaagggctcatggctctttgaaggtgaagacccaggatgcagggtgatctgcacttggccctcaatgccaaggtcagcctgtggctgggccaggtggtgatcctggctctcacttgca

SEQ ID NO: 1760 - DNA, 120 bp, synthetic construct
  source 1..120: mol_type = other DNA
tcagctctctgcctgaaggagacaagaaaaaccaacgggaacaggttagttatactgataaatcctgggcttattttattaactcacataatagctattgtctttcctccaaggagcaaa

SEQ ID NO: 1761 - DNA, 120 bp, synthetic construct
  source 1..120: mol_type = other DNA
gagcatttgctaatttatttcctcattaataatttatgccttaataattttaggtttgaataaatgttccaaaagactaatattcaaaagattttttgaaaagtagaacaaagccagaga

SEQ ID NO: 1762 - DNA, 120 bp, synthetic construct
  source 1..120: mol_type = other DNA
gccgggttctcgatggcccattctgcaaggtagagggcggcatcccatgtgaccaggcctgtggtaccgtgggagatgatggctgtgctcttggagagtgtgactgagcctcctgaggac

SEQ ID NO: 1763 - DNA, 120 bp, synthetic construct
  source 1..120: mol_type = other DNA
actcagcaactgctctctgggagcgtgtgtccctggggacaggatggaggggaggggaagctcagggtgactccaactaaagctgagagaagccaagtgcaggatgagcaagttccaggc

SEQ ID NO: 1764 - DNA, 120 bp, synthetic construct
  source 1..120: mol_type = other DNA
cccctaaaggaaagaaaaaaccaggttgggcagaacgacacccaatgtgatgttcacctttaacctgggcttccagaatttgcttgaaaaagctcatgatcaacagaatgcagaaataaa

SEQ ID NO: 1765 - DNA, 120 bp, synthetic construct
  source 1..120: mol_type = other DNA
cccactcccttgtccctgctcctttttttttttttttttgcctttaaaaagccacttgtaactgctttttaattggaatgcataagcccctgggttgcagtcttcaagcttggccaaaat

SEQ ID NO: 1766 - DNA, 120 bp, synthetic construct
  source 1..120: mol_type = other DNA
ttctctaagctgcttgccaccatgcaatattgagtcagaagaatggttctcagatcccgtgcattaagaactatttgtgtatcagccttctaaagcatggcgaataagacaacatacgca

SEQ ID NO: 1767 - DNA, 120 bp, synthetic construct
  source 1..120: mol_type = other DNA
agctggagaccagcccggccaacacagcgaaaccccgtctccaccaacctttttttttttttttttggtgtggattgaaaactactaatggatagaaaatgattggggattggagctact

SEQ ID NO: 1768 - DNA, 120 bp, synthetic construct
  source 1..120: mol_type = other DNA
cacgaagctcacacacagaacagcacccgctacacggccccaccaccacgaagctcagacacagaacagcacccgctacacgaccccaccaccacgaagctcacacacagaacagcaccc

SEQ ID NO: 1769 - DNA, 120 bp, synthetic construct
  source 1..120: mol_type = other DNA
gctccacgaccccatcaccacgaagctcacacacagaacagcacccgctccacgaccccatcaccacgaagctcacacacagaacagcacccgctacacagccccatcaccacgaagctc

SEQ ID NO: 1770 - DNA, 120 bp, synthetic construct
  source 1..120: mol_type = other DNA
ttgtcgttcagtttgaggaattgttacatttccatcttgatttcatctttgacccactgatcattcaggagcaggttattccatgtatcggcatggttttgaaggttccttttggagttg

SEQ ID NO: 1771 - DNA, 120 bp, synthetic construct
  source 1..120: mol_type = other DNA
ttaagaatggtcttgtatgccaaaggaatggcaggaagcttaaatcatggatgcaattgtgcacatcattcctgttaactatggggaaaaaaggtacataacaataaaagtaaccaaatt

SEQ ID NO: 1772 - DNA, 120 bp, synthetic construct
  source 1..120: mol_type = other DNA
aacgcataacttttatatgcaatgggaaacaaaaaaatgtgtgtgactcactctattgtgatattcagtttactgcagtgatatggaactaagcccacaatatccctgcggtatggctgt

SEQ ID NO: 1773 - DNA, 120 bp, synthetic construct
  source 1..120: mol_type = other DNA
tgaggcttagaaaagataaataccttgctcaaagtcatacaatcagtaaatggcagcccttgggctcaatccaaacctgcctgacactaaatctcctgctcttttaaaccagaagatctg

SEQ ID NO: 1774 - DNA, 120 bp, synthetic construct
  source 1..120: mol_type = other DNA
tcccagtacataaaaaactatatttcaacttgatatgtaaaacttgatatgtaacctactcttgtaacaagtagtgagtctcagccaatcacagcagctgaacttcagccaaccacaggc

SEQ ID NO: 1775 - DNA, 120 bp, synthetic construct
  source 1..120: mol_type = other DNA
agatgggtggagaagtggcggcagcctgagccacagagatggcagcgccaatggccaaaagagcacagtcaagctgacaggcttggtgtttggttagagagggaagagagcggggcagct

SEQ ID NO: 1776 - DNA, 120 bp, synthetic construct
  source 1..120: mol_type = other DNA
ttgtaagcaggggaggcattagattcaatttgagatttagggcattctgttcagggtataaagctgggattggcaagctttctctgtaaagggccaaataggaaatattttaggccatgt

SEQ ID NO: 1777 - DNA, 120 bp, synthetic construct
  source 1..120: mol_type = other DNA
aattagtataaaagaggtgaatggagcagggtaggatagagagttttaaagagaaaagtcagcagagccacgtccttatggtgagagggagcggggaacaaggaagacttaaaacaaggt

SEQ ID NO: 1778 - DNA, 120 bp, synthetic construct
  source 1..120: mol_type = other DNA
gcggagaagtgcagagcacaccctgccaaggggcatctactgaagagatactgacaatggcaatttaaagatacttgttatttccaaagttgagagaaagagccttgtaaaaatgtgtat

SEQ ID NO: 1779 - DNA, 120 bp, synthetic construct
  source 1..120: mol_type = other DNA
tctatccatccactctcttttctcctttgagaactccaaatacacacagattaggcaactgaagttgtcccacagatcaccgatactctgattattctttgttttttttctgtctctgtt

SEQ ID NO: 1780 - DNA, 120 bp, synthetic construct
  source 1..120: mol_type = other DNA
ctccatcttagccagaagtaaaataagaaaaagaaatatatgtaagtataaacacacatacacatatatatatgtatgtatataacacacatgaatcatatcctaaagatttggaacaag

SEQ ID NO: 1781 - DNA, 120 bp, synthetic construct
  source 1..120: mol_type = other DNA
gcagatcacttgaggccaggagttcgaaaccagcacggccaatacggagaaaccctgtgtctaccaaaaacacaacaaattagccaggcatagtggcacactcttataaccctaactatt

SEQ ID NO: 1782 - DNA, 120 bp, synthetic construct
  source 1..120: mol_type = other DNA
aacctggccacaggtgcagccttcatctgcacccatcactgccccgtaaggcttcagggccaagggaaaacaatgcaaatgaactgctgctcacgaggcttgctgtgccatgagtagtag

SEQ ID NO: 1783 - DNA, 120 bp, synthetic construct
  source 1..120: mol_type = other DNA
gctacaaatttccaggggttattactgaactgtgggaggcatctgaagcctgcagatataccctccatgcttcagtgtgatgcctggcacaggacatttaataattcttgaagataaaac

SEQ ID NO: 1784 - DNA, 120 bp, synthetic construct
  source 1..120: mol_type = other DNA
cattgggagaagcttagaataatcatattgaatgcataggagaaggacaaagagattaaagccattggaagaaacagaaaaaatgtatggggggcaaaggaaacaagtcaacagtcccag

SEQ ID NO: 1785 - DNA, 120 bp, synthetic construct
  source 1..120: mol_type = other DNA
agacttcctcaaaacttcctaattaatagggacatctcatttttcttttctattattttctaaagcttatactatagtctacacttggaaatagtgctttcataggtaccataatctctt

SEQ ID NO: 1786 - DNA, 120 bp, synthetic construct
  source 1..120: mol_type = other DNA
gacagctaacagaactagtttcttcactttatttttcatcttaaaaattatcttgcttatcctttcatccttaatttccatatgaattttaaaaccaggttgctgcaatccacacaagta

SEQ ID NO: 1787 - DNA, 120 bp, synthetic construct
  source 1..120: mol_type = other DNA
gatatatggctgctatatcaagtttgttaattataatattaaaatattcttacctgcttcacttactcattcccaaaaatgttatgttaattattccactgttttgggtgtcaatttgcc

SEQ ID NO: 1788 - DNA, 120 bp, synthetic construct
  source 1..120: mol_type = other DNA
taatattacagttacatgtgtcatcattatattagcaaaacaacttgtggatttttgcagacagctgaattatatgttatatgtatattttagagaatatattggtctatttgaacatag

SEQ ID NO: 1789 - DNA, 120 bp, synthetic construct
  source 1..120: mol_type = other DNA
aaagagttacaatatggcaaatattaatccaagtatcaataatcactttaaatgtaaacagtctaaatataccaattaagaaagcaatggcaacaaaagccaaaattgacaaatgggatc

SEQ ID NO: 1790 - DNA, 120 bp, synthetic construct
  source 1..120: mol_type = other DNA
ttttaaattatcttttcaaaagaggagaaatagggaaattctcactgatgggagtagaatattccatttcttgtgttattttagcccctagcccagtagtttccaaaagatcacctgggg

SEQ ID NO: 1791 - DNA, 120 bp, synthetic construct
  source 1..120: mol_type = other DNA
tccatgaaaaatagataactgcattaaaaattcagggatagagccttaataacacatatatactaggtcctaggtattacccatttcagactttttttttccagtttttgttttgaatct

SEQ ID NO: 1792 - DNA, 120 bp, synthetic construct
  source 1..120: mol_type = other DNA
tgaagggtcacagagaaaaatctgaacaaacaggccttgctaagttcttcccagtttattattagatcatactgttttatctaattatgcttctccattaactatcctcttccataccat

SEQ ID NO: 1793 - DNA, 120 bp, synthetic construct
  source 1..120: mol_type = other DNA
gtataccaaactttcctgccttcctactaaatggaactagaaaagcaaaatgttgattttttccaggtactccaaaaatacctttataattttaaccgtaatttgtttagtctaaaaagg

SEQ ID NO: 1794 - DNA, 120 bp, synthetic construct
  source 1..120: mol_type = other DNA
caatcattccctctattttcctattattatagaactctgtgcttttaaaattcttgtattaatattaatatctattatgttgcctttttgtttgtttgcttctgtttccccccaatgact

SEQ ID NO: 1795 - DNA, 120 bp, synthetic construct
  source 1..120: mol_type = other DNA
gctctaacattatattaagggcataaatcaaacaacagaggatacagaaaacctacaaagcattttttttttttaaagaaaaccttagtggaagcactaaattggaagttgagtgacatc

SEQ ID NO: 1796 - DNA, 120 bp, synthetic construct
  source 1..120: mol_type = other DNA
acttttatatgcaatgggaaacaaaaaaatgtgtgtgactcactctattgtgatattcagtttactgcagtgatatggaactaagcccacaatatccctgcggtatggctgtacagtata

SEQ ID NO: 1797 - DNA, 120 bp, synthetic construct
  source 1..120: mol_type = other DNA
ctctcaaaagtatcaagtttttgtctataaaatggcaaaactggctatgatgaaataaactgatatttgctatttctaataaaagcatacaatatattctttcttaccagattcaaataa

SEQ ID NO: 1798 - DNA, 120 bp, synthetic construct
  source 1..120: mol_type = other DNA
taacaaagaaaggtgaatgcttattttttgcaccagctctaaataaattatattttagaaaaaaagttttcattgccaaaacatatttttaagctatgcttaacttcacttttcttcaat

SEQ ID NO: 1799 - DNA, 120 bp, synthetic construct
  source 1..120: mol_type = other DNA
ggtcctttgtctctgtaccaggacagcatccacaaaacagttaaaagctgttaacttcctagctcgtaaatcaggtaaaatcaaatcccagacccaacataaaacatttcttctaaatga

SEQ ID NO: 1800 - DNA, 120 bp, synthetic construct
  source 1..120: mol_type = other DNA
taggtttactctgaattgatcttgtgataatcaatctgaatggtcttcattcactaagactactcagaaatggcaaaatcatattgaggtgctcagaaacagcatcttaattatgatgga

SEQ ID NO: 1801 - DNA, 120 bp, synthetic construct
  source 1..120: mol_type = other DNA
ggaattctgtgttcagagaaggccaaacaaaagcgaagcaaaagcaatgagaccagtcaggggatcgcgcagcaacacagtagggacagggtcaagttcagaatcacctcaaaggtacga

SEQ ID NO: 1802 - DNA, 120 bp, synthetic construct
  source 1..120: mol_type = other DNA
tttcatttcatgagactggtaaattccatttttataaactgaaaaatcaattttatttgaaaaattaaaatagaaattgtaatttcccacccccatacacacccccacatttacaaaaca

SEQ ID NO: 1803 - DNA, 120 bp, synthetic construct
  source 1..120: mol_type = other DNA
ggattgttaaagatgtccgtcaaaagatttgaaggtcgctgtttgtctcattagagcccaaagctaacacacatcatcacattatcataccagacactttaaaatgtacatcatacaaaa

SEQ ID NO: 1804 - DNA, 120 bp, synthetic construct
  source 1..120: mol_type = other DNA
atgtcctttcaaaataaaaactgtcagccaaccaggaataaaagggaactacctccacataacataggaaacaagaatgaatgcttttcccctaagacaggaaacaaggcaaggatgtct

SEQ ID NO: 1805 - DNA, 120 bp, synthetic construct
  source 1..120: mol_type = other DNA
atgttctatgaatagaaagagataaaatagacatttgattatttccaatattagaagttaaatattaaaaatttcactacaatcgtcagctaatttcacctaaattacaaatggcaatgc

SEQ ID NO: 1806 - DNA, 120 bp, synthetic construct
  source 1..120: mol_type = other DNA
atcattggtagatattatactgtaggaatgaagttagtgtctgcagctgtacatattcaggccattctaaatatataagctagttaggaagaaaatactgtggattttatccatcaagcc

SEQ ID NO: 1807 - DNA, 120 bp, synthetic construct
  source 1..120: mol_type = other DNA
gcaaaaatgaaaattgcctaacaatagcaaaatgggacagtagaactgataaaatgtggtatattcatgtaacaatatatacattcttttgaaaaattagcaatatttttaactgtacat

SEQ ID NO: 1808 - DNA, 120 bp, synthetic construct
  source 1..120: mol_type = other DNA
aagatttattgcacccttctgtgacctccccactctgactgccctctcttaggctgcagtgtctcttggctgtactcaatcattgactgagctggcaaatattctgtttattattgtcta

SEQ ID NO: 1809 - DNA, 120 bp, synthetic construct
  source 1..120: mol_type = other DNA
ctgaaaacaaagtagtgtggatcaaactctgtcatctgtttctgtcacacagattacagccctcatcctgaaggagggacagatttcagtcccatcctaataaaaaaaaaatctctgttc

SEQ ID NO: 1810 - DNA, 120 bp, synthetic construct
  source 1..120: mol_type = other DNA
aatggaggcacaaaagtttatttgagctaacagtgattcatgaatcactgttgaagcagcttcaaatgggaactggttcagggaccctttcaagggaacaaaaagggacagcttctgtaa

SEQ ID NO: 1811 - DNA, 120 bp, synthetic construct
  source 1..120: mol_type = other DNA
catgcatgatctttcctctctatttcttttctttcctctctcttttctccttctcccatttcctggtaaagatagttgattgcacagagtctggaatcctctgtgagtaggttcacattc

SEQ ID NO: 1812 - DNA, 120 bp, synthetic construct
  source 1..120: mol_type = other DNA
ctgtgactgtgacccaggttggtcattgttggcatggttggtagagatggttgatccatccttttattttggttctaatttgggtttaatatctaagacatacagccaagctaatacagg

SEQ ID NO: 1813 - DNA, 120 bp, synthetic construct
  source 1..120: mol_type = other DNA
gttagaaaaacctgtctaaaagaaatagattcttcagcagcttcagcttattattagtttcccaaacactcaaatgtactacgagagattcttattttaatatgctgttattattttaag

SEQ ID NO: 1814 - DNA, 120 bp, synthetic construct
  source 1..120: mol_type = other DNA
catcagtgcacaattacaagtccacattttgaggaccttctgtttatttccttttattgtttgtttttagcagagaataacaaagaaaaaacaaaatatggttcacagtcttaccagtca

SEQ ID NO: 1815 - DNA, 120 bp, synthetic construct
  source 1..120: mol_type = other DNA
agaaaagatgaaaattgtgatcatcttttcttagtccgtattttcttttagaatagtgctcatctttagccacgctgtgttgctctctcacccatttccccaagggtgttgtgtggtcgc

SEQ ID NO: 1816 - DNA, 120 bp, synthetic construct
  source 1..120: mol_type = other DNA
ttttaaatcacctctataaactgcctccaccttcttttcttgcacttacctacattcggagactgtttaatatcatctcctgcaccccgtactttgcattcttttctctacgagagtgtc

SEQ ID NO: 1817 - DNA, 120 bp, synthetic construct
  source 1..120: mol_type = other DNA
ttttcttgccattattctttaaacaatatagtataacgactatttttacagcatttgcatcgtattattagtaatctggagatgatttaagtatacaggaggctgtacaaaggttacata

SEQ ID NO: 1818 - DNA, 120 bp, synthetic construct
  source 1..120: mol_type = other DNA
ttatttgtaagataaaagtaaagatttatctcacaaataaatgtttataaaaaatgagatagcaaaagcaattattttagcctgcctaggagatttaaaaattggttccacaggtctgta

SEQ ID NO: 1819 - DNA, 120 bp, synthetic construct
  source 1..120: mol_type = other DNA
aacgcggatgagagagaagccatgttgttcaggtcctgctatttatgagggagagttttccttgagaaatgcatgtctctttataagcagaaacctctgtaaggtaatccagcagtgatg

SEQ ID NO: 1820 - DNA, 120 bp, synthetic construct
  source 1..120: mol_type = other DNA
atagaatggaaaataactgagtttcaaatactggcaggcaaagagtagacaagccattgtatctcatggtaattcagaaaggcatctggatatggagccatctcagaagtcattcacatg

SEQ ID NO: 1821 - DNA, 120 bp, synthetic construct
  source 1..120: mol_type = other DNA
ttattggtttcctttgcatagagtatcttttttccatccctttgctttcagtctatgtgtgtccttataagtgaagcgagctccctgtgtgtagcacagagctgggtctggtttttataa

SEQ ID NO: 1822 - DNA, 120 bp, synthetic construct
  source 1..120: mol_type = other DNA
ccctggcctgtaaggtttctgctgtgatgtctgcttctagtattaatggaattcccttatatgtgacatgcttcttttgtcttgatgctcttttgctgcagaatactctttttgtccttg

SEQ ID NO: 1823 - DNA, 120 bp, synthetic construct
  source 1..120: mol_type = other DNA
tttgaatttttccttttttagataaacagaaatttatttgtaacagttctggagactgggatgctcaagatcaaggtggtggcatctgtgaaggccttcttgctgtgtcataacaaggca

SEQ ID NO: 1824 - DNA, 120 bp, synthetic construct
  source 1..120: mol_type = other DNA
gccattctgactggtatgagatggtatcttattgtgggtttaatttgcactgatctgatgataagtgatgtggaacactttctcatatgtttattggccatgtttacgccttcttttgag

SEQ ID NO: 1825 - DNA, 120 bp, synthetic construct
  source 1..120: mol_type = other DNA
tttttgtatctctgaatagaaactttagtcaggcctctctccttgaactcctaagatggagccaaacaaaattttctatttgctttccctactatttttatttttccttctagaaactca

SEQ ID NO: 1826 - DNA, 120 bp, synthetic construct
  source 1..120: mol_type = other DNA
ttaggaggaagaaagagccaaattacaaatacgatgcagactctatatgagtcttctcttacagcatctcttttatagggaaactgtccacaacattttaaacattattaatcaatgcag

SEQ ID NO: 1827 - DNA, 120 bp, synthetic construct
  source 1..120: mol_type = other DNA
ttctctttcaatgctttcaatgaaataggtatcttactttcacttagaacatttttttcaaagtaattcttaaaattctgtttttctaataggtttgcagcaataggtagcaattattgt

SEQ ID NO: 1828 - DNA, 120 bp, synthetic construct
  source 1..120: mol_type = other DNA
tctaagtagttaaagatcgcatactataacaaaccatttgtgggtcatttccccaatgtaagaattttgcttttatttattaatatgattttaaactatggtgccaagttttcattagga

SEQ ID NO: 1829 - DNA, 120 bp, synthetic construct
  source 1..120: mol_type = other DNA
caaatgccccatcatattttagaaatcttggttttgcagaaaaatttagcaatgtgcaattccaggaaatatcaatgtaaacttaatgacaacaaagtcaggtttaatagtcaaatccaa

SEQ ID NO: 1830 - DNA, 120 bp, synthetic construct
  source 1..120: mol_type = other DNA
gggatatgacaggaagattgagaaaaactgtggctggaaggccggcagtgctgtagagaccctgggacctgggcccttcttctttggctccaggtcatcctgtggtctccccaccttcct

SEQ ID NO: 1831 - DNA, 120 bp, synthetic construct
  source 1..120: mol_type = other DNA
ttcagtagcattaagtacattcacattgtgcaaccatcactaccatccatctctagagctgtttcaccttcccaaatgaaaactctgaacccactaacaataacctccattaccagcccc

SEQ ID NO: 1832 - DNA, 120 bp, synthetic construct
  source 1..120: mol_type = other DNA
tatattgcctttactccaaaatttactagaccaccttcttacgtatggcagtgggcattaggtggcttgtgaatttgagaactgctctatggggttagtgtctgagattcatcaactgag

SEQ ID NO: 1833 - DNA, 120 bp, synthetic construct
  source 1..120: mol_type = other DNA
ataatagaaagaaagtgtgtatccactcctggaaggctgtgtgctgtgctataagagaagctgatgcctctgcttccccatctttgttctgtggagccacacaggcagcctgatacctgg

SEQ ID NO: 1834 - DNA, 120 bp, synthetic construct
  source 1..120: mol_type = other DNA
tctatacctagcgcagaatctgaaagatagcacatgctcaataaacttcaactgaatatttactaaatacgtaaaagagaattatcattaaccaatacacttaattaaacttagtcttcc

SEQ ID NO: 1835 - DNA, 120 bp, synthetic construct
  source 1..120: mol_type = other DNA
aagtgttacaggggctggatctccctcttcctcagcttatttggaaatctggttaagattcactatatttccatgtgcttggctcaatatagagggttctagggtcttaatgttacaagt

SEQ ID NO: 1836 - DNA, 120 bp, synthetic construct
  source 1..120: mol_type = other DNA
cagagcaagactccatatcggaaaaaaaaaagaaatacttacaatgaaaaggaacattaaaaggaggcaatataaagcaaagtgagttaaagcccagaacacattaagactttcaaacat

SEQ ID NO: 1837 - DNA, 120 bp, synthetic construct
  source 1..120: mol_type = other DNA
tgccatggtcctgggcctccccactacccagcatggatgcctaagctgaactgaatgaccttggactgaattgttcaaaaagagaaggggaaaggaagaggaagaagaatgccaagtaat

SEQ ID NO: 1838 - DNA, 120 bp, synthetic construct
  source 1..120: mol_type = other DNA
ggctggcgaacttgcaaaacataaccatttaggggaaaaaattgaggcaattaaaattaaaagtgttttaggctaagtaatgaataaattaacccactgaaaagttacatcaaaggctat

SEQ ID NO: 1839 - DNA, 120 bp, synthetic construct
  source 1..120: mol_type = other DNA
cttgatctaaaaggtaatttaaaattagtaaaatttattagatatgaggatactaagtttcatcaacgaaagaagactgaaaacacccacagtagtagtattgaaattttacgtgtcact

SEQ ID NO: 1840 - DNA, 120 bp, synthetic construct
  source 1..120: mol_type = other DNA
ttgggttcacttaaactacttttgcacaagaactctgtaaatagcacgtcttttattacagaaaaaattataaatctaaagttttgattgacagatcagttgccttcagtgagacagaaa

SEQ ID NO: 1841 - DNA, 120 bp, synthetic construct
  source 1..120: mol_type = other DNA
gttgtttggttagggaacttgaagtccttagacataaatgtgtgtcttgaaatgcattttatgtggctataattgctgctatatggttattatttaaatcagcatagacatttgccgtgg

SEQ ID NO: 1842 - DNA, 120 bp, synthetic construct
  source 1..120: mol_type = other DNA
cactagcatggaatccccactggccagcacagcacctggagtctgcctaagaagaccaagttcctggggggaagggtgaccgccattactgcgggtctagccggtggttttcccccgcca

SEQ ID NO: 1843 - DNA, 120 bp, synthetic construct
  source 1..120: mol_type = other DNA
ggggaggggctgtgctccagtctccccctcccctgcccctctccctccccctccccctcctgctgcacctccccctccctctgcccctccccctcccactgcccctccccaacaaaggag

SEQ ID NO: 1844 - DNA, 120 bp, synthetic construct
  source 1..120: mol_type = other DNA
taggtgcctgagcagccacctgttgacacatccttctcagtggatataaaaccactcagcacagtagcagcacagccgggatatcagttgcactccccaggaaccctgggacacccagat

SEQ ID NO: 1845 - DNA, 120 bp, synthetic construct
  source 1..120: mol_type = other DNA
aaatatgataaaaacctctagaaaatgaaccccagaaatgaaacaaaccagcaaagaggcatctggactcacactggtctcccaggggactgtgcaactagcacataatttcatacagaa

SEQ ID NO: 1846 - DNA, 120 bp, synthetic construct
  source 1..120: mol_type = other DNA
ttatgacaatgaatgttcagtgagaaatcaaacgccaactgcaagggcaaaatataataaaaaatagcttaaagtagctagtgccttcaggataaaatctggaaaagagctttcttgctg

SEQ ID NO: 1847 - DNA, 120 bp, synthetic construct
  source 1..120: mol_type = other DNA
gagagtttaattaaacacgattcagcttttcagaggaagaaagaaaaactaaagatcacagagaaagcttttatacaaattgtagttataaaaaatgttaatgtttcttgcttctaactt

SEQ ID NO: 1848 - DNA, 120 bp, synthetic construct
  source 1..120: mol_type = other DNA
gcacattcaaacacatatccttctaactcccactcaggtcaagatacaaaagatatccaaaattgtaaagagttcctttttgccccttcctagtcaaagaaggggtaagtgctattctga

SEQ ID NO: 1849 - DNA, 120 bp, synthetic construct
  source 1..120: mol_type = other DNA
aataagagccttatttatataacaaatatttttttttattcctctgtagtgctactttagtctctgagctaattttcatgaagccaatctaaaaatcgcgttacttctaaggatgtggag

SEQ ID NO: 1850 - DNA, 120 bp, synthetic construct
  source 1..120: mol_type = other DNA
ggcccatactggtacgtgtgaaatcaacttagttggttatggccatttttttttaaaaggaaatatcagtcatcactatagtgtaagtatattgtttcgtgaaacccatcttagttatgt

SEQ ID NO: 1851 - DNA, 120 bp, synthetic construct
  source 1..120: mol_type = other DNA
taggggaaactgtgtgtgggttgatgagcggaggtatatgggaactctgtgctttctgctcaatatttctgtatacctaaaactgctctgtacatctattaatatcccagcactttggga

SEQ ID NO: 1852 - DNA, 120 bp, synthetic construct
  source 1..120: mol_type = other DNA
taaagcctctccactccccctgcactgcactgccccacacgtcttttactgagtatgaaaaaaaaaaaatcagaccctcagaatggtagaaaatagtaaaatgagcatcataagcacgta

SEQ ID NO: 1853 - DNA, 120 bp, synthetic construct
  source 1..120: mol_type = other DNA
cactttcttgctgtgtgttcatgtggcctttcctctgtgcacatgcagtgggagagagagaatactctggtgtttcttccgcttcttataaagatatcagtactactggattagggtcct

SEQ ID NO: 1854 - DNA, 120 bp, synthetic construct
  source 1..120: mol_type = other DNA
ggagttctaagaacttaaaactcattagaattaggacatcataatgtctcatctgattaaacagtaggtacagtggacattaaataaatatgcctagagaggctataaattacatttgta

SEQ ID NO: 1855 - DNA, 120 bp, synthetic construct
  source 1..120: mol_type = other DNA
tttggaacagggagtccagttattccagcatcactttttgaaaagactgttacttctccactgaacagcatttccacctttcttagaaaacagatggctgtacatttgggggtctatttt

SEQ ID NO: 1856 - DNA, 120 bp, synthetic construct
  source 1..120: mol_type = other DNA
ttttcttgaatagtatttgcctaatcttgctatgaggatgaggcaggccttataaaatgatttgggaaatattccatcttttattttctagaagacattgtgtaggattggtattatttc

SEQ ID NO: 1857 - DNA, 120 bp, synthetic construct
  source 1..120: mol_type = other DNA
ggatataacaagaagtgagtggtctgtaaaccagaagaggtcttcacaagaacacagtcatgttggcaccctaatctcagacttccagtctcctgcactgggaaaaataaatgtttattc

SEQ ID NO: 1858 - DNA, 120 bp, synthetic construct
  source 1..120: mol_type = other DNA
acagtctagaatatagtctgttttgatgattgttccatgtgcatttcagaagaatgtgaattcagctgttgaatgcattgtgtcttcaggtttgaagccatggttattgcaagtgctact

SEQ ID NO: 1859 - DNA, 120 bp, synthetic construct
  source 1..120: mol_type = other DNA
gacatccaggatgatcaggagccttcattaaaacagaaattttagggaaaaccacaaaaaccttcgtaaagtgaattgcattaaacatcaattataataaaatttcatattttgaataaa

SEQ ID NO: 1860 - DNA, 120 bp, synthetic construct
  source 1..120: mol_type = other DNA
ctggtcagctgtgcctgaatcccaaaggaacgtgagtatagtgtggcatgtctgacctctactacccatcatggcctgaactgattttccaggttaacttaggaatgcccttgtttgaga

SEQ ID NO: 1861 - DNA, 120 bp, synthetic construct
  source 1..120: mol_type = other DNA
aaaaaaaaaaaaacattactgcttttcctgattatatgaagtatgggatgctagattaaagacatcttaagtcgggccaggtgcagtggcttatgcctgtggcgtcagcactttgggagc

SEQ ID NO: 1862 - DNA, 120 bp, synthetic construct
  source 1..120: mol_type = other DNA
tccgaactgcagaagatccacagggcagctgtcaaaggcgacgccgcggaggtggagcgctgcctggcgcgcaggagcggagacctggacgccctggacaagcagcacaggtagcggggg

SEQ ID NO: 1863 - DNA, 120 bp, synthetic construct
  source 1..120: mol_type = other DNA
tacaggtgtgagccaccgcgcctggcctatgttgtttattatatatcataagatatatatatattactgatatgtatacatatataacacatatgttatatatatcagttatatatacac

SEQ ID NO: 1864 - DNA, 120 bp, synthetic construct
  source 1..120: mol_type = other DNA
ttgagcttttagcctcttcagaagtaaaaagggaatgtttttatctgtttcagattttattatctatatattttattatgtacatatgttttgcttatatactcattccatttatgcaaa

SEQ ID NO: 1865 - DNA, 120 bp, synthetic construct
  source 1..120: mol_type = other DNA
tcatgttttcagttttatgagaaatgaagaaaaagattagaagcaagtaaacaggaactctatggtcagtggtagactataatagtatattcaatagtcatatgtttttctccagttata

SEQ ID NO: 1866 - DNA, 120 bp, synthetic construct
  source 1..120: mol_type = other DNA
gataacaaggaaggggacaagcaaaattagtagaggaaaaaggtgcatgtggtcaattctggaggaaacaaggcacaagcctccaggagttctgtcctgtggagttcccgggatctgctt

SEQ ID NO: 1867 - DNA, 120 bp, synthetic construct
  source 1..120: mol_type = other DNA
gccctaaaaactctctgtgctatgcctgttcatctttccctttctccctagtaactcgtggcaaccattgatgtttactctgtcttcatagttttacttttttcagaagagtcacatagt

SEQ ID NO: 1868 - DNA, 120 bp, synthetic construct
  source 1..120: mol_type = other DNA
ggtaatggaaagttggtcagagaaaaacatacatatggctagttgattcaaaaaatgtgtttaactttggtaactaacaaagattgataagtactgtgacagggtgggagctgaaaaaaa

SEQ ID NO: 1869 - DNA, 120 bp, synthetic construct
  source 1..120: mol_type = other DNA
ttttagattaacatttcttaagctttttattagctccaactcatgttttattaaatatactttttcaagccatacattactctttattattcttatactgtaagttctagggtacatgtg

SEQ ID NO: 1870 - DNA, 120 bp, synthetic construct
  source 1..120: mol_type = other DNA
atggccagtgatgatgagcattttttcatgtgtctgccatacgttactctttagaattctggtgaccaatttttttctgggtggaaagttgattgaaagttctagttttctctctgtgtt

SEQ ID NO: 1871 - DNA, 120 bp, synthetic construct
  source 1..120: mol_type = other DNA
agaagaaggaagaacatggtgttagaaacaggaaagaagataaagtgagcttccagtaccaaaatgtgtcagagaattacagtaacattttccttctcttgctgtcatcctcactactgg

SEQ ID NO: 1872 - DNA, 120 bp, synthetic construct
  source 1..120: mol_type = other DNA
cctatttttctcattatgtttctgtcatgttgccgtcctaggcaatgaaaagatgccaagaagaaccctcaaaaccttaagtaattatttttatagccaggcatgagaattcagctcgat

SEQ ID NO: 1873 - DNA, 120 bp, synthetic construct
  source 1..120: mol_type = other DNA
cagaattttttatttgtgtcccaaaatggtatgtgagtggttatacactttacatacctttctgccactttctttggtgtattttgtattatattttccagatgtatccacattgatatg

SEQ ID NO: 1874 - DNA, 120 bp, synthetic construct
  source 1..120: mol_type = other DNA
ctaccttgtggaatgggacctttggtgtcagggtacaaacaataactttattttgacataaatacatagtaaatgttactaaaatttaaaaaatccatccactatcactagtggaactta

SEQ ID NO: 1875 - DNA, 120 bp, synthetic construct
  source 1..120: mol_type = other DNA
tatgttggaattaaacattattaacataatttaataaggcagtttataaaatcagtaacaaatattttatcaggtggttgtgagacaacttcaacaagaagtggctgacagcgtaaaaaa

SEQ ID NO: 1876 - DNA, 120 bp, synthetic construct
  source 1..120: mol_type = other DNA
agaaagtaaacatatggtctttatcctcatgtattttatctgtgaaaataagtgtgcttaacttctcaactcaaatattaaactgtagtaaaaaaaaatagctctagacacaatacttct

SEQ ID NO: 1877 - DNA, 120 bp, synthetic construct
  source 1..120: mol_type = other DNA
gttagaattggtcttttttaaaggaaataacgagagatggaaatggaatgggtataaatagtaaaaggttctatcactataattcccttttgctataaatagttaaagcttctatcacta

SEQ ID NO: 1878 - DNA, 120 bp, synthetic construct
  source 1..120: mol_type = other DNA
tacagattttttcagggtttttctaacatgaaaagagtttattggtgtaggaaaacatctggttccaaaatgtagatcatccttcttgagctttaatttttaaagccttttttgtctcat

SEQ ID NO: 1879 - DNA, 120 bp, synthetic construct
  source 1..120: mol_type = other DNA
gactccgtgtgagctctcctgccttccctgagtaaacttacacaatttagtgctgggacatttgagccttttctgaaaatttgagtcagggagagcatcttgaggaggtgggaaggaagg

SEQ ID NO: 1880 - DNA, 120 bp, synthetic construct
  source 1..120: mol_type = other DNA
ataaagatgcagagcctcagagaagttaaatgattgatcctatgtcaggggatagtcaagactcatacctatgccttttaacttcaagttgagtgctttttctttatacaaaagggcttt

SEQ ID NO: 1881 - DNA, 120 bp, synthetic construct
  source 1..120: mol_type = other DNA
agatggggtttctttacatgactcttatcaaatcaggtgggtgttaggagcctgagaaatgtgagcgtgaagaaatgtgaaatgtgagatttggataaggtcgtttggatttaaagagga

SEQ ID NO: 1882 - DNA, 120 bp, synthetic construct
  source 1..120: mol_type = other DNA
cacattgcgtctagctcatagctctgcctccctagtaggatgcagcccttgtcctcagggttccaggcagtgggagctccggccaccatgcccatatttaggcagcaactagagagagga

SEQ ID NO: 1883 - DNA, 120 bp, synthetic construct
  source 1..120: mol_type = other DNA
ggggagggggggatgaagaaacagcacagaggatttttagggcagtgaactattctacatgatagtacaatagtggatatgggtcattatacgtttgtcaaaacccacagaatgtacaac

SEQ ID NO: 1884 - DNA, 120 bp, synthetic construct
  source 1..120: mol_type = other DNA
cccctcctactgcccctccccaacaaaggagccctttgtgatgtgaagccccagctctgtgatgcgggcctgggccccagtccctagtctccacgaggatgcccagagctcagttgctag

SEQ ID NO: 1885 - DNA, 120 bp, synthetic construct
  source 1..120: mol_type = other DNA
gggaatcaggggagtcccaacagctgagggcatgtgacagggaaactctgcagcttgcaagtgtccctgagtgtgcatcagatgctctgttcctccacggcagagtcgctccactagaga

SEQ ID NO: 1886 - DNA, 120 bp, synthetic construct
  source 1..120: mol_type = other DNA
ctcttccccttttcctcttcccttcctccagttcagcatgtcatagaactttcacaagtggttatgaaatcttagatatgctatggagaaagaggttatggcatagcaagagcattgttc

SEQ ID NO: 1887 - DNA, 120 bp, synthetic construct
  source 1..120: mol_type = other DNA
ggtgcaaaataaggatggaaattatttgtttatgaacagttgttcatttgctgaaaaatatgtttttattcattgaatagcttttacatctttttttttttttttttttgagatggcgtc

SEQ ID NO: 1888 - DNA, 120 bp, synthetic construct
  source 1..120: mol_type = other DNA
gagttgatcctgctttcagatatatatgcactagaggctataaggggccttagacgccagtcctagttttctcagtatatgtatgagagcactaaaggccagaaaattggttaaagacag

SEQ ID NO: 1889 - DNA, 120 bp, synthetic construct
  source 1..120: mol_type = other DNA
aaaacacttatgttcctggaccaaactgagagttgggctgctacttcttaaggcccaataatgagatgcagatgaactggggaggaagaaagtttttatttctgcaatgggttacaggga

SEQ ID NO: 1890 - DNA, 120 bp, synthetic construct
  source 1..120: mol_type = other DNA
agtgtatatgcataacatagtttttaaagtttcagttcaatagcattaagtacattcacattgttgtgtactcattaccactatctgtctctagaattttttcatcatcccaaactgaac

SEQ ID NO: 1891 - DNA, 120 bp, synthetic construct
  source 1..120: mol_type = other DNA
aaaccattttccataggggctgcaccattttacattcctaccaacagtgtgcaaggcttctaatttcttcatgtccttgccagcacttatcttcttatttaagaaaaaaatcacagctgc

SEQ ID NO: 1892 - DNA, 120 bp, synthetic construct
  source 1..120: mol_type = other DNA
ctttgatatatgaaggtttttcattttgatgaagtttgatttttatgtattttttcttttgttggctgttcttttggtgccatatccaagaagtcattgtcaaatccaataccaggaagc

SEQ ID NO: 1893 - DNA, 120 bp, synthetic construct
  source 1..120: mol_type = other DNA
gggtcccttaagattctatataaattttaggatggagttttctcttcttgcaaaaagcatcattgggattttgataggactggcattgaatctgcagatcacttttggtaacagtgatac

SEQ ID NO: 1894 - DNA, 120 bp, synthetic construct
  source 1..120: mol_type = other DNA
actttgttaaattcatttattagttgtaacaggttttttgtgtgtggaatttttagggtcttatgagatcttgtcatcagcgaacagagataattttacttcttcatttccagtttggat

SEQ ID NO: 1895 - DNA, 120 bp, synthetic construct
  source 1..120: mol_type = other DNA
gacttgaactcctaggctcaggtgatccttccaaatagctgggactacaggtgcacaccaccgctcctggctgagaatgataatttgatgttgcattgtataaatgtttttaatattgat

SEQ ID NO: 1896 - DNA, 120 bp, synthetic construct
  source 1..120: mol_type = other DNA
tgtagccttttcagattggtttgtttcacttaactatgtgcatttgaggttcctccatgttttttagtggcttggtagctcatttctttttagtgatagtctggatgtaccacagtttgt

SEQ ID NO: 1897 - DNA, 120 bp, synthetic construct
  source 1..120: mol_type = other DNA
cgcctgcaactggttgtgttgggcctcacctgctgctgggcagtggcgagtgccgcgaaggtaagagcccagcagaggggcaggtcctgctgctctctcgctcaatcagatctggaaact

SEQ ID NO: 1898 - DNA, 120 bp, synthetic construct
  source 1..120: mol_type = other DNA
tcgaggcatccataaattctaccctctctgcctgtgaaggagaagccacagaaaccccaagccccacaggaagccggtgtcggtgcccggcccagtccctgcccccagcaggagtcacac

SEQ ID NO: 1899 - DNA, 120 bp, synthetic construct
  source 1..120: mol_type = other DNA
aggacccatcccaggagaataagaagaagactgtggtggactttgagaccgatgtcctcttcctggtgcccaccgagattgccctagcccagcacagagccaatgccaagtgaggatctg

SEQ ID NO: 1900 - DNA, 120 bp, synthetic construct
  source 1..120: mol_type = other DNA
aagtctaggatgaaagctttgcagcaactaagcagtacatttagctgtgagcctcctttcagtcaaggcaaaaagggaaacagttgagggcctataccttgtccaatctaattgaagaat

SEQ ID NO: 1901 - DNA, 120 bp, synthetic construct
  source 1..120: mol_type = other DNA
acacacattcatgctgttgcaggagtataggtcggtggtgttacacacattcactgttgcaggcgtgcaggtcggtggtgttacacattcacgctgttgcaggcgtgcaggtcggtggtg

SEQ ID NO: 1902 - DNA, 120 bp, synthetic construct
  source 1..120: mol_type = other DNA
gtgttgcaggcgtgcaggtcggtgttacacacatgctgttgcaggcgtgcaggtcggtggtacattcatgctgttgcaggcgtgcaggtcggtggtgttacacattttcacgctgttgca

SEQ ID NO: 1903 - DNA, 120 bp, synthetic construct
  source 1..120: mol_type = other DNA
ctgtgaggaagttcccctggtgactttgctggaggagtcttaggttgccacctcaacaggaggtcccagaaacaacccccaggaaagtcatcactgtgccttgactctctagagactgga

SEQ ID NO: 1904 - DNA, 120 bp, synthetic construct
  source 1..120: mol_type = other DNA
gggagggacagggctgtccacactcgacagagcccccatggggccatccactaccgtgtacagggacgggccgtccacagtggggccgccatggggctgtctatacactactgtatgcag

SEQ ID NO: 1905 - DNA, 120 bp, synthetic construct
  source 1..120: mol_type = other DNA
atagatggtagatgatgggtacgtagatagatgaatggatggatagatggatggatgggtgaacagatggtagatgatgggtacgtagatagatgagtggatggatagatggatgtgatg

SEQ ID NO: 1906 - DNA, 120 bp, synthetic construct
  source 1..120: mol_type = other DNA
tagaaaaagcaaaataaaacacctcttctaaagaaggaaaaaagtagtttgcctatatcagtacagaagttagaactaaagaaaagggggagggtgctactggcatctggtgagtggagg

SEQ ID NO: 1907 - DNA, 120 bp, synthetic construct
  source 1..120: mol_type = other DNA
taggaatatgcttaataagtctatgtatggtttttctggaggttgataactttgggaaagatttactttaaaagagtgaacaattatatgcatacgtgaagtattttcctgcttaaaaaa

SEQ ID NO: 1908 - DNA, 120 bp, synthetic construct
  source 1..120: mol_type = other DNA
gagtcttagaactgatccggagtaaaggtaagaaccctcagcggggactgaagggacaatccatgtttttaaccctggaaagccctaggcggaactataaaactggcttgcctctcattt

SEQ ID NO: 1909 - DNA, 120 bp, synthetic construct
  source 1..120: mol_type = other DNA
aataggggaaattcagtttccgttagttctgtgactcactctagcaaattaatcaaacaccaggagggagtcaagggaacccctgatttgtgtcccatcaatcagatgtatagatgatac

SEQ ID NO: 1910 - DNA, 120 bp, synthetic construct
  source 1..120: mol_type = other DNA
gcaattcattgtgtcacatatctttgtgttttggtaaattcatcattagagagagagaaaaaacatcaatggagtttaaaccctttgtctcgttaagtcgcaaaaaaaattattggacta

SEQ ID NO: 1911 - DNA, 120 bp, synthetic construct
  source 1..120: mol_type = other DNA
gcattatgtactattatttccttcatgaacttttcctttgcattcacagcttggctgtttggtggaagaggccgagctttcagcctatcttggctttcagcatgcttcctcactaagctt

SEQ ID NO: 1912 - DNA, 120 bp, synthetic construct
  source 1..120: mol_type = other DNA
attcagagcaagaccagaactctcttcaagtccatgaatgctgagagagctgaagaagctgcaggagaaacgtgtgaagctagtagaggttggttcgtgaggtttaaggaaagaagccgt

SEQ ID NO: 1913 - DNA, 120 bp, synthetic construct
  source 1..120: mol_type = other DNA
gtttcgatcgttaccaaaatcattcccgtggaagtctgcagcccgtttactacgcatgaaaggtgggagggtgaccttgaaacctagaaaggagcaaaatgtttatttcttaagaggcaa

SEQ ID NO: 1914 - DNA, 120 bp, synthetic construct
  source 1..120: mol_type = other DNA
aatgctgaagcactcatgcgggttctaataccagctcttacagccttggcgagattctgagtgagtcctttcccttctaaacctatctttggttcttatgaaaatagtgagtttaagtca

SEQ ID NO: 1915 - DNA, 120 bp, synthetic construct
  source 1..120: mol_type = other DNA
agcatgtccttggaggtacctttcatctgttttctcaactccaaacatcttaggaccatgggttgtgactggtaggactatgtatcttgctgctttcaagacggagtatattttcacgtg

SEQ ID NO: 1916 - DNA, 120 bp, synthetic construct
  source 1..120: mol_type = other DNA
tcccgaggtgccgggaacccccgacgacacagggcagattccctgaatggggtccccggcgggggcgaggcgggcggtgaagaaggggcctggcacctgggaaggctgcggcctggtgag

SEQ ID NO: 1917 - DNA, 120 bp, synthetic construct
  source 1..120: mol_type = other DNA
tggcatctcatgaaggaaacattgattctggaggattttttttttcctctcgtgttcttcagcttttgcccatgacttctttctccggctttgtttgttaatgacagattgtacacatgt

SEQ ID NO: 1918 - DNA, 120 bp, synthetic construct
  source 1..120: mol_type = other DNA
gtaaattttaggatatctgtattttttaccacaattggaaattcctttcttcctaaagttcagtgcagttatcatgtattcttttaaatttttactgtatgtatcttcaagacatagcat

SEQ ID NO: 1919 - DNA, 120 bp, synthetic construct
  source 1..120: mol_type = other DNA
tttttaaaagagttttctcactcagcgtttattggtggctactcatgccatgtaagagtctaagcgctaggagtgtaagtgctgtgagagacgggatttgagccttgagtcatttaatac

SEQ ID NO: 1920 - DNA, 120 bp, synthetic construct
  source 1..120: mol_type = other DNA
cggaaaggaagagggtattatttggaacaccttgttttcctgttttctgctaatggactcctgaaataatgttcctgggattcttatcaacacatttagtattacgttagctaaagcttt

SEQ ID NO: 1921 - DNA, 120 bp, synthetic construct
  source 1..120: mol_type = other DNA
ttgtaaaggtctgcttttaatcaatacataacacgtttgtaacacccatcacttggtgtgaaaaatgctgaagcactcatgcgggttctaataccagctcttacagccttggcgagattc

SEQ ID NO: 1922 - DNA, 120 bp, synthetic construct
  source 1..120: mol_type = other DNA
agcactcatgcgggttctaataccagctcttacagccttggcgagattctgagtgagtcctttcccttctaaacctatctttggttcttatgaaaatagtgagtttaagtcagagatttt

SEQ ID NO: 1923 - DNA, 120 bp, synthetic construct
  source 1..120: mol_type = other DNA
aatcaactgaagtatgctttacacatgtgttttccaaattgctgactgttaattgtaagtgcttgtgacttgaaaggaagcacttgatgttcagggaggaaattccttttaaattctgca

SEQ ID NO: 1924 - DNA, 120 bp, synthetic construct
  source 1..120: mol_type = other DNA
cgaggtgccgggatccccgacgacacagggcagattccctgaatggggcccccggcgggggcgaggcaggcggtgaagaaggggcctggcacctgggaaggctggggcctggcgagcccc

SEQ ID NO: 1925 - DNA, 120 bp, synthetic construct
  source 1..120: mol_type = other DNA
tgacattttaatacatacaatgtatcacaatcagatcacggtattattttgtaataccaaaatacaaaaagtaatttgtgccttctgtctttcatgcttactttttttttttcttttttt

SEQ ID NO: 1926 - DNA, 120 bp, synthetic construct
  source 1..120: mol_type = other DNA
catcaggaagtgtcccgaaaagtttcagatgttgaacaaaagtcctgtcagctgtgaattttgtatccagtgataccatccttcatggacgaaggggaaatcaagacattctcaggtaaa

SEQ ID NO: 1927 - DNA, 120 bp, synthetic construct
  source 1..120: mol_type = other DNA
cacgcataatctaaagtatgtccaaggtgctatgcacagagaatccatggtgtgcattcctgacattttacctatctgctcgcccagagatttaccctttctcctaagtaactagaaaat

SEQ ID NO: 1928 - DNA, 120 bp, synthetic construct
  source 1..120: mol_type = other DNA
agtgggtcaccgcgcccacccaggagattctctttgtaacaaagcctctgaaaatctccaaaccctgaatcaaaaaaaacacggagctggaaagggccttaggataatcacatcatgtag

SEQ ID NO: 1929 - DNA, 120 bp, synthetic construct
  source 1..120: mol_type = other DNA
cacaaatgtaacattcggctactagatattgagtgccatgtcctccatgcaaatagaggagaggataccctaaaagagataccgaagcatttgatttttctttctccctgggacaatggg

SEQ ID NO: 1930 - DNA, 120 bp, synthetic construct
  source 1..120: mol_type = other DNA
caccctggggccttcctgcaaaatgctgcagtgaacatctgagcacatgtctttgtgtagacatgattttatcactaatgggtgtcagatattgtcaaatacttttctctgtctatgaag

SEQ ID NO: 1931 - DNA, 120 bp, synthetic construct
  source 1..120: mol_type = other DNA
aataactaataacaagatgacctatgatgtagccaggcgccacattggaggagtggcagtggcggtgaagtggtgctcactgcggtgtgactcccctgggctggagtttggatctggctg

SEQ ID NO: 1932 - DNA, 120 bp, synthetic construct
  source 1..120: mol_type = other DNA
taagtagagtccactcaaagcaggaacattttgaagtgtctttgtagagatgactcaactgtgatttgggatgtctggcctaagttggttctaagttcgtcacctctagggctctcttta

SEQ ID NO: 1933 - DNA, 120 bp, synthetic construct
  source 1..120: mol_type = other DNA
tgcgcatgcccaggggccctgtgagctagaaagtagctgagctggtgcagtacctgctggttaagaaccggaagacggtggcgatcaaaagggcagacatgctgaagtatgtcatcaaaa

SEQ ID NO: 1934 - DNA, 120 bp, synthetic construct
  source 1..120: mol_type = other DNA
tttagccaaagatttcagtatgtcaatagggcaatggaagctcaagaaggtatagcaacttgctcaacacagagagaaaatgtatcactatggtgagacagtgaagggaggacactgtga

SEQ ID NO: 1935 - DNA, 120 bp, synthetic construct
  source 1..120: mol_type = other DNA
gtttgctattggcaaacagacatgctactgattcctgtatgctgattttatattctgcaactttaccgaattcacttattagttctaatagttacttggtgcagtctttagggttttctc

SEQ ID NO: 1936 - DNA, 120 bp, synthetic construct
  source 1..120: mol_type = other DNA
cttggtcaatcctagtttccacgtggtatcattttacttctgcctatatttacttctgcctgtatttttttggggggagaaatggctgttcacatcttttgcccatttctcaatgaggtt

SEQ ID NO: 1937 - DNA, 120 bp, synthetic construct
  source 1..120: mol_type = other DNA
atccacgtgctgaggagaatgatgtgtattctacagctgttggaggaaatgttctgtaaatacctgttaggtccatttggtgtatcgtgcagagcaagtccgatatttctttgttgagtt

SEQ ID NO: 1938 - DNA, 120 bp, synthetic construct
  source 1..120: mol_type = other DNA
aaagcaaagcaaagcaaagcaaagcaaagcaaagcaaagcaaagcaaactctgggtcccaccccagatcttgtcgtctgagaatacagatacggagctcagaaatctttgttttatcaag

SEQ ID NO: 1939 - DNA, 120 bp, synthetic construct
  source 1..120: mol_type = other DNA
ggagggaaggagggagggaggaaggaaggaaggagaaagagaaagagagagagaaagggagaaagaaagggtaagaaagaaagaaaggaaaagaaagaaagagatagaaaactgattaag

SEQ ID NO: 1940 - DNA, 120 bp, synthetic construct
  source 1..120: mol_type = other DNA
aaaaaaaaaaaaaaaaggccgggggggatgcatgaagggatgaatgaaattagtaactgaaagagggccagggatccaggagaacaatatgatttcatgggatacaagagggaaatcagc

SEQ ID NO: 1941 - DNA, 120 bp, synthetic construct
  source 1..120: mol_type = other DNA
ctgtgaaggggtgcaatttgacgtcctttctttccatttgtatgtcatttatttccttctggtgcctaattgctctggtaggacgttcagtactatgttaaataagagtggtgagagtgg

SEQ ID NO: 1942 - DNA, 120 bp, synthetic construct
  source 1..120: mol_type = other DNA
taaagtctcccagcaaagtaaagcctggtacccaatggcttcactgctgaattgcgccaaacatttaaagaagaacaaataccaatcctactcaaagtacttcaaaaggtagaggaggag

SEQ ID NO: 1943 - DNA, 120 bp, synthetic construct
  source 1..120: mol_type = other DNA
ttgatgccagaaatataaaaagaaccataagagacaactgtgaacaattacgcagcaataaatgggtcagcccagaagtggataaattcatagatgcatacaaccaaccaagcctgcatc

SEQ ID NO: 1944 - DNA, 120 bp, synthetic construct
  source 1..120: mol_type = other DNA
tgctcatttcgatagatgctgagaagcattcaaaaaatgtcaacatcccttcatgatagaaactcccagcaaagtgggcaaagaggtaaaaaacatacctcaacaaaataaaggccgcat

SEQ ID NO: 1945 - DNA, 120 bp, synthetic construct
  source 1..120: mol_type = other DNA
agttggcaaggttttgtgttgcggaccctcactttctggcgtttctgattccctgctgttcaaatgtccctgcagaatcacagatgtcactaccctgacatactgacagatacaactggc

SEQ ID NO: 1946 - DNA, 120 bp, synthetic construct
  source 1..120: mol_type = other DNA
ctaaaaaagtaaagaaaaggtagaaaacgggcaaaacttatggacctactccccagagtcagaaattcagatggccaacaaacctgcatgttgtgcacatgtaccccagaacttatagta

SEQ ID NO: 1947 - DNA, 120 bp, synthetic construct
  source 1..120: mol_type = other DNA
tcagaagccatcaccttcccgatgaaactgtactagtcttttctaagctctgatacttacaggaacagcaaagtctgtttagtggtaataatttgaggatctcagtgagataaagggcca

SEQ ID NO: 1948 - DNA, 120 bp, synthetic construct
  source 1..120: mol_type = other DNA
cttcatactctattatcaaagaatagagaagaaaacttactctatggtaaatagaaatatcagttctatgaacacgatcagtacattttttttttttttttttttttgagacggagtctc

SEQ ID NO: 1949 - DNA, 120 bp, synthetic construct
  source 1..120: mol_type = other DNA
tacaattaggaatatgtgctttggctctttaaggcaactgcttgccccatactctgactttagccctcaattgtcttggagatgcacagtaaaaggatatatgcctaggagaataaggct

SEQ ID NO: 1950 - DNA, 120 bp, synthetic construct
  source 1..120: mol_type = other DNA
tatgatataaatgagcttgataaggttgtttaaagattcacaaaagaaagtagatttctggcctttcacttgatttactatgaatttctgcaaaactactgagtttcctggttgtgaaat

SEQ ID NO: 1951 - DNA, 120 bp, synthetic construct
  source 1..120: mol_type = other DNA
cctatagtaaaatggtcaggaaaaatactcatttccatttatgataactgaagtgacaaaaagactcctagaagttacattttccctttgtggtatattaaagaacaatgaatataccac

SEQ ID NO: 1952 - DNA, 120 bp, synthetic construct
  source 1..120: mol_type = other DNA
agtgaagtgcctaggacttttttcttaaataatctagtatattttatgtgaataagggactataaagtagggagatcagcaggactgtaaaagtgggtgtgggagaagaaagtttgctag

SEQ ID NO: 1953 - DNA, 120 bp, synthetic construct
  source 1..120: mol_type = other DNA
atctgttagctctgtcgatccagggatgaaggttcagctagaaaaataactttaacccattattggactggtctttattaaaggcagagatataaccctaactatctcccactcttctga

SEQ ID NO: 1954 - DNA, 120 bp, synthetic construct
  source 1..120: mol_type = other DNA
aggcactcccctgggacatgaaaaaaaataataaaatttaggttatctggcactgcccaaataattgtatacagaaagtaagagaaaattcatgtatgtttgtgtttatctgcacttacg

SEQ ID NO: 1955 - DNA, 120 bp, synthetic construct
  source 1..120: mol_type = other DNA
ccctgtgatcgcaatttcctagagtgagtgccagttttagcaagtgtaaaatagttgtgtttgttgtagcttcttctatgatatctattaaggagttggatatctctgaaaagaaaatat

SEQ ID NO: 1956 - DNA, 120 bp, synthetic construct
  source 1..120: mol_type = other DNA
taaccctgatcacaccacttgcatttcaactattgtttagtatgatggcatttcaattggcagttttccttacagtgatctgtctacacatgcacgcacataaatgcacacaagggcata

SEQ ID NO: 1957 - DNA, 120 bp, synthetic construct
  source 1..120: mol_type = other DNA
aaggttttatagttttgggttttatggatatttaattcattttgagttgacttttgtacatggtgtaagaaaggggtccagtttcaattgtctgcacatggctacccagatgtcccagcc

SEQ ID NO: 1958 - DNA, 120 bp, synthetic construct
  source 1..120: mol_type = other DNA
gtgtcacatttatggttcagttgtttttctattcatttattaattaatgttgtcatttttaattggttatccatttttttggttttgaggtgacacaaaacaaaaatcacagaaataata

SEQ ID NO: 1959 - DNA, 120 bp, synthetic construct
  source 1..120: mol_type = other DNA
ggggtatttttaatctcaccttcataacagagtataaaaccaaaaattcacaagactgaattttgagcgagtttttatattatgtaatcccaatgcacatcattgtacaaatgatgctaa

SEQ ID NO: 1960 - DNA, 120 bp, synthetic construct
  source 1..120: mol_type = other DNA
aggtcttattcattctttcttttttggtacccattaatcatccctacctcccctgcctaccaacaacccttgctagcctctggtaaccaccttctactctctgtcttcatgagttcaatt

SEQ ID NO: 1961 - DNA, 120 bp, synthetic construct
  source 1..120: mol_type = other DNA
gtgagatcagagttctgtccataaacccctgactggagttgctgatattcctgtagggaggccttgcccagtgaacagggatagatccaggtcccacccaaagaagcaatctggccacag

SEQ ID NO: 1962 - DNA, 120 bp, synthetic construct
  source 1..120: mol_type = other DNA
gcatgtggtgtatagtacagattaagtctgatgtttctttgttgattttctgttgggaagatctgtccagtgctaaaagtggggcattgaagtctctagctattattgtacttgggacaa

SEQ ID NO: 1963 - DNA, 120 bp, synthetic construct
  source 1..120: mol_type = other DNA
tatttgaaagggctttggtattgtgatctaagctgtatgtgctttagggtacactccaagcccactaacactgtggttcttgcaaactcacagaggcaccacctcaatggtttggacaag

SEQ ID NO: 1964 - DNA, 120 bp, synthetic construct
  source 1..120: mol_type = other DNA
atcttgttttagacagtggtatgacaaaactataacctcagatcttatcctgttcttttatgatacagcacataaatgagagatcaataaccaatccatgccacttgtccagaacatgta

SEQ ID NO: 1965 - DNA, 120 bp, synthetic construct
  source 1..120: mol_type = other DNA
ttgaaattctttgtattttatacaaatttatattttaaccagtttgtgtattttttttccatctgctaaaggttttagctgtatttattagatatgatacttatgatgttgtcttggagg

SEQ ID NO: 1966 - DNA, 120 bp, synthetic construct
  source 1..120: mol_type = other DNA
ttctgtttcattgcatgttttccagagtcaaaacatttttggcctcgatgtcattgaaacaccagaaggagacaagatgccacaactgattgttcaaaaggagttagatagggaagagaa

SEQ ID NO: 1967 - DNA, 120 bp, synthetic construct
  source 1..120: mol_type = other DNA
agttacctgttccactactaacaggttgccttactttctactttcatttgttcaatcaattttctaccctgtacccataatactcctaaaacacaggtctgatccagtgaagcctgacag

SEQ ID NO: 1968 - DNA, 120 bp, synthetic construct
  source 1..120: mol_type = other DNA
ctccttttgtccatgagttatactcaaaaagtatcaaaggaaaaatttaatgcatttattgatctggatatagtccatatacaaaggggtgagagaaccgcatttttttttttttttttt

SEQ ID NO: 1969 - DNA, 120 bp, synthetic construct
  source 1..120: mol_type = other DNA
aataacgaagaccagagctgaactatatgaaattgaaacaaaaatataatagataaatgaaacaaagagctggttctttgaaaagataaacaaatggatagaccgttagtgagattaacc

SEQ ID NO: 1970 - DNA, 120 bp, synthetic construct
  source 1..120: mol_type = other DNA
caaactgtcgctgttcactgatgatattattgtatacctagaaaaccctaaagatttatccaaaacactcctagattttataaacgaattcagtaaagtttcaggatacaaaatcattgt

SEQ ID NO: 1971 - DNA, 120 bp, synthetic construct
  source 1..120: mol_type = other DNA
tttttgctggaatttctctctgtgttgttttcatcttgaggagatcaagtataaaagtgttgcgcatttactgagtaatattacaagcagaatgccacatattattaattgaaattctga

SEQ ID NO: 1972 - DNA, 120 bp, synthetic construct
  source 1..120: mol_type = other DNA
tgcattttatatttagaagcaagttggcacagggctgaaacatcagaaattcagtatccaccagtaatttcttgttattgctaattctcattagaggtctaaccacaaattgctatctac

SEQ ID NO: 1973 - DNA, 120 bp, synthetic construct
  source 1..120: mol_type = other DNA
cactagcagaggttctccatgagaactccatccctgcaacacacctgtgcctggatatccaggcatttacatatatcttttaaaatctagatagaagttcccaaacctcaattcttggct

SEQ ID NO: 1974 - DNA, 120 bp, synthetic construct
  source 1..120: mol_type = other DNA
agattgtgcacttcttatgagaaatctagctaatgcctaattatctgaggtggaatagtttcatcctgaaaccattatccacccacccacccccactctccaaccatggaaaattgtctt

SEQ ID NO: 1975 - DNA, 120 bp, synthetic construct
  source 1..120: mol_type = other DNA
tgcttgataagctctaaatgaacaagtatctacatgtaagacatactttagaaataaaactacctgaaatggtggttgccagcatttgagagttggggtattggggagatgtttgtcaaa

SEQ ID NO: 1976 - DNA, 120 bp, synthetic construct
  source 1..120: mol_type = other DNA
tatcaccaaagaaatgagtgtgtagatacaaaagggaagaaaccttagagacctccagcttttggagatctaggagaagggaagaaactagtcaaggggactcaggaatggctgtaaaag

SEQ ID NO: 1977 - DNA, 120 bp, synthetic construct
  source 1..120: mol_type = other DNA
ttaacttgtcactcagccctgcagattatattggtcttctgatgtgaagtttactgttctttcttttatgctatctagccacttgttcagttagcttattcattaatcaccgatacatat

SEQ ID NO: 1978 - DNA, 120 bp, synthetic construct
  source 1..120: mol_type = other DNA
gtttggactcaagtagtgtaatgcctccagctttgttcttcttcctcaagagtcttttagctattctgaggtttttgtggttccatatgaattttagagttgtttgtgttctatttccat

SEQ ID NO: 1979 - DNA, 120 bp, synthetic construct
  source 1..120: mol_type = other DNA
tctatcagacctgagacaggaaaccaaacccccacctcttccttctcctcttcagcctaatttatgtgaagatggtaacgataaagagctttatgataacccacttccacttaaggaata

SEQ ID NO: 1980 - DNA, 120 bp, synthetic construct
  source 1..120: mol_type = other DNA
gaggtgtatcatatttattgatttgtatatgtttaatcatcattgcattccagaaataaatcccacttgatcatggtgtatgatctttttaatgtgctgctgatttcagtttgttagtat

SEQ ID NO: 1981 - DNA, 120 bp, synthetic construct
  source 1..120: mol_type = other DNA
agtccatccagactaaccatttctctatgatatattctaccatgttgaacattatatttatacatttatttgtttgtatttaattgtccttttatgtaattttttcctctccatccaaat

SEQ ID NO: 1982 - DNA, 120 bp, synthetic construct
  source 1..120: mol_type = other DNA
aataaaatatttactctgaaatttgtatgtttaaaataatagagtcagtagagctttataaaaaatgacagcttcctactttttaattgaagaataaacatataacactggctacactag

SEQ ID NO: 1983 - DNA, 120 bp, synthetic construct
  source 1..120: mol_type = other DNA
ttaagacatattttgtgacctaacatattatctatccttgagaatgatccatgtgctaaggaaaagaatgtatattatatagtcgttagatgaaatgttctgtaaatatctattaggtcc

SEQ ID NO: 1984 - DNA, 120 bp, synthetic construct
  source 1..120: mol_type = other DNA
tactattgataagtaaggacctactcttgccattttcttatttattttctggttgtttatgatcttctctttcttttttctttccttcctgtcttcctctagtgaaggttattttctctg

SEQ ID NO: 1985 - DNA, 120 bp, synthetic construct
  source 1..120: mol_type = other DNA
ggtctcattcaagacccactgttactactccctggctacttcccatgtttgctcaaggccctggtgctctacaatcagcatgtggcaaagccagccaagcctatgctcttcccttcatgg

SEQ ID NO: 1986 - DNA, 120 bp, synthetic construct
  source 1..120: mol_type = other DNA
aaacacactccctccaccaagaaacagtcaaagtgctttgttaaacgggtcctgctccccatgccacccaactgggtgagaccctccagaaggggttgtcagacaccgtattcaggaggg

SEQ ID NO: 1987 - DNA, 120 bp, synthetic construct
  source 1..120: mol_type = other DNA
ccctgtgagcatgtgtttctgagtactatggttcttatgtcaaacattgcataagggtagggcacaggtagaaaggagaaaagaaaacttttactctattacctgttttcttctccatgt

SEQ ID NO: 1988 - DNA, 120 bp, synthetic construct
  source 1..120: mol_type = other DNA
cttaaaatatgtgacatcatcagaagttggaggaaatcaggcatttataatgaatatgagattgtagagctcccaatgtaattaagattcttttgtcaaaatttatctaaattcaccata

SEQ ID NO: 1989 - DNA, 120 bp, synthetic construct
  source 1..120: mol_type = other DNA
tatttatgaggtagatgagatactttgatacaggtgtgcaatgcataataattacatcaaaatagggcatctatcccctcaagcacttatgctttgtgttacaaacaatccagtttcact

SEQ ID NO: 1990 - DNA, 120 bp, synthetic construct
  source 1..120: mol_type = other DNA
gtcctttaaataatcctttaaattactgtggtttcagtcataatgtctcctttttcatctctgattttgtatatttgtgtcttctctctttcttctcagtttgcctaaaagtttgtcaat

SEQ ID NO: 1991 - DNA, 120 bp, synthetic construct
  source 1..120: mol_type = other DNA
tcctctttctgaattgactactttatcattatactataaccttctttgtctcttttttcagtttttgccttgaaatccattttgtctgatatcagtatagctactcctgctcttttttgg

SEQ ID NO: 1992 - DNA, 120 bp, synthetic construct
  source 1..120: mol_type = other DNA
ccttcagcactttaaatatgtcctgactatctcttctggcctgtaaggtttcgactgaaaagtttgctgccagatgtaatggagctttgttgtatgttatttgtttcttctctcttgctg

SEQ ID NO: 1993 - DNA, 120 bp, synthetic construct
  source 1..120: mol_type = other DNA
cacaagtaacaaggagcccaatgttaatccccaagacaaaggggtccagggcatgttagaggtcttcatggcagcccctctaatcacaggctcagaggcctaggaggataacatggtttt

SEQ ID NO: 1994 - DNA, 120 bp, synthetic construct
  source 1..120: mol_type = other DNA
cccactgtaaccactaccaggctcctttctatgttaactcaaggccctagggctctacaatcagcaggtgggaaatccagccatgtttgtgacctcttcttcagggcagcaagttttcca

SEQ ID NO: 1995 - DNA, 120 bp, synthetic construct
  source 1..120: mol_type = other DNA
cttctcactttggttatgttcaaagtgtcccttctctcaaatactcattatttaaaactttgagacgaaagaacttccattttgtaagatatggctcaaagtaaatgaaacaaaaaagct

SEQ ID NO: 1996 - DNA, 120 bp, synthetic construct
  source 1..120: mol_type = other DNA
aagttattagaaaaaattttattacatttcaggtgtttctccaattgcctgtgtgctttattgcactagcagaagacaatttttattttactggcatacgaatacatgctttacgtgtat

SEQ ID NO: 1997 - DNA, 120 bp, synthetic construct
  source 1..120: mol_type = other DNA
tctgaagtgtgccaagagcttatataaatgcctcattaattgctaaatcacttacaaattgtaaatttggcttaagtttatctctttatgtctacttgggacctagaagcaaagcagggt

SEQ ID NO: 1998 - DNA, 120 bp, synthetic construct
  source 1..120: mol_type = other DNA
ggcagagtggaattcttaaaatactcttcactttaacttctcctaaaggaaagtagacatgaagagcaagtaggcatactgggatatgtggccatgagatgtcctggataatgtgcctga

SEQ ID NO: 1999 - DNA, 120 bp, synthetic construct
  source 1..120: mol_type = other DNA
acaaaaaacaacaaagcagacactgaagtgaggagaagggaaacgtaatagcctattatgcaaaaataacttcatttaagaaatcaaccaagattagagaaaaatatgagtatccacatg

SEQ ID NO: 2000 - DNA, 120 bp, synthetic construct
  source 1..120: mol_type = other DNA
tccttgtgataaatcccacttggttatgatgaatgctctatttaatatattgtctaattcagtttgtagtattttatttaagatttttgcatcaatattcaggagagatattggcctgta

SEQ ID NO: 2001 - DNA, 120 bp, synthetic construct
  source 1..120: mol_type = other DNA
ttgcagtctttttttctgccttactgtcttccttttagtgaaggtgattttctctggtggtattctttaacttcttgctttttagtttttgggtatccattgtatgatttttgctttgag

SEQ ID NO: 2002 - DNA, 120 bp, synthetic construct
  source 1..120: mol_type = other DNA
gaattccttctctgtgttatcttgaatttctttgattttcctcaaaacagttttttgaattatctctctgaaacatcatatatctctctttctccaggattggtccctggtgcctcattt

SEQ ID NO: 2003 - DNA, 120 bp, synthetic construct
  source 1..120: mol_type = other DNA
agaggcacaatcacagctcatcgtaactccccctcctaggctcaagcgatcctcactcctcagtctcttgagtagatgggactatagtcatgtgccaccatgcttagcaaatgttttgta

SEQ ID NO: 2004 - DNA, 120 bp, synthetic construct
  source 1..120: mol_type = other DNA
atagcagtagaaattcttccacattaaatacaggaaggaaaaaaatgcttcagaagcacatttgaagagagctatattcaatttcacaggaaagattcaacatcaagtaacccctgggtc

SEQ ID NO: 2005 - DNA, 120 bp, synthetic construct
  source 1..120: mol_type = other DNA
cgtatcttttaaaattaatagttctattagtattttttttcagatttgactcattccaaaatttattgcattttaatgcaaactaagcatgcatattattggtttggttataatgcagtc

SEQ ID NO: 2006 - DNA, 120 bp, synthetic construct
  source 1..120: mol_type = other DNA
caggtgtgagccaccacacctagccattgattaattacttaaaaatcaaagcaatatgctattacagaaccagaccttataggcaacaaattacccatgtcacatactttttgaagtaca

SEQ ID NO: 2007 - DNA, 120 bp, synthetic construct
  source 1..120: mol_type = other DNA
tccatttagaataaaactcaaatctttacaatgacctacaatatcctgcctgatttgactcttttctatgtcattccactttcctccttgcttactatatattccaggcacactggtctc

SEQ ID NO: 2008 - DNA, 120 bp, synthetic construct
  source 1..120: mol_type = other DNA
tgtccctgggagtccaatttgtgatctctgatttatttatgcatttgtttgtttgttgcttatctttcctactaaattgtgagctccatgtgggttagggaacatgtctgtctcgctcat

SEQ ID NO: 2009 - DNA, 120 bp, synthetic construct
  source 1..120: mol_type = other DNA
aataactatatcagaattccaatttcctaatacttttaggagtatacaaaaagaaatctcaaagtgaggccttccatcaacattatgtttcttaccaccaattttcctaggcttcacatg

SEQ ID NO: 2010 - DNA, 120 bp, synthetic construct
  source 1..120: mol_type = other DNA
aatatacaaacaagggtttaggtggtatgattcagcagagaatgtgacatacataccttcattactaaaatgctattatagtgcctgggatctatcaataaagaagggactatttttcta

SEQ ID NO: 2011 - DNA, 120 bp, synthetic construct
  source 1..120: mol_type = other DNA
ctcatctatcagaaacgagtgtatctgtattgtaaaacatcaaccctataactgtgggtctgaaagttgcctgacaaagcagatgtgtacttttcccaattccagttgtggataactgag

SEQ ID NO: 2012 - DNA, 120 bp, synthetic construct
  source 1..120: mol_type = other DNA
acacagttcatttattcattcatccattgataggcatttgtgttgtttcctttttgtctattatggataattgatgctataaacatttgtgtgaaagtttttgtgtggatgtgtcttttc

SEQ ID NO: 2013 - DNA, 120 bp, synthetic construct
  source 1..120: mol_type = other DNA
ttgttaaatttcacgttccaattatttggtgctaatatgaaagaatacaaccttatatcacctaatctcactaaatttatttattaattattgtaattgttttgtggttcccctgtgatg

SEQ ID NO: 2014 - DNA, 120 bp, synthetic construct
  source 1..120: mol_type = other DNA
tttctctgtaaacctaagtttaaatatggctgaaactacataattttaaacattgtagatctaaaattttaggaggcaaatgtcaaaacaattaaggataagatactatagtaactagag

SEQ ID NO: 2015 - DNA, 120 bp, synthetic construct
  source 1..120: mol_type = other DNA
tctccatcttgctcaaagttggaagtaacatttatgacacgggcttcttcttactgaaatataccaataatgagctgattctcttttgttattttttgttgctatttattttgttttact

SEQ ID NO: 2016 - DNA, 120 bp, synthetic construct
  source 1..120: mol_type = other DNA
ggtatcataaatagagtttaaaaagatcattcttggcatatattgaacaccaagagagtcttattgcagcctcaatgctaaagctttataatttaaagatgctctgataatcagcagtct

SEQ ID NO: 2017 - DNA, 120 bp, synthetic construct
  source 1..120: mol_type = other DNA
tgctgatatgagaagtagttcagcctgtggtataaaggttaactgttttactttgccaacaaatttagagtgcacaagaatcctttttctggagtgcggtggcgtagtgtcggcttactg

SEQ ID NO: 2018 - DNA, 120 bp, synthetic construct
  source 1..120: mol_type = other DNA
ctatcccaaaatctcattttaaaattgagaaaaactaggctcaaagagatgaagtgacttcctaagttcacacacttgggcatagctgaactagaagcaaaatcccagtttcatcaagtt

SEQ ID NO: 2019 - DNA, 120 bp, synthetic construct
  source 1..120: mol_type = other DNA
attgtgatgaaagatgacttttattcagtgcccagtttattattgttattattgttgttatgatattagcaggcaatatgatgcagacgtgctggcaaaatctatgatactagtcccaca

SEQ ID NO: 2020 - DNA, 120 bp, synthetic construct
  source 1..120: mol_type = other DNA
catcatggctaaagataaagccatcacagctttatcacgcctacgtaatttttgctttgcttctcatcaatgagcccaggaaaaaattatttaatgttggtgcatacaaatattccagca

SEQ ID NO: 2021 - DNA, 120 bp, synthetic construct
  source 1..120: mol_type = other DNA
tatttgtttcaggaatcaataacagccagtgactgaaggtcataaaggaaccattcaggaaaacaaagagccttttgccaaggcagttgtcatgctgtatatgtgtgcacatatgcaggg

SEQ ID NO: 2022 - DNA, 120 bp, synthetic construct
  source 1..120: mol_type = other DNA
cctgggtcagagaaaagacattaagaaatagaaataaagtaaaaattagttaataatagtgtatagatatattggttcattagttgtggcacaatgtattataataatgtaagatgttaa

SEQ ID NO: 2023 - DNA, 120 bp, synthetic construct
  source 1..120: mol_type = other DNA
ttcaaggccctagagaaacatatgtgtgtactctttggtgagcaaattgctattattatcttgaatttaatacaatgaagcatcacacattgtaaaactaagggagtcacagaaatttca

SEQ ID NO: 2024 - DNA, 120 bp, synthetic construct
  source 1..120: mol_type = other DNA
ggcctgaaaaatattgccggaccaactcaaaattacagtctttcagagcttatataccttctaagctatgtgtctacatctaagtgtgcattcatttaaagacataagtgattaacttct

SEQ ID NO: 2025 - DNA, 120 bp, synthetic construct
  source 1..120: mol_type = other DNA
tctgcgggtttttgtatttctttggggtcagtggtaatgtcctctttgaaatttccgattgtgtttatctaaattttctctttttttctttatctagctagcagtctatctgtcttatta

SEQ ID NO: 2026 - DNA, 120 bp, synthetic construct
  source 1..120: mol_type = other DNA
aacaacctagctttacatcataaagaattagagaaagaacaaactaaacccaaagtgaacagaaggaaagaaataataaagactagagcagaagtaagtaaaatagagaatagaaaaaca

SEQ ID NO: 2027 - DNA, 120 bp, synthetic construct
  source 1..120: mol_type = other DNA
aacccacagctaacataatatgaaagtctgtaagctttacctctaagatcaggaacaggaatagggtgtctgctatcattccttctatttaacattgtaatggaatggatttgaaagaaa

SEQ ID NO: 2028 - DNA, 120 bp, synthetic construct
  source 1..120: mol_type = other DNA
cacacgcccagtagtgtttgttgtgcaggtttattaagtacagtcatgtgtcatttaatgatggagatactttctgagcaacgcattgttaggtgatttccttgttatgagaacatcata

SEQ ID NO: 2029 - DNA, 120 bp, synthetic construct
  source 1..120: mol_type = other DNA
aatatagtaaatacataaactagtaacataattgttaattattattatcaagtcttatgtactgtacataattgtatatgctatgcttttatatgactggcagtgcaataggtttgttga

SEQ ID NO: 2030 - DNA, 120 bp, synthetic construct
  source 1..120: mol_type = other DNA
atcaggaagaatttgaaaataatgcatgttgatgtcctaatattgtctttctcactaactcttatgattgagaatatatttctttatttcatttaactaatttggaaaaacgaaatctag

SEQ ID NO: 2031 - DNA, 120 bp, synthetic construct
  source 1..120: mol_type = other DNA
gcaaacagttgtagatctggaatggattccatagctaaaaaaattataggtctaaatctcagaagagacatctaactgcactgaaggtaaataatcattagatacagatggtcattgatg

SEQ ID NO: 2032 - DNA, 120 bp, synthetic construct
  source 1..120: mol_type = other DNA
gtcctactgggaggttttcagggacagtaacatgcacagagctgtcttctcctatgataacaatgtcttcttttgaaatacctcctgaaagatctgcttgaggctgttttgtagttaact

SEQ ID NO: 2033 - DNA, 120 bp, synthetic construct
  source 1..120: mol_type = other DNA
cagccgctttgctgcactgtggtgaatttgcccagtccacacctcccagcctccttagcactgtcaggggaaaattgccttataaagcctcagtaatggcggatgcccctctccccacca

SEQ ID NO: 2034 - DNA, 120 bp, synthetic construct
  source 1..120: mol_type = other DNA
atctgtttcataaaatgtaccacaaactgacatgtcaaacttgttttaaaaaatcaattgcggggtgagcaactgtctttaatttgaatttatcccgtcttttatgaccagtttccaact

SEQ ID NO: 2035 - DNA, 120 bp, synthetic construct
  source 1..120: mol_type = other DNA
ttgtaatcatgatttctctgatcaatacaatgtatttttgatctacaaagagggtatatgagcaataaaaatcccagaaatgttgcccataatgatttcaaatgccttagaatgattatt

SEQ ID NO: 2036 - DNA, 120 bp, synthetic construct
  source 1..120: mol_type = other DNA
catgtggcttaaataatctgaatcttacttcggacctactaaaacagaacagaatatttgaattttgaaacccaggaatttgtgatggcagtggcggctgtctggagtggccactgccat

SEQ ID NO: 2037 - DNA, 120 bp, synthetic construct
  source 1..120: mol_type = other DNA
ctgctttcctgcttttatctctagttctagttctaatggattgagcagagtacaactccttttcatctctagttgtttatcctagagatgaaaaggagttgtactctgctcaatccatta

SEQ ID NO: 2038 - DNA, 120 bp, synthetic construct
  source 1..120: mol_type = other DNA
ttattcaagtagaaaactggagttttaggatttgacccaaattaaatccaaatattgaaatttcaattcaaagtgccatagtattgaactattaagtcttcccttctgaaataactagcc

SEQ ID NO: 2039 - DNA, 120 bp, synthetic construct
  source 1..120: mol_type = other DNA
aagctggttacatgaattaatccttcatgtcctttactcctttctgcttttgaaggaaagattaattccgttatcaaattaacacgtgcacaaatatttggtactgtatattcagtggaa

SEQ ID NO: 2040 - DNA, 120 bp, synthetic construct
  source 1..120: mol_type = other DNA
tgtttataatttcatatatttgccaaaagtgtgtgcgtgtgtgtatatatatgtatatataccaaagattctaattgaagatgaatagtgcatttaaattatggaaattttactaccttg

SEQ ID NO: 2041 - DNA, 120 bp, synthetic construct
  source 1..120: mol_type = other DNA
ctcgtattttgaatcaacaatgccaaaatattataggggaaaatggaaaaataagagaatttgtataagtagtaaagactgctttcttgaggcagaaggcaaaagtgccaactgatgttc

SEQ ID NO: 2042 - DNA, 120 bp, synthetic construct
  source 1..120: mol_type = other DNA
ggtatacagattattttgtcacccaagtaaaagcatagtatccaataggtagtttttctctccttagcctcctcactctccaccatcaaatagaccctagtgtctattgttcctttcttt

SEQ ID NO: 2043 - DNA, 120 bp, synthetic construct
  source 1..120: mol_type = other DNA
aagcagctgttatataccggctcagtgaaataaatgaacccgtagaatttcttttcttttttttttttttttttaaattttatttcacattttatttccagaggtttttggggaacaggt

SEQ ID NO: 2044 - DNA, 120 bp, synthetic construct
  source 1..120: mol_type = other DNA
aaaggcagctggaagaggtcccatatgctctattcctttctcttagattttatgctctgagaacatctgtgtgaagagtaaagttgacatggtgttgccaaaatgtcagtgttatgggac

SEQ ID NO: 2045 - DNA, 120 bp, synthetic construct
  source 1..120: mol_type = other DNA
tacatgatactacttttttcattgacatagcttaagagaagaaaagacaaaatgtaagtatcagtctctggcagactatgttaaatatgtttactcataatgaattaaatttatagggta

SEQ ID NO: 2046 - DNA, 120 bp, synthetic construct
  source 1..120: mol_type = other DNA
ttggttttgattttcattttctgatgattagtgatatggagcatttgttcatgtttgttggctacctgtatgtcttcttaagagaagtgtatgttcatgtccattgtctatttttaatgg

SEQ ID NO: 2047 - DNA, 120 bp, synthetic construct
  source 1..120: mol_type = other DNA
aagtgaactccttaatttaacctcatattattggttttgtgtcatgtctcaatatgtcaccaaagccagcccagattttaaattcttattattacttaataacacctacattttaatctt

SEQ ID NO: 2048 - DNA, 120 bp, synthetic construct
  source 1..120: mol_type = other DNA
gttttggacctccatggggcctgtagtctctttgttttgccaatctctgccatttgaaatggttgtatttacccaatgactgtactcccattgtatctaggaagtaactaatttgccttt

SEQ ID NO: 2049 - DNA, 120 bp, synthetic construct
  source 1..120: mol_type = other DNA
tcagtaacttcttatagccgaaattttattgtttgctagctggcaaaagcattatgtttaaaaatatacagcaacagattttcatattttttcatatctttttagaatgactcacataag

SEQ ID NO: 2050 - DNA, 120 bp, synthetic construct
  source 1..120: mol_type = other DNA
ggagcaggaggccaataaaaagtacagagttaaaaaaaaaaaagatttaaacaatgaaaactataaaacattgatgaaagaaattgaggcagatacaaaaaaattgaaagacatttcata

SEQ ID NO: 2051 - DNA, 120 bp, synthetic construct
  source 1..120: mol_type = other DNA
atagacatttctcaaaataatatatacaaatggcctaccttcaagtgtttaagtaaaagttgtttcctgatatcatgtccatttacttatgcaatatagagactttaattacctactgtt

SEQ ID NO: 2052 - DNA, 120 bp, synthetic construct
  source 1..120: mol_type = other DNA
aatgagacttgaaggtggtatccattacagcctttgcaaagatttcccttgaataaaagggcagaaaatagagccaatagcttgtggactaggaagattttgtgaagaataggaaaaatg

SEQ ID NO: 2053 - DNA, 120 bp, synthetic construct
  source 1..120: mol_type = other DNA
catattttgtagaattttttaaaattagcattattcaaagaggtattggtttattaatttgacaccacagtcttccgtacactgatttcatttttttcatgctgattctgccatatcctg

SEQ ID NO: 2054 - DNA, 120 bp, synthetic construct
  source 1..120: mol_type = other DNA
ctgttgatatgatgaatcacatagattgatttgcatacattgagccatctttgcatctctaggttaaatcccacttggtcatgatgaatgatgttttcaatgtgttgttgaattcagttt

SEQ ID NO: 2055 - DNA, 120 bp, synthetic construct
  source 1..120: mol_type = other DNA
cagtgcggagtttagttcctaaatatcttcatgaattatctgtctaatactgtcaaagggtgttgaaatctcccactattattttgtgggagtctaagtcactttgatgatctctaagaa

SEQ ID NO: 2056 - DNA, 120 bp, synthetic construct
  source 1..120: mol_type = other DNA
gccctagagatctgctgtacattgtgtctatagtcaacaataccatattggacacataaaatttaagaaggtagatctcatgttgagtgctctgactacaataaagtacaattttcttaa

SEQ ID NO: 2057 - DNA, 120 bp, synthetic construct
  source 1..120: mol_type = other DNA
gattcaagagatatattttgtcctggcctctcaataggatgtcagtgcacttttgtcttctctgcatgaactgccaagcagtttaacagatcagaacatctagcccctgttaggagtatt

SEQ ID NO: 2058 - DNA, 120 bp, synthetic construct
  source 1..120: mol_type = other DNA
tctctttccatactgatttctccagttgcccctcaatcccaatgctttaaacaatccagataatcttaggttcacttaatgattcatgcggcttcatgtgcctgcttatatgctattctg

SEQ ID NO: 2059 - DNA, 120 bp, synthetic construct
  source 1..120: mol_type = other DNA
gagacaaaatatcaatttctttctcctacatttaagaacaggtagtctcttcaaaatcccagaagttgagccttagctgaggtttagtgttttctaaacaggcttaaaatggaagttgtt

SEQ ID NO: 2060 - DNA, 120 bp, synthetic construct
  source 1..120: mol_type = other DNA
gaaaaaggaacgcgtttacactgcctgtgagagtataaactagttcaaccactgtggaagtcaatgtgacaattcccaaagacctagaggcagaaataccatttgactcagcaatctcat

SEQ ID NO: 2061 - DNA, 120 bp, synthetic construct
  source 1..120: mol_type = other DNA
gcttggtgaataaaatacatttcagagttcatcctttcaacttgatatttggtcattaaaaagtattttgttttacggggtttgatacgccgtctccctcataagtttgtgttcctcata

SEQ ID NO: 2062 - DNA, 120 bp, synthetic construct
  source 1..120: mol_type = other DNA
tgttgaacatattttcacatgcctgtttgccatttgcatgtcttcttcagagaaatatctactccaatctattgcctgttttgaattgcattattgaattttttcttatgaagttatttt

SEQ ID NO: 2063 - DNA, 120 bp, synthetic construct
  source 1..120: mol_type = other DNA
ataaattattgtaaactagagtaatcctacagtgctatagaatgctagaacttaatcttcctatctagttgtaattttgtatcctttaatgaatgtctccctctctcctcttctccctac

SEQ ID NO: 2064 - DNA, 120 bp, synthetic construct
  source 1..120: mol_type = other DNA
tgtctctttgatatactgatttcctttctttttggtatatgccaagcaggggaattgctggatcatatggtagctcaatttttgtttttttgaaaaaactccaaactgttctctagagtg

SEQ ID NO: 2065 - DNA, 120 bp, synthetic construct
  source 1..120: mol_type = other DNA
tttctagttcaatgagtaatgccaccagtattttgataaagattgcattgagtctgtagattgctttgagtattatggatgttttaacaatattaattttaccatttcatgaacatggaa

SEQ ID NO: 2066 - DNA, 120 bp, synthetic construct
  source 1..120: mol_type = other DNA
gaataatctttctattgtgtttttgaatttggtttgctagtattttcttggaaatttttgcatcaatactcatcacggatattgtcctgcaattttcgtgtgtgtgtgtgtgtgtgtgtg

SEQ ID NO: 2067 - DNA, 120 bp, synthetic construct
  source 1..120: mol_type = other DNA
cccttctattcaattttagaaaggttctgtccttctctgattaaaagaattattgatcaaaagtcttatttcataagctattatgacagaggctcctggaaggtccttttggctaaacac

SEQ ID NO: 2068 - DNA, 120 bp, synthetic construct
  source 1..120: mol_type = other DNA
atgatggtgagtaaactgctcttaagtagaaagactaaataacaaaccaataaaaaataatgatgaaaacgaggaaactactagaactgataaacaaattcagtacagttgcaggatacg

SEQ ID NO: 2069 - DNA, 120 bp, synthetic construct
  source 1..120: mol_type = other DNA
aacatctccctttttgccagttagaaaagtgatatgaactttttattgagttgttgcaccccactgatttcctgaaatactcaaaatgtcatgtattttgtaaattttaatattttgtta

SEQ ID NO: 2070 - DNA, 120 bp, synthetic construct
  source 1..120: mol_type = other DNA
tcaataacgaaacattcaaagaaacccagccagttacaggacaggctattttgtacgtctttaaaaatacgctactgcattgttatcaatttctaaattcccagtctgaagcaatgtaaa

SEQ ID NO: 2071 - DNA, 120 bp, synthetic construct
  source 1..120: mol_type = other DNA
gtttctgggtagacctcagaaagcttacaatcatggcagaaggcaaagtgcagtcagcactgtacataactggagcaggaaaggggggtgctacacacttttaaacaagcagatctcact

SEQ ID NO: 2072 - DNA, 120 bp, synthetic construct
  source 1..120: mol_type = other DNA
tgataatacaaaaaaatgctacacttactggttaattagaaatcctacagcaaattaaagtcacttgtcattgtttaatggttgttgatatcatgagctctgtattgctgtacaggcagc

SEQ ID NO: 2073 - DNA, 120 bp, synthetic construct
  source 1..120: mol_type = other DNA
aacaaaaccggaggaattatattacctgccttcaaattatgttacagagctatagtaaccaaacagcataaacctgacataaaaacagacacatagaccaaaggaacagaatcgagaacc

SEQ ID NO: 2074 - DNA, 120 bp, synthetic construct
  source 1..120: mol_type = other DNA
cattgtttcagagggttcaagccccatacattggtgtcttacatgtggtattgggcctgtgggtgcacagaagtcaagaactgggaatctccacctaaattttggaggatgtatggaaat

SEQ ID NO: 2075 - DNA, 120 bp, synthetic construct
  source 1..120: mol_type = other DNA
gcgattgtgtgcttccagcaatttctcaatttcctctaaattttctattttgtgtgcacagaggtgtttatattttctgaggatcttttgaattcctgtgggatcagttgcaatgccacc

SEQ ID NO: 2076 - DNA, 120 bp, synthetic construct
  source 1..120: mol_type = other DNA
caaaacttgtataaaatctctaatagtgggtcaccaatgcccacatctttgaagaagagacattattggtacttggaacaggtctcccgataggtccgtctagaagcctaagttggttct

SEQ ID NO: 2077 - DNA, 120 bp, synthetic construct
  source 1..120: mol_type = other DNA
tattgaggtagagttaaggcacatctgaagggtaaaaattccctgctgaaggcataaaattctcataaatgactttgcaaactgtgatatgtgtactcagagtgggtaaccccaagtgcg

SEQ ID NO: 2078 - DNA, 120 bp, synthetic construct
  source 1..120: mol_type = other DNA
gtggtgaaacaacaggagtgaaagtgggtatccttgttgtattccagatcttacaggaaagactttcactttctactcattcttatgatactagctgtggatctctgttttttatggctt

SEQ ID NO: 2079 - DNA, 120 bp, synthetic construct
  source 1..120: mol_type = other DNA
ctatctttggtcaggactcagttccttctttaatatatcagagaaccagagacactaatatctgacagccttttgccatcaagtggccatgcgttttttaagtaagcatcccctgctaca

SEQ ID NO: 2080 - DNA, 120 bp, synthetic construct
  source 1..120: mol_type = other DNA
ttatttcattttgttttaagttccaggatacatgtgcatgacgtgcaggtttgttatatagacaaacgtgtgtcatggtttgctgcacctatcagcccatcacctaggaattaagccccg

SEQ ID NO: 2081 - DNA, 120 bp, synthetic construct
  source 1..120: mol_type = other DNA
caaagagaacatccaagacctcaactcttcagtaactgggtctggcttccagtttgtgtgaattaataaggctgaactaaaattaatttcctttggaaaacccgggggtggtcagaacag

SEQ ID NO: 2082 - DNA, 120 bp, synthetic construct
  source 1..120: mol_type = other DNA
ttatctggaggtaccaccatctcagtaatatgggcaatctcagagctccaggtctcatgaacagaacggtctcctgaaacatgcagatcaggagaactctgcagtggttggattctactg

SEQ ID NO: 2083 - DNA, 120 bp, synthetic construct
  source 1..120: mol_type = other DNA
atgaccataggagcaacatgacaagagaggccacatgacctcaaagttttagagcccttggtgctgatatgaccagtagggccctatcagtagggctcataattgtagtgttcacatgat

SEQ ID NO: 2084 - DNA, 120 bp, synthetic construct
  source 1..120: mol_type = other DNA
aagaaaacagtggtgaagactgtgtcttgcatctgggataccagcccagccatagcaagatagggcaccagtcagagtcacgtggcccctgttccaggacctagctactagaggacattc

SEQ ID NO: 2085 - DNA, 120 bp, synthetic construct
  source 1..120: mol_type = other DNA
aataacaaaatggcaggactacgtccttacatgtcaaccgtaacattggatgcaaattggaaaaactctcccatcaaaagtcacagactggctgaatgggtgaagaaacaaggctcattg

SEQ ID NO: 2086 - DNA, 120 bp, synthetic construct
  source 1..120: mol_type = other DNA
aaacacaacataccaaaacctctgggatatggcaaaagcagtactcagagggaagttcatagctataagtgcctacatcaaaaaagaggaaaattttcaaataaacaatgtaacgatgcc

SEQ ID NO: 2087 - DNA, 120 bp, synthetic construct
  source 1..120: mol_type = other DNA
taataaaagccatatgcaacagactgacagctagtatcataccgaatgtggaaaaactgaaagcctttccttgaagaactggaatacgacaaggatgcccactgtcaccactgttgttca

SEQ ID NO: 2088 - DNA, 120 bp, synthetic construct
  source 1..120: mol_type = other DNA
agaggaagtcttgtgactggagtcaagggacttgaatttatctaactgcttctaccattactagcttaatgttacagaaaaacatcaattctggccttgtccactactatgcactaaaac

SEQ ID NO: 2089 - DNA, 120 bp, synthetic construct
  source 1..120: mol_type = other DNA
aggcatgggtgtatacatacattatttcctaaccctctccatagagagagccttagcagcaatgaaacgccattaataatgaacacacaccgagatactggttggtaaatatcattcccc

SEQ ID NO: 2090 - DNA, 120 bp, synthetic construct
  source 1..120: mol_type = other DNA
aagtgatcaaggtgagcaccaccagtaatacaacttatggatgtcatgtacccctgacatgatccacatagaagggaacgaaatcacgtttgcggtaatgtcgcataagacctaaaatta

SEQ ID NO: 2091 - DNA, 120 bp, synthetic construct
  source 1..120: mol_type = other DNA
aaggaaatttatggaaaagatattgttgtaatttacctaattggaagaagacttggaaccaacctgggagctacacttcccctcagaatcttgccacaaacaagacgcaatcttgtgggt

SEQ ID NO: 2092 - DNA, 120 bp, synthetic construct
  source 1..120: mol_type = other DNA
tgtgttttcactgctcagagtagtgaggcccatgtccttaaggccttgatggacttcctgagacacctgttcactcacactcagcatagtctcttcaggcctagataataagggatagaa

SEQ ID NO: 2093 - DNA, 120 bp, synthetic construct
  source 1..120: mol_type = other DNA
caattgcaacaaaagcttctgcacaacaaaagaaacttggtagagtagacagacaacctacggaataggagaaaagttttgcaaaccatgcatctgagaaaagtctagtatccagcatct

SEQ ID NO: 2094 - DNA, 120 bp, synthetic construct
  source 1..120: mol_type = other DNA
gggtggagggtgggtggatggagaggatcaggaaaaatatctaatgggtgttaggctcaatatctgggtgatgaaataatctgtagaaaatacccatgacacagtttacctatgtaacaa

SEQ ID NO: 2095 - DNA, 120 bp, synthetic construct
  source 1..120: mol_type = other DNA
ctacttcacagagatcttgtgaaaggcaattaaagtgttccctgtaaagcacttagaacaatgcctggaatagtcgccactcagtccgtggtgactctttttattactatagcaatgcct

SEQ ID NO: 2096 - DNA, 120 bp, synthetic construct
  source 1..120: mol_type = other DNA
agtaggttaagcgactcattcaaggtaacaaagacagcgtagagctgcagcaagaacccagaccaccttatttttaatcagatctctttctgttataccacataggaaaggtggaacaac

SEQ ID NO: 2097 - DNA, 120 bp, synthetic construct
  source 1..120: mol_type = other DNA
tcagtcacattcatgcttcttgccagcctccttctatggaagaaaccacacgtgttcagcatttggagttgtgggtgtcgtttcattcttgtgtttaatttttttattctaccaactccc

SEQ ID NO: 2098 - DNA, 120 bp, synthetic construct
  source 1..120: mol_type = other DNA
ccttcccataggtggccaggaactccggcgccgccgccatctttttcttctccgccgccatctttttcttctccgccttgggctcctgccgactttaacttttctcctgctgctgtgcct

SEQ ID NO: 2099 - DNA, 120 bp, synthetic construct
  source 1..120: mol_type = other DNA
ttgcaaagcttgtgggctgcgcaaatgcactatgtaaaaatgcagcacactccttgagaaagtccactattaattcttagtaatgaatccacatcaaagtgcaagggtggaaacatgcac

SEQ ID NO: 2100 - DNA, 120 bp, synthetic construct
  source 1..120: mol_type = other DNA
ctccatcgtttgagtgactcattctatttttgcttgcacaatgacccttttcatcaaccttattttatataagaaattaaactagtttgtgggcccctacatgtactgtgggttccagtc

SEQ ID NO: 2101 - DNA, 120 bp, synthetic construct
  source 1..120: mol_type = other DNA
atggatggcttttatttgttacagaatgtcaatgttagctctctgttgtcttagcttggtctgctataacacgataccacggaaatttatattgcacagttctggaggctggcaggtcca

SEQ ID NO: 2102 - DNA, 120 bp, synthetic construct
  source 1..120: mol_type = other DNA
accctttgtatatacagtaggccttcaactatgcagaggatttggggaatgaagtttctaattcacctcatttagggtcgactggggcaatgctcttagaaagtgaaaccacggtaggat

SEQ ID NO: 2103 - DNA, 120 bp, synthetic construct
  source 1..120: mol_type = other DNA
ctattactcctgggtatctagtaacaaaatgttgcttcttatgctcaagaagcaaactgtgcaccaagaagccaacttttggctctgctggactagaggacttagttacacattgaggaa

SEQ ID NO: 2104 - DNA, 120 bp, synthetic construct
  source 1..120: mol_type = other DNA
tgtgagctgctgcagaaaccacgactgtaatagtatttacctaatgggttaataatatctaccagcacaggtgggaatacaaaataaccaaaacacaagttatcctttcaaataaaacgc

SEQ ID NO: 2105 - DNA, 120 bp, synthetic construct
  source 1..120: mol_type = other DNA
tcacatgttctcacttatttttgggagtaaaagtgtaaaacaactgaactaatggagatagagagtagaatgacagttaccagaggctacaaaggttagtgggggtggagggtgtgggaa

SEQ ID NO: 2106 - DNA, 120 bp, synthetic construct
  source 1..120: mol_type = other DNA
agctcacatcctcatggggcggtcagacagtacgtgcacaatgagcaaatgaaacatacagtgttgggctagtggtaaggaagcagtccacaggcctgtgggcaacagcagcagagggag

SEQ ID NO: 2107 - DNA, 120 bp, synthetic construct
  source 1..120: mol_type = other DNA
ctgtcaaatgctgctgagaagttaatggcaatgtcagccgaaactgttaaccttgacaaggacagtttctctggaggggatgaggcaggagcatgaggaggacgtgaggacaggcttact

SEQ ID NO: 2108 - DNA, 120 bp, synthetic construct
  source 1..120: mol_type = other DNA
tacagataataattttaaaaacccagcaccaagagaaagcatccagtaagcgtccacaacggggataagcagaaccaaagaaaagccaacacattgtaactgagagcgagcaacatccga

SEQ ID NO: 2109 - DNA, 120 bp, synthetic construct
  source 1..120: mol_type = other DNA
atgcagaaccttctcacccagcgggatgaaatcgcctgggtaacatagtgagaccccggctctacaaagcaaccaactaatcaaaaaagaaagaaagaaagaaagaaacacacaaattag

SEQ ID NO: 2110 - DNA, 120 bp, synthetic construct
  source 1..120: mol_type = other DNA
ccctgttagaagagagtcatattcagtattacagcttcttagcctattgtgttaatatttgcctgtgcttcagaaccttcatagaacacattttcttttggaatatatttgattgatagg

SEQ ID NO: 2111 - DNA, 120 bp, synthetic construct
  source 1..120: mol_type = other DNA
cagttaataagcaaatttagtcaacttactagatacaatgaaaaccaatggcatttctgtataatgaatagcaattctgtataatgaatggcattatacagaatggcaattctgtataac

SEQ ID NO: 2112 - DNA, 120 bp, synthetic construct
  source 1..120: mol_type = other DNA
agggcaaagggaatgcgaaacgggtagcgaaagaaggtagttataaacgccagctacatcagtgtgagctgctgcagaaaccacgactgtaatagtatttacctaatgggttaataatat

SEQ ID NO: 2113 - DNA, 120 bp, synthetic construct
  source 1..120: mol_type = other DNA
tctggaaacaacagccttacagggactgctactgcagctccaaattattgtatcagaccaatcctatctaggaactacctttattatatatattggatatacccccccacacacgcatac

SEQ ID NO: 2114 - DNA, 120 bp, synthetic construct
  source 1..120: mol_type = other DNA
gagaaagagacatgtcattaaccaaaagatagccaaagaacctatgctgtaggaagcgctgtgacagatagaaagatgaagtaacagtcagcatggaaatagaaatgtatctgcatggta

SEQ ID NO: 2115 - DNA, 120 bp, synthetic construct
  source 1..120: mol_type = other DNA
ctgctatgtgcctacacaaattttttaaaaagaggtagtctagcaaatacaaagagtgtcaattgagggacaatgcgcacctcagactatggtgaaaatggaagtctccatagtcttcga

SEQ ID NO: 2116 - DNA, 120 bp, synthetic construct
  source 1..120: mol_type = other DNA
ggtaaggaagcagtccacaggcctgtgggcaacagcagcagagggagccccaggagctgctgctggttgggcagagccttctgtggaggtacccttgggcagggcttgaaggaaaaagca

SEQ ID NO: 2117 - DNA, 120 bp, synthetic construct
  source 1..120: mol_type = other DNA
tgtcaaatgctgctgagaagttaatggcaatgtcagccgaaactgttaaccttgacaaggacagtttctctggaggggatgaggcaggagcatgaggaggacgtgaggacaggcttactt

SEQ ID NO: 2118 - DNA, 120 bp, synthetic construct
  source 1..120: mol_type = other DNA
ttaaacactgacagcaattacagcctcattttcaggcccagtagaagatgctaatcaaagtaaactgcgttcatgagatgcagggccagaaattaaaactattcaactcctcaaggccca

SEQ ID NO: 2119 - DNA, 120 bp, synthetic construct
  source 1..120: mol_type = other DNA
ttgagtttctgcaaaccttgccaccaagggctaagaaacggttccaggtttctcagacaaccttaaaggcagtctaggccataagatctctaactcgtaggtgagttctagcatagaatt

SEQ ID NO: 2120 - DNA, 120 bp, synthetic construct
  source 1..120: mol_type = other DNA
aggatggcggagaccacagtgcaaatgtggccctcaatacatgttggatgaggcaagttctatgtcaccaggagctcagtggggtttagcatccttggacatggctccacattagaacag

SEQ ID NO: 2121 - DNA, 120 bp, synthetic construct
  source 1..120: mol_type = other DNA
tttcttgtctaccagctatgaatgagaatcccacatcctctccagaatttgatattctcaggtatttgaattctatccattgtaataggtgggtagaggaatcttagtgctgttgacatt

SEQ ID NO: 2122 - DNA, 120 bp, synthetic construct
  source 1..120: mol_type = other DNA
atttcagagctcttttgatgtctgtgcccagttgtgtctacggtaagaacttgaatctatttcctctgatcagtcaaagaagttcgtcgatgatagcatgtgttctaagatgaacacccc

SEQ ID NO: 2123 - DNA, 120 bp, synthetic construct
  source 1..120: mol_type = other DNA
acctgtaatttgaagtccacaatgcatgagctaaaatatgtaagtgagctatgatacccaatgttgcacagtaccaaatattgtacaatggctatagaaaacaacaacaggctagcagag

SEQ ID NO: 2124 - DNA, 120 bp, synthetic construct
  source 1..120: mol_type = other DNA
tgacactgggtaagatttccccatttactaaacattcacttgcattcacctcacgctgacatttcacagtggaattttccttgcccatcgttgtacagacacttgttttcaggataagag

SEQ ID NO: 2125 - DNA, 120 bp, synthetic construct
  source 1..120: mol_type = other DNA
gaatctagaggttccctttctatctccctgcaatttatttgtggaagcaagcaagtcgttcatgacgtagcctaacaggcccctctgacgttgttcattatgatttttctgtaaattggt

SEQ ID NO: 2126 - DNA, 120 bp, synthetic construct
  source 1..120: mol_type = other DNA
gattctcttgctcattgcttcatgaaattcagttccagaactttcaggagggaggggtaggccatgacaccagctctagttacactggtggcagctcctgtcccctcccccactgctgct

SEQ ID NO: 2127 - DNA, 120 bp, synthetic construct
  source 1..120: mol_type = other DNA
agcacccaaatgagaatggtgaggccagtatagcaaggccagaatagcaaggaagggagatggtgctggaaaggggtaatgagggcttcaacagaatattttaaagttttatttcctaaa

SEQ ID NO: 2128 - DNA, 120 bp, synthetic construct
  source 1..120: mol_type = other DNA
ctgagggtatatgccactaggttgtgtagtaaaccggtgtgtttccagtcccttagaatagtccctctctaagtgatatgccactcagtggatatgcatttagcttcatttcttttgttg

SEQ ID NO: 2129 - DNA, 120 bp, synthetic construct
  source 1..120: mol_type = other DNA
gagctgccgacagtttgggggttctctgttcttaggtccatcagcaaccccattgctcccctctgcttccttctgcacggagactgacgccatgcaggtcttcaattgtcaatggtctgt

SEQ ID NO: 2130 - DNA, 120 bp, synthetic construct
  source 1..120: mol_type = other DNA
cttcgatacactgagagaataactgtcagagagaaaaaaataggtcacattcaaagaatcagaagtcagaatggcttcagacttcagcaacagcatggggaactagaagacaatgaagtg

SEQ ID NO: 2131 - DNA, 120 bp, synthetic construct
  source 1..120: mol_type = other DNA
cgtttcaaaagctgtcatttgctacacgaaatgctgaggttcaggaaaaggaagacacttgctccaactcacacagcaagcttggatgctctcaatgaggtgtctaataagagctgaagg

SEQ ID NO: 2132 - DNA, 120 bp, synthetic construct
  source 1..120: mol_type = other DNA
aggttggaaaggggctgtttgtcaaagcaaaacagacatatgcttgagctgtgttctgggatgctcttaagttgctcggagacaacttgatccctttgagttttgttttagcatttgctc

SEQ ID NO: 2133 - DNA, 120 bp, synthetic construct
  source 1..120: mol_type = other DNA
tgtctgggtcaaacagtggccgctccctaaggaaaagttaggggcgctacataaaatagttaaaaaaactatttaaaaaaggacatgtttcacccactgtctctccttagaattcgccag

SEQ ID NO: 2134 - DNA, 120 bp, synthetic construct
  source 1..120: mol_type = other DNA
aatcgagggtctcggggatgcggatccaagaccctgggaaggtacgcggggcctggcggggcaccagctgctgctagctcggctgcaatgcaagtggtctaggttgctaaaggcatccca

SEQ ID NO: 2135 - DNA, 120 bp, synthetic construct
  source 1..120: mol_type = other DNA
ggattcagcctctttcctaggggtatgtacaggggtctaatctcccgctttgcaggagttgcagttacttttgctgggaaacccagggccggagtatgtaaagctgctgggtctctgcac

SEQ ID NO: 2136 - DNA, 120 bp, synthetic construct
  source 1..120: mol_type = other DNA
catgatctcactcatatgtgtaatgtaaaaaaaaagttgatatcatagaaatagagagcagaatggtgggtactagaggctggtgggttgtggagtagtggttgggtggttggggatatg

SEQ ID NO: 2137 - DNA, 120 bp, synthetic construct
  source 1..120: mol_type = other DNA
tcatgagggtaatgatattttaagcctaaaatattagaattttcaataattttctctagtgtttggaaattattttaatcctctgtttagtgctcaaaaatgctgttcatttgtgactga

SEQ ID NO: 2138 - DNA, 120 bp, synthetic construct
  source 1..120: mol_type = other DNA
tacaaagataaatgcttgaggagatggatactccatttttaccctgatgtgattatgtactgcatacctatattagaacatctcatctaacccataaatatatacacctactatgtaacc

SEQ ID NO: 2139 - DNA, 120 bp, synthetic construct
  source 1..120: mol_type = other DNA
gggcagagtggggttagagtagtgcctgctgcccattggtttgtgcggtcctttaaggctgtaagtctgtgtgcgtgtctggttttttcctcctcctatcagtaatcagtcttgtataac

SEQ ID NO: 2140 - DNA, 120 bp, synthetic construct
  source 1..120: mol_type = other DNA
tgtcccagagaggagtcttctcggcagatgtggagacctagctgagtcagaggccaggatctaagtttgagggtgttccttacaccctgcagccatgagtctttggctgagtcaaatggc

SEQ ID NO: 2141 - DNA, 120 bp, synthetic construct
  source 1..120: mol_type = other DNA
ggagcgtagttttcaagatttttgtccaaaaatataatttgaaccatgaaccgggcatctggctcttggcagagtctccctctttccccaaggtggtagatgtgactgtcaggagcctgg

SEQ ID NO: 2142 - DNA, 120 bp, synthetic construct
  source 1..120: mol_type = other DNA
agactgcatcttttaaaatgacaccaagggaaatctgcccatgagcagcattggatgggaccataccaggtgacttaaaattaaggataaccaaggaacaaagtctttcttagaagcaga

SEQ ID NO: 2143 - DNA, 120 bp, synthetic construct
  source 1..120: mol_type = other DNA
aacattgaggccaacagacctgtccttgtgcatgtttgggcattgatccagggccaaatcagtgggagactcctccacgcacatgccaggtccccaggtgacaactgcagtctctggatc

SEQ ID NO: 2144 - DNA, 120 bp, synthetic construct
  source 1..120: mol_type = other DNA
actggttttgatggatttgattaaggtgttccttggtgaagttttctgcatgtttcttgttcttgggataatcatatttctgtaatatttgaagtttatgatttctatggagcttctaaa

SEQ ID NO: 2145 - DNA, 120 bp, synthetic construct
  source 1..120: mol_type = other DNA
aatgtgccttccttaatttttcccataagaaccaccctacttcatgccctgtctctctgtccaaacaccaggacagccctcagaccagtctcaaccacccaatggattgacaaaggtcca

SEQ ID NO: 2146 - DNA, 120 bp, synthetic construct
  source 1..120: mol_type = other DNA
aggagggagggggagggggagggggagggggagggctgttctgtttttttaactatgctttagggatgatatataatgtacttcatgaccaaggaatcaatctaatctttttgtaatgat

SEQ ID NO: 2147 - DNA, 120 bp, synthetic construct
  source 1..120: mol_type = other DNA
tggggagggggagggggaggggggaagagggagagggctcttttcttttctctctacctgttttagttttttaagtctgttatatgttagcaacattgaattacgttaatatatgaatta

SEQ ID NO: 2148 - DNA, 120 bp, synthetic construct
  source 1..120: mol_type = other DNA
ataggatccatcagttaggggttacatgtgaagcacttggaacaatgcctggcacacagtaagccctctatcaatggtaactcattttcttctttaccctcaactagaaagtcagctcca

SEQ ID NO: 2149 - DNA, 120 bp, synthetic construct
  source 1..120: mol_type = other DNA
gcttgtcagttaaaaattattttgttattctcgtagaggtgcagtaatatatcaatgcggtttcaacttccattttcctggtattgagattgagtatcttttattgccatttatatgtcc

SEQ ID NO: 2150 - DNA, 120 bp, synthetic construct
  source 1..120: mol_type = other DNA
ttaagtactttattgcaaacttcttgtttgtatgagaaatcttatgccatcattatatttagtgctctgtatgtaacatgttctttccctttttattcttcttaggatttcctttttatc

SEQ ID NO: 2151 - DNA, 120 bp, synthetic construct
  source 1..120: mol_type = other DNA
tttaggctgttaggcatttcctcttcaacagtcccatagccatttagacatgtatcattataccacgatgtgtttgttgtatcgtttaaaaatacatctaggctgggtgcggtggtggct

SEQ ID NO: 2152 - DNA, 120 bp, synthetic construct
  source 1..120: mol_type = other DNA
gattctaaacatttatatagtttgctacatgagtgatatgctttgctataataagaacttaagagtgtattccctccccacttcaagaatgtgacctctccctctccctctccctctccc

SEQ ID NO: 2153 - DNA, 120 bp, synthetic construct
  source 1..120: mol_type = other DNA
tctcatgaggccaggaagcccatttgctccagattcgctgccctgagttgccctgacttcactgggagctcgtcaatgcttgcccttcttttttttttttttttcttttttttttttttt

SEQ ID NO: 2154 - DNA, 120 bp, synthetic construct
  source 1..120: mol_type = other DNA
caggcgctagtcaatacactcaatcccactccaccgggagaccaggcgctagtcaatacacgcaaacccacttccaccagggagaccggggcactcgccaatacacacaatcccactcca

SEQ ID NO: 2155 - DNA, 120 bp, synthetic construct
  source 1..120: mol_type = other DNA
ctagtttcttgaaattccacttaagggtgtctttctccatgttatcaccactgtcccttggccatttaggggatgtggttggactttgtcctaagcttgcaattgctggattattaagtt

SEQ ID NO: 2156 - DNA, 120 bp, synthetic construct
  source 1..120: mol_type = other DNA
ggacaagattaaatgatctttgaggtttcttttaacttggagatttgtatccaaccagatttcacctgagacggaagttatttcctactgtcagccataatggaagcactacagacgtgg

SEQ ID NO: 2157 - DNA, 120 bp, synthetic construct
  source 1..120: mol_type = other DNA
ttagtagacatgaggtctgactatgttgcctccactggtctggaactcctggccacaagacgttctcacaccttggtctccccaagtggtgggattggaggtgtgtgccaccatgcctgg

SEQ ID NO: 2158 - DNA, 120 bp, synthetic construct
  source 1..120: mol_type = other DNA
gtttattcaaaaggaagaatatgcaacttatttacaaactgaagcaagaatgcttacattttaattttaactctccttgtgcttcaattttcctcccttcttctctccctctcctactgc

SEQ ID NO: 2159 - DNA, 120 bp, synthetic construct
  source 1..120: mol_type = other DNA
ggcagaatgaaagctccatgtgggcagggatttttatctgttttgttaactcctatatccttggcacttttaagagtgcctggtacatattacacactcagtaaatatgtgtttaatgaa

SEQ ID NO: 2160 - DNA, 120 bp, synthetic construct
  source 1..120: mol_type = other DNA
agggagagcttaagccactctttagttgggctttctgtaacttacattttttcttaactgataacaagctggtgccccttaagatagggtgcacacattctagtttgctatcatctctgc

SEQ ID NO: 2161 - DNA, 120 bp, synthetic construct
  source 1..120: mol_type = other DNA
ggctcatagtttagtctctctacttagaataagagtagtttatacatcatagttacaatgttataacattctgcatttttctgtatacctactattaccagtgagttttataccttcagg

SEQ ID NO: 2162 - DNA, 120 bp, synthetic construct
  source 1..120: mol_type = other DNA
cagataactataagtacgtatgtattacatatacagataactataagtacgtatgtattacatatacagataactataagtacgtatgtattacatatacagataactataagtacgtat

SEQ ID NO: 2163 - DNA, 120 bp, synthetic construct
  source 1..120: mol_type = other DNA
ttaccagtgtttcatacacataaagaccaaactgccaaaatgttcttcagtgagctagtttttgattctagtttgagctagtttgagagaaggctgggcaacacagcgagaccttttctc

SEQ ID NO: 2164 - DNA, 120 bp, synthetic construct
  source 1..120: mol_type = other DNA
caacgtaccatcttggaagcagagaccaggccctcactagacactgtgtctgctggagtcttgatcttgttcttcccaacctccagaactgagaaaataaacttctgctctgtgtaaatt

SEQ ID NO: 2165 - DNA, 120 bp, synthetic construct
  source 1..120: mol_type = other DNA
tgtccacccattttctctcttgccccccaagtaatttcctaaagtgtctcatataaaaaggcagtagctttcagcttaaactttttctctgtatatatttaagtcaatttctttgaggta

SEQ ID NO: 2166 - DNA, 120 bp, synthetic construct
  source 1..120: mol_type = other DNA
atttatcaaaggtgaacacacagaactctaacacagcagcagaggaaatggtaggaaggccattggcagaaaaaaaggaaatttagaaagcagtgcaaaatgttacacgtgacggtggag

SEQ ID NO: 2167 - DNA, 120 bp, synthetic construct
  source 1..120: mol_type = other DNA
attgttccacctcatccaccctccgcctcttgggtttcggtgattgttccacctcatccaccctccacctcttgggtttgggtggtttttccacctcggcctcctgagtagctaagggag

SEQ ID NO: 2168 - DNA, 120 bp, synthetic construct
  source 1..120: mol_type = other DNA
agaatattatacggtcattttccagaactgtaaaaactctatcatttgttttaaaccagatgatgtgcttcatttctgtctttgacgtcttcagtttcttctcccctggctttacctcct

SEQ ID NO: 2169 - DNA, 120 bp, synthetic construct
  source 1..120: mol_type = other DNA
gttaagtgtgatattagctgtacgttttgcgtaagggctgtattcgtttgctaggactgccatacaaggtaccacacactgggtggcttaaaaaacagaatgtattttctcagagttctg

SEQ ID NO: 2170 - DNA, 120 bp, synthetic construct
  source 1..120: mol_type = other DNA
gtaagtatttaaaaaaataactagttcttattgaaaaatatcagaggctgggctcagtggctcacacctgtgctttgggtgagtgaggcaggaagatcacttgagcccaggagtttgaga

SEQ ID NO: 2171 - DNA, 120 bp, synthetic construct
  source 1..120: mol_type = other DNA
ttcccggccattttttttttaaattacataaaacctctggttcaaaaaaaaatttcatctgaaagcccacaatacaaaatgacttgcagctctccctctccctctccctctccccacggt

SEQ ID NO: 2172 - DNA, 120 bp, synthetic construct
  source 1..120: mol_type = other DNA
ctttcttagcatttcattatgcccggttaaactgaccactgagtccatcagagccaaatgcatgtctaagatgatactgtctctaccacatacagaatccccataaaatgtttagggtgc

SEQ ID NO: 2173 - DNA, 120 bp, synthetic construct
  source 1..120: mol_type = other DNA
aagttatatttcttccttgccttcagaaagctgtcacagcaatggttaacattccttgaggcactaggctgtgaagtgcttctcatagattatctcactgaaatctgacagctccctagg

SEQ ID NO: 2174 - DNA, 120 bp, synthetic construct
  source 1..120: mol_type = other DNA
gggagggggaagggggggggagagggagagggagagggagctatttgttttttctttaattcatttgtgtagaaatgaaatgttggaatacagactgagcttgtagttaataaacagata

SEQ ID NO: 2175 - DNA, 120 bp, synthetic construct
  source 1..120: mol_type = other DNA
gcgtcgggagccagggggaccagtggtacttgggctacccgggggaccagtggtcctcgggcttcccctacagctggtggaaaaacagcgtcggcagcgagagcaagcacggtgagggcg

SEQ ID NO: 2176 - DNA, 120 bp, synthetic construct
  source 1..120: mol_type = other DNA
aatgcttccctgaatgaacatgattatgatggcattctggaatgaggttttataacacttgtgggaacacactacccctttagcaatggaaaacagaacttcacagctgccttctgaaag

SEQ ID NO: 2177 - DNA, 120 bp, synthetic construct
  source 1..120: mol_type = other DNA
tggcagttcttggtaaagttgaagatttatgtccaacaatccagaaagtccactattaggttcctttccatggaaaaattctctcatgtgtgcacaggaaaacatggaccaagatgctag

SEQ ID NO: 2178 - DNA, 120 bp, synthetic construct
  source 1..120: mol_type = other DNA
caggcatgagccaccacgcccggcccagttataccagatataagcaaatttgctagtagtttagatttctggaattgtgccaactacacatcaagagactatttagctttgttacagaag

SEQ ID NO: 2179 - DNA, 120 bp, synthetic construct
  source 1..120: mol_type = other DNA
ggagacaagtgccctctctctcacacccggtggccttcccttcccctttcccagagcctccaagaaggcccctggcctggcctgatgcccaccatcagcagcaataggcaccaaaacctt

SEQ ID NO: 2180 - DNA, 120 bp, synthetic construct
  source 1..120: mol_type = other DNA
gatcctctcaaagtgtttggtatttttcaactcttccatcatttttgtgttttattagttccatctctgatgttttagttctctttgcctagtatttaaaaaatctatagttgggagctt

SEQ ID NO: 2181 - DNA, 120 bp, synthetic construct
  source 1..120: mol_type = other DNA
gtcttccccacagacctcaattgctcatctccttgaaatcttggctcaaatgttaccttgtcagtgatgctctccctatctcctctatttaacattgcaacattcccttttactcaaata

SEQ ID NO: 2182 - DNA, 120 bp, synthetic construct
  source 1..120: mol_type = other DNA
aggtagttgtaattcccattttatttttggacagagtgagtatccttcaggactttgctctgtagggcagacgctagggcagatttctgcacttgggtctgcatatggtaggctttatat

SEQ ID NO: 2183 - DNA, 120 bp, synthetic construct
  source 1..120: mol_type = other DNA
cttttgagtctctgtatacttttgaggttggtgtttctatttcttcaaaaatgcaatgagaaatttgaaaaatattgcattaaatctgtagattgcattgagcaggatggactctgcaat

SEQ ID NO: 2184 - DNA, 120 bp, synthetic construct
  source 1..120: mol_type = other DNA
cgagtagggccaggtgttgggaggtgagtagctctccggcagctctgcaacttcatttctttatttctccattccacagttggtaaaatttctccttttatttcatatattttttttctg

SEQ ID NO: 2185 - DNA, 120 bp, synthetic construct
  source 1..120: mol_type = other DNA
atgtatctctgatgcctaatagtaacaaagaggagtaatgagtcattgtgtttttatgccaattcaagcactgtttcctgcttccagcacttgctggagttgccaaaatcaaatattgtt

SEQ ID NO: 2186 - DNA, 120 bp, synthetic construct
  source 1..120: mol_type = other DNA
tcattatagcagaagttctccacctggaattaacaatagttgtgacactggagaagcatagcccagagtgcaagagatttgcaggatgaatggtggcaaggaaatctatttctaagtcct

SEQ ID NO: 2187 - DNA, 120 bp, synthetic construct
  source 1..120: mol_type = other DNA
ctcctgaatagctgggattacaggcacccgccaccatgctgttctgtgcgggagatgcctaaggggggaagaaaaacacacacacaatacctttaagggtaaacaagctttatcccacgt

SEQ ID NO: 2188 - DNA, 120 bp, synthetic construct
  source 1..120: mol_type = other DNA
agttccatatgtccaggaatgatgtaaagccaacaatggaataatgcgagcaactatttttctagaagaagtagactttaccagaatgccaaaatgggctgctaaaggaagggcagccca

SEQ ID NO: 2189 - DNA, 120 bp, synthetic construct
  source 1..120: mol_type = other DNA
gtcacaactagatgactttttgtgtaaccgtatcttgaatggaacaaacattttctttctacgtaattatacataaataacccaatgctttttaatacccacgaaaagccattagctcaa

SEQ ID NO: 2190 - DNA, 120 bp, synthetic construct
  source 1..120: mol_type = other DNA
ttagttttatcagcacttaaaaagaatccctttcactgaaatacaatctgtggtgagacttctagcttttctcgatcttacgctgccagatttatgtcactgccaaagctatgcaatggg

SEQ ID NO: 2191 - DNA, 120 bp, synthetic construct
  source 1..120: mol_type = other DNA
ggaacatggtatgtagtagaacctcatgaaaatactagctgttgataaaactagactgaaaaaagctttcaaagtcaacaacagtatgaggcagtgaaggacgtagaggagaagctgctg

SEQ ID NO: 2192 - DNA, 120 bp, synthetic construct
  source 1..120: mol_type = other DNA
aggtcacaccatgtgactccctgggtcccaagctctcattatcctgagggagttgtgcttaggccaccagtgaccagtgcctactctaaatatttttgggaaaagaagacagggaacatc

SEQ ID NO: 2193 - DNA, 120 bp, synthetic construct
  source 1..120: mol_type = other DNA
ccaaactagatcagtcaaactctagctggcctgaagatctgtgagaatgtgaggctaaatgtttgttgtcatagccaccgaattttgggatggcatctagtggtttgtttatggaactag

SEQ ID NO: 2194 - DNA, 120 bp, synthetic construct
  source 1..120: mol_type = other DNA
ataataaaaaaaaagaaattgaagaagacctaaataaatggaaagagaacccacgtttatgagttggaagacttagtgttgttaaaaagcaatactgtctaaagtaatccacagattcaa

SEQ ID NO: 2195 - DNA, 120 bp, synthetic construct
  source 1..120: mol_type = other DNA
ttggtctcaacgagacccctgtgagactgcatcatacccatgccccagatggggagactgacactgcagccccacatgctggctccaagaccgggctcatccctgctcagtctctggggt

SEQ ID NO: 2196 - DNA, 120 bp, synthetic construct
  source 1..120: mol_type = other DNA
acccagattacccagggtcaagtcccagctctggtacctgcggcctttaaaaccacgaaaaaattactttaatctctgtgtctccatttcctcatttgtgaaatggttatcattatagca

SEQ ID NO: 2197 - DNA, 120 bp, synthetic construct
  source 1..120: mol_type = other DNA
gagcttgtgtgggtcaactgggataaagagctaaagaggtcccttttcttcctgctttgtcccatgtcaaccacaactccccttgctggtgtctggattttcagggcaggtaaaatttac

SEQ ID NO: 2198 - DNA, 120 bp, synthetic construct
  source 1..120: mol_type = other DNA
tttgatgtgcagtatgaaacctcaaatattccaggggctcctgcaaagtgtaaacttgtagtatccttgacttagaactgaaagaacagcaggattggaggtgggtgaaagaaagaacct

SEQ ID NO: 2199 - DNA, 120 bp, synthetic construct
  source 1..120: mol_type = other DNA
tttttttacctgggtattctggaagtgtctttcctctgacagtgttgttggacgtggggaaacaaaagggtatcaaagagagggagagaaggataaagaccacccctcattcccgccctc

SEQ ID NO: 2200 - DNA, 120 bp, synthetic construct
  source 1..120: mol_type = other DNA
actattctgatcactgattttctcttcttacctgctgctgtttagctgatcttttggagtttctcttttgtttcaggtctttattcctatctgcttcagatgcagggcctcggtgggtgg

SEQ ID NO: 2201 - DNA, 120 bp, synthetic construct
  source 1..120: mol_type = other DNA
tgaggaacaacatctatgctgaaaaatgcacaaagattaagcatagagcttggagaattttcacaaacagcataggtgtctatgtaaccagcccccagatctggaaatacagcatagccg

SEQ ID NO: 2202 - DNA, 120 bp, synthetic construct
  source 1..120: mol_type = other DNA
gttttcaaatgcagatgaaacaagggaccgtggaatgcctgttgtctcaggtgtgctcctaggcatgggttccaaacttacaggtacaaacttacttatgggtagagagacagataataa

SEQ ID NO: 2203 - DNA, 120 bp, synthetic construct
  source 1..120: mol_type = other DNA
ccaaagtgcctgcactattttacttcctcctcagcagtgtataagggttccgatttctccacagcctcattaacacttgctattatctttttcattaccagtaagtggcatctcattctg

SEQ ID NO: 2204 - DNA, 120 bp, synthetic construct
  source 1..120: mol_type = other DNA
agaaaatattatcttgtatatcaaggttgtatagatgacctcacctggtttggtgtcttcccacagcctgtcctgggggaacagagaggccctgcggtggctacgggcagtgtgaaggag

SEQ ID NO: 2205 - DNA, 120 bp, synthetic construct
  source 1..120: mol_type = other DNA
aaatcagcactgagcaattttgaactatgatactattatgcatacaactgtctaataatgaaaaaagagaaaaatgactatttaggatttacctaaatgtttctggtaccgaaataagga

SEQ ID NO: 2206 - DNA, 120 bp, synthetic construct
  source 1..120: mol_type = other DNA
gtataataaaaaaaaaaaaaagatatgcccacccaggacctgtgaacctgtgaatgtgactttatttgaaacaggggtctttgcagatgtaattcagttaaggatctcataatgagatca

SEQ ID NO: 2207 - DNA, 120 bp, synthetic construct
  source 1..120: mol_type = other DNA
ctgaccagggatacccaatttgactccatttctctcaatttagatccagcgagttgcatgttctttctctgcccgttaaactcttgaatatgttttcttttatttatttatttatttatt

SEQ ID NO: 2208 - DNA, 120 bp, synthetic construct
  source 1..120: mol_type = other DNA
atacaagcaactttataaccatctttgtatccatactttgttagactggtttttgtgttgtgggaatgactgattcactaagatgtccaggatgttggcaatccagttgagggacgtggt

SEQ ID NO: 2209 - DNA, 120 bp, synthetic construct
  source 1..120: mol_type = other DNA
ttgaaactgtggagtaatgaaatcaaaaggtaatgttttgccttactctcaccatttatttagagacaaaattaaaaaaaaaatccctcttcctttttgttccctctgggactctgaatt

SEQ ID NO: 2210 - DNA, 120 bp, synthetic construct
  source 1..120: mol_type = other DNA
gataataggattaaattgtttatcaattacatggtcacaaacataactgctgttggaggagtctataaagacaccaaccaaagacagatgcttgttcccaacaatggtcataaacacgga

SEQ ID NO: 2211 - DNA, 120 bp, synthetic construct
  source 1..120: mol_type = other DNA
gttgacataagaagttgtggatgtaggagattctaccatgtagacacagtggaaggatttagggagttggagcaggttgggatatgtgatcagaaagcgggagtttagctctctcacttg

SEQ ID NO: 2212 - DNA, 120 bp, synthetic construct
  source 1..120: mol_type = other DNA
gaaatttctaagcagcaaagcattcaagatgtggccttctgctactaacagcctgtgctcagatgtgggggcaaatgaatgacttaaatttggaacttacatttaaacaggaagcagagc

SEQ ID NO: 2213 - DNA, 120 bp, synthetic construct
  source 1..120: mol_type = other DNA
aaagcttgtatctcaacatataaaaatatacttttttatagaatggaactataacaattatgtcattttataggtttttctttttttaccgtagttgccaggaaatccagagttgaatat

SEQ ID NO: 2214 - DNA, 120 bp, synthetic construct
  source 1..120: mol_type = other DNA
atttaaaagaggacagaaaaaatactttaaaacataatagctgagaattttccaaaattaataaaagacgataaaccacagatccaacttactcagaaaatatcaagcaaggaacaaaat

SEQ ID NO: 2215 - DNA, 120 bp, synthetic construct
  source 1..120: mol_type = other DNA
ctttagttgacaccaaaaatctccccagccagatccacaaactttttcggtatttttcctattttttatatcattccaggcaagcgttttctaactctcccatcagaatatgactttggt

SEQ ID NO: 2216 - DNA, 120 bp, synthetic construct
  source 1..120: mol_type = other DNA
ggtggatcagggtaaacctttctgaatgggcaattggaaagattattgaaaaaagtggaagagctttgggctattagggagaagacttttcagcagaggaaaaatacctgcagagatcct

SEQ ID NO: 2217 - DNA, 120 bp, synthetic construct
  source 1..120: mol_type = other DNA
tccccagactaaggattttcttcagcacatgttttagtgtaggtgtgctggtgattaatttgaattctgtttcacctgaaagagtatttatttttttatttttttttttattatactcta

SEQ ID NO: 2218 - DNA, 120 bp, synthetic construct
  source 1..120: mol_type = other DNA
attcggggcaaccgagcagaggcgctcctcacttcctcccagacggggcggccgggcagaggctctcctcacttcctagacagggtgggggccaggcagaggtgctcttcacttcccaga

SEQ ID NO: 2219 - DNA, 120 bp, synthetic construct
  source 1..120: mol_type = other DNA
agttctgttttaaattatgtaaaatctttgaaacaataagttgtttcaaaaaaaatacactaaaacaagatacactcaaaaattcagtttccatccctttccactctacatttttccttc

SEQ ID NO: 2220 - DNA, 120 bp, synthetic construct
  source 1..120: mol_type = other DNA
atccaacaaacttgctggatacctcctgtctgcagagcactttgagggaacataacagggtcttgggaggccacaggaggagagttgaaagatcacagccaggggctcagggtgtccaca

SEQ ID NO: 2221 - DNA, 120 bp, synthetic construct
  source 1..120: mol_type = other DNA
tgggttgcaaacgacaccagactttggaggattaaaggagcaaagacttatttcttggttgcactaaaagtctgttatgcgttggctgtgagtctgtttcacgttgtctgcgatctggaa

SEQ ID NO: 2222 - DNA, 120 bp, synthetic construct
  source 1..120: mol_type = other DNA
tgggattatgggtattagagtttaaatttctttgctcaacaccactccccattttgtggccaacagtcacattctttcttgggccacgtcattcattttcagttgcttcagagcactggt

SEQ ID NO: 2223 - DNA, 120 bp, synthetic construct
  source 1..120: mol_type = other DNA
tggctgtattcgtcagcataaggatgatttaaattttcttaaaatagactattaggatgcagatgttcttgctgacaggtgcttctaaagcattaaaaatacatgtaaccacagtgcttt

SEQ ID NO: 2224 - DNA, 120 bp, synthetic construct
  source 1..120: mol_type = other DNA
caagcaaaaaaaaaaaaaacaaaaatagacaaatgagacttaagctaaaaagcttctgcatagcaaaagaatcagcagactgaacaaatggcctacagaataggagaaaaaagtttcaaa

SEQ ID NO: 2225 - DNA, 120 bp, synthetic construct
  source 1..120: mol_type = other DNA
ttccggagtttcccaggtgatctggtcagccacatgtggcttattcttccttgatgcctacccagatcttaaacttgccttccaggtaaagtaagccatgctacaactggaaaactcaat

SEQ ID NO: 2226 - DNA, 120 bp, synthetic construct
  source 1..120: mol_type = other DNA
gaccaaaaacagccgttctctaggtttgaatgaaacataaatagctagatgtatttctgatttacttttatcctatatgtctagaaggcaagatccctgttagcctttcggggtagagca

SEQ ID NO: 2227 - DNA, 120 bp, synthetic construct
  source 1..120: mol_type = other DNA
gggggagggggaggggaggggagagggagaggtttcttaattcttgattcaatttctgttttctgataatttggaattctgtaagtaactttttaaaatgtggggtattctcttcctttt

SEQ ID NO: 2228 - DNA, 120 bp, synthetic construct
  source 1..120: mol_type = other DNA
ggagcccggggcagggaggctacagggagccaagaccaccgcagtacagtccagcctcgacaacagagggagactgaagaaagaaagaaagaaagaaaggggagagagggagacgaaaga

SEQ ID NO: 2229 - DNA, 120 bp, synthetic construct
  source 1..120: mol_type = other DNA
aaggtgacaacagaagatgaatgctatgtcactaaccttcaaagatgacaatgtgcaaatcgggacagccatagaagccacaaccgaaggcaagaaaagatgacttgacgccctgcgaag

SEQ ID NO: 2230 - DNA, 120 bp, synthetic construct
  source 1..120: mol_type = other DNA
tttcagaggcagcgctattacaaaaaaaaaaaaaaagtgtgaggatgtccccaagcagaaaaccgccttcactgcaatgctgacagtatctgggtgtcccagggttcctggggagtgcaa

SEQ ID NO: 2231 - DNA, 120 bp, synthetic construct
  source 1..120: mol_type = other DNA
ctttttgccttctgattttcaataaagccatctctatctgtctatctatctatctatccatccatccatccatccacacaggtaggtatctacctaccatatacatagagatggattatc

SEQ ID NO: 2232 - DNA, 120 bp, synthetic construct
  source 1..120: mol_type = other DNA
agtaaaaaaaaaaaaaaagaaaaaaaaaagaaaaattgtcaatgtagatttgtatattcagctaaactacaattcaagagcaagggcaaaatactattagtttctgaccaagactgtgta

SEQ ID NO: 2233 - DNA, 120 bp, synthetic construct
  source 1..120: mol_type = other DNA
aattatcgtccattgatctgccaattcaaaggtggaaaatacgcaatacaattatcgttcattggtctgtgcacctaatggcattttactggggagtgaacgctcagggtcacaatcaca

SEQ ID NO: 2234 - DNA, 120 bp, synthetic construct
  source 1..120: mol_type = other DNA
aactgcgtgagacaacttcctttttctatgtcctggtgaaaaattccagtggatttttaaacaggtacgagggcatggaggccagcagggaagacattgtatagaaggaaggtctatttt

SEQ ID NO: 2235 - DNA, 120 bp, synthetic construct
  source 1..120: mol_type = other DNA
tgtcaaaaatgagttcactgtaggtgtgtggatttgttcctgggttgcctattctgtcccattggtctatgggtctgttttaatgtcagtaccttgctgatttggttactatagctctgt

SEQ ID NO: 2236 - DNA, 120 bp, synthetic construct
  source 1..120: mol_type = other DNA
tcaattcagaatctcagaatttcccaatgttgtatccatcgaacatctcctgagatgcgtatcatcccatctggccctaaatggctgattcatgcagaacattttcatgtcatccctcaa

SEQ ID NO: 2237 - DNA, 120 bp, synthetic construct
  source 1..120: mol_type = other DNA
aattcagaatctcagaatttcccaatgttgtatccatcgaacatctcctgagatgcgtatcatcccatctggccctaaatggctgattcatgcagaacattttcatgtcatccctcaagc

SEQ ID NO: 2238 - DNA, 120 bp, synthetic construct
  source 1..120: mol_type = other DNA
atggcaaggaggatgctttctttgggacagattggatgttggagaaaactgatctgaaggagttcgactttgatgccctgttgggtatagatgacctggaaaccatgccagacgagcttc

SEQ ID NO: 2239 - DNA, 120 bp, synthetic construct
  source 1..120: mol_type = other DNA
catgatgctagctggttattttgcagacttgcttacatgtttgctctgtagtgtcactggtctgagtacttcagtgtgtttttggagtggctggtaaccatctttcctttctacatttag

SEQ ID NO: 2240 - DNA, 120 bp, synthetic construct
  source 1..120: mol_type = other DNA
gtcttggctcaaggtcaggccggaggccaggctgtccacctgcatctggaacctgcacagtcactcctccaggtcctcgctgctggaggactctcagacaggaaacctttgctttggggg

SEQ ID NO: 2241 - DNA, 120 bp, synthetic construct
  source 1..120: mol_type = other DNA
acccaagtctgactcgatgaccgtggtctccgtgatggtgacggtcagtacgttctcatctgtgccgccgtcgctcttggcaaaaacaatcttctcacttcggtgaccaaacagagagcc

SEQ ID NO: 2242 - DNA, 120 bp, synthetic construct
  source 1..120: mol_type = other DNA
acaagaccactgcccccaggtgagcatctggcagcctggaaaaacaacccccttcaggtgagcatctgacagcctggaacagcaccctccaccttcaggtgagaatatgacagcctgaaa

SEQ ID NO: 2243 - DNA, 120 bp, synthetic construct
  source 1..120: mol_type = other DNA
tatgaccgcctggaagaagcacccctgcatgttacctgtggtgaaaccaaggctgagagacaggacagggttgttggccaggaggaggggcctgctgctgagccccagcgctgagtcaga

SEQ ID NO: 2244 - DNA, 120 bp, synthetic construct
  source 1..120: mol_type = other DNA
aagccctggacctatctcccagtcatgcctctcccactcccaagtgcctctggccctggaactgtcagagacccctgtgtcttttccatgtgctcttcttctcctttcactcagccctgc

SEQ ID NO: 2245 - DNA, 120 bp, synthetic construct
  source 1..120: mol_type = other DNA
ttcagtcctaatgggcagattgagaagaatccatttctgaccattagctgtgctgggacagagattcactgcacaaggcatggcccctgctttggaaggggacattcacatcattgatta

SEQ ID NO: 2246 - DNA, 120 bp, synthetic construct
  source 1..120: mol_type = other DNA
actctgctcagggaaaaaggaaaatggcctggaattcactcagtcaaaaggtctgaagaaaatctagtccctggtactctaaccttcaaatcacttataactctctaaacagatataaac

SEQ ID NO: 2247 - DNA, 120 bp, synthetic construct
  source 1..120: mol_type = other DNA
aaaaaaaaaaaaaaaaaaaaaaaaaacaccttaggtagaacccagtgctcaatcagagatacagggagttctcagccatagcttcctgtctgagtgagggggagcaggaggctgctgcat

SEQ ID NO: 2248 - DNA, 120 bp, synthetic construct
  source 1..120: mol_type = other DNA
cttttgttctctaatgaatggcaacatcattatcaaaaccatcagtgccatcctagctagacatgttggaactcagttctatgtcttcttcttattcagtcctcactcatccaatacact

SEQ ID NO: 2249 - DNA, 120 bp, synthetic construct
  source 1..120: mol_type = other DNA
acacttactatcaagatactttcacttagggacagaaaagataagctatgagacagttcttctcaaaatgtaggacatggactacaagtgatagagcaaataataatggtacccaaaatg

SEQ ID NO: 2250 - DNA, 120 bp, synthetic construct
  source 1..120: mol_type = other DNA
gagagggagagggagagggagagctacttctatattttctatctctttgacttactgtcttttgttctcatgggtttcttctaactgctcccagttctgtaattgtctctttggttgtac

SEQ ID NO: 2251 - DNA, 120 bp, synthetic construct
  source 1..120: mol_type = other DNA
attcttttccaatcctgggagaggagtaatttttctctgtgtttctttatcctctcatatctaccccagatgctatatagagcaaaccttaatagtggctaaatgaagagtatgatggca

SEQ ID NO: 2252 - DNA, 120 bp, synthetic construct
  source 1..120: mol_type = other DNA
tcactatccatagtcctttgcgatccactgacaagtgagaaaccaaaatgtaaggggttccctttttttttttttttttgccagccagcctaatgatttggcatgctggcaactgcgtgg

SEQ ID NO: 2253 - DNA, 120 bp, synthetic construct
  source 1..120: mol_type = other DNA
cttgtcaatacttacagaaattcaatgaactgaaatattgtccctaaaaagttgtcagtatctgtttttctggattgtaaagtttataaatatgatagcacacaatggagcaatacttaa

SEQ ID NO: 2254 - DNA, 120 bp, synthetic construct
  source 1..120: mol_type = other DNA
atttgtgaagctgagagaaaaagccattagggactctgactggatcagtaaactgtacaaagcttagcaattcaaatattcaccacaagttggggtcccatattaaatacaggctttaaa

SEQ ID NO: 2255 - DNA, 120 bp, synthetic construct
  source 1..120: mol_type = other DNA
ggggagacgggagagggagggggagggggagggggagggggaggccaaatggcattgttatggggtcttatctgcaaacgcagaactccattatgttttaatgatggatgagccattttt

SEQ ID NO: 2256 - DNA, 120 bp, synthetic construct
  source 1..120: mol_type = other DNA
tgaggaggcatgaaaactgctaaaggatgtggttgcaaaattactctattcagtatctaatttttgctgtcagccaaatagagttcatcggcaatagaaaatgtacccttctgaacagaa

SEQ ID NO: 2257 - DNA, 120 bp, synthetic construct
  source 1..120: mol_type = other DNA
aaatgtctttaattctttctcttttttgggtttcatttggaaagtcttgagtccccacttatgtccttacttgttggagtgttttacttcataaccatgttccttacttcctggtgttta

SEQ ID NO: 2258 - DNA, 120 bp, synthetic construct
  source 1..120: mol_type = other DNA
tctgtaagtctagattcctgtttttccacttgcattttttattcctcttccccactctgcttctatcaacagcaacctttgttagcctaaatctctggctccctttatggtccagcagtt

SEQ ID NO: 2259 - DNA, 120 bp, synthetic construct
  source 1..120: mol_type = other DNA
actttaaaagcagcctaaaccatagtttctttcttgcctggtattgagcgtatgccaaatctaccctaaactgcacagatggaaaaaattagtctatgtctgtggtacctctggggttga

SEQ ID NO: 2260 - DNA, 120 bp, synthetic construct
  source 1..120: mol_type = other DNA
catcttaaatagggtggccaaagaaggcttctctgagcagatgacacgtaagctgggacctaaggatgaaaaggaggcagccctgagaaagatatttcaggcaaagggagtagttgtaaa

SEQ ID NO: 2261 - DNA, 120 bp, synthetic construct
  source 1..120: mol_type = other DNA
tttgttactatactgcatggattattggtttgatgctgtagagccctattcatgttctcattttcttttccattactggctgatagtaataggatatgcaaaagcatttgcctcagtgtt

SEQ ID NO: 2262 - DNA, 120 bp, synthetic construct
  source 1..120: mol_type = other DNA
tggagagatggagacgtgtaacctctcagggaattcagaatagctattttgagaaagctcaatgaacttcaagaaaacacagagaaacaattcagaaatatatcagaaatttaacaagat

SEQ ID NO: 2263 - DNA, 120 bp, synthetic construct
  source 1..120: mol_type = other DNA
aagaagctttaaaaagtcatgcaattatcttctgctgtttcagaaaagtgattcatatgttctccacagctgaaggcctgctgacccagggtgataagatcactgctgatggacttcagg

SEQ ID NO: 2264 - DNA, 120 bp, synthetic construct
  source 1..120: mol_type = other DNA
gtggagaatttaagcaatttatatccaatgttaatattgagatgtgaggtactgttccagttatcctgttacttgttacctagatactctggtttctttttttttttttctttttttttt

SEQ ID NO: 2265 - DNA, 120 bp, synthetic construct
  source 1..120: mol_type = other DNA
tcggccatcttggctcctcttcgataatttgtttacttgcattgttagtaccactttcctctccctttctctgtcttcattcactacattccagttatactagcctctgtattcattctt

SEQ ID NO: 2266 - DNA, 120 bp, synthetic construct
  source 1..120: mol_type = other DNA
actgcaactctcatatgttgctggtggaaatacaaaatggtgtagccattttggaaaatagcatggtattttataaaattgaagacccttcttataccaccccagcaattccagtcccac

SEQ ID NO: 2267 - DNA, 120 bp, synthetic construct
  source 1..120: mol_type = other DNA
aaaaacatttaccattaggctgttattatgtacatcatttggagtccagcctctagctgttgtatatttatcataaaactgaacatatacatataattaacatacctgccttgctttgct

SEQ ID NO: 2268 - DNA, 120 bp, synthetic construct
  source 1..120: mol_type = other DNA
accaaaatggcacacttgagttattcccagttaagctctcattcactgagtcagttaacatcctcttcggtaacaagcacattctaagttttcagtatatcagctggtttttagcagatt

SEQ ID NO: 2269 - DNA, 120 bp, synthetic construct
  source 1..120: mol_type = other DNA
ggtgaagggaagggctcaggaacagctcagcaatttttgcctcttatttgccctcagtggtgacatgtttcctgatcttcttggctttgtgtttatcgcttatcttttataacacatagt

SEQ ID NO: 2270 - DNA, 120 bp, synthetic construct
  source 1..120: mol_type = other DNA
aggttcccacaaaagttttcctatgctgctgattcagacttttaaggcccatagaaatttatgctttccactttcttactaagccattttaatcagtttcatatgattctaccagttcgg

SEQ ID NO: 2271 - DNA, 120 bp, synthetic construct
  source 1..120: mol_type = other DNA
tcaaccttcatttcagaattcagtcccattatcttgcctgctcaaaatggttcacagggttatctagctgacatataagataaccctccatctcactagacaccactgggatatgacaca

SEQ ID NO: 2272 - DNA, 120 bp, synthetic construct
  source 1..120: mol_type = other DNA
aaattcacaagattgataaacctctaaaaggagtgctggaaaaaaagacagatgacacaaataaacaatattagaaatgaaaaaatgttccccctccccctccccctctccccctcccca

SEQ ID NO: 2273 - DNA, 120 bp, synthetic construct
  source 1..120: mol_type = other DNA
tccactcttgaatgttttcctgacaggctccccgtttaggtagatgcaagtaatactcatgaactcaagagcagtgggggcactacaatcctgttttcttacgttaacaagaaaatagtt

SEQ ID NO: 2274 - DNA, 120 bp, synthetic construct
  source 1..120: mol_type = other DNA
cttgctgttttcacacgttctgccccatgggtgatggattgtgttctgtggggccctgagatcacacaggcaacagaacagacattttctccacaggaagtccttgcggcatccagcagt

SEQ ID NO: 2275 - DNA, 120 bp, synthetic construct
  source 1..120: mol_type = other DNA
tgttcgtagtcatcatgttctgttatagcaaatagctgaaagcactgaattaatcaatactgaaccattgctcctaagggaaacacaggctgggttcctgtgagcctctggtcacatttt

SEQ ID NO: 2276 - DNA, 120 bp, synthetic construct
  source 1..120: mol_type = other DNA
tatttggccatcttggctcctcccccaacttcctctttcctttcatttctttttccttccagacttttctcatgcttttgagaaaagggaatgctgggtaatgaggaaggagactgttta

SEQ ID NO: 2277 - DNA, 120 bp, synthetic construct
  source 1..120: mol_type = other DNA
cagacctgtttaatgcaacattctgggatgatggacaatgttccctatgttaagtatagtagctactagctacatagagctattgagcatttaaaacaactgagaggccaggcgcagtgg

SEQ ID NO: 2278 - DNA, 120 bp, synthetic construct
  source 1..120: mol_type = other DNA
aattttatctaattctcacagtaactttgtgagtagtcctagaatttgagggaactgaggcacagagatgttaagtagtcttgccaaggtccctcagctaggaagtggcagagtccagat

SEQ ID NO: 2279 - DNA, 120 bp, synthetic construct
  source 1..120: mol_type = other DNA
attcggccatcttggcacctccccccaatttattctttagaataatgggggaggtgtccctctgagctaattacttgttggagctaatactaggggatactatatttgtgcttaaaagag

SEQ ID NO: 2280 - DNA, 120 bp, synthetic construct
  source 1..120: mol_type = other DNA
catctatgcagccaaaaaacacatgactcttttacttttaaccactttgtatatatttgaagggaatattttgtagacagtatagttaggtcttgctactttatccagcctgatgattgc

SEQ ID NO: 2281 - DNA, 120 bp, synthetic construct
  source 1..120: mol_type = other DNA
ttcattttggtgaaagtcttggggtggggatctgatttttttccaaatgatttttattaaataatgcattttccccccactaatttgcaagactcctatttgtttagggtctattttgta

SEQ ID NO: 2282 - DNA, 120 bp, synthetic construct
  source 1..120: mol_type = other DNA
aagctaccaaaactgtgacttacaggcattcttgatggagaagaggaaaaagtagaaagcttggaaaaatatttgaggggataatttaggaaaatcacccaatcttctagagatgtagac

SEQ ID NO: 2283 - DNA, 120 bp, synthetic construct
  source 1..120: mol_type = other DNA
aaaacaacattgtttgatcagattggcagatacttaaagatgggtggacaggagccattgctggcaaaggtttgggtaaggggcacttgagtatgctgctagtgacagggaattctacac

SEQ ID NO: 2284 - DNA, 120 bp, synthetic construct
  source 1..120: mol_type = other DNA
ctatcatgaggagaatacaacctctggaaggctttcctacactgtggactgtattgtgctgacttgttgcctgtctcttctcagtttctcttaatgtcaataatccacgaatgcaagaaa

SEQ ID NO: 2285 - DNA, 120 bp, synthetic construct
  source 1..120: mol_type = other DNA
ggcaaagcatggtaaatatgcttcttaaaagccatgatgtggcttccaaagacttgaagtcagtctgaatctgtagaatatcaaattatgtggcaaggtggcaagtgctgatgccacagc

SEQ ID NO: 2286 - DNA, 120 bp, synthetic construct
  source 1..120: mol_type = other DNA
cctttttttgagaataaattttaattggttatggtttttactgaaatgagttgattagatgtgtagagaaactgctataatttttcatgtttaagggaaagccaataaaatatatatgag

SEQ ID NO: 2287 - DNA, 120 bp, synthetic construct
  source 1..120: mol_type = other DNA
cctccatactctaccagcggaacttccgaccttcagtaaatcacagatggttaattttatctcggcataacagtttataatcttgacaatgtctccatgacttagaaggtcacacactgg

SEQ ID NO: 2288 - DNA, 120 bp, synthetic construct
  source 1..120: mol_type = other DNA
tccatatcactaatcaagcacgtttcggtaatagccaactctttgctgtaggagacaatgctgtaataaacattctcatacatgtctctttgtgtgcctatgcaagagtccctctggtgt

SEQ ID NO: 2289 - DNA, 120 bp, synthetic construct
  source 1..120: mol_type = other DNA
cgacatgagacatgaatagctggatatgaaaattggtattgaccagtgatcactatgtgctttccaactactcctccttacaaatggtaatccttattgcagttatcctatcactgcctt

SEQ ID NO: 2290 - DNA, 120 bp, synthetic construct
  source 1..120: mol_type = other DNA
tcataaatcaaacagaagcattcaaatggcaagcctaatattctagaaatagatgttattaaaaattagaaaccagacccctccttccacacaagtgtaaacaaaatgtccattttatca

SEQ ID NO: 2291 - DNA, 120 bp, synthetic construct
  source 1..120: mol_type = other DNA
tcagtatttgtttactggtgaatggatgagccattagcagtgaattatgaatatgcttgaggtttcttgtgagtcacctgagaaacgattaataaatgagaactttttataacccacacc

SEQ ID NO: 2292 - DNA, 120 bp, synthetic construct
  source 1..120: mol_type = other DNA
agataattgcatcaaatcattcctaggaaaagcaaaaccaacagtctgaattcactattgaaaacttggtaatcactgcagctgacttacttggagctgggacagagacaacaagcacaa

SEQ ID NO: 2293 - DNA, 120 bp, synthetic construct
  source 1..120: mol_type = other DNA
ggatctgtcttgtgttctacagagcacattctctgtgaatgtttgttgaattgaaaacttgattcacctccatcccacctgtggaatagtggtaatcactttaaggaccttcaggatgca

SEQ ID NO: 2294 - DNA, 120 bp, synthetic construct
  source 1..120: mol_type = other DNA
tttataatgaaagtctttctggtgacaaggagtatttggagttctggctatctcaagatagttctaatgataagccaggggctagggcctcatacatcttcattcagcctatggcagatt

SEQ ID NO: 2295 - DNA, 120 bp, synthetic construct
  source 1..120: mol_type = other DNA
ccctattctaggcctaggagtctacctatcagtaaaacatcactatcttctagccaattgcaaaaaaacacagaaacttggagtcatttttgttcctgtccctcatctctcacatgcaat

SEQ ID NO: 2296 - DNA, 120 bp, synthetic construct
  source 1..120: mol_type = other DNA
cctcataaaatgagtttgaaattgtttcctctattttttggaagacattgcataaaatcggtgttaattcatttctaagcatttggtaaaagtctgcagtgaagccatctggacctagaa

SEQ ID NO: 2297 - DNA, 120 bp, synthetic construct
  source 1..120: mol_type = other DNA
ccgtgtgaggttttgttgagatgttggggtgtgcgtgccgtgtgaggttttgttgagatgttggggtgtacgtgccgtgtgaggttttgttgagatgttggggtgtacgtgccgtgtgag

SEQ ID NO: 2298 - DNA, 120 bp, synthetic construct
  source 1..120: mol_type = other DNA
ccgtgggaggttttgttgagatgttggggtgtgcgtgccgtgggaggttttgttgagattttgggttgtacgtgccgtgggaggttttgttgagatgttgggatgtgcgtgccgtgtgag

SEQ ID NO: 2299 - DNA, 120 bp, synthetic construct
  source 1..120: mol_type = other DNA
aacaggctggtatgtttattttggggggatgagtttatttaaagtggcttaaacacatctgcgatgaaccatgcagtgaggtgtttatgattattaagagaaacttttaagcgattaact

SEQ ID NO: 2300 - DNA, 120 bp, synthetic construct
  source 1..120: mol_type = other DNA
gtcctggagatgggcccctggagatgggccatggagatgggtcctggagatgggcccctggagatgggctgtgcagggctgagcccggagagcgcatgggtagacaggacccggcagcct

SEQ ID NO: 2301 - DNA, 120 bp, synthetic construct
  source 1..120: mol_type = other DNA
ttccccacatcaggccctggccatctgaccccagctgttttgtcagggcagcagcagcctggggctggactgaacccctcatctgccctgcacggggtttctacaagctgaggtctcagg

SEQ ID NO: 2302 - DNA, 120 bp, synthetic construct
  source 1..120: mol_type = other DNA
gtgagcgtcttctgcggtctggtcaggttttgccactgtctaacagctgccctgtgcccttggtggctgtgccctaatgactcccctcctgtttggggccatcttttgtgaaaatgcaga

SEQ ID NO: 2303 - DNA, 120 bp, synthetic construct
  source 1..120: mol_type = other DNA
gaaaagataatctctagagagtgggtataattagctgattctaagagctgggcgtaaaatataaatgcagaaaaggtttaaaaagcaatagccagagctaagaatgtacccatgagaaga

SEQ ID NO: 2304 - DNA, 120 bp, synthetic construct
  source 1..120: mol_type = other DNA
aaggctgtttaaaaaacacgtaagcatgttctgtcaccacagtggaattagatttgaaaacatctctcaatagatctgcagaaaatcctcaaattataaataacctatgggtcaaagaag

SEQ ID NO: 2305 - DNA, 120 bp, synthetic construct
  source 1..120: mol_type = other DNA
acacatgtaccctaaaactttaagtacaataaaaaaaaaaaaagaaccagcttagatatcccttcctctggatggcttctctggacctccccactcccaaacccaccccaagaatacttc

SEQ ID NO: 2306 - DNA, 120 bp, synthetic construct
  source 1..120: mol_type = other DNA
cttgcctagtctaaggtggttctgtgtgtttacccaggaaattgtgggacagtcttcaatcatcagaacaggtcaaagagattagaacttataaggaagtgagtgatagcttttcaaaag

SEQ ID NO: 2307 - DNA, 120 bp, synthetic construct
  source 1..120: mol_type = other DNA
tcacaaagttctgaagttctggtcctagtttgaggccagacctgtggtaaatcctaaactcttttctgtacattttccctacctgtctaaaatgtgggggtgtgagatactgataaaagg

SEQ ID NO: 2308 - DNA, 120 bp, synthetic construct
  source 1..120: mol_type = other DNA
gttcctatttggccatcttggctcctcccgatttaagagattttcaagggcttttctctacatgatttttacctactctgctggctggcattagcattagcatctaagctttgtatgaga

SEQ ID NO: 2309 - DNA, 120 bp, synthetic construct
  source 1..120: mol_type = other DNA
tggcctaacttcaacccagcagagcagccacttgcaatcactaagcagacagagaatcaaattgcctctacgtcttattaatacaagttgagatgatctaaaggaaaggaattggtgtag

SEQ ID NO: 2310 - DNA, 120 bp, synthetic construct
  source 1..120: mol_type = other DNA
tgctcactgtgagacgtgcctcacagactcgtggtgaagatagttaattcatgacgctctcagaagagagcctggtatttaataagcattcaataaatgttagtcattcttctgatagtc

SEQ ID NO: 2311 - DNA, 120 bp, synthetic construct
  source 1..120: mol_type = other DNA
aagtccctaatccattgtccaaagatgatatttttaaaagagaatacttctgcttttataattcctgtctgtgggaattttatttttaaaatattttcattttaggtgaaacaaaggtca

SEQ ID NO: 2312 - DNA, 120 bp, synthetic construct
  source 1..120: mol_type = other DNA
gcctccatccattgtccctggtgtcctgtcctgagccatttgtagaggagaaactcatagaagagagatgctcccttctgttcttttagggcaaaatcaatggtttaaaaaaaaaaaaca

SEQ ID NO: 2313 - DNA, 120 bp, synthetic construct
  source 1..120: mol_type = other DNA
ttgtaaaatttatctcttcttgcctagaagctattaaactccaaatggtgctgcagatggaaccacacatggacatgcctttcttccaagaacctttagatcaactccagaaggagcctt

SEQ ID NO: 2314 - DNA, 120 bp, synthetic construct
  source 1..120: mol_type = other DNA
gactatgacacttcctcccatctcatgctcggcaggtaacgttacgatagttaacgatgcctcctggggactttgacatcaagaaggagatgcctacaaaggggcaaagagtaaattact

SEQ ID NO: 2315 - DNA, 120 bp, synthetic construct
  source 1..120: mol_type = other DNA
aagggtttaagcagttataaagttaaagatattttggtattgctctccaagaatatggaacaatttatactccaccagcctccttcagctctcagaaagagcctcttttaccacacctcc

SEQ ID NO: 2316 - DNA, 120 bp, synthetic construct
  source 1..120: mol_type = other DNA
ggcttaacagcggtgtaattggatagtaggagtggagagagaaatgcagcagaaggaatgtttaagaggaaatttttaaactgatgcaattctttattctacaggcttaaggagctctgg

SEQ ID NO: 2317 - DNA, 120 bp, synthetic construct
  source 1..120: mol_type = other DNA
cttatgctagttgaagtaaacattaataaagtgaaaaccaggaggcagtcatggggctaatcagaagtcaacatggcagattagcattcaaagtggagtcacttttgcctcccctggtgc

SEQ ID NO: 2318 - DNA, 120 bp, synthetic construct
  source 1..120: mol_type = other DNA
gaaaaatattttttctacatttgaaaactcaaacgccaataaatagctgtagaggttaaaacaaacaaacaaacaacaacaaaaaaaaggttttttcttctcccgccattgctctccact

SEQ ID NO: 2319 - DNA, 120 bp, synthetic construct
  source 1..120: mol_type = other DNA
caggactccaactcataggcttttttagcttctgtgtataagacagttggcctgaaagtagtgtgcagtatggactgaagggttaagtttttgggagtgggaagacagttaaaagtctat

SEQ ID NO: 2320 - DNA, 120 bp, synthetic construct
  source 1..120: mol_type = other DNA
atcatttctttcctctcttggattcatttcttttcttctcttagatttcattgaggcacagtcactatttctgaactgatctccccgcttcctaagcccctccttcagagcactttaacc

SEQ ID NO: 2321 - DNA, 120 bp, synthetic construct
  source 1..120: mol_type = other DNA
ttaaccaaggcgtttctaaagtaatttcttctttgaaatctgtcgtagtggccttatcttcacatgaactgtataattctagacacaaaggccaggctggccaacatggtgaaaccccgt

SEQ ID NO: 2322 - DNA, 120 bp, synthetic construct
  source 1..120: mol_type = other DNA
atatgctgtgcagaccaggaatgctttacattccggggtggtcttttctagatcactgtctcagtctgcttgtgctgctacaacaaaataccacagactgggtaacttataaagaacaaa

SEQ ID NO: 2323 - DNA, 120 bp, synthetic construct
  source 1..120: mol_type = other DNA
cccaagtctgtgcttttaactgctatgctgtgtggcccccaactaaggtataaatgggaggggtattttgctttgaatacgatgccttaattatcaggccttcaactagagtttatgcag

SEQ ID NO: 2324 - DNA, 120 bp, synthetic construct
  source 1..120: mol_type = other DNA
tccttgtgcagtagcaatcactatagcaagagctaccattttagcatacatattatgggttgggtgctgtgtcagtcactttgtaaacattgccttatttaatttactcaacaacattgc

SEQ ID NO: 2325 - DNA, 120 bp, synthetic construct
  source 1..120: mol_type = other DNA
ctccagtctttctggaatcttgattggataagcagcctttaattgatccgtgtgaaatgttctgttgcatgtcatttaattttctggtctattatgtgttaacagtcctcctaagactat

SEQ ID NO: 2326 - DNA, 120 bp, synthetic construct
  source 1..120: mol_type = other DNA
ttgatcattaaagaaattttattcgcataagaaaaagctactatgtttctgttaatatcaatctattgtatggtttctatcgaaaaatggctgtccatcaggtttgaaataaccctttgg

SEQ ID NO: 2327 - DNA, 120 bp, synthetic construct
  source 1..120: mol_type = other DNA
gagatctggacatggctcctaaaagtggatcaatacattgtgttggcaaatataagataagtttctagacttcaaagacaacctagtattttgactgctgcctgaagataaatattgtgc

SEQ ID NO: 2328 - DNA, 120 bp, synthetic construct
  source 1..120: mol_type = other DNA
gttgagttgtaagaattctggtgcaaacaaagtcagtaaacacaggtttatcctttaaaaatatattatttggctctatcactgttaaataacatttaagtagtcaagtagagaggaata

SEQ ID NO: 2329 - DNA, 120 bp, synthetic construct
  source 1..120: mol_type = other DNA
gccttccctctctcttttctccatcagtacctaagagtttgtaccattcacatagattacatactgctttgaattgtcattattggtcaatatcctgtatccctcagagcagggacagtg

SEQ ID NO: 2330 - DNA, 120 bp, synthetic construct
  source 1..120: mol_type = other DNA
ttttaccaccagcgttgatcatcttcctgggctccagatttgtacatcaactcactactgagcatccctaaccagatgtctaacaggcatcttgaacatgtaaaatactcaaaacacaac

SEQ ID NO: 2331 - DNA, 120 bp, synthetic construct
  source 1..120: mol_type = other DNA
cagcccaataagctagacatcattattcccattatgaagatgaggcagaagacctaaggaaggataaataattcgccaaatgtcacttaagcacctggttggactgcaatgattctaatc

SEQ ID NO: 2332 - DNA, 120 bp, synthetic construct
  source 1..120: mol_type = other DNA
gctgttcctattcggccatcttggctcctcctcccatttgtctttctttattccctcttgaactccaattactcgaacattttctcttttgatgctatcccatagatcttgtaagctttc

SEQ ID NO: 2333 - DNA, 120 bp, synthetic construct
  source 1..120: mol_type = other DNA
tccaaatttaagaaaaaaggctcactgagggtcactcaaaatatgtctggtccagtttgtggtctataaattgcaagccctgtttgacagtgaagagtgcagattgacctggcaatcaca

SEQ ID NO: 2334 - DNA, 120 bp, synthetic construct
  source 1..120: mol_type = other DNA
agagaggaagggtgctttgtaaatcttttgaatagcacactttgaaatatttctgatgtagatcatacacagtcaggctcagtaacgtagtactcttgcactttgttgaattcagattag

SEQ ID NO: 2335 - DNA, 120 bp, synthetic construct
  source 1..120: mol_type = other DNA
cagccacatagattcctttttatttcaatttttttgtagtccatcaccattatttttctttttcatgctcgtattgtctgaaatttagctgatgagagccaccagaaaccacccctgtgt

SEQ ID NO: 2336 - DNA, 120 bp, synthetic construct
  source 1..120: mol_type = other DNA
atctagtctaagactaaaatgctaaaaacaaaaacatgaaggaaattaaaaccccttattattaaatcgatttgtaaaaatgttgttactggaaatttattggacttgaggccttcttcc

SEQ ID NO: 2337 - DNA, 120 bp, synthetic construct
  source 1..120: mol_type = other DNA
gctaaatttgcccatatcagtcatgttgaactgtgcctccctcaaacaactagcaagactgatctgaggttgaaccaattgcttaggaaacatcctctatgaagctataaacctgaaacc

SEQ ID NO: 2338 - DNA, 120 bp, synthetic construct
  source 1..120: mol_type = other DNA
gcccaattattgtgagttttcatgaggtgtcacatattaatgtgcctgtcatggttcctagaataacataaacaacaaatggtgagtattatagtaatagttgcattgggctggaaaacc

SEQ ID NO: 2339 - DNA, 120 bp, synthetic construct
  source 1..120: mol_type = other DNA
agtcggaacatagtaagatagttgctttgatagaagtgcacacaaagtggggattgtgatggtccaagaaaggttcctggagaaggtaccctgcaggtgaatcttataagatttatagga

SEQ ID NO: 2340 - DNA, 120 bp, synthetic construct
  source 1..120: mol_type = other DNA
tattaccattttcaaatggagagactaaggcactgtaaagtgattcatccaactcatttagccagtaagtagcagagcaaatgtgggtgcaagtagagtctagagtctatgcccctaacc

SEQ ID NO: 2341 - DNA, 120 bp, synthetic construct
  source 1..120: mol_type = other DNA
ccagtctccaggcagtttgtttgcatgctacagtctgagaaatactgttctagaggagttatgcttagacaatcatagacatttgggaaggacacataagaagcctaactctggtttctt

SEQ ID NO: 2342 - DNA, 120 bp, synthetic construct
  source 1..120: mol_type = other DNA
aaaaaaaaaaaaagaaaaggcactgtgtattttaggaagatttccactgaatggtcaacattttcagagggctgatacttaaaggtataaggtggcaaagtcacttactggggaaacccc

SEQ ID NO: 2343 - DNA, 120 bp, synthetic construct
  source 1..120: mol_type = other DNA
gtcatagtatttctgcccttgaagaaacagaagcttgttccaaggtggacatgttcttaggaactatgcagtgcctcagtttagctgggtggtaattattttagcttggctgcattttca

SEQ ID NO: 2344 - DNA, 120 bp, synthetic construct
  source 1..120: mol_type = other DNA
tgattgagggggggcaacactcctaagaggggtgggaagactgaggcgagcgagaaaaataattgtgtcccaagcctcagtgccaagtggggtgcttggctgtggacagtggagtggagt

SEQ ID NO: 2345 - DNA, 120 bp, synthetic construct
  source 1..120: mol_type = other DNA
gagcagaaatcttaaatgaaattatgtgcagaccaaatacaagacatctacgaggcaggctcagcctgtgtgccatccctgtgggacccctggtgtagacctgttttggggtatctggct

SEQ ID NO: 2346 - DNA, 120 bp, synthetic construct
  source 1..120: mol_type = other DNA
gaaaagaattggaaaccctgttaaaagcttctcagaataaactccacaaatgtccgtccatctgtctccttgtatgtttccactgtgtgcatgggttagtggatgtgtttgggagaagtg

SEQ ID NO: 2347 - DNA, 120 bp, synthetic construct
  source 1..120: mol_type = other DNA
gtatacagagagcgttggtacaatattagtaagcctactatttatgtttacaatttattatataagtagggaaaagggtatacaatagatcatttttgatagatgctgaaagggcttctg

SEQ ID NO: 2348 - DNA, 120 bp, synthetic construct
  source 1..120: mol_type = other DNA
caaatcatgagtgaactcccattttctaatacactttctttagaattaggttatttaaactgtgaattataattaaataaaatgaaatataaatcacattggatattggtctgtcaggct

SEQ ID NO: 2349 - DNA, 120 bp, synthetic construct
  source 1..120: mol_type = other DNA
cctcccccatgtttctttaggatccttcatctgtacctaatgcagacaatgccttcacattattttatgtgaaatttcgagctgctgcccccaaagtcagagtaagtctattgacataac

SEQ ID NO: 2350 - DNA, 120 bp, synthetic construct
  source 1..120: mol_type = other DNA
aaaaagttgcattgcaacacaaatccactgaaaaattaggctggaaggaccatcatttgctatatctaatcatccacagctttatggaggcagtcgaaaacctcagaagtttgcctaatt

SEQ ID NO: 2351 - DNA, 120 bp, synthetic construct
  source 1..120: mol_type = other DNA
gcaaaaaaccctgccctggcatgccagagtcagacataagacatacattgacttctttcattggcttggttctatatctgccacctaaaatgtaaacttcaagaaagcagaggcttttgt

SEQ ID NO: 2352 - DNA, 120 bp, synthetic construct
  source 1..120: mol_type = other DNA
caagttgcattaattatttgcgtctcattcctctatcatggcaggagtgatggcttttccaacatttgtacttaccatgtggcctgtcacagtgtagctcaacatcctgttcactgagtt

SEQ ID NO: 2353 - DNA, 120 bp, synthetic construct
  source 1..120: mol_type = other DNA
tttgtgcagtaagaaactaataccattcttaatttctatccatgctaaaaaggggatttccagattaattcatgacgaagtgattatattcacagtgcttttaaatagtgtaaagctaag

SEQ ID NO: 2354 - DNA, 120 bp, synthetic construct
  source 1..120: mol_type = other DNA
aaaatcaccggtgcaccttgaaattttgacaaatgttggctctgagaaccatatcgatctgtggttggatgtggagtttgctgaagcaggcatttcgtaagtctttacgttcttagaaga

SEQ ID NO: 2355 - DNA, 120 bp, synthetic construct
  source 1..120: mol_type = other DNA
cctatctcataaggtcattgtgaaggggaaataagattaggatgtttgagatgtcattgggattatctttaaaaatctgaaaaatgtttaagcagactcaaaaataggcctttgagtagc

SEQ ID NO: 2356 - DNA, 120 bp, synthetic construct
  source 1..120: mol_type = other DNA
ctcccttactgaaatgtattaatgaatatacctaccatacatttctattccaaaagattctgtctatccatccttttagaaacacccaaggactgaggatcagctcaatgcctccttatt

SEQ ID NO: 2357 - DNA, 120 bp, synthetic construct
  source 1..120: mol_type = other DNA
ttgtgcccccttatctttcttaccatcctgctgattcattcctatgagtgcctcaccctgactgcttctcacccaagtgttttttctgtgtatatgttaaaggaagcatttttcaaggaa

SEQ ID NO: 2358 - DNA, 120 bp, synthetic construct
  source 1..120: mol_type = other DNA
ggtatactggttactgctttaggcatgataggcaaatgctgaattcccaaacgaagctgtctcactgagttttaaattaggccatatatgtaaagttaaaatataagggaatggagtagg

SEQ ID NO: 2359 - DNA, 120 bp, synthetic construct
  source 1..120: mol_type = other DNA
ccattatcaagttatcttttaaatttgtgatacaatagtaaatatgtctttgtactatctgattaaataaaaagatatagtggccggtttaataactactatagtttcaaagtagtgatg

SEQ ID NO: 2360 - DNA, 120 bp, synthetic construct
  source 1..120: mol_type = other DNA
gaaagggtcctattccacacagtagcactaaagagggaagagtacattgttccttgaggtcagaatttttgcaattttgagaataaggcaaaaacaaaaatttcctatatgaagaaccca

SEQ ID NO: 2361 - DNA, 120 bp, synthetic construct
  source 1..120: mol_type = other DNA
acactgaaaacccatctgtacatcaccatcatcaaagaccaaaagtagcacagggaagcattctaagcttttgccaggacgcctgcttattatatgctatggtctgtccaaatcttctgt

SEQ ID NO: 2362 - DNA, 120 bp, synthetic construct
  source 1..120: mol_type = other DNA
tgacacaaaggcagggtccgtttccttaaggtggggaacctctagaggaacacaaacaagaagtgattacaaaggattacacaagctggccaatgggctgccagacaacagaggacaaaa

SEQ ID NO: 2363 - DNA, 120 bp, synthetic construct
  source 1..120: mol_type = other DNA
tggtctctgtgattctgcccatagctcccttcagtctgttctcaaaaaagcatccaaagtaacactttcaaaatgttaagtcacttcatccactctcctcatcaaaactctccatggctt

SEQ ID NO: 2364 - DNA, 120 bp, synthetic construct
  source 1..120: mol_type = other DNA
tggagagagagggagacgagagggagagggagagggagagctgtttcacagtttttgatgattgtgaataacgctgcctatgtgtgcaggtgcttttttttgtttgtttgttttgaggtg

SEQ ID NO: 2365 - DNA, 120 bp, synthetic construct
  source 1..120: mol_type = other DNA
aactgcagtgcaatctactgttgttcgtgaatgtcaatgtattatcaggaaacgtgtctatacaaccacagagttatattttctcacaaacttctttacaaagtgaaatatgtttttgta

SEQ ID NO: 2366 - DNA, 120 bp, synthetic construct
  source 1..120: mol_type = other DNA
gttttggaccaaattctgttttaagaatttactgactaaccactaaccaaattgactttatgatcagattggaaacttgagtttactagattatttgaggggaatgacattatcttggcc

SEQ ID NO: 2367 - DNA, 120 bp, synthetic construct
  source 1..120: mol_type = other DNA
ttgtgagaggggacatagcttgttctagttttaggagaaaattatgtagtttctcaccctaaatgttagctgcaggtttttcaaggtattccttattaagttgaggaagatcctctctct

SEQ ID NO: 2368 - DNA, 120 bp, synthetic construct
  source 1..120: mol_type = other DNA
atacaagcttggtgtacaataaaatactgcaagacaagcaaagggcatgatagaaagacacagagatgatgtgtatatggctcttctttgtttttgcagagaaagggctatttgggctct

SEQ ID NO: 2369 - DNA, 120 bp, synthetic construct
  source 1..120: mol_type = other DNA
tttcatgttgtggctttgccataattaattttggttgtttccagtcttttactatttcaaacaatgcttcgatgaacatgtatgtatagatgatatatgcgtatgtgtccaagaatccct

SEQ ID NO: 2370 - DNA, 120 bp, synthetic construct
  source 1..120: mol_type = other DNA
tatcaggagatcaggttagaaagggatctccctcccccctcccccaaccctccccctctccctcgcttcttccttctccctctgttgctgaggctggactgtactgccgtgatctcagct

SEQ ID NO: 2371 - DNA, 120 bp, synthetic construct
  source 1..120: mol_type = other DNA
cggagctgttcctattcggccatcttggctcctcccccgccacagcacagtttctaacctttgacccaattctatttctccaaatctgtcttaagataatttaagatacaaaaaaaagta

SEQ ID NO: 2372 - DNA, 120 bp, synthetic construct
  source 1..120: mol_type = other DNA
ctaaagagttctccactctttcctgtcccacccagtactatcaattctgaacctcaatttttctgcctcagcactttcctgggttatgacagactctcatcaattaacagtaacttcctt

SEQ ID NO: 2373 - DNA, 120 bp, synthetic construct
  source 1..120: mol_type = other DNA
atgatgggcatatacaatggtatagacagttatttgatctccacgtcagccaaaatgttgaattaagggacactttccattcctccgaaaaacatgaagactgatgcctgcatcctagtg

SEQ ID NO: 2374 - DNA, 120 bp, synthetic construct
  source 1..120: mol_type = other DNA
aaaagaactgcaacacataagctttttagattcttggtacgtatgttaagaattgtgtacaaattgagatatctgtggactggtcctcaacacaaccaacaaaatctcaattatgaaagg

SEQ ID NO: 2375 - DNA, 120 bp, synthetic construct
  source 1..120: mol_type = other DNA
gagcctgcctggatcagtgtttcccaaatggcagtcatttgcatctttgcattttttttggggggtgggggggttgtgggggtatattccataccagatttttaaaaaattgacattaaa

SEQ ID NO: 2376 - DNA, 120 bp, synthetic construct
  source 1..120: mol_type = other DNA
cggcggccctccctaccccacacacgctggcctgtctcatggaacccaggcaatccacccatccacccacagttcagaccaatgccagctccctcgggcttccctcttctgtggtcccca

SEQ ID NO: 2377 - DNA, 120 bp, synthetic construct
  source 1..120: mol_type = other DNA
ggtcatgttatgccttattctataaggctttaaaaaatttttttatggtggcaggggagaatataattatgctttgtgctttttatcttccactcaataaatgcttggtaaatatttgtt

SEQ ID NO: 2378 - DNA, 120 bp, synthetic construct
  source 1..120: mol_type = other DNA
tctgtactaagaaaaattcttctgccttgggaaaaaaaaaaaaaaaagaactcccctcacttcctgtctcttgtcttcacccctctctgtcctctcccttctagcaggatcactgagacc

SEQ ID NO: 2379 - DNA, 120 bp, synthetic construct
  source 1..120: mol_type = other DNA
cttcctccatccttttattttgagcctatgtgcaagtagtctatctttaaccagtctcttatcaatgagcatccagactgctgcaaaacttgagctctgaccaaccacattgtgactcat

SEQ ID NO: 2380 - DNA, 120 bp, synthetic construct
  source 1..120: mol_type = other DNA
atgtacacaggtgcaaaatggcaaaagcataaggttactcactgcaccattgtctaattagcaaaagattgaaaaccaccaaaatgttaatcaacagggggctggttcagtaaattacaa

SEQ ID NO: 2381 - DNA, 120 bp, synthetic construct
  source 1..120: mol_type = other DNA
acttttttttttaattgtctaataggttggcactcatcatgagcccctgttctcattctgcaaatggtgaagctctctattgtcctgaccccacggttcctgtcccatgaccagggccag

SEQ ID NO: 2382 - DNA, 120 bp, synthetic construct
  source 1..120: mol_type = other DNA
catataggcgatgggggttcggggaccaacacaacccacagttcctgccagttccaggatcccacgccggtgcacacgtaatatcctggaggctggggggtaaacaaaggtgacaggctg

SEQ ID NO: 2383 - DNA, 120 bp, synthetic construct
  source 1..120: mol_type = other DNA
ccagcaggaacccgagcagaggcttcaacccaggcttctgacttgcaaaccagtgctccttcctccttacacagtgacaacaggggaaggtggccttcggggttgccagagccgagtagt

SEQ ID NO: 2384 - DNA, 120 bp, synthetic construct
  source 1..120: mol_type = other DNA
aatttgctgatagtttgcggtgattaaaccaggggttcccaaatgccagtccctggaccagtgctggaatggctaagaaagagttgcttgaacataaagatttgtgggtcttacttccca

SEQ ID NO: 2385 - DNA, 120 bp, synthetic construct
  source 1..120: mol_type = other DNA
aataatgatgcctgtgttcaaagacatggtcgtgacattttttgtttgaagttgaggaacttccctggagtgtctaaagaggaaaaatcagaacagttcttcctaggagggggtaggtgg

SEQ ID NO: 2386 - DNA, 120 bp, synthetic construct
  source 1..120: mol_type = other DNA
cgacaccacagaaatacaaaagatcattcaaggcactacaaacagctttatgcacataagctaaaaaacttggaggagatggataaattcttgggaagatacaaccctcctagcttaagt

SEQ ID NO: 2387 - DNA, 120 bp, synthetic construct
  source 1..120: mol_type = other DNA
acactgctccggaggcgtgttttaagactgatttagattcaggcccaaagtattcttacagtaaattaggaaaaagtggccctagctcaggcatttctttacatccatgggagggtatat

SEQ ID NO: 2388 - DNA, 120 bp, synthetic construct
  source 1..120: mol_type = other DNA
atttaatatttattcagttctacactttattaacttctacaccagcagatttagacattatgtaaccatctcaagaagtttcacttggatgtaatgcttcacgcttgtaatcccagcact

SEQ ID NO: 2389 - DNA, 120 bp, synthetic construct
  source 1..120: mol_type = other DNA
caaggtaattatgagtactacctggcaaaacttcacggaagctgtggtatcacttttatgatggaagaatggtgtttgcattttgtgtaaaagtacttgcggctgggcgtggtggctcat

SEQ ID NO: 2390 - DNA, 120 bp, synthetic construct
  source 1..120: mol_type = other DNA
atcgtgacgctggataaatgtcttttttttttaaaaaaaaaaaaaagatctttgcagaacacctattaattaattaattaattcactcattcagcaacatttttgagctgctgccctgtt

SEQ ID NO: 2391 - DNA, 120 bp, synthetic construct
  source 1..120: mol_type = other DNA
ccaccaacgctgtgcaagccataaatgtggcacagattaattgagcaaaaaaagtgacttgcatacagttggcacttctgttcttattaggatcagaaagaacaattgggtgaagatcac

SEQ ID NO: 2392 - DNA, 120 bp, synthetic construct
  source 1..120: mol_type = other DNA
gtggatagatggacggttggatggatgagtggaaggacggatggacggatggatgggcagggatgggtggagggatgggcagaggaatagatgggcagatggctgggtagacagagagat

SEQ ID NO: 2393 - DNA, 120 bp, synthetic construct
  source 1..120: mol_type = other DNA
actcttgaatcttcactctttcacacaagcgttctttttataaggcttggtagaggacattttcctcacatcacaaaaccagaaaaaacattgtttctcctgaacacctggattactctt

SEQ ID NO: 2394 - DNA, 120 bp, synthetic construct
  source 1..120: mol_type = other DNA
aggttttctgaagactaagcaaacagagatataaaggccctaccactttggcatgacgtagtactcctctgataagcaacactgattccaaaggaaactactagtttgggccaagttttg

SEQ ID NO: 2395 - DNA, 120 bp, synthetic construct
  source 1..120: mol_type = other DNA
ataaccaaccatagttacccacatcaaaatctgagctttctagcaaatactcgaatttcagaaaatctgtccccgaacagaaacttctaaatacttaaatatttttctgtgaaattgctg

SEQ ID NO: 2396 - DNA, 120 bp, synthetic construct
  source 1..120: mol_type = other DNA
gtgaaagtggaaagacaaattcaaattgtttttcctctgctttcacaccacaataatcaacacagaagaccaaatgtgtgggggtttctccccacacaccaagcaagcaagcaattctgc

SEQ ID NO: 2397 - DNA, 120 bp, synthetic construct
  source 1..120: mol_type = other DNA
ctcctgtcctacatttggtctgatctgtctcatttgggctcatttttcttacaggttacacaaggacaggctcaatctttctggcccaaactcaggaccgactgatctccctgaagcgca

SEQ ID NO: 2398 - DNA, 120 bp, synthetic construct
  source 1..120: mol_type = other DNA
agggtgaaatccctccttaagacgggcctcctccgaggggcggtgaggggtgagggttatttgcgtgcagctagtatacacacattacgtgaccactcatcgcctattaggatgtcctgg

SEQ ID NO: 2399 - DNA, 120 bp, synthetic construct
  source 1..120: mol_type = other DNA
ggccgggccaggctgcagaggggagcaccaggggccgggccaggctgcagaggggagcaccagcggccgggccaggctgcagaggggtccacaggcacccacaaccccagcccacgtagt

SEQ ID NO: 2400 - DNA, 120 bp, synthetic construct
  source 1..120: mol_type = other DNA
acaggcacccacaaccccagcccacgtagtgaggctcagagggcctctgggctcaggccgtggacaccctgcctggagtggcatcggcctcctacagtggctcggcttccagggtgcaaa

SEQ ID NO: 2401 - DNA, 120 bp, synthetic construct
  source 1..120: mol_type = other DNA
tcagcacgtccttcctttctgaggctgagcaatgttcccctgtacggatggatcacgttttgtcgtctgttcataggtacgtggggtgcttcccccttttcgctggtccttctgttttca

SEQ ID NO: 2402 - DNA, 120 bp, synthetic construct
  source 1..120: mol_type = other DNA
acacccaggcccccatctcccctccagtatttttgggccagttaatccaccttcctcagcccagttttcccttaccacatatgacaaaagcaggaaaagaaatgaggtagctgaagtcct

SEQ ID NO: 2403 - DNA, 120 bp, synthetic construct
  source 1..120: mol_type = other DNA
ctcctgactgaacatcccagaactacttggttccattccacaaataccagttgagaacccctaggtgccaagaagcttccactggggtccacagagatgatcagggattaaggtcctgat

SEQ ID NO: 2404 - DNA, 120 bp, synthetic construct
  source 1..120: mol_type = other DNA
gttcgtataatgtgtgtaaaggtgaaagatattgaagacctaaataaatgaacagctaaaccaggttggaatggaagactcattattgttaaggtatcaattctttccaacttgacctat

SEQ ID NO: 2405 - DNA, 120 bp, synthetic construct
  source 1..120: mol_type = other DNA
ctgcccagctgtgagacctcggccactttctcacaccatatccttcatttccacatccataaactgggagcaacaacacctcctcgatctatggtgaaatcaagtaaatgctgtatgcag

SEQ ID NO: 2406 - DNA, 120 bp, synthetic construct
  source 1..120: mol_type = other DNA
ccccacatccctctgtgccctagatgtcttatctgtgttttactgtctgttctttctggctgcttgtagttagaagagatttccttgaaattcatgagactagaaagggacctggaactt

SEQ ID NO: 2407 - DNA, 120 bp, synthetic construct
  source 1..120: mol_type = other DNA
aaagtagcgcaggcccacatggaatgaacctcaaccttgttgtgtttacctggctatttcgtgtcctaacaaatcatagaagagcaaatctaaggtttcttagatagcattgtggccaaa

SEQ ID NO: 2408 - DNA, 120 bp, synthetic construct
  source 1..120: mol_type = other DNA
aaactctgacaagagggaggtttaattgaaatcacagtggctgctcagggaagtttataaatctcgaactgcaacgactcaataagcatgaattgcttgtgatgatattgacttaataga

SEQ ID NO: 2409 - DNA, 120 bp, synthetic construct
  source 1..120: mol_type = other DNA
ctactaacatttgagtaacttttgtttagagtcctgtgttaatacaaaaacaaattgtagaaagtcccagttcttaaagaagtgtgtgcttttctttcttaaatggacctcaggtccatt

SEQ ID NO: 2410 - DNA, 120 bp, synthetic construct
  source 1..120: mol_type = other DNA
gacagaacgagactctgtctcaaaaaaaaaaaaatgtaacgcacttgaaacatcccgaaaccacctcctcccccaatggaaaaattatcttctataaaactggtccccgatgccacaaag

SEQ ID NO: 2411 - DNA, 120 bp, synthetic construct
  source 1..120: mol_type = other DNA
tagttattagagaacttaagcatttctccatatgttaattgaccatatgcatgtattgtgtgaaatagtgtccaagtcttttgcctgtttttctgttgtactgcttatttgattgataca

SEQ ID NO: 2412 - DNA, 120 bp, synthetic construct
  source 1..120: mol_type = other DNA
actgtgttagagcttgggagcacaggatttaataagtgaactagatgtacctctgcaattaaataactggatattctggagccagctagattccctgacattttaggctgccaaagagca

SEQ ID NO: 2413 - DNA, 120 bp, synthetic construct
  source 1..120: mol_type = other DNA
ttaaagataccagttttttgttttgcagtggagctccagcttcatggtgccaaaaacactggattcattggaggtgcttattttctgcatttcgtgtggaagctcaacttcgagaactaa

SEQ ID NO: 2414 - DNA, 120 bp, synthetic construct
  source 1..120: mol_type = other DNA
taagaacttatcattgacattgaagacttactgtatataagtttgcatttcctagcattttacataaatggaatcaaacagtatatgctcttttttttttggtctggcatcttttactcc

SEQ ID NO: 2415 - DNA, 120 bp, synthetic construct
  source 1..120: mol_type = other DNA
aaaaaagacatttacagaattttccacccaactgctgcagacatttacagaacatttcctcaacagcacatggaagagtctccagtatagactacatattaggtcacaaaacaagtctta

SEQ ID NO: 2416 - DNA, 120 bp, synthetic construct
  source 1..120: mol_type = other DNA
ttcttttaaaatatgtattatgagggatgttgtagtatagccactgtagaatgagagaaaatattatacagatctgaacatgtagcaggcgtggagcgctcaggtttcacgggtggcctt

SEQ ID NO: 2417 - DNA, 120 bp, synthetic construct
  source 1..120: mol_type = other DNA
gtggtggtggtaatggtggtggtggtggtgatgagggtagttttccacattaacatcttgcaaaacaagtagttcaagatcttctccagtttgacttatagtagattgtctatttccagg

SEQ ID NO: 2418 - DNA, 120 bp, synthetic construct
  source 1..120: mol_type = other DNA
aaaaaaaataaaaaataaaaaataaaacctcacttatcttgatgcctgagtttctggcagcctcttaaacgttgagcccaaggcggacgcctcacttggctcaccctaatcccagcgccc

SEQ ID NO: 2419 - DNA, 120 bp, synthetic construct
  source 1..120: mol_type = other DNA
tcactcgcggttaggagctggagaccagcccggccaacacctacagttacttttaaattaatgtcatttttgaagaatggattatttaatgaacattttatatataaatatatgtctttt

SEQ ID NO: 2420 - DNA, 120 bp, synthetic construct
  source 1..120: mol_type = other DNA
agattacagtttcctaaattgtcccagtatgtcctttatggctatttttcctgtctctctagtctgcttttctctagaagtgcttctcagcattctatggtggaggagggcagcatgcag

SEQ ID NO: 2421 - DNA, 120 bp, synthetic construct
  source 1..120: mol_type = other DNA
atacaaccttttaaccacatcaaaggaacaagagagaagtactgactacaaatctgagtctagtggcttgtcaaattcataactcctttctgaaaaacctgccatggccacaggcacctc

SEQ ID NO: 2422 - DNA, 120 bp, synthetic construct
  source 1..120: mol_type = other DNA
tttcattcctctttggaaatgctctggaagaaaaactaatgataaaggctgttctattattgttaaatatgcattcataatttcattttctctttctcctataaattcagaaagcatatg

SEQ ID NO: 2423 - DNA, 120 bp, synthetic construct
  source 1..120: mol_type = other DNA
gtgatgttagggtgtcaattttggatctttcctgctttctcttgccctgtttctgtcatcatatctctttttcactaactcttctcttctgcgttctttcatttgaatgggcttttgtga

SEQ ID NO: 2424 - DNA, 120 bp, synthetic construct
  source 1..120: mol_type = other DNA
aatgggctccagattcttacatagtccaggaatgatcctctgcaatctctgtgcccttctgattaaaataaatgttcaaagatgataaagggctagctaatccttttacttcttactgtc

SEQ ID NO: 2425 - DNA, 120 bp, synthetic construct
  source 1..120: mol_type = other DNA
ttattaaacactaacgtcccattctcccatcacttagctcctggcagccactcagggtgcatattttaaatactagcagtgctagttaaaatgatggtaacccgtataacaaataagccc

SEQ ID NO: 2426 - DNA, 120 bp, synthetic construct
  source 1..120: mol_type = other DNA
gtagaggaaatatttaagacaattttattgtaagcaagggaaggcaatgggatgtagaaggaggtaaggtttccatatattacttaaactggtaaaatgacatcaccagtagactgggat

SEQ ID NO: 2427 - DNA, 120 bp, synthetic construct
  source 1..120: mol_type = other DNA
gcccacaaaaagaataaatttatatgaatatgagtcactttaggaaatacgtcttgattattcttccattattgaagaaattggcctgatcaatgtagccaagatgactgcatttcaaca

SEQ ID NO: 2428 - DNA, 120 bp, synthetic construct
  source 1..120: mol_type = other DNA
ggctcaaaatatgtatagaaggaaatccacagttcttttgatcaatcaatattgagctccttcatgtccagccatagtctaggtaatgttgatacaacagtgaacaagacaaaccaaatc

SEQ ID NO: 2429 - DNA, 120 bp, synthetic construct
  source 1..120: mol_type = other DNA
gattctaagtacagcaggagttaaaagaacagcgtttacaaagaggtagctgagcattatcaaactgaaaaccagcagtgacccatttaattcctggttgtattactgtcatcagcctgc

SEQ ID NO: 2430 - DNA, 120 bp, synthetic construct
  source 1..120: mol_type = other DNA
ggcccatgtgtggctgagatacaggactggctgcagggaggaggtatgaggggaccgagtctgagactggggtgagaggcaaggagcacccagttccagcgagggaagggaacatcctgc

SEQ ID NO: 2431 - DNA, 120 bp, synthetic construct
  source 1..120: mol_type = other DNA
aggatggggttcaggtagagggagcaaggaagtgggggggcagccgcagctctgggagcagtgggtgtggggtttgggctgttgttcacgtgtgagtggggaaggggaccctctgctgaa

SEQ ID NO: 2432 - DNA, 120 bp, synthetic construct
  source 1..120: mol_type = other DNA
aaattcctttctctggcctctccttccttacactcagaagtccagacccctaacctcctcctccctcatacccaagagtccagaccctagcaccttcctccctcagacccaggagtccag

SEQ ID NO: 2433 - DNA, 120 bp, synthetic construct
  source 1..120: mol_type = other DNA
attcctgttcttcagatccctagagacccaggaatctaggctccgatcttgcccttccctgtggaacccaaacttctgactctgtagttcgtttttccctaaaaggccccaaattgcaga

SEQ ID NO: 2434 - DNA, 120 bp, synthetic construct
  source 1..120: mol_type = other DNA
cattcaattgtggagaaaccagtggaagggctcaggcaggaggattacggtcacagctgcgcattaaatgtctcacagggacctctgctggggatggactagagggaaagagactggaaa

SEQ ID NO: 2435 - DNA, 120 bp, synthetic construct
  source 1..120: mol_type = other DNA
aatcaccgcccagtccccaggcagagagggttttggcacaggcccctcccaggctttcttatcccccaaaagtttgcctctaggagttaaaggactagaaagcagtggtggaaaagctga

SEQ ID NO: 2436 - DNA, 120 bp, synthetic construct
  source 1..120: mol_type = other DNA
cttcagacaaatgtcctggagcatttccccaatattttcttctacgtgtttcataggttcaggccttagactcacatctttaatccattttcatttgagttttgtgtatagtgacaggta

SEQ ID NO: 2437 - DNA, 120 bp, synthetic construct
  source 1..120: mol_type = other DNA
ttttctctgggattccgactcctcatcccgcacaggcatctggtaggacctgagggaagggtcccaacctcagacagggaacctggggaccctgtcccattccgtggctgacaccctccg

SEQ ID NO: 2438 - DNA, 120 bp, synthetic construct
  source 1..120: mol_type = other DNA
gcttcctgtccgtgagcacagctgtgtgttgcctgaagccagtgtcccccgcagcagacacgacagtgtctaagggcccgggtgaagctggtgtcccccacaacagacacgacaatgtct

SEQ ID NO: 2439 - DNA, 120 bp, synthetic construct
  source 1..120: mol_type = other DNA
tgtgggtgtgtgttgtgtgtgtgtgtgtgtgattgaaatattaaaggatgagatttagtttaaaagaatccatcaaggtcagatgaggtggctcactcctgtaatcccagcactttgggt

SEQ ID NO: 2440 - DNA, 120 bp, synthetic construct
  source 1..120: mol_type = other DNA
ggtgcacagctgattgtggtctcagtccccatctccagctctgatgtccggacttgctcaagcaggaagtcctgtttgttctgcacatcccacccaacctctccagtgccgaattccagg

SEQ ID NO: 2441 - DNA, 120 bp, synthetic construct
  source 1..120: mol_type = other DNA
gtgtcaggtacagcccccaacccccatgtcaggcacacccccactccttttgttgttgttgttgtttgtttttatttcttctaaaaaaaaagtgataaatgatgtgaagaacatgcaggt

SEQ ID NO: 2442 - DNA, 120 bp, synthetic construct
  source 1..120: mol_type = other DNA
ggattgggaatcctgggttggagccctgtcaatgtgtgtcgctggccaggtgtgctaggtcacattgtttaaccttcccgagctccagtttatttcatatagaaagaaaaagatgtgcac

SEQ ID NO: 2443 - DNA, 120 bp, synthetic construct
  source 1..120: mol_type = other DNA
ccctcacctcccggacggggcggctatatatctgattacttgctgacaataattaagcaaagtaggcatcataagttactttttacagctgaaccaacaaacttcagggaagtgatataa

SEQ ID NO: 2444 - DNA, 120 bp, synthetic construct
  source 1..120: mol_type = other DNA
tagcaatacagctctgttttgtttcaagaaaatttaagtgaggctgaaattagagcaaggtcagaggagtatgtttgttcaaagacatcttgcaagtgcgccttttcttctcctggaagt

SEQ ID NO: 2445 - DNA, 120 bp, synthetic construct
  source 1..120: mol_type = other DNA
gggcaagagtccacaacagtaaaggatggcttataggtggctagtacctttcatgaatgcgttgcctttacggtagcactccagggccttctgtggattgtgaatcttctcaaagagatc

SEQ ID NO: 2446 - DNA, 120 bp, synthetic construct
  source 1..120: mol_type = other DNA
ttcttctctctttttttctttattagtcttgctagtgcttccaggacattttctatgcctaaattacatatacaaaccaaaatgaggctataatatgcatactgtttaacaacctacatt

SEQ ID NO: 2447 - DNA, 120 bp, synthetic construct
  source 1..120: mol_type = other DNA
gagaaaagtacaatgagttttaacttctatttgatgggacatattgctgctttgaacagtccccaatggacattttgcaaaagagtctgagccaaacctgagccatcctttctccctgtc

SEQ ID NO: 2448 - DNA, 120 bp, synthetic construct
  source 1..120: mol_type = other DNA
gatccttagaaaaacagtattttagcatactataagcagtatttttagagtttcctttttcttgagaactaattttaggtcccagacattcaatagaagatctcttgttcagtgaaagtg

SEQ ID NO: 2449 - DNA, 120 bp, synthetic construct
  source 1..120: mol_type = other DNA
aaaattgtaattaacaacaggaagaactatctgggctgttctggatatagtccaggctgagtgtaagtatagtctgctggacttgagagttggacacccagacccatttttctggtctgg

SEQ ID NO: 2450 - DNA, 120 bp, synthetic construct
  source 1..120: mol_type = other DNA
caacgcttccatccagcagtccagtgttgatgagtttttatagacgtaacaactactcccaaatgtcattaagtcaaaaatgcaagctgaacaaatgtgcattaaaaaaacttggaatga

SEQ ID NO: 2451 - DNA, 120 bp, synthetic construct
  source 1..120: mol_type = other DNA
ggtggtggtgatggtggtggtggtggtggtgatagtagagccttcacattttaactacaatgatgtgcatttttctctaaaaccaggagaaaaattagtcaaaattatgtgtgggcatga

SEQ ID NO: 2452 - DNA, 120 bp, synthetic construct
  source 1..120: mol_type = other DNA
aaaaccatcatctttagttttgggcagtatcattaggatataagctagacttatcaccagatatcccagtaaaggaagtctttactgttggactcaaacacctatgccaggaatcctctc

SEQ ID NO: 2453 - DNA, 120 bp, synthetic construct
  source 1..120: mol_type = other DNA
ccatattgtgtcaagaggaaatttttcagtttgacataaaatcagtacattgagcttgtatacttgatagcttcccttgtcaaattctcttggaaatgtacagaaaacatctgacatatt

SEQ ID NO: 2454 - DNA, 120 bp, synthetic construct
  source 1..120: mol_type = other DNA
tcttattaccatattacttgattatttttgccacattactttctagaacagttgtgtcaatctgttttcttgttgggaaggtaaaatgcaaacattagatgtctagaacccaataaaaaa

SEQ ID NO: 2455 - DNA, 120 bp, synthetic construct
  source 1..120: mol_type = other DNA
agaaaatattaaaactaagttttgtggtaaagactaacacaggggcagtccagaggagactgatgttggtgagggtgagcaacatcacaaaccctacctggcattttctgagccattatt

SEQ ID NO: 2456 - DNA, 120 bp, synthetic construct
  source 1..120: mol_type = other DNA
aacaagataccttttaaaaatcagttctcacaaagtcccataattctaaggccaagctatcttttgcagtttccagctaggatcagcacagaccgggtcagttcctgctacacctacttc

SEQ ID NO: 2457 - DNA, 120 bp, synthetic construct
  source 1..120: mol_type = other DNA
tgtggatatatgcattacactacagaattacatgaagaatttactcaataattctctatattgaatgttttatattattcctctatattactctgccaaaaacaaaaacgaacaaaaagt

SEQ ID NO: 2458 - DNA, 120 bp, synthetic construct
  source 1..120: mol_type = other DNA
aaaactccgacattctagaaggcatgggcagttcacagatggccagcctctgccaaactgggggagaatactaacctcttcatattcttcacagccactgcctcttctccctccattctt

SEQ ID NO: 2459 - DNA, 120 bp, synthetic construct
  source 1..120: mol_type = other DNA
caaaatgctgatgaaagaaatcaaataaaatgtaaatgatagaaatatattccatgttcatggattgagaagctcaaaatagggaagatgtcaattattcccaagtttctgttttgtttt

SEQ ID NO: 2460 - DNA, 120 bp, synthetic construct
  source 1..120: mol_type = other DNA
tacaaaaacagttcttagaaagccagattagcccaatgctgtagtttatggacccctgatctagtatactgtaaaccaaaaataaaaccctaaggcccccaacagaccaaacagactctc

SEQ ID NO: 2461 - DNA, 120 bp, synthetic construct
  source 1..120: mol_type = other DNA
gtattatagagaatctgaaaatacacacacaaaaaaagaagatagaaataatgcctctatccacctccgttttttagagaaaaccactgttaatgtactggtttatctcatctaattctt

SEQ ID NO: 2462 - DNA, 120 bp, synthetic construct
  source 1..120: mol_type = other DNA
gggatttggagctttgaagttcatgggaaggattgaaatgtgatacatgttgatagtgactgtaaatgatacacagctaatgaaaatttccattgctggggtgttgaattaatagcactt

SEQ ID NO: 2463 - DNA, 120 bp, synthetic construct
  source 1..120: mol_type = other DNA
gtgattctataattttggttttctttctttatgatgtttgtcaggttaaggatcagctttgcatttactttacataacaaatgtggaagatgggaagatatctttcttcttctgttcttt

SEQ ID NO: 2464 - DNA, 120 bp, synthetic construct
  source 1..120: mol_type = other DNA
gcatgctgactactttgagtcttcagaatgattatacgataaaagtaaatcccttatttggtaaccccttgtatttattacaaacagccaaatatacttcctgatttagtgagatactga

SEQ ID NO: 2465 - DNA, 120 bp, synthetic construct
  source 1..120: mol_type = other DNA
aacagacacttctccagtgaaggtatacaaatggccaataagcacatacaaatttcttccgcatcttcatcattagggaaatgcaaatgaaaagcacagtgagctaccacttcaccccca

SEQ ID NO: 2466 - DNA, 120 bp, synthetic construct
  source 1..120: mol_type = other DNA
ctagtcacaggagccagtcacaaagaactatattgcatgattccatttataggaaatacccaggatcagcaggtctatagagatagaaagtcaattagtagttgcctggggctggagtga

SEQ ID NO: 2467 - DNA, 120 bp, synthetic construct
  source 1..120: mol_type = other DNA
aaaatctcaaaagcaggtgtgtttgttttcagtgtcctttcatctctctaggagttttgtcctagggttgctgtctcattgctcacactaccctcctctcctccatgacccatgaaacgt

SEQ ID NO: 2468 - DNA, 120 bp, synthetic construct
  source 1..120: mol_type = other DNA
agaatatgatttttcttagaaaagagtgctgaattatgttcagcactccaaagaacctggaatgggttaggaattgactatagtcccttgcttcttttagcttaaaacagaatttatgtt

SEQ ID NO: 2469 - DNA, 120 bp, synthetic construct
  source 1..120: mol_type = other DNA
aaaatgcaaagccttggccaactctcagaaaatattattctaattgctgagacaaattttatgctatgagctaattattgaaatattaagttgctaaaaccattgagtagagagaaatga

SEQ ID NO: 2470 - DNA, 120 bp, synthetic construct
  source 1..120: mol_type = other DNA
agatgagactgccaccaacaatccctcactaaaagcaattcttaaggatgttcttcgggcagaagaaaaggcctaatatgtaagaggcaatcataaccaaagaaagaggtagatatgtgg

SEQ ID NO: 2471 - DNA, 120 bp, synthetic construct
  source 1..120: mol_type = other DNA
ctttaaaacacaagtctgacttttagatgcttatatttcagagcactttccaaacaataaaaatcatagcacctttcattttaggggggaaaaaagcctgtctggcacacctgtcaggtg

SEQ ID NO: 2472 - DNA, 120 bp, synthetic construct
  source 1..120: mol_type = other DNA
aacatagcctgggtggcttaaaaaaaaacaaaaaaaaaggtaagggctatattttgctgactattgtatcttcaaggcaaatagtaggcacataataaatatttatgggcttgaacaatt

SEQ ID NO: 2473 - DNA, 120 bp, synthetic construct
  source 1..120: mol_type = other DNA
aaataaacctgacttactctactgggatcttattttctttgtcacttgcagatttccatgggtttggaacaattgggttgaacatgccccggagtcatcccatatgaatgaaacacgcca

SEQ ID NO: 2474 - DNA, 120 bp, synthetic construct
  source 1..120: mol_type = other DNA
ggttttctgcctgttctttgaggacagtaatgaagacagacagatgtggattgaaattccagggccagcacttctgttctagctgtgagaacgtaataactgtcttacttctctaagtct

SEQ ID NO: 2475 - DNA, 120 bp, synthetic construct
  source 1..120: mol_type = other DNA
tttatacatatccactggatcctctcagaactgtatgatgtgagatttatacttatttaatagaaggggaacctgagcctcagtgacattaaccaactcccccaagggccacaaaggtag

SEQ ID NO: 2476 - DNA, 120 bp, synthetic construct
  source 1..120: mol_type = other DNA
cttagtgacaatttgacttcctccttttccatttggatgcccattatttctcttgcctaaatgctctggctaagactttcagttctgtgttggaaaagagtggtgagagtgggcatcctt

SEQ ID NO: 2477 - DNA, 120 bp, synthetic construct
  source 1..120: mol_type = other DNA
atcaattttgcagatttttttttagctcttattttgcttgacaaatcaaagcacaaactttagtccctgttgttggtcctccctcaactcattggaccattaagcttttactatatggtg

SEQ ID NO: 2478 - DNA, 120 bp, synthetic construct
  source 1..120: mol_type = other DNA
ctggctacaaatatgtctacacccaagaagaaggtataatggagataaaaaaaattcccatatcaattagcatattatatctaggaataaacttagcaaaatgattctagactcgtgtgg

SEQ ID NO: 2479 - DNA, 120 bp, synthetic construct
  source 1..120: mol_type = other DNA
cacttagcatgatgttctccaagttctttgatgttgtcacaaatggcaggatttcctttgtttgaaaggctaaatagtattgtattatatctgtctgtctgtctgtctgtctgtgtatct

SEQ ID NO: 2480 - DNA, 120 bp, synthetic construct
  source 1..120: mol_type = other DNA
caaaagcagttaccatctggcattttacagaaaaagtttactgatccctgatctaggtcaacgatacttcagagcctgttctgaccactttcctgtgaggagactttgtggtatggtctg

SEQ ID NO: 2481 - DNA, 120 bp, synthetic construct
  source 1..120: mol_type = other DNA
acaaacactgcggaaggccgcagggtcctctgcaaagaaactacaagaaagagatttgatgtggctgcaaatcaaattagtggcctggaaaaaaagatgtaatcaaagtgaatgccaata

SEQ ID NO: 2482 - DNA, 120 bp, synthetic construct
  source 1..120: mol_type = other DNA
gccaagaatggtcaggctgttcttggccctttgttcttccactttaattttagaactggccggttaaatttcagaagcagaaacctatgagattttgattgggattgaattgaatttgta

SEQ ID NO: 2483 - DNA, 120 bp, synthetic construct
  source 1..120: mol_type = other DNA
caccaaaattgcattaatctgtacatgatgggtacatgtgattgatctctgttgtttgcattctacatataattgcattttggtaaacagtagctacttttcaatgctaaaagctcagcc

SEQ ID NO: 2484 - DNA, 120 bp, synthetic construct
  source 1..120: mol_type = other DNA
ttcctacataggattgcatgcaagtgatcccaattgacacaatatggaagacagtggagaaatatctaggctgcccataatttatcaatcttctctctgccctcttctctgtagtggaca

SEQ ID NO: 2485 - DNA, 120 bp, synthetic construct
  source 1..120: mol_type = other DNA
ctattcagccatcttggctcctcccccctccttaattttctaaaggtccaataactggtatgacaggactgttttaacaactaatatcaggtccatcacttcacttgcttccttttgtcc

SEQ ID NO: 2486 - DNA, 120 bp, synthetic construct
  source 1..120: mol_type = other DNA
tttttttggatattaggcttcctgaagtccaagaaagacatattaggcttatttgttatattagaattataccggaagcattgtaaattgtgaggtggtatttaactttctttgggtttt

SEQ ID NO: 2487 - DNA, 120 bp, synthetic construct
  source 1..120: mol_type = other DNA
gtaacttcatgtgggtggaaaaagagacattacaatggagggtagacttaggaaagatttagaatagagccttttccccccgaacaataaagcagtgacataaagacatggaaaataata

SEQ ID NO: 2488 - DNA, 120 bp, synthetic construct
  source 1..120: mol_type = other DNA
ggatgaattcggtttgcagctattcagcctgaagagaagagataaaggcagttgtttataatccaaacctaagaatactggaacctttccatttttgagcaagcatgcttactccaacga

SEQ ID NO: 2489 - DNA, 120 bp, synthetic construct
  source 1..120: mol_type = other DNA
gcttttccctacagagaattctaaggatcaaatgtagaaggaacaaagaaatagaaaatcaccacttggcgtactccatccatagtaataatcacaaaaggcaagaatcatcaatggatg

SEQ ID NO: 2490 - DNA, 120 bp, synthetic construct
  source 1..120: mol_type = other DNA
atgaaagatccagtgaagtctctcagctttactcttagggataataatgttaaggctaaaagctctgagaagtcctgtgtccagccctgaattctgatccacggtatttgcttgatggta

SEQ ID NO: 2491 - DNA, 120 bp, synthetic construct
  source 1..120: mol_type = other DNA
atataaacctgctcacataccacaaatgacaatagttttgagggtctggggttctcttcagtaatgtattctttgagatggaatcttgctcttgtccaggctggagtccaatggtgcaat

SEQ ID NO: 2492 - DNA, 120 bp, synthetic construct
  source 1..120: mol_type = other DNA
cttcaccatcttagctacggcagcccattcccctgagcctcctggcctgggcaacagtggctcgcacggccagcccaccgtgccctccagggtcagtagcgtctattctggcggccagca

SEQ ID NO: 2493 - DNA, 120 bp, synthetic construct
  source 1..120: mol_type = other DNA
atgtggagaagctgggagaggtctgggtggggttcccagctgtgcacctcataacagccaactgtatgatgtgtgcacttctaaacttccagaagtttgcttaaaaacacacgcacacca

SEQ ID NO: 2494 - DNA, 120 bp, synthetic construct
  source 1..120: mol_type = other DNA
gcctgtgcatgacaccaccgcccatcctcatcctgagccagcctctcaggatcaggacttggtttggcggcgttaaccttagagcctgcaaggggcttcctcctggtgggtctggccgta

SEQ ID NO: 2495 - DNA, 120 bp, synthetic construct
  source 1..120: mol_type = other DNA
aggccacacaagttctcacatgctcagccccataagccgtgctggacaggcatggccatttacacccaggatcctgctgagaacagcaaccaactcaccaccctcgcatcatgatccttg

SEQ ID NO: 2496 - DNA, 120 bp, synthetic construct
  source 1..120: mol_type = other DNA
ctccaccaccatcacatcaatatcatcagtatcctagtcacacagtctgaaagctgacgccatcaaagaaccaccatagaagcattagcttcactcttcttaggatataagaaaaaagtg

SEQ ID NO: 2497 - DNA, 120 bp, synthetic construct
  source 1..120: mol_type = other DNA
acacacagctgcagaagaaacatacacacacacacatactgagctgaaggaatacacacatacactgagctgcagaagaaacatacatacacacactgaactgaagaaatacacacacac

SEQ ID NO: 2498 - DNA, 120 bp, synthetic construct
  source 1..120: mol_type = other DNA
agaaatggtagctgttgtttctattactgttattgaaataatctctcaacaaatgccttgagctatgtgtctcaacactaaacccctctcagctctaaggaaggtgacatactgcagggc

SEQ ID NO: 2499 - DNA, 120 bp, synthetic construct
  source 1..120: mol_type = other DNA
ttcacatggggccacatgtctaataaaggtgactgaatcccaaaattatattggtaacatggaaattcctgataggggaagaatattcccagaagtgtgaccagttagggccaaaataaa

SEQ ID NO: 2500 - DNA, 120 bp, synthetic construct
  source 1..120: mol_type = other DNA
gggaccttgcctcaccttggcagacattcttaagtgtcatttccccgaaacacttagttcctgttctgctagacctggctttttgaagtcttgaaatgatagtcatcaacaaaattacaa

SEQ ID NO: 2501 - DNA, 120 bp, synthetic construct
  source 1..120: mol_type = other DNA
gtataataataaaagaaaaaaaaaaactaccagtgaggagggaggcaggcaggaaggatcgggtcaagcaagcacagttgcaataactgtagcacacttgcaataaaggactcagctgat

SEQ ID NO: 2502 - DNA, 120 bp, synthetic construct
  source 1..120: mol_type = other DNA
aaaaaaacacaaaaaaaaaacactggattttctccaccctgagaaatgaggtcctaaggaagttagagcctaaatggtgtggtaaggtagaggtggtgattgcttccagagtcctgtcct

SEQ ID NO: 2503 - DNA, 120 bp, synthetic construct
  source 1..120: mol_type = other DNA
tctgcccagtggttctcaaactctttggtttcaggaccccattacactcttaaaatttatttcaggccccagcagcttttgattatatggttaacagttatggatttttaccatattcac

SEQ ID NO: 2504 - DNA, 120 bp, synthetic construct
  source 1..120: mol_type = other DNA
tgatgccatattaatcttattttctcccaagaatactggccatttaaccctaactacctggtaacttcctatgtctcaaatttaactaaaatgcccaagaaaacagtgcttctgctatca

SEQ ID NO: 2505 - DNA, 120 bp, synthetic construct
  source 1..120: mol_type = other DNA
atggaccactttctagggaacagtaagagcctggaaaataactaatgctaatttaggaagacagatatttaacacatggccctctcatctgctcttccttgccatatataaagttacaga

SEQ ID NO: 2506 - DNA, 120 bp, synthetic construct
  source 1..120: mol_type = other DNA
aaaaaaaaaaaaaaaaaaaaaggtacaaaatgggccagatgccgtggctcacatctgcaatttccaacactttggaaacactttgggaggctgaggcaggtggatcacctgagcccaaga

SEQ ID NO: 2507 - DNA, 120 bp, synthetic construct
  source 1..120: mol_type = other DNA
tataatagtataataaaaaataaaaattaaaaaaaaatctgtttttggccactctctgagcctgcattatttttataaccttaaggtggtatataagcttctgtaccttactgaggggtt

SEQ ID NO: 2508 - DNA, 120 bp, synthetic construct
  source 1..120: mol_type = other DNA
tattctgagcacctgtttcctggaactcagcactgttgcagctgcttgagggctgtgtcagacctgacatcaagaaatatcttctcatctaagactcaccattgtgtggaaagaaagaag

SEQ ID NO: 2509 - DNA, 120 bp, synthetic construct
  source 1..120: mol_type = other DNA
agcctcatttgttctctagtttctaagtgcagcttataggggaattgaaggaagaaaagtactaatacaggaaggaaaaaatcaatctgatggacacgaatacagccaccaaactagccg

SEQ ID NO: 2510 - DNA, 120 bp, synthetic construct
  source 1..120: mol_type = other DNA
aatgtagaatctacgaaagaacacaaagacaacaagtacccccaccatccagaaataaaccctatcaacagttaagtatccaaagtctatggcaccaacccatggcccaggatgaattct

SEQ ID NO: 2511 - DNA, 120 bp, synthetic construct
  source 1..120: mol_type = other DNA
tactgaagctatattaacagcagtcacttttagtgggtacttcatgcctggaattatggggaaaaaattacaaggcatactaaaaggcaaaaaaataaaaaaaaatacaatttgtagcaa

SEQ ID NO: 2512 - DNA, 120 bp, synthetic construct
  source 1..120: mol_type = other DNA
ccttattacaccattggtaatattgcataacaagaactcattaaggttagctctctcctccccctctgactatttgctcctcaatggtcagagccatatattgcccatataggcacttaa

SEQ ID NO: 2513 - DNA, 120 bp, synthetic construct
  source 1..120: mol_type = other DNA
tgccatccccatcaagctaccaatgactttctttttcaaatacaagacatggcacaagttctgtcttaccacaccaaagtaaacaaactgacaaaacaacaacaaaaactcgctattacc

SEQ ID NO: 2514 - DNA, 120 bp, synthetic construct
  source 1..120: mol_type = other DNA
tcccatccataaaaataaataagtaattttctgtaaattcaaggcagatgcaaaaaaaaaaaaaaaagtggagaaggaagaagaccaacacttattgataggactttccaggtgctggat

SEQ ID NO: 2515 - DNA, 120 bp, synthetic construct
  source 1..120: mol_type = other DNA
aaaatgactttgacctcaaattctgaaactgacagggtgactttgctcagtgaataaatatgatacagaaccttttagagggaatcgaatatgccgaatacccaagtgatctctctgtct

SEQ ID NO: 2516 - DNA, 120 bp, synthetic construct
  source 1..120: mol_type = other DNA
agactcctcattataaaccaggtgaaaactcagccattatttaaccttcctccccaaccctgattttgaaaagccaaggctctactctcttccccaagaaaatggacatgtgatcatgta

SEQ ID NO: 2517 - DNA, 120 bp, synthetic construct
  source 1..120: mol_type = other DNA
tccgtccacattccttttcctccccaccccagaggggtaaaaataccttaaaaatagcctgcttccaaagcatgttatgtttaagtgtacactccagcagtattggagatagttaattac

SEQ ID NO: 2518 - DNA, 120 bp, synthetic construct
  source 1..120: mol_type = other DNA
tgatgggtgaaataaagcctagtaaaagagccagggctggcagttcgttcatttattcattcagcatatatttaataagcatgtgttatgaccagatgtcattctaggcaccagagataa

SEQ ID NO: 2519 - DNA, 120 bp, synthetic construct
  source 1..120: mol_type = other DNA
gaatcagtgtattttttccaagcataggtatagtcttttgacactgattacttttaatggccatccattctcagtggttctttgtgccactcagggtcactcagtgtcctccccatagat

SEQ ID NO: 2520 - DNA, 120 bp, synthetic construct
  source 1..120: mol_type = other DNA
acctgataatgtcataatttcttcatacctgagggataattttgcttaatatagaattctaggttggtagtttttctttgtttttcattttatacacctgaatagcattctacttcctcc

SEQ ID NO: 2521 - DNA, 120 bp, synthetic construct
  source 1..120: mol_type = other DNA
ggtgaattcctttatgacctggaaagggtcatatgaccttggtttctaattatgactcaaaaacaataaagttcaacaacagattttgttggtgaggctgtggaggaaacaagcactttc

SEQ ID NO: 2522 - DNA, 120 bp, synthetic construct
  source 1..120: mol_type = other DNA
ttatcagaaccgcctctgactagacagggttatcagaaccgcctctgactagacagggttatcagaaccgcctctgactagacagggttatcagaaccgcctctgactagacagggttat

SEQ ID NO: 2523 - DNA, 120 bp, synthetic construct
  source 1..120: mol_type = other DNA
aaccgcctttgactagacatggttaacagaactgcctttgactagacagggttaacagaattgcctttaactagacagggttatcagaactttgctaaatcggccgggaactgttagccc

SEQ ID NO: 2524 - DNA, 120 bp, synthetic construct
  source 1..120: mol_type = other DNA
gtaatttgaatgacagcagatttcccatcagaaactgtagtggtaagaagaaagtggtataacatttttcaagtgttaaaaaaaaaaatccagccaggcacagtggctcacacctgtaac

SEQ ID NO: 2525 - DNA, 120 bp, synthetic construct
  source 1..120: mol_type = other DNA
tcggccatcttggctcctccctcctattataatctttcatttgtttcatcaatctagacatttataatgaatacagtataaaaagtagctctactggccaggcacagtggctcacgcctg

SEQ ID NO: 2526 - DNA, 120 bp, synthetic construct
  source 1..120: mol_type = other DNA
gagctgttcctattcggccatcttggctcctcctccctctctagatactagttctttgtgagatagtggtttgctgtttttttttccactttgcaacttgtcatctcatcctcttaacat

SEQ ID NO: 2527 - DNA, 120 bp, synthetic construct
  source 1..120: mol_type = other DNA
tacctggatttgaggattaagaacttccaaggggacatgacacaaaagctgaagcctaaaggtgagtacaagttatctatgtgaaatggggaagacgaagtgtactatggccaagaaaac

SEQ ID NO: 2528 - DNA, 120 bp, synthetic construct
  source 1..120: mol_type = other DNA
ggttcttctaaagtccttctgtcatctaatttttgtcttgttccaccaagtttgcatatattctcactgtcttaatttgagcaatcaatccgtatttggaaagatgtcgttttgtcctaa

SEQ ID NO: 2529 - DNA, 120 bp, synthetic construct
  source 1..120: mol_type = other DNA
ttggtcctgttggaggcaaggttgcttcatgggaaggggagagccactcagtggacatcaactatcatccccatgtgtttcattataacggcaaccttctttgttcattgacatcttctc

SEQ ID NO: 2530 - DNA, 120 bp, synthetic construct
  source 1..120: mol_type = other DNA
taccaggctcaggatgtcaacttttaccctttaggccggtggtttgcaatggtgtaccaggtatatggggtgctaccaactctttcaggtgtaatataactttttttattttctgcaaca

SEQ ID NO: 2531 - DNA, 120 bp, synthetic construct
  source 1..120: mol_type = other DNA
agggagagccaatttttaatgttaaagagaaaaattacccaaacacttgttaaagatgataaggcagactttattcaagggggtccatggccataggtataggagcactgcaacagggcc

SEQ ID NO: 2532 - DNA, 120 bp, synthetic construct
  source 1..120: mol_type = other DNA
agcaaaacagccttcttgctgatttggagaaagtctcagtgatctgtatagaagatcataccagccataacattcccttaagccaaatgctattctagggcaaggccctagctcttcaat

SEQ ID NO: 2533 - DNA, 120 bp, synthetic construct
  source 1..120: mol_type = other DNA
aggtgaggttcatttgggcgatctaaaacatgttcttttgttttgggggggagcttaagaagcctaaacaaacaaaaaataaattaagaattactaatgtcattgcttctggccttttgg

SEQ ID NO: 2534 - DNA, 120 bp, synthetic construct
  source 1..120: mol_type = other DNA
aaattagatgctacttcaagccattacctggggaaagtaattagactcctccgaaaataacagcagttctgctgccactcctggagcctttcttctggaattatctggccgtcctcccgc

SEQ ID NO: 2535 - DNA, 120 bp, synthetic construct
  source 1..120: mol_type = other DNA
gtcccctaactagtctgacttctctccacccttcagagtcttcttttgtttctttaatttacagtgtctgggtttttagttgtacttagaagggggaatagagaaaagcacatctagtcc

SEQ ID NO: 2536 - DNA, 120 bp, synthetic construct
  source 1..120: mol_type = other DNA
cagtgacagccagcacccaagggctgctgttttcttcctcccgacttcttcctttttctttttttttttaattaccagaggaacacgtgcttagggtaaagcatggcagatataaaacat

SEQ ID NO: 2537 - DNA, 120 bp, synthetic construct
  source 1..120: mol_type = other DNA
agatcaaggctacagtgagttgagattgtgccagtggactgcactccagcctgggcaacagaacaagacaccatctcccccaaaacccaaaaaaagacctggcattcataaatgaaacaa

SEQ ID NO: 2538 - DNA, 120 bp, synthetic construct
  source 1..120: mol_type = other DNA
ggactgttttctttttatggggtggaagtagaaggcccaagaggcaaaaggtgtgtaacttgcccttttataagggcattaattcctctcctgagggttgggcccttatggtcctattac

SEQ ID NO: 2539 - DNA, 120 bp, synthetic construct
  source 1..120: mol_type = other DNA
tggctgaatttcatcttaaaagttgtctgaggaagattggacctctaaattggtaattccttatatttttccttgcagcaaattaggaaaatcagaatacttgtgcaagcttaatgtgtc

SEQ ID NO: 2540 - DNA, 120 bp, synthetic construct
  source 1..120: mol_type = other DNA
cgttgtctcatggacatgatcatggattggaagaatcaacaccattaagatgaccatactgcccaaagcagtttagagatttaacactatttctatcaaagtaccaagatcactttttac

SEQ ID NO: 2541 - DNA, 120 bp, synthetic construct
  source 1..120: mol_type = other DNA
acgtagaaaataaaaggagaataaaacacataggagaataatatgagaaaagcaggcttactgcagccatattacacacttctgatgacattgttttcaagaggtaggcaaagatcccag

SEQ ID NO: 2542 - DNA, 120 bp, synthetic construct
  source 1..120: mol_type = other DNA
taatctgggtcatgcatttgttttcatatctacaaaaacattggctaactgaagtcaccataattttctcctaactttttaatggccttcaagaccttattgtgtgcagaaaagcttatt

SEQ ID NO: 2543 - DNA, 120 bp, synthetic construct
  source 1..120: mol_type = other DNA
acacattagagacctactaaataagcaactctgggggtgcagcccagcaatttgtgttttaacaagccctcaaggacattgtgatgcatgctaaagtttgagaaccatttataggataga

SEQ ID NO: 2544 - DNA, 120 bp, synthetic construct
  source 1..120: mol_type = other DNA
caggtagattcataaagggggattactgggccaaagggtatataacttgtaatttaatttctctaaacctcagatctctctcatctactgaagagggactaataacatctccccaaaagt

SEQ ID NO: 2545 - DNA, 120 bp, synthetic construct
  source 1..120: mol_type = other DNA
tctggtggagttattttctgagtaattagaccaagaggtgggacaattccctgaagtaagctaccctataattggatacccagttatatctgcagtcatcagcttgcattcagtgagcat

SEQ ID NO: 2546 - DNA, 120 bp, synthetic construct
  source 1..120: mol_type = other DNA
gtactggttgtgtaacacattactaatgaaaattgttaatcagaggatataaagataaggttgggaggtgacatgaaaaggttggcaatttatttccacaccaaaactccccccaaaaat

SEQ ID NO: 2547 - DNA, 120 bp, synthetic construct
  source 1..120: mol_type = other DNA
agcttcccaaattctctttcaattatgatctgggcccttgatttttcttattgctggtgaggcctggttacaaaggatttgtccgagaacatcaagctgagacttcttattgagttcgtt

SEQ ID NO: 2548 - DNA, 120 bp, synthetic construct
  source 1..120: mol_type = other DNA
gtgtatgaccccacaaagaatttggaacaggtgccagcccaattgtgactgcctgacttcttgtccttacactgggagttgttagcatgaaaaaacaaaatgtcatggcattttctctaa

SEQ ID NO: 2549 - DNA, 120 bp, synthetic construct
  source 1..120: mol_type = other DNA
agcacaggtctcttaagaaggatcctccaaggatcaagcacacacaattgcacttatgtgttcagtggggagattctcaaggcagagtaaacaagaaataggtaaagttagtttgactga

SEQ ID NO: 2550 - DNA, 120 bp, synthetic construct
  source 1..120: mol_type = other DNA
aacaaatttcatcttgtatccaataggtgtaaaagtgcacaaagagtagagcagtagccagccacacaaaatacttgctatagtcaccctgttgtgctatctattttcagatttctccac

SEQ ID NO: 2551 - DNA, 120 bp, synthetic construct
  source 1..120: mol_type = other DNA
gtttctttgcagagaagatatattcattctctatgacagttttattctcccataggagttccgcccaaacaaaagataaacgcaaataagtgcacagcctgcatcacagggaaggtgtgc

SEQ ID NO: 2552 - DNA, 120 bp, synthetic construct
  source 1..120: mol_type = other DNA
tcctagtctcggtggtgtttacattttggcatgaaccactttgcaccttaggagtaaagcctacttgatcattaacatgctttttaaaaactacatgtatacactaataagtgtttggag

SEQ ID NO: 2553 - DNA, 120 bp, synthetic construct
  source 1..120: mol_type = other DNA
tccaaaaggtaaataacttgtccaagggtcatatgactactgagagatcctcgtgtaactttgtcactcaattgcatttgacagtttccttcctgaaacacttagttcatttgattctgg

SEQ ID NO: 2554 - DNA, 120 bp, synthetic construct
  source 1..120: mol_type = other DNA
tggctgttatcaagttatcataatacttagcacatgacaggtaagtactccaaaggctcaaaacttgaaaaacctatcagaaaataaaagtctccctctccctctccctctccctctccc

SEQ ID NO: 2555 - DNA, 120 bp, synthetic construct
  source 1..120: mol_type = other DNA
tccagttattttagtgatgtgcattcttccaagcctagttcagagctgtgtcctccataaaatctttcttggctgtcttttcctgtagtagtttcctggcacctgaatctccatactgaa

SEQ ID NO: 2556 - DNA, 120 bp, synthetic construct
  source 1..120: mol_type = other DNA
aaaatgtgaggcagaaagctaactgtaattaaagggtaatgaaaagtctattgtgaaatgattattatgtacttgatgggattggcaagatcactttgcataagctacctatccttccca

SEQ ID NO: 2557 - DNA, 120 bp, synthetic construct
  source 1..120: mol_type = other DNA
cagactccgtctgcaatcccggcacctcgggaggccgaggctccatatatcctctttagtgagatatctgttaacatcttttgcctattttttaattgtattgtttgtttcagaattcta

SEQ ID NO: 2558 - DNA, 120 bp, synthetic construct
  source 1..120: mol_type = other DNA
gtgtgtgttcttgttgctgtgtagagaagtgtggagtagattagtaccaaaaacaaagtagggaggagagaaggtggcacagcctcactctgaaagcctggggattttcctgtcaggatg

SEQ ID NO: 2559 - DNA, 120 bp, synthetic construct
  source 1..120: mol_type = other DNA
cgtttgcagcacgctgcttctctcagagaccgtgcaggaattttccttctcctggtctgcgtgggccggagcatatggctggcttgagtgatgctgatgagtttgcttttccttacagac

SEQ ID NO: 2560 - DNA, 120 bp, synthetic construct
  source 1..120: mol_type = other DNA
ttgctgaatgagttgggaagtgttgcttccttctctgttttctgaaagagtctgtgtgtaggttgtattgtattttttctttaaatctttgctggaattcatgcatgaagactacagggc

SEQ ID NO: 2561 - DNA, 120 bp, synthetic construct
  source 1..120: mol_type = other DNA
gacagctcagcagggtggccagtgccactgatccggcccctgcacagggagaactgctccgcccaccatgcaggccctgtgaggtcaggatgagtgcagatgccttgtgggcccaggtct

SEQ ID NO: 2562 - DNA, 120 bp, synthetic construct
  source 1..120: mol_type = other DNA
ttgggttccttgggatccagacatcaccctcagccttttcctgagaggcccagctccagcccgtgtgccatatcccaaagctcccctccctgagccacctgccaggcactcacttcattc

SEQ ID NO: 2563 - DNA, 120 bp, synthetic construct
  source 1..120: mol_type = other DNA
tgggttctggaaagcctgggcttcctctctagggttctggaaagtccgggcttccccgtctcgggttctggggaagtccgggcttcccgtctcaggttctggaaagtccgggcttcctgt

SEQ ID NO: 2564 - DNA, 120 bp, synthetic construct
  source 1..120: mol_type = other DNA
ctctcatcagagaaggatacacagagggggaagttaccgcccagctaccactcccttcttaacacagcaagttccccatacatgctgccaggaggtcatgaaaataaatccatagcatta

SEQ ID NO: 2565 - DNA, 120 bp, synthetic construct
  source 1..120: mol_type = other DNA
ggcggggatgggatgcgagtccactcacaaagtgagaaaccatggttcagctcaatcagggctcagaatttatgttgaacaccagcagaagcatatttttaacacttaaggaaaacacga

SEQ ID NO: 2566 - DNA, 120 bp, synthetic construct
  source 1..120: mol_type = other DNA
cggagctgttcctatttggccatcttggctcctccccaccgacctagaaggattttccacaagtatttcagtttgcttgaattctactccacaactgaatttccaaaacattattattaa

SEQ ID NO: 2567 - DNA, 120 bp, synthetic construct
  source 1..120: mol_type = other DNA
tttttggtatattcacaaggctgtggatccattactacaatcaattttaaaacatttttttcaccacctaaggaaactaaccatcagccagtcattccccatccccacctctccccagcc

SEQ ID NO: 2568 - DNA, 120 bp, synthetic construct
  source 1..120: mol_type = other DNA
tctttgttcaggacatcaccacagtcctttggataaccacactatcttttctcctaactggtgtcattagttcaggtcttatcctactccaattcagtctccagaataccatgtttttcc

SEQ ID NO: 2569 - DNA, 120 bp, synthetic construct
  source 1..120: mol_type = other DNA
actatctgctgaaattttacctcaatgaagatgaagattttctattacttttactcttctacctcgagcacttagcatattaccttgcgcaaagtgggtaatcaatacatatttgttaaa

SEQ ID NO: 2570 - DNA, 120 bp, synthetic construct
  source 1..120: mol_type = other DNA
attaaatagggaatcctttccccattgcttgtttttctctttccccattgcttgtttttctcattgattgttttaaaaaatttcttaaagcatgcaacaaaccagggtagattcagacca

SEQ ID NO: 2571 - DNA, 120 bp, synthetic construct
  source 1..120: mol_type = other DNA
ggctccccccaccgacatctttcaaaacttgtaaataatattgtcctttgagtgttgaaccatgaagtcgtcccagagtgagggatgtcctgattgatactagaaagcattttacttata

SEQ ID NO: 2572 - DNA, 120 bp, synthetic construct
  source 1..120: mol_type = other DNA
gatccactgtcatatccaaaaagaaacagaagtttgcacttcaagagtagttcattaggaaacagctctaaagtcctactataaatcaaacttagaatacaaggctggatatgatcttag

SEQ ID NO: 2573 - DNA, 120 bp, synthetic construct
  source 1..120: mol_type = other DNA
ggttaggggagagggagagggagagggagagggagcgagaaagctatttctaggttggaaacaatgtcatgatttaatttccctgtcatattaagcaacagctttgtgaatatacatatt

SEQ ID NO: 2574 - DNA, 120 bp, synthetic construct
  source 1..120: mol_type = other DNA
agggatgtagatagtcaaaagaagatgtaaacctaacctcatgcatctgtgaatctccccatctaaaaagacacagccttgtaaagaagcttgtgtgaaagtgctaacgacagacatgcc

SEQ ID NO: 2575 - DNA, 120 bp, synthetic construct
  source 1..120: mol_type = other DNA
cttatcttcagtccaccagttgacaaactttggcctggcctgtctcttttctatcgtttatcatcagggcagataatcttttaagtttcaggtgttacactttcctgggatatactcctc

SEQ ID NO: 2576 - DNA, 120 bp, synthetic construct
  source 1..120: mol_type = other DNA
tttttatttgtttttatgttcctctgtgaaacagtatttgtttgtatcccagtggctagcacaaagcctggaacaataggataatcatatttcttgaaggacccaatgagaaaggaaaaa

SEQ ID NO: 2577 - DNA, 120 bp, synthetic construct
  source 1..120: mol_type = other DNA
ttttaatgtgatggggatgagaaggataagtcaagtctgcaactattataatatcttaaccaacactcatcatcgtcattaattggctacttatggctagcatttactgagcacttgtca

SEQ ID NO: 2578 - DNA, 120 bp, synthetic construct
  source 1..120: mol_type = other DNA
tgaaaaataggtgttacagaattgatgactacaatgtatctcccatccttgaagctcacaccctcccagctaggggtagccatgtgactgagttttgactaatgggatataaaaggaagt

SEQ ID NO: 2579 - DNA, 120 bp, synthetic construct
  source 1..120: mol_type = other DNA
gttgtgtctctgagctcatggctgattttatttcttctagtcttgggaagttttttattgaaatattttttatgtcataacaatgaaattgcattaattcacaacatggagggacaagct

SEQ ID NO: 2580 - DNA, 120 bp, synthetic construct
  source 1..120: mol_type = other DNA
gtagcatattttaaaatgcccccatgccgcctgcccccctctctctttctgtgtgtgtgtgtgtgtgtgtgtgtatgtttattcactcatgtttttttgtagtagccaatacagtaattt

SEQ ID NO: 2581 - DNA, 120 bp, synthetic construct
  source 1..120: mol_type = other DNA
acttcattgtcttattttaagaaattgcacagccacttaatacctttggcaactaccaccctgatcagtcagcagccatcaatattgaggcaagaccctgcaccagcaaaaaaggttaca

SEQ ID NO: 2582 - DNA, 120 bp, synthetic construct
  source 1..120: mol_type = other DNA
cttcccaactggtagtaccaatgtaccctcccactattcaatgtattttctttttttttttctttttttttttttttacatgcagtatgatttattttatataatgttcaaaagcttgca

SEQ ID NO: 2583 - DNA, 120 bp, synthetic construct
  source 1..120: mol_type = other DNA
catctgagagtaaatcagtcattcagaaaatgaggttttcatgggattggatcctagggacttggtcctcttcttatagctgcattatttttaaaaatctcaaaaatcaataaaaaaata

SEQ ID NO: 2584 - DNA, 120 bp, synthetic construct
  source 1..120: mol_type = other DNA
aaatagtctttgccctggaaaaaaaaaatgttccaggaaaaggtctttgttttagtacagaattgcttcatggttatggggaaagcttgcaggagataatgtaatatgccattgtggtgg

SEQ ID NO: 2585 - DNA, 120 bp, synthetic construct
  source 1..120: mol_type = other DNA
atttttagccactcagttgccagaacctgaaaagggtctgtatcagcattttttcacttattatcacctgcattgcttcctttggagggcataactgttggctctgagagttttttagtc

SEQ ID NO: 2586 - DNA, 120 bp, synthetic construct
  source 1..120: mol_type = other DNA
tctacaagctacaaaatttgcagatgaaacttaaaaattaattttgggagcaatcctttttggagatcaatccaaaatgacagctaagcatctctggaattgaaatttagtccagtggga

SEQ ID NO: 2587 - DNA, 120 bp, synthetic construct
  source 1..120: mol_type = other DNA
atttgtgtttttttctggtttcttaatgtggaagcttaaattactggttttagaccttttctaataaaagcatttaatgctatgcatttatctgtaagcagtactttagctgcatctcat

SEQ ID NO: 2588 - DNA, 120 bp, synthetic construct
  source 1..120: mol_type = other DNA
aaggggacacaaaaaatggaaagatattccacattcatgaattggaagaatcaatactgctaaaatgtccatgccacccaaagcagtctacagatttaatggaatccctatcaaaatacc

SEQ ID NO: 2589 - DNA, 120 bp, synthetic construct
  source 1..120: mol_type = other DNA
tactaaagtgtgggaggaaatatgggtatcaccttcctggcgatttcccatggctgggacctcttaggaagcagtctccctagagtatttcaaaataattatgaaatacctacttcctgt

SEQ ID NO: 2590 - DNA, 120 bp, synthetic construct
  source 1..120: mol_type = other DNA
agggaaaaagggaaggggaggggagaagggaagggaaggaaagggcagggaagaaaggaagggaaggaaagggaaggggaggggaggaagggaagggaagtagggaggagaagtaaaggg

SEQ ID NO: 2591 - DNA, 120 bp, synthetic construct
  source 1..120: mol_type = other DNA
caggaccagtctacaaataaaaatgaccagcgagcatcatgcccacagagcactgacaataatctcctgtgctccaaattattctagtctatattatagacgatccaataagcctgtgtg

SEQ ID NO: 2592 - DNA, 120 bp, synthetic construct
  source 1..120: mol_type = other DNA
gtgagtcatctgtaaaatgcaacaactaccctttctacttcatagggtttttccagaactggaatgtgacgaagggcttgctggaagaatccacttgtaaggtcccataagtttctgttc

SEQ ID NO: 2593 - DNA, 120 bp, synthetic construct
  source 1..120: mol_type = other DNA
cgtgtgcgaatccacacacattctcacaccaagaacaccccgtgtgcgaatccacacacattctcacaccaagaacaccccgtgtgcgaatccacacacattctcacaccaagaacaccc

SEQ ID NO: 2594 - DNA, 120 bp, synthetic construct
  source 1..120: mol_type = other DNA
gtgaatttggacaatgcctctcactgtctcggtcacacaggaactgcaagaactaacagcaatgatgtaaacacagcgtggttgccaccagtgtagtcgggtctgtggagcagtaaaatt

SEQ ID NO: 2595 - DNA, 120 bp, synthetic construct
  source 1..120: mol_type = other DNA
caaaatgggattccagggtgtatcagtcagggtcctggaaggatactcatggatagatcctgtgagtctctaaggttaagatgactaaactcttaatcttggcatggttaaactaaggaa

SEQ ID NO: 2596 - DNA, 120 bp, synthetic construct
  source 1..120: mol_type = other DNA
aaacttaaagtataataaaaaaaaaaaaaagaaaaggatggggaagggcaggtctgtaagatctcctaaagtgtctgggattaaatcctcagttggctcccagtgccccaggctgaggcg

SEQ ID NO: 2597 - DNA, 120 bp, synthetic construct
  source 1..120: mol_type = other DNA
gctgatgcctgtaacaaaattccaacgtttagtgttgagtattctgaagaagccacaactgctgttactgtcccatagagcttatagagaaatagctcatttgtttgccttttttatttt

SEQ ID NO: 2598 - DNA, 120 bp, synthetic construct
  source 1..120: mol_type = other DNA
aaagaaagccagttcttggcttctgccttgaagatgctgggcctaagaagcgtgttcaaatggcactgggtagcaatgaagtaggacgaatatctactacatacatcaataacaaaatca

SEQ ID NO: 2599 - DNA, 120 bp, synthetic construct
  source 1..120: mol_type = other DNA
tggtgtttaaaattactctagttgcttctagtctgtttgccatattttatttatttataaatttatatcctgtttcactttgctaatcatttgaggtgcattataatgaacctgtgcatt

SEQ ID NO: 2600 - DNA, 120 bp, synthetic construct
  source 1..120: mol_type = other DNA
acttggcgaagacaaacttcacatgttctcacttactgtatgaggtaaaaatgaaaacaattgaattcatggagatagtgagtagaatgatggttactagaggctggaaagggttgcagg

SEQ ID NO: 2601 - DNA, 120 bp, synthetic construct
  source 1..120: mol_type = other DNA
acacctgctgttataaaataggatttatcataaatgcttcaaaataatgagaataagttggctctgatgtcacagtgtcagctacaaaaacttaaagaacacactatattactatcgccc

SEQ ID NO: 2602 - DNA, 120 bp, synthetic construct
  source 1..120: mol_type = other DNA
cgcatcactctgacatgccagccaacataggaaggaggcctattttgaaagaattgtgaatggagcctctgtcaaattgagtagagtataatctgataacagagaaggcctaaagagttt

SEQ ID NO: 2603 - DNA, 120 bp, synthetic construct
  source 1..120: mol_type = other DNA
gcctcttgaattgagctcctgaaactttgcaatgtaatgtttatcaaagtacatgtgaccatagagatatatttctaaccatttccttctcttttgagaatccaaaacccatgtggtacc

SEQ ID NO: 2604 - DNA, 120 bp, synthetic construct
  source 1..120: mol_type = other DNA
tttacagactatttttcttatgggtttgttgtctgcatgtttctcattgctttggagttctttatatgttctggatatacaaaacttgtcattcatgtgttccaaatctcttctcacact

SEQ ID NO: 2605 - DNA, 120 bp, synthetic construct
  source 1..120: mol_type = other DNA
tactgacttgcacctatatgtacttctgggaaatttagccagcatgtatttccacaatacagggatagtttttgttctgtggactgctaaatgatcacagcctaatgtattgccttctca

SEQ ID NO: 2606 - DNA, 120 bp, synthetic construct
  source 1..120: mol_type = other DNA
ctagcgtccgtggagctgtgttcagcatgaaagatcagtatctggcttccctctcatttataactcttattttctttctttctagaatatgtctgtgctggagaatcatcactggcgatc

SEQ ID NO: 2607 - DNA, 120 bp, synthetic construct
  source 1..120: mol_type = other DNA
tacgcccgtttattaacatattgtttatggttgctttcacactacagtggtggagttgagtagttgtgagagagactgaaaggtcctcaaagccaaaaatatttaccgcctgtggccctt

SEQ ID NO: 2608 - DNA, 120 bp, synthetic construct
  source 1..120: mol_type = other DNA
tgtgcccagccaagtgttcgacacttctttgtcctcagcaagtgtttactgaccatcttcatctattgtatgtgatacatacaatatgtcaggaactgttacaggctctagggatactct

SEQ ID NO: 2609 - DNA, 120 bp, synthetic construct
  source 1..120: mol_type = other DNA
cttaaacttgtagacaccacagttctggagggggcactccttcctgggccagcccagcctgccagaggcatcctcttattgacacagcgtggaggggggctaactaggggtcttttcctc

SEQ ID NO: 2610 - DNA, 120 bp, synthetic construct
  source 1..120: mol_type = other DNA
cttagttcttttgggcttggggactcactcttgttcacttaaagtggattggttcttacatttattttcatagttgtgtctggtcaccttctggcttgatgtatgcccctatgtctggaa

SEQ ID NO: 2611 - DNA, 120 bp, synthetic construct
  source 1..120: mol_type = other DNA
ccaggagtggcaggtggctgtggggacctaactgggcttattgagaggcacacagccagtgctcaataatgctaacggtaaaagagtaatattgatttattatacatttaattctttaca

SEQ ID NO: 2612 - DNA, 120 bp, synthetic construct
  source 1..120: mol_type = other DNA
tttaaaatatttcccaagtgttatctgagagatcactttgagagaaggaaagcaagcggtgtttgtcatgagcttcgtccaaatcagaggccttgagtgttcggaggatcatctaaaccc

SEQ ID NO: 2613 - DNA, 120 bp, synthetic construct
  source 1..120: mol_type = other DNA
gttttagagtgaaatatatcgaatcatctgggtcctcttggatcacagttttagagtgaaatatatcgaatcgtctgggtccccttgcatcacactgttttagagtgaaatatatcgaat

SEQ ID NO: 2614 - DNA, 120 bp, synthetic construct
  source 1..120: mol_type = other DNA
ctgggtccccttggatcacagttttagagtgaaatatatcaaatcgtctgggtccccttggatcacagttttagagtgaaatatatcaaattgtctgggtccccttggatcacagtttta

SEQ ID NO: 2615 - DNA, 120 bp, synthetic construct
  source 1..120: mol_type = other DNA
tctttcctcaggagaaacacatttccatatgttggctttgacattagtattctgcaatctcttgactctcccttagatgtttttctcaccaaacaggacagcctggcttcacagcaggag

SEQ ID NO: 2616 - DNA, 120 bp, synthetic construct
  source 1..120: mol_type = other DNA
acaagactgcccagcatatgtgacccctgagagctgggtggcaaccgaggttgtgcacatttggcctagagtaggtggacagaagtcatcaaggcttgcagctgttctgggaccctcaag

SEQ ID NO: 2617 - DNA, 120 bp, synthetic construct
  source 1..120: mol_type = other DNA
tatgttttgtcttactgtgatatttgtgtcactgtatatcaattagcacagaaaaccacatgcagctctcctccagtatgtgacattcagatgtgatacagaaagcatcgttttgtgtgt

SEQ ID NO: 2618 - DNA, 120 bp, synthetic construct
  source 1..120: mol_type = other DNA
tctgagacttcagaacaatttcatgaagtaggtattattattattgcaacttagtactgatgaagaaactgagtacaaggaggttaaagagttttcccaaggtcttgcttacgaagcact

SEQ ID NO: 2619 - DNA, 120 bp, synthetic construct
  source 1..120: mol_type = other DNA
aattgaaggcagtccttgaagagacatttgtatgcccatgtgcacagcagcattattcacaacagccaaagcatagaagcaagccagtgtctgttcttggatgaatgagtaaacaaaatg

SEQ ID NO: 2620 - DNA, 120 bp, synthetic construct
  source 1..120: mol_type = other DNA
tgaggacatggcgtctatgtaagagaaccatctccaatgagtagattccttccagataaaatacacaatgcttgattctgtttctgatgctaagtaactcctaatgagccaaccctccca

SEQ ID NO: 2621 - DNA, 120 bp, synthetic construct
  source 1..120: mol_type = other DNA
acgctgggagctgtagaccggagctgttcctattcggccatcttgtgtttggtatttttaaaagttttgcctttgctgttagattattctgattgactttagggcgtgatgatggattct

SEQ ID NO: 2622 - DNA, 120 bp, synthetic construct
  source 1..120: mol_type = other DNA
cagcatgtgctttgggagaaactttcaattgtaaaaacaatagctaagattgaagaaacagtacagtttcaagtaaataaaggtagacaggaagttctctggctcttaaatcctgtcact

SEQ ID NO: 2623 - DNA, 120 bp, synthetic construct
  source 1..120: mol_type = other DNA
accgcaccttaattttgaggaagtgttgggaaagctggctctgacatctcttgtgaggcaagcccagctggggaaggtgtttcctgcctgacttcctccccagaagcaatagcagggctt

SEQ ID NO: 2624 - DNA, 120 bp, synthetic construct
  source 1..120: mol_type = other DNA
ttttagtagggcaatggggtgtctgcaaacgagagcccttgagagtggtgtggtccagggagatgggcaggggcccagcctaggagtaggggctagatttggtgggtctttgtcaatttt

SEQ ID NO: 2625 - DNA, 120 bp, synthetic construct
  source 1..120: mol_type = other DNA
cagagcaggtcataaaaaactacacggaagagctgaaagtgcccccagatgaggtttgtgtcttgggaccttggctgcctttgtttctgtttggaaacaactccacatggaaaggacatc

SEQ ID NO: 2626 - DNA, 120 bp, synthetic construct
  source 1..120: mol_type = other DNA
ctctgtctcggccctggtgtccatctggtgtgactgggccgtttcaccccaggctcctcctctccaagctgccgtctgcacagccagcacgcagcttggatcatgggagcactccctgcc

SEQ ID NO: 2627 - DNA, 120 bp, synthetic construct
  source 1..120: mol_type = other DNA
cacagtcctgagctgtcccctgcaggggcgggagggttccgggggtggctgtaggaatgggcctctgcaaaagatggtgctgggcgtggggccagcttgaagacctttctaaaggcctgg

SEQ ID NO: 2628 - DNA, 120 bp, synthetic construct
  source 1..120: mol_type = other DNA
atcttggctcctcctggtcctggttgttttcttattgtgcagaagctttttagcttgctgtagtcccgcttgtctacttttgcctttgttgcctgtgcttttggtgtcatatctaaaaaa

SEQ ID NO: 2629 - DNA, 120 bp, synthetic construct
  source 1..120: mol_type = other DNA
tttgaatatcttaacccatataagtcaaacatgcctagggctcacaaaagttacagtgcatcctggcacaggagaggaggcagctcttgagtttcagtgcatgcttttgatattcactat

SEQ ID NO: 2630 - DNA, 120 bp, synthetic construct
  source 1..120: mol_type = other DNA
catttactattttttaatgttgcagttttaatattttggagccaaagcatttcccgctcttaaacctcgaggagttttaggagctggaggcctcacacctctcctggaaaaaattgtccc

SEQ ID NO: 2631 - DNA, 120 bp, synthetic construct
  source 1..120: mol_type = other DNA
atctatgacaagccccctgcccaggctgcctataccgactgctgcaggacctctgcctggggggtgcagctggcttgttagccgggagggacaattgggtgagggatgcagaaggaggca

SEQ ID NO: 2632 - DNA, 120 bp, synthetic construct
  source 1..120: mol_type = other DNA
agctgcatgtctggtcctttacagaaaacgtttgctgatcctaatcttggggattgtgcctgtgttgactttgctatttattgtttggttacagcccagacactgaagttacttattagc

SEQ ID NO: 2633 - DNA, 120 bp, synthetic construct
  source 1..120: mol_type = other DNA
agggtgcctgccctgccctgtggtgaacaccagccccctgggctgcagatatctgcctgggggtccaatcagatcctcaagacatctgggactgggcatggtggctcatgcctgtaatcc

SEQ ID NO: 2634 - DNA, 120 bp, synthetic construct
  source 1..120: mol_type = other DNA
atgtgttacaccagaaagatgctaaatatcaattgtaatctaagcaaacttaaaatgctgttttaaaactaccaggtggatataaacctacgacttacttcttaaatgaccacggcaaaa

SEQ ID NO: 2635 - DNA, 120 bp, synthetic construct
  source 1..120: mol_type = other DNA
gaggaccacactttaagcaacactgcccctggtgatttataatcacattaacactatgattataatgtaacgatactgaggccaacaacaatggccagaccactataatagaactttaga

SEQ ID NO: 2636 - DNA, 120 bp, synthetic construct
  source 1..120: mol_type = other DNA
tgctgagtaaaaggagccagacccaaaagaccatctatgattctacttatatgaaatctttagaaatgcaaaagtatagccagcatggtggttcatacctgtaatcccagcaccttggga

SEQ ID NO: 2637 - DNA, 120 bp, synthetic construct
  source 1..120: mol_type = other DNA
gaataaaggaaaaaagcagagagaaggcaaggcaaaatgatttattaggaaaggaagaaaccctttcaaacaaagaaatcctacgttttctctcgatatatcactagaagcatatgcaag

SEQ ID NO: 2638 - DNA, 120 bp, synthetic construct
  source 1..120: mol_type = other DNA
gaaccccaaactgcatttaaaacttttcctaacccaaattctttagctcaatttatagcaaaaacatccatttaactaatgaagccaactgttggtcatccttccactccaccctctgta

SEQ ID NO: 2639 - DNA, 120 bp, synthetic construct
  source 1..120: mol_type = other DNA
actaagctgtgaactccctgctgacagaagtaggtctttcatctccacacaaattctcacatagtgcctagcacacagtaggcactcaataaatattgcttgaattgactgattgcttga

SEQ ID NO: 2640 - DNA, 120 bp, synthetic construct
  source 1..120: mol_type = other DNA
cttggctcctccccctgttttgagttcatatttcaaaatgtcacattcttgcaggagagctcaggtaccttaaattatgacatacttggagttgtccttccttgtccaacacattgacta

SEQ ID NO: 2641 - DNA, 120 bp, synthetic construct
  source 1..120: mol_type = other DNA
atgtaccccatgtccaaggggggttgtttccagaaatacaagcctgattaagtctcaaaaagtcaatcaaaataatccaccatgttaacaaacaaaagaaaagttacgttgcatcagttg

SEQ ID NO: 2642 - DNA, 120 bp, synthetic construct
  source 1..120: mol_type = other DNA
atataccaaactgataacagggaaataagaaggactgaggagttagtaatggtaaattctgatctacctataatgctttaattttttttaatagagaaaatgtattgatgtgttacatgc

SEQ ID NO: 2643 - DNA, 120 bp, synthetic construct
  source 1..120: mol_type = other DNA
atgtgaaattatgttaaatacatatgtttagaagatacaatgcaactttctagtttttatttccactgtaactaacttcaactatgaataaaattctacataagtttccatctcaggatt

SEQ ID NO: 2644 - DNA, 120 bp, synthetic construct
  source 1..120: mol_type = other DNA
taattacagcgttattaaactcctccaggttgacactttctttcattctctattttagatttgtcaatcagaggtgctccatgaagcagctccttagtgctgggggaaatgcaaagccat

SEQ ID NO: 2645 - DNA, 120 bp, synthetic construct
  source 1..120: mol_type = other DNA
aattgtaagtatgtgtggggctcatgtgctgagtttggtgggggaaatctttccatgcacccccacaactgtctacaatatgaaaacaatcttcaagaaaacaccagcgaacagaccatt

SEQ ID NO: 2646 - DNA, 120 bp, synthetic construct
  source 1..120: mol_type = other DNA
ccgggttgtccttttaaacgatgtgtgccaccgcacagaaactgcaaaggagaaaactaaaattatttgtaacccaccgatctgaggaaacggctgctggcattggctgtttctctccat

SEQ ID NO: 2647 - DNA, 120 bp, synthetic construct
  source 1..120: mol_type = other DNA
atagaatcgtctcctgagaacagctggtcttcactgagatcaaggcaagcctggtctctggctcactctttctttccagcatctccagctagcattttattcccgtagttgaagaacaca

SEQ ID NO: 2648 - DNA, 120 bp, synthetic construct
  source 1..120: mol_type = other DNA
cttcacaggcaagaccactccactttctctcttgggctgtttttcctctccccagtctcttttccaattacattctcagtccctaaatcttgatttgcctaagtaaatatattgtttcct

SEQ ID NO: 2649 - DNA, 120 bp, synthetic construct
  source 1..120: mol_type = other DNA
ttagtgttcatcaaaaaacttattttcataagtcagtatttctcacagtattatacttctgggggttcaaaagaacaatttctgtcttttttcttccataggtctgtgccttactgaagt

SEQ ID NO: 2650 - DNA, 120 bp, synthetic construct
  source 1..120: mol_type = other DNA
aaacctaccagtggaggtacaaaataaaaaaaaaaaaaaagaccacagaataaatgaagatgaaggttgtattagaactagacatgaagacttttttttgcatctgaaatcaaagcagtg

SEQ ID NO: 2651 - DNA, 120 bp, synthetic construct
  source 1..120: mol_type = other DNA
tgcgactgtaatttagagctattagccagaagcatcttagtagggagggaatttgtatttataaccagataagtactgtatacaattggatcacacacatcttaaagccacttccccagc

SEQ ID NO: 2652 - DNA, 120 bp, synthetic construct
  source 1..120: mol_type = other DNA
gtgaagggagactgagtctccagtttccaattctgcaggtgaactgagaaggaaattagaagattgagaggccttagttgggcacctttatgggctacttccttctattcattattttag

SEQ ID NO: 2653 - DNA, 120 bp, synthetic construct
  source 1..120: mol_type = other DNA
ggatcactcccagggctagggccgtaagagtgtcgtcttcaagtaacacatagaaattaaacacagcatttcagagccaaataaattaagtaaacatcaattaattgtataccagtcctc

SEQ ID NO: 2654 - DNA, 120 bp, synthetic construct
  source 1..120: mol_type = other DNA
aaaaagaatctctgatctagacagtaagctaggtaataactactctgtgaggagttacttcttcagcacctatcatagttctgggaacagaggtagagctcaatatatacttgttagaac

SEQ ID NO: 2655 - DNA, 120 bp, synthetic construct
  source 1..120: mol_type = other DNA
tcagaagttagatgttaatattggcaatcttttctaaaggtctggctacctctgccctgcctctagctcagagagggaagaagagaaaaaatgttgtacaggcacaatctgtgaagcagc

SEQ ID NO: 2656 - DNA, 120 bp, synthetic construct
  source 1..120: mol_type = other DNA
cacttggtcaaaatccacaacccagtaaaaggtcccaagaaacagtatggagaatatatccgaagacatacttctgaacactcaacagctcctaaaatcctcctaggtagagacaaaggc

SEQ ID NO: 2657 - DNA, 120 bp, synthetic construct
  source 1..120: mol_type = other DNA
agactggagctgttcctattcggccatcttggctcctcctggtcttaacttttatgaactcttatacagccacttgtccaattttccaaaacagcaattctaaacttttctctccagcta

SEQ ID NO: 2658 - DNA, 120 bp, synthetic construct
  source 1..120: mol_type = other DNA
gaagatcctataactctatgctgagtatttttgttttttaaaagaagatacataagtactggaggaacacagtgcgttaaacttatcctgaggatagatgttagggtgtgtctaacccat

SEQ ID NO: 2659 - DNA, 120 bp, synthetic construct
  source 1..120: mol_type = other DNA
aatcctgtgatccaacaatgtgcccagtaagagaataaatggacctcaagcggatgggctgatcaaagagggccagaattcacttgaaaattctgaaaggatcagaaattcaccattaca

SEQ ID NO: 2660 - DNA, 120 bp, synthetic construct
  source 1..120: mol_type = other DNA
attcctgatttatttcattatgtaactgaatactcaagaatatggcaagtttcttcctccccagatcctttcctcttgacctcccttatgaaaatgactgtgttttgccctatttagatt

SEQ ID NO: 2661 - DNA, 120 bp, synthetic construct
  source 1..120: mol_type = other DNA
aaataatgtacatccaaaactgatcacttggaattatatacttattcttcaatgctgctattacttatatatatatcagaaatacacctttgaaatttacttcagagactgcagcatgtt

SEQ ID NO: 2662 - DNA, 120 bp, synthetic construct
  source 1..120: mol_type = other DNA
cctattcggccatcttggctctggttcccggaaatcatcctttttaactaagctttggctctggcttataagatgagacatatgttagacttaagataggagtcaatgacaataggagag

SEQ ID NO: 2663 - DNA, 120 bp, synthetic construct
  source 1..120: mol_type = other DNA
aaagaaatcataaccaagaatatctcaaactgcacaactacatgaaaattaaaccacttgcacctgaatggctttttggtaaacaacaaaattaagggagaaattgtaaaactctttgaa

SEQ ID NO: 2664 - DNA, 120 bp, synthetic construct
  source 1..120: mol_type = other DNA
atatctaaaatgtattctcagaagagagcacttggcaatagttagagaaagcctacaattttgtaatctagaccacagatacaaactacagtctgcaggcaaatccagtctaccacctgt

SEQ ID NO: 2665 - DNA, 120 bp, synthetic construct
  source 1..120: mol_type = other DNA
atgtacacatatatatgtaatggggtacatgagatactttcatacaggcaagcaatgtgtaataatcccatcttaataaatggggtatccatttattgagcattccctcaagcatttatc

SEQ ID NO: 2666 - DNA, 120 bp, synthetic construct
  source 1..120: mol_type = other DNA
gaggggatttggggatttctttatccagttttcactggcctgtttcgatatttgactgtttctctctcttgattttttggaaggtcaaataatttagtttctgcttggtggcctggaact

SEQ ID NO: 2667 - DNA, 120 bp, synthetic construct
  source 1..120: mol_type = other DNA
ttggcctctgcttctcctttttcctatgcttctcatttctgctgctgttttcatgtttgctgactctgccctacttccccctactttcagcatctgttcatggcctctgcttctcctttt

SEQ ID NO: 2668 - DNA, 120 bp, synthetic construct
  source 1..120: mol_type = other DNA
cttctcctttttcctgtgcttctcatttctgctgctgttttcacgtttgctgactctggctccacatctgcttctcccatctttcagcatctactgattctgctactttttctgatgatt

SEQ ID NO: 2669 - DNA, 120 bp, synthetic construct
  source 1..120: mol_type = other DNA
gtagtcccagacaggaggctgaggcagtaagctgcaccccagcctaggggacaaaaatcccatctcttaaaaaataatcacctactatcaagttcagggggaaaaataaattaaataaaa

SEQ ID NO: 2670 - DNA, 120 bp, synthetic construct
  source 1..120: mol_type = other DNA
tgtcagacatgacttagtcctaatgttccacaaacatagcttaagcagatgggcaatttaaaaggatttattttttaaacagttctatgaaacacgcattctctaagatgggcagtaggg

SEQ ID NO: 2671 - DNA, 120 bp, synthetic construct
  source 1..120: mol_type = other DNA
tacagtgtgagccaccatgtctggacaaattttggtttcaattttatgcatggaaatacatgtacatattctggattaagaagtatcattttttggccaggcgcagtggctcccgcctgt

SEQ ID NO: 2672 - DNA, 120 bp, synthetic construct
  source 1..120: mol_type = other DNA
taatactgtatgtgtgaagccttttcaattgtcctcaccccacccctgttttctgtgagacaaagatcttgccatttgcgattttgctaactgctgtacttttcaggaagataactatga

SEQ ID NO: 2673 - DNA, 120 bp, synthetic construct
  source 1..120: mol_type = other DNA
ttatatctcattgaccacagttgggccatgtagctcattcctgtcttaaatcatggaattattatggttgaattagattcatctccggacctagtgagctctctggcctgcagtctcaag

SEQ ID NO: 2674 - DNA, 120 bp, synthetic construct
  source 1..120: mol_type = other DNA
cactaggtctttcaggagctcctggggtgctactctcatacagccagtaacttggccttcctgcagcccttgagacggtacacaatgcgcagggccactgagcagcttgccgtgcaggcc

SEQ ID NO: 2675 - DNA, 120 bp, synthetic construct
  source 1..120: mol_type = other DNA
cattatgctttataacaatgtattgtgttgccacatacaacagacctttatgaactgctaatacaacttttcagtctcactctgaacaattctagattgttgagaaaccttttgttgctg

SEQ ID NO: 2676 - DNA, 120 bp, synthetic construct
  source 1..120: mol_type = other DNA
taattctatggagattcatccaagttgttgcatgtaccaatcgtttgctctttttcactggtgagtagtattccatggtgtggatgtaccagggtttgtttgaccactcacctgttgaag

SEQ ID NO: 2677 - DNA, 120 bp, synthetic construct
  source 1..120: mol_type = other DNA
tcagattaattcagtaaatatttattgagcatcaactgtgcaccagacacacattcccttaccctcaaagagtctgtggtctcactggagagagagacagacacatactctaccaaatca

SEQ ID NO: 2678 - DNA, 120 bp, synthetic construct
  source 1..120: mol_type = other DNA
gggagagggaatcacagaattttcaaactggtttagcatgctggctctgcagccagactgcctgagctcaaatgtcagttgacttttctgtaaaatgggataataatagtaccagtttca

SEQ ID NO: 2679 - DNA, 120 bp, synthetic construct
  source 1..120: mol_type = other DNA
agagttagggcagtcgaggcagtgaactagggtgaaaaagggaggaagtgatgaacaacaggtagagtaactgaaaatgagattatgggaggtatacaaatgtatggaatgacaaagtca

SEQ ID NO: 2680 - DNA, 120 bp, synthetic construct
  source 1..120: mol_type = other DNA
gaagcaccacagttattcctgtagagattagaaacaaggagcttattgccctgcttgtcaaggctcaggacagacaggaggaagaaacaagtataaaggttttggttttggaaagaagtt

SEQ ID NO: 2681 - DNA, 120 bp, synthetic construct
  source 1..120: mol_type = other DNA
tcacaccagttagaatggcaatcgttaaaaagtcacaaacgttcttgaacatgccttttgttagacataaactcccattttccttggatgcaatgtgtgggagtgaaattgctggctcgt

SEQ ID NO: 2682 - DNA, 120 bp, synthetic construct
  source 1..120: mol_type = other DNA
aacaaggatgctgcagagcacagctccatcaccacctgcattcatccattcatccttcattcattcattcctcaatcttgtgtctggtcctactttgtgccaggctccaggcaccaggaa

SEQ ID NO: 2683 - DNA, 120 bp, synthetic construct
  source 1..120: mol_type = other DNA
gttcacggtgcaccaacatcatcgcgggggacttcatcggcgcagacggcttcgtcagtgacgtcatcgcgctcaatcagaagctgctgtggtgctgacgggacccttctgaagttcggg

SEQ ID NO: 2684 - DNA, 120 bp, synthetic construct
  source 1..120: mol_type = other DNA
gaacttttaaaagggagttactgactctcaactgtgcggggacggtttcagtttgatttaatatggaaagagggccaagtgtcatcctcacaaatgggtccccgaagcagatcaaacgca

SEQ ID NO: 2685 - DNA, 120 bp, synthetic construct
  source 1..120: mol_type = other DNA
gtcttgtgccaataaactcatcatttaaagactacacctcagactcaggtagcacaaaagagcaaaagattgatatggagaatcaagtggagttctcagtgggtagccaatctggacaaa

SEQ ID NO: 2686 - DNA, 120 bp, synthetic construct
  source 1..120: mol_type = other DNA
acaactctgaacacatcagggatcctagtacatgatgaacaagtatctgagagaattttcttaatttaacacctagaaaatcagctaaaagggtaaaactgtttgcacagaaaaccaaac

SEQ ID NO: 2687 - DNA, 120 bp, synthetic construct
  source 1..120: mol_type = other DNA
tttacatcatgaaaatcttcaaagacatatataagtaaagagaacagtatattatggacccccatgcacctgtcaccaccttgagcaattatcaacatttgcgaatcttgtttaatcttc

SEQ ID NO: 2688 - DNA, 120 bp, synthetic construct
  source 1..120: mol_type = other DNA
taagtggagactagagttacaaagaggcaggacctagcccaacttggggggtgaaagagttggaaaatgtaaaagataataaaaacaagacatcagttgactttggtcttggtgcccaga

SEQ ID NO: 2689 - DNA, 120 bp, synthetic construct
  source 1..120: mol_type = other DNA
atattcttcagagagaagctactctttaaccatttcaaaaagggcttttctgagatattcgcaatacctatatatagcaaaggacttttatactacagaaactataaagaactcctacaa

SEQ ID NO: 2690 - DNA, 120 bp, synthetic construct
  source 1..120: mol_type = other DNA
gttatatttatacaaaaggaatagtgaatagtatggaaaaagaacaaactactgacacataaggtaacaaggatggatctcaaaaacattatggtaagtaaaagaagccagacccaaaag

SEQ ID NO: 2691 - DNA, 120 bp, synthetic construct
  source 1..120: mol_type = other DNA
tctctgcctctgtatcccccaccccagttttgaactcaataaattgaacaccatttattcttttttttaatcttgattaatgttaaattagaatgaattcgagtggcattcttgttgaat

SEQ ID NO: 2692 - DNA, 120 bp, synthetic construct
  source 1..120: mol_type = other DNA
atttctttttgtaagccatctcttgattttgctatcaccacagaaaaatttgtagagatttgaccccaatacatcaagtactgcagaggcaccaagaccttttctgcttctaaaactgca

SEQ ID NO: 2693 - DNA, 120 bp, synthetic construct
  source 1..120: mol_type = other DNA
atgaaacacacaccacacacacaccacaaacacatcacaccatacacacaccacacaccacacacatacaccacactcccccacacacacaccccacacaccacacacacacacaccaca

SEQ ID NO: 2694 - DNA, 120 bp, synthetic construct
  source 1..120: mol_type = other DNA
aggtgcctactctgtgcaagtactgctcaagctgctggaatgacagcagtgaaccaggtctgtcataatagctaacatttactgaatgcttactgtgtgctttacatgtattaagttgtt

SEQ ID NO: 2695 - DNA, 120 bp, synthetic construct
  source 1..120: mol_type = other DNA
tgttagggtgtcaattttggatctttcctgctttctctttgtttctttatttatttagccactctatatcttttaagtggagaatttaatcaatttatattcaaggacattattgaaggg

SEQ ID NO: 2696 - DNA, 120 bp, synthetic construct
  source 1..120: mol_type = other DNA
tttttgataatggaggggcactaatagaagccaggtattcaaaaaggaaggggaaagcctgatgcgctttattgtgactgacagttagtttcactgaatatcttccaggcaatccagcaa

SEQ ID NO: 2697 - DNA, 120 bp, synthetic construct
  source 1..120: mol_type = other DNA
agctgtagaccggagctgttcatattcggccatcttcgagaagactgttttcaaagctggattagagattgactagaaaggaagaaagcctgagtatagtgattagtctacccaatgcat

SEQ ID NO: 2698 - DNA, 120 bp, synthetic construct
  source 1..120: mol_type = other DNA
atagtttgaaaaacctaaaggccccacaacaaactattagaactgataaattcagtaaagctgcagaatgcaaaatcaacatatataaatcagtagtatttctagatgccaatggcacac

SEQ ID NO: 2699 - DNA, 120 bp, synthetic construct
  source 1..120: mol_type = other DNA
aacaaccaaatgaaacgtatagaactgaaatgtaaaataaccgaaataacaagctcacctaaggaatttgataacagaatggagtcaacagaggatagaataagaaaacttgatgacaga

SEQ ID NO: 2700 - DNA, 120 bp, synthetic construct
  source 1..120: mol_type = other DNA
gggataattgtaaagctggatctatgccagagtttcttgtgaatataaaaggaaaataactcatgaacgaggggacagttccaagaaaggatttgtggaggtggttacacctaagctact

SEQ ID NO: 2701 - DNA, 120 bp, synthetic construct
  source 1..120: mol_type = other DNA
ctcagtttttgaggataagaatgctttgttttaaaagggatcatctgtgtctttttaaaagcttactgaattttcctggtgtgaattatttgcacgtactcatttttgtggttgatttgg

SEQ ID NO: 2702 - DNA, 120 bp, synthetic construct
  source 1..120: mol_type = other DNA
ttttcattccttatctcacagagcccttttctcctctcttaaagtcttcagtcccttacttcccttcttttaccttatatcatcctctccctctctaagctaccttcactaaggccttcc

SEQ ID NO: 2703 - DNA, 120 bp, synthetic construct
  source 1..120: mol_type = other DNA
atcttgtttagcttcttatgtatagaatgggagtacctagtacctgcttcaccagcctctcagcattgcttagagggccagaggaggtgatccatgcactcattctttgaaaaatataaa

SEQ ID NO: 2704 - DNA, 120 bp, synthetic construct
  source 1..120: mol_type = other DNA
ttggtctaagggctggggtaaagggcaaaggagaaagtcatttcattttagggaccacagtagaatgatacttgaaatgccattttaatataacttctcagataactgttttgtacaggt

SEQ ID NO: 2705 - DNA, 120 bp, synthetic construct
  source 1..120: mol_type = other DNA
acataacacccaaaagtgcaagaattgcattttttgaaatacatatttaacctaaacaaaatttactgttgaatgggccatgaagcagaccacaccaatttcaaatgattggagtcaaaa

SEQ ID NO: 2706 - DNA, 120 bp, synthetic construct
  source 1..120: mol_type = other DNA
tggccatggacggatggttgtacgccgtggggggtaacgacggtagctccagcctcaactccatcgagaagtacaacccgaggaccaacaagtgggtggccgcatcctgcatgttcaccc

SEQ ID NO: 2707 - DNA, 120 bp, synthetic construct
  source 1..120: mol_type = other DNA
ccatgtctgcagcagcattgttcaccacagccaaaaggtgggagcaagtgtccacccacagatgaatggataaacaaaaggtggtctatacagaccgtggaatattctacagtcctgaaa

SEQ ID NO: 2708 - DNA, 120 bp, synthetic construct
  source 1..120: mol_type = other DNA
acctcccgttgggagtgatcatatagatactgggaggtttgaaaggaaattctctgggaaaaattagttttccatgataatagccacctacatggaaacaaaacagaaagggccttgtcg

SEQ ID NO: 2709 - DNA, 120 bp, synthetic construct
  source 1..120: mol_type = other DNA
tgggctctgaatcggaacccgaagtagagaaggaccgggcacaaccaggagcaaagggacggctgagccatcctgccttgtctacttcgggacctcctctgttcagtctgcggctcaggt

SEQ ID NO: 2710 - DNA, 120 bp, synthetic construct
  source 1..120: mol_type = other DNA
ttttctatagtgacagtaataaaccaagtccagtccccgaagcacagcccacatgacagcctcccgccagagagaggacagtttaggactgtcagctcccgggcagtagctgtgtgtttc

SEQ ID NO: 2711 - DNA, 120 bp, synthetic construct
  source 1..120: mol_type = other DNA
gtcggggaagctgctacaggccacagtgtctggcggcctccctggggagccgcgccgtttgccagcccccaaggtgcctgctctccacacgggggtggcagtgtctccacaggtcactcg

SEQ ID NO: 2712 - DNA, 120 bp, synthetic construct
  source 1..120: mol_type = other DNA
ggaggcgctgcggcaccccatccaggtagcggcgcaggcctggccctccctgagtgcagttcctggctgagtcccttctgccccacgagcacagcccacgcacaccctcccgtcccttcc

SEQ ID NO: 2713 - DNA, 120 bp, synthetic construct
  source 1..120: mol_type = other DNA
gtcctgggagagggactaagcctgtgttggggaggtccctgtgcagcgtctctcagctgagcaaagggcattgcaggggggcctcctgtgccaaagctgtggagtgactcactgaactac

SEQ ID NO: 2714 - DNA, 120 bp, synthetic construct
  source 1..120: mol_type = other DNA
gtcgtctccaaacactgatggagtgtggtaagaccagaaaattcttctgtcatcgctgacaagcacacttaagtttgtcacaacaagttacatgtaaaaaagttactttggcaccgagtg

SEQ ID NO: 2715 - DNA, 120 bp, synthetic construct
  source 1..120: mol_type = other DNA
cccagaaaaaaataaagcttagaaacaagaggctatgtagtctcgagatagatccagccctatgaggcacatgtcaatcacagagggaaagctatgcacgcacaaagcatgtgtgaatca

SEQ ID NO: 2716 - DNA, 120 bp, synthetic construct
  source 1..120: mol_type = other DNA
gcttcatgggggaaacagagactcctctggtaccagggtcccctgaatctccggagtcccccaagtccattgagtccactgggcccgaagagggaaacagagactcctctggtacgaagg

SEQ ID NO: 2717 - DNA, 120 bp, synthetic construct
  source 1..120: mol_type = other DNA
cttgtgaggcaaagtcctcaatccttagggctcaaggatttcaagcatccccttccatggggactttattgctgccatgggattcccatggcccctgtagcaccttgggtttctgctggg

SEQ ID NO: 2718 - DNA, 120 bp, synthetic construct
  source 1..120: mol_type = other DNA
catgtccacattgctgtgctggcccctcgaggccaggtgcaggagctcgtcaaacttctgcaggacacggcgagggggcgggtgaggcgccaggagctgctggaatccccacgaccccag

SEQ ID NO: 2719 - DNA, 120 bp, synthetic construct
  source 1..120: mol_type = other DNA
gggcctcctggtcctgagatatctctgtgcctcctgcgtagcttagcttcccagttgcctttgtctctgggtacaacaaattgagtcagtgtctgtcccctcgctgggcatgggggcagg

SEQ ID NO: 2720 - DNA, 120 bp, synthetic construct
  source 1..120: mol_type = other DNA
catggaacagtgctcaggagagtccttcacaaacatgaggcattaacaagaaaaaaaaaaaaaaacaggaagaggcagaaagaaaactcttgaatgtccctcacgccctggtcctcttag

SEQ ID NO: 2721 - DNA, 120 bp, synthetic construct
  source 1..120: mol_type = other DNA
aatccttggggacagtgacatgagaccccagccaagccctggtgtgcatgctggggagtgcaggaggctgtgggctctttaatccttggggacagtgacacaggaccccagccaagccct

SEQ ID NO: 2722 - DNA, 120 bp, synthetic construct
  source 1..120: mol_type = other DNA
gtgtgtgtgcgtgggtgtgtgtgcctgggcaggggtatgtgtggtctcgaccctgtgctgctccctatatgcaggaggaccccggagcatcgagtctcctgagcctcagcctcaatgcta

SEQ ID NO: 2723 - DNA, 120 bp, synthetic construct
  source 1..120: mol_type = other DNA
ccgaggtagggcctgctcttcctccgccaccgtagtcaccagaggacctgtcctggtcaggccagtgtgtccccagtccaacctggcgatgctgatccagtctctcccactcccctccac

SEQ ID NO: 2724 - DNA, 120 bp, synthetic construct
  source 1..120: mol_type = other DNA
aatggccccaggtttctttgccacttcagattggaatcgttgatctgctgaaataacaggtaaaatcattggtggtttgggaaccaccggaatcagaagtgcattgagatgtttgcttta

SEQ ID NO: 2725 - DNA, 120 bp, synthetic construct
  source 1..120: mol_type = other DNA
ttacccagccatctctttccaggggaattaatttcgttcttgccaatgtcccagtagctgacaccccccgcctcttgttctttctccttgacctcgacgtcagcaccatgctgtgcagca

SEQ ID NO: 2726 - DNA, 120 bp, synthetic construct
  source 1..120: mol_type = other DNA
tgggatatttaattcaccagaatgcacctcaaaaacaagaacgctgcaacagcgacagcagaatgaaaactacatttaggaatgatttaagcaggaatgaaaatgactttgagctagtcc

SEQ ID NO: 2727 - DNA, 120 bp, synthetic construct
  source 1..120: mol_type = other DNA
cagaaacagaaagcaaccccacaaagctggcgcatggcccaaaagggggtgaagaagcgatgtcctgagacagggacgcagctgtcatgcagggcctcagggctgagacaaagtctggat

SEQ ID NO: 2728 - DNA, 120 bp, synthetic construct
  source 1..120: mol_type = other DNA
tgatcttttgaggagctgccaagctgttttccaaaatggctatgccattttatgttcacaccagaggtttagttttgaacgttttggcagttccagatctctcctgccatggaaaataga

SEQ ID NO: 2729 - DNA, 120 bp, synthetic construct
  source 1..120: mol_type = other DNA
ttaccagtagcacattcctatcgggcatttatcaaaacaaacatataggtcaaatgaccgtttactcagcagccacctgtcagtgccttgggacgtcagcagtcccggggatgcccgtca

SEQ ID NO: 2730 - DNA, 120 bp, synthetic construct
  source 1..120: mol_type = other DNA
gtggggaaatcagtatctaaaaagtacaagatgggattatgttatggaatccaagaataggaaagcgaatgtgaatccagacagcatggtttagacggggacccaaataaccttcagcat

SEQ ID NO: 2731 - DNA, 120 bp, synthetic construct
  source 1..120: mol_type = other DNA
ttatcttcacagactcccaaatagataaaccttcattttccctgctttacaaatgaggcaactgaagcacagtgagatgaagccatgtggccaagctcagtttcaatgaagtctaacgcc

SEQ ID NO: 2732 - DNA, 120 bp, synthetic construct
  source 1..120: mol_type = other DNA
taccattgctcctatataaatcataagaataaaatagagccaagagaacttcttaggaacccctctcatcccaagccaagagattcttcccacattgggcattatcaataatgagaacat

SEQ ID NO: 2733 - DNA, 120 bp, synthetic construct
  source 1..120: mol_type = other DNA
gggttgatggtatttgccctgttttgtagatgaagaaatgtggatgctaaggctctaatcacctacccacccttatggaaaggtggagggcatctccctgatttaattagctgatttatt

SEQ ID NO: 2734 - DNA, 120 bp, synthetic construct
  source 1..120: mol_type = other DNA
actgatggtgggatcaatgggagttcccagtgttggggctcatagtaggttgaatgccatctacaatgaaaaaacattcaccaaggcctccagtacatcacaaacctttttttttttttt

SEQ ID NO: 2735 - DNA, 120 bp, synthetic construct
  source 1..120: mol_type = other DNA
ggataggattggtaggcagaagaatgggtgggtgggtagatggacagttggaaggatggatggatacatagaaggatgtgtaggtagaaggatgggtggatggttggatgaatagaggaa

SEQ ID NO: 2736 - DNA, 120 bp, synthetic construct
  source 1..120: mol_type = other DNA
tgggaacaaccctggcatcacagagggcaactcctctctgttgaacaacactcatgggaaacagacacttggaaagctgacagcaaggtgctttctgagccccagttactcttccacctc

SEQ ID NO: 2737 - DNA, 120 bp, synthetic construct
  source 1..120: mol_type = other DNA
acttagactcgtttcttgagcagattgtgattcattctaaggtttttatactccctcatcacccttcttcacatcaggacaatcatcagaaggaaaatggggctgaaggatgactgtgtc

SEQ ID NO: 2738 - DNA, 120 bp, synthetic construct
  source 1..120: mol_type = other DNA
tttatggaagagcgtgccatccctgctcctcaccctgtgctcctgcctgccacactgatctctagaagctgtgtgctcctcctttcacttcttatgcttcagtttccatatctagttatt

SEQ ID NO: 2739 - DNA, 120 bp, synthetic construct
  source 1..120: mol_type = other DNA
tattaaaactttacagtgacatgaatttttatttcttgacatttgaagttatttgtttttgtgcctttcaattacagttcatagacttggtgttattgtgatcctccaagtatgctttca

SEQ ID NO: 2740 - DNA, 120 bp, synthetic construct
  source 1..120: mol_type = other DNA
tgggtcacctcacctggggcgaaccttttgggcaagcaggcaatcaatcccatccactacataatgtaagatctccagatcaggcgtcttcatcagggaccccagagggaggcaggggaa

SEQ ID NO: 2741 - DNA, 120 bp, synthetic construct
  source 1..120: mol_type = other DNA
gactccgaagtgactgcagatttctgttcccttcagtgagatgctcctgagttcttaataacttggctaggcttagaagagatgatctccaaagattgtctagcttgaaaaacttgtgat

SEQ ID NO: 2742 - DNA, 120 bp, synthetic construct
  source 1..120: mol_type = other DNA
tgaaatgacagagcacgtagttgtccgtagactgatgtcaggtgctgctgtttgtgttattaatgacaacagcagtcatcctattcaggtgcttttgctaggactgtgacttctgtctct

SEQ ID NO: 2743 - DNA, 120 bp, synthetic construct
  source 1..120: mol_type = other DNA
taaaatcacttctacctgaccacggcactgcagctcatgggcagcacatgctgtggatatttgttcattcatttaacaaatatttatttaatatctgttgcatgccaagcaaggccctgc

SEQ ID NO: 2744 - DNA, 120 bp, synthetic construct
  source 1..120: mol_type = other DNA
tcaatgtaataaacagaaaccacgacagggctaagtgttctggaggagaggcacatggtgtactgaggcccctgaggttgacccaggtgcacctttgagctttgcctgcgtggtttgggt

SEQ ID NO: 2745 - DNA, 120 bp, synthetic construct
  source 1..120: mol_type = other DNA
ggaccaggtgtttagagcctccttgcctaagcagtggaggggtctaggctccaaatgaatggcccaagcatctggaaccctgagtttaaatcctcactaccctggtgaggggaggcatgt

SEQ ID NO: 2746 - DNA, 120 bp, synthetic construct
  source 1..120: mol_type = other DNA
ttccctgtttctcttggggacaggggagggaggctgggactggggagggttgtctctttccgtttccttctgtccccacctggccaagtgcccctccttcttgtctttagaaacaactgt

SEQ ID NO: 2747 - DNA, 120 bp, synthetic construct
  source 1..120: mol_type = other DNA
ggtctcgcgtcctatcactgcatggagtcggctctgctcggcagtttgtcttaattttttttgttaatgtgtgtgtcattgtggttgtcaccctgttatgttttttaaattaaaagttgg

SEQ ID NO: 2748 - DNA, 120 bp, synthetic construct
  source 1..120: mol_type = other DNA
ctgagatttgggatctcttgtatcccatatgtccagaaagaacttaaggtgccttggatagctgtacccatgtgacgcaaaacctgtatcccttcccctactgccacacgacgcttccag

SEQ ID NO: 2749 - DNA, 120 bp, synthetic construct
  source 1..120: mol_type = other DNA
tcagcacacagggaaaaccagttctgtggcaggcaaaaggacaagggtattctagttagaaggttgataaacgcctccagataaagttattagaggaaggacagatgaaatcagtgttta

SEQ ID NO: 2750 - DNA, 120 bp, synthetic construct
  source 1..120: mol_type = other DNA
tgctggtggggaatgggtgggaaggtggcaggactggatgtgaggagacagctctggtggcttgtgcaggggttcaatttccccctccccatgggaccccagagctaactgggcatcaca

SEQ ID NO: 2751 - DNA, 120 bp, synthetic construct
  source 1..120: mol_type = other DNA
catgagccaccatgcccagcctcctgtcatacttttctctgtgtttccatttttctagcagacacattaattttatagtgagcaaaatctgctatttggaacttggcagtgaggtatcca

SEQ ID NO: 2752 - DNA, 120 bp, synthetic construct
  source 1..120: mol_type = other DNA
gccaggtcttgaatgccaggtcttgaatctgggatcctcccctccctgccactgcaagccccaagtgagttgcactgcagggctggctacaagataccgtgcaaagatcagaagagactt

SEQ ID NO: 2753 - DNA, 120 bp, synthetic construct
  source 1..120: mol_type = other DNA
tccagctttgttctggcctttgcagtagctgtgtcctctaccagaagacttttcttctgagatctgcattgcaagctcgttcctttgcttcctggtgggtctctttaagttcttccctga

SEQ ID NO: 2754 - DNA, 120 bp, synthetic construct
  source 1..120: mol_type = other DNA
gtgactatttccaggacatctttattaaaaaacagaccagaagcctgatgtgccccactgtccacagtttgctaaccctggtctagatggagcttttgaaaatcagaatgtgtaggaaat

SEQ ID NO: 2755 - DNA, 120 bp, synthetic construct
  source 1..120: mol_type = other DNA
catcaactctggggacctctttgtgcatccactctggaaccgctcgtgtgtggcctgtgggtgagtgaatgctccggtctggaacccagaggctcctctactcatccctccatgacccac

SEQ ID NO: 2756 - DNA, 120 bp, synthetic construct
  source 1..120: mol_type = other DNA
ttaattagagagaggggagaaaggcagagtgctctaattaagtgttctaattaagttctgaagaagagcagcggttgtaacaaggggctgactttgtcacatggtgccaccaaaaagaaa

SEQ ID NO: 2757 - DNA, 120 bp, synthetic construct
  source 1..120: mol_type = other DNA
catcatacacacacactccacacatcatacacaccacacacactccacacatcacacacacacactccacatatcatacatgccacacacatatactatacaccaaacacacctcacaca

SEQ ID NO: 2758 - DNA, 120 bp, synthetic construct
  source 1..120: mol_type = other DNA
cccaaatgactatttcactttctcctctcttcttaaacctctatcacccccttccccatcctcattctcatctgctgctttatggaaatggatgcaatcaagagatgtctccattgattc

SEQ ID NO: 2759 - DNA, 120 bp, synthetic construct
  source 1..120: mol_type = other DNA
tttgtagcccttgattgcagttgtaataaagttttctgggatttggggctgtagactgtggggttttttgaccaaatcttttgtgtgtgtgtgtgtgtgtgtgtgtgtgtgagcctatga

SEQ ID NO: 2760 - DNA, 120 bp, synthetic construct
  source 1..120: mol_type = other DNA
acttcttagcagcctacagagtggccagcaccgtatccgcttccagatcgatctcatcactgtacacgtactttaataggatcagaaaggctgcgggctccacgtctggaatgtgaattt

SEQ ID NO: 2761 - DNA, 120 bp, synthetic construct
  source 1..120: mol_type = other DNA
gcacctagaatttgctttctgggaagatggcaggacctctgggggaagtcactgggtgatatatcctggatgtcaaaatgagacacagtggtttcaggtcttacaaagaatctggactcc

SEQ ID NO: 2762 - DNA, 120 bp, synthetic construct
  source 1..120: mol_type = other DNA
acgcacccttgatgtcagaacgaggtgatgtgtgaaggttaaatgacagaggagtgtggaaccacagccatgctgtaggtgctccaggtgctctgcgtgtacaaagttcccacctcctga

SEQ ID NO: 2763 - DNA, 120 bp, synthetic construct
  source 1..120: mol_type = other DNA
attttgagacaatcaggaaatctgaatatagcatgaatatcttacgatatacaaggattattgttaattttgttaggtatgataaaagcatggtgggttgtttttgtttttgttttttaa

SEQ ID NO: 2764 - DNA, 120 bp, synthetic construct
  source 1..120: mol_type = other DNA
aaaaaaaaaaaagcaggggaaagtgggtctcctcactctcaaaccagtgctctccctatgacaccaaagagcctgtttctgtttcttgcttcattcattactccggttcccttgactgag

SEQ ID NO: 2765 - DNA, 120 bp, synthetic construct
  source 1..120: mol_type = other DNA
actacacacacaccatacacacatccagcccccctacaatgcactacacacaccacacacgcaatacgcatacacacacacaccacagcccagcccctccacacaatacttatacactgc

SEQ ID NO: 2766 - DNA, 120 bp, synthetic construct
  source 1..120: mol_type = other DNA
tgtttccctaccccaatcttgagccttcgggggcatcccctggatcctatggccctcttccacttatagtaccccttcttctgtctctcctctggtcacacacgtgggaaaaagagacct

SEQ ID NO: 2767 - DNA, 120 bp, synthetic construct
  source 1..120: mol_type = other DNA
ccggaacctaccgcaagggcgggccgagagggtcgcggggccgcggtcgcggccgctaacgttaccctgcgggctgtgggcttcaccccgacttcggccggctcggaagaggggaacttc

SEQ ID NO: 2768 - DNA, 120 bp, synthetic construct
  source 1..120: mol_type = other DNA
agtgtgcccagccaaaaacggcctcaggtttccttttttctttcccccgtcaagtgttaaacatttgttacatgtgtttctctccctctccatacatacacacacacgaatgtattacta

SEQ ID NO: 2769 - DNA, 120 bp, synthetic construct
  source 1..120: mol_type = other DNA
gctgccacggaagctcaagaagtcgaagaaatcggggtggcacagaattacacttcatggccacacagaagactcggggcttcgcaaacccatcaaaaaaagcaacccgaatggcaacat

SEQ ID NO: 2770 - DNA, 120 bp, synthetic construct
  source 1..120: mol_type = other DNA
cagagctgggacagaaacaaccatggcagtgatctattattgggcactcactggctcacagtgcaggcactacacatgaggctatcgaaatatgatcatcttcattttcagatgaggaaa

SEQ ID NO: 2771 - DNA, 120 bp, synthetic construct
  source 1..120: mol_type = other DNA
agcaaagaagcatatgcaacccatgagggccaggaccacccaatctgggctcccatgcatgagatatccatatggtatttggtagatagggtggagagggtggagagggtgaatagggtg

SEQ ID NO: 2772 - DNA, 120 bp, synthetic construct
  source 1..120: mol_type = other DNA
aagccccagcaaccaaatgcattaaacactggacatttctgtgacaggtaaaagcagaacctgctgaggctgaggaactctggaattaaatgaagcaaaaacagaatcctaaccatactg

SEQ ID NO: 2773 - DNA, 120 bp, synthetic construct
  source 1..120: mol_type = other DNA
ctctggccactcttaacatcagtcagatcttctaattgttccaatctagaatttgcttaagaaccaggtgtcgctgtccctccgctcctgcacatttctatttgctatttcaatatgtga

SEQ ID NO: 2774 - DNA, 120 bp, synthetic construct
  source 1..120: mol_type = other DNA
gagggcaccattgtctacattaaggcagtcaaaacctggctgtgttgaaacaactatgtaaaaacagatggtttggctaaattcatctttccttccttctccttgagtagcacctaggtg

SEQ ID NO: 2775 - DNA, 120 bp, synthetic construct
  source 1..120: mol_type = other DNA
ccagggctagaaggcctagagttcaagctcacacttgaggccccaggagaaacatatggcatctgagttgagacaggcctgagggaacccaggatttccagcaacacttagatacgctca

SEQ ID NO: 2776 - DNA, 120 bp, synthetic construct
  source 1..120: mol_type = other DNA
aatgagcaggaaattattgcaaagcatctagagggacattctcacctggctgggtgtctgcaagtgcaccattgcatcaaaaccagggtgaagaaatgggatgcgagattctggggaaaa

SEQ ID NO: 2777 - DNA, 120 bp, synthetic construct
  source 1..120: mol_type = other DNA
catttatctgcctctaaggagaaaaaaggagctggatgaaatgacctcagatgagtcctgttgcataacctcatcttgctagtcctcagtgccccaggatgcaggagagggacagtcttt

SEQ ID NO: 2778 - DNA, 120 bp, synthetic construct
  source 1..120: mol_type = other DNA
gtgttctagaaacactactgaagaaccaaaggcagaatagtcaaataattatggcaccattattttagctttgtctgacctgctgtgtgacctggagctagtccctttgacactttatgc

SEQ ID NO: 2779 - DNA, 120 bp, synthetic construct
  source 1..120: mol_type = other DNA
taaaaacataggtcttatcctgttactccttaatcaagtttctaagaggtttttctgtcactcgaatgcttttttttggggggggggggtgggcggggggtggtttgagacagggtcttg

SEQ ID NO: 2780 - DNA, 120 bp, synthetic construct
  source 1..120: mol_type = other DNA
gcaacctgggagcttgtgagaaaagcaaaatttcaggtcccagacctaataaatcagaatctgcattttaataagctccctaggtgatctaggcactttcaagtctgagagatactgttt

SEQ ID NO: 2781 - DNA, 120 bp, synthetic construct
  source 1..120: mol_type = other DNA
taattagttatcagactgtgtgctggatactgtgagggatccagagagatgaatcatatgcagatcctaccctcaaggagcttgtatagcaggaggggaaataagacatacacattgatg

SEQ ID NO: 2782 - DNA, 120 bp, synthetic construct
  source 1..120: mol_type = other DNA
tggaaaacaacaaccccttcagggctgaaagggagcagcacactaaactaacaaggagaagaacgcaatgaacagtgctgctgcatctcctctgtgaacatcagggattctggacttact

SEQ ID NO: 2783 - DNA, 120 bp, synthetic construct
  source 1..120: mol_type = other DNA
tctttacacaaattgcctacagaccacttgatacagaatgggccagacatggtgagttagttgtgaaccaactggttacactggtgggtgtgttgaagagagaaggttttatcattctta

SEQ ID NO: 2784 - DNA, 120 bp, synthetic construct
  source 1..120: mol_type = other DNA
ggtaccaagtctttaaaatctagtgttgtattttacactgatagcacatcccatcttggtctagcaacattgtaagtgctcagtagccccatatagtagtctttaccatatagagcagta

SEQ ID NO: 2785 - DNA, 120 bp, synthetic construct
  source 1..120: mol_type = other DNA
ctgtgtattttaagacaaatcagtaaggcattccctaggaagttccagagagtgggtcctttgcttgtcaagctctgtattaggccaagtatggtgggtcatgggagcagggacacttct

SEQ ID NO: 2786 - DNA, 120 bp, synthetic construct
  source 1..120: mol_type = other DNA
agcctgtctttcaacttgacagaggctctcaggaattctgcttggagtggaatccaggtcccagagcctccatacttgggtgggatttgatggtttaaacaagcgatttcacaagcataa

SEQ ID NO: 2787 - DNA, 120 bp, synthetic construct
  source 1..120: mol_type = other DNA
tgatcccacatctccgtaagcaggcaggaatcactcccctgttttgcagatgagaaagctaagagggtcagctgttgtcaaaccagtcccatcacttgagaacttgttagaaatgcaaat

SEQ ID NO: 2788 - DNA, 120 bp, synthetic construct
  source 1..120: mol_type = other DNA
ctgtataaaacattctaactgatgcccacgacatactattggctgatggttttgctagtatacagtatggccacttactgccattcccatgcgttatcttgtgtgcttaccataactcag

SEQ ID NO: 2789 - DNA, 120 bp, synthetic construct
  source 1..120: mol_type = other DNA
cctcagtctggtgtcaaagggaggtgggttttgtgctcagcctgaacttgaggcttcctcaagtacaaggttgctagatttagcatataaaaatatgggacatccaggtaaatttagaaa

SEQ ID NO: 2790 - DNA, 120 bp, synthetic construct
  source 1..120: mol_type = other DNA
aagatctacatcagaaagggctgatgtggtagggagctaaaaagccagaggcttactgggtcaaacccacatgatttcataaggctgaaaatgtcacttattagtacaatcaacgtgtga

SEQ ID NO: 2791 - DNA, 120 bp, synthetic construct
  source 1..120: mol_type = other DNA
ggctttcctaggccacattggaagaaaaataattgtcttgagccatgcataaaatacactaacactaatgatagctgatgaactcaaaaaaattgcaaaataatctcataacgttttaag

SEQ ID NO: 2792 - DNA, 120 bp, synthetic construct
  source 1..120: mol_type = other DNA
ctgaatttgtttttgaaaatgagctattttctaaatcagtgtgatacttagagttaagtttccagaatggaattattgtgcaataatttagttataaaatcatgatgggaatactgtgtc

SEQ ID NO: 2793 - DNA, 120 bp, synthetic construct
  source 1..120: mol_type = other DNA
ttttaagactaagtttctgaatcttagtatttgagattctggctgccaaccttctctgatctagtgattgtacattccccttctttctcccttcctggttcctgtgcatcaccttcaccc

SEQ ID NO: 2794 - DNA, 120 bp, synthetic construct
  source 1..120: mol_type = other DNA
agcactgtttgcttaattatagcacaccttcctaactgcctggaattaaaatttcataagggtctggccttctcatcagattgtaagcttctcccgactgggactctgccctattaatct

SEQ ID NO: 2795 - DNA, 120 bp, synthetic construct
  source 1..120: mol_type = other DNA
tgtaatctaagggtagagtcttggttattcaaactatctcttactacaaaaccccccccccccaaaaaaaaagaagagagagaaggagcaggttgtagacagtgtggaagtatatgggag

SEQ ID NO: 2796 - DNA, 120 bp, synthetic construct
  source 1..120: mol_type = other DNA
tagaaggcagaagcaagacaaaagacaaaaaggaagccacattcccaaaataactaacctactctcctgacaacagccttaatccattcatgagggcagccttaatctgtgcataaccta

SEQ ID NO: 2797 - DNA, 120 bp, synthetic construct
  source 1..120: mol_type = other DNA
gagcctccatgcccggccacttttcttattttctctgtctactactggcttagcaaattctgtgtgctgccctggagtcttaattacttcaggtgatcacactgaactataaatataatt

SEQ ID NO: 2798 - DNA, 120 bp, synthetic construct
  source 1..120: mol_type = other DNA
catgtatatgtgtgactgaggggcgtgtgtatgagtgtgaccgaggggcatgtgaatgtgactgtgaggtgtgaatgtgactgaggagtgtgaatgagtgtgactggaggggcgtgtgaa

SEQ ID NO: 2799 - DNA, 120 bp, synthetic construct
  source 1..120: mol_type = other DNA
agacccacccccctcccccaaaaagcattgttaaaacagggaaaaatagtaaagttcctgctgttatttcagcctaagccacttaatccatcagcacataaagcaacttattttatgacc

SEQ ID NO: 2800 - DNA, 120 bp, synthetic construct
  source 1..120: mol_type = other DNA
tagggagcctgaaagggtatgggtgagaaggcaggtaggaaagtgcatattataggaaaaaagtagtgaggaaagttgaaaattgaagaatggggacacacagaacaatgaaggtggatt

SEQ ID NO: 2801 - DNA, 120 bp, synthetic construct
  source 1..120: mol_type = other DNA
aagagccacttctcagtgccagcctgcccttctgttgggaactaaggcagctgacggcgcctcccctgctcctgcccctgtctgagtcatcctctcctctccaatggcagtcacagcccc

SEQ ID NO: 2802 - DNA, 120 bp, synthetic construct
  source 1..120: mol_type = other DNA
gggactgtgcagctaggtggatggataaaaaggcatcttgaaaaccaaggtcaagaatatccacgtggaggctgacagcaagaaatcggctaatgtttgaagagttatgtgatcaaaaaa

SEQ ID NO: 2803 - DNA, 120 bp, synthetic construct
  source 1..120: mol_type = other DNA
atgcaccttcaggtgcagaagctgtaactgtaccttagggagaggggatacctggagcatttaaaaatgtcattaccgtccaatctaaagtaataatagtggacatgtagcatagcactt

SEQ ID NO: 2804 - DNA, 120 bp, synthetic construct
  source 1..120: mol_type = other DNA
aaaaaagttgatgatttaattgaatttagtggacatttgctaggggtcagaacacagaaggtctcaggcaaacggggcagacaggaaggattgatttagcatcaggtacatgaaggaggg

SEQ ID NO: 2805 - DNA, 120 bp, synthetic construct
  source 1..120: mol_type = other DNA
tagaaggcccagagatatcaaataactttcccaggatcacacagctagtgtgtggagctcaaactatgaatccaaggttatctgactcctaaatcaatgcccttaacttcatgtaacata

SEQ ID NO: 2806 - DNA, 120 bp, synthetic construct
  source 1..120: mol_type = other DNA
gtgcagggtgacgggggaagccatgggagaagtctctgacagttataagggtgagggtaagtccaagtacctatattctgagaagatgtagacacatttaaaagctataaaacttagttt

SEQ ID NO: 2807 - DNA, 120 bp, synthetic construct
  source 1..120: mol_type = other DNA
tttaaaatgcaccccaagcattgtgcaaaagtactgtgtagtgttcaagtacagtgcaagaaagctgcgatgtgccttacagagacaataacgtgtgtttgataagcttcattcaggcag

SEQ ID NO: 2808 - DNA, 120 bp, synthetic construct
  source 1..120: mol_type = other DNA
atagagcaaggacaactctgggagttcctggatgtgaatcacagagggcagaggaagaacgtattcatgggattgcaagtttattgttttaagttgaggttcggtttaatgcgacccact

SEQ ID NO: 2809 - DNA, 120 bp, synthetic construct
  source 1..120: mol_type = other DNA
ttttaattatctccaggcaggcagtcttttaatttcctgagcaaggagtttttttttgtctttttctttttaatttatttatgtattttttgaatcaggatcttgccctgtcacccaggc

SEQ ID NO: 2810 - DNA, 120 bp, synthetic construct
  source 1..120: mol_type = other DNA
ccagtgcagatacacaatgtattctgcttctgtcctgcagctatagccatatgtcaaatgtagacataggaatgtaaaaccctactggttttacgttaaagagctgttctttccagtagg

SEQ ID NO: 2811 - DNA, 120 bp, synthetic construct
  source 1..120: mol_type = other DNA
gactttctagagaacgttttctagagaagactttctagagaaaacgggggggggggggcggtatgctgactcacctaaatcagaattctaacttttattactgcagagaaatgattattc

SEQ ID NO: 2812 - DNA, 120 bp, synthetic construct
  source 1..120: mol_type = other DNA
tatccttgaaaattcagctctgacatagccttctctagaaagatgcctgttttcttacacctaagcttgggttgcccttgtgagatacttagcagtagagactacatctgctttccctga

SEQ ID NO: 2813 - DNA, 120 bp, synthetic construct
  source 1..120: mol_type = other DNA
tttagcacttcacttctatttctcttttgtcaaagtgacagtccccttttagaattatgttttgcattcctcttccttcccctcctaggatatgagctgtgggagggcatagtccaagtt

SEQ ID NO: 2814 - DNA, 120 bp, synthetic construct
  source 1..120: mol_type = other DNA
gcacccctgtattttcctacaatgctgaccacaaccaccaccaccactagatatacagtccacctgatgaatgcttatgacttgatgtggctgccattctatacacattttgtttaatcc

SEQ ID NO: 2815 - DNA, 120 bp, synthetic construct
  source 1..120: mol_type = other DNA
attgctggtgaggatgcagggcagcaagaacttttattcattgctgtggaaatgcaaaatggtacagccactttggaagccagtttggtaatttcttacaaatttaaacatagccttacc

SEQ ID NO: 2816 - DNA, 120 bp, synthetic construct
  source 1..120: mol_type = other DNA
gttagtactctaaagggacttatatttggcaagacaacactggattaagtggagaataggaaaaaaaacagtgaatatggcatatgattgaccttagaactgccgacatgcttgctgtat

SEQ ID NO: 2817 - DNA, 120 bp, synthetic construct
  source 1..120: mol_type = other DNA
atgcaaaccataccaatttgaaaacaggcaaataatttattttgctaaatcaaatttcagagattgaagtctggatctgtttatgttgccgcagtccctcttgaaattaccaaataggag

SEQ ID NO: 2818 - DNA, 120 bp, synthetic construct
  source 1..120: mol_type = other DNA
ggcataaattcatcacttacaaattaaaatataatagaaaacacattttatttaacttcttcccaaaatatttaaacatgcttagtgactgctttatgctttgggagaaatgaaaggaaa

SEQ ID NO: 2819 - DNA, 120 bp, synthetic construct
  source 1..120: mol_type = other DNA
aatattgaggtcctcagcacaggtcacagatcctattgtaatttgtgtttctttttcaacctcaacctcaaagttggcaaaatgaacctcaaaacccactgaaactcggcggggtgcggt

SEQ ID NO: 2820 - DNA, 120 bp, synthetic construct
  source 1..120: mol_type = other DNA
tgtcctcatgttaccatacttctacaagtctgtgctgccagtgagggttggcaaatcatcccaactcagaaggacagacttacaaaatggcataatcaagcttcactaacactgtatata

SEQ ID NO: 2821 - DNA, 120 bp, synthetic construct
  source 1..120: mol_type = other DNA
atcccaccaacaatgcacagcttcttggtgctcatgttttctataattgccccagccatttttgcgccccccctttttcttttctccttgaaataaatgttttagggtgagctttttgct

SEQ ID NO: 2822 - DNA, 120 bp, synthetic construct
  source 1..120: mol_type = other DNA
gaatcttttatgcaattatccttaatcactcacaggacgatgatacctgtgagtctgcatctgcagaaggactgcccaggtgctttaaagcataagacttcttgttttctgttcacaggc

SEQ ID NO: 2823 - DNA, 120 bp, synthetic construct
  source 1..120: mol_type = other DNA
agttacctttatgccaattatttcttgctaaattccaaatatttgaaatttgaagaaactcgtatgttccatgtgtatttgaatacaatgtgtgttttgccattggtctggtgttctata

SEQ ID NO: 2824 - DNA, 120 bp, synthetic construct
  source 1..120: mol_type = other DNA
accttgaaggcacccataggtcgcgcagtctttcagaagctgcaggagggctgtgactgtatggggttgcagactgaaaatcttattaacgtgaaagaggaatttgaaattaaaaaaaaa

SEQ ID NO: 2825 - DNA, 120 bp, synthetic construct
  source 1..120: mol_type = other DNA
tggcatgcatgtgacaatatttaggtaggcatgagtttatcatagagacaaaataaaatcctaattttgtcagaggtcattatatagatttggagatacagaatagaatcattcctacat

SEQ ID NO: 2826 - DNA, 120 bp, synthetic construct
  source 1..120: mol_type = other DNA
acctgaggtgatccaccttccttggcctcccaagagtttccctttttaaagagttcacaggctacagaggaaggttgacatgtaaacaaaatgctactttctgatactattgatacacaa

SEQ ID NO: 2827 - DNA, 120 bp, synthetic construct
  source 1..120: mol_type = other DNA
gattacaggcatgagccaccacgcccggcctgggatggtctatcagcaacaaataaataacaggcctacacagttttataaaagatatctaccaatatttaaagaactaattttcatgtt

SEQ ID NO: 2828 - DNA, 120 bp, synthetic construct
  source 1..120: mol_type = other DNA
aggcatgagccaccacaccagcctgaaggtcaaattgttagcaatcttattttcatctgctgcttttgctaggaaaattaatatattcatattcacatgttccagggattaaatttattt

SEQ ID NO: 2829 - DNA, 120 bp, synthetic construct
  source 1..120: mol_type = other DNA
tgaccctaacaaaagagagtaatggggtttaaatttatgccactctacaaaaaagaagtcgaactcacccataggtagtgtcattagtcttttaggtctgcatgcctctctctatgactt

SEQ ID NO: 2830 - DNA, 120 bp, synthetic construct
  source 1..120: mol_type = other DNA
tcttttaagttaagtatttttactggtctctgagtggtcaccttagagattatactgtgcattctttactcattataaatttgggccgggcgccatggctcattcctgtaatcccagcag

SEQ ID NO: 2831 - DNA, 120 bp, synthetic construct
  source 1..120: mol_type = other DNA
gggcctgctatattttttcatccatctttggtgatcatttagaatattgctaagggtatatttcagaagaactagaaaagaaaatagctgtttttcaaaactttcaaggtgttttcttgg

SEQ ID NO: 2832 - DNA, 120 bp, synthetic construct
  source 1..120: mol_type = other DNA
ttcttcaccccccccccatctttttaacacaaaaatacataaaggattcaattaagaccaagttcaatcccaatgtctcctcctgtaggaagttgtcctaaataccctcaactagttacc

SEQ ID NO: 2833 - DNA, 120 bp, synthetic construct
  source 1..120: mol_type = other DNA
ttaccagtgcaaaacaggtatttctattacattgaattacaattacttaattgcacatcttttttttccactgcaacatggtcacgttgaagataggactccccccaccagcccccaacc

SEQ ID NO: 2834 - DNA, 120 bp, synthetic construct
  source 1..120: mol_type = other DNA
ctaggattacaggcttgagccacctcgcctggcccaaaatgcttattaatcttttaagtgatcaatatagttgttattatgatgacagtcatttcagctcttgcactgaggcagttcctg

SEQ ID NO: 2835 - DNA, 120 bp, synthetic construct
  source 1..120: mol_type = other DNA
ctccccctcatcctcctgtatctcctccccctcctcctcctgaaactcttcctcctctttctccactcctcctcattcttgctagacggaaaaaatagttatttattttttattgataca

SEQ ID NO: 2836 - DNA, 120 bp, synthetic construct
  source 1..120: mol_type = other DNA
ttgcaaattcattgatatattgtctgttagattgttaaagtcctaccatttgaatcatatgcagcttttctctttggaaatatatttatgtagtctccatccatattcatatgaggatga

SEQ ID NO: 2837 - DNA, 120 bp, synthetic construct
  source 1..120: mol_type = other DNA
acccaactgagtcttggaaaaggaacagtagttagccaagggacaagtggcagaggagattccaggcagaaggaacagtataactataccaagaaaggtatagaagtgagagtaagcttc

SEQ ID NO: 2838 - DNA, 120 bp, synthetic construct
  source 1..120: mol_type = other DNA
agtaggttaatacaagtcagagacttccttattttagttacacattacaatagaaagcctgttggattttaagaggctacttttatatggtagaatgctgtgatgaggcgatgttgacag

SEQ ID NO: 2839 - DNA, 120 bp, synthetic construct
  source 1..120: mol_type = other DNA
ggtctttgaatcttgaaaaagtggcatgaagatgcatgacagtttagaaattattcatagtgcagtagcattggcactgagagtccaatggtggccatgttgactggtgccaatgtcatt

SEQ ID NO: 2840 - DNA, 120 bp, synthetic construct
  source 1..120: mol_type = other DNA
tcattctcaattccctcttgaagcccagtaacccaaatatttgctcttttgatactgttgcattgttctgtaaacttcttcattcccttttaccctttttttaattgtttctcctccagc

SEQ ID NO: 2841 - DNA, 120 bp, synthetic construct
  source 1..120: mol_type = other DNA
aagactgaagagacatccggaacataagaggaaaaccaggagaactcgtttcagggaaaccaagaaaaaaaatgggggaaaaaggatagtaaagcagcaaatgcaactttgcactccgta

SEQ ID NO: 2842 - DNA, 120 bp, synthetic construct
  source 1..120: mol_type = other DNA
tttctccctcctaaaattcattcagcaactatttgttgagcacctgtgatatgccaggcaccaggcatacagcagtaaataagacaaacaaggttctaatgtagtcacgactcgcttaac

SEQ ID NO: 2843 - DNA, 120 bp, synthetic construct
  source 1..120: mol_type = other DNA
cccaaacccactgcacactcaataacaaagttatatccctagggggtaaaagtggctgagtaccactattttagggcatgcagtgaggtatgcataacaagcttttagctccatgataaa

SEQ ID NO: 2844 - DNA, 120 bp, synthetic construct
  source 1..120: mol_type = other DNA
aggtgcacacccaacacctggctccataatgtcaaatgaatgagccattccatgaagaacccaaggcagtgattttctcattccccaggctaacatttcatatttttatggtaaattaac

SEQ ID NO: 2845 - DNA, 120 bp, synthetic construct
  source 1..120: mol_type = other DNA
agctgggactgtagatgtgagccaccttgcctggctctgttttctctagtacacccacatatatttgaagatagttgtatcttacgagtctttcttttcctgtgctaagcaatcttgatt

SEQ ID NO: 2846 - DNA, 120 bp, synthetic construct
  source 1..120: mol_type = other DNA
agaaagaaagaaacgaacaccctatgaagttgttaacattgaccagatctctaaatgttgaattgctccagattcaggccttggaattcttatctccttcactttctagggaaacttatc

SEQ ID NO: 2847 - DNA, 120 bp, synthetic construct
  source 1..120: mol_type = other DNA
agggtcatagttaaataacttgctcaaggtgccccaggtaataagtcatggtgccaggatttgaatccaaggaatccagctttagaatggcgctcttaacctttgttctatcgtattcat

SEQ ID NO: 2848 - DNA, 120 bp, synthetic construct
  source 1..120: mol_type = other DNA
tcctagagagttattaatagagcccccaaatggcttacgctttcaaatgattttcctgcaaatctgatttcttgcatggcacatggcaattaggaggtggtgctagtatctttgaactgg

SEQ ID NO: 2849 - DNA, 120 bp, synthetic construct
  source 1..120: mol_type = other DNA
cttgattttgagaaaccttcacaccaattaatcatcttctacctccttccagaagttcaggttgctaaaacatgagccattccttctgaccaagtatccatgtggcatttcccagcctag

SEQ ID NO: 2850 - DNA, 120 bp, synthetic construct
  source 1..120: mol_type = other DNA
ggatgtgagatgtacagcccaggtatggttatggacgccccacggattctgtggctagtgaaaactgacctacctcgcaaataaagtgcaaaatttaaaaaaaattcacaatcataacta

SEQ ID NO: 2851 - DNA, 120 bp, synthetic construct
  source 1..120: mol_type = other DNA
ttaaaatatgatggtagaaaaaagtaaatccgaagcagcctgaggtaatctgtgaaaatggttcgctattcacttgacccggagaaccccacggaatcatgcaaatcaagaggttccaat

SEQ ID NO: 2852 - DNA, 120 bp, synthetic construct
  source 1..120: mol_type = other DNA
tctggctaaactgacctagcaggactttttctggaatcggacactgcaaagacagacacagaagcccaagattgaggtccagttgagaagagggctcagagaagcctacctaagtttggt

SEQ ID NO: 2853 - DNA, 120 bp, synthetic construct
  source 1..120: mol_type = other DNA
ggggtttggccaagcttgtagctgacgggagtgttctctatttgcttacttaagagataaataaaaagattaacaggtatttgaggcatgctatatccaagggagagaaagaatttacct

SEQ ID NO: 2854 - DNA, 120 bp, synthetic construct
  source 1..120: mol_type = other DNA
ctggcaaatttttaaatgttaaaattcaatgtttccaaagataaaagaattatcttttgctctttggttatttccaagactgttgtgtgtttcactattgaggttgtttgaatgaaaaaa

SEQ ID NO: 2855 - DNA, 120 bp, synthetic construct
  source 1..120: mol_type = other DNA
agcactttggtctcttaggaggaaaagcgccattaaaatccaaggcattgtcaccattaccgatgtgattgttgttgttcttcggcagacttacccaagtggccttgggacaggagctgg

SEQ ID NO: 2856 - DNA, 120 bp, synthetic construct
  source 1..120: mol_type = other DNA
aaatatgtctagcatactcataaagcatgaacatctacacgtaactaaaaataaatactgagagcactgacactgcttctgggggttttcccaagcacgtgttacgtatgataataatgg

SEQ ID NO: 2857 - DNA, 120 bp, synthetic construct
  source 1..120: mol_type = other DNA
tgagggaggtctgctgccatggtctttgttaagtgcctgccaccatggcccacaattagtcagttaataaagggttcttgatgagagaatttggcaacatgtgattttccacaaatataa

SEQ ID NO: 2858 - DNA, 120 bp, synthetic construct
  source 1..120: mol_type = other DNA
tagatgcaaaaaattctcaacaatgtatcacaaaatcaaatctagcaatatataaaaagggtaatacatcatgaccaagtggggtttcttcccaagaatgcaaggctggtttgatgttca

SEQ ID NO: 2859 - DNA, 120 bp, synthetic construct
  source 1..120: mol_type = other DNA
attcttgctttctagaacccaaatgtcagtttctttttatttttgtgtttttcctacggctgtatcatgacccaatctcagtcagagccacagaagaatgcaccctgagtctgttataac

SEQ ID NO: 2860 - DNA, 120 bp, synthetic construct
  source 1..120: mol_type = other DNA
gctctctggtcttttttccccctaagtctttctctttcccatcatacccttccctgcccaccttgttttctgttctccttttattaggaattcccaagtgaattttattaatgtgggagt

SEQ ID NO: 2861 - DNA, 120 bp, synthetic construct
  source 1..120: mol_type = other DNA
ctagattatttttcatccctcaaaaagaaatcccatacccataggcagtcactctcccattttcgtctcccccagcatcaagcaaccaataatctactttctgtctcaatggatttgcct

SEQ ID NO: 2862 - DNA, 120 bp, synthetic construct
  source 1..120: mol_type = other DNA
tgcccctgaagaaaacaaaatggttttctttaaatcaaaaaaaaaaaaaaaaagaaagaaaaagacctataaaaggtaagatgtcaagtgctaaccaagagaaagctttgaatgccacga

SEQ ID NO: 2863 - DNA, 120 bp, synthetic construct
  source 1..120: mol_type = other DNA
cttaaatggaagcaggggccttttcctgaaagataggatgaatccaggaataactggcagagatagagtcatgactgaattaaagccaacatcctaacccaagtcactctccccttttta

SEQ ID NO: 2864 - DNA, 120 bp, synthetic construct
  source 1..120: mol_type = other DNA
tcccagaggagcagatggggcagctgaagtacctggaacagcaggaggggcagctgaagcacctggatcagcaggagaagcagccagagctcccagagcagcagatggggcagctgaagc

SEQ ID NO: 2865 - DNA, 120 bp, synthetic construct
  source 1..120: mol_type = other DNA
acattgttccaaggaagggttagttttgctgaagatgtggccagtcttgcaaacatatggacccgtcaaacagaagctgtttctaaggcagcatttcctagattttggtcattcatgaat

SEQ ID NO: 2866 - DNA, 120 bp, synthetic construct
  source 1..120: mol_type = other DNA
gttatgctttagtacgagtgagccaggaggaaaagcgatttctcagaagggattattgaatcctccctaacagagagtctgcaaattagacacagtgtgtggggatgtcccctacccccc

SEQ ID NO: 2867 - DNA, 120 bp, synthetic construct
  source 1..120: mol_type = other DNA
gagatgatgttgaaggtctgtggctgtgccccttgctcctggcacatggtgaggatcacacggtcagcttccctgtaacccaggtatcatgattaaccctagggagccacatggatgtgg

SEQ ID NO: 2868 - DNA, 120 bp, synthetic construct
  source 1..120: mol_type = other DNA
tttttttccatgttgtctttgtatacatacagctagccagcaatccgcaggtctgctgctgcggctgcttctcttacagagcagccatttcccttcctctgttgctctaataaacttact

SEQ ID NO: 2869 - DNA, 120 bp, synthetic construct
  source 1..120: mol_type = other DNA
atttagtgggtgctgttaaatctcctgtaatacacaggacagtccaccacaataaagcattaccctacccaaaatgtcaacagtgtcaaagtagagaaactgtgatatggtaaggccgac

SEQ ID NO: 2870 - DNA, 120 bp, synthetic construct
  source 1..120: mol_type = other DNA
cttcggatactgaactgcagaaatgtcacatattcacagaccaccccatccccagggacagagaagaaaggacactgaaacatccacacatggtaatcaaaagccaggtttgcctttatg

SEQ ID NO: 2871 - DNA, 120 bp, synthetic construct
  source 1..120: mol_type = other DNA
tcccatttgcacctgtccgtaagctactgtgcagtgttctggagcaatcatcccatgggtcttttcctctattacaggacggttgcccaaggacagggactatgtcccttctgtcctctg

SEQ ID NO: 2872 - DNA, 120 bp, synthetic construct
  source 1..120: mol_type = other DNA
ggggtttctccatgttggtcaggctggtacaaattatcctgatcacatagctagttagtcactcagctggggctcacttaaagtcctatattctctacattagtcaactagaatgatttc

SEQ ID NO: 2873 - DNA, 120 bp, synthetic construct
  source 1..120: mol_type = other DNA
cgctgggtctttctacccaggcttcttactcttccttctttgtgccaggagaatgtgacagtccctgaaccctgggctactgagcaaataaggaccatattttctccttcaatcagctgc

SEQ ID NO: 2874 - DNA, 120 bp, synthetic construct
  source 1..120: mol_type = other DNA
actgaacctcctaataaagcaagtcttgatccattgttcacagtgacatatctggtaacttagtccctttttcttatacgcatccaaggacaacattttggcctgggacactcactcaca

SEQ ID NO: 2875 - DNA, 120 bp, synthetic construct
  source 1..120: mol_type = other DNA
ccccagtctcagatagctttactagcaatttgctctactagcaaatatttaaggggagaaataagacatcctacccaaatatcgcagagaataacaaaaaggaaatgcaccctgtggtgg

SEQ ID NO: 2876 - DNA, 120 bp, synthetic construct
  source 1..120: mol_type = other DNA
ggggtttggtaatccaggaacaaaccttatattttccatcatatgctgactgggagcactagaagagttatgtggaatattaatttcagccctctattttgccagtaaatctctacccca

SEQ ID NO: 2877 - DNA, 120 bp, synthetic construct
  source 1..120: mol_type = other DNA
tgcgatagtttactgagaatgatgatttccttttaatactcttttaaattatgaacttgaatgtttcttatataatacccccaaatgaaacttataatagaaaatatccaaagttgcctt

SEQ ID NO: 2878 - DNA, 120 bp, synthetic construct
  source 1..120: mol_type = other DNA
atgccaatgacctatcagagtatggcttaggctgttgctgtcatcatcaccaaatgagtaacaatgatttctagttcaatttagtactcactgtgtgacaggcatgtttggaaacttgag

SEQ ID NO: 2879 - DNA, 120 bp, synthetic construct
  source 1..120: mol_type = other DNA
agtggggaattgttgagttgctgtatcctttaaaaaaaaacaaaaaacttgttattttgaaagaacttaaggctcacaagatgttacaaaaatagtagagtggccttaccctagatccag

SEQ ID NO: 2880 - DNA, 120 bp, synthetic construct
  source 1..120: mol_type = other DNA
taagtcttagatgaagagtcttagatgaagacttacataggtttaaaactgaaaatgctttttcaactcagcatttcatatcccttccgtgacaagtattcaggggggagcccaacaaga

SEQ ID NO: 2881 - DNA, 120 bp, synthetic construct
  source 1..120: mol_type = other DNA
tcacaatttaatccctataattaaacaaatggaaggatacagtcttggttaagattgtcttcttctttcttttttgtttatctctcaacatcagaaaattgtatatgttggaaacgctgg

SEQ ID NO: 2882 - DNA, 120 bp, synthetic construct
  source 1..120: mol_type = other DNA
cactcatgtgttcagtgattcaggttctgttgaagataccaaagatattcggttggtcaaaatgacgggcatataaaggcttctcaggtttctgaggtaaactgaagggtcagaattcca

SEQ ID NO: 2883 - DNA, 120 bp, synthetic construct
  source 1..120: mol_type = other DNA
caccagaacagaaatgagaacccagaaatagatttgagtattaatgagaaaaggatgatttatttaagaaacagttctggctcaattagctattcatctggaagaaaagggtgttgggtc

SEQ ID NO: 2884 - DNA, 120 bp, synthetic construct
  source 1..120: mol_type = other DNA
aaactgagctttagatgtctagaatggtttgcctgatgtcacacagctggtagatagcagaaccaggacaataattgaggtctttaattattggtcctgggttgacagatgatgccacca

SEQ ID NO: 2885 - DNA, 120 bp, synthetic construct
  source 1..120: mol_type = other DNA
gccagaaagggcttccatagcagagaaggtttccttcccatcagaagaaagcttctctctgctccccattcactggaaatttaatgtctaacatcttgttttctacatcggttaaaatgt

SEQ ID NO: 2886 - DNA, 120 bp, synthetic construct
  source 1..120: mol_type = other DNA
aaatgctttgtccgacattgaatttatcatatcagcttcatttaatgcattatgagatgttgtctttatttttccttctgtatcccatggcttctcaccattcccctccccctccacccc

SEQ ID NO: 2887 - DNA, 120 bp, synthetic construct
  source 1..120: mol_type = other DNA
ttttaaaatgttataaaaataacattttatgtcgggtgcagtggctcagttctgtaagcccagcactctgagaggccaagatgggaagatcatttcagttcaggagttcgagatcagcat

SEQ ID NO: 2888 - DNA, 120 bp, synthetic construct
  source 1..120: mol_type = other DNA
acttctgctcacaggagtttttgagcctcagtgtctggctacagggttctgctttaatatgtaggaggaagagattcaagcctcttgctccattatgggtagacagcacactacagggag

SEQ ID NO: 2889 - DNA, 120 bp, synthetic construct
  source 1..120: mol_type = other DNA
gaggaatgaatgaaggcatttcgtataggatttggagcttacacgaacatcaaggctgggagagtgaaggcctggaagtttatagtcagagaatcagacaaaatagtccccactgactct

SEQ ID NO: 2890 - DNA, 120 bp, synthetic construct
  source 1..120: mol_type = other DNA
ctccctgttccttaaggctgatccacagtcatcctctagcaataataacgagcatgctctgtaataacaaaaatcacaagtgttgattcctaatccgtatggcattaggatggggagatc

SEQ ID NO: 2891 - DNA, 120 bp, synthetic construct
  source 1..120: mol_type = other DNA
ctccaactttccaaggtcaaatgtgaggtctcctctactcacattgtacaggccttcctgagggttcttccttctctgctaggaaagacaacgggaagacgttagagggagagaaacaca

SEQ ID NO: 2892 - DNA, 120 bp, synthetic construct
  source 1..120: mol_type = other DNA
ctgactctaaagttcttagcacagtatctgatacccaggtcaaaataaacaggaggtgtgatgatgatgatgatgaagatgaccaggggtgattaattcaaagagaaaaggaaagattgc

SEQ ID NO: 2893 - DNA, 120 bp, synthetic construct
  source 1..120: mol_type = other DNA
attcctattcagaataagtgcaaatcagtttacagagcccatatggctcatatctgaggagtaagctatttgtaatagcacatctgtaaagactatgggcaatatggagattatgggaat

SEQ ID NO: 2894 - DNA, 120 bp, synthetic construct
  source 1..120: mol_type = other DNA
ttacaggctgagtatgaaatattattgagatattggacttgtgccataaaagtttgctctagtttgtgataatgttgcctcaggttttcaactgtttaccaaataaagcatcttagaatg

SEQ ID NO: 2895 - DNA, 120 bp, synthetic construct
  source 1..120: mol_type = other DNA
tttgtaaataaaattttataatagtacacagccacactcattcatttattttctgtggttgctttcaagctacaattgtagagttgggtagtcgcaacagaatctctgtggcccacaagg

SEQ ID NO: 2896 - DNA, 120 bp, synthetic construct
  source 1..120: mol_type = other DNA
aaactttggaaaacccagggcctggtactctgacctcttccctgtctaactcttgcttagtgatctcatcacttacctgacttgaatgactaccaaatatatatctctcacttggacttc

SEQ ID NO: 2897 - DNA, 120 bp, synthetic construct
  source 1..120: mol_type = other DNA
caacagcatgtggaaatattattctggtattctcaatatttgcatagcctctcattattctttgatactttgattattgtatgagtcagtcatcatctctgagtccttgaactaggcaaa

SEQ ID NO: 2898 - DNA, 120 bp, synthetic construct
  source 1..120: mol_type = other DNA
catccatgtccctacaaacttatatttgatgaattctgcaaataggtgtatgatccagtttttcttatagcttctgtgatttggtaatcctcctacagatggtagaatatggtattcaca

SEQ ID NO: 2899 - DNA, 120 bp, synthetic construct
  source 1..120: mol_type = other DNA
ggatgttttctggtattgaggacaagtattcaaaatgaaagggcacactagttatccagcatattggataaaattcaataaaaatgactgtgtggcttagacaccagccaggggcagctg

SEQ ID NO: 2900 - DNA, 120 bp, synthetic construct
  source 1..120: mol_type = other DNA
gaaaggcccagaaccttttccttcttatggcctccctcttccagctgaacctatcctcatcctaggcagtacatcaaacatttactccagaactttaggacctgaaatttatttgtatat

SEQ ID NO: 2901 - DNA, 120 bp, synthetic construct
  source 1..120: mol_type = other DNA
ttgctcaatgccactgagcctcagttcctatcctggggatcaagtggagaatagcgtgtggcttttatctttgtgatgaacgtctaaggatggccgttgtgaaatatcattatttttatc

SEQ ID NO: 2902 - DNA, 120 bp, synthetic construct
  source 1..120: mol_type = other DNA
attcactgctcataaacttaagaccagacaaagctactcttttgatggacctagaaggtggcattcccgctttcatccccagcccctgacactatccaacctcaaaggcaaagagcttgg

SEQ ID NO: 2903 - DNA, 120 bp, synthetic construct
  source 1..120: mol_type = other DNA
ttacatgtttattatctatttctttgagttagagtgtaagctctttgagagatgacctttttctgcatgcccagcctggcgcatagtaagtgctcaacaaatatgtgtgggcatgccgag

SEQ ID NO: 2904 - DNA, 120 bp, synthetic construct
  source 1..120: mol_type = other DNA
caacatttttttttaacttgggactgccaagagctgaaggagagtggtgagcaaaggaatgaagggagagagagagaaactaaactggaagcttgagttttgtgtagcttcttgaaacct

SEQ ID NO: 2905 - DNA, 120 bp, synthetic construct
  source 1..120: mol_type = other DNA
tgattcgacagaatcacagccaagtgaggcctccagtctccccactgcttttctccacaacactgaaaagcaccagaaaaaataaatgtacaatcatttaagaatggccagatgtacata

SEQ ID NO: 2906 - DNA, 120 bp, synthetic construct
  source 1..120: mol_type = other DNA
ttgagtttgcctttagatagaatcggggttaactattcttttgtagctggaggaaagactgagtatgtgggtctacaaacaggtagttacatggcagtgacaggagtatttgagattaag

SEQ ID NO: 2907 - DNA, 120 bp, synthetic construct
  source 1..120: mol_type = other DNA
gagcttcagttaatcatccactgtaataaggattctagggcatgaaagaaaagcacagctgattcaaactgctagagtgaccaagtcatactgcacgaaggaagagcagcagtttaattc

SEQ ID NO: 2908 - DNA, 120 bp, synthetic construct
  source 1..120: mol_type = other DNA
gtaaacacccagaggatgtttttaaatctatatgagtagactcctttgaggtgttcaatactgatgactccttctttcttctcttttggctttcctcgtggcctctcatacttcagaggc

SEQ ID NO: 2909 - DNA, 120 bp, synthetic construct
  source 1..120: mol_type = other DNA
cttgtcttacagagaagtagtttttaatcttaagaccaggcaatcaattatttctttcatgtattgtgcctttggtgttgtttctagaaactcatcgccttatccaaagtcagctagtgt

SEQ ID NO: 2910 - DNA, 120 bp, synthetic construct
  source 1..120: mol_type = other DNA
ctgagcttcttgtattggtttttttatttaatcagtttttcagaaactctctcttcatgtattgcttctgcccctccccccccccctttttttttttgagacagggtcccactctgtttc

SEQ ID NO: 2911 - DNA, 120 bp, synthetic construct
  source 1..120: mol_type = other DNA
gctctctcaactacaaaatcaccacacttttctcaaatctaataggaattcagtgtcattacagatacggtctctagtgaccaggtgaagacaattgaagctttggtagaacttctgcaa

SEQ ID NO: 2912 - DNA, 120 bp, synthetic construct
  source 1..120: mol_type = other DNA
ccttgttccttctttccccaactctcccatgcatgcacacacacacacacaaacacacttttgtttcttgagtcatattctgttagtgaatccaccttcgacttagaccttttacaaggt

SEQ ID NO: 2913 - DNA, 120 bp, synthetic construct
  source 1..120: mol_type = other DNA
tgctcagctgtgtgtgccctgcacagatgtgtgtacactgctcaggtgtatgtgccctgctaaggtgtgtgtgctctgcacaggtgtgtgtgccctgcaccagtgtgcgtacattgctta

SEQ ID NO: 2914 - DNA, 120 bp, synthetic construct
  source 1..120: mol_type = other DNA
tgttcctcctcactccttagactcaatgcttcctaagttcagctgcacattggaatcacctgtggagctttaaaaatgactgatgcctgggtctctaacaaaagcttctgatttggctgt

SEQ ID NO: 2915 - DNA, 120 bp, synthetic construct
  source 1..120: mol_type = other DNA
cttaactatctaaaaggacccatgcaccaaagcttttacaggatagtgcaatagaagctcatcacgatatagaacattgtttctgtggtgccaggggtttggaaggcattaactacacag

SEQ ID NO: 2916 - DNA, 120 bp, synthetic construct
  source 1..120: mol_type = other DNA
ttgttttggaagatgagaaagtagaataatcatagctatagggaataccagtcaaacaggtcaaatcctgttataaaaggtggcacaggtgccaccgaatgacttctgctgccattgtgg

SEQ ID NO: 2917 - DNA, 120 bp, synthetic construct
  source 1..120: mol_type = other DNA
gaggagttactcatcccttcaagctttcgggcccgggggagaatctttcagcatgcacaaagtaactctcctctaccccaacaaggaatgatctgaccttaaatgtcaatagtgcctaag

SEQ ID NO: 2918 - DNA, 120 bp, synthetic construct
  source 1..120: mol_type = other DNA
aaatgtctccaattgactctccttattgaaaggaagtgttgctaggtgtacaattctaagaggacagtgtatttcagccccccattttttttttttttttttttttgagactgagtctcg

SEQ ID NO: 2919 - DNA, 120 bp, synthetic construct
  source 1..120: mol_type = other DNA
caccacacttttaagtcatttcattagagtcgcctcagaagtcctggtgagacaatcctaggagtcctctttggctgtcttgcttgatattctcaagcaagtccattctgctagacgcct

SEQ ID NO: 2920 - DNA, 120 bp, synthetic construct
  source 1..120: mol_type = other DNA
cactactgcagctatcctaacatggtacataatatctctgtcaatgtagattccaggttagaaactcatgtttttctaaaggcttctgactcccacattctcacacatccttgtagtcta

SEQ ID NO: 2921 - DNA, 120 bp, synthetic construct
  source 1..120: mol_type = other DNA
cataatttcagtgctaggctataccacctgtccccccccccccctttttttttaaactcatcagtgctgttgaaagtgagtatgaagaaagaaaataaaggattggaaaggcacaggcaa

SEQ ID NO: 2922 - DNA, 120 bp, synthetic construct
  source 1..120: mol_type = other DNA
agtattttttttcagattcttcagaaaagtgtgggcctcctccacctattagcaatggtgataccacctcctttctactaaaagtgtatgtgccacagtcaagagtcgagtaccaatgcc

SEQ ID NO: 2923 - DNA, 120 bp, synthetic construct
  source 1..120: mol_type = other DNA
ttcggtaaaccaaagcagccaggacttgaagaataaagaatttagaaggataggaagtgtagagatatgagtttgaggctctgcactagcttttccctaaggtactgcttatccttgact

SEQ ID NO: 2924 - DNA, 120 bp, synthetic construct
  source 1..120: mol_type = other DNA
cttaaatgcctattatgtattagctattaggatacaaaaacacttaaagcatgaaccttgtttttacagagtctacaacacaagaaggagccaaacaaaccaacaaatatcatatggtgc

SEQ ID NO: 2925 - DNA, 120 bp, synthetic construct
  source 1..120: mol_type = other DNA
aggttcttactttattcaatggattataatttgttactctcaaattgtaccaaatgtggccgatgggaacccattcaagctggcttttatgtctttttgacatgtccacattgttctttg

SEQ ID NO: 2926 - DNA, 120 bp, synthetic construct
  source 1..120: mol_type = other DNA
attccctgggttggctacacaattgcaagtccctttgttaaaaattaaaaatttttaagatggcagtaacagagctttaaaccccaagtgccagacctgcataacacaggtttcctgccc

SEQ ID NO: 2927 - DNA, 120 bp, synthetic construct
  source 1..120: mol_type = other DNA
aacaaggcacgactgctcacctattcaggtttgcttttttaaagcttcgatcaacacgacgctccctggtaattcctatggctgtactgaaatttaacccgtctgtttctaatacaaagc

SEQ ID NO: 2928 - DNA, 120 bp, synthetic construct
  source 1..120: mol_type = other DNA
ctgttttgttggggaggggctgcaattctagtatgtccaagggtacagaggcatcaaagcagcaacctagtggccgggtaatccccgtctaggaagaacaggccaaaaaatcatttcctc

SEQ ID NO: 2929 - DNA, 120 bp, synthetic construct
  source 1..120: mol_type = other DNA
aagtcatccttcgatctacagaagctctgtgggcctggcccacatgtgggtgaccagctggggacttccctgccattctgcattgatctcttttttcctttgaatttctttcttctttct

SEQ ID NO: 2930 - DNA, 120 bp, synthetic construct
  source 1..120: mol_type = other DNA
gaacagtctgtggaaaaggcccaagaggtatttgagttgggagacttaggatttcaggtccgaaagtggggattgaaaatgccacattcattaattcactgatccattcattcattcact

SEQ ID NO: 2931 - DNA, 120 bp, synthetic construct
  source 1..120: mol_type = other DNA
ctcaaagctatggaatacaattgagggatttccagcaggggaatgacttgatcaaataaaacatatcatttaagcctttacagaattaaagccatttagtttctctggctagacaagcat

SEQ ID NO: 2932 - DNA, 120 bp, synthetic construct
  source 1..120: mol_type = other DNA
cagaggagattgagttggcctttaagtatatgaaaggtttaaatgctgtaagagaattaatgtttttgaaaacttactataagccaagtaccctgctagatgcatttaatctttgtaact

SEQ ID NO: 2933 - DNA, 120 bp, synthetic construct
  source 1..120: mol_type = other DNA
taccttcccagacagatgagtatcttatgtatgtctcctgatgctttttgttttataggatagggaaatggaggccatcccaaactctgcaaataatgctcccttgggtacctattttcc

SEQ ID NO: 2934 - DNA, 120 bp, synthetic construct
  source 1..120: mol_type = other DNA
gctaaacacttctaacccattgtgtcctctgagacttagctccaccgatcatctcctctcaaatatgtttctgatgcttcctcctccactgatgtcttctccttagcagatgcactcaag

SEQ ID NO: 2935 - DNA, 120 bp, synthetic construct
  source 1..120: mol_type = other DNA
attgaatccccccgcaccgttggagtcagaactactggcacccttattttacaggcaaggaaactgaggcttacagatgtgaagtaacttgcccaaggtcttcctttttttttttttttt

SEQ ID NO: 2936 - DNA, 120 bp, synthetic construct
  source 1..120: mol_type = other DNA
ccttaggtgggttgaatgtggacgtggtaaccatcagtgcaccaccataaatgttgtcgggaaaaaaatattggtactcagtggtatggtgttgggctatcaaaaactaaagtctaaatc

SEQ ID NO: 2937 - DNA, 120 bp, synthetic construct
  source 1..120: mol_type = other DNA
ttttaaaaatcaaattagaaaaatcctgtcaagcaggagtctctggtatgcagctattttatgaggagggaaaacgtgaaccttgctgtctttggttgcctagggctcccatgaagacct

SEQ ID NO: 2938 - DNA, 120 bp, synthetic construct
  source 1..120: mol_type = other DNA
agagtatgtgaggctgagcaggatttgaacacaggcctggcggaattacagcccactgcactttgttgccttcctaaggcctaaactaagagcttctgccaacattgcctcttttgtcag

SEQ ID NO: 2939 - DNA, 120 bp, synthetic construct
  source 1..120: mol_type = other DNA
aatttttttaaatctctccactatctgtgccccctgcaaatcaccccctaatccagtcattttagaaacctgccagccagccagcactcatccatatttatacctgatgagtgataacaa

SEQ ID NO: 2940 - DNA, 120 bp, synthetic construct
  source 1..120: mol_type = other DNA
tcgtgccgctgcaaacctgggtgttcaaatactggttttctgatatttgagtccttgctctcacatcttctgggtgtatacccagaagtgtaattgctggatcacatggtaattctgttt

SEQ ID NO: 2941 - DNA, 120 bp, synthetic construct
  source 1..120: mol_type = other DNA
aagcatttttaactctctggcttgatagaagcaggatcctcacaactgctcttacatgcggtctgttgtaatatgccgttttagttggagcataagaattttcccctggaaaagggaaga

SEQ ID NO: 2942 - DNA, 120 bp, synthetic construct
  source 1..120: mol_type = other DNA
ctttcctgtgtgagatctaagaacccactcttggggtctagattgggatcctcttttctggcaacatcttgagtatgtgaccatgagaaatgttagaaattggagtgaaaggtacgtaaa

SEQ ID NO: 2943 - DNA, 120 bp, synthetic construct
  source 1..120: mol_type = other DNA
gacaccccacccccacccccaccccatacacatctgcagtattttccatgatgctcaactggtctagttgtgaaaaacaattatgggaaattatttttgcttttccaaaattatgacaac

SEQ ID NO: 2944 - DNA, 120 bp, synthetic construct
  source 1..120: mol_type = other DNA
tcacatcctgtgctctgccctgacctttctagcatatggagtatggctctactaattcacatctaccgtcttttatgggccatactaacttggcattatgtatggaagataattctggga

SEQ ID NO: 2945 - DNA, 120 bp, synthetic construct
  source 1..120: mol_type = other DNA
aagtcattggcatcgttacaattgaagctgtagctactcactgaagccatctatactgccactgcctgagccacttctagaagtagaacagattctgccatcatcctgctttttaatttg

SEQ ID NO: 2946 - DNA, 120 bp, synthetic construct
  source 1..120: mol_type = other DNA
ttagagaacccgtctttcactgatcaaataggagggagtggcttatgacctggctggttgaggtcttcatgtacctctaatagccagagatattggatgtgttcatgtattcatatgtct

SEQ ID NO: 2947 - DNA, 120 bp, synthetic construct
  source 1..120: mol_type = other DNA
aaaaaaacattaaaaaaaaaaagaaaaataaataacacagtagatagatgagaaatatatgggaaacacagcaaagggttaatagtgttatcttacaggtagcagtagtggtggttgtga

SEQ ID NO: 2948 - DNA, 120 bp, synthetic construct
  source 1..120: mol_type = other DNA
ggtaggatagaaactataaaacccccaaacagtgacaactccagcaccataaatatttcatagcacctaaagtggtgagtttaggctgctgtcagctgctgccttgtatatttaaccatg

SEQ ID NO: 2949 - DNA, 120 bp, synthetic construct
  source 1..120: mol_type = other DNA
gtctttggtggattcattagtaaactgaacacagctgaggaaagaatctctgtgcttgaggacatgtcaatagagacctccaaaactgaaaagcaaagagaacaaaaaaagaccggaaaa

SEQ ID NO: 2950 - DNA, 120 bp, synthetic construct
  source 1..120: mol_type = other DNA
tgccaggactgttctcagagagagaaggaggcttctccctcatctcagccattgtatttgcaggttttgtttttatttggtagcttagcctatactctgactaatacacaatttgttagc

SEQ ID NO: 2951 - DNA, 120 bp, synthetic construct
  source 1..120: mol_type = other DNA
gcctcgcctagtaatcttgcctgcgacccttccccacccgcctccagttaacaactttcactgtcttgaagtttcttctttgtaaaatatacttactctactgctatttttatactctgt

SEQ ID NO: 2952 - DNA, 120 bp, synthetic construct
  source 1..120: mol_type = other DNA
tgcattcatggattcaaccaactatggatcgtaagtatttagggggaaaaagaaaaaggccgggcacctgtggtttacacccgaatccccacactttgggaggttgagacacgcggatca

SEQ ID NO: 2953 - DNA, 120 bp, synthetic construct
  source 1..120: mol_type = other DNA
aatgccagtttttccagggcttgagtagttgttagtttgtttggattttgccagggggcggggggaggggttagcgtttctgtagaataaacatttattacaaacattgacgacttttat

SEQ ID NO: 2954 - DNA, 120 bp, synthetic construct
  source 1..120: mol_type = other DNA
caaaaatacttgaggtaagctaatttatacagaatagggatttaactggctcacagtcctgcagggcgtacagaaagcatgatgctggcatctgcttatgagagactcaggaagcttaca

SEQ ID NO: 2955 - DNA, 120 bp, synthetic construct
  source 1..120: mol_type = other DNA
ctatccccatcggcaactttcatttctttcctggatctgccattggccacaaaagacacaaatctttggagtgataacccatcgtgtaaacctaggcattcccagtcttttttctttttt

SEQ ID NO: 2956 - DNA, 120 bp, synthetic construct
  source 1..120: mol_type = other DNA
cagtgccgacccaaaaaaaaaaagagttcttcaatctttccttggcttttctgatcttaatactgttaaagaggaccgcccagttattttgtagattgcctctcaatttgggtttgtcta

SEQ ID NO: 2957 - DNA, 120 bp, synthetic construct
  source 1..120: mol_type = other DNA
cgaaagtacttttctatattttctggacacaacaaacgagacaaatccacactctgagcagtatttaaggggaaaattttaaagtcactactgtttcttctttagttttttttcccccct

SEQ ID NO: 2958 - DNA, 120 bp, synthetic construct
  source 1..120: mol_type = other DNA
tcccacgacttattaaatcagaattgacattttaacaagatccactcccaccagccccaagatccgctgggagattaaatttaagcatctccgctctacacttggtggaaaggatttcta

SEQ ID NO: 2959 - DNA, 120 bp, synthetic construct
  source 1..120: mol_type = other DNA
tcatcccaacctaagtggcttaaaccaagaaccatttatgatttctcatgagtcagagtcagctggggatcagttgattaaatcttggcttaactggcagtgactctgctccatgtattt

SEQ ID NO: 2960 - DNA, 120 bp, synthetic construct
  source 1..120: mol_type = other DNA
agaaatcactttgaacacttcatcaacattgtggcatgaacctgatcattgacgcagatcccacagtctctgctttactcagatcacccagagtccattcaaatgcttctctaagatgtt

SEQ ID NO: 2961 - DNA, 120 bp, synthetic construct
  source 1..120: mol_type = other DNA
tttctggctgcagacacattctggatgaaccctcagtacctgatcaagctggaggaggaggatgaggacgaggaggatggggagagcggctgcaccttcctggtggggctcattcagaag

SEQ ID NO: 2962 - DNA, 120 bp, synthetic construct
  source 1..120: mol_type = other DNA
cgaactttgatggttctatagttccttatctgcctttggctgaataatctatgtcaaaaggtaggcttctttcccaaagctgttgcttaaggccataagaagtaactgatcccaccatcc

SEQ ID NO: 2963 - DNA, 120 bp, synthetic construct
  source 1..120: mol_type = other DNA
tccttacatcttccacacacccacctcatacctgcacacctccttacacacccacctcacacccgcatacctccgtacacacccacctctcacccgcacagctccttacacaccctccat

SEQ ID NO: 2964 - DNA, 120 bp, synthetic construct
  source 1..120: mol_type = other DNA
ggaaatggaatgaagcaataatgtctgataattccccaaaattttcctacatcaaaccacagagccaggaaattcaaaaaatatcaagaaggataaatggcaccccccacccccccccca

SEQ ID NO: 2965 - DNA, 120 bp, synthetic construct
  source 1..120: mol_type = other DNA
tatagtggagctcctatgtgtggtcaggactcctccctatgtgtggtcaggactcctccctatgtgtggtgggactcatccctatgtgtcatcagggctccttcctacgtatagtggggc

SEQ ID NO: 2966 - DNA, 120 bp, synthetic construct
  source 1..120: mol_type = other DNA
gaagttggggaacctttcccaagggaaaacagaattatttgtgaggttttccactgatttaaaactgcagggttgcttcccatttacccccagtgttgtttttaggtcctttgaaacaag

SEQ ID NO: 2967 - DNA, 120 bp, synthetic construct
  source 1..120: mol_type = other DNA
cttccccatttttactgtaggagcaggtatttaagatgataatctgcaggttttggcctgggagtccagaacaaaacagtcctatgtgagtgacctcctagaaatgtattcttgggtttt

SEQ ID NO: 2968 - DNA, 120 bp, synthetic construct
  source 1..120: mol_type = other DNA
acttcaggtttgtcaagacccctgcaattgagacacctctgatcgtcctatcacaggactgtagcttcaggtaaccccttcctcatggcctcccaagcaacatttcacaggaacaaatgt

SEQ ID NO: 2969 - DNA, 120 bp, synthetic construct
  source 1..120: mol_type = other DNA
ggccctcgcacgggcctcccctcaagtcaccccatggtctcatcattactacagcactgaattgattactgtgcttatctgtaaagtatttaggttttctctattcaatttattctttcc

SEQ ID NO: 2970 - DNA, 120 bp, synthetic construct
  source 1..120: mol_type = other DNA
gaatcagttttctctgtcccaagagcaagaaggtcagaggtgagagcagaatgagcaaggtgggttcagagaccctagagggttaagtaaagtttgcataacttgccccattatgaaatc

SEQ ID NO: 2971 - DNA, 120 bp, synthetic construct
  source 1..120: mol_type = other DNA
ttaatcctgtaaaagggacactcattaacttattcatattcatactcatgggctttctcccctgcttcctgatgcctaaagctaagtttcctaccagaagacttcttggttacagctgcc

SEQ ID NO: 2972 - DNA, 120 bp, synthetic construct
  source 1..120: mol_type = other DNA
ctccaaaatagatgttcaaagttcagtccttgccatttgactgagaccacatggtgtgccccttgagtgaggctaatctttaggtttttcctatagaaaacattcttcctccatcagtag

SEQ ID NO: 2973 - DNA, 120 bp, synthetic construct
  source 1..120: mol_type = other DNA
actggctattgtgtggaaaagaacagaagagactgagccatacattattgatatccaaaagtggacacacatctttttgtgtcaggccattagtggaaggttgagtcagtctagctggga

SEQ ID NO: 2974 - DNA, 120 bp, synthetic construct
  source 1..120: mol_type = other DNA
aaaagacttggaaaagaaatggagccatgattgtacagtatttgaaaatgtttcagagtgatgcatgtgattgaaaaacagatcatatggatagaacaaagcgggatattgtagtttcac

SEQ ID NO: 2975 - DNA, 120 bp, synthetic construct
  source 1..120: mol_type = other DNA
acaattttgtccaaaacagataatgatctgattctacctcccattggtatttcccttcctcggcctgtgacatctcactttctctagactgaactttatcccagactgtgaccttgccat

SEQ ID NO: 2976 - DNA, 120 bp, synthetic construct
  source 1..120: mol_type = other DNA
agttgctggtcagttggtcagcaagtcagtttcatagttggaattttaggctttaagcaagatcagtaatctcttggcttcagtttcctcatgtgtgagtctggagaatctcagagtttt

SEQ ID NO: 2977 - DNA, 120 bp, synthetic construct
  source 1..120: mol_type = other DNA
gtgcctctgttaagatcgcgctctgagaaacaacgctggcattcaaatccaggtatagccccttttattttctttttcagttttctgactttggggaagttattgaaacttctgtatctc

SEQ ID NO: 2978 - DNA, 120 bp, synthetic construct
  source 1..120: mol_type = other DNA
atctaatgaccttccaaaggccctggctcctgataccatcacccttgagattaggatttaacatgtgaacttgagcgggaagggatcacaaatattcagttcatagcagccacatttttg

SEQ ID NO: 2979 - DNA, 120 bp, synthetic construct
  source 1..120: mol_type = other DNA
caggtaaaagctccacctaagatagaaggcaacccaggttccaaagtaattcctccctcacctgtgaatgaccagaattattatcctctaagtgcttctattgtcacttgaaaaaggtac

SEQ ID NO: 2980 - DNA, 120 bp, synthetic construct
  source 1..120: mol_type = other DNA
ctattattaaacatgatgttaaattgatcttaaacttcaacattattttttcacccatgccacggatctgaacggcaaacgagcttccttacctgtgccccctgcagagtgcaaaggcct

SEQ ID NO: 2981 - DNA, 120 bp, synthetic construct
  source 1..120: mol_type = other DNA
caggcgtgagccaccgcgcccggcctaatcaaagtatcttaatctcaaagtagatggtatagcaagaagcaccactagagataaagatcactttccataatgatagaacagtcaatccat

SEQ ID NO: 2982 - DNA, 120 bp, synthetic construct
  source 1..120: mol_type = other DNA
ccagcgcgggtgtctgatggatgctgttgtcatcagaatggagagaggagagacattagcaccgttctttgctgtaattcagaataattaatatgagttagctcaagaaagctcaattta

SEQ ID NO: 2983 - DNA, 120 bp, synthetic construct
  source 1..120: mol_type = other DNA
ggccttagggattctttagttggcaattggttgaaagagttaagctttgtgtgaaaccttgacgtcagtagaaagaaatgcttaagagaagggagtctgctgtcatgtgaggctgtacca

SEQ ID NO: 2984 - DNA, 120 bp, synthetic construct
  source 1..120: mol_type = other DNA
ccataagtgaaactggttgtttgtacggtcactctctcttagcagataatgtcagtgggaacaaacgcctgggccttttcatgcctgtcacgtttaccactgcgtgtttgctatccctct

SEQ ID NO: 2985 - DNA, 120 bp, synthetic construct
  source 1..120: mol_type = other DNA
gcactggctgtgcctgggtgataagcctacctagttctggggttcagtgaggaagatgtttggatctcacattaagctacatcttccaatttagcctttgtcattaaggcgatcatttgg

SEQ ID NO: 2986 - DNA, 120 bp, synthetic construct
  source 1..120: mol_type = other DNA
aaaaagaacaccttgtcacaagaaaaggcaaaatgtaccatttaaagtttaaatcaggataacagctcactcaacagtgggttttcagtcttcacacttaaatgccaaagcttacttggt

SEQ ID NO: 2987 - DNA, 120 bp, synthetic construct
  source 1..120: mol_type = other DNA
gaacacgctgctaagtcaatgagctgcagtgctgggtgcaacagcatcagccattgcagggttttcaaggtgaatatcaccttgagataacagaacttggcagcaagagatgacagtgaa

SEQ ID NO: 2988 - DNA, 120 bp, synthetic construct
  source 1..120: mol_type = other DNA
aattaaagaaaaataacctgaagacaatactgaatcacccactttttattttgccagggagagaatcccagagcttcaattataacattatcaacacagtatcattttaacatctctcac

SEQ ID NO: 2989 - DNA, 120 bp, synthetic construct
  source 1..120: mol_type = other DNA
acctggagtttatgaaccagtcaccaatagagctggaatgagaagattgagaagtgttgcagaaagttccaaggtcttctgagcctttgagacatgataatatgaagaggcagaagccaa

SEQ ID NO: 2990 - DNA, 120 bp, synthetic construct
  source 1..120: mol_type = other DNA
tttatttttctttttattattcttagagttggggtctcactctgtcacccagcctgtagtgcagtggtgccatattacctcactgtaacctcaaactgctgggcgtaagtgatctacaca

SEQ ID NO: 2991 - DNA, 120 bp, synthetic construct
  source 1..120: mol_type = other DNA
gtagtaagaacggactaccaagatctgcctggagactaaataatgtgaaaatcaagtcaaaatacgatagttgactctaacttcagttactagtaaatagcatcactgagaattgcgtgg

SEQ ID NO: 2992 - DNA, 120 bp, synthetic construct
  source 1..120: mol_type = other DNA
tacatgcctcatatattttggagaaacaaggtaaatatataaacattcaacaaaaactaagttatgtgtaacagagaggcagagagaaatagggagaaataagacagaaagagagaaggc

SEQ ID NO: 2993 - DNA, 120 bp, synthetic construct
  source 1..120: mol_type = other DNA
gatggaagacatatacaaattaggaaggcatgagaaagggcaggagagtctaaggaaacattgcaacacagaataggatatttctcttttctttgctcatgaagtttagtttgttgtcac

SEQ ID NO: 2994 - DNA, 120 bp, synthetic construct
  source 1..120: mol_type = other DNA
tctgaaaagttctaaatacaaagacaaacaatggcgtgcttttcttttatgggcaggacctgagtcttactcatttcctggcacataataggccctggatgtcacagaatagattggaaa

SEQ ID NO: 2995 - DNA, 120 bp, synthetic construct
  source 1..120: mol_type = other DNA
accaagttcttttctttcctttgctcatcattaaccatgcctaaatatgttgaagtccttttaatatttttagggtaggttagctgtaacaagtcagtggtgtggcctaaaacagtggca

SEQ ID NO: 2996 - DNA, 120 bp, synthetic construct
  source 1..120: mol_type = other DNA
agggccaggaatagtacctactctcaacagctagactgtaaaacctcatgcatgattcatgagtcactgggtagagcacaagtcagcaaactttttctgtaaagggccagatagtaaatc

SEQ ID NO: 2997 - DNA, 120 bp, synthetic construct
  source 1..120: mol_type = other DNA
ttggtttacaaataaggaattaaaaggtaagaaaagcaaatgcaatcacgcagcacctttcccatcgcggggaaatcaacctttttactcattgcctctcaggggaaagaacttgggacg

SEQ ID NO: 2998 - DNA, 120 bp, synthetic construct
  source 1..120: mol_type = other DNA
cattaaataccaagaatcagcttgacagaatttacccccagattaaactgagctacccaataggtatggaatcctctaacaaggttcatcacaatggtgtattaggaagagcaccagaaa

SEQ ID NO: 2999 - DNA, 120 bp, synthetic construct
  source 1..120: mol_type = other DNA
atcaatggagttttaacttaggcctatctcactgtgaatccagtggtctccaaacccatgctgtgattcttccttcagttctaggatgtatacttgggataatacttagcagctgacaga

SEQ ID NO: 3000 - DNA, 120 bp, synthetic construct
  source 1..120: mol_type = other DNA
atgtttggagaatggtatattagcagaaacactgccagcttggactgaaagagacagagaggggacaaaattaaagaagatgctttgactgtcaaaattctataggcaggtaactggccg

SEQ ID NO: 3001 - DNA, 120 bp, synthetic construct
  source 1..120: mol_type = other DNA
gtggcctatcatatggtctgtcctggagaatgttccatgtactgatgagaagaatgtgtattttgtagcagttggatcaaatgttctgtgaatatctgttaggtccctttggtctagagt

SEQ ID NO: 3002 - DNA, 120 bp, synthetic construct
  source 1..120: mol_type = other DNA
tccccgctgcgcgctgccatcttagggttttgcttagggggcagatagaaaatagtaaatgaaaccctttcagatatttcctggccttatttagtaaacacgtctttttgaaagaactct

SEQ ID NO: 3003 - DNA, 120 bp, synthetic construct
  source 1..120: mol_type = other DNA
taagacctgactgtatatgatcacaacctaactgagcagaactcaccctccactgcgcatattgaagacagagcccaagacgcatccaggtgcaacgtctctgctaagaatgtgtgccag

SEQ ID NO: 3004 - DNA, 120 bp, synthetic construct
  source 1..120: mol_type = other DNA
taccactgctggcttttcctgtgcctcctgttgctcccttattagatgaccactcaaagcttaattcctctcttatgttgtttgaatctcttcagatcacccttctggccttcactacct

SEQ ID NO: 3005 - DNA, 120 bp, synthetic construct
  source 1..120: mol_type = other DNA
aactctcagcagttcaacactacccccttcaatgcttttctgagttataaaaacatctcagggcaaaacacctactggtctccaggagctgagatcagtcaagaagcaattacctatagt

SEQ ID NO: 3006 - DNA, 120 bp, synthetic construct
  source 1..120: mol_type = other DNA
tcagtgtacgagtaacaatgcacctcatgtaaaccactgtgaggtaaagaaaaggcaaggactttaaagccagatattcatggatttagctccctggtctggcatctttgaatcttgtga

SEQ ID NO: 3007 - DNA, 120 bp, synthetic construct
  source 1..120: mol_type = other DNA
actatatataagagaggctagctgcggctcctgagtcagctactcatcactcatttcccacacctaaaagaggcctttttgtttggcaaaatgcttcccaaagtaaatagaaacgacagt

SEQ ID NO: 3008 - DNA, 120 bp, synthetic construct
  source 1..120: mol_type = other DNA
tctgagcacgtgatacctctgtgatttcagggcacaaatccctctatccatcaaactaaatagaagggttagagaggttaatcgagacagagtgtctgtaacagacttctgcatttcatt

SEQ ID NO: 3009 - DNA, 120 bp, synthetic construct
  source 1..120: mol_type = other DNA
ttctttgagagtgttttccgtgtttcaggatcaaacttagagcttttacccattatccttaccaccaaggcaagaaacggcagccaatcaactccgtgtcttagaatacgtacaatcctt

SEQ ID NO: 3010 - DNA, 120 bp, synthetic construct
  source 1..120: mol_type = other DNA
ctgtcagagacagacaggtccacttgtgaactgtagtataattactgtcagcccttttaggtcacaggctataattttttattgagacggggtctcactatgttgcctaggctgggctca

SEQ ID NO: 3011 - DNA, 120 bp, synthetic construct
  source 1..120: mol_type = other DNA
ttgaggcttcacaggtatcccagtacctaggcagtgcctgataatttccacaggtttattttctctttaacatagtgttcataattcttcactgattccacaaaggccaagatgcatggc

SEQ ID NO: 3012 - DNA, 120 bp, synthetic construct
  source 1..120: mol_type = other DNA
ggaaaaggcaaaactgtggagacagtagtaaaaagaccagtggttgccaagggttagggaaggaagggatgaataggtggagcacagacaatttttaattcagtggaactattctgtatg

SEQ ID NO: 3013 - DNA, 120 bp, synthetic construct
  source 1..120: mol_type = other DNA
atatcaaatgctggtgaggatacagagagaagggaactcttatacactgttggtaggaatgtaaactaatacagccactatggagagcagtatgaaggctccttaaaacacacataccct

SEQ ID NO: 3014 - DNA, 120 bp, synthetic construct
  source 1..120: mol_type = other DNA
gcgtatttatcaagcgggatactggaggttccattgatcctgtgagccccagaactttccgacatgctctgttttgcatgacagacattctatgttgcttgcaagagtgatatgaagata

SEQ ID NO: 3015 - DNA, 120 bp, synthetic construct
  source 1..120: mol_type = other DNA
ttccctagcattctatcccatgaccactggttggcacagtaaaggtttctaaatgccttgttaaggtctgtgcgttctccacagctttctgcaaagcctgaggcatctgtaggcaaagtc

SEQ ID NO: 3016 - DNA, 120 bp, synthetic construct
  source 1..120: mol_type = other DNA
aggggaagtttgaaatgcaaccatgtaactggcacagactctgaagagatacccacgtggcagatggttttcttaaatattgagtcaacaaactttaatgctggagtagccacaaagaca

SEQ ID NO: 3017 - DNA, 120 bp, synthetic construct
  source 1..120: mol_type = other DNA
caggtaaaggggactcgaatgtcttctgaaagcagcagctggttagctgccgagttaaagggcctctgaatttcagagctctgtgtaggagtccagcacactttatcatgaatgactcca

SEQ ID NO: 3018 - DNA, 120 bp, synthetic construct
  source 1..120: mol_type = other DNA
cactgctgtaattacgtgctgtgatctgaattctcattaggaaagggatctcactgcttaagcactctgctgcctccttgcaaacaacaaaaaatccaaaacccctcttaaagaacgttt

SEQ ID NO: 3019 - DNA, 120 bp, synthetic construct
  source 1..120: mol_type = other DNA
gaccctgaggtcataagggtcataaggatgtggtgctttaatccaccactggttgagaatagaaaatggtaccaccactttggaaaactgccttaccatttcttaaaaggataaacatgc

SEQ ID NO: 3020 - DNA, 120 bp, synthetic construct
  source 1..120: mol_type = other DNA
tctgctcccccgtcctctgtggcccggagtgggagttgctctcgaactccacgtgacgtttctggtcttagggatgtcaaggtcagtctctgtgttgtgtaatgtaataaaatgacagtc

SEQ ID NO: 3021 - DNA, 120 bp, synthetic construct
  source 1..120: mol_type = other DNA
ccagttcacagcacaaaatgtctcctggaggggattcagggaatctccagcagtgaaaggtgccaacagacctgtggcgattgagggacagagcctgtgtcgtctgaactcagaaaacgt

SEQ ID NO: 3022 - DNA, 120 bp, synthetic construct
  source 1..120: mol_type = other DNA
agaggagacatggcaggtccagaaggggccagaggcagagagcactcgagaagactgaaacctctgtgcagagtctccttcggtttcagatgagctcctctggcccccagcaaaggtctc

SEQ ID NO: 3023 - DNA, 120 bp, synthetic construct
  source 1..120: mol_type = other DNA
gttttggacaagacacctggttaaaaagtataattttgttttgctttgccattgctatggcttgggtatggtttatttgtagccaaaactcctgttgagatttggtcctcagtgtggcgg

SEQ ID NO: 3024 - DNA, 120 bp, synthetic construct
  source 1..120: mol_type = other DNA
atgcgccaggggatttttcttcccctgaatgaaagtgtcagcatctcatttattaacaatgcagatacacatcaaagccactattgaatctgtctctccccattgactttgccttcctat

SEQ ID NO: 3025 - DNA, 120 bp, synthetic construct
  source 1..120: mol_type = other DNA
cagagtcacaggagggggctcaggatcactggaggggctcaggggccattgcaggagggctctccctgctggacttcctgcaaatacggtagcagcagttcatgctatggttctgtggtg

SEQ ID NO: 3026 - DNA, 120 bp, synthetic construct
  source 1..120: mol_type = other DNA
tggccctcctcccgtggctgtgaactcccctgcacgtgtcatgggagttcccaggccatccgtgaggcagactggctcctctcaaactcccacgacggcctgtcctcagtgatatttccg

SEQ ID NO: 3027 - DNA, 120 bp, synthetic construct
  source 1..120: mol_type = other DNA
ccggcccttcacaaactcccccaaactgccatccctgacaagacacgttgtctctcttcactaaacccctacagcttgtaacctgagacaaaatttgcctgtgacccttgtgtggcctct

SEQ ID NO: 3028 - DNA, 120 bp, synthetic construct
  source 1..120: mol_type = other DNA
ccccacaacagtccccggtgtgtgatgttcccaacaaggggcttttatcatcatcatagccaattagtgatatctgctctcattctttcctaagtcaaataacctaattcttttctctct

SEQ ID NO: 3029 - DNA, 120 bp, synthetic construct
  source 1..120: mol_type = other DNA
tgccaggaataaatggaatcaggtgggaggctctgtcctgccacgaataaatggaatcaggtgggaggcaagccaggcccttttcctgggaggtgccagagccgaggaggagttggagga

SEQ ID NO: 3030 - DNA, 120 bp, synthetic construct
  source 1..120: mol_type = other DNA
gccaagaatgtgcagtaagccgctgtgtcccagcatcttcaggagggtttggctgagctcatgggtttaggaatcttcagcgtctccacgtagttaaagatgcagaactcacagagcttc

SEQ ID NO: 3031 - DNA, 120 bp, synthetic construct
  source 1..120: mol_type = other DNA
ttcaacattacgtacaggcatttgaggtcggggcatggaaaaatactgaggcagtgtgtgtatgttatttgtgctgagaatgaaactccttgaccttgaaaacaggacagggagtggtgt

SEQ ID NO: 3032 - DNA, 120 bp, synthetic construct
  source 1..120: mol_type = other DNA
gtaggcaatccttgttctgcattgaggtccattcctatggtcacgtactgcttatttttcgtttgtgcactgtttctttcttctgttcatgtctagttcccagcttggcagaatatgtaa

SEQ ID NO: 3033 - DNA, 120 bp, synthetic construct
  source 1..120: mol_type = other DNA
agacccatagaaagtccctgagtgacagatgcgcgcaggcttggggctgggggatgccttggaaagtgctccaggaaaagcatccacacagcagccagcagagcagcagtcccaggccac

SEQ ID NO: 3034 - DNA, 120 bp, synthetic construct
  source 1..120: mol_type = other DNA
gtaaacacccacgggggtaaacaaccacgcaggtaaacacccacgcgggcaaacacccactcgggcaaacaccccctcgggtaaacacccacgcgggcaaacacccccgggggtaaacac

SEQ ID NO: 3035 - DNA, 120 bp, synthetic construct
  source 1..120: mol_type = other DNA
gccgggcagaggggctcctcacttcccagtaggggttggccatcactttttaaagcatcctggatatacactaatgtacagctggcgttttgaaccattactctccacacatttcccagt

SEQ ID NO: 3036 - DNA, 120 bp, synthetic construct
  source 1..120: mol_type = other DNA
acgtgggttgctcaaagggaagtgttgccacaaaaaggaaggaaatagcaaatattttaaagttataaaaaccagcaatttgtatttacttttgatcctggcttcttatggtatatccag

SEQ ID NO: 3037 - DNA, 120 bp, synthetic construct
  source 1..120: mol_type = other DNA
ttgggttaattgtaaatgtcacttactagtctagacctcacgtctttatggcgggtaatacattaaccgaggcaaatgattctttccggtgggtgagaattgaagctgtgatggcattgg

SEQ ID NO: 3038 - DNA, 120 bp, synthetic construct
  source 1..120: mol_type = other DNA
aaaaaaaaaaaaaaaaaaaaagcctggtaatgagactgaggccagctgaagtcttccttcttgggggcatcactgcaaggaatcatagcctcatagcatctcggggtggacagtggcaaa

SEQ ID NO: 3039 - DNA, 120 bp, synthetic construct
  source 1..120: mol_type = other DNA
cacaaaatgcatcctgaattacaggtcccaatgccattttggtacaaaaacctttatgacttcttactttagggcagagtaaaatttccttctgaccactgcacccatgaacctcaaaag

SEQ ID NO: 3040 - DNA, 120 bp, synthetic construct
  source 1..120: mol_type = other DNA
ccttcagggtgagtcacagggtccttttctcagctgaggttctcacctccaggtgacatcatccatccccatggtgccaactaccatcgtcatctgtgaacttccagacttatctctgga

SEQ ID NO: 3041 - DNA, 120 bp, synthetic construct
  source 1..120: mol_type = other DNA
aatagaatgggataaaaggcaagagtaacccattttttgaaactggaaagtcgagggtcaaatggtaaagaacttagcagacccagtacaactgaatcccaagccagcaatgcggaaacc

SEQ ID NO: 3042 - DNA, 120 bp, synthetic construct
  source 1..120: mol_type = other DNA
cacatatatatatacacacatggcacatgtctccattttttaaagatctttaatttttctcagtgatgttttatagttttcagtgcatctcttatacataatttataaactttatccgta

SEQ ID NO: 3043 - DNA, 120 bp, synthetic construct
  source 1..120: mol_type = other DNA
ggagcttgggcctacctgctgtgaatttgtcactggtatgcagtaaaatgagaaagataatgcagtggggtttttagaaatccaaatgtattaaatggaagggcttatccctttttcacc

SEQ ID NO: 3044 - DNA, 120 bp, synthetic construct
  source 1..120: mol_type = other DNA
actattttaagtctctaaaatatttagttggggaaaggggttaataaatcagtgcacttttagaagaagggacaacataagctttccttcttgagtagcatgagaatgatgtaaggagtt

SEQ ID NO: 3045 - DNA, 120 bp, synthetic construct
  source 1..120: mol_type = other DNA
ggtatcacagcttggtatcaccagcttaaggtatccccccttaagctgggatgttgatgttgtactacagagatcttgcagcgttacaactacatgaaggtcaatggctttaatatatac

SEQ ID NO: 3046 - DNA, 120 bp, synthetic construct
  source 1..120: mol_type = other DNA
cttagagtagcatgttgctttacaactagatacaaaggggctagaaggtaggaattgttgagaagacactagggttcctgacttaataggaccctgcagctattttagtattagccggaa

SEQ ID NO: 3047 - DNA, 120 bp, synthetic construct
  source 1..120: mol_type = other DNA
tggaatggaatggagaatggaagggaatggaatggaaaatggtatggaatggagaattaaatagaatggataatagaatggaatatggaatggaatgaaatgaagactggaatggagaat

SEQ ID NO: 3048 - DNA, 120 bp, synthetic construct
  source 1..120: mol_type = other DNA
acaatgttttctgcacaagcgagtacaggcatacctctcgttaaaactgatgtaaacagtcatacctctgtttaaaactgatgtaaacagaagaagccaagtggggcggggggggggcag

SEQ ID NO: 3049 - DNA, 120 bp, synthetic construct
  source 1..120: mol_type = other DNA
gaaggaagtttaaaaataacacaaactttctttctaaaaagaaaggaaaagtcaatgacaatctcaattgattcataccaattaaatcacccagtcattcattctgtctgtacaacgcag

SEQ ID NO: 3050 - DNA, 120 bp, synthetic construct
  source 1..120: mol_type = other DNA
tccctcaccttctcccttctccctcctcccttctctctcttcttcctttctcttctcaccccttagaattagaaatcgcagtcaatagagatgattgtgctaggacatattttaacattt

SEQ ID NO: 3051 - DNA, 120 bp, synthetic construct
  source 1..120: mol_type = other DNA
gcaagcatcaaagatgatcccagagtattatacttaggtgactgcacagttgataatgctgagatctgaaaacttaagaggaaagcttatttgggcagtagggaaggaaataatgttgat

SEQ ID NO: 3052 - DNA, 120 bp, synthetic construct
  source 1..120: mol_type = other DNA
gataaaattacctgaaaatcttctacagattccaaagcccatgccatattctagaccaattaaatctgaatccgggctgcagtgcaggatgtgattccaacatgcagacaagtctgggaa

SEQ ID NO: 3053 - DNA, 120 bp, synthetic construct
  source 1..120: mol_type = other DNA
agaaggaaagaaggaaagaaagaaaaggtggaatgcataatctggagagtggagaatgcatctgggagggctgcaggaaccaagacatgtgacttaaaaaacaagctctgacataaacat

SEQ ID NO: 3054 - DNA, 120 bp, synthetic construct
  source 1..120: mol_type = other DNA
aagcattttgaatttattccagtcctctgggcatcattcctatttcttctgccatgtcaaggagaaattccaagcctgcattctgtcatgctaaaataaccagcccatacttctcggtga

SEQ ID NO: 3055 - DNA, 120 bp, synthetic construct
  source 1..120: mol_type = other DNA
ctcctccctgttccacgacctggaaactctctcaaggcagtaagctgggcacacgtgcggcccatttgttttttgtcttccagggatgactgtgttttgttgcttgtccaatatcttcag

SEQ ID NO: 3056 - DNA, 120 bp, synthetic construct
  source 1..120: mol_type = other DNA
aaatcgtgtcttttcctctcctcaaattccatagcatacttggatgactacatgtggccattgaggcctcttggggatagggagtgcacatccccatctctaattatttttcttcttaaa

SEQ ID NO: 3057 - DNA, 120 bp, synthetic construct
  source 1..120: mol_type = other DNA
attttgagtcatttccagaactagagttatgtcctattctatttggaagtatccatgcttcaataagtgattgctcccttgcccttccccctccccccacccccttcttctttttttttt

SEQ ID NO: 3058 - DNA, 120 bp, synthetic construct
  source 1..120: mol_type = other DNA
agggcagtgttcttgttgagaagaggggtttgggattcagggagtatcaagtcatcccgtagtaacaaaagaatcccacagaaatggaagtttcagaaaacactcctagctgataatcta

SEQ ID NO: 3059 - DNA, 120 bp, synthetic construct
  source 1..120: mol_type = other DNA
gtgtgagccaccacgcccggccgacaccttgttttttgcagctttgtatcaagacataaaaggatgaataacacttgatttctacacacaactttctcaaggtatagcaggaacaatgaa

SEQ ID NO: 3060 - DNA, 120 bp, synthetic construct
  source 1..120: mol_type = other DNA
gggcgggttaaccctggaaaagaaaggtggcacttccaccctggaaagtgaaaaagaagtgtgtatgggggtgagggaatatgaggagaagatagatgaaaatatactaacattttgaga

SEQ ID NO: 3061 - DNA, 120 bp, synthetic construct
  source 1..120: mol_type = other DNA
tgacaaccactgcagacctttaaacgttgtatttctttaatgttctcattatcttctcaagcctgacaatctcctcatgcgatgtgctttcagctactattattttcattatttctaaat

SEQ ID NO: 3062 - DNA, 120 bp, synthetic construct
  source 1..120: mol_type = other DNA
acattaacataaggttcatggtgtcccgttagatagtcaaaaacaaaagtcaaggcattagaactaacacatctctatgttcataaaaatagttcaggccgggcgcggtggctcacgcct

SEQ ID NO: 3063 - DNA, 120 bp, synthetic construct
  source 1..120: mol_type = other DNA
ttggggaacttattaaatcagagttcatcagaaacctctggctgtaatgcctaggctgctgtttttgaagagtcttgaagcctgagagctctttctgaagaccacggttctttgaaatag

SEQ ID NO: 3064 - DNA, 120 bp, synthetic construct
  source 1..120: mol_type = other DNA
aggttctgtctccggcaggctttgaggatgaaggctgcgggcattctgaccctcattggctgcctggtcacaggcgccgagtccaaaatctacactcgttgcaaactggcaaaaatattc

SEQ ID NO: 3065 - DNA, 120 bp, synthetic construct
  source 1..120: mol_type = other DNA
gcaaatgggtgaggctactggggttatggcagtaggtgacgccaaacctgtggaacacacagacgagctactgagcatctcagggtcacttctggaaatctccgggaccctggtggatct

SEQ ID NO: 3066 - DNA, 120 bp, synthetic construct
  source 1..120: mol_type = other DNA
ccctatgagggaggggacagaggccctacgagggaggggatagagactctacgaaggaggggacagaggccctagagggaggggacagaggccctagagggaaaggacagaggccctatg

SEQ ID NO: 3067 - DNA, 120 bp, synthetic construct
  source 1..120: mol_type = other DNA
aaaagaaaaaaaaaaacataagaaacgcacaaagaaaaagaacatgaggcttcctgctttggtagaacctgttttgatatggctgaaatgtaagaatcttaggccaggtacggtggctca

SEQ ID NO: 3068 - DNA, 120 bp, synthetic construct
  source 1..120: mol_type = other DNA
tgactgaggtctcttttctttttcagtgtaagtttgcagctgtaaaattcctctaagcatcactttagctgcatcccatagttttcatgtgatgtgtttttgtttttcttcacctcaacc

SEQ ID NO: 3069 - DNA, 120 bp, synthetic construct
  source 1..120: mol_type = other DNA
atagttacatttgtaaactggaaggctgctatcgttttagcacttcccttcaaagtactatccaacagggccccaaatagtatcgcaaatagcagctcctgtaaatattcaggagggtgt

SEQ ID NO: 3070 - DNA, 120 bp, synthetic construct
  source 1..120: mol_type = other DNA
gcagatcaagaaagcactccgagctccagaaggagctttcagggccagctttgaggataagctgctgatgagcggtgagtgtcttgagtagtgttcagggcagggtgttaccattcatgc

SEQ ID NO: 3071 - DNA, 120 bp, synthetic construct
  source 1..120: mol_type = other DNA
actcccaggggatgggagtgactctggacatgggagtgacataatagtgactctggaccctacagtggtgggacacagcagcatctcagtctctacgaggccaggcgcagcatcagcaag

SEQ ID NO: 3072 - DNA, 120 bp, synthetic construct
  source 1..120: mol_type = other DNA
catattctccatggtacatgggaaccacaaaaagattaacagctgacttatcctcagaaaccagggaggccagagacagtggaaggacataaagaactcaaagaaaaaaaatgtgaacca

SEQ ID NO: 3073 - DNA, 120 bp, synthetic construct
  source 1..120: mol_type = other DNA
atgtaagagttgagtgattatgacagagactggatggctcacagagcctcagatgttttctatctgcccctttatatacagtttgctgaccattgctctaaggcatccttttccatcctt

SEQ ID NO: 3074 - DNA, 120 bp, synthetic construct
  source 1..120: mol_type = other DNA
ccttttcctctgggaacctcatcttacctccagccaccaggcaggagtcaatgcgagcagcaaagtttcccgagcgctctcatccactgtgagtcacttaatactcaggacaaatgggtg

SEQ ID NO: 3075 - DNA, 120 bp, synthetic construct
  source 1..120: mol_type = other DNA
atctgataacttagggactgtcactatcactgtaaccatcaacatcattatcttgacttttgcctgttcagtttgtaggatgtttgaacggagaggcatgggggcttaagaatgtgccca

SEQ ID NO: 3076 - DNA, 120 bp, synthetic construct
  source 1..120: mol_type = other DNA
atttactaatctcaaatcaagttaaagggattagcagttatttttctagcagccagttctatgtgtttgagagattatgctctctcttggtctaggaagcagaagctctgccactccttc

SEQ ID NO: 3077 - DNA, 120 bp, synthetic construct
  source 1..120: mol_type = other DNA
tgttgctttttacctttttgaatgtgactactaaaaaaaaaaatggtcagatcacctgtatggctgacatatttctagggggcatcatgaaaagggccttcacttgtctgagcagctggg

SEQ ID NO: 3078 - DNA, 120 bp, synthetic construct
  source 1..120: mol_type = other DNA
cccaacaaaaatgtcaacacttccctctgcctccctcttcctgatctcccttccctccttatttcttcttcttgctcgtaattacctacctcagcacgcactcacctgtataccttgtta

SEQ ID NO: 3079 - DNA, 120 bp, synthetic construct
  source 1..120: mol_type = other DNA
atcatatatatgggcaaagacttaaaaagaatacaacaagaaataaatacttagtgtagttgtggggacttctccaaccctccatatgtttacaaagtaaatacaaatcagaaggtctgg

SEQ ID NO: 3080 - DNA, 120 bp, synthetic construct
  source 1..120: mol_type = other DNA
ctctgtcaaagcttcctgaatagtacttcatgccatactaagtatctaggttaaaagatgagccaacaaaatgtgtcttattcacttggaatcaggggacatccaagttccttaagaaaa

SEQ ID NO: 3081 - DNA, 120 bp, synthetic construct
  source 1..120: mol_type = other DNA
gagaaataatgattctaaatacagattctttctctttctgccctgataggattttgaatatggtgactaggcaaggggcactttgggctaatactctaggttctctgggtaagtagagat

SEQ ID NO: 3082 - DNA, 120 bp, synthetic construct
  source 1..120: mol_type = other DNA
tggggggcctcacatgtcgagctaaagagtctggcctttatcactctcaagtgagtggagagtaaagtaaaggcttttaagaagggaatagaactatgaatgtagcatcagaaaaactaa

SEQ ID NO: 3083 - DNA, 120 bp, synthetic construct
  source 1..120: mol_type = other DNA
acttttctgaagtctgggcatagttaggatttatgaaagaaaaaagaaatcagatgctcagatgaaaacttcttatttgtttttgatgcgaatcagtgaataaactaaaaatctggaaac

SEQ ID NO: 3084 - DNA, 120 bp, synthetic construct
  source 1..120: mol_type = other DNA
tagatacgtgtatataatatatgtatgtattagatacgtgtatataatatatgtatgtattagatacgtgcatattatatatgcgtatgtgatacgtgcatattatatgtgcgtatgtga

SEQ ID NO: 3085 - DNA, 120 bp, synthetic construct
  source 1..120: mol_type = other DNA
ctttgagtttagacagtttgactataatataccatgaagaagacctttctgcattatatctgtttggagatctctgaacctcctctatctgatgtctaaatctcttgctagatttgggaa

SEQ ID NO: 3086 - DNA, 120 bp, synthetic construct
  source 1..120: mol_type = other DNA
aatctgctctagtattgggttagccgcaggccaattcacctcagcctttaattagccacgagccaaatccttcatccggataaaaggtagctgataagaacctcaaaagaatacttaatg

SEQ ID NO: 3087 - DNA, 120 bp, synthetic construct
  source 1..120: mol_type = other DNA
tatcctacagtgaacatgacattatctcagcaggtagaatggaagtatatggattttattctctgcaggtcccacttgatatttcaccaaacattctaaggtgagtttttagtatccaag

SEQ ID NO: 3088 - DNA, 120 bp, synthetic construct
  source 1..120: mol_type = other DNA
gttttagctcttacattatgtatagaaagtctttcaagttggtttctatagatagtgtgaggtacggattgaagtttatttgtttacatatggctgtccaattgttctgcaatgttggtt

SEQ ID NO: 3089 - DNA, 120 bp, synthetic construct
  source 1..120: mol_type = other DNA
aatcctgaaaaactttctacattagtgtgtggaaaaacagcacaattgccaaatttatagggcgaagaagtcctatgtttacctagaggggaaactctgaaccaccacagcccaacagga

SEQ ID NO: 3090 - DNA, 120 bp, synthetic construct
  source 1..120: mol_type = other DNA
acacacacacacactatatatatttttgtgttatatatacacactatatacacactatatacacactatataggtttgtgttagggcctacatttatataggtacatgtgtagtgtgtgt

SEQ ID NO: 3091 - DNA, 120 bp, synthetic construct
  source 1..120: mol_type = other DNA
aaatacatagctagagaggtttgttataccaatgacttttacaggcaagaatgtatttggctgcgactaacaggaaacctgacacagagtggcttaaacaagccaggggtttgtccttct

SEQ ID NO: 3092 - DNA, 120 bp, synthetic construct
  source 1..120: mol_type = other DNA
tacagtgtttgaggggaatggtgacttatagaactaaaaacattgaataacttatgttttactatacagatttatagttgcacaaatctgtagttgatattttcaaactgtaattacatt

SEQ ID NO: 3093 - DNA, 120 bp, synthetic construct
  source 1..120: mol_type = other DNA
tttaaaataatgtttttgttatgtttattttaaatgatattgaaaatgaattacattttctcaaggtcatttaaaatgaactgattctttattgggtgataggtggaaggcaggaattga

SEQ ID NO: 3094 - DNA, 120 bp, synthetic construct
  source 1..120: mol_type = other DNA
ctttcattcttagatttcctaatatttctcactgtttgcagagacatatatacattccagcagtttaaatggaaacacatgtttgaatccaggaacatgtgtgcgtcccacagactatga

SEQ ID NO: 3095 - DNA, 120 bp, synthetic construct
  source 1..120: mol_type = other DNA
tggcagctccttttttcttaaaccattctgtggaattagtaaagaacagtgaaattggataaaggcaaaggcaatagggtagaggggaggaagtaagcctgaacatctattaccagtctc

SEQ ID NO: 3096 - DNA, 120 bp, synthetic construct
  source 1..120: mol_type = other DNA
tcagctgattagcaaccttaattaccttttgccgtgtagcctaacacaggatttaagggttaggatgtggagatctttgggggatcattgttctgtctgatttgtgtttttacctcatgc

SEQ ID NO: 3097 - DNA, 120 bp, synthetic construct
  source 1..120: mol_type = other DNA
tggtaagacacttctccatgggaatcagcaattcaagggaagaattcaaacttagttacaaattgtaactggaagaaaaagtcagaccaggcagaatactggtagtagaaagccagcccc

SEQ ID NO: 3098 - DNA, 120 bp, synthetic construct
  source 1..120: mol_type = other DNA
tagcagtctggttacacggaaagtcaatgttttacatttggtttcccaaaatccttagagaattctccactccgatctgagaacacaccttgttgaacaatgcttcactggatctgttcc

SEQ ID NO: 3099 - DNA, 120 bp, synthetic construct
  source 1..120: mol_type = other DNA
tagttaaaatgacatgaccttccatttctgatatgacagctgaggttattttgggtcagattttttttatgttgaaacttcagatgacggcaaataattcccccccccaccccccacccc

SEQ ID NO: 3100 - DNA, 120 bp, synthetic construct
  source 1..120: mol_type = other DNA
gattaaacatagaaaaaaagccacgtatgcttgcccaggggatgcaacgtttctttgtaaaccctccttagggtggagtggacaactgagagctgaggcaagcctgatcatcctcaaaat

SEQ ID NO: 3101 - DNA, 120 bp, synthetic construct
  source 1..120: mol_type = other DNA
cactctgttctttgtgtttattgtccctcgttgcttgtctccttttgtgctggaattatttagtatactaatcattgaaacattatatatatcattggctgtcttctgatttttttagtt

SEQ ID NO: 3102 - DNA, 120 bp, synthetic construct
  source 1..120: mol_type = other DNA
cacttaaatgtgaaatatttgtgtaatacatttcaaggaatgaaaaacacagactttaaattccaagtcaaggctttggctattatttgccattttccctcatcttgtatggtgcctaaa

SEQ ID NO: 3103 - DNA, 120 bp, synthetic construct
  source 1..120: mol_type = other DNA
gagatgaaatacagaacatctttttcagagctgggacataaacaccttcaaagtgctgagctctgggatgtgctttacgttttaattattcatcccctgggctccactgtttctttggga

SEQ ID NO: 3104 - DNA, 120 bp, synthetic construct
  source 1..120: mol_type = other DNA
aaaactcctgttttaaatgcagtaggggagcttactatttaaggcaactgaagtaacttctatcataaatatttacctcctaatttctttttctttttaaagctgaatttccacatgttg

SEQ ID NO: 3105 - DNA, 120 bp, synthetic construct
  source 1..120: mol_type = other DNA
cttttgataaaattcaacataccttcatgataaaaaaattctcaacaaactaggcatagaataaacatgcctcaaaaaataaagtccatatatgtcaaatccacaaatagcattatactg

SEQ ID NO: 3106 - DNA, 120 bp, synthetic construct
  source 1..120: mol_type = other DNA
ctcccacactctcatgttccaggaatatctcagagcattttaccaaaacttagatcagctgtagttaagccttggccaaatagcctctctagagacatgcagggaagatgtttatcataa

SEQ ID NO: 3107 - DNA, 120 bp, synthetic construct
  source 1..120: mol_type = other DNA
gggagcctatgaagaaagagatgatgtttctgtatattatacattctccagaaactaagagctccaatagtctatcgagacttcatttccctggcctggcgaggtggatcacagatgtaa

SEQ ID NO: 3108 - DNA, 120 bp, synthetic construct
  source 1..120: mol_type = other DNA
atgctatttacttcatcattttccagccttcctgataggcgtatactcacatgaggagatacaaaactgaaaacattatctcattatagactatccacgatttaaaccttcaagctggca

SEQ ID NO: 3109 - DNA, 120 bp, synthetic construct
  source 1..120: mol_type = other DNA
tttcagattctgaacaaggctgtgaccatgccttaccaggacatgtagaacttatacacagtcttaaacaagctgaagcacaaaatcaatattttggttggaaaaagttttctgtatttt

SEQ ID NO: 3110 - DNA, 120 bp, synthetic construct
  source 1..120: mol_type = other DNA
gctgagataaatttgcaagaaaacagagcacatgggatgagctttgcacatgagaaggtggaaaaatggtcaacatgatcatgcagtgatgcctgtgaagaaaagtaatctgactagtgg

SEQ ID NO: 3111 - DNA, 120 bp, synthetic construct
  source 1..120: mol_type = other DNA
aaaatgaatttgtgcattaactcattaaatcactgagtttggaactctaggtaagtttagactgtgcgacacagtacgatacagggcaaaaggcagattctggactccacaagatctggg

SEQ ID NO: 3112 - DNA, 120 bp, synthetic construct
  source 1..120: mol_type = other DNA
catatgaatggatcgagtttaggttgagcatctcagactgtaaagtgccagcgaaatgtcaggcatcatttgtaatatcatctaagagccaactcattcccccagggtgaaggataagca

SEQ ID NO: 3113 - DNA, 120 bp, synthetic construct
  source 1..120: mol_type = other DNA
tactttgtggatcctgaggttttctggtttttttacaaattgaaggttggaagcagccctgagttgagtaagtgtatcagtaccatcttctaacagcatgtgctcccttcatgtctctat

SEQ ID NO: 3114 - DNA, 120 bp, synthetic construct
  source 1..120: mol_type = other DNA
cctagccacagatttcataagcatgccttttattttccccctaaattattaattaatgtcatatcagggttggagttctagggacccctaggctgctatcaaacctttcataaagccccc

SEQ ID NO: 3115 - DNA, 120 bp, synthetic construct
  source 1..120: mol_type = other DNA
aactgcaaggaggagttccagatccatgatgagctgctcaaggctcattacacgttgggccggctctcggacaacacccctgagcactacctggtgcaagtgagctcaggccttaccctg

SEQ ID NO: 3116 - DNA, 120 bp, synthetic construct
  source 1..120: mol_type = other DNA
gatacttataacaaccctatgaagtaggtatgactattatctccatttaagagattagggaaactgaggcacagagcagctaagcagctcatgcaagctcacatagcaagtttggcagtc

SEQ ID NO: 3117 - DNA, 120 bp, synthetic construct
  source 1..120: mol_type = other DNA
ttggtgtccacgtacagctatggcaatttcctcagctgaggttcaggaggtggaattgctgggccacagggtatatgcattttcaggctctttggacaattttcaaagacggactgattc

SEQ ID NO: 3118 - DNA, 120 bp, synthetic construct
  source 1..120: mol_type = other DNA
acataagagtacaacaataggagaaaaagggaagcctgtttgtcattccaattctgacaacgtacaaggtcttcgaaattcttgtccacgttcatggagccatttattggatactgtgag

SEQ ID NO: 3119 - DNA, 120 bp, synthetic construct
  source 1..120: mol_type = other DNA
ctgttcttccctataatccctctgcaaattgccattgtttttacttaactccatgaattccagtcatacttctgttcttaaaagaagagtgagctacatgtctagtacttacaatctgat

SEQ ID NO: 3120 - DNA, 120 bp, synthetic construct
  source 1..120: mol_type = other DNA
tcttctttctttcatagtgaagatgaggcccaggatgttgtactggcatgagtgccaagagaccatggcccttttcatttcctattctctttcccctgatcccaaccattgtttgcaaag

SEQ ID NO: 3121 - DNA, 120 bp, synthetic construct
  source 1..120: mol_type = other DNA
tttcaaataggaaatcagtgctggcattggaaggaacagggaagaaatccatgtacctaggaagtagcacagaagagagagaagcagaaaaatatgcagagtgaagtggccagaagtctg

SEQ ID NO: 3122 - DNA, 120 bp, synthetic construct
  source 1..120: mol_type = other DNA
cttgaaatctttcttgttttttgatataagcatttattcctataaacttgactctgaatactgtttttgctgtgtcccataggttttggtatgttgtgtttctgttttcctttgtgtcaa

SEQ ID NO: 3123 - DNA, 120 bp, synthetic construct
  source 1..120: mol_type = other DNA
gtttgttatgggggactgtctcatatgttgaaggatgtatcacagcatccctagcttctactcactaggtaccagtaacacatcctttgtgacaattaaaaatgtctccagacattgcca

SEQ ID NO: 3124 - DNA, 120 bp, synthetic construct
  source 1..120: mol_type = other DNA
tggctccagttggtttccaactttaccaggtgtgtggcccgggcaagtcacttcatctcagcaggttcctgcacataggggctggtgaggactcaaggataaggcacactaaagggcttg

SEQ ID NO: 3125 - DNA, 120 bp, synthetic construct
  source 1..120: mol_type = other DNA
cacaggtaacctcccaggcctctgccaagcagaaccaatgaagtctgttgacacaagtcactagggaaaaaaaaaaaaaaaagtctctgcaactctgtgctccccattatcagagaaaat

SEQ ID NO: 3126 - DNA, 120 bp, synthetic construct
  source 1..120: mol_type = other DNA
tcctgccggagggatggccgtgagcccatctgccacctctgccaacatctcccccactgtgctctgtcaggactcaggaagctgggcagagcccgagaggcagggcgggcgagaccagag

SEQ ID NO: 3127 - DNA, 120 bp, synthetic construct
  source 1..120: mol_type = other DNA
catttttaacatgacatcgttacttgtgtgtacaccctctttgtctcctggggggttcgttttggggaggggctattatcatccttgctttacagttaaactatacactaaattcctccc

SEQ ID NO: 3128 - DNA, 120 bp, synthetic construct
  source 1..120: mol_type = other DNA
gaatgtaatgtcttcttgggtaattgagccttttattcatcaagtaatggtcctcaatatccctaggaattttcctgttttatagtgaaatttgtctgatattgatatagccatcccatc

SEQ ID NO: 3129 - DNA, 120 bp, synthetic construct
  source 1..120: mol_type = other DNA
caaatgactatatttcccaagttttacccagctattcctagttgtcttctagacagagaacagaagacaggacacgaggaatgtacgaagatttttcttttcagctttgggataccccca

SEQ ID NO: 3130 - DNA, 120 bp, synthetic construct
  source 1..120: mol_type = other DNA
cttatatgtggaatttgacactactgcttgttatcttcaaagtttcttgcaaattacttttttatttctcttctttactcttggatcatacgttctctgtgccaccccccgccccccgcc

SEQ ID NO: 3131 - DNA, 120 bp, synthetic construct
  source 1..120: mol_type = other DNA
cttccaatcacctctgccaaagcactagacatgtgagtgaatccatcttagacccttaagacaggtgcataaactagctgagtgtcattgagtgactttagttaacattagaagaatccc

SEQ ID NO: 3132 - DNA, 120 bp, synthetic construct
  source 1..120: mol_type = other DNA
atcaccatcatcaccatcactaccaccaccatcatcaccaccaacaccaccatctcaccatcatttatctccatcgccatcatcaacaccatcattatcaccattatcatcatcattaac

SEQ ID NO: 3133 - DNA, 120 bp, synthetic construct
  source 1..120: mol_type = other DNA
aaagaccagcttcttctaggtccacctgagctatccaacacttatgaatgaagctatggtaactggagcaggaggaaagaaccctcctgagcttggcctgggactccaagcacagcattt

SEQ ID NO: 3134 - DNA, 120 bp, synthetic construct
  source 1..120: mol_type = other DNA
aatctacttttctgctttgatctctaacagttcctgcacccaaatgcttagcttcagccagatggtcctttgtataagctcccacattggtgcctttacaaaaaaagtcctcttcaccta

SEQ ID NO: 3135 - DNA, 120 bp, synthetic construct
  source 1..120: mol_type = other DNA
atggtgctacactttagacaccttgattcttccagcaacattttgaggtaggtgttgctatgcacattttgcagataagaaaaaccaggttccaaaaagttcaagtttctagcccaagga

SEQ ID NO: 3136 - DNA, 120 bp, synthetic construct
  source 1..120: mol_type = other DNA
atactactatcaaacaaagaagatgaataatctaagaaaacattttctaaaatgcctctcattttaagttccaccatggtcggtcaatgctataatataccgacctttctgagactctca

SEQ ID NO: 3137 - DNA, 120 bp, synthetic construct
  source 1..120: mol_type = other DNA
tggtgtatagtaggtgttcaacaaatctttgttgctgaggaaatcagcaccagcagtagtgactgcttatgcagtttctggagcagcttgcttctgaagtcagattcatggatatcacaa

SEQ ID NO: 3138 - DNA, 120 bp, synthetic construct
  source 1..120: mol_type = other DNA
cctcagaagcagctgcaaaaactcattcccagctcctcatcgctttcctaacaggatctctcagaggggcctgaggcctttccaagctaacacaagccattggtgagagtccctgactga

SEQ ID NO: 3139 - DNA, 120 bp, synthetic construct
  source 1..120: mol_type = other DNA
aagtagttcccttgcaacgagataccatttttctcatgtttcatctaaatatctcattgcctacagttgatcctagtatatttccaggtggcgaattgcaaagtcaaacccaggaggaaa

SEQ ID NO: 3140 - DNA, 120 bp, synthetic construct
  source 1..120: mol_type = other DNA
cacccaacccagccggccttctcccatcactacttgggtgcgagcataccctctctgtctcaccccatgccatcatccgggtaaggttcgtagtcttccacacgcatattatacttcttg

SEQ ID NO: 3141 - DNA, 120 bp, synthetic construct
  source 1..120: mol_type = other DNA
caagctacataatttcctgtggaaacggaaaaatcctactagcctctaaggtattctaaatgtgagctcttttgtccctcacatcctgtgtcccttgccattattgtgaggttgtctttg

SEQ ID NO: 3142 - DNA, 120 bp, synthetic construct
  source 1..120: mol_type = other DNA
tcgttggaggggaaggcccccagccgcatcttcgttttagaaagggaggagtgggaaaagccagttcaagagggggcgtctgagggtcagagctccgggccttcggggaccaactcagat

SEQ ID NO: 3143 - DNA, 120 bp, synthetic construct
  source 1..120: mol_type = other DNA
gccatatgtgatactggtaatgctgaaaatgatttgttgtgacagagaatacagaaacatatttatacatgcttgtttcatccaggttgtggagtcagtgttaataatgtcaggctaaca

SEQ ID NO: 3144 - DNA, 120 bp, synthetic construct
  source 1..120: mol_type = other DNA
gctgatgttttgtgatatcccacagaagactaattctgattgcagggaagtgcatggttcaagaactgaaatcaatcactcaagttagtctgggtcttaaaggaggaggactcttgagag

SEQ ID NO: 3145 - DNA, 120 bp, synthetic construct
  source 1..120: mol_type = other DNA
ttctcagacctctatactgtggggccagggtgcctctggcctaggagctggtgagggtggggggtgggaggacaggggtgcggatgaatctggctggagtggtctgcagcttgggaatcc

SEQ ID NO: 3146 - DNA, 120 bp, synthetic construct
  source 1..120: mol_type = other DNA
tcagtgcagacatctgaggagcgaggctgcagggccctccccctggaagatagctacattgaaggttctttacctgacagtcactctacttttaaattttattttaaatagtcataaatt

SEQ ID NO: 3147 - DNA, 120 bp, synthetic construct
  source 1..120: mol_type = other DNA
cacccccattttttcctttcccttttgttcgtctcaccgctcatccagtgggcggccagagaggcacactgaggctggaagagcccaggccctctgctagttctttttctcaaggtagtt

SEQ ID NO: 3148 - DNA, 120 bp, synthetic construct
  source 1..120: mol_type = other DNA
ttgggctcttgattatagagaagcttggagttgtacaaggcaatgtattaaatgcttaaaaatcaactcaatgaaaaaagaaagacctattacactaaaatcacatttgagcaattctct

SEQ ID NO: 3149 - DNA, 120 bp, synthetic construct
  source 1..120: mol_type = other DNA
aaggaaatgaggaaaggctaaggggctggaggcgtgcatggcttagtctcttcttgagctgctgtgtaaagacacagtcaccctgttgtgttaggagacaacctaactaacaagtgttaa

SEQ ID NO: 3150 - DNA, 120 bp, synthetic construct
  source 1..120: mol_type = other DNA
catgcacacgattttacataagagaggtagcgcatggacctgtggtgttagtaatctcagagtttgacatgatgagtttacaggacacttcttggaggctgtaattgcttttgtgaatct

SEQ ID NO: 3151 - DNA, 120 bp, synthetic construct
  source 1..120: mol_type = other DNA
ggtcaagatcacacaagtatctagtggtggaaccaggcattgaaaccatgtctgtgacttcgaagtttgtgcacttaaccactctggtaatatattccatttggcttaattgcttcctac

SEQ ID NO: 3152 - DNA, 120 bp, synthetic construct
  source 1..120: mol_type = other DNA
aaagaggttggaagggaagaggcatttgtggaattatgagttcatgcaaaactctccaggccaagtaggggtctagcctttaatgatattagtcaaaggcaattttagcaaagctgtgct

SEQ ID NO: 3153 - DNA, 120 bp, synthetic construct
  source 1..120: mol_type = other DNA
tgcataccaaaggttgccagcaggctctaagagcccgtagccccttattttctaaaccaaacccctaactttgttccatgcctatctttgcagcctttgcctattattcctagttctagg

SEQ ID NO: 3154 - DNA, 120 bp, synthetic construct
  source 1..120: mol_type = other DNA
cctacagagccccatatccttagatggaacagctcaaagcaaaagtaacatttttaacaaattgcaggggagagggtttcagtccaacaaaataaaaaggctctttaggtttgctataga

SEQ ID NO: 3155 - DNA, 120 bp, synthetic construct
  source 1..120: mol_type = other DNA
tcaaagtgtcaaaaactggccattttatcatcatagctacaatttgaaacaagatggatacaaacacaaaacagttctaatcatgatcctttttgatcatgaatatgagagttacggtta

SEQ ID NO: 3156 - DNA, 120 bp, synthetic construct
  source 1..120: mol_type = other DNA
aatcatgttaagtggtgctaagaatatctctttggacctgatcatcctgaaatgttgatttctcttggacctgtctatgtatgacactaaatgtgctggaagggaaaggcgacagatccc

SEQ ID NO: 3157 - DNA, 120 bp, synthetic construct
  source 1..120: mol_type = other DNA
taattaggtgaagcacattgggcagatgaataatggttttgtctctggcttggactatttggacgaggcttatatgtctgtcttgaggtgatcagtgggaagaggggaaattttactgga

SEQ ID NO: 3158 - DNA, 120 bp, synthetic construct
  source 1..120: mol_type = other DNA
ccggtggtactgtctcccccagtggtactgccttccccaatggtatgtgtcatgtaaccagaaaaggagtattaaacaatgtttgtaatatgggaggaaaacctcaaattaccataagat

SEQ ID NO: 3159 - DNA, 120 bp, synthetic construct
  source 1..120: mol_type = other DNA
gaatgtatttgaagtcccttcctttgtgtgacctttcgtcttctaaacagctctggactgcttaattttcctcttccacctaccacattagctgctgactttccttgaatgtgattacta

SEQ ID NO: 3160 - DNA, 120 bp, synthetic construct
  source 1..120: mol_type = other DNA
cactcatgagtggcataaccttagtttagacccttctctggactctcctattccagagagctgtggtgagaattatatgggcatatgctaagcatatataggtaaacataggttgagcac

SEQ ID NO: 3161 - DNA, 120 bp, synthetic construct
  source 1..120: mol_type = other DNA
tagtatcagtggctacttccaggctaccatgccagaattgagtcattgcaacacagaatatatgaccacaaatcctagaatatttcctatctgctcattacaagaaagcttgccagcccc

SEQ ID NO: 3162 - DNA, 120 bp, synthetic construct
  source 1..120: mol_type = other DNA
ccctcccctctaaactaaaaatggatcaaaacaataaaacaacagaaaacaggaataatccttcaagacatgggtctggagaagactttctgcaaaaggccgcaacagcacaggcaacaa

SEQ ID NO: 3163 - DNA, 120 bp, synthetic construct
  source 1..120: mol_type = other DNA
gtgggtagccctcccgctgcactgactcaagaagcacttcaaaagctttggatgcattgtgaccatagcctccagatggataaaacaaattatctctctagagaatatcaacattattta

SEQ ID NO: 3164 - DNA, 120 bp, synthetic construct
  source 1..120: mol_type = other DNA
aacaggaaaaatctttttgtaaccacattgaaagaagttgttcagccagtatattgtacacatctacacatatgtttttattctaggagtaaatataaatgaatatgtattcaacatgaa

SEQ ID NO: 3165 - DNA, 120 bp, synthetic construct
  source 1..120: mol_type = other DNA
ggcaaactacttgaaaacttccattaacagccaaacgtgtgatgactaaatgaaaagcaataaaaagcagggcccttcaccaccactgttgccatcccagaaatgtctaagcaagcattt

SEQ ID NO: 3166 - DNA, 120 bp, synthetic construct
  source 1..120: mol_type = other DNA
aatgttgtggtacccccttaattttcctgaggtagttgttttggggggcacagtaggaggggagaatctttgtaagattttaataccagaacttccaaaccaacctaaaaactgaatggc

SEQ ID NO: 3167 - DNA, 120 bp, synthetic construct
  source 1..120: mol_type = other DNA
acaaggtaggttcttcaaaaatgtgaaggaaagagaaaagaaacctatacaatttttacaacatcaaatattactttgaatttttagccttaactacttgacatcttctgccacaatctg

SEQ ID NO: 3168 - DNA, 120 bp, synthetic construct
  source 1..120: mol_type = other DNA
tcaccatcgagtcgctggtggccaaggacagtcccctgcccgcctcgcgctccgaggaccccatccgtcccgcggcactcagctacgctaactccagccccataaatccgttcctcaacg

SEQ ID NO: 3169 - DNA, 120 bp, synthetic construct
  source 1..120: mol_type = other DNA
cctctccccacagaataaatagcacattactttcataccttatctagccagttatcccagaggaacttcttcctaatgtgaatcaatggcccacattgaaaggtgtgctaatggcaaacc

SEQ ID NO: 3170 - DNA, 120 bp, synthetic construct
  source 1..120: mol_type = other DNA
ggaggtggcaatgaaggaatagatgaaataaatgcatgaaaattactaaagctgggtaatgggtacacaggggttcaattacacttttttctttaatgtggcatgtctgaaaacccccgt

SEQ ID NO: 3171 - DNA, 120 bp, synthetic construct
  source 1..120: mol_type = other DNA
agttaggcagtttaaaattaaaattatagtttagtggtcataagagttagatcattgtgtggtaacctgtgagtgtgtttatttagcaatgatggtgaccatgaagggactcgctcaggc

SEQ ID NO: 3172 - DNA, 120 bp, synthetic construct
  source 1..120: mol_type = other DNA
gttgtgatgtgatccacatgatccccggacgcttttcagcttcttcgctgggaagagtttgtatctgttggttgcacttttcattggttctaagacatagctttcattttcaaacacaat

SEQ ID NO: 3173 - DNA, 120 bp, synthetic construct
  source 1..120: mol_type = other DNA
gggccagagagaccttgagggttttccttcagttcagcatgtcaaagatccatattttggggtatcattttctgagccccaacatacataaccacaaaattttgcagattattttagcaa

SEQ ID NO: 3174 - DNA, 120 bp, synthetic construct
  source 1..120: mol_type = other DNA
tgttcagatggagctctgccccgtattccagtaaatgctcgaaggcatgattgttaatctcttactgatgtcatgcttctgcgctttctattgaagactctcaaggcccttgtgacctgg

SEQ ID NO: 3175 - DNA, 120 bp, synthetic construct
  source 1..120: mol_type = other DNA
ccacaaataaacacagatatgcagatacagataccacacacacacacacacacacacagatgcagacaccataaacacagatacaccacaaacacatacacaccaacacatgatacacca

SEQ ID NO: 3176 - DNA, 120 bp, synthetic construct
  source 1..120: mol_type = other DNA
cacattctcatctgtgacaccttctcaactggtctccaactcctctcctctggtttgcctctagttataccgccttaatcttctgagaatatatgttcttgtttcaaacatcaacagagg

SEQ ID NO: 3177 - DNA, 120 bp, synthetic construct
  source 1..120: mol_type = other DNA
aacagagtgagatcctgtctcagaaagaaatagtttagtggcaggtgagagagcatcatgtaatcgcgatgtgtaaaaacgtgcaagaatggaattgtgcagaaaacccagtgcgggctt

SEQ ID NO: 3178 - DNA, 120 bp, synthetic construct
  source 1..120: mol_type = other DNA
ctcccttcctcccttctttccttcctctatcctcccttctctcgctctctctctagctcattttttttttcttctgcccggaagaaatactggcattctccaaggctcttttctcagcct

SEQ ID NO: 3179 - DNA, 120 bp, synthetic construct
  source 1..120: mol_type = other DNA
aaatgggtgggtgtctgcttgtctcagccctgggcgtcggcgggctgtgattagagggttagacatactgcactgcttgtttataacttaaaacccagaaggtacgttttatctatactt

SEQ ID NO: 3180 - DNA, 120 bp, synthetic construct
  source 1..120: mol_type = other DNA
ctaagcaggtgcagatccctctatgaggaggatctcagatctggagtattcccaaaaggttgcattatagttctcctcccactgaaaatcaatccctcaatcaatcccaaaagaagcact

SEQ ID NO: 3181 - DNA, 120 bp, synthetic construct
  source 1..120: mol_type = other DNA
tttctttcccttcttgttttaaaaggtctgcaggggagttagctccatcctaccagtgcctaattcacattagcacggttctcctaaatcttcagatgtgattccaatgtctgtccttct

SEQ ID NO: 3182 - DNA, 120 bp, synthetic construct
  source 1..120: mol_type = other DNA
aaacaaaaaaacagaaaggcacttccacctggaaatttaagagtcttattatttcttaggtcaccaactgagaggaaagaatttaaaaaaaaattacaatgaaaacactacatatcagaa

SEQ ID NO: 3183 - DNA, 120 bp, synthetic construct
  source 1..120: mol_type = other DNA
tgcccaaggacacgcagtcagaatgaaggcaggagtcgaatgtcagcattcttctcctgtgcccacagccatgactgctgcactaggcatctctccttcctgcacttgtggatgtgagtt

SEQ ID NO: 3184 - DNA, 120 bp, synthetic construct
  source 1..120: mol_type = other DNA
atgtctgtgcacactgtgcatttggccatggtgtgtatacacttgctcctgtgtcctgggtagtgtgcgtgtgtgtgtccacactgtgcatttggccgtggtgtgtgtgcatctgctctt

SEQ ID NO: 3185 - DNA, 120 bp, synthetic construct
  source 1..120: mol_type = other DNA
aatcagcactatgtcaccccggcacaatgcgtgcaccccacgcgaaggctgtctcaagagctggagaatcagctctgctcctgacaccccaggtcccctcttgatgtctttggaggcccg

SEQ ID NO: 3186 - DNA, 120 bp, synthetic construct
  source 1..120: mol_type = other DNA
tccttccccctcacgtggctcaacccaaggctttccctactccgctcctgtcatcccaccccacacccctttctcagcaggatctttttctgtggccctgtgtctttctgaattactgta

SEQ ID NO: 3187 - DNA, 120 bp, synthetic construct
  source 1..120: mol_type = other DNA
agcagcttctggctccatctgcagatttgcttaagtcacttgccctatctctggggggaaggctgctgcatgtggtcagtgtggtagaacccacagtctccccaaaaaacctctaggctg

SEQ ID NO: 3188 - DNA, 120 bp, synthetic construct
  source 1..120: mol_type = other DNA
ctgccctgcaggtgggactctcattgctgtttgggttcaagggccatctcacttgtttgggcatccagtgccagttgatcaatgtccttgtccctgagatggtcacacagctgtcatgcg

SEQ ID NO: 3189 - DNA, 120 bp, synthetic construct
  source 1..120: mol_type = other DNA
aggctgccctttgctgttggtcacagggaacagccttggcatggtgtgggggcacatggggcacgttcaccaggcagcgtcatcggggtcattgtggcagctgggccacaggctggagga

SEQ ID NO: 3190 - DNA, 120 bp, synthetic construct
  source 1..120: mol_type = other DNA
agccccagcagggaccaggcctgggagtgagggcgagccccttgcgcgaaccctggagggccggaccctaaccctggggctgtgggctctgcccctccctccattcattcatttgtcccg

SEQ ID NO: 3191 - DNA, 120 bp, synthetic construct
  source 1..120: mol_type = other DNA
gctgtgtgtgccacatgaagacatggtgagaaggcagccaggctgtgtgtgccacatgaagacacagtgagaaggcatccaggcattgatggccaggaagatgttcctcaccagaaccca

SEQ ID NO: 3192 - DNA, 120 bp, synthetic construct
  source 1..120: mol_type = other DNA
ctcctctctttctcctgtctcttctcctctcttcttctctctctcctgtctcttctcctctctttctcctctcttctctctgcttctctcgcctctctctcctctcctctctctgctcat

SEQ ID NO: 3193 - DNA, 120 bp, synthetic construct
  source 1..120: mol_type = other DNA
cctgctgcagcctctgccccatctacctccacgcctgttcctgctgcagcctctgccccatctacctccatgcccagctcctgctgcagcctctgccccatctacctccacgcccagctc

SEQ ID NO: 3194 - DNA, 120 bp, synthetic construct
  source 1..120: mol_type = other DNA
ccagcattataaaggtattataaacacggtaacctgcacatcgtttaaagcgtccagttggacaagttcgggagtatggctatacgtctgtgaaagcaacacacaatcaagaaaacgagc

SEQ ID NO: 3195 - DNA, 120 bp, synthetic construct
  source 1..120: mol_type = other DNA
ttacgagtggcctcggtttctccccgtggaaacggcacgatgggttattttgtgtttaaaatcacctgctttccataatatgagaaatacatgaactatcttaaaccaaaagtcaggctc

SEQ ID NO: 3196 - DNA, 120 bp, synthetic construct
  source 1..120: mol_type = other DNA
cgtgcaatacacgatgtaccacagagaggctggatacaattgataaagacattcaagaaaaagaggcaagtagaaaccccaggagatggattggaaggcagacaaaatcaaaaacaacaa

SEQ ID NO: 3197 - DNA, 120 bp, synthetic construct
  source 1..120: mol_type = other DNA
ttgtgtgtacagacattcacgcgtttgtgtgatacggatatattcacgcatttgtgatacagacatattcacgcgtttgtgtgatacggccatattcacgtgtttgtgtgatacggacat

SEQ ID NO: 3198 - DNA, 120 bp, synthetic construct
  source 1..120: mol_type = other DNA
tggacttgacccaggcggtgctgggagcaggggattcctgttggggcttcataacatgcataaactcgtgtatacttttgtgtacataccaagtcctctacaattaatttttaaaattat

SEQ ID NO: 3199 - DNA, 120 bp, synthetic construct
  source 1..120: mol_type = other DNA
tcccgagtactctgattatggtagacaaagttatacaatcctgaactaccgtttgtagcctacaaaatttctcttgaatttctgtggagcggagggctgaataatagaggaactgtggac

SEQ ID NO: 3200 - DNA, 120 bp, synthetic construct
  source 1..120: mol_type = other DNA
agggccaatggaaatatttgggaccaagattcttggtaaataaaaacgaaaatgtttgcaaaaggtgtcgcctgcccctcccctcacacggtgacacagtggggtgtgtgactgttttgg

SEQ ID NO: 3201 - DNA, 120 bp, synthetic construct
  source 1..120: mol_type = other DNA
tggtgagatgttagaagatgataaacacaacagagagatattaaggggggaaggtgattgggtaaatgagggtataggtgttcaattttaagtagaatgatcagggccggcccttctgtg

SEQ ID NO: 3202 - DNA, 120 bp, synthetic construct
  source 1..120: mol_type = other DNA
gccgtgtcctggagcggtgacagggtgcccggtgccgtgtcctggagcggtgacagggtgcccggtgccgtgtcctggagcggtgacaggctgcccggtgccgtgtcctggagcggtgac

SEQ ID NO: 3203 - DNA, 120 bp, synthetic construct
  source 1..120: mol_type = other DNA
tcaactacgaggtgcgtgtgctttgctgcgagacccccaaaggctgccccgtgacctccacatctgtgacagctcctagcacccctagtgggagagccaccagcccaactcagagcacct

SEQ ID NO: 3204 - DNA, 120 bp, synthetic construct
  source 1..120: mol_type = other DNA
atgtggtgtgctccagcctggagctgtacgcggcactctgtgcgtcccacgacatctgcatcgattggagaggccggaccggccacatgtgccgtgagtgccaccactgtcctcagggtc

SEQ ID NO: 3205 - DNA, 120 bp, synthetic construct
  source 1..120: mol_type = other DNA
gccccgtcctgtggtgggtggagtctcagctgtgctgccccgtcctgtgattggtgaactctgagctgtgctgctctgtcctctctggtctgtgaagtctgagctgtttggtaggcgggg

SEQ ID NO: 3206 - DNA, 120 bp, synthetic construct
  source 1..120: mol_type = other DNA
ttcccggtgcccctgggcctgcagaagtgctcccccacccccatcttgctttcaccctcacgtggcgcccccatcccaccccgtgtgtccccagccacactttcctcggcctttctctga

SEQ ID NO: 3207 - DNA, 120 bp, synthetic construct
  source 1..120: mol_type = other DNA
caggtcaggagtaagagggtgaatgtggcaatcagggagagcttcctgaaggaggggcctttctgaaactgcagggatggaaaggcccagaaggcaggaggagggacagactcccttctt

SEQ ID NO: 3208 - DNA, 120 bp, synthetic construct
  source 1..120: mol_type = other DNA
gagagattttcgggatggaacctgatggaaacgtccgtggtcaggaggaggctgcaggatggtggcgccgggctgcagacttgcggcagttttgctcacttccgattgctggccatctct

SEQ ID NO: 3209 - DNA, 120 bp, synthetic construct
  source 1..120: mol_type = other DNA
cctgtgggctggttgaggtcaaaggactcaggagtcctttggagtactggagattcttccaggcctccccagcagcagatccagaaagctcagggcacacatctgacactccatccacct

SEQ ID NO: 3210 - DNA, 120 bp, synthetic construct
  source 1..120: mol_type = other DNA
ttaagtctagatgtctctgtagactcaacacagggattcagtgtcatttctgaacgtgtccttgcttatttttcccatttagtgtatttgcaaaatatcttttagtatgaactctagtgt

SEQ ID NO: 3211 - DNA, 120 bp, synthetic construct
  source 1..120: mol_type = other DNA
tgtcttgatgataaaaagaatggtgccatttcctagaatagcaataagatacatgctgcagatggggatagagatccagatgtgtgcatattctagccctggcatcccaaccaagaagaa

SEQ ID NO: 3212 - DNA, 120 bp, synthetic construct
  source 1..120: mol_type = other DNA
ggatgaatgggcaccagtgagctagacagactggccaagggagacctgtgatgttttctgcacctgctgtgacctcccagatgtgatcttcctgctagggccagtcctgagtttctgttg

SEQ ID NO: 3213 - DNA, 120 bp, synthetic construct
  source 1..120: mol_type = other DNA
ctctggcacgttttattaaaatgtgtctccatatgtgttcttgggatcaccagtgtcaagatcacttgggtatccgtcttaaaatggagattcctgaaccccacactagacttaccaaat

SEQ ID NO: 3214 - DNA, 120 bp, synthetic construct
  source 1..120: mol_type = other DNA
taaaaagctgatggagaggactgggtgctaatgtggcctgagctagaatgtgtccgaactctcacactgggggttcaggcaggacgctaagtctgaatagtggtgctgaattggatccct

SEQ ID NO: 3215 - DNA, 120 bp, synthetic construct
  source 1..120: mol_type = other DNA
aataaactgccattaacaaagaagtcagttgtgattgttaaggttctttgtctgtggcatgaaagagcttccataacaatgaacaagacataggctccagaggggctggagcagaagaca

SEQ ID NO: 3216 - DNA, 120 bp, synthetic construct
  source 1..120: mol_type = other DNA
tgagaacgaacccagagtgaaaaggacacagaaaataagagctagagccccagtgtgacaactgtgagtctctggttcaaaccatactgcaagacatttctaacacagggtcttttcatt

SEQ ID NO: 3217 - DNA, 120 bp, synthetic construct
  source 1..120: mol_type = other DNA
gaataagggaaatgcatggaaggaggggatggaagtgaataaaagtggaatacgaaaagaaacaaatgaacctaatgtattataaactaatagtataaccatactgaagaggatggggaa

SEQ ID NO: 3218 - DNA, 120 bp, synthetic construct
  source 1..120: mol_type = other DNA
ttggtaccacaccaacagctgttagagttcactaattttgttctgttgttctccataatgccctggaacctgaattgcctcacagtctgagatcatttaaattcaggcctacatgtagtc

SEQ ID NO: 3219 - DNA, 120 bp, synthetic construct
  source 1..120: mol_type = other DNA
tgaactcggccctgccttttttatcttttcatatgttttatatgtcctggccatgtttttggtgtgcaatcagtgattgatggttcactatcatgccatcctgatttgaagacaagtttc

SEQ ID NO: 3220 - DNA, 120 bp, synthetic construct
  source 1..120: mol_type = other DNA
agagttgatttgaacgatgacgtcccatggtgggtgaaaatctatcctggataactcctggaccagtaccaattccgctaccttaaaatacatatacggacaactctcaaaactaaagtt

SEQ ID NO: 3221 - DNA, 120 bp, synthetic construct
  source 1..120: mol_type = other DNA
gataggttgggattcaatagaacaggatatgataggatggggtgggatgagatgggaggtgatggaatgaaacagagtagttgtgacaaaatctcttcaaatcacaatagagacacttgc

SEQ ID NO: 3222 - DNA, 120 bp, synthetic construct
  source 1..120: mol_type = other DNA
cctggctggctgattgctacattctttagcaaactaggtctcagtttcaaggatctcaaagtaaacccgagcaagatacactaggggaaatgcaacattggcttgaaccctgatgaagaa

SEQ ID NO: 3223 - DNA, 120 bp, synthetic construct
  source 1..120: mol_type = other DNA
tgtgtgatattccccaccctgtgtccaagtaaggggatttagaaagtggtcaagatgaagggtattgttgccatcatttttggaaagtacaatctgctatagtcaaccttctggccaaaa

SEQ ID NO: 3224 - DNA, 120 bp, synthetic construct
  source 1..120: mol_type = other DNA
aaccagagcagaatgcatgcagctcctatgcaaaagacggataaattacaacacagaaaagacagtctaaactcgtgcaccagcagagcaagtctctgatgtatttgctccaaaatgtaa

SEQ ID NO: 3225 - DNA, 120 bp, synthetic construct
  source 1..120: mol_type = other DNA
tgttttctgatacctccaactgaaacttagcacttcctctataaagcactctagcaatacctgctgattgtcaacaacagacgtcagatattttcatgtaatagctactgcaggtaagtc

SEQ ID NO: 3226 - DNA, 120 bp, synthetic construct
  source 1..120: mol_type = other DNA
ctctcctgttctctcctctcctttcctttcctttttctctctctctttcttatactccatattcagtccattagcagctcctgactactccatctttaacatttgtgctcaatatgatta

SEQ ID NO: 3227 - DNA, 120 bp, synthetic construct
  source 1..120: mol_type = other DNA
aacataattttctcacaaagacctccatgccctccagcctggcagagggagaagggatgcagatggtttagaaacactctgtgagatattggttcacgctgaatttagcaatctctttta

SEQ ID NO: 3228 - DNA, 120 bp, synthetic construct
  source 1..120: mol_type = other DNA
cccacatgctccccattctcagttctgcctgccttgcttgctagccaggaacagctctagcaactgaaggcccaggtggggctggcctgggggccacttgatgcacatcaaaggcagatg

SEQ ID NO: 3229 - DNA, 120 bp, synthetic construct
  source 1..120: mol_type = other DNA
ctcagggtcatcaaggtccctgagatctgggatgaaggacaccatcaagagttcctccttggtagcttgccctcccaccccactgctgccaaggggtggggcaggaggtatgggaggtgg

SEQ ID NO: 3230 - DNA, 120 bp, synthetic construct
  source 1..120: mol_type = other DNA
gtctttgaatggttcctccagctccccccacccccctcccagtaatgaaaatcataaaccaagcgcctcctggtcagagccctgcagccccttcaccgctaaatgggaataaagttagaa

SEQ ID NO: 3231 - DNA, 120 bp, synthetic construct
  source 1..120: mol_type = other DNA
tattagaaaggccattctaaaaataaagctctaccaaaaatcaaaggactgtctccaggtgggcctaatcaatcacacgtgccctttaaaagctgagagttttctctggctgatggcaga

SEQ ID NO: 3232 - DNA, 120 bp, synthetic construct
  source 1..120: mol_type = other DNA
gagcctactctgacatgagagaagccaattacatcggctcagacaaatacttccatgctcgggggaactatgatgctgccaaaaggggacctgggggtgcctgggctgcagaagtgatca

SEQ ID NO: 3233 - DNA, 120 bp, synthetic construct
  source 1..120: mol_type = other DNA
atgggattagtacttgagcctgttgtcactaaccagttgaggcaggacattctccttttgaccaatcatttgttcctatccatttgaaaaaaagaggtgctgataccctaaggcctacat

SEQ ID NO: 3234 - DNA, 120 bp, synthetic construct
  source 1..120: mol_type = other DNA
gtggtcatgtacagagccttacagttgagaaatgcatcttgcatgatagaattgaaggaaccacacacacctgcttatcatactgctcatgaattccttctatagcttactgaggactca

SEQ ID NO: 3235 - DNA, 120 bp, synthetic construct
  source 1..120: mol_type = other DNA
agtttgaatcatcagtgaggttacaggaagaaaacctggtggaagctgcctaaggtgttgctgttttaggctgggacacaattatgggctttcttctaactgcttcttattttgcaagat

SEQ ID NO: 3236 - DNA, 120 bp, synthetic construct
  source 1..120: mol_type = other DNA
aaatgtggtagttgcatagcatagtatctggatcaggtaagttatgtatgtatgtttctatcaaaaacaacattgaagccgggcatggtggcgcacacctatagtccctgctacttagga

SEQ ID NO: 3237 - DNA, 120 bp, synthetic construct
  source 1..120: mol_type = other DNA
cacagtagctcctcaaggttggcattataattatctccactttacagatgaggaaacggaagcccagagttgatgtgacttgccttgccttgtacatctaataattatcaacagcttgga

SEQ ID NO: 3238 - DNA, 120 bp, synthetic construct
  source 1..120: mol_type = other DNA
tctctttcttttcttttcctttctttcttcttagagatagggtctttctcactatgttcctcaggatagactagaattcctgggctcatgttatcctccgtctcagcttcctgagtagct

SEQ ID NO: 3239 - DNA, 120 bp, synthetic construct
  source 1..120: mol_type = other DNA
atagcagaggaaagagatggaactagctgaaagctaaattgattccatgtatcacaccttcaaaacagagcttatttttgaagcttcattatattgttttctgcaggttactccaaggac

SEQ ID NO: 3240 - DNA, 120 bp, synthetic construct
  source 1..120: mol_type = other DNA
gatcaagtcaacgtatttagggtgtccattgcctgagtataatacatttttgttaagtatagtcaacctactctgctatcaaacattgaaattattccctctggccgggcgcggtggctc

SEQ ID NO: 3241 - DNA, 120 bp, synthetic construct
  source 1..120: mol_type = other DNA
tgtggctgtttgctattctggcttaacccaggaatggtggtgtgaaggatttataggaatggattgactgcatctctctcagactgtaccacacaaacatttttctcttagtagagcatt

SEQ ID NO: 3242 - DNA, 120 bp, synthetic construct
  source 1..120: mol_type = other DNA
ggcatttatagtctctgggcttctgctcaatagattataaatccaaaagattagatcatttgattataaacttcctcagaattctaatattattattatgtaaccatgtaagttaagtaa

SEQ ID NO: 3243 - DNA, 120 bp, synthetic construct
  source 1..120: mol_type = other DNA
aaactgtgtgccctaggtgcttttcttgccctagtcctgctattctgtgacaggttgtttctaagttgagcaatatgtaagagtcaaacatgattcctaacttcaagttgctttccgtcc

SEQ ID NO: 3244 - DNA, 120 bp, synthetic construct
  source 1..120: mol_type = other DNA
cccacagtaggtcacacactcaaaatgaactggctgagtgattttattcttgctgtccttcagtcagttgcttttatatggaatttaggggcagactaatacagttcaaaggcattagaa

SEQ ID NO: 3245 - DNA, 120 bp, synthetic construct
  source 1..120: mol_type = other DNA
tctttgcagaagctccaaactgttttccacagcagctgaattaattttcattcccatcaacggtgtataaatgttctcttttctcccaaatctcaccaccatctgatatttcttgacttt

SEQ ID NO: 3246 - DNA, 120 bp, synthetic construct
  source 1..120: mol_type = other DNA
aattgatagttgaagcaattcctttctctgagcctgaaacaatgtatatgcatttttaattattttcatctcctagagtctatttcttgcataggaaatgtcaatgcctggaagaacagc

SEQ ID NO: 3247 - DNA, 120 bp, synthetic construct
  source 1..120: mol_type = other DNA
gggttatgagccttgttggctccctgtcatgccacacctttcatttctgctcaaggaaacataaacaaatgagtaaggaagtgctttagagataaccttgaattttctttgacctagtcc

SEQ ID NO: 3248 - DNA, 120 bp, synthetic construct
  source 1..120: mol_type = other DNA
gaggtcttttatttttctttccttctctctttcgcttctctctcctttctttccttcctccctcctttgtttaatcccttccttcttcctttcctttctctttctttccttccttcttcc

SEQ ID NO: 3249 - DNA, 120 bp, synthetic construct
  source 1..120: mol_type = other DNA
gcatttctcagaattattttcttaacatgatgcaaatgccttgaagttagaaacctaccttccatagcacatcatagttcacatttttcacaaagacaacacagggccaggactttgcat

SEQ ID NO: 3250 - DNA, 120 bp, synthetic construct
  source 1..120: mol_type = other DNA
taaagaatatatatagaatacattctatatatatgtagaatatatataaagaatatatatgtatattcttttagttctgtccctctagagaatcgtgactaatacggcatctctagaact

SEQ ID NO: 3251 - DNA, 120 bp, synthetic construct
  source 1..120: mol_type = other DNA
ctggtagtgcaggctggctcttggaaaggagtatgtattccaggctggttggctgctgttccactgggagctgaagccagggctcatggtcactcgtgacttactagtttgataggctct

SEQ ID NO: 3252 - DNA, 120 bp, synthetic construct
  source 1..120: mol_type = other DNA
aactatatatggttttccctctgtctttcactttgcagtctttcttaaatattcatggatccatggctgaactgaggttctaaaatgctacccagaatgtctgtgggctgggtctggttc

SEQ ID NO: 3253 - DNA, 120 bp, synthetic construct
  source 1..120: mol_type = other DNA
tgttgtgaatttggcaaaatctctagtgtctttcatagattagttgaaatttttacaatttcctatagtttctggcttcatgtattcagatcttatttctcttccattacctgtgttggg

SEQ ID NO: 3254 - DNA, 120 bp, synthetic construct
  source 1..120: mol_type = other DNA
cctccctccttccctccctccctttctaccttctttcctttctctccttttcccattgcttctctttgcatgcctgctctattctatcaggaagataactgttttttgcctaactatacc

SEQ ID NO: 3255 - DNA, 120 bp, synthetic construct
  source 1..120: mol_type = other DNA
aagtacaaagggaaatcctttgttaaaccctgtgttcatattgtttggtttagaagccataggttcacagcggtgctcctaactcagcttgcccataagcattatcctcattgctcacaa

SEQ ID NO: 3256 - DNA, 120 bp, synthetic construct
  source 1..120: mol_type = other DNA
acctcccttctcccacctcctggtttatttttaaccgccttccattcatgcccttctgtcacattcccgatattatttatccctcaaatgtccactgtttcttaacagccaaaataagaa

SEQ ID NO: 3257 - DNA, 120 bp, synthetic construct
  source 1..120: mol_type = other DNA
atatctcaaccttttaacttacagaggacaagccaaactgttgagtaaagtgaccaatctgaattcagtctgcttgtctttttccagtcctatccacaactcctagtgaaggactggggt

SEQ ID NO: 3258 - DNA, 120 bp, synthetic construct
  source 1..120: mol_type = other DNA
cttagaaatagtaagaaacatgttgtctctgtgctgggttctgggcacagagcttctaactcccttgacattccttgagtgatagaagcatcttttgtcctaatgaggggattcttggaa

SEQ ID NO: 3259 - DNA, 120 bp, synthetic construct
  source 1..120: mol_type = other DNA
ggtatttttaaaaaaggacagaaaagaatgctgagaggaaaaagagacacgagggccgaacaagagtgggagagagaggaaaaggaggatgagggccagagaatattagtaactgagccc

SEQ ID NO: 3260 - DNA, 120 bp, synthetic construct
  source 1..120: mol_type = other DNA
gaatcttttccccagtatcctcaaagtgttttactttactatttgggcatcttttgagtttgagttttggtggctagagggttttttgtttgtttgttttccttccaggaaacaggagat

SEQ ID NO: 3261 - DNA, 120 bp, synthetic construct
  source 1..120: mol_type = other DNA
aagtgttaaaaactcaatggcgtatcacacaaaatggcactgcccttatggctgttgtgtatgtgatcatagcccctaccaattgtataggtttctggatggctgagcctgtcttaaatc

SEQ ID NO: 3262 - DNA, 120 bp, synthetic construct
  source 1..120: mol_type = other DNA
tggtagttaatactgtgttctgtggttgactttaaacttattaatgaccctgtcagaaagatgccgggagaagaagagagaagaacccccctaagtcccattggtttacttttcttgaca

SEQ ID NO: 3263 - DNA, 120 bp, synthetic construct
  source 1..120: mol_type = other DNA
gtgtgaagctagtatgaaaaaaaaaactgccataaacattttcatgtgttttcttaacaagtgttttcatttattttggataaatatgtaggagtggaatttctgggtcatagggtaggt

SEQ ID NO: 3264 - DNA, 120 bp, synthetic construct
  source 1..120: mol_type = other DNA
aacagggctaacacatcttccccactagactctttacagatggaattaatggtaataaaaataacagcaacagttggcatctgttgagctcccattgtctactggacacagctaagtgct

SEQ ID NO: 3265 - DNA, 120 bp, synthetic construct
  source 1..120: mol_type = other DNA
actggccactggccacacttactttgctggtcttgaggatgtcgaacatgagctgcaagccctcggtcaccagctcctcgttgtactcctcctctctgatggagctgaagtcccgcagga

SEQ ID NO: 3266 - DNA, 120 bp, synthetic construct
  source 1..120: mol_type = other DNA
agagttggtctgttaaaatactcttaagttatcgccttgataacttagaggactggagaagagagaacatctgaactctgggttacctgttgaaagcaggcttggacaaggttttcaggg

SEQ ID NO: 3267 - DNA, 120 bp, synthetic construct
  source 1..120: mol_type = other DNA
tttgttgcttgcttcccattgggttaaaagctagactttgggggtggctggtaagtcattttgaaaagaaatacctgttttcatgcctccattcttgtgttgttgattttggggcctttc

SEQ ID NO: 3268 - DNA, 120 bp, synthetic construct
  source 1..120: mol_type = other DNA
gtcagacgaacccatttgaacttctcttacatagatacaattgtcttcctaaaggaatagaaagctttgcagttttctggaactggcaaaagagactttgactgtggctggctggtcagc

SEQ ID NO: 3269 - DNA, 120 bp, synthetic construct
  source 1..120: mol_type = other DNA
tcatttgctccaattaagagctggtgaagcagcttttctgtattccacgcattcgctactctctagagcagatataactattcaagaagaaaaaaatagagctatggggagggggaagtc

SEQ ID NO: 3270 - DNA, 120 bp, synthetic construct
  source 1..120: mol_type = other DNA
aaagtggcttgcttggacacccagctgcctttgtttctgcattaaaccaatattgatcacacatatgacacaggctagtcctataaaagtaatgacttcatagaaatggcattataattt

SEQ ID NO: 3271 - DNA, 120 bp, synthetic construct
  source 1..120: mol_type = other DNA
gaggtcttaaaggctgaatcagccagccatgtggtgatggccatggccatgaccctccaggcaggaggaacagcacacgtgaaaccttcaagatgcgaagggctaggagtgattgggaaa

SEQ ID NO: 3272 - DNA, 120 bp, synthetic construct
  source 1..120: mol_type = other DNA
tgtggagatctgcatggcactagacccttggagatctttcttccctctgttttcttttacacatccttgccatccagatgttaagactggagattctatgctttgatgaagatcgttttt

SEQ ID NO: 3273 - DNA, 120 bp, synthetic construct
  source 1..120: mol_type = other DNA
acacataccacacacacaccatacaaactacacacaccacacaatacgtgcacacacacgccacacaaacccaccacacatacatcacacacacccaccatacacaatgcacacacaaaa

SEQ ID NO: 3274 - DNA, 120 bp, synthetic construct
  source 1..120: mol_type = other DNA
gcctacacaacacttggcaggggctggccaacctcagtgatgaaggtttccaattatccaaaagacttctcatgaaagagggattcgatattttttctgttttttcagaggatggttaga

SEQ ID NO: 3275 - DNA, 120 bp, synthetic construct
  source 1..120: mol_type = other DNA
taccatcatcagtgctcagcccaatatacagtttctacctctgcttcctggggtccaggctgtctgaatatacacattcttctatttcctaactttctttacaaaaatcaggcacgtcta

SEQ ID NO: 3276 - DNA, 120 bp, synthetic construct
  source 1..120: mol_type = other DNA
gtcgcagaaagaggaaggagacagtgccaggaggaagaaggaaggagtcccttagctctcttcattgtcccctttacttcctgctatcttcttctcctcttcttctctctcttgcctcta

SEQ ID NO: 3277 - DNA, 120 bp, synthetic construct
  source 1..120: mol_type = other DNA
ccattctcttgagacgttgataaaccttgtcaaaatattctgctgcacagaagattccctgagagatcattttagttcaatgaaacaaatcatattgaagcaggggaacgatcaagcatc

SEQ ID NO: 3278 - DNA, 120 bp, synthetic construct
  source 1..120: mol_type = other DNA
tgcacacgcgtcttctgagaaatgacagggactaagggagctgacaaagcagagagtgacagactgacaacccatacaaagaaaagaggaaaacgtcggacatcaaggaatctctgatcc

SEQ ID NO: 3279 - DNA, 120 bp, synthetic construct
  source 1..120: mol_type = other DNA
gatgttatttcgcttaattctctcaagggcttgaggagagtcctgccataatccttcctttcagaggggaagatcgaaatttagctcagatctcaagctagtaatcatcagaaccaggat

SEQ ID NO: 3280 - DNA, 120 bp, synthetic construct
  source 1..120: mol_type = other DNA
aacacactgtcggggttagggatctgggaggatagaaatttgctggtgccataacctgtggcaaaatttcaaaaagtgaggttgaaatctctatcttttaattttgggtctgtttccagc

SEQ ID NO: 3281 - DNA, 120 bp, synthetic construct
  source 1..120: mol_type = other DNA
cctaaatgtttaacatttccaaaattaatggcttcacaatatttgctattctggataaacagaattttgccagatggaagtggaaataaggagctctatgtggaggtaatgacaaaaaca

SEQ ID NO: 3282 - DNA, 120 bp, synthetic construct
  source 1..120: mol_type = other DNA
acccagctccacttaaataatggcctggaaaaataaatgtcattatctgatattatactgagatgtttagttatgaaatcaaaagtggagaatttcaatctgtcctgtaaggctttctct

SEQ ID NO: 3283 - DNA, 120 bp, synthetic construct
  source 1..120: mol_type = other DNA
gattgctcaaatagacgtatgtagctgactgactttaggttttcttcttactaagcaaaccagtgggatatttaaattgcctttggggatagttttatgggagggatgcagtgatctcag

SEQ ID NO: 3284 - DNA, 120 bp, synthetic construct
  source 1..120: mol_type = other DNA
ttcttcagtgattttcaggttgttcttcctccaagcaaatgattgtctgctccggaagattcacatgagcctttctttttcttaatttctcccttgaaatccacattttagtgtgggtaa

SEQ ID NO: 3285 - DNA, 120 bp, synthetic construct
  source 1..120: mol_type = other DNA
agagaccacattgaagtggagttgtaatagaatctggaaataaaaaaaatatggttaaaactaaaaaaaaaaaatgttctgaattattttccaatattggatatctttccccaagtatga

SEQ ID NO: 3286 - DNA, 120 bp, synthetic construct
  source 1..120: mol_type = other DNA
tttggggtgccactcagaggattgtgattgtgaacaatgttgttgactagcactgtgagaataaagatgtgttaaaatattatgtagcaatgacttctgcttgtaagggaaagccaaagg

SEQ ID NO: 3287 - DNA, 120 bp, synthetic construct
  source 1..120: mol_type = other DNA
acaatttcagtaatgagtagaagcgtcattacaggtgaaggataaacttcctcctcctcccctacacactttcactccatacctgtgacatattattaagggggacatcagaggaaagaa

SEQ ID NO: 3288 - DNA, 120 bp, synthetic construct
  source 1..120: mol_type = other DNA
agatgctgagagatagggagatggccctgtcataggaatgtggtcccctgttttcccttgtatggaagggtgcccctgggtctccaccgtgtgctagggggtgggggcacactcaaaagt

SEQ ID NO: 3289 - DNA, 120 bp, synthetic construct
  source 1..120: mol_type = other DNA
gccaccgcgcctggcctgagaatgttttaatgaacccaatgcgtcctcaccacccagacttagaaaatgtttacacttttgccgtatttgctcagatctatattaataagaaagaaaacc

SEQ ID NO: 3290 - DNA, 120 bp, synthetic construct
  source 1..120: mol_type = other DNA
gaaaattaaatagcttataacaagtgtggcaaatgatagctagatgatcaactgttagatgacaaatggtgggtgggtgagtgggtagcagggaatcctagagatagatggagggatagc

SEQ ID NO: 3291 - DNA, 120 bp, synthetic construct
  source 1..120: mol_type = other DNA
ttttctcagctgagtaaaggaacagggtccttgccctgccagctcacgaggctgattttagtgacgaaggtgtcatgcagggtgtgttggggaagaccctgccagggacacagatgcctg

SEQ ID NO: 3292 - DNA, 120 bp, synthetic construct
  source 1..120: mol_type = other DNA
gaagcagcagactagatatgcacatgaaactagaggtagatctcaaaaacttggtgaatgacaaaggttagaaagagattggatactttttatgtaaattaaaatacctgcatacccaat

SEQ ID NO: 3293 - DNA, 120 bp, synthetic construct
  source 1..120: mol_type = other DNA
agggagagctgggccagtccttcgggcgtttgcacagcacctcctggagtccttgccacagcctaggacgttgccgccaccatccccccatccgacagataaggagactgatgttcagaa

SEQ ID NO: 3294 - DNA, 120 bp, synthetic construct
  source 1..120: mol_type = other DNA
ttcatcctcacggcagggaggtgcggcaggctggcttactcccattttaaaaccagcaaaccaaggcccagatctaagcagcttgcccaaggcaatggtgacggagttagctctggaacc

SEQ ID NO: 3295 - DNA, 120 bp, synthetic construct
  source 1..120: mol_type = other DNA
catgcggtaaggtagccagagtgatcccacttgggttgccccgtcaccccatgaccccattgattccctagtggtccctagtgattcttgcaacctctgctcttggtgacctctagtgac

SEQ ID NO: 3296 - DNA, 120 bp, synthetic construct
  source 1..120: mol_type = other DNA
gacacagcaagcctgggatggggattggagggcttgggaagagaaggaaggcaggagggacagaaggaagaagaagaaaaattgaggaaaattaacaggacgagcagtggacactttaca

SEQ ID NO: 3297 - DNA, 120 bp, synthetic construct
  source 1..120: mol_type = other DNA
ggttgctgacatttaccagtgaccccaccggacacttgatctctgccgccccagctgccccagccccgcctgctgcacaggcacaccgcgcatacatgcagcaactgatgtgtccttcca

SEQ ID NO: 3298 - DNA, 120 bp, synthetic construct
  source 1..120: mol_type = other DNA
ttttcctggcccccctcgagggcactcctctccctgcctcatggctttgaactccaagatattctcacctttatgttcaaagttcacaattttctttttttttttttttttttgagacgg

SEQ ID NO: 3299 - DNA, 120 bp, synthetic construct
  source 1..120: mol_type = other DNA
aatctttgcccagggattgtgaaccaccaaacccatggacccttactgatgaaagcatctgaagtctttaaaagcagttaaagaaaaggagtattcctggcattatttagtcccaggttg

SEQ ID NO: 3300 - DNA, 120 bp, synthetic construct
  source 1..120: mol_type = other DNA
ctggagtacaggatgggctgggagctctggttgctgggagcctgtggcttcctccttcctgaaccatgccccaaagtcctagtgtggttggctctgagactgcaggtaccaggtgtgagc

SEQ ID NO: 3301 - DNA, 120 bp, synthetic construct
  source 1..120: mol_type = other DNA
taaagtgtgtaaaccaagctgtgtcccgaccaccttgggcacatgctgtcaggacatccccaggctgtgtcacaggtgcacgtcctcaaccttggcaaaattaactttttttttttttta

SEQ ID NO: 3302 - DNA, 120 bp, synthetic construct
  source 1..120: mol_type = other DNA
gagcacctagttccacttgcgggctgaccttctattttttgtcatcgtgttgggagcttaggaaagtgacttaacctctctgtgcttcagtttgtccgttggtagaaagggggtgattat

SEQ ID NO: 3303 - DNA, 120 bp, synthetic construct
  source 1..120: mol_type = other DNA
ggcctcgtcccatgggcgtgctttggcagctttttgctcacctgtggagcctctcttgagcttttttgtttgttgtttgtttttgtttgattttgtttgattgtttgtttttgttgtcgt

SEQ ID NO: 3304 - DNA, 120 bp, synthetic construct
  source 1..120: mol_type = other DNA
gagatccttaacctgcaaagaccctttttccaaaaaaaggttatgctcacagattctaggccttaagacatgggtgtatctttctggggggcactatccaaccccttatacaatgaaaga

SEQ ID NO: 3305 - DNA, 120 bp, synthetic construct
  source 1..120: mol_type = other DNA
agtggagaatgcgtggggttcaacccactaagcatctggaaggttacataatcttttctattttcttactggagctccatgtcagcccaaatgtagccatgtattgtaccttttatatcc

SEQ ID NO: 3306 - DNA, 120 bp, synthetic construct
  source 1..120: mol_type = other DNA
catagtttcacatttgggtcttgtcaggcactgttcaactaagcttcctgcatgggtgaatccaagcctagaaggaagtcctcagcctccaggtgtctggacactgcatcagtagatgag

SEQ ID NO: 3307 - DNA, 120 bp, synthetic construct
  source 1..120: mol_type = other DNA
tgtgtgtgcgtgttctcaccacaggatgattttcctgttttcgcccactgatgccctctgaaggtgagatcaaaatcagtggctatcacagtttcaaagatcccctgttacagaaatcag

SEQ ID NO: 3308 - DNA, 120 bp, synthetic construct
  source 1..120: mol_type = other DNA
caccaacagcttcaccccagggatcccccaccccacactttctgttctgtccccaccattgacctcgtcatcctcccacctgtgactgcgctggccaggccatgtttccatttgataggg

SEQ ID NO: 3309 - DNA, 120 bp, synthetic construct
  source 1..120: mol_type = other DNA
atggacatgtgaatgggcagatggacagatgaacggttggaaggatggatggaaagaaggatgagagaaaggaaagaaggaaggaaggagaggtgtatggacagatgggtgaagagaata

SEQ ID NO: 3310 - DNA, 120 bp, synthetic construct
  source 1..120: mol_type = other DNA
gcctgagggatgaataattaatgatggatggatggatggccgatggaagaatgaatgatggatgctggaggaatgaatgatggatgatgggtgggtggatggatggatggataaatggat

SEQ ID NO: 3311 - DNA, 120 bp, synthetic construct
  source 1..120: mol_type = other DNA
ttcctctctattctgttcatttgagtgaggtgctgagtcctgcccacactcagcgtttggggtgagaatcaccctccacctcttaaagggacgagtgttaaaagtgtttgtggacatatt

SEQ ID NO: 3312 - DNA, 120 bp, synthetic construct
  source 1..120: mol_type = other DNA
cgcagagagacatttattctaaaaatggggctccctgctgtgggttgggaaaattacatattggggaaaagaaaggcaacgtgtcaggagagcctggtagggaagctgctgtggcttctc

SEQ ID NO: 3313 - DNA, 120 bp, synthetic construct
  source 1..120: mol_type = other DNA
attaaaacagagatccggagagtaatggaatgaactcctggtagcaataagacaccaaactataaacaagacctgaggccatgccaggcaaggtgatcctgcaccctaaacctaagaata

SEQ ID NO: 3314 - DNA, 120 bp, synthetic construct
  source 1..120: mol_type = other DNA
ctatcgggagtggagggaagaatgtgccaggcacagtgaaggacaaagaagagcccttgaattaaaaaaaaaaaaaaaaggagcgtcagtgggggaatcggaacatgtacacacctattt

SEQ ID NO: 3315 - DNA, 120 bp, synthetic construct
  source 1..120: mol_type = other DNA
agcgatgcctagcgtcccacccgccctgtgcaaccacaagacttggtgtgaattagaaaaaagggtgctccttccttcaagccatttaacgccacctgctggacactggtgatacatcta

SEQ ID NO: 3316 - DNA, 120 bp, synthetic construct
  source 1..120: mol_type = other DNA
agtggatattattattactttttgtataatattattattactgtttatataataatattattctcattctctagataaagaagctgagcctcagagactccaagtaactaccccaaggtc

SEQ ID NO: 3317 - DNA, 120 bp, synthetic construct
  source 1..120: mol_type = other DNA
caagctactaataaatcagatgcctgaattaaaatgatacgtcacttaagagcactcccttagatgaattgcaatgcctcactggtgtgttctattaagacattggggtgtccaggtctt

SEQ ID NO: 3318 - DNA, 120 bp, synthetic construct
  source 1..120: mol_type = other DNA
accttacagggattcaatactcaaagagaaatcaccatcacctataaccagaaaagggggtctcataggaaatctggaagactcattggctgagaggcctgcagccatctaattcattaa

SEQ ID NO: 3319 - DNA, 120 bp, synthetic construct
  source 1..120: mol_type = other DNA
gtcttcaaaaaagcatgacctttatttcccaatttgcattatagatataaatatgatattgcatatatttggtcttcacatcaagccactaactgctttgtgaccactgaaaagttaaat

SEQ ID NO: 3320 - DNA, 120 bp, synthetic construct
  source 1..120: mol_type = other DNA
taatttcaaaatgtattataaagatagagtaatcaaaactgtgtgctactgggataaagatagacatataggccactggaagagaatagagggccaagaaatcaactgacacttataaag

SEQ ID NO: 3321 - DNA, 120 bp, synthetic construct
  source 1..120: mol_type = other DNA
ttccaggtagggccatgctacaaaggcatgccacaggtcaccaggagagagggaggaagtgagcttcccatcctcaagggtgcacaagagtgggctgaatgcctatttgccagaaagttc

SEQ ID NO: 3322 - DNA, 120 bp, synthetic construct
  source 1..120: mol_type = other DNA
aaagtggaaaggggccaaacttttccttttatcaggaacccactcctgtaataaataactcactctcacaacaatggcaataatccattcataagggctctgccctcatgacctaatgac

SEQ ID NO: 3323 - DNA, 120 bp, synthetic construct
  source 1..120: mol_type = other DNA
ctacaaatttttatgattggaaagactgggaatgggatgtagactactagaaagagataagaagtataaaaattgtttttatcacactctggggactgtggtggggtcgggggagggggg

SEQ ID NO: 3324 - DNA, 120 bp, synthetic construct
  source 1..120: mol_type = other DNA
aggattgtaaggaatgtcccccattccttacaagattaatgtcccccattaattgtctaaattcctgcctaccttggaagcctcatctcttactaagcttccttccttcatccctctgtt

SEQ ID NO: 3325 - DNA, 120 bp, synthetic construct
  source 1..120: mol_type = other DNA
actttccctgccactgtttatatacgtagctgctgcttccatcagactgggaatgttgacagggactggcaaagagcaagggtgaggccaacattgtaggatccaagtacgaaccaggca

SEQ ID NO: 3326 - DNA, 120 bp, synthetic construct
  source 1..120: mol_type = other DNA
tgcccaccacgcctagcacagtgcctggcacacgggcttctagcaagggaatgctaaataaatgatcccctgtgcattgtaaactctgatttatttgatctgcaaaaataaatgattatt

SEQ ID NO: 3327 - DNA, 120 bp, synthetic construct
  source 1..120: mol_type = other DNA
atataaggaacaagttttactgctgtgaagaacatctgcatatgttaattggtacaaatcgtttcttgataagagcagagacttaggataatggattgctgccaactatgatcatacaaa

SEQ ID NO: 3328 - DNA, 120 bp, synthetic construct
  source 1..120: mol_type = other DNA
atgggaggttattgcctaatggttacagtttttgtttgggataaatgaaaaagttttgaaaatagtggagaaggttgcacaacactgtgaatgtaattaacgccactgaattgcacactt

SEQ ID NO: 3329 - DNA, 120 bp, synthetic construct
  source 1..120: mol_type = other DNA
ttaaactttaaaatcctgaaactctggagttggattatctaaactgaacctcttactgtgaagctggagaaactgaggcacagaagggggaagagacttgttcagagatgagatgaggac

SEQ ID NO: 3330 - DNA, 120 bp, synthetic construct
  source 1..120: mol_type = other DNA
tacccaactccaacctgactctctgttatagcatcacatggtagatggcaggccctgaaggaaatgaaagtattttaccccaaagtaatatttcttcgacatattttgaaatggccctgc

SEQ ID NO: 3331 - DNA, 120 bp, synthetic construct
  source 1..120: mol_type = other DNA
caggaagtaaaatacaaaaagatttgggaactctccccaaacgtcaaaaaagagcaggcatcctcatcaacaggccatatacatgaagtaggcctctaagaactcctacttttcctttgg

SEQ ID NO: 3332 - DNA, 120 bp, synthetic construct
  source 1..120: mol_type = other DNA
tcctgcttctgcctcttcttagcaaattacttcatgtctgcaatgatggttgtaaaacatcgcaggtgccctcagtgctatggtccatctgcttccctttccagatttttcaccatcctg

SEQ ID NO: 3333 - DNA, 120 bp, synthetic construct
  source 1..120: mol_type = other DNA
cacttgtatcccccttgtggttagagtcctgattttactgcaaaggtgttcatgttccttgtgaagtgtgggctcttaggaagcctgtgggctcctctgagcagttggcctttgtagctg

SEQ ID NO: 3334 - DNA, 120 bp, synthetic construct
  source 1..120: mol_type = other DNA
tttattttcctttgggagtcagacattaaagactaggatggtcaaaaacaactgcatatatggggaaaatgagaaagtgatggcacctgcctagggaaagaatcaggcaggctcagaaag

SEQ ID NO: 3335 - DNA, 120 bp, synthetic construct
  source 1..120: mol_type = other DNA
tagaaatccctaccacttcgtttgtggggcaaagtaagaaatgtgtctcaagcatcagcatagcacttcatgtctactagattctgtttcattcacttctgaatctccacctcctagaac

SEQ ID NO: 3336 - DNA, 120 bp, synthetic construct
  source 1..120: mol_type = other DNA
aaaaagaaaaaagaaagaaaatttgatacccaatgttagaggtggggcctaatgggaggcgtttcggtcacgagggtggatcctgcatgagtagattaaagccctccttgggaggagatc

SEQ ID NO: 3337 - DNA, 120 bp, synthetic construct
  source 1..120: mol_type = other DNA
gttgatgaagcaggatgaacaatgcaagggagcacctgcgaaccacaaagacaaacacagacagaaaaaataatgaaaattgattttgaggcacacggggagggggagggagcaaaataa

SEQ ID NO: 3338 - DNA, 120 bp, synthetic construct
  source 1..120: mol_type = other DNA
cagggcctagaaaggggaggagcccaggtatctattggttaaacatattccagggtactgaatgttcaagctcctttttcctctcttaaatgtctaacaatatctgtagaggacaacaaa

SEQ ID NO: 3339 - DNA, 120 bp, synthetic construct
  source 1..120: mol_type = other DNA
cagaaagttcaacatgtactaattaggcactctgagagacaagtttgcgaattcatgaacaaacttgtccacagttacagatctcaaacctccaaatgaagagggtgagttcgaaggctg

SEQ ID NO: 3340 - DNA, 120 bp, synthetic construct
  source 1..120: mol_type = other DNA
tgccctttctgtatagctaggcagtctttataaatattcgtcttaaatggctagtcatgtttcatcaaggtcacatattacttatttaaccagtcccttgtcactggatattaaatttct

SEQ ID NO: 3341 - DNA, 120 bp, synthetic construct
  source 1..120: mol_type = other DNA
ttgctttcaactctatagtggctgacagaacaaagaagcagaaaggcaatttagagaaagacagtttaggtcatttaaaaagggcaagtgagagattagacacgtttggggcatgggtgt

SEQ ID NO: 3342 - DNA, 120 bp, synthetic construct
  source 1..120: mol_type = other DNA
aacccacacaccacacctaaggaggactcaatatcagtgtcgaaaaagacaagaagatagatatcaaaaattataattatatacagaattgaacaacttgtccccagtcccactggcacc

SEQ ID NO: 3343 - DNA, 120 bp, synthetic construct
  source 1..120: mol_type = other DNA
ctggaaagttccatgaagaactaaagttttagtttcgctgctgtttctttgacaactaaacatgcaatgaccatacaacccagaaattgcactcctggttatttatcccaggtaaatgaa

SEQ ID NO: 3344 - DNA, 120 bp, synthetic construct
  source 1..120: mol_type = other DNA
cttaattttcacttcctcaggaaagcctcccgatatttatccctgcctaccctgcaacaaagctaatcaggttctttaggtatccctgtatccctatcctcatttccatagcactctata

SEQ ID NO: 3345 - DNA, 120 bp, synthetic construct
  source 1..120: mol_type = other DNA
tttatatccaaacctaagaacgtggattctgaagttagacagtttgagtttaaatcacagttctacacttactggctgtataatgaatttgttacttagcttttctgggcttctgtttcc

SEQ ID NO: 3346 - DNA, 120 bp, synthetic construct
  source 1..120: mol_type = other DNA
aataggtattccgcatcaagataatacatttttaaaaatgtacatactttggtataactaaaataatgataatgcaacatttttcaatttactgccatcaaacaaattgatgtttgttac

SEQ ID NO: 3347 - DNA, 120 bp, synthetic construct
  source 1..120: mol_type = other DNA
caaattcagtatcttcaactagcttcaccttggggttgttaaaagatttttgaaccacacactgtgctcataacaatcttcatctcttaaaaggattttattcttcctcgtattgccctc

SEQ ID NO: 3348 - DNA, 120 bp, synthetic construct
  source 1..120: mol_type = other DNA
gcaatggatctttttttctcctactaatcttttccaggatgtgttttgttcaaatgagtgagtcccaaccctgataatagcaaaatgttgtttcctagttggtagtgacaagactattac

SEQ ID NO: 3349 - DNA, 120 bp, synthetic construct
  source 1..120: mol_type = other DNA
gtattcaaagttttttccccaaaatctgagtaacatattcttgttcaaaaatcagcaataaaaatctctgttgctaaagaactaagttttgtttgaaccttttagagccacttaatgtca

SEQ ID NO: 3350 - DNA, 120 bp, synthetic construct
  source 1..120: mol_type = other DNA
tcttactcagtagacctggcacaataatttgtacttataagaagattccagaggtcagtgatgctactggtccagggaccgcactttaagaatcagttcctagatgtagagaatcccatt

SEQ ID NO: 3351 - DNA, 120 bp, synthetic construct
  source 1..120: mol_type = other DNA
tctgttctgtttccttgagtaaataatttccgtaaggcagctagaaaatagtaagtattttgttctataaagctgttcacatttctgcattaacatgctaaattgtcctgctgtagagtt

SEQ ID NO: 3352 - DNA, 120 bp, synthetic construct
  source 1..120: mol_type = other DNA
gtgagaaaataactgttgtttaagccacccagtctgtgggattttcttacagcagcctggttgaagacaaaactatcaacagaccagactctgaatgggattcatgtttaaggggtcttt

SEQ ID NO: 3353 - DNA, 120 bp, synthetic construct
  source 1..120: mol_type = other DNA
gtacaatgtaaatcttggccattgtgggtagggcagtcctctacttttgctggaaggaagccactcctgctcttggtttatgtgttggcatcaagctgagttctactttaacttgtgagg

SEQ ID NO: 3354 - DNA, 120 bp, synthetic construct
  source 1..120: mol_type = other DNA
aacttaagcaaaagagaaatttattggaaatatatcgggcagctcacaaattaattggaaggctcagaaaatgggcaggaatctaggcagatagccactgggaacccagccagagatacg

SEQ ID NO: 3355 - DNA, 120 bp, synthetic construct
  source 1..120: mol_type = other DNA
acaaagagaagaacttttatgcttaggttgataaccaggcagaagctctgagatcctgtggttcatctccaggatgcctgcttagtaatacctgagtgccctccagagcttggagaaggc

SEQ ID NO: 3356 - DNA, 120 bp, synthetic construct
  source 1..120: mol_type = other DNA
aggccattctcaggatcaagttaaggtatttacctgcgttggcagaatatttcagggacatctgtcctgaagcagtccagtggtgacaattccctatactattctttcagtttagactta

SEQ ID NO: 3357 - DNA, 120 bp, synthetic construct
  source 1..120: mol_type = other DNA
aaaccaattatgtgtcacacatgctctagaaaaggtatgtatcaagtttctgtgaatccaatctagcttttccactgatttatgtcttcattttagaaatccttggccgggcgcggtggc

SEQ ID NO: 3358 - DNA, 120 bp, synthetic construct
  source 1..120: mol_type = other DNA
atgatgagaaagatgatggggataaggaagatgatggggatgataagaaggatgatggcgatgatgaagatggtgaggatgatgatggtgatgatgaggatgatgatggggatgatgaag

SEQ ID NO: 3359 - DNA, 120 bp, synthetic construct
  source 1..120: mol_type = other DNA
tcctgtaacatactgtattgggcagatattctgaagataattaacctgggcattataaaatctgtaggctcctttaattgtaattattttgagtgcatttccactttaacagtgccacga

SEQ ID NO: 3360 - DNA, 120 bp, synthetic construct
  source 1..120: mol_type = other DNA
aacacaagacccaacatgtagtaggcactcaacatctgtaaccctattccatcatctttttccttgcaccaacattttcctcttatggcagactgggctttagaatttaaacctgggaag

SEQ ID NO: 3361 - DNA, 120 bp, synthetic construct
  source 1..120: mol_type = other DNA
agaaatgttatcacaatttaaaaataacccatcaaaataaaggtttatgaatatatcaaaaatagcttctgcagatggagaaccatgttacatattcttttaaagcaacagatgggagaa

SEQ ID NO: 3362 - DNA, 120 bp, synthetic construct
  source 1..120: mol_type = other DNA
tttcccttccttctttccttcccttcttccttcctttctttgtctctttgtccctttctttcatggcagaagccttttgcctccttaatatcttaagggagatttttgaagtttgccctt

SEQ ID NO: 3363 - DNA, 120 bp, synthetic construct
  source 1..120: mol_type = other DNA
cagagcaggaattgagtccctctctatgtagaaccatcagtaatcaccctctggtttttctctttaggcagatacacaaattgaccgagaacatcagaacttctatgaagcatcattaga

SEQ ID NO: 3364 - DNA, 120 bp, synthetic construct
  source 1..120: mol_type = other DNA
aacaagctgctgccgatttactgggctgtataaattgtaggaaaagtgagggacatgtagccataacagcaaaaaagcagcccagaatagttcttctttcagtacccactccagataaca

SEQ ID NO: 3365 - DNA, 120 bp, synthetic construct
  source 1..120: mol_type = other DNA
tttgctggttctctttttcacaatctagtctgtggctggaacacactatacatatctttatcctccatatctagctagctcactgacaaacattgttgttcaaacacagttggcttttgt

SEQ ID NO: 3366 - DNA, 120 bp, synthetic construct
  source 1..120: mol_type = other DNA
aggagggaagcttgaagggtggggggagatggtacctggagattttacactttttgaggcctccgtcttccgctactgctgctgccaccccaggggattttctcttcttcttcaccggca

SEQ ID NO: 3367 - DNA, 120 bp, synthetic construct
  source 1..120: mol_type = other DNA
attctcctgcctcagcctcccgagtagctgggactgggacttaggatttcaagagtcacttttcagtaatcataaggcaatctgatattactgtaatattaggcatagagatcactggaa

SEQ ID NO: 3368 - DNA, 120 bp, synthetic construct
  source 1..120: mol_type = other DNA
ttagaataggttttggaatgtaaaggtgaataaaaatagtccctgttttgaaggaattcagtttagtggggagagaaatgtgtagaaaaagtcccactgccacgtaagtggtaaaataga

SEQ ID NO: 3369 - DNA, 120 bp, synthetic construct
  source 1..120: mol_type = other DNA
ttgtctacacaatacgtttttctggaatcctccctttaacaaaaatcactacccaaattatcttttatattctatgatggggttcaggacactgtactcccaaatgttttaagctgaagg

SEQ ID NO: 3370 - DNA, 120 bp, synthetic construct
  source 1..120: mol_type = other DNA
aaatatatgcaagatttaacattgtgtaggcttacctgtattaaagaaagcctccacttagcaattgggtaggttaacaaatgtagttttccttgtgatgcatcttaaggtctactgtga

SEQ ID NO: 3371 - DNA, 120 bp, synthetic construct
  source 1..120: mol_type = other DNA
caagctaacccctaccacatagttggtttttaatgcctttcaacctcacttccctaagaacatatgaaatctacaaaaacaccaaaataatgtaggtctgaatgtaaatgacatcctgaa

SEQ ID NO: 3372 - DNA, 120 bp, synthetic construct
  source 1..120: mol_type = other DNA
agcactccaaaacacctataaaaatcacccatgatacataagagtccatagctaccctgatggaaaatttaacatatggaaatctttaactgagcagactcaaagaaaataagagattaa

SEQ ID NO: 3373 - DNA, 120 bp, synthetic construct
  source 1..120: mol_type = other DNA
aactacatcttcagtagaacaggtaaaactacacatctgaattacttgtaagtatcatacagaactcacacacctggtgtggtaaccacaaagcggagggaatgctggctgatggttcca

SEQ ID NO: 3374 - DNA, 120 bp, synthetic construct
  source 1..120: mol_type = other DNA
gaggatataagagcacagagtgtgttgtggccaatcaattttggaagggtagaagagctctataggaaatagcaagggctaatgaaacaagtgaaggaaaattactttttccttccccct

SEQ ID NO: 3375 - DNA, 120 bp, synthetic construct
  source 1..120: mol_type = other DNA
atatatatatacacgtatatatatatatatatatttgcagaacaacctctgagctgcctcactctgggcacactgcctatgggatagctgtgctccacaaggagtcctacttctgctgct

SEQ ID NO: 3376 - DNA, 120 bp, synthetic construct
  source 1..120: mol_type = other DNA
atagggcttgttaaaacatagaatgcaaggttctactcttggaatttttgactcattatggggcagggccctaaaatcggcgtttctaacttgttccaggtgatgctgatgctactgggg

SEQ ID NO: 3377 - DNA, 120 bp, synthetic construct
  source 1..120: mol_type = other DNA
tatttttctatggaacaatttttggaagactttcagagttttggggggcaaatcgtgtcttctatttttcaccaaagggaaagattggggcagggtaaactggtagtgggcagactggag

SEQ ID NO: 3378 - DNA, 120 bp, synthetic construct
  source 1..120: mol_type = other DNA
gtattccttaaaaaaacacgcagatccaattgtgaaaagacaaccaggattgactgcagtgttattgggctctggctgcctttcagcttgaagtcctttctaatgagagcaaagctgaat

SEQ ID NO: 3379 - DNA, 120 bp, synthetic construct
  source 1..120: mol_type = other DNA
attactatatgtattcattactcagtgttcattactgtatgtagctccttccttcccactgtgcctgaaactaggtttcacgtgtacctgctaataccatgtagacagaaccatgtgtgc

SEQ ID NO: 3380 - DNA, 120 bp, synthetic construct
  source 1..120: mol_type = other DNA
tgagactcaaaataagattatttctacgatgaaacacttgagaagagacctatttcgatctagttttatttcctgtaaagaaaggggaacatcacactctggggactgttgtggggtggg

SEQ ID NO: 3381 - DNA, 120 bp, synthetic construct
  source 1..120: mol_type = other DNA
caaccaccacttaactactctcaacataatcccaaaagatcattttagtctctcttaaatgaaggacaaataatttagcacttttatacttccttactctacctgcaagttttctagtta

SEQ ID NO: 3382 - DNA, 120 bp, synthetic construct
  source 1..120: mol_type = other DNA
agcaaagatggttaaaacaatacctccctaaacccagagactacatccaaatattgaagaaagtactgcagcaatgccacagcatcaagtcttccctgaatatttggggaaatgggcaca

SEQ ID NO: 3383 - DNA, 120 bp, synthetic construct
  source 1..120: mol_type = other DNA
ggaaataacggtttccttgtctcctgctctgtggtcttttaccccttcaatttcatatacttaccttcttaatttttaagtgtaggcaaaagagcatttccttcccccagtaccctctat

SEQ ID NO: 3384 - DNA, 120 bp, synthetic construct
  source 1..120: mol_type = other DNA
gcatatttaattgcagtaacgttttcagacacagtgttttgctcctcctgaaacaaaggcaggctgcagccagggggatgcacagcgcgagaggggaaggagaaatcaggggtatgatgt

SEQ ID NO: 3385 - DNA, 120 bp, synthetic construct
  source 1..120: mol_type = other DNA
ggcccatgggctatagtttgtcagttctgttctaggcggtgtgctaagtgttttagtgcataatctccttgaatcctcatagtaacctagggggagggtgctgttatatattcattttta

SEQ ID NO: 3386 - DNA, 120 bp, synthetic construct
  source 1..120: mol_type = other DNA
catagggcaggtgccagggtccttggggtgcctggggctgggatggggctgggacacggcatggcagagtgacttgacccgcgggtgagccatctcaggaactgcccagctcctctggaa

SEQ ID NO: 3387 - DNA, 120 bp, synthetic construct
  source 1..120: mol_type = other DNA
ggcatcacagaagaaaaaagtagtgcacttgaaggcatagcaataggaactatccaaggtgagacatagaggggaaaaaaagtaataaaacaaatgaaaaagctgggcgtggtggctcac

SEQ ID NO: 3388 - DNA, 120 bp, synthetic construct
  source 1..120: mol_type = other DNA
ggtttagggtggattttgattcttatgtggagagaacagagtcataaatttggagttaagcttatctgctcatcttgctttttgcccattttgcagaatgaagaatccccacctgagggc

SEQ ID NO: 3389 - DNA, 120 bp, synthetic construct
  source 1..120: mol_type = other DNA
ccccacctctaggtaagagcgccccgtcccactacacttgcgggtcccattcgctgcggtgctaggactggataaggggaagtccccggggcctggcgagagccctgagatcagctctag

SEQ ID NO: 3390 - DNA, 120 bp, synthetic construct
  source 1..120: mol_type = other DNA
gactggtttagggtggtaaggtgctgaatctaatgatgcttgtcctccacccgtactacctacagaaaggacccttggacctgatcgagacaggcaaagggctgaaagtgcaaacggaca

SEQ ID NO: 3391 - DNA, 120 bp, synthetic construct
  source 1..120: mol_type = other DNA
tcttaataataataataataataaaattatctgggtgtggtggcgcatacctgtggtctaagctgttctggaggctgatttgggaagatgcttgagtgtgggaggtttaggctgcagtga

SEQ ID NO: 3392 - DNA, 120 bp, synthetic construct
  source 1..120: mol_type = other DNA
aaaggtcagagcttatgggataagcccagtgtgagaggagtttgaagtgtagaggagttcatgggagagaagaccccatacaagtcctggtgtggagagtataatttctgactcaaacac

SEQ ID NO: 3393 - DNA, 120 bp, synthetic construct
  source 1..120: mol_type = other DNA
acttataagcatagaagcatttatgatgttccttaatagcataggagaaatatttatgatgctcactggaaaaagtgggatagaagtctatacagagtggtatatatccatgaagagaaa

SEQ ID NO: 3394 - DNA, 120 bp, synthetic construct
  source 1..120: mol_type = other DNA
aactggacaccaactttcttgtaatgtttagcttttggcccctaatggctaaagtggaactggcttagaaaccttcctttcaaatctttaattccacgaggtatcattactattatcatt

SEQ ID NO: 3395 - DNA, 120 bp, synthetic construct
  source 1..120: mol_type = other DNA
cgggttgagagctaatgttatcagtgcagggagtggcaaactagcctgtgggcaaaatccagtccctaacctgctctattaaatgaagtttgatttgcatacagtaactactatttgttt

SEQ ID NO: 3396 - DNA, 120 bp, synthetic construct
  source 1..120: mol_type = other DNA
ctctgggcatagtctctccctggcaatcctatataaaatggcataacctgatcagattaatgtacttgtttgcagtttctctcaatagaagataactccctgaggacaggtccttcatct

SEQ ID NO: 3397 - DNA, 120 bp, synthetic construct
  source 1..120: mol_type = other DNA
tgatctttgcgttttcatcagagcatcaaaccagttctggctgactgcctttcctgtagacctggtgtgcttacaggggtaacgaagaacaagaaatcacccaagtactttaatatctaa

SEQ ID NO: 3398 - DNA, 120 bp, synthetic construct
  source 1..120: mol_type = other DNA
ggatatagttgtgcatcaaccctggaatagcatcccaggttcctgctgtggagagacttgaacgtcatgacaggaattacgtatgcaatgtgaatccatggaatatattgaatatgagag

SEQ ID NO: 3399 - DNA, 120 bp, synthetic construct
  source 1..120: mol_type = other DNA
ctgtcaatgtggaactaaactcaatggatagtttaggaacaaactgatgggtaggtagctaggggcttacgtagcatgacttgatgatgagtggcattgaaagggtttgggaagttcacc

SEQ ID NO: 3400 - DNA, 120 bp, synthetic construct
  source 1..120: mol_type = other DNA
gcacacgggtggggggtggggcaacctggcttcatatcgctcaccagttgtgtgactctaagcaaggaaacgtaatatttttggattttattttcttcaaatgcaaaatatgagcaataa

SEQ ID NO: 3401 - DNA, 120 bp, synthetic construct
  source 1..120: mol_type = other DNA
ttaaaaaatcattctctattaaaatccagtctaagcactgccatgatttgggtatggtatgtttggccatgccgagtcccaagtctcgtgttaaaatctgatttcccaacacacaccggg

SEQ ID NO: 3402 - DNA, 120 bp, synthetic construct
  source 1..120: mol_type = other DNA
tatctgtgtgcgtgtgcatgtacctgtgtgtgcatgtgtgtatctgtacgtgtgtgcatgtgtgtacctatgtgtatctgtgtgtgtgcatgtgtgtatctctgtgtgtatctgtgtatc

SEQ ID NO: 3403 - DNA, 120 bp, synthetic construct
  source 1..120: mol_type = other DNA
catggaggatgagagagaaggaaaaacattcctgttacgaaggtggcaatgctcagattggaagaagctgcaccagtgcggtccagcagggcagcccttgactgagggcttggctgtgtg

SEQ ID NO: 3404 - DNA, 120 bp, synthetic construct
  source 1..120: mol_type = other DNA
atcattcatcaacagaacattcaaaagacctcaaaaggcaactgaacatatgttcataaaagcacgcaccatttacatttaaactctctatgtgtctatctctagcaattaactggcttc

SEQ ID NO: 3405 - DNA, 120 bp, synthetic construct
  source 1..120: mol_type = other DNA
tcccaaagagacagctctccttagtacttcctgttcactccgtagtcagagcctcaggcacacaggctcaaaccactccagtcaatattgcaaactatacataataatattcttaaccaa

SEQ ID NO: 3406 - DNA, 120 bp, synthetic construct
  source 1..120: mol_type = other DNA
cttttctctttacaatgcttgtaccctcaagaacagcctccaaatacggaaaaacagttgttaagaggaggagtgctgctgttagctgtaagaactaccttctcggaaacttctgtgtat

SEQ ID NO: 3407 - DNA, 120 bp, synthetic construct
  source 1..120: mol_type = other DNA
caggctcttctctaatgctaccattcttagcatgagtttgataactgctctccatggcatgctttctaattctgcgttcttgtttcagaaaaatggcataacaaagccccaaaccccaaa

SEQ ID NO: 3408 - DNA, 120 bp, synthetic construct
  source 1..120: mol_type = other DNA
tacatacacacatgctacacatacacctcccacacactctcacacatgctacatacacacatgccacactctcacacatgctacatacacacatgctacacacacactacacacacaccc

SEQ ID NO: 3409 - DNA, 120 bp, synthetic construct
  source 1..120: mol_type = other DNA
tgcgatagtttgctgagaatgatggtttccagcttcatccaagagttgttgactttcggtttggtcagctttttccttttcatgtgaaaagcatgatgatgatgactccagcctgtttag

SEQ ID NO: 3410 - DNA, 120 bp, synthetic construct
  source 1..120: mol_type = other DNA
ccccgccccgttttcttcttctcttcttcttcgtcttcgtctttgtcttcttgtggatattaagccagtaacaagaacaacaagtttacctctgtggaatacaagttcatctatatgaac

SEQ ID NO: 3411 - DNA, 120 bp, synthetic construct
  source 1..120: mol_type = other DNA
agcaaagtggcacctacctgactcggccacttcagaaatgggcaccccttgctcttgggacatgaagcccaggatggagaagacaacaaacccagccacaaagctggtggcactgttcag

SEQ ID NO: 3412 - DNA, 120 bp, synthetic construct
  source 1..120: mol_type = other DNA
aacagtttggttatcaacgtcatcatcagcagagctactacttattacttaagaccacagaacagtttggttatcaacgtcatcatcaacagagctactacttattacttaagaccacag

SEQ ID NO: 3413 - DNA, 120 bp, synthetic construct
  source 1..120: mol_type = other DNA
gtgctctcactatctagaacagtcctagcccgtggtaggcactcaaacaaaacaatatttgttaagtgaatgaataaaggagtggtcactttattggctccagcgcttactttccatttg

SEQ ID NO: 3414 - DNA, 120 bp, synthetic construct
  source 1..120: mol_type = other DNA
ttattacaactacttaggagcaaaagcaatacatcctgccgtgtaccttgtaaaatgccctgttgggcattggcagaagtttgagcgttgctatgtcttaggctgatttagggaagattt

SEQ ID NO: 3415 - DNA, 120 bp, synthetic construct
  source 1..120: mol_type = other DNA
gatgcttacagctgatcagaatccaggacactagcactcactatcaaggttatagggaggtggcagagaaaagaagttcagcgagagtggtgcctcttttcaaaatggtatgacagtccc

SEQ ID NO: 3416 - DNA, 120 bp, synthetic construct
  source 1..120: mol_type = other DNA
ggactatggaaacttaccacaggaagggctttagtaatcagttgtgcctgatctgtctattttacagaggaagaaactgaggctcagagaggcatataacctaccagcaggctttggtta

SEQ ID NO: 3417 - DNA, 120 bp, synthetic construct
  source 1..120: mol_type = other DNA
atattctgttgaagaggtggtgagagtggactcccttttcttgttcctgatgttaggggaaaagctttcaacttttcaccgttagatttatcggctgtgggctaatcatatatggccttt

SEQ ID NO: 3418 - DNA, 120 bp, synthetic construct
  source 1..120: mol_type = other DNA
atagcaactgagtgctggtaaaggccaccctgctaagtagccagaaagtttgcagaaccttcttttgagggatctgaagttcaagttctcaaatgctccagatcctcagtgttcaagaac

SEQ ID NO: 3419 - DNA, 120 bp, synthetic construct
  source 1..120: mol_type = other DNA
gatgacagttgtcctgaccgctgcctcagtccccaacttggtgcagcgtgtgttgacacggccgaggcagagtggagacaggcagccgcggagtcaaggacaggtagagacaaaaagccc

SEQ ID NO: 3420 - DNA, 120 bp, synthetic construct
  source 1..120: mol_type = other DNA
atcgatagcataagcttttctgtttaaaccacacggccatggtttaacagggccaggaggaaacagagatgtggcctgttttcatgtatcataattaagatatcaagtttaacacagtga

SEQ ID NO: 3421 - DNA, 120 bp, synthetic construct
  source 1..120: mol_type = other DNA
cattctaggatctgggaggtttttgttttgcaggggataagggaggcatcccattcttgaggagttagatttggagaaaagactaaaaaacagcaaaggatttttttctcaatttaatgt

SEQ ID NO: 3422 - DNA, 120 bp, synthetic construct
  source 1..120: mol_type = other DNA
ttgataccttgctgtgcttcggtttgacctcttgataccttgctgtgcttcggtttgacctcttgataccttgctgtgcttcggtttgacctcttgataccttgctgtgcttcggtttaa

SEQ ID NO: 3423 - DNA, 120 bp, synthetic construct
  source 1..120: mol_type = other DNA
ctgacaccatgtgggtactggggagcctcatcatgacccagtgggaaggaatgtccttttgataatagccgtcctgataagtgtgcagtggtattgatttgcatttccctaatgactagt

SEQ ID NO: 3424 - DNA, 120 bp, synthetic construct
  source 1..120: mol_type = other DNA
ggtggtaatgatggtggtgatgatggtagtgatggtggtaatggtggtggcagtggtgatgatagtgatagtagaggtagtagtagggatggtggtaatggtgatagtggggatggtagt

SEQ ID NO: 3425 - DNA, 120 bp, synthetic construct
  source 1..120: mol_type = other DNA
cagatgccctgaaagccgctttgcagttcagttttcaactttcttcgcggctctgcatactccaacactaatgtgtatacaacttgctaattaatggaatcatttcaatctgaaaacatc

SEQ ID NO: 3426 - DNA, 120 bp, synthetic construct
  source 1..120: mol_type = other DNA
atatatatatatatatatatatatatgtaagtgaatgaaggaatgagtggagtgaagcggcaatgagtgaacgagagcacagaccaacagcgtgctgtagtggcaagaagcctggccgga

SEQ ID NO: 3427 - DNA, 120 bp, synthetic construct
  source 1..120: mol_type = other DNA
agattgcctgagttcaaaccccagctattaaacgtgagcattcacgtttaattcatacttagactgcatgaagtatcagtggaaacaggtcaccagggtacactgcaaatggaattgtta

SEQ ID NO: 3428 - DNA, 120 bp, synthetic construct
  source 1..120: mol_type = other DNA
ctaaacactggtgacccatttttctaattctgaattattgtagatgtacaagttctcctaacagtccaacacttaaacagattaaatcatctctgacacacatatggtagctctcatata

SEQ ID NO: 3429 - DNA, 120 bp, synthetic construct
  source 1..120: mol_type = other DNA
atatgtaggtactggtgacacttccattattgcagcctgctgccaccatactgtcctttttctaacaggctgctagatggttgacacaaaccagagaatctgtaaatagaaggaaaaatg

SEQ ID NO: 3430 - DNA, 120 bp, synthetic construct
  source 1..120: mol_type = other DNA
ctagacatatacaccacactcatacagagacacatgcacacacatgcatactacacacatgcacatgcacacacaaaaacatacacagacatcacacatgcatacatatacacaacacac

SEQ ID NO: 3431 - DNA, 120 bp, synthetic construct
  source 1..120: mol_type = other DNA
ttaaagaagttgaatattgggggcttaagaattctcctttttgagtgttggcaaagcaggactaccagatcggttgtaaatatcagaggtggaggagacactgaagtgacttcagagcca

SEQ ID NO: 3432 - DNA, 120 bp, synthetic construct
  source 1..120: mol_type = other DNA
tatatatatatatatatatgaaaataaataacatggaaaaggcccagcctatcatgttcatggcccagctggcccagcccatcagagttgtccatacacacacacacacacacacacaca

SEQ ID NO: 3433 - DNA, 120 bp, synthetic construct
  source 1..120: mol_type = other DNA
cccacgccccttgtccatccctggtccatgttattctctaccacagcacttattgctatccaaagtgatcttgtttatttattcatctcctaactggctttttaaggaaaacatcagctc

SEQ ID NO: 3434 - DNA, 120 bp, synthetic construct
  source 1..120: mol_type = other DNA
ataaaacagttttcagaactatgctcattacttagtccaccccttttttccccctgatctccaaaagttggccatttagatgttctcagatgaagactctttggtggctgtggggcaaag

SEQ ID NO: 3435 - DNA, 120 bp, synthetic construct
  source 1..120: mol_type = other DNA
taagtttcaactgtttcttgatggaggatgctccatatcactgaaaggaatattgttggctgccttcaagagtgtggaaggccagagtcccaccagaaacctcatggtaacatcaactgc

SEQ ID NO: 3436 - DNA, 120 bp, synthetic construct
  source 1..120: mol_type = other DNA
tctgcaaggtacaaagaaagaacaaatggaaacacttgtaaggacatagcttaaactcctggttcttcaactgttccacacaaggagcccaacccgttgttcttcagtttctcgttttcg

SEQ ID NO: 3437 - DNA, 120 bp, synthetic construct
  source 1..120: mol_type = other DNA
caagatgaggcccgtgacctgcaggaaggtagggagggtgggaagggtaggaatgagtttgggggagatggcaagggaaggtcatttttttttcttttttgagacggagtctcgctctgt

SEQ ID NO: 3438 - DNA, 120 bp, synthetic construct
  source 1..120: mol_type = other DNA
catctgggacctgcgagagaactggcccaggatagggaacaaaaggtgaaggccggtgggggaggaggaagttcctggaaatgttaagcaactccacagttccccttctccaattctccg

SEQ ID NO: 3439 - DNA, 120 bp, synthetic construct
  source 1..120: mol_type = other DNA
cagatagtgcaggagcagacaccccaaaagaaaacactccttggagtgagtgggtgtatgaacatcaaagatgatgcaaattgtatttcatagtggacctggatcatctgtgtcagagtt

SEQ ID NO: 3440 - DNA, 120 bp, synthetic construct
  source 1..120: mol_type = other DNA
tacttcagatttctaagaccagtttctggggataaataattggaatcacagaacgcggctcgtagcgtcgttgcatcagtatcttccccaacagcaaatacatgtcaggaacggtaaaaa

SEQ ID NO: 3441 - DNA, 120 bp, synthetic construct
  source 1..120: mol_type = other DNA
acagtcaaacagaatgtagctagaagtccagtttggcttcaaaacctgtgctagtactcatgcttctgactggtagctgcaaggggtgggggatactcgggatactcataaagccgctac

SEQ ID NO: 3442 - DNA, 120 bp, synthetic construct
  source 1..120: mol_type = other DNA
gaaagaaaaataaaagacgaaggtaaaaacaacaggcgcagacataggtgagaattgagagagtcaaaagaggaactacacaggtgataaaatgccatcaacacatttacttctagaaat

SEQ ID NO: 3443 - DNA, 120 bp, synthetic construct
  source 1..120: mol_type = other DNA
catacaacccagcgcgcaccaaaaacccctattctaacacaaattttgatagaaaaacatgcttgcaagcatgtgcacataaaagtttgcaaaacttctcccgtaaagaacaaaacgggc

SEQ ID NO: 3444 - DNA, 120 bp, synthetic construct
  source 1..120: mol_type = other DNA
gataatggcttgggtgcaaatgttagcacgtctgttaagtgttccctgactcctaaagtcattcttccggaggatgtgttatttaactaatgcattaacacttgagccatggctcatgcc

SEQ ID NO: 3445 - DNA, 120 bp, synthetic construct
  source 1..120: mol_type = other DNA
tccgcagggaagagaccgaaatgcaacccataaaaaaagtcgttccatcaggttgaattgacagtgcaggtttgcactgtacctttcccatactgtggttaaaatggaaatctcttttca

SEQ ID NO: 3446 - DNA, 120 bp, synthetic construct
  source 1..120: mol_type = other DNA
atgaacctgacacggacagccacacctgcgcccagccagacacttattagctcaggtaaattgtcattcctcatgtcattattctctcagaattcatgtgaaattttcctttttttcttt

SEQ ID NO: 3447 - DNA, 120 bp, synthetic construct
  source 1..120: mol_type = other DNA
gagattgcaactcttgggacgtatttcctaatctttcttccatttgagaaatggtgtcttgaccagtattggagagctggtagtactgaaaaactaacccaaatgaccaagtcagactgg

SEQ ID NO: 3448 - DNA, 120 bp, synthetic construct
  source 1..120: mol_type = other DNA
gggcagaaaagttatcatgtctgaacagacaaaaagaaatttttaaaatgctggtgtaatatcactggttgtgattgcttgaatatcctgaccttaaattctatatgcacctgatttgtg

SEQ ID NO: 3449 - DNA, 120 bp, synthetic construct
  source 1..120: mol_type = other DNA
tggctttcctggaggaggtgggggacatacggcattcactgaatagttgccacaaatttttacagtaatggagctaaatggggaaatgcacaaaaatgagacccagatactaatttcttt

SEQ ID NO: 3450 - DNA, 120 bp, synthetic construct
  source 1..120: mol_type = other DNA
ggagagcttcatctgcttagtataacttctagcagaagatagaactgatggattttcgtgcgcaaatacagattcacaagggtgttcggtgtcacaagcatggatttatgatgcagtttg

SEQ ID NO: 3451 - DNA, 120 bp, synthetic construct
  source 1..120: mol_type = other DNA
gttaaaatagcggtacaagttctggcaagagcagatactgtctttgtgctgaatacgctaagcctggaagccatcctgcccttctgacccaaagcaaaacatcacattccagtctgaagt

SEQ ID NO: 3452 - DNA, 120 bp, synthetic construct
  source 1..120: mol_type = other DNA
ctagtggcataagctataatatgtaaaattcagaagccctgggcagccatgttttgtagcctatggagaaactgacctatggaaggagagaagaatgaaggcagaagctactgaaaagta

SEQ ID NO: 3453 - DNA, 120 bp, synthetic construct
  source 1..120: mol_type = other DNA
ccacttcctcactgttcctcataaaggtgccatccccaggctggggtcccttggcagggaaaattcaggaacaaggaattgctcagatttcatatagatttatgtcttataaaactataa

SEQ ID NO: 3454 - DNA, 120 bp, synthetic construct
  source 1..120: mol_type = other DNA
cctactgtgtatgtgtgtatgtgcatgtgcacatattcatgtgtgtaataatttttgaagctcctgtttaaaatgtgagacctttttggcaggaagtagcattcaggttagtttgttcct

SEQ ID NO: 3455 - DNA, 120 bp, synthetic construct
  source 1..120: mol_type = other DNA
ctaagctctctattcatttcctttggtcactgtctatttttgtgccagcacctcacttttttcgattattgtagctttgtaatatattttgtgtggttcccccaccccccgcccccttgg

SEQ ID NO: 3456 - DNA, 120 bp, synthetic construct
  source 1..120: mol_type = other DNA
ttttagaggatgtatagtcacagcttttcagagctgaaatgaaccactggggttcatgtaatcattgaggatattgagatccagagttaagagaattgcccaggttcacacagctggatg

SEQ ID NO: 3457 - DNA, 120 bp, synthetic construct
  source 1..120: mol_type = other DNA
agcagcatttaatggtttttcctctatgtccccttagtactttcttcatatctctacttgtctctcccactagactgtaaattcacttttgtcaggaccatgccatctgagtaccccagt

SEQ ID NO: 3458 - DNA, 120 bp, synthetic construct
  source 1..120: mol_type = other DNA
cctattactcagagttgcagccagcttagtttttcttgcaattagaaaagcctttgatttatgatttcagctcttccctgttcctttgaccactgatgcattgctcatcagagcacattc

SEQ ID NO: 3459 - DNA, 120 bp, synthetic construct
  source 1..120: mol_type = other DNA
tttatcagatacttcaagtgtatgtggcattaagtgcaatagcatattgcttttgattcaaggcagatttctgttatctctctttggagaaagatgcaatatttcccctctttacaaact

SEQ ID NO: 3460 - DNA, 120 bp, synthetic construct
  source 1..120: mol_type = other DNA
aagaaaaggagaaaacaaaatcataaaagcagatcctttgccctggtgacttctgatatccaaatgaaagcccctttttaagctgacggatgcttgttacagctgaagtctgcagctcat

SEQ ID NO: 3461 - DNA, 120 bp, synthetic construct
  source 1..120: mol_type = other DNA
tgctgtccctccccgctcccccaatcccccgagaatagttgtttcttaagggatgctttgtgtgctcctattctttctttatacaaatattcactcaacaaatctctgcttttttcatat

SEQ ID NO: 3462 - DNA, 120 bp, synthetic construct
  source 1..120: mol_type = other DNA
acccctcccggagaagaaaagaactcgctctcatcagttaattcagcggcgcgccgcagccttccgctgcgccccggacttcgcagacaaacgcccggggattggtggaaatcaaggtct

SEQ ID NO: 3463 - DNA, 120 bp, synthetic construct
  source 1..120: mol_type = other DNA
ccctccgcggagccacacgctccggctgcaaggctctagacaacctcagggtgcctgtcctttccttttaattctctcttctagacatcactgaatgtgagaagtcaactcatttaacac

SEQ ID NO: 3464 - DNA, 120 bp, synthetic construct
  source 1..120: mol_type = other DNA
acccattctgcctgaagagctggcaacaatttgaaatccatcatcccggctgtgttttgtggattaaactacttattctcatatgttctacccatttccttgtcaggagtgaattctgtg

SEQ ID NO: 3465 - DNA, 120 bp, synthetic construct
  source 1..120: mol_type = other DNA
ctgttaatgtcaatctctataatacagcactgctcgtacgggtgaagtggtgaccagtctcacaagtgtatttctccaaacccaagaagaaaaaccagagcaaggagaaaacattgagca

SEQ ID NO: 3466 - DNA, 120 bp, synthetic construct
  source 1..120: mol_type = other DNA
atatacagtggcacaagctgcacctgcccagaaataatggtatgtttgcacaagagaacagcctgtgcagccaacagaggccttttttctcattcatacaaagaagccataaatactaat

SEQ ID NO: 3467 - DNA, 120 bp, synthetic construct
  source 1..120: mol_type = other DNA
agaatagatagactggtggggaagagagagacagaagtgggaagaccactttggaaactagcacagcaatccaggtaagaaaagtgagggtccataaatatgtttctcaaaagctatcaa

SEQ ID NO: 3468 - DNA, 120 bp, synthetic construct
  source 1..120: mol_type = other DNA
tagctttgtttaactgactctggttgtaaaaagtaggcatggtcattagaacaacagctctagagtgaacagggttcacatccctgctctgacgttttccagttgagaggcctctggtaa

SEQ ID NO: 3469 - DNA, 120 bp, synthetic construct
  source 1..120: mol_type = other DNA
agggtttaatgctttgaagaaaaataaagtagagtattgagaatgatggatttggggggagtagtggccacaggatggtcaggaaagatctttctgaggaagtgacatttgaacagggcc

SEQ ID NO: 3470 - DNA, 120 bp, synthetic construct
  source 1..120: mol_type = other DNA
gtaagccagaatttatagggtttgttaccctttagagatccattagatgtttgcaggataggtcattcactgtgctcaagatttttctagtgccactgcccattgattactgaagctgta

SEQ ID NO: 3471 - DNA, 120 bp, synthetic construct
  source 1..120: mol_type = other DNA
tatttatagaaaattccacagctaattttaaaaaaagaaacaagtgatgataaatgaaaccggctttattgtaagcggaattcaaagtgttactaacaaagcaggtcccccccaaaatgg

SEQ ID NO: 3472 - DNA, 120 bp, synthetic construct
  source 1..120: mol_type = other DNA
attgcctcagtgttctccaatgcttttaagcaaagctttatatatatatatatgttttctctttgtttccagctgtagcattgatgtgccacaaaccactgaatcattcgtggaagcagc

SEQ ID NO: 3473 - DNA, 120 bp, synthetic construct
  source 1..120: mol_type = other DNA
tacctgtgccctggatcctacggaattgtgccttcatacaaaactttactttaggattccgtctttgatgtcttctaacaaagagctgctccctctctattgatgcttaaatcagcattt

SEQ ID NO: 3474 - DNA, 120 bp, synthetic construct
  source 1..120: mol_type = other DNA
tcaagaggctaaaagaggaggcacacaaggtaaccaataaaataaatagagtatgagtgtaactatggaaacgtgcaagacctggagttggtacagaggacagaatgatttgctgggaga

SEQ ID NO: 3475 - DNA, 120 bp, synthetic construct
  source 1..120: mol_type = other DNA
ggggtttttttaaatcatgttggaatacattgtccatagtaagtatatttttacctctctcttttcaatctggatgtcttcttcttcttcttcttcttcttcttcttcttcttcttcttc

SEQ ID NO: 3476 - DNA, 120 bp, synthetic construct
  source 1..120: mol_type = other DNA
tgagcctttgtaaacctaagtctgctgtgtcagtcctctactcataacccttcagtggcttcccttctcattcttgaataaaagcctaaatcctcacagtccctacataatctggtcttc

SEQ ID NO: 3477 - DNA, 120 bp, synthetic construct
  source 1..120: mol_type = other DNA
gttgcagtttgtttttgtaaagaacccaattccccctctttttttcagtgtggagagctagttaccatcacagcacaatttattagaggttcacctgtttcccagtcatgtggtatataa

SEQ ID NO: 3478 - DNA, 120 bp, synthetic construct
  source 1..120: mol_type = other DNA
gagaaggttgtagttgtacaaagtggctgatatctgataatgttttaatctaattcaaagtcgatttcttaaatccaggtgtcagagtagcacactactgtacaattctctgtttcatgt

SEQ ID NO: 3479 - DNA, 120 bp, synthetic construct
  source 1..120: mol_type = other DNA
cgtagtggctatagcaatttacatacacaccaatagcatatgggcattcgtttttttccgcatccttgccagcatgttattttttgtcttttttataatagccattctaattgggtgaag

SEQ ID NO: 3480 - DNA, 120 bp, synthetic construct
  source 1..120: mol_type = other DNA
aatttaagctcaacgacggaaaagatgtgtttgacttgttctcattggttgtcactgtatttgcaatgccctgaagaagctggagtatagaacaagctgaagtaggcagaccctcatgag

SEQ ID NO: 3481 - DNA, 120 bp, synthetic construct
  source 1..120: mol_type = other DNA
atgtaaactattgattatgttatcttctggatatattggcttacgcctctaatctcagcactttggaaggccaaagcagaagactgcttgaggccaagagttcaagacccacctgagcaa

SEQ ID NO: 3482 - DNA, 120 bp, synthetic construct
  source 1..120: mol_type = other DNA
aatcccattttacctgtgcacctagttggatattgggagctggactgcaatttacattttcaattacagtcagtggtcctctgagcagtaggaagcaaatatgaagcaggaagctagatc

SEQ ID NO: 3483 - DNA, 120 bp, synthetic construct
  source 1..120: mol_type = other DNA
tctgatgagctatcataatggctcattttatgctctgtgatagccaataattaaattgaccattgttgtaagctgaagccaaaaccaaagtgattttggaaggctcaatcttcctaggtt

SEQ ID NO: 3484 - DNA, 120 bp, synthetic construct
  source 1..120: mol_type = other DNA
gcacacttagtgagtctgcaggaagctgcagtcaatctacagagaagaggatgaacttggatgtttgtttaaaacatgggttttgtcactgtagagatgcaaagagatcctaaactttgg

SEQ ID NO: 3485 - DNA, 120 bp, synthetic construct
  source 1..120: mol_type = other DNA
cactagtattcccaggatccagcagaaatgacaactctatggcctaaccagatctaaaaaagaaagtgaaataattacctccctgtgtgacaaggagacacataaggagactccaagggc

SEQ ID NO: 3486 - DNA, 120 bp, synthetic construct
  source 1..120: mol_type = other DNA
acatacgaggtcctctctctctctcactgtctctctctccatacatgcatatgtagtatgaaatgtcaggagagtagatacgtagtatgaaacttacctcttcttctactctcctgacat

SEQ ID NO: 3487 - DNA, 120 bp, synthetic construct
  source 1..120: mol_type = other DNA
cctccacactgacacagtggcagcaccattttttattctcatcagtagtgtgtaaggattccagtttctccacatcctttccaacactttttgttgttgttgttaattgccattctgaca

SEQ ID NO: 3488 - DNA, 120 bp, synthetic construct
  source 1..120: mol_type = other DNA
ttcacaatagcctcaaaaagaaaaaaatacataggaatacagctaaccaggcaggtggaagatgtatctacaatgagaattagaaaacacttttgaaagaaatcagagatgacacaaatg

SEQ ID NO: 3489 - DNA, 120 bp, synthetic construct
  source 1..120: mol_type = other DNA
tctcccaggttgattcatgacctaatataacctttgaccctaagaaagtagatttctaaaagaataactgctagttttagactgctatttggcttcatatctacagccaagcaacattct

SEQ ID NO: 3490 - DNA, 120 bp, synthetic construct
  source 1..120: mol_type = other DNA
cttcctctccattctgcataccttcccctggtatccaaccaagagagaattcttgttcttaaggccctcatgatctaattaaaacccagataaaatgagaactaaagggcaaacggttgg

SEQ ID NO: 3491 - DNA, 120 bp, synthetic construct
  source 1..120: mol_type = other DNA
aagaaccaaagccaattcaaacagttactagtatgtctgaaagcccaaggaataaagtctatccaaggaaaagtaagcagtcatcaaggctggggaaaggcataaagcagaggctgcatg

SEQ ID NO: 3492 - DNA, 120 bp, synthetic construct
  source 1..120: mol_type = other DNA
tagagatttcgcctttcccccaaggctgttccttccacttatacagctcattgtcactttttgtcttttccattaaactgggagtatcttgaggaaaactttcacttcagtgagcagcat

SEQ ID NO: 3493 - DNA, 120 bp, synthetic construct
  source 1..120: mol_type = other DNA
cagtggcttcccttgggtactggtggcaagacaaaagaaggaatagagaatgtgtgcgtgtttaaacatttcttgacttttgacttcctattaggaatctttggtcatagcagggatgga

SEQ ID NO: 3494 - DNA, 120 bp, synthetic construct
  source 1..120: mol_type = other DNA
acgtaatataggccatatttacacttggcctcagccagtgcagcctgtattgctcaacagaaaatcccattcagcaggttttgatgtgttaggaaacgtgctacatccgttacctatttt

SEQ ID NO: 3495 - DNA, 120 bp, synthetic construct
  source 1..120: mol_type = other DNA
ttaaagtttctgtgagttctgaatctgggcacaatttagttctagcttagactctagctaagagtctgtcactgtcaatctgttgcaatcaagactgcagtcaatggttggcctgggttt

SEQ ID NO: 3496 - DNA, 120 bp, synthetic construct
  source 1..120: mol_type = other DNA
agcagcccagtcttcctactgtctgatttaattacagcggttcctgtgggagtgggggctgttattctcttaaacatttgcagcttgaaacagttgaggaagcagctttaaaaaaaaaaa

SEQ ID NO: 3497 - DNA, 120 bp, synthetic construct
  source 1..120: mol_type = other DNA
acgggaaggcatacagtgtcaagaatgggcttcagaatggaggtggtgatgtctgagccattttgaaggatggataattatttggatattccaggcagaagaaacataatttatcaaggc

SEQ ID NO: 3498 - DNA, 120 bp, synthetic construct
  source 1..120: mol_type = other DNA
tacccaccccccacccagcacgcttttctaatttaggcctattttcctgaagtcagagccaagctgaatacagacataagtggatttctcacaattcttctccagctgaaaattaaagaa

SEQ ID NO: 3499 - DNA, 120 bp, synthetic construct
  source 1..120: mol_type = other DNA
tatctcctaatgctatccctcccccctccccgctggatgtggagttttaaataaaggaacgagccaagattgacgtcacagttttggtttgagcaactgttaagaatgaaattacttgac

SEQ ID NO: 3500 - DNA, 120 bp, synthetic construct
  source 1..120: mol_type = other DNA
cctctcttttaggccttcgaggacatctacattgagcagagaaagaccatccgcaccatcctggaatatgctgacaaagtcttcacctatatcttcatcctggagatgttgctcaagtgg

SEQ ID NO: 3501 - DNA, 120 bp, synthetic construct
  source 1..120: mol_type = other DNA
gttctccaagaggggctccaggttgttggttccagttgaggtgttcacctgctgcagcaactcccattttgtttgtagcacctggttctgctgctccaggaatcgcacctaagagcaaga

SEQ ID NO: 3502 - DNA, 120 bp, synthetic construct
  source 1..120: mol_type = other DNA
aggcttatctctgtgcgtggaggtgtgatgtgggcctgcagccagagacttttctaggttgttgatctggcatagagacagagacttactcagggggtttagttcctgcctgcttgaggt

SEQ ID NO: 3503 - DNA, 120 bp, synthetic construct
  source 1..120: mol_type = other DNA
acatacacacacatacacaccccacatacacacaccacacatatcacatgcacaccccacatataccacaccacacacataccacacacacaccacacaccacatacacaccacacatac

SEQ ID NO: 3504 - DNA, 120 bp, synthetic construct
  source 1..120: mol_type = other DNA
aaaaaatgcccaatacaattgctgggtcttaggttagttatatgtttagggtttttccccttttacttttacttgacaagtaatacttgtacatatttatggagtatagagtgatatttc

SEQ ID NO: 3505 - DNA, 120 bp, synthetic construct
  source 1..120: mol_type = other DNA
gggtgttaactgtaataaaactgaatttcttaaaaacagaaacaagaatttagactttttcctgaatggtcccatatttccaagtggcctagattatcaaaagtaattgatttgtaataa

SEQ ID NO: 3506 - DNA, 120 bp, synthetic construct
  source 1..120: mol_type = other DNA
agtagattcatgcattgttttctattccctaaaccagttagttaagcagggacttaggccttgaaaagggctactctttaaaacattaacaaacagaaatactacatgagagataaatgc

SEQ ID NO: 3507 - DNA, 120 bp, synthetic construct
  source 1..120: mol_type = other DNA
agtaaacattgccaagcctgcaaacacttaagaaaacacagccccgatatgagaagaagaaacaattaattgaaaccgacacagatgacagaattagcaggtggaagcactgaggcagtt

SEQ ID NO: 3508 - DNA, 120 bp, synthetic construct
  source 1..120: mol_type = other DNA
tccagtgtcagggacacagtcatctctgtcttgggatatcccattcctacctttcttcttgatacagtggaaatatggtcacttctcctatgtttttgtaacttaggacacttaatgtta

SEQ ID NO: 3509 - DNA, 120 bp, synthetic construct
  source 1..120: mol_type = other DNA
tcttttttattcctaatagatgctgacatttttaatgttggtgagactgtctaccctttgtccaagtgcagtactgcagaggttggaccgacttgttgagccattacgtgcaacatgtac

SEQ ID NO: 3510 - DNA, 120 bp, synthetic construct
  source 1..120: mol_type = other DNA
gaagccagctgtcaatgtagttgtcattcctttgtagataattggttttcttcctccttctggtcacttctaagattttttttttttaattgatcattcttgggtgtttctcgcagaggg

SEQ ID NO: 3511 - DNA, 120 bp, synthetic construct
  source 1..120: mol_type = other DNA
aaaaaagggaactaaggtggttagaaaattcaaagggtaaaaattaaagaaattaaatcaataattccagaacaaaaaagaagtacaccagccattccacctgtttcttaatttttcaaa

SEQ ID NO: 3512 - DNA, 120 bp, synthetic construct
  source 1..120: mol_type = other DNA
attcccggtgactggtagaaagcttggcgcataggaggtggtcagtaagtatttgatgaactgatcaataagaagaactaggacatccatgtattgacattcacaagtcacataaatatg

SEQ ID NO: 3513 - DNA, 120 bp, synthetic construct
  source 1..120: mol_type = other DNA
gagtgtacaaaatgtcaatgtactaagaagactatggacaaagataaaaacagataaaaataaaaggaaatacaaatgaaaaactaaaacaaaataacatcagcaacttaagacactgaa

SEQ ID NO: 3514 - DNA, 120 bp, synthetic construct
  source 1..120: mol_type = other DNA
agggaaaatgtgcttggtttgcagactgcaaataaaacaggttaaacattttgggtagccatttaagtaaaaatcgtttaacaaatgtcctggcttagaagggggaaagggatccgccgg

SEQ ID NO: 3515 - DNA, 120 bp, synthetic construct
  source 1..120: mol_type = other DNA
tgaggaaaaagagataagcgattaagaatcatctctatgtcctttctcagactgataccactcttggtaacatggtgctaactctacagctaactgaggttccagagagaaatgtcccac

SEQ ID NO: 3516 - DNA, 120 bp, synthetic construct
  source 1..120: mol_type = other DNA
ggttcttgtaccttgacaatatttccctgataaaatgacataaaattggcattgttactcaccattgacaagactgcatcacatgatccatctggcttgaacctcatactaagtcagaag

SEQ ID NO: 3517 - DNA, 120 bp, synthetic construct
  source 1..120: mol_type = other DNA
tttcaaagtgaaataaccaagttttgtactcataactgcagaaaggagttatgaatttaagtacctcacagtgaaatgaaagtcctttgatcattttttgttattagatagaagttaggg

SEQ ID NO: 3518 - DNA, 120 bp, synthetic construct
  source 1..120: mol_type = other DNA
accaacatggaaggatattgaccatctcttttacaatgacttgatcctgaatcatatctcagccatctactttcaaggtcatatctatgtcctgctaataacaacaagtacaccccaatt

SEQ ID NO: 3519 - DNA, 120 bp, synthetic construct
  source 1..120: mol_type = other DNA
gctccagttatagaacaacttctatgcagagttatgtaagattttatgcagttattttatctctctggccttagcttttacatctgtcagaaaacttatcaccctcctatgttcctattt

SEQ ID NO: 3520 - DNA, 120 bp, synthetic construct
  source 1..120: mol_type = other DNA
tgtatgtctgtatttatgtaggcatatgtaactgcatttttacctttatatatttgctttgactgtaaacattagcaaagctgactcaacaagtaatgctacatagcaaggattgctttt

SEQ ID NO: 3521 - DNA, 120 bp, synthetic construct
  source 1..120: mol_type = other DNA
ttccaccactaaaatgtgagctgcaccagggaaggaactttgtcttgattaccaaggcctggaaccgagcctatcacatagcaggaacttaatccatttttatagagtgaaacatcacat

SEQ ID NO: 3522 - DNA, 120 bp, synthetic construct
  source 1..120: mol_type = other DNA
cctgttctcccgaatgtctggatggcttttcttgcctcttatttaatttataataagcttatggcttccctcttgtctttttgctttagcaagttggcattctgtttactcagagataaa

SEQ ID NO: 3523 - DNA, 120 bp, synthetic construct
  source 1..120: mol_type = other DNA
tccacatgtttttattatgcttaagtggatggcatgtttagacaatttttgttgttgtaggtggtggcatgtctaacaaatttaagcaactcaaaatgttgtcttagaaacacaaagtca

SEQ ID NO: 3524 - DNA, 120 bp, synthetic construct
  source 1..120: mol_type = other DNA
atgcctgggaaagggagaaataaggctcactagccacagagagaaaaacagagagttaattttaaaggactccagcctttttctcttcctcacggggaactgggtttgcttacatacaac

SEQ ID NO: 3525 - DNA, 120 bp, synthetic construct
  source 1..120: mol_type = other DNA
gattaaatgccacttaagtgtcaaaaaaaaaaaaaaaaacccgacttactgtggtagaatcaaaagaaaggatatccataacagggggagtagagatctgcaaatcgattacctcaagct

SEQ ID NO: 3526 - DNA, 120 bp, synthetic construct
  source 1..120: mol_type = other DNA
ggatactggttatctttgcagagagacaaggcagtaattagaagggagtaggattcactaaaaaattatcaaaaagcttaacctcacgaaccttgccacgagctgaaagtgttccccaaa

SEQ ID NO: 3527 - DNA, 120 bp, synthetic construct
  source 1..120: mol_type = other DNA
ttattcagatgacgtcatgaatttagtcaggacagcctaccaagaggcactcccaacatcccatttcagagatgaggaaaaagaggactggatgtgcatacctaattcagggttccatag

SEQ ID NO: 3528 - DNA, 120 bp, synthetic construct
  source 1..120: mol_type = other DNA
atgtgagctgggataaacttgaaaagaatcttgcctatatcattgtatcaagaaatttaagccctataaaaagaaattcctcccattcataacagcagccaaaccatgaaacggaatgga

SEQ ID NO: 3529 - DNA, 120 bp, synthetic construct
  source 1..120: mol_type = other DNA
gatctctgcttttttaaagttttggtttgatgatgtggcattcagcgttagtgactccattatggtttggtcaggtctgttgaggactagcgcaggagcataatttttggttaacaggtg

SEQ ID NO: 3530 - DNA, 120 bp, synthetic construct
  source 1..120: mol_type = other DNA
tcccaagccttgaaactacctaaaggctccttctgagtcaaatatcaaaaaaatggatcccaaatgactcctaatatgatttctcccagatgctctttctgataactttgtttccgacgt

SEQ ID NO: 3531 - DNA, 120 bp, synthetic construct
  source 1..120: mol_type = other DNA
ctgtctgaaatgttttttagaggctcattcctttctgaggtaggtaggttcctatttagaacttctgagcctaacatcatgcttagtttacttctaattttaatgaacacttttattaag

SEQ ID NO: 3532 - DNA, 120 bp, synthetic construct
  source 1..120: mol_type = other DNA
tgactgtagacctggtccagcttaggtgaaagcaggagtttggagaaggtctcagtttctaatcatcttttcacacaaaaacttatgaggcaattataaagctcttcctcttcctccctg

SEQ ID NO: 3533 - DNA, 120 bp, synthetic construct
  source 1..120: mol_type = other DNA
attactgtgtgccttttaaatgtcatatgagatcattgtctcacaagctcactctgtgctctaaggggacatatatttactacttataaagttacaatcacttcaaagtagatgctggct

SEQ ID NO: 3534 - DNA, 120 bp, synthetic construct
  source 1..120: mol_type = other DNA
tcataactaggagagaaaaatgaggggctgatgctccactgatgagggaataacatggagtcagtcttcaccaaaaactccaagtttcttttgtggatcagttttaacccctttcattgg

SEQ ID NO: 3535 - DNA, 120 bp, synthetic construct
  source 1..120: mol_type = other DNA
attaaattcgttagcaagaggaatgcagttcagacttctcagatttgggaggtaaatctcccccacccccagtgtttgcatttggtttgagtgtcttaattaccattccagaacgtttgt

SEQ ID NO: 3536 - DNA, 120 bp, synthetic construct
  source 1..120: mol_type = other DNA
cattctacatatttttcacacgtctcatggaatctttacaacaacccgaagaggaaggtctccagtaaccccgttttttagttaagttaactgaggctcagagggttgagcaatgtgcca

SEQ ID NO: 3537 - DNA, 120 bp, synthetic construct
  source 1..120: mol_type = other DNA
gctttgtaaagatgaagtagagcgggctgttgaggggagtaggccagtagctgttggagagttttatgttgggtttttattaggttgaacttttttttgaagttcccacctctgttaagt

SEQ ID NO: 3538 - DNA, 120 bp, synthetic construct
  source 1..120: mol_type = other DNA
acttgttcaaaaaatttaattctgaaatgaaaaagattgccgaccaggtgattcctaagcaaagagcagcccagtttgatgttgtcaaacacatgcgccaagaccagatcaccaatggca

SEQ ID NO: 3539 - DNA, 120 bp, synthetic construct
  source 1..120: mol_type = other DNA
aaaactaacaattgaggagtgctgtttgtactggtaagattataatttggaaagtagatttttggtaggccaaagctggtggatcgcccaggagtttgaggctagcctgggcaatatagt

SEQ ID NO: 3540 - DNA, 120 bp, synthetic construct
  source 1..120: mol_type = other DNA
ttctgtatctccttttcattttcctgtcttcatcgatattcactatcctcatcgctgcgacactctggcaatgaactgtttactgcccaataatcttaatgattaatttctgcttagtaa

SEQ ID NO: 3541 - DNA, 120 bp, synthetic construct
  source 1..120: mol_type = other DNA
attgtagcaaaagaaaaaagtaaaggaggaaaaaaaactgccaccaggagggttcttttcagatgctggtttctctactggagataaatagcccagctggggtgactttgccatttcagc

SEQ ID NO: 3542 - DNA, 120 bp, synthetic construct
  source 1..120: mol_type = other DNA
tcctaactctcttcaattccatggaggctgacagaggtgaagaagctgcagaagaaaagttggaaactagcagaggttagttcatgaggttaacgaaagacgccatctccattatataaa

SEQ ID NO: 3543 - DNA, 120 bp, synthetic construct
  source 1..120: mol_type = other DNA
caaagccaacttatgttcagcaagactgctattattcatcctctgaaggactaaagaataagtaaatgcactaagccacaccttgaaaagtcatggcagagtggcaagccacagcttgat

SEQ ID NO: 3544 - DNA, 120 bp, synthetic construct
  source 1..120: mol_type = other DNA
ctgacctgaatactgtatctgacgactgcagcttctgatgcccagaggcacaggctcccgattcatcagaccctcaaagtgtcccactggggaagtccatgaagaaatccacattggtga

SEQ ID NO: 3545 - DNA, 120 bp, synthetic construct
  source 1..120: mol_type = other DNA
ctgcgcggggagagggggcagggagagcccttctgcttggaagagttcacaggctctctggctgatggtgtatcactgggatgcctatagggcacaccagtctgtgaaatggttgtccgg

SEQ ID NO: 3546 - DNA, 120 bp, synthetic construct
  source 1..120: mol_type = other DNA
taatggtgatggtgatagtggtaatggtggtggtggtgatgatgatgatggtgatgctgaaggcaatgatgatgataatgatggaaaatcatttctgggagtgatctagagcttacagct

SEQ ID NO: 3547 - DNA, 120 bp, synthetic construct
  source 1..120: mol_type = other DNA
gcagtggatataggtgcagatggtgtaggtgtagatggtgtaggtgtatggatgtaggtgcagagggtgtaggtgctgtggatgtaggtgcagagggtgtaggtacagtggatgtagatg

SEQ ID NO: 3548 - DNA, 120 bp, synthetic construct
  source 1..120: mol_type = other DNA
cagtacaatacagtgatgcagcaggaatcatctaactgaagcaaagttaccacaagctgtggcagaaccctctaactcttaaatcttctgttgttcatccacctccaatatccctgagat

SEQ ID NO: 3549 - DNA, 120 bp, synthetic construct
  source 1..120: mol_type = other DNA
tttatttttaaaatccttgcccagatcaatgaatgtgaagaaggatttctcctatggtttcttctagtagtttcatgcttttttttggcggggcgggggggggggggaggtgatcttgtt

SEQ ID NO: 3550 - DNA, 120 bp, synthetic construct
  source 1..120: mol_type = other DNA
tactgacattaacagtatgtgaggcattatgtggcacacatgatatatatctatcatctagcaaaagctcaaggtacatggtgtcctgtacttaaatgttaactaaggcttagtgagatt

SEQ ID NO: 3551 - DNA, 120 bp, synthetic construct
  source 1..120: mol_type = other DNA
aggagaatattctaattggttctaaggaggacgagttagggacagcaatgacctggaaccactggttgtttcttgcatgcttctaagctggaccaattggggaaattagtctatgttagt

SEQ ID NO: 3552 - DNA, 120 bp, synthetic construct
  source 1..120: mol_type = other DNA
ctggagcatcaattcctaagtgacttatttgcagtcacaaggctaattagtagccaaggtgggattcaccttgggctccttctaaaacacctcctaggaaactctcaactccttgaaaag

SEQ ID NO: 3553 - DNA, 120 bp, synthetic construct
  source 1..120: mol_type = other DNA
actaataccatgcactgagtacttcctacagcatttgagctgagacccaaataatgaaaaggagctggctcacagaaacagtattgcaggcagaagaaacaaatgcaaaggtgggaatta

SEQ ID NO: 3554 - DNA, 120 bp, synthetic construct
  source 1..120: mol_type = other DNA
aaggttgcaaagtgtgttatttgtccttgctattttatttccctgtacccaacatacacagaccctctcacctgcctcctcattaaatagcccattgattatgctcaccgtactaaaagg

SEQ ID NO: 3555 - DNA, 120 bp, synthetic construct
  source 1..120: mol_type = other DNA
gatgatggtgctgatgatggtggtgatggtggcgatgatgatgatggtggtgatggtgatgatgatagtgatgatggtgatggtagtaatggtaatgataataataatgatggtgacgat

SEQ ID NO: 3556 - DNA, 120 bp, synthetic construct
  source 1..120: mol_type = other DNA
taaagtataataatacaaaaaaaggaattagcctcgaaaccaacaagggagagggagagagaggagagtcatggtgtgattaaattgtcgagacacattcccgttgctatcaatggctgg

SEQ ID NO: 3557 - DNA, 120 bp, synthetic construct
  source 1..120: mol_type = other DNA
agaagaagacggctctgatgaaagaattcctgggttcaagccatagagctgccattttatagctgtacaaccttgagctactggcccaaacctcatttttcttgtctaataaatattagc

SEQ ID NO: 3558 - DNA, 120 bp, synthetic construct
  source 1..120: mol_type = other DNA
tgctaatcaatcacagatacttcttctgataagactggactggaggacactccagacagaatgactactcgtgggtagattgaagctagcgctcagattggagcccatttgccatctcaa

SEQ ID NO: 3559 - DNA, 120 bp, synthetic construct
  source 1..120: mol_type = other DNA
tttgagcacctactgtgcaccgaaaactgagttacttgagtacctgcccttcccaaacttaaattttagaagagacaaatgataaataagaaatccctaggctgggtacagtggctcatg

SEQ ID NO: 3560 - DNA, 120 bp, synthetic construct
  source 1..120: mol_type = other DNA
ttttactgaaaaacaaccaaaaataacgccagcggtaaaagatgccagggtggtgatggtgatgatgctgtgtgagcatgtacgtgttagattctccaagaaaggaccactcaattcttt

SEQ ID NO: 3561 - DNA, 120 bp, synthetic construct
  source 1..120: mol_type = other DNA
tctctctagatgtcccaggaaaacagtgagggctcagcagagattttatgaatgaataaaatggtatctccgatgacattgggaggtagtggggtaaaagagaggaaggtacagacagcg

SEQ ID NO: 3562 - DNA, 120 bp, synthetic construct
  source 1..120: mol_type = other DNA
gcgctgtggtcaccatggaggaggaaaaggagttcttcagttagtgttacagacaatatggcccactgggatttttttatatatgtaacaaagtttacagatggtttaaggggacacagg

SEQ ID NO: 3563 - DNA, 120 bp, synthetic construct
  source 1..120: mol_type = other DNA
ttaaatttaaaggaacaaggtcagtgacaagacttaactgtaacgcttctcggacttcaaattgattacatcacgggccacttcggaaaccgcgcatcagtcagaattggtagttccaca

SEQ ID NO: 3564 - DNA, 120 bp, synthetic construct
  source 1..120: mol_type = other DNA
tgtgtatattttgggggggtgtattttggggggtatgttttggatgtgtattttttggggctgtgtatttggttgtgtgtgtgtgttgggtgtgtgtatttagtggtgtgtgtacttttg

SEQ ID NO: 3565 - DNA, 120 bp, synthetic construct
  source 1..120: mol_type = other DNA
agagtgatcttgtttttaaattgagactacttaaaaacctccaatggttcccactgctctgagaatcagactggtctgcccggccctgcaactggccccgccaccctcgctggcccttct

SEQ ID NO: 3566 - DNA, 120 bp, synthetic construct
  source 1..120: mol_type = other DNA
taatgggtatgagtgtgtctcactgattctcatttccctaacgatgagcgagtgtcgctgagcacacttccatgtccccgttggctatctgcattttttttttttttaagacagagtctt

SEQ ID NO: 3567 - DNA, 120 bp, synthetic construct
  source 1..120: mol_type = other DNA
caactatccatccaactgtctatacattcttctctctacctacccattcacccatcttccatctctccatccactcatctatccttcactcattatccattcatccatccatcttccatt

SEQ ID NO: 3568 - DNA, 120 bp, synthetic construct
  source 1..120: mol_type = other DNA
ttcacggacatgggactggagcagttgcaggggatgctatgctcagaaggaccccaaactttgtgtcatgctcttgaaattcttaatactttttgaccaaaggctccctgccttttcatt

SEQ ID NO: 3569 - DNA, 120 bp, synthetic construct
  source 1..120: mol_type = other DNA
tgagaacttggacttttactctgagtcaaatgggagccatgggaggtttgggagcagggcaggaggcctgatgtgactcgcctaaggtccccgataaataagtacatctctttctcagcc

SEQ ID NO: 3570 - DNA, 120 bp, synthetic construct
  source 1..120: mol_type = other DNA
tatggctgcatagtattccatggtgtatatgacacttttataccgtctcgaggttacagaaaaaatggaggcttggactatggcaaaagaggttataggagaggcagaagaggaagcctg

SEQ ID NO: 3571 - DNA, 120 bp, synthetic construct
  source 1..120: mol_type = other DNA
tctatccctctctcccttcctctctctctctctctctctccccatctctatccctctctccctttctctctctctctctgcctccttcacacacacgcatgctttcatggaggcttcatt

SEQ ID NO: 3572 - DNA, 120 bp, synthetic construct
  source 1..120: mol_type = other DNA
gtaaatatgaacaaatcactgaatatctcatagccctggcacccttgtcagtgttagagagccctagtgagcaagtttcaattagagtcctttggttgcaagcaacagaaatcaacactg

SEQ ID NO: 3573 - DNA, 120 bp, synthetic construct
  source 1..120: mol_type = other DNA
ttttagtttgaactcatgaagccacgatggtcgctgccctctgaatgctgagagctggaccctcttttctgggttccaatttcaaaactggacctttcttccccctagaacctgccacat

SEQ ID NO: 3574 - DNA, 120 bp, synthetic construct
  source 1..120: mol_type = other DNA
gttgattctccaaacaaaggcttattgctttttaccatattccatgtctctcaaaatcaacgccagccaagcttcaggtcagtgaatattaatatccgctctggcaaagtgttctgggat

SEQ ID NO: 3575 - DNA, 120 bp, synthetic construct
  source 1..120: mol_type = other DNA
tgatcctggagctgagtcttgatgtccatggctggatgtcaggaagagaccatgtgggtgacaagggggcaggtgtctcatgcaggagggttgcgagtacaggacaaaggaatgattcat

SEQ ID NO: 3576 - DNA, 120 bp, synthetic construct
  source 1..120: mol_type = other DNA
catgcaagctccgctttctctttgcataccctctacctacactgaccatctccgcgataatgctgcccgaaaaattaactccaaatggtgtgggttgaaactgtagcaatttcttcttaa

SEQ ID NO: 3577 - DNA, 120 bp, synthetic construct
  source 1..120: mol_type = other DNA
gtatatatatacatatatatatagatggatggatgtcaaacttcttttggatggagaaagttctgggctcagattccgaggtcagccatcacctggagctgcaggttttcctcgtctcca

SEQ ID NO: 3578 - DNA, 120 bp, synthetic construct
  source 1..120: mol_type = other DNA
aaaatgagtgttggacaggatgtagaaaagagagactcctggcacactgtgggtgggaatgtaagttggtaaagccattacggcaaacagtacgtaggctcttcgagatattaaaaatag

SEQ ID NO: 3579 - DNA, 120 bp, synthetic construct
  source 1..120: mol_type = other DNA
acgctgcctgtagattatcagtaagagactttcatgcgccagtatgccccgtgtgtaagccgagcatgcatacgtaatcattgtcatgatgcgcacattataaaataaatacaaagcagt

SEQ ID NO: 3580 - DNA, 120 bp, synthetic construct
  source 1..120: mol_type = other DNA
atatttcatccgacgccaccctgaccaccttttacaacttctcagatgtccccttcctccttattttatttccccagtcttttcagcactgtgtttttttcccaaagcatttctcattta

SEQ ID NO: 3581 - DNA, 120 bp, synthetic construct
  source 1..120: mol_type = other DNA
cgcgcccggcctctttctcttatcttttatactgcatgttactgtgccttttctgcaaggtttagatatgttcagatagacacatacctactattgtgttacagttgcctacaaagtcca

SEQ ID NO: 3582 - DNA, 120 bp, synthetic construct
  source 1..120: mol_type = other DNA
gacactcggcccggcatcacgggctggatttaggatggtgactgcagcgctttgcctttcttctgcatcataactgccgccctcaattcttctctgctaatcagcctcatgggcagagag

SEQ ID NO: 3583 - DNA, 120 bp, synthetic construct
  source 1..120: mol_type = other DNA
tacccttctctctggaatctcatgggaatctcctctcggtgactgttcttattgccacgtgaacaacggaccaaggaggatggaggtctctgaggaggggcaggattctggtgggaaccg

SEQ ID NO: 3584 - DNA, 120 bp, synthetic construct
  source 1..120: mol_type = other DNA
agggaggacaggtaggcaggctatgattgggtttcattaaacgctcttacctgatggaagaaatcatccatgaaatgatctttctcaaccacaacaactgtgtctccatcatcattcttc

SEQ ID NO: 3585 - DNA, 120 bp, synthetic construct
  source 1..120: mol_type = other DNA
tgggtcccctgtagctgtgtccagatgggattgtcttgtttttgtgtggcaggggctggggtggggtgggaaggaaggacttccaggccggaggggtttctagagctggtcattgctggg

SEQ ID NO: 3586 - DNA, 120 bp, synthetic construct
  source 1..120: mol_type = other DNA
tgatgtgaaaacactttctgttcagtttcggggcaagctgccctaactccagatccccacgcaattcagagtactttcttttctttgggttttgaaacagcaatgcagtttcctctctgc

SEQ ID NO: 3587 - DNA, 120 bp, synthetic construct
  source 1..120: mol_type = other DNA
ccttttgccacggtctgtatcaatgtcagcactttaattaaagagaaaaaggaagagggagttaagagaacagactccaggagtacatggctccttcctcagtggtgtgagcaggaatag

SEQ ID NO: 3588 - DNA, 120 bp, synthetic construct
  source 1..120: mol_type = other DNA
gtctgttacagacgaattctgaaagaagatgccaggtagggcacctcagggcctggagggcctcacaggaagggctcaggcctgtctgcctttaccaagtacatgttcactctcttaggt

SEQ ID NO: 3589 - DNA, 120 bp, synthetic construct
  source 1..120: mol_type = other DNA
ttgccgaccccattactgcgaacctggagggggctgtgaccttcgaggcccccgacctccctgaggagaccctcatggaggtgagggctggagtgagcaaaggttcccattctggctgga

SEQ ID NO: 3590 - DNA, 120 bp, synthetic construct
  source 1..120: mol_type = other DNA
gcccgggaaaggggaaggggtacctccccagggtgacacccgcctgggtaaggggaaggggcacctccccagggtgacacccgcctgggtaaggggaaggggcacctccccagggcggca

SEQ ID NO: 3591 - DNA, 120 bp, synthetic construct
  source 1..120: mol_type = other DNA
catctcactgtgggttgaatttgcatctccctggactgtggggagcacatttcatgagcttgctggcgcaggccagtcttctcctgggtagtgtctgttcatgtcgcgccctgtccttta

SEQ ID NO: 3592 - DNA, 120 bp, synthetic construct
  source 1..120: mol_type = other DNA
ggatgcgggaactccgctcagtctctatcaacccgaaactgctctgatggtcaggcctactaatgttaaaaatattaacccgaaaattgcaacggctctaagattaggtattttaaacgc

SEQ ID NO: 3593 - DNA, 120 bp, synthetic construct
  source 1..120: mol_type = other DNA
ttgataaaagactgtgagctgttcaaagcaactgactgccagttttaggaaaataaaatcagcaaactgcgtcagttccttccctcctggttctacagatgcatcttcttcacaaagtgc

SEQ ID NO: 3594 - DNA, 120 bp, synthetic construct
  source 1..120: mol_type = other DNA
ctgctggtggggccgaggggaaggggacatgtggagtcactgctggtgggcaccggtttccttttcgtgtcaatgagtggtgatggtcccacaccttgtgatgtactaaaatccactgaa

SEQ ID NO: 3595 - DNA, 120 bp, synthetic construct
  source 1..120: mol_type = other DNA
aaatgactttctttgtctcttcatacagtttgacttaaagtctgtttttatctgataagtatggctacctctgctcgcttttggtttctgtttgcctggaatattttcttctatcccttc

SEQ ID NO: 3596 - DNA, 120 bp, synthetic construct
  source 1..120: mol_type = other DNA
ctgtaaaagtatgactgtcaaaaaatataaattgttgagggataaatagtagtttggatacatgtgaaaagctaattaatttagagttagaaggttagattgagaaaattgaggaactta

SEQ ID NO: 3597 - DNA, 120 bp, synthetic construct
  source 1..120: mol_type = other DNA
gctataccataatcatgaattggaaaactcaagctataccataatcatgaattggaagactcaatactgttaacacatcagttctcctgaacttgatgtactgattcactgaaaccccaa

SEQ ID NO: 3598 - DNA, 120 bp, synthetic construct
  source 1..120: mol_type = other DNA
ctgacaaaggaggaggaagacggagaacaggtcacttgtcttccaagatggcaggacttactccaaaggtacagtagttaaaaacagtgtaacattaaccagggatggaaaaattaaaga

SEQ ID NO: 3599 - DNA, 120 bp, synthetic construct
  source 1..120: mol_type = other DNA
actcaacttccccttgtagtgaaaagaagctgtagatgctccataaataagcatggctctgttccagtgacaccatatgtgtgaagactgaaatgggaatttcccatggtttccatgtat

SEQ ID NO: 3600 - DNA, 120 bp, synthetic construct
  source 1..120: mol_type = other DNA
gaaggggaataagggtgacgtgggtcccactggtcctgaggggccaaggggcaacattgggcctttgggcccaactggtttaccgggccccatgggccctattggaaagcctggtcccaa

SEQ ID NO: 3601 - DNA, 120 bp, synthetic construct
  source 1..120: mol_type = other DNA
cagcaactccctatattacactgagatactttatataaataacgtgggcgaaacctgaagttcacaatgagcctgctaggtagctggtgtcaagtacaaatgataggaattgactttgcc

SEQ ID NO: 3602 - DNA, 120 bp, synthetic construct
  source 1..120: mol_type = other DNA
acactctgaataagcacttcattatcatgaatacccctctgctttagaccccacagatttatactggctcctcttcccagacgacttgaggacttaggaaagcttggccgccatcttgga

SEQ ID NO: 3603 - DNA, 120 bp, synthetic construct
  source 1..120: mol_type = other DNA
atgtgtcaagtggaatggaaaacgagttcaaggtagaaggaatgatacaaaatttttgactcttcaagaaatccttgtttctattcacactagcaaagacacggaatcaacccaaatgcc

SEQ ID NO: 3604 - DNA, 120 bp, synthetic construct
  source 1..120: mol_type = other DNA
ggcagttgattcaggaatgcacatggtgccccaggctggagtatcacctagagacagttcaaggattttttacagaaactaattgggggatggagctcttttgctgctgggtctcttata

SEQ ID NO: 3605 - DNA, 120 bp, synthetic construct
  source 1..120: mol_type = other DNA
gttgggattacaggcgtgagccacagcgccaggcccctcagtccaacttttattattaataaattcagacaagagaggaaaggaagacaacaaatgttaatactatgtgtcttctacatg

SEQ ID NO: 3606 - DNA, 120 bp, synthetic construct
  source 1..120: mol_type = other DNA
tattacagctacaaacttgacctttctgaaagcctgttttcattgtgtcactctgctcagaatctgcagtgatgcccttatttctcttccaggattaggtaactctacccagtcttcaag

SEQ ID NO: 3607 - DNA, 120 bp, synthetic construct
  source 1..120: mol_type = other DNA
gtggtgttttgctgtggcagcccaagctgaccaatacagtgctaccatgtgcaaaacttaggacaactgagggtttaaggtcatgtgtttattacatagaaatgctataccattccttag

SEQ ID NO: 3608 - DNA, 120 bp, synthetic construct
  source 1..120: mol_type = other DNA
agctgatgagcagcgcagtaattgcaatcaccccatggcatatgtgtgtcactttccattttggtaacatagtggagagagtctcttgttttaacccgtgttgtcataatgaagttcaca

SEQ ID NO: 3609 - DNA, 120 bp, synthetic construct
  source 1..120: mol_type = other DNA
actttatagggtttaagaacactgggtttaactagtgatatggtttggatgtgtgtccctccagatctcatgttaatgtgatccctaatgttggaggtggggctaatggtgttggatcat

SEQ ID NO: 3610 - DNA, 120 bp, synthetic construct
  source 1..120: mol_type = other DNA
caagatgagcatttttgtaattagggaaggtgattcgtcgtatttcccactgactgtcaagttgtacctaaagaggaaaacagggctgttccttgaagttcagtgaccctgttttagtca

SEQ ID NO: 3611 - DNA, 120 bp, synthetic construct
  source 1..120: mol_type = other DNA
tattatggagcaccatactgtggaatgtcacgtacatgactgaattatgtgactaaagagaacaatgaatatgagtacataatttacaaggatctctctaatcccttttccacttatttt

SEQ ID NO: 3612 - DNA, 120 bp, synthetic construct
  source 1..120: mol_type = other DNA
ggtgatgaccttactagagggtttagatgtatggattatgaatataggctgtaccattttacacccacaaggatggctatagtcaaaaatataacaattctgggtgaagatgtggaaaaa

SEQ ID NO: 3613 - DNA, 120 bp, synthetic construct
  source 1..120: mol_type = other DNA
tactttactcttcagaggctcaaatgcacagtttccgtgctgtctcaaggagctctgatcttgggaagcagaaaagagttacgccttttgacctttttcatcttgtccacattgaagtaa

SEQ ID NO: 3614 - DNA, 120 bp, synthetic construct
  source 1..120: mol_type = other DNA
cggtcttaaccctcaaaggctaacaagtgctttacttctacaaaacaaagcaaaaacagtgaagatctatctcctatttcaacctctggcaactctccaaacagcatcccctcataacct

SEQ ID NO: 3615 - DNA, 120 bp, synthetic construct
  source 1..120: mol_type = other DNA
cctctcacagtgcatctggcttggggtccacaattggtgacctggtctagttttaattggagatatcatattaaaagagaaaacatgatacctgtctcttctctagatagctcagagctt

SEQ ID NO: 3616 - DNA, 120 bp, synthetic construct
  source 1..120: mol_type = other DNA
tgtccctacaaaggacatgaactcatccttttctatggctgcatccaacttcagacaattttgcttctgtcatacctgaaggttgcccacagaagcagaaggcattattttaagaactag

SEQ ID NO: 3617 - DNA, 120 bp, synthetic construct
  source 1..120: mol_type = other DNA
atccacatattttacacttcctaaaaacctgtgaggaaaatgttgtctatatatacagttgtccccaagcatctgtgggggattggttccaggacctcatgtggataccaaaatccatgg

SEQ ID NO: 3618 - DNA, 120 bp, synthetic construct
  source 1..120: mol_type = other DNA
tgttctacactctgttcctaacacagtcatttgttttccgtaggcttgcaaccccaaatattcagactacgataaaacaggctctatctgtgcaagtgagaacatcaatgacactttgac

SEQ ID NO: 3619 - DNA, 120 bp, synthetic construct
  source 1..120: mol_type = other DNA
cacacacacacacacatatatatatatacacacacacactacgtgtatagaataaagagaaaaacatgaggaacggcactttacccaaccaatagcacctgctgcaaaacaaaatctagt

SEQ ID NO: 3620 - DNA, 120 bp, synthetic construct
  source 1..120: mol_type = other DNA
acatgtgccatgttggtgtgctgcacccattaactcatcatttcccaagtattggaagatatatggacatcagattcatgaagcttaaaagtctccaaacagatttaatccaataagcta

SEQ ID NO: 3621 - DNA, 120 bp, synthetic construct
  source 1..120: mol_type = other DNA
gcagctttaaaaggcaaactttgactcaaacttgttagtacagttttcatctttaaatatacatttttttcaatcataaattagagttgggcttgggggaaatattagaatttagtgtga

SEQ ID NO: 3622 - DNA, 120 bp, synthetic construct
  source 1..120: mol_type = other DNA
ggcagtgaggtatgtttttcatttaaacctaagatgtgtatccagagtgagttcctggtgcctgccgtgcacactttataaacaaagacttcattccatcaataaaaccctctgtctcct

SEQ ID NO: 3623 - DNA, 120 bp, synthetic construct
  source 1..120: mol_type = other DNA
taaccatgaaagaaaaagaaagccctgataaattagacctcaaaatttaaacttctgctcatcaaaagacatcactaagagaataaattagcaaggctcagattggaaggaaatacttgc

SEQ ID NO: 3624 - DNA, 120 bp, synthetic construct
  source 1..120: mol_type = other DNA
cttcattctgttcatacgatgtgtcacattgattcatttgcctatgttgaactatctttacatcctggggataaatcccacttggtcatgatgaatgatcaagtttataagatctggaac

SEQ ID NO: 3625 - DNA, 120 bp, synthetic construct
  source 1..120: mol_type = other DNA
ccttgactctccgggctttattatttattacactctatgctttaccttatcacgtgcctcctgttcatgttgcagccttcatcacatgttaatagctcaatcctagcatagtggacatgt

SEQ ID NO: 3626 - DNA, 120 bp, synthetic construct
  source 1..120: mol_type = other DNA
aagacatcagaccatcaatccagcttttcctgccagctggggaaacaacactcggtcactaacagcacccaatcacctagagagcgagagtgagccgaggcaaacacgccgggttccaga

SEQ ID NO: 3627 - DNA, 120 bp, synthetic construct
  source 1..120: mol_type = other DNA
tttgagaaatagggttaagagaatgtgaatacttacatggcctatgaaccacaagcagaaagcaggagagatccattctctggcatggattccacagtcaatccatatggcatttttggc

SEQ ID NO: 3628 - DNA, 120 bp, synthetic construct
  source 1..120: mol_type = other DNA
cgaagaggagtaccgatagtattttggtgtatttccattctgtctgtctctccccctcacatacacagatacatgcatgtctataaatacactcacacaggaacacagcttctgaaactt

SEQ ID NO: 3629 - DNA, 120 bp, synthetic construct
  source 1..120: mol_type = other DNA
tgtggcagtcacagtggctttgagggtgcaatattctctggtttcctcttactcgacatttacacagaatttgatatggttgataatgctctccttaggacactttgtcacttgcttgca

SEQ ID NO: 3630 - DNA, 120 bp, synthetic construct
  source 1..120: mol_type = other DNA
attggctccagttgagaaccatcttcctatgggaagatgagagcaataaaaaagatgactggctttggaattagagagagagaacctaggattaaatcccagctcctctgctgtttacta

SEQ ID NO: 3631 - DNA, 120 bp, synthetic construct
  source 1..120: mol_type = other DNA
gttcacactttagctccttaattggccatttcagtggctcacaaaacatttttttttctagaaattctgacctttgaatatacagtgtaaaattttgtaagtttttaggaacaaattcac

SEQ ID NO: 3632 - DNA, 120 bp, synthetic construct
  source 1..120: mol_type = other DNA
agggaaggttatctcttttgtccaaaatgagaatgttaataaacagaagaatcacaaagccaaacaccacagctctgccacacacagccccaaggccacatcgcacacacagtcccaaga

SEQ ID NO: 3633 - DNA, 120 bp, synthetic construct
  source 1..120: mol_type = other DNA
atttattttttaactccttagaggacttcaaggtgtttcccagtttcttacaccatatggcaactttaaaaatacaatgaagctggccgggcacggtggctcacgcctgtaactgcagca

SEQ ID NO: 3634 - DNA, 120 bp, synthetic construct
  source 1..120: mol_type = other DNA
ttggtcagaaaagccttcaactagatccggtaaaggtctggcaaacttaggtcactcaaagttcataattctttattacttgcatttggttagaaccagttgtgatgacagcatgtagtt

SEQ ID NO: 3635 - DNA, 120 bp, synthetic construct
  source 1..120: mol_type = other DNA
gtttattgcttactgcctacaatcaatatcaccttttgttcaatttaatcagtgacatcttaaattgattagctttatagaaatgctgccaaacaccagaaaccagtgccaagggactag

SEQ ID NO: 3636 - DNA, 120 bp, synthetic construct
  source 1..120: mol_type = other DNA
cctcaattcttacactgcacataaaaattaaaatgtatacagttctaaagaaaagaactaaaactataacatttctaaaggaaaagaagagaatatctgtgtgaccttgggttctagacc

SEQ ID NO: 3637 - DNA, 120 bp, synthetic construct
  source 1..120: mol_type = other DNA
gcataaagagaaaatctttaaagcagccagagaagagatatgcttaaaggaacaataaaattgatagtttccattctttgtgttgaaaagggctggggggtggggagggggaggtggtag

SEQ ID NO: 3638 - DNA, 120 bp, synthetic construct
  source 1..120: mol_type = other DNA
gcgcccggcctctgattgagtttttagttgtcttgttttcatcatggggtagttgctttttcaaggacacatgggtgctgtgtattctgtcttctttcatgtttaaaaatgtctattcgt

SEQ ID NO: 3639 - DNA, 120 bp, synthetic construct
  source 1..120: mol_type = other DNA
tacaacttcatatacaatgtaaaaaactgatgacagtaacatttcctttattccctctatgtcctttgtgattgttttagtataaatttttctatgtacatcataaaccccacaataaaa

SEQ ID NO: 3640 - DNA, 120 bp, synthetic construct
  source 1..120: mol_type = other DNA
tagattcaatcaatctgtaagaccagtccaaaggggaaatcctttgttgtctatatgctgtgatcaatgaactgagtgtgagtgcaactaaactcccatttgactcagtcattaatggat

SEQ ID NO: 3641 - DNA, 120 bp, synthetic construct
  source 1..120: mol_type = other DNA
aaactatttcatttagggacctataaaaacatacccaagtgactcacgtaagctttagcagacagagtagtctatggtcttataatgaagagcttataccccataaaacaatcctatttc

SEQ ID NO: 3642 - DNA, 120 bp, synthetic construct
  source 1..120: mol_type = other DNA
ctaatccttgtttccagcttccagatttagcctctcatgtcatcgagtcacatggagtaattaaaccgctctcaactcctagggaatctcacatgcaatacagagaatggaaaatccata

SEQ ID NO: 3643 - DNA, 120 bp, synthetic construct
  source 1..120: mol_type = other DNA
tgccttttaaacatatggggtaggcactgtattatctccctttcatagatgtgtaactggaggcacataaaggcaaatacatgctccagatgacaaaggtaatagtggcaagcagagact

SEQ ID NO: 3644 - DNA, 120 bp, synthetic construct
  source 1..120: mol_type = other DNA
tcatagaagagcagagtatggttaatagccaaaactgtcaatcatgttggatgctgctaagaggacaagtaaaatagggggtaaggtgtggctgttgcatttggaaaaacaaaggtcacc

SEQ ID NO: 3645 - DNA, 120 bp, synthetic construct
  source 1..120: mol_type = other DNA
tgatttttggtttagtcaccacgtgtcataagcagagctgaacagtaaagttcatggagaatgtatgttatctatccagaggagatgtaagaaaatcacaatgatgcacggtgagtcaac

SEQ ID NO: 3646 - DNA, 120 bp, synthetic construct
  source 1..120: mol_type = other DNA
gctttccagagtactgtgcatttaatatgtacatagaaagtgaggcttacattcacagcaatcagaacaaacaaagccacaagtgtgatattcagcaatgcacacagccctagagaagag

SEQ ID NO: 3647 - DNA, 120 bp, synthetic construct
  source 1..120: mol_type = other DNA
ccaaattccccagagaattttgtaaaattcccaatcttactgcagcttcctcttctgtctttctggtcctctctgttcaatatgcactgctcagtttccagacctgacaactttttgtct

SEQ ID NO: 3648 - DNA, 120 bp, synthetic construct
  source 1..120: mol_type = other DNA
agggggtgctttccagattgagggaaactttctttgtattttccctcatgttcattttagaataagtagggatgattatttatttagaaactgcattgtatggtgggaaaaaagcacctt

SEQ ID NO: 3649 - DNA, 120 bp, synthetic construct
  source 1..120: mol_type = other DNA
tgggtgaataatattccaacatatggacatactacattagttggtggaaatctgcagtgtttttaccttttacttgttaatacggcctctatgaacacttgtgtacatgtgttgttgctg

SEQ ID NO: 3650 - DNA, 120 bp, synthetic construct
  source 1..120: mol_type = other DNA
gtagctcccacgaccaagagttatccagctgaagatgtcaatactgccaagtgtgagaaatcacaatgtgtaaggtcatggtcaacagtgttagatgccctaagaatctgagaaaaggtt

SEQ ID NO: 3651 - DNA, 120 bp, synthetic construct
  source 1..120: mol_type = other DNA
aggctacttccagccaagcccggccctcagtgacctttccaatctctgctgcccacttcttccatttaaaaaaaaagattgtcgtatgccaggtgtaggggctcacacctgtaatctcag

SEQ ID NO: 3652 - DNA, 120 bp, synthetic construct
  source 1..120: mol_type = other DNA
tcccaacaaaatgcaccgtgacaactccccatcctgcatttaaagccacccttttgtaacaacagcaacatccacccctctaactttaatggaccactgacatccctaaggtagcacaga

SEQ ID NO: 3653 - DNA, 120 bp, synthetic construct
  source 1..120: mol_type = other DNA
aaagtgacacggaatatcattttaccccagttagaatggctatcattaaaaagataaaagaatagcaggtgttggtgaggatgtggaaaaaaggaactcttatagatagttgctgggaat

SEQ ID NO: 3654 - DNA, 120 bp, synthetic construct
  source 1..120: mol_type = other DNA
tttagtttagtcccagacccagaggaaaatccttcaaatttcttaagtaaatccttaaaaagtgtaatttacaccagagcaattgacctggtgtaaataaactgcagcatgagaagaaga

SEQ ID NO: 3655 - DNA, 120 bp, synthetic construct
  source 1..120: mol_type = other DNA
aggaaatcgcaagaccagcatttcagaagcgattttcttcaagaaggcttcccgcgaatcttgtcctctggcctttttagctgtggctttgagctgagagatgacgtggaccaaatggat

SEQ ID NO: 3656 - DNA, 120 bp, synthetic construct
  source 1..120: mol_type = other DNA
tccactgggggtcttggaatgtaaaccatctggagagggggacattagtttctctgttttggtagtaattgtatctttttatcggtgtattctccttagtttctgggccaaagagcaagt

SEQ ID NO: 3657 - DNA, 120 bp, synthetic construct
  source 1..120: mol_type = other DNA
ttaatatccagggtgtgtgtatgagtgagtgagtgtgtgtgtgtgtgtgtatgttctgtgtgtctttgtgttgtgtgtgagtgtatgtgtgagaacatgttgtatgtgtgtgttgtgtgt

SEQ ID NO: 3658 - DNA, 120 bp, synthetic construct
  source 1..120: mol_type = other DNA
tcagatacaggaatgtgcagctccagggagacagtgacaaagacttcccactgctttgtgttttctgaacgtttgtgctgctaatcatccacgtccacttagaaccctcaaatcagcgaa

SEQ ID NO: 3659 - DNA, 120 bp, synthetic construct
  source 1..120: mol_type = other DNA
gatgaactttgataaatggggtcagcttaaaataaagagaatggactaaacatgtaagttcctggtcgagtcccaaaattacatgaccccaggaaaagggtcaacagccaaagtgactgc

SEQ ID NO: 3660 - DNA, 120 bp, synthetic construct
  source 1..120: mol_type = other DNA
tatgaagattgttgaacccttggtggagataaggaaatgaaggcacagaaaggctaaacttgtctaaagtcatacaggtagtaaacagtggagacaggacttggaccaagacaggcattg

SEQ ID NO: 3661 - DNA, 120 bp, synthetic construct
  source 1..120: mol_type = other DNA
tttgagtgactctggaacatgccataaagatgcccatggtgtatttaaagctggaggatggacatctctgtcttggaaatgtggaagctacatatatatataggtgatggagtcacctct

SEQ ID NO: 3662 - DNA, 120 bp, synthetic construct
  source 1..120: mol_type = other DNA
ttctctctctcctcttcttcctctccctctctctcctcttcttcctctccctctctccttctcttttttctttctcctctttctcgctcctctttttcttctctctctctccttttctct

SEQ ID NO: 3663 - DNA, 120 bp, synthetic construct
  source 1..120: mol_type = other DNA
acccctcaggcctccttcatggtcattcctgccggcgcagccccaaccccaactactgtctatagttttaacttctggaaatactgcactatttattattatttcactttttattatttg

SEQ ID NO: 3664 - DNA, 120 bp, synthetic construct
  source 1..120: mol_type = other DNA
gattttgaccaagctacagacacagaaaaaggaagaaagagtaagatgggagtagacagggtgtgtgttggtggtgggggatgaggtgaccatgatacacaaagtattacatgttatttt

SEQ ID NO: 3665 - DNA, 120 bp, synthetic construct
  source 1..120: mol_type = other DNA
ctcggtggaacattgaatgagagttcaccattacaatgaggtacatttacaatgttaacaaatgaggataaacagtgatacttccctttgtgttatggggaggggggcgggcaagtgaat

SEQ ID NO: 3666 - DNA, 120 bp, synthetic construct
  source 1..120: mol_type = other DNA
taagagaccccaagaatctggaaaaagacaacaaatacctgtgttcttagtaataacggttttaatggtggcgattatcatgggagtggaggtgaaggaagatgcaagaaagatactcct

SEQ ID NO: 3667 - DNA, 120 bp, synthetic construct
  source 1..120: mol_type = other DNA
ctccctcttcctcttccttttattccttctcttcctcctctacctccttctcctccttcttcctcatctttgcctcaaacaattactaataacaagatcccttgaaaacgcttaccaatg

SEQ ID NO: 3668 - DNA, 120 bp, synthetic construct
  source 1..120: mol_type = other DNA
aagcctcttgttataaaagtggcagagtagataggaaatagggtcatcatactgaccttctgcagcaaaaacaataaagcccagtttgacttccattcctttttaagaaaatgcacttgt

SEQ ID NO: 3669 - DNA, 120 bp, synthetic construct
  source 1..120: mol_type = other DNA
taactgcgctgtgacagctcctgacagcagctatgaagtctcactttcaggcctttttctcttctatctgccccactggagcctctggaaattacaaaataagacattttaggaaaatgg

SEQ ID NO: 3670 - DNA, 120 bp, synthetic construct
  source 1..120: mol_type = other DNA
ctactgtactatctatcttgtgtatgcactactgtactatcttgtgtatgcactactgtactatctatcttgtgtatgcactactgtactatctggtgaaatgttttcttgttttctcca

SEQ ID NO: 3671 - DNA, 120 bp, synthetic construct
  source 1..120: mol_type = other DNA
aagtttatccctggacttatcatctcctgcattcatgagaattcccttgtcttgggtaacccctgtcagccccatggaatacttgctccaggacagcaggatctgttgagtcttgtcacc

SEQ ID NO: 3672 - DNA, 120 bp, synthetic construct
  source 1..120: mol_type = other DNA
tcccaaaggtcctgtgcctataacctgaatcgagaaggaaaaggtgatcatcccgtggcatgggaatggctagtcctgtatagtaaagcagtatgagtgaagaaatgtacatatttgttt

SEQ ID NO: 3673 - DNA, 120 bp, synthetic construct
  source 1..120: mol_type = other DNA
caaaaaaaaaaatgtagttttgaaagtaaccgtaactgatcatgagtatgtattgtgattaatcgtggaaattgaacctttgttgttcccacagggtcagcctgggccagtgggccccca

SEQ ID NO: 3674 - DNA, 120 bp, synthetic construct
  source 1..120: mol_type = other DNA
acacatgatcgtacactcatacacacacgtacatacccactcgtgcctatgcacgctcacacatgatcacacactcacatacacacacgtgcctatgcatgctcacacatacacatccaa

SEQ ID NO: 3675 - DNA, 120 bp, synthetic construct
  source 1..120: mol_type = other DNA
gcccttacgtgtctcctggtgaggaatacaccatctacaaagtagccttctccagaaatttagaactggattaagcctctacattcaactaccagtttgcaaaaaaacacacaggacaga

SEQ ID NO: 3676 - DNA, 120 bp, synthetic construct
  source 1..120: mol_type = other DNA
gcagcaactgtgggtcacttagaaaacagttcattcctaaactcactaaatagctaagctccttcaccaactcatactcacaggaataaacatgaggtgagggccacccaaagttaaaaa

SEQ ID NO: 3677 - DNA, 120 bp, synthetic construct
  source 1..120: mol_type = other DNA
gcttcctttcctggccccacgtctactggaattccactcctcccagctgtcttgcacccgctctctttccccttgttttctcttttccttcccaattagcaccgattttccttccccgat

SEQ ID NO: 3678 - DNA, 120 bp, synthetic construct
  source 1..120: mol_type = other DNA
tactttctctgggaattctttacagattaatcttcttccaaagacaaccctaacctgtgccttttcagcagttgtgctattttgcaggacgaattcgcacctgtttctgtgttgctctgt

SEQ ID NO: 3679 - DNA, 120 bp, synthetic construct
  source 1..120: mol_type = other DNA
tccggtcacggaagcgtcactcagagcagattctagaatcatttccagtcatggaagcattacttagagcagcgtaaatttcttagcaaccctggtgttgacatatgttgattataatga

SEQ ID NO: 3680 - DNA, 120 bp, synthetic construct
  source 1..120: mol_type = other DNA
gtcctacagattgggaaggaaggaataagactatctttgttcacaagtgatatgattgtccatgcagaaaatcccaaagaaccaacaataacaaaaaaacttctggatgttagaggcgat

SEQ ID NO: 3681 - DNA, 120 bp, synthetic construct
  source 1..120: mol_type = other DNA
ttgagtgcaggggaaagcacctagcagtatggagtgggaggaaagcacccagcagtgttgagtaggggggaaagtacccagaagtgttgagtaggggggaaagcacccagcagtgttgag

SEQ ID NO: 3682 - DNA, 120 bp, synthetic construct
  source 1..120: mol_type = other DNA
ctgacgcacatccttgctgtgttccctcggttgccatgtcagggtggcccattgagccagggatgttttccgaattgactggattcatgggagcttccctcgattttaaattaaaggcag

SEQ ID NO: 3683 - DNA, 120 bp, synthetic construct
  source 1..120: mol_type = other DNA
ccatgacgtgagtggcccctgtgacattagtggaccccgtggcatgagtggctgccatgacgtgagtggcccccgtgatgtgagtggcccccgtgacattagtggaccccgtggcgtgag

SEQ ID NO: 3684 - DNA, 120 bp, synthetic construct
  source 1..120: mol_type = other DNA
atccctacctcgtgccaagctcctgaggggtctgttccaggggagccagggctctccgtgtcccgacgcggttgcctcaccccatgcccctcaggaaatgctgaaatacagcaggaactg

SEQ ID NO: 3685 - DNA, 120 bp, synthetic construct
  source 1..120: mol_type = other DNA
tctgaaagactaaccaggcaacacactatttcctttttgatttgtctgatgtcatcagtccctcaagaggaaactcaaggaacatcaagaagctggaagaaaggaaaacagaccccctaa

SEQ ID NO: 3686 - DNA, 120 bp, synthetic construct
  source 1..120: mol_type = other DNA
tcgcgtgtgtgactatggaggtctcgtccatgtggctgtggcggtctctgtgtgactatggaggtctcgtctgtgtggctgtggaggtctttgggtgactatggtggtcacgtcccatgg

SEQ ID NO: 3687 - DNA, 120 bp, synthetic construct
  source 1..120: mol_type = other DNA
gaagctaccaggaaataatgtttctgatgtgcttatgctgttacatttcacaagtaaaaagctaacagacctgttacatgtcaactaaacaaactgaggccaggcgtggtggctcaagcc

SEQ ID NO: 3688 - DNA, 120 bp, synthetic construct
  source 1..120: mol_type = other DNA
tctgttcctgagcccatttctgggcctttatctgggtctgccactgggcctgtccctgagcctcttcctgggcccatttctgaacctctccttgaacctgtttctgggcctgtccctgaa

SEQ ID NO: 3689 - DNA, 120 bp, synthetic construct
  source 1..120: mol_type = other DNA
ctatccctctgtcccgtgtctctgcccttctgtgcctgcattccttgtccttctgccccgtgcctctgcctctgtgcctgttcctctgtgcaactgccctctcaggtgatcactgcacac

SEQ ID NO: 3690 - DNA, 120 bp, synthetic construct
  source 1..120: mol_type = other DNA
attctagaacaagccgtcgtcgtcgtaggagacgacagctctgtgccggttattccacctgaagaccttgcagtgggacaggatgcggacgtggaagacagcgacactgatggtcctgac

SEQ ID NO: 3691 - DNA, 120 bp, synthetic construct
  source 1..120: mol_type = other DNA
gtgtgcgtatgtgtgtgtgcatacgtgtgtgtgcatgtgtgtgcgtgtatgtgtgtgtgttcatgcacttttgcatctgagacacagccataccctctaggaccctgtggtcaggtggaa

SEQ ID NO: 3692 - DNA, 120 bp, synthetic construct
  source 1..120: mol_type = other DNA
cacagatctcaacagaactccacatcgtctggttttgtggagactttcatatgtcctgtcaagttgcctcatgcacctgcagactgttcttgggaagcaaacctggactgcaaaataaac

SEQ ID NO: 3693 - DNA, 120 bp, synthetic construct
  source 1..120: mol_type = other DNA
catgtgtaaaatcaggacgaaagaggaattgacggctgagtgattacagttttacctgggattgttacttggacaccatgactggtgtccccacatgattaaatggaactcactcttctt

SEQ ID NO: 3694 - DNA, 120 bp, synthetic construct
  source 1..120: mol_type = other DNA
acacacaacacacatgacacacacaccacacaacacacaaatgacacacaccacacaatacacaccacatataccacacaccacacacactatacacaacacacaccacacatatgacac

SEQ ID NO: 3695 - DNA, 120 bp, synthetic construct
  source 1..120: mol_type = other DNA
ggcttctgtgcaccccacgccgaaggcctcctgggctctgtccttctgcccacgcaccctgatatttccctctgctcctgggatcatggagaagcaaggcctctcctctgagccccgatt

SEQ ID NO: 3696 - DNA, 120 bp, synthetic construct
  source 1..120: mol_type = other DNA
gaggtgcagtcactggtcagggatacgagttcttttcggggaggcaagtgtgttctaagcgtgttctggatggggagaggtgcagtcactggtcagggacacgagttcttgtgggaagag

SEQ ID NO: 3697 - DNA, 120 bp, synthetic construct
  source 1..120: mol_type = other DNA
tcctctccacgctgagccctccgtggactaagaagccagaagaaaaaacttccgccctgttttcagtgtttctatctcacccagaattccaaagtcctgataaagaagctgttttaggaa

SEQ ID NO: 3698 - DNA, 120 bp, synthetic construct
  source 1..120: mol_type = other DNA
tcctggcactggcttcgcaggcaccttctcggcacatctctctcatttcttcttcactggctgactctgaactgagtgacctgcatggccatcctgagaggtgggcctctgcccgcacct

SEQ ID NO: 3699 - DNA, 120 bp, synthetic construct
  source 1..120: mol_type = other DNA
tataaagtgtgcagtgctctccatgatctgtggctactctggaactatgaactgtgcagagctatgtgtgatctgtggctactctggaactatgaagtgtgcagagctctgcgtgatctg

SEQ ID NO: 3700 - DNA, 120 bp, synthetic construct
  source 1..120: mol_type = other DNA
aactgcacatgtgtgcaggtattgttgccttgcctgtctgcacacacatgtacctgtatgttcatttcacacatgtattgctgggaacatgtgtgtacatggctatgcatacatgtgtat

SEQ ID NO: 3701 - DNA, 120 bp, synthetic construct
  source 1..120: mol_type = other DNA
gtttatgtgcagcttacaggcaggcatgcactgtctgctggtccctccctactcagccccttggccacatttcctgcacagtgcacgagctgggcaccgaggcacagacctacccagtgc

SEQ ID NO: 3702 - DNA, 120 bp, synthetic construct
  source 1..120: mol_type = other DNA
ctgggtttcaagagaggatgtggtgccggctttgattcttgatctttatcttacgactctctcaaatgtgggaggtttttcacgtgtattttctgaagagagaaaagaatcagttgtccc

SEQ ID NO: 3703 - DNA, 120 bp, synthetic construct
  source 1..120: mol_type = other DNA
atgtttcgaaggtacctggtttggggcaggcagtggctccctttatgcattaaacataaaacacagcactccagtgccttggaccgctccttttatccagagatccagtacaaagtcctg

SEQ ID NO: 3704 - DNA, 120 bp, synthetic construct
  source 1..120: mol_type = other DNA
cacctagaacaccaatagtgctgcgtggcagagggccgtccacccaaaacgcaacagtaccccagttacacgctcctggtgcaaatgaccctcctctcgtgcttggtgcaaaggctgtta

SEQ ID NO: 3705 - DNA, 120 bp, synthetic construct
  source 1..120: mol_type = other DNA
tgctgtccaacctcgcaccctccagaggtaccggcacctgcggggcatgacaccacatccccacgggaccccgtgtggccccttctgtcaacccatcggccagaggcccatccacacgtc

SEQ ID NO: 3706 - DNA, 120 bp, synthetic construct
  source 1..120: mol_type = other DNA
ccttctcccacaggagacaagtgaaagataagtgtgattttagatctttcttgtccatagttgttttcagtggagtcttccattctgtatcttaccctaagatctggttcttccctcccc

SEQ ID NO: 3707 - DNA, 120 bp, synthetic construct
  source 1..120: mol_type = other DNA
agctaaaacgcatgttttggatataacgactatgggcggggggtgatgtataaatacagatgagctcccaaatcatgtacccaacttatgtatgttgcttagtaattttataaaagtctc

SEQ ID NO: 3708 - DNA, 120 bp, synthetic construct
  source 1..120: mol_type = other DNA
atgtgtcatgctcttttgtaaacatgaatatgagatgccgttatctgggatatcctcttcatatcccagttgattcaccacattccattctgctacactatgtgccgccacagtgagatt

SEQ ID NO: 3709 - DNA, 120 bp, synthetic construct
  source 1..120: mol_type = other DNA
ggtactggactttagtctcaaagaaagtatataagtcgatgtcagaattagtagtggacaccagccttgcagctgctgaagcaaatatgaagcattcacaaaggaagctcctcttccctt

SEQ ID NO: 3710 - DNA, 120 bp, synthetic construct
  source 1..120: mol_type = other DNA
ctgtgctgacagacctggaaggagaggagtatggggtatacagcagagtagaaaatgtctccaggtgattctagagcaatccattgtctcctcccagcccaaacacatgtgtactgagca

SEQ ID NO: 3711 - DNA, 120 bp, synthetic construct
  source 1..120: mol_type = other DNA
tattggctgcctgtggactaccaggtactggacttcagtctcaaagaaagtacataagtcaatgtcataattagtagtggacaacagccttgcagctgctgaagcaactatgaagcattc

SEQ ID NO: 3712 - DNA, 120 bp, synthetic construct
  source 1..120: mol_type = other DNA
gcattgcatttggtgagacagctccctttggccacagatagtgctcaaggaagtactcagctgtgagctatcagcagccaacactcagcagctggaacaatgagcatcatgatcctgaag

SEQ ID NO: 3713 - DNA, 120 bp, synthetic construct
  source 1..120: mol_type = other DNA
cagaaggcttagcgggattgcacgaggttagttgctaagcaaggtggtctttggtcaactgccgcctggaccaaggcaacaggaagtgagtacctctattccggaaactagttatgaacc

SEQ ID NO: 3714 - DNA, 120 bp, synthetic construct
  source 1..120: mol_type = other DNA
gtcttccacagatgttcaaagtaactgaggatttggcctgtgtctcatagaagccacaagaaaggatactggagggggaactgagcacttaaagactcctctttttgcagctgcaattct

SEQ ID NO: 3715 - DNA, 120 bp, synthetic construct
  source 1..120: mol_type = other DNA
ggcccgcaccgcgtagccagtgaaggttggggagcaagcttatgcgggaaagagggagggggactccaggaaaagccgttgagaggaccatcacaacctgagcagcacaggtaggttccg

SEQ ID NO: 3716 - DNA, 120 bp, synthetic construct
  source 1..120: mol_type = other DNA
acacccccccccccacattttgacttttgttgtgtcattttacgtttttattttacctgtctcttaacaggttcttatagctattactgttttcgatagatttctcttttagacgtcatg

SEQ ID NO: 3717 - DNA, 120 bp, synthetic construct
  source 1..120: mol_type = other DNA
tgtgtgtctatatctcattgctccctctcctgctttctcacaaggatcacctaacttttcatgacctctctatctttcaagactcagcactgggagagtaacatttcattttgggaaatg

SEQ ID NO: 3718 - DNA, 120 bp, synthetic construct
  source 1..120: mol_type = other DNA
aagaacttccccactaccacctactaagtggcagacctgagatccatcagtctcaaaaactctgattatagagcttgtactcttacttgcaatgccatctggtgtaacatagtagtatac

SEQ ID NO: 3719 - DNA, 120 bp, synthetic construct
  source 1..120: mol_type = other DNA
ctacacacttgtgcacacacacaccccttcagggatatatattttattttttagtagaacttggaaatttgtcacttttggtttagaggtatgttccttaaataattttcccggttgatc

SEQ ID NO: 3720 - DNA, 120 bp, synthetic construct
  source 1..120: mol_type = other DNA
acatctaaatgtacaccttacaaattcacttctcaggatggcctgttgtcttccccactgtgaccctttcccctgcaagttcaatgctctgtttttggcaggcatttaaaaccctgaaga

SEQ ID NO: 3721 - DNA, 120 bp, synthetic construct
  source 1..120: mol_type = other DNA
ttttatggctgcatagtattccatggtgtatatgaggcagctgactttcaacaaagatgcaaagatagttcagtggagaataaaaatagtcttttcaacaagttgtgctggaacaatggg

SEQ ID NO: 3722 - DNA, 120 bp, synthetic construct
  source 1..120: mol_type = other DNA
caaccacacttacctggaaattggcctcagtaatagatgagaagtgctggttaatattctgttcctcctgagaagaaaacccaactggaagctgaggggagggggaaccctgtattcttg

SEQ ID NO: 3723 - DNA, 120 bp, synthetic construct
  source 1..120: mol_type = other DNA
taaaaaataaaaaaaaaagattgcatgccttcccttgatcctgcaaagccatgtcaggtgctgagagtctttcataggttttctctagggtggtgccctgatatggtcaagacgatgtgc

SEQ ID NO: 3724 - DNA, 120 bp, synthetic construct
  source 1..120: mol_type = other DNA
catacttactgagtgtctctactcagtgccagacacaagtataaggaatacagagctaattgggacatgacccttaggaaatatattcttgggatgggaaaggggagatagaaaatgagc

SEQ ID NO: 3725 - DNA, 120 bp, synthetic construct
  source 1..120: mol_type = other DNA
taaagttacttacctccattcctttgttcatactctactctttggaagtaaatcactaagtacagtccatactaaagaatgaagatgggaggttgttgagccccacctcctgaggggaga

SEQ ID NO: 3726 - DNA, 120 bp, synthetic construct
  source 1..120: mol_type = other DNA
ccagataagaagcttaagtcctccttctgcaggggagaatcggatgcaatgaaactaagacctgtggtcgttaacgcggttcaaagccgaccccaactgggacacggctcagcttagaag

SEQ ID NO: 3727 - DNA, 120 bp, synthetic construct
  source 1..120: mol_type = other DNA
cttaattattttgccttatttttatgtctttacattttagttctttacattttagttcctataagtctggtttttattgctttctgtaaaaggatgtactagactccaaattgagagttg

SEQ ID NO: 3728 - DNA, 120 bp, synthetic construct
  source 1..120: mol_type = other DNA
taatgtgttccatagactaatcatctgtcatcaagtaaaagactgacagtagtgaataaaatctgagttcattagccaaccactgttaacattggcagagtaatgcaaatataactgagc

SEQ ID NO: 3729 - DNA, 120 bp, synthetic construct
  source 1..120: mol_type = other DNA
acaggtgtgagccaccacacccaacctagtcttcaatcttggttttactctctctcaaattttaaaggaccacatattctttgcagccccttttgtcaagaacgggaatttatttccaca

SEQ ID NO: 3730 - DNA, 120 bp, synthetic construct
  source 1..120: mol_type = other DNA
catcatagaaaaggtagcacttacttctcactggcataggcacttgctctgaatataaatttgtcttccctgcctataatgcttctgccaaagccaccatgtgtgaacttatgagatgtc

SEQ ID NO: 3731 - DNA, 120 bp, synthetic construct
  source 1..120: mol_type = other DNA
cacaacagtccccagagtgtaatattccccttcctgtgtccatgtgaatagctaacatttatgtaagtgcttactctatccttggctctgctctaagcactttacatatactcactgatg

SEQ ID NO: 3732 - DNA, 120 bp, synthetic construct
  source 1..120: mol_type = other DNA
gccagagagatctgattgggcatcccaactctaccacttagtagcaaagcagtatgacagacattttttaccctctgagcgtgtaacctcctttgtgaaatgaaagtaattaaatttgcc

SEQ ID NO: 3733 - DNA, 120 bp, synthetic construct
  source 1..120: mol_type = other DNA
gggagatgttccccgtggtgtatcctcatggtaacaacgacaaaaaatgccggttgtctgtgttctcttttcactattcctaacatgtgtacatgatagctttgattctgcaagtaaaag

SEQ ID NO: 3734 - DNA, 120 bp, synthetic construct
  source 1..120: mol_type = other DNA
tcccccagatgctgttgttagtttcacttctcagctgcagctgcccacagctgtctggggatggagcagcagcaaggtagtagggtggtggcatctttttattcttccagacctgggcct

SEQ ID NO: 3735 - DNA, 120 bp, synthetic construct
  source 1..120: mol_type = other DNA
gaaaattggggagaattagttggtaatggatgagatcagacatctttagaaggaacatactgcagtaaatcatctagaaagctttagaacagtcaaggaaactagttcaggcttagaata

SEQ ID NO: 3736 - DNA, 120 bp, synthetic construct
  source 1..120: mol_type = other DNA
cccaatcctggatctatgctaacctggttccaaaggcccaaattttaccttgaaactaggtgctctgtatcctttgtcgaagccattatcctttttatatggctttaggaattccaagtt

SEQ ID NO: 3737 - DNA, 120 bp, synthetic construct
  source 1..120: mol_type = other DNA
acccgtcatgcctcaaacatgtataatttagagctgggtgcttcaattgagtgctgttacatctgaaaggtttataattttacagaattgatgcacacttctcatgaatgtcgtcaggac

SEQ ID NO: 3738 - DNA, 120 bp, synthetic construct
  source 1..120: mol_type = other DNA
aagatacagctcaaattttgttttagcatgtaaccactttgtctttgcctaaactaaatgagttcattttcttttcctcgaacaaatcatgctttctgccacctctaaatctttgcacac

SEQ ID NO: 3739 - DNA, 120 bp, synthetic construct
  source 1..120: mol_type = other DNA
cacacatgttgaaatatgataaactttaagcccagatgattaggcttctcatgtacagtaacatttgaacttttggaaggtcaacttgatcagcctctgtgcatgtctcctcatactctg

SEQ ID NO: 3740 - DNA, 120 bp, synthetic construct
  source 1..120: mol_type = other DNA
tttaggcactgattcatatgattatttatttttcggatggtcaatttcatagcatatgttttattgaattattaaactaattctttttctctggccatacaggaagattttcttgagtga

SEQ ID NO: 3741 - DNA, 120 bp, synthetic construct
  source 1..120: mol_type = other DNA
aggactggggcccagcctgtcttacaccaaagcccctacttcaaaagttgcatgtgacatgtgtacagcttgctctatatttgtgtgtttacatctttatctccagtcctaaatatgatg

SEQ ID NO: 3742 - DNA, 120 bp, synthetic construct
  source 1..120: mol_type = other DNA
gatacatcgctatatgcctcccatcttctatatttcctgcaaattggcaagtggatccacagataggatcagacccaggttccatttttctggcaaaactaatgtttgacaagactgtag

SEQ ID NO: 3743 - DNA, 120 bp, synthetic construct
  source 1..120: mol_type = other DNA
tatacttgtgttgctgtagagcccccccccacccccatctttctttaactcccaccttccctttaaaaaaaacctaacagcaatagcatggtatgattcaaaaactcattttgccactaa

SEQ ID NO: 3744 - DNA, 120 bp, synthetic construct
  source 1..120: mol_type = other DNA
tataccagaaacttggtccagggaaaccccatttccccaagtccttaaggatccaaagcctagctttcggtaggtcatttaatttctctgaacatcagtttccctatctggaaaataaga

SEQ ID NO: 3745 - DNA, 120 bp, synthetic construct
  source 1..120: mol_type = other DNA
caaagaaggtttataagtgcctacatcaaaaaagaaggcaagcttcccataaacaacctaatgatgcatactgaagaactagaaaagcaagagaaaacaaaaccaaaatttagtggatga

SEQ ID NO: 3746 - DNA, 120 bp, synthetic construct
  source 1..120: mol_type = other DNA
tctgatcatcaccactgttaccaacctccataaaattgctggttcaaaatttaaaagagccctttaagggagcaagctgagtagaatgactcaggaacccaacaacagagatttttcagc

SEQ ID NO: 3747 - DNA, 120 bp, synthetic construct
  source 1..120: mol_type = other DNA
gctaggataattaaactggcacagtcaatgcaaatacaactcctagaaaagttaaagaatactagctttaaagacacaggcaaaaagatcaggtcacgtaatgagatgaagggagcatgt

SEQ ID NO: 3748 - DNA, 120 bp, synthetic construct
  source 1..120: mol_type = other DNA
aaaaaaaaaaaaaaaaagtcaacctgaaccatgaatacatttctacgaaaatgcagcagcttctgcctaggggtgaagatgtacaaggtattattcattttcttccaccccttccccctt

SEQ ID NO: 3749 - DNA, 120 bp, synthetic construct
  source 1..120: mol_type = other DNA
cacaaaaatggagaacccctaagttaaagtaacttgctcacattgatgtagaaagtatggccagagctggcatttgaacccaggtctgtatggttccaaagccttgccttttcttttctt

SEQ ID NO: 3750 - DNA, 120 bp, synthetic construct
  source 1..120: mol_type = other DNA
attcctctctctaggcccaggcaggaaatcggggttaaccaggaggccctgtgaacctgcgcccggctgtccagccctcagacactgctttgcccagactctcgtacttctcacttggcc

SEQ ID NO: 3751 - DNA, 120 bp, synthetic construct
  source 1..120: mol_type = other DNA
ttctctgaaaacatttccatatggtaccaatccttcttccaccgtttgctttagtttcagtgcccatatcagagaagggtccatgtcatgaaggagtcaaaagcagtcttgaacaatcag

SEQ ID NO: 3752 - DNA, 120 bp, synthetic construct
  source 1..120: mol_type = other DNA
aattgccgatgtgttttagctcacttgccagtgcttgttgattgtcagtaattacatgaatctctcttgaaaacagttctgggagcggggagggatagcatttggagatatacctaatgt

SEQ ID NO: 3753 - DNA, 120 bp, synthetic construct
  source 1..120: mol_type = other DNA
ccagtctatcattgttggacattttatataatattcatattgtattaggtatcatgagtaatctagagatgatttcaagcagggttccccaaaccctgggccattgaacagtagtggtcc

SEQ ID NO: 3754 - DNA, 120 bp, synthetic construct
  source 1..120: mol_type = other DNA
gccacttacagtctcccagtgctaaggactctgacagtcttacctagccaggtgtggcaggcataaagagaagggtagtttaggtggttctcaggtggcaggaataaagagaagggtagt

SEQ ID NO: 3755 - DNA, 120 bp, synthetic construct
  source 1..120: mol_type = other DNA
gccttgggggctttgtcattcatgagagaaacaagtccatcactccttccagttagatatctgtgaaaaggtggaaaaagcaaagaacacttggaatttgggagagaaagagagaccatt

SEQ ID NO: 3756 - DNA, 120 bp, synthetic construct
  source 1..120: mol_type = other DNA
cactcgttgtcttggcttgtgctttctcctctccccatcggggatccgagactctgccaggattcacatgccactgaagcccactcagtgccctctggtgaccacacataccattccccc

SEQ ID NO: 3757 - DNA, 120 bp, synthetic construct
  source 1..120: mol_type = other DNA
gaaaagaaaacttagggaaaaggaagtcatttcctttgaggttttaagggggaaaaaaaagttgcattctgtagagctttgaacgagccaaatagaaccctgagcgccaactgccctgag

SEQ ID NO: 3758 - DNA, 120 bp, synthetic construct
  source 1..120: mol_type = other DNA
tcttctgtttaatgattgttgcactctcctacaaattctctttaaggaaattttcctagaagccttcttccttgaatttgtaagaaagtggcttttcagtgggttgacctcttggctttt

SEQ ID NO: 3759 - DNA, 120 bp, synthetic construct
  source 1..120: mol_type = other DNA
cggccgctgcctccttctccttcctgccttctcctcccaaatgagctgacatgtatgatgaatatatcagcacatgggttaagcaacagacagcattattaatattctcattacattatt

SEQ ID NO: 3760 - DNA, 120 bp, synthetic construct
  source 1..120: mol_type = other DNA
gttcactaggctcaacaaattcactttgcatagacagacagaagagagggaagggaaccgaggtgaaggcaataatgactccttcggaagataggttaagtcagaaaagaatttgggagc

SEQ ID NO: 3761 - DNA, 120 bp, synthetic construct
  source 1..120: mol_type = other DNA
ttcatgctagagaaggagccaactataaatgttatctcccatccctcccagatttagggccaggggtatattcaccaagacattcctgaatcacctgggatcttgtcccaaataatttaa

SEQ ID NO: 3762 - DNA, 120 bp, synthetic construct
  source 1..120: mol_type = other DNA
atcgaggatcggagccaccttacctccaacagtatactacctccctgatatcagtactattcgtactgtaaacacgactactgggaacgttaacaaagatgcattttcggaataaccact

SEQ ID NO: 3763 - DNA, 120 bp, synthetic construct
  source 1..120: mol_type = other DNA
tctttctctcctaggctgctccatcagctgtcatcattcctgccttgctttcaattcccttttaatttctattaacaggagagatgtgtcttcactgaaaactcagctatccagagaaaa

SEQ ID NO: 3764 - DNA, 120 bp, synthetic construct
  source 1..120: mol_type = other DNA
acaccttgggccctccagataacccgctgctccagcctggcagtttgtcaaccccctcacccagacccccaacacctcatgcctgtcttatgccatgagtctgaggcccctgacccctac

SEQ ID NO: 3765 - DNA, 120 bp, synthetic construct
  source 1..120: mol_type = other DNA
gcaaaataaaatattaaggtacataatctaagtggtaatactatgaagaaaaccaagagtgatacacagaaagtccaggatactggaaagagaggaaagggcacaggggtctgtgggacg

SEQ ID NO: 3766 - DNA, 120 bp, synthetic construct
  source 1..120: mol_type = other DNA
tggccacgaggggacaatcccatcaaaagtgtaaattttatttgatcatgtggcctctctgttgctaatctctcctggaaacatctgccacatttagtgtgtgtatgtgtattcattctt

SEQ ID NO: 3767 - DNA, 120 bp, synthetic construct
  source 1..120: mol_type = other DNA
tctgggttaatgaagcacctacctgttgatgttttctgtcatttagtccgctcatgccctgttctataaatgagattcaggcccctgtgatgggccagatgctagggacaaagaggttga

SEQ ID NO: 3768 - DNA, 120 bp, synthetic construct
  source 1..120: mol_type = other DNA
tatgaagggaaacatggcctctaaggtaaacccgaataaagttatagatgaatttataaagtaaacccagttttggacctactagaagaaaaaagcagaagtactacccaccccccgccc

SEQ ID NO: 3769 - DNA, 120 bp, synthetic construct
  source 1..120: mol_type = other DNA
aaaaacaagagtactgaacagcagcaagccgcccctgagccagatccctctacgatgactccacaggtaagaaagcatctgcctgaacctcatctttcacctagagggccctgaatgagc

SEQ ID NO: 3770 - DNA, 120 bp, synthetic construct
  source 1..120: mol_type = other DNA
aagccaatgttcctgtagttaataaatgttgttttgatgacagaggtgaataatgtggattaccaggaacatatgtgggttgaccacacagtcttatggctccagaaggcttccctttcc

SEQ ID NO: 3771 - DNA, 120 bp, synthetic construct
  source 1..120: mol_type = other DNA
ctggagtataaaccgtacatgcgattgccaaggctgtgcatgtctcatggttttaccccattcgggagaatgaagcaaacttctaagaggaccaggctgggcctggtggctcagtcctgt

SEQ ID NO: 3772 - DNA, 120 bp, synthetic construct
  source 1..120: mol_type = other DNA
acttatttgtatctgccatgagctactgagcttaggggcagggtccctgttgtgtttgactcagtagatgtgtagtaaatgaaataagtaagcgaatagtaacaacttctcatgtgcagc

SEQ ID NO: 3773 - DNA, 120 bp, synthetic construct
  source 1..120: mol_type = other DNA
agcctccctttcctcctccataaaatgggaatcataatagtgcctatcttcatcttgctcccaatcttcagggaaagctcctagagttatactgtgaagtctgattgttgattggagata

SEQ ID NO: 3774 - DNA, 120 bp, synthetic construct
  source 1..120: mol_type = other DNA
cggcatttgggaggtctcaccgggtaactgaatgttttccccttttgtcttgggggtggttttgcggaagcctgggtagaagttctggactgtccaagggtgccaaggataggtaacacc

SEQ ID NO: 3775 - DNA, 120 bp, synthetic construct
  source 1..120: mol_type = other DNA
ttgtcccacaagagcctttttgtttctttgtatctttctgcatcttgtcctaaaagttccatccagccttctagagggaggaaccatgaggccttatataactgactccaacacaaaaac

SEQ ID NO: 3776 - DNA, 120 bp, synthetic construct
  source 1..120: mol_type = other DNA
aagcttccaggcctcattcctgtccttctctctctccctccctgggggcttttccaaccctttagagactgaatggtctggagggataaggaaggccatagctgaggtccaggaaggtgg

SEQ ID NO: 3777 - DNA, 120 bp, synthetic construct
  source 1..120: mol_type = other DNA
cacttccccccttcgcacatgtgtgcacacacacacagagaaagaaaccaaatgataaaaagccagagaaactctttttctgattatttttccttttccagacagggacatcgatatatt

SEQ ID NO: 3778 - DNA, 120 bp, synthetic construct
  source 1..120: mol_type = other DNA
caagggcttcacaagtatcacctcatttaattttcacaatgggtcttggagaagagctaatgttattattgttgccttgttacggaagagggaactgatacatggaaaggtgcccagtct

SEQ ID NO: 3779 - DNA, 120 bp, synthetic construct
  source 1..120: mol_type = other DNA
ctgggtgccatagctccagataataaaaactcagcctcagcagtgattgataaactgctctgtgtgtaatgataacatggggaatttcctgccaagatgaccaatcaaagaggaaacaga

SEQ ID NO: 3780 - DNA, 120 bp, synthetic construct
  source 1..120: mol_type = other DNA
ttgggaacttctagcaggtgggcagatcactgctattggtgataaggcaacactttaaccaaagacttgagacacactctgtctctgcaaaaggaagaactgcagtattattttcacctt

SEQ ID NO: 3781 - DNA, 120 bp, synthetic construct
  source 1..120: mol_type = other DNA
ccccccccccccccccagctatcttattccttatctgatgaattatctcaagtgtatcaaactagttgacatggtcaccacatcctttactcattctcttttgctaattactttcctttc

SEQ ID NO: 3782 - DNA, 120 bp, synthetic construct
  source 1..120: mol_type = other DNA
ttcttctgtttacaaagaaagatttatctgtactatgtgatgctgtttgatagcattttacccaaagcaaaattttcaaaattggagctaatcctgttaagcccagcagctgcttcatca

SEQ ID NO: 3783 - DNA, 120 bp, synthetic construct
  source 1..120: mol_type = other DNA
gtatataaaagaaaaaaagaattagtggctcttgcagttgttcaggcaagagatgaaggaggcttgcccttggatgaatggcaagattctgtgtgtggtatgaaagtctagagcttcctt

SEQ ID NO: 3784 - DNA, 120 bp, synthetic construct
  source 1..120: mol_type = other DNA
ggtgacgatggtattaggaggtggatgctgcctcacagaaacttttatcagcaagaaagtgtgggaatgtgtttgtgcatttgagaagtaagacaaattagaccagagggaaaaaaatga

SEQ ID NO: 3785 - DNA, 120 bp, synthetic construct
  source 1..120: mol_type = other DNA
gcaacatataatatttctgtgacaaatagactcagttctccttctacttcattttcattctactgctccggtgactcgctcattaaaggttgacctccccaggtgtttcatcctttgtcc

SEQ ID NO: 3786 - DNA, 120 bp, synthetic construct
  source 1..120: mol_type = other DNA
aggctgggcttctgataggagtgctttatttggttcagcaactagattaacctttccctggtgtttgcctaaaatcttgctttgccctgcttctatgagaatggaaataggttgtcaaaa

SEQ ID NO: 3787 - DNA, 120 bp, synthetic construct
  source 1..120: mol_type = other DNA
ctgctggtttttactgtcatctttaagagactggcaaggacgggttcttgctgcccccaaagagcattttttttgcatgttgatttatactcaggcttttgaagctatggtctcctttaa

SEQ ID NO: 3788 - DNA, 120 bp, synthetic construct
  source 1..120: mol_type = other DNA
ttctcttctccacccaacttggatcccatattcaacactgctctttagctaacagactcaacttcctccccttttgtcttttcctggagctacctggaaatatccctgtataatattcct

SEQ ID NO: 3789 - DNA, 120 bp, synthetic construct
  source 1..120: mol_type = other DNA
cactcgctaagtgtttatggaataaccagatggatgagtgacaacagccaatgaataaagtaactgttaagattgtaggcatcctgatagtcatgggaaggagtggtgtgtgtcagctgt

SEQ ID NO: 3790 - DNA, 120 bp, synthetic construct
  source 1..120: mol_type = other DNA
tcacccaataaggcccattagcacggttccccttcttctggctaatttgcataattattcactgcctttttcctagaaccaaatcatggtaatgattttctcaagtaagcgtcccataat

SEQ ID NO: 3791 - DNA, 120 bp, synthetic construct
  source 1..120: mol_type = other DNA
ctaaatggagggtggagaaccaccctctttgttaaagggaaacatcacaggaagggaaaggagttgtaaacagatacatttattgaactatctctgtacagaggacatgacttgtggtga

SEQ ID NO: 3792 - DNA, 120 bp, synthetic construct
  source 1..120: mol_type = other DNA
tctaataaaatattagattttattagatctaataataaatctaataaaatattagattttaaatctaaatgttagtaatccctgctctcttttccccccccactcagtgtgggtagtagt

SEQ ID NO: 3793 - DNA, 120 bp, synthetic construct
  source 1..120: mol_type = other DNA
gcatatatgtcacatatatttataacacatatatgtcacatatatttataatacataaatgtaaaaaaatatgaatgtaaatacctatgagacaagtgccctgctggcctcaatcaagtc

SEQ ID NO: 3794 - DNA, 120 bp, synthetic construct
  source 1..120: mol_type = other DNA
atacaccagacactggggcatacaggtacagatctgttcccacgcaaaattgaccaaaattcctgcccaagtggaacttaggttctactgatgggagacaactgtaaacaaattaaataa

SEQ ID NO: 3795 - DNA, 120 bp, synthetic construct
  source 1..120: mol_type = other DNA
ggacgtttggacaggcattgtctgtgacaacggtggcattggaaggccctggcagctgaacgcccagcctcccaccctccatgtcctcacactccccatgcacaaactctgcaggaagca

SEQ ID NO: 3796 - DNA, 120 bp, synthetic construct
  source 1..120: mol_type = other DNA
gcttcaacacagggcagctctgcagggggcaaacacaggaagccacagtcaccacagtgagcccataaaggaagacagtcccagctacctgtgtgtgcgaggagtggggtccattctaga

SEQ ID NO: 3797 - DNA, 120 bp, synthetic construct
  source 1..120: mol_type = other DNA
gcaagtttaatgttttatattattttatcccagcttttaaaaaagcacgacatccaggtactgtggtatgcacctccagtctcaattacttgtgaggctaaggtgggaggatcgtttgag

SEQ ID NO: 3798 - DNA, 120 bp, synthetic construct
  source 1..120: mol_type = other DNA
gcatattggagaaacagcaaagaggccagcatggctagagcagatcaagctgggaaaatcaggtcagacgtaatgtcaaggccaaagtccaaggaggactttataaaccattgcaagaat

SEQ ID NO: 3799 - DNA, 120 bp, synthetic construct
  source 1..120: mol_type = other DNA
gtcaaattttatttttagatgttagcaaattgccttttaacatagttgcactaattttccaacagataatggaagaaggtactctttccccatgtatggcattgccaatctcatagatga

SEQ ID NO: 3800 - DNA, 120 bp, synthetic construct
  source 1..120: mol_type = other DNA
ccaaagtgctgggattaccagcatgagccactgcacccagcagacttcctccttcctataaggagaccagtcatcagattagaactcactctaatttagtatgaccttaccttaatttga

SEQ ID NO: 3801 - DNA, 120 bp, synthetic construct
  source 1..120: mol_type = other DNA
gaaatactctcactgccttaaatagaagcaaaccatctggccagttggagaaagtttacacaaggaggactgggttgcactcggtgcattttaaagaaagcccggcggacacacgggttc

SEQ ID NO: 3802 - DNA, 120 bp, synthetic construct
  source 1..120: mol_type = other DNA
ggtttctgcaggaggtgtactgtttacgcgacatctcccaggctgtctcattgtcaagagtggactttcatccccaaaacgttcatcaggaaagaatttgtgaggattctaaaaaagatt

SEQ ID NO: 3803 - DNA, 120 bp, synthetic construct
  source 1..120: mol_type = other DNA
gggtttctcaagactcagagaccctgcgaaatgaaattaaaatggggtcattctcgggaaaaagaggcctcgtatctttcagataaacatttcagtatctcttgttggagtgggggaagg

SEQ ID NO: 3804 - DNA, 120 bp, synthetic construct
  source 1..120: mol_type = other DNA
ggacacgcagaagcgcctcgaggccttctgccagatgatccaggctgtccaccggagcctggagtctctggaggaggaccacagggctctcatgttggtaacagctgcttgaagtctgct

SEQ ID NO: 3805 - DNA, 120 bp, synthetic construct
  source 1..120: mol_type = other DNA
tctcagaaagagaaaggagaaatgggaaggaagaattatttaaagaaatactagccaggacaaagcatagatctaagaagaccagaggactcagagcaggataaatgcgtgcgagcgcac

SEQ ID NO: 3806 - DNA, 120 bp, synthetic construct
  source 1..120: mol_type = other DNA
gaccttcacagtgcccagaccccaagataatgcagccattcatggaactgcagttgttcattggtcgcctttagttttccaaaataagtgtcatctttagctgaaatcattcattaattc

SEQ ID NO: 3807 - DNA, 120 bp, synthetic construct
  source 1..120: mol_type = other DNA
tcagatttcctagagttaagggtttaattgacactagcttaggtgacactcaatagctatatatgtgatgacaaattgagaagaacatgcttggagcaaatgtcctggccacactgccag

SEQ ID NO: 3808 - DNA, 120 bp, synthetic construct
  source 1..120: mol_type = other DNA
ctcatcaccattcaccagcaatttccacaacagaagagtaatccctgttggctgaaagcctatagcatattatgcatcctccctgactgaccaactgaaagtgtttaatcctgtatttca

SEQ ID NO: 3809 - DNA, 120 bp, synthetic construct
  source 1..120: mol_type = other DNA
tgtgttcactcaccaaagtctttagacactgattttataaaacaggctgattataaccatgaataagtactcttggctgcatgtatttcagcagtgacttcgggagtggagggtgggggt

SEQ ID NO: 3810 - DNA, 120 bp, synthetic construct
  source 1..120: mol_type = other DNA
cagttcttacagtgcctaaactgcttgtccagagtgaagtggacaatccatgtgaatttccatccttgtgttaaggcccattaccagcttcttggtttcaggtactagatcattaaagat

SEQ ID NO: 3811 - DNA, 120 bp, synthetic construct
  source 1..120: mol_type = other DNA
atcactgttgagccgtcaaaataaagaaaaggaaaatgaaaagtcagcctctccctcagtgtaccagccaatacttcagccaaccacaggttacctgtctttcaagcaaaacatgaacaa

SEQ ID NO: 3812 - DNA, 120 bp, synthetic construct
  source 1..120: mol_type = other DNA
tcctgagagatgtacccctagctccacttaagggcgaaaattccaaaccacctgattttcttggccaggactctgcaacagtaagagagttacaaaatcttctccaatggagaatgcatt

SEQ ID NO: 3813 - DNA, 120 bp, synthetic construct
  source 1..120: mol_type = other DNA
atagagtgcattaactttgctcattctacctactagctccttgtggaaaatcacttaatgtaaaggatatgaaaagtcttttccaggctgggcatggtgtctcacgcctgtaatcacagc

SEQ ID NO: 3814 - DNA, 120 bp, synthetic construct
  source 1..120: mol_type = other DNA
gaagggagagaggaaaaaggggaaagacagggtgttaatagtcaaaagggagagagagagagagacaggctgaccaagtggggatgaatgaggcccccacgcagtttgggaacatcaagg

SEQ ID NO: 3815 - DNA, 120 bp, synthetic construct
  source 1..120: mol_type = other DNA
caccacactaggccagctcgtcaatttctaactttgaaaagcctgttaggattgtaagagggattatgtttaatttacagatcaatatgggggaaattgccacctggacaatagtggctc

SEQ ID NO: 3816 - DNA, 120 bp, synthetic construct
  source 1..120: mol_type = other DNA
ccttcctctcccccttgctccttcctttttcccttctcttcttctttcaccccttcctctccccctgctccttccttcctttttcccttctcttttcctccctttccgtttcccatcctg

SEQ ID NO: 3817 - DNA, 120 bp, synthetic construct
  source 1..120: mol_type = other DNA
gttgggaagcatcccggtcaccagtgggaaggagcagctggggtgcggggcctcgtgcaccctcatcaggaccttggcttctgccatgaggtggatgggagcccctggagggatgaatgg

SEQ ID NO: 3818 - DNA, 120 bp, synthetic construct
  source 1..120: mol_type = other DNA
catacacaaaagttgagggaatcaagagccccccaccacacagctttatcaatatgtggacaatgttatttatattttctttcctacctctccacccccaccagattatcttgaagcaaa

SEQ ID NO: 3819 - DNA, 120 bp, synthetic construct
  source 1..120: mol_type = other DNA
cggggccccctctctgcagtcacacactctgccctcttagctgggcctagagctttaaacattaactggattcaacatacgtttttctgactttttaaatataatgagtatagttttatt

SEQ ID NO: 3820 - DNA, 120 bp, synthetic construct
  source 1..120: mol_type = other DNA
caaccatggcatgggagcgtctggatctgtgggcggacagcatatctctgggtagttggtgcagctgtggcagaaatcaggcccctggggaagtcctgtgacatggatgcttccctgaag

SEQ ID NO: 3821 - DNA, 120 bp, synthetic construct
  source 1..120: mol_type = other DNA
atcaatggggcaaagtcataccccagaaatagacccaattacctatgaaaaaaatggcaaatgatgagggaggtatctcaaaaatcaaggagggaaaacgactatacaatgagtgatgtt

SEQ ID NO: 3822 - DNA, 120 bp, synthetic construct
  source 1..120: mol_type = other DNA
ttagagatgcgtatggaggttttacgttagagatacgtatggaggttttacattagagataggtatggaagtttctataaaaacaggttgcagccagcagggctctgaagggtgtcactt

SEQ ID NO: 3823 - DNA, 120 bp, synthetic construct
  source 1..120: mol_type = other DNA
ctgcagtcacggtatccacgcacaaggccgagctgcacaccgctgagggtcggcggcctccccacccatcgcccacagtcacggtgtccacagctgcaggcactcggtgtacgcctggct

SEQ ID NO: 3824 - DNA, 120 bp, synthetic construct
  source 1..120: mol_type = other DNA
agaacttaaaagtataatttaaaaaaaaccgaagtatagaaacctgtaggttctggataagatgggaagagatggacatctccatagcctgacggaggggagctctcaagagcttgcagt

SEQ ID NO: 3825 - DNA, 120 bp, synthetic construct
  source 1..120: mol_type = other DNA
tacactgccgcaggggctgcagaaatgcgtggaatccttgcgtaccctttaggaaccctcgctttagaggctatggcataagaagactggaatgatgtgcagaacttgcatttacagatc

SEQ ID NO: 3826 - DNA, 120 bp, synthetic construct
  source 1..120: mol_type = other DNA
ccaccctatgacagcccagctctggggacctccactcaatgacaacctagctctggggacctccaccctatgacagcccagctctggggatatccacccgatgacagcccagctctgggg

SEQ ID NO: 3827 - DNA, 120 bp, synthetic construct
  source 1..120: mol_type = other DNA
cagcatggaccggggcgtcagagtgcaagatgtgagacctatgtgcgcgcggggcggcggcagccggtcaaggggcagcaggaaatcagacctcaaaggtggccggggacagattccaag

SEQ ID NO: 3828 - DNA, 120 bp, synthetic construct
  source 1..120: mol_type = other DNA
aaaaataaagaaatagagagtcatactgtcttcaaggaatagaagacccaacgtggtaaacatgtcaacatgtaaattctccataaatttatatatggattgtgtgtgtgtggtctgtgt

SEQ ID NO: 3829 - DNA, 120 bp, synthetic construct
  source 1..120: mol_type = other DNA
ccatgagaggcttctggaaaagctcgctgagaacctgctcccagctgttgctttcctgccatttgctcccccaactgcacaaatgcttatgcaagactcacattgcctgttccataattc

SEQ ID NO: 3830 - DNA, 120 bp, synthetic construct
  source 1..120: mol_type = other DNA
tcttcattctgttttctttctgctggttttgagagtggatcatctttactgaatgatcattaagttcactgattattctatcagctcaaatctgctgttgagttcctccagtaaatgtct

SEQ ID NO: 3831 - DNA, 120 bp, synthetic construct
  source 1..120: mol_type = other DNA
agaggaagctgtctcaatttcaaatttctgcaacatctctcatatttgcattgttatttctctgtgttttttttttatttgtttgttcaagaacaaagcactgggcctgggtagaccaga

SEQ ID NO: 3832 - DNA, 120 bp, synthetic construct
  source 1..120: mol_type = other DNA
gagcaccgtgcagccagccagaccttggatcgggacagaaaagacagaccggggaggggaaacaaggtcctggctgggatcacactaaaagaaatcgggagtgcctggggtgaagacagc

SEQ ID NO: 3833 - DNA, 120 bp, synthetic construct
  source 1..120: mol_type = other DNA
cattggaggtgaggagcacctcaacttctggcgtgtccagagaactggagaaccgcttggtgtggagaacccgcacatctggtgtgagaggtgtgcgagcagaggcacaagagttttcct

SEQ ID NO: 3834 - DNA, 120 bp, synthetic construct
  source 1..120: mol_type = other DNA
ccctgccctaatggcatttaatacatcttattacttgtcgatacctggaaagctaatcccaatatataaattctatgtgttcgtgaatacataggaaggacatatttctactgtaaagaa

SEQ ID NO: 3835 - DNA, 120 bp, synthetic construct
  source 1..120: mol_type = other DNA
aggagggcctggagccatgttgttgggagaaagactgaaagcacatgtcaagcaatgtcaacacagagaacatgctcaggtcctaattcaaaattaccacctaaaaaaggcatttttgag

SEQ ID NO: 3836 - DNA, 120 bp, synthetic construct
  source 1..120: mol_type = other DNA
gcgccctcactgggctcaccaccaccagacatcaccttcactacctgataccctgcctggataacaccactgtaacacaagaaacaggtctagaatctaacatgtatgctacacctgaag

SEQ ID NO: 3837 - DNA, 120 bp, synthetic construct
  source 1..120: mol_type = other DNA
gaagcaaaacctgcagagctgagagaaaataatccataattagcatgagagatttcaatcctcctcagaagaaagaggaactaagcagtgaaactgctcttcatgcctccccagcacgat

SEQ ID NO: 3838 - DNA, 120 bp, synthetic construct
  source 1..120: mol_type = other DNA
accatactctatatacatatcacagcacccataccacacaccgcattccacacagacatcttatacacaccacacacactatacacataccacacaatagcatatatacacacaccatgc

SEQ ID NO: 3839 - DNA, 120 bp, synthetic construct
  source 1..120: mol_type = other DNA
attcgttctggaaattttgtagctaatatctcttcagatattgtatcttcgctattctctttgccagggactccagtagctgtatgtttgtccttcacattccatcctccaaatgtctta

SEQ ID NO: 3840 - DNA, 120 bp, synthetic construct
  source 1..120: mol_type = other DNA
ttttgtttcagtgcaatcactgcaagttcacgacatgccaggagctgaaagtttcagaatctgggctctgcattctttttctttaagctaatcagcaggagcccctgaatatccaattcc

SEQ ID NO: 3841 - DNA, 120 bp, synthetic construct
  source 1..120: mol_type = other DNA
tactgttcaagggtcagctgtacaaaatgaggacaagacgtagtacccattccccagggtttactgctaggcttaaataagttgatatgaaacactgttagaatcgcgtctggcaaaaaa

SEQ ID NO: 3842 - DNA, 120 bp, synthetic construct
  source 1..120: mol_type = other DNA
cttccctccctcactccctccctctttctctctctcttttttccttttattgagatataattcatgtaatacataatcaacccatttcaagtatgtgattcaggccaggagcagtggctc

SEQ ID NO: 3843 - DNA, 120 bp, synthetic construct
  source 1..120: mol_type = other DNA
tctttcttccctccctccctccttccttttctcttggtgcaagagaaaaccctttcccagtagtccacagattccctggttcctactcctcatgagcccctacagtggcacttgggatct

SEQ ID NO: 3844 - DNA, 120 bp, synthetic construct
  source 1..120: mol_type = other DNA
gtgacacaaggaaactcactgcaaatggtcttaatgggtctgtttaagagtatttaaatacactcatctctctaaaggaagaatgtgtcttcctgaatgaggccaggcgagagggagtat

SEQ ID NO: 3845 - DNA, 120 bp, synthetic construct
  source 1..120: mol_type = other DNA
gagacccttaaggtccacaaaattgaaaagatgtacttcctggaactttatggaaaaagcttgcagaccccattacaggcaatggaaaattttatgctaggaagtatgtaattaatttta

SEQ ID NO: 3846 - DNA, 120 bp, synthetic construct
  source 1..120: mol_type = other DNA
ccctgtgcaaacatgcaaggtttctctaagacagacatagagaagtagatttgttagtgttatcaggtagacatagttttaatttatttgagactgtcagtcctccacaatgatagtata

SEQ ID NO: 3847 - DNA, 120 bp, synthetic construct
  source 1..120: mol_type = other DNA
aacctctgcttaaaggtcagttcctaagagtatccttgtctggacccatggatcttaattagaccccatcagagcagctccacagcactcatcacattatatttattggctggttatttt

SEQ ID NO: 3848 - DNA, 120 bp, synthetic construct
  source 1..120: mol_type = other DNA
catgctacaccttttgataagctagtagcaggagcagccttgtgccctttccatactgcaccactcaacgaatgctggctgcagagcacacatggaataaaaaccctaagctcccccact

SEQ ID NO: 3849 - DNA, 120 bp, synthetic construct
  source 1..120: mol_type = other DNA
gcctggccagtgttcttccacactcatctccatgatattcgaacctgtaccaaacatatatatttatatattgggaggggtgatagttgttttacaaaacctgagagcattttatgtatt

SEQ ID NO: 3850 - DNA, 120 bp, synthetic construct
  source 1..120: mol_type = other DNA
ctctctgtctctgaattctgtccactcccttcctacttggaaacaatagcctggtagaaggtcatgcaatttcacatgacttccgaggatgattgggattcttgtttgacatctatttct

SEQ ID NO: 3851 - DNA, 120 bp, synthetic construct
  source 1..120: mol_type = other DNA
cccgttttggttaacctggataaatgcgcgtattttatttctgttttcagctgattggtgattggttctgtctaaaggcatggttctgctttctctactaatgtggccttgtttttccct

SEQ ID NO: 3852 - DNA, 120 bp, synthetic construct
  source 1..120: mol_type = other DNA
aactttcctctagtgcttagtgtcatagctcttccatacccatctgtaggtgtttggattctaccactggtgggcacccttctgaattcaaacaaacttactctctagtatgacaatgta

SEQ ID NO: 3853 - DNA, 120 bp, synthetic construct
  source 1..120: mol_type = other DNA
caacgaaaacaagtaagagtctgcactggaacccaggtgttctgtatccattgcctatattcttaacgaatacactgtaatgcctcccaattaatatgagagattaagggctgaatgtat

SEQ ID NO: 3854 - DNA, 120 bp, synthetic construct
  source 1..120: mol_type = other DNA
atcttatgcaggataattccttcttttatttctgttcagatgtttagcatccttggctcacagttacctaatgccaagagcctgccattcctcacctctatcccggtcatttgaaaacct

SEQ ID NO: 3855 - DNA, 120 bp, synthetic construct
  source 1..120: mol_type = other DNA
catacaacatcagcatctgctggcagatgacaaaggctaaatgggaccagctacaagtcagcagatgccccagctggcttcccatatccacagaccaagcaggacaagatacgcctctga

SEQ ID NO: 3856 - DNA, 120 bp, synthetic construct
  source 1..120: mol_type = other DNA
caggtttggctttgtgaaacatggatgaatctcatggttgttccacaataaaaggatattacaattctaaagactgcccctcaccgccctagactgatatttctttttcccctagcatgg

SEQ ID NO: 3857 - DNA, 120 bp, synthetic construct
  source 1..120: mol_type = other DNA
gagctctgctgtcttattgaggcggtgaccttggtttggataagttatgtaacctctctggccctctcaaaataaggataatcacggttggcatcaagattaagtaaaataatgtgtgta

SEQ ID NO: 3858 - DNA, 120 bp, synthetic construct
  source 1..120: mol_type = other DNA
cccacagcttcttggctgaacgtagaacttctttttctcacccagtataccagcctcttcctggtgattctgttttgctgctttggcaagaactacattttgtttttaagagaaatttct

SEQ ID NO: 3859 - DNA, 120 bp, synthetic construct
  source 1..120: mol_type = other DNA
ctcttcaggacttttgctccaagtcttgcctcctctttgtcttctgagatgccagctgctccctctccatggcttcccttctgtccacttttcattctgctgaggttgtgcttgtcttta

SEQ ID NO: 3860 - DNA, 120 bp, synthetic construct
  source 1..120: mol_type = other DNA
tgttaaaatgaatttctgattccattgactaccctggttgaaaccttccaccagttttccattacccagagaacaaaactcaaactccttagcaagagagacaagaccctgtgtcacctg

SEQ ID NO: 3861 - DNA, 120 bp, synthetic construct
  source 1..120: mol_type = other DNA
aaaataatgcttggcacttagtaagtgctcagtaaccggcagatgctcttgttggcattgatgttgtagttagtctactttgctcctaataccaacaactcctgcaatgattgatgttta

SEQ ID NO: 3862 - DNA, 120 bp, synthetic construct
  source 1..120: mol_type = other DNA
tctagctctcaggagcatgggattatataattagaaagagctgaggaccacatttgtggctggaaaatagaatgctataatttttattcagtttttgcccttgcaaaacaggaacccaaa

SEQ ID NO: 3863 - DNA, 120 bp, synthetic construct
  source 1..120: mol_type = other DNA
ctcccagtttgatgaaggtggattgaaattcctcatcaccagctgagtttccacctctgtccttagctagagttctacttctttagattgcatctgtttattcaatacttttaaagattc

SEQ ID NO: 3864 - DNA, 120 bp, synthetic construct
  source 1..120: mol_type = other DNA
tctaattaactctgagtcccagcaatatgcctgccttcctcacagctcggatgatacggcaatgtccttccagtaaactccccttttgtttaagttagtttaaattaggtttctgtccat

SEQ ID NO: 3865 - DNA, 120 bp, synthetic construct
  source 1..120: mol_type = other DNA
agcataggggagtgaaggaggcagaagtagggagtcaaacttctttaccagcttgctgcgtgagccccaagccaaacttattcatcttttgccatctatgttttctttttcttttttttt

SEQ ID NO: 3866 - DNA, 120 bp, synthetic construct
  source 1..120: mol_type = other DNA
aaaggaaaaggatatatttattgagtatctactatatgccagcagttcttgattgctgattgaaagcagcaggcttatcatctgtgaacctatgttggtgctccttttcctctcccctcc

SEQ ID NO: 3867 - DNA, 120 bp, synthetic construct
  source 1..120: mol_type = other DNA
acctaacagtggtgcaatcatgttgtctgtgttgtgttatgtgagaattttctcctaagtcatgcaggtaatgacaatatactgtaaataccacatgtgagtttacctgaatctgtgcat

SEQ ID NO: 3868 - DNA, 120 bp, synthetic construct
  source 1..120: mol_type = other DNA
atacttcaagtattacctggcttggtttcttcctttgaataagagaaaacaaattctacacatacagagagaaacactgtagaaagttgagcctttcaaccaggcatggtggctcacccc

SEQ ID NO: 3869 - DNA, 120 bp, synthetic construct
  source 1..120: mol_type = other DNA
agtagaaggagaggacataaattgggtcttttgcttctaagtccaaagcaatgaccctctaattaaatgcaataagcaacctgggcctctgcctgtcagagtcctgtttttccatattct

SEQ ID NO: 3870 - DNA, 120 bp, synthetic construct
  source 1..120: mol_type = other DNA
attcatagtgtaaggacatctctgagaatgtagtagaaatatgtcttggacaaagatgccctctctcaccacttctattcagcatcgtatttgaagtccgagtcagaactatcaggcaag

SEQ ID NO: 3871 - DNA, 120 bp, synthetic construct
  source 1..120: mol_type = other DNA
ataataataataatacagatgttgttatataaggtatatcagacctacaggcttctggcaggatttgtcagataatcaagccacactaactatggaaaatgagcagcattttaaatgctt

SEQ ID NO: 3872 - DNA, 120 bp, synthetic construct
  source 1..120: mol_type = other DNA
gtgaattaattgggacacattaaattgcaaatcctggccttgcttttaggggtctaagttatttggatgattgtcttgacctgactacatacgtattcaggtacacaggcatagtccata

SEQ ID NO: 3873 - DNA, 120 bp, synthetic construct
  source 1..120: mol_type = other DNA
acatctctttaatcttttcacacatcctcctgcccctaagcaggaaaacagggcagcctgtttacttagcagtaaatacggctagaagaagcttagatatgagccccagtttcatcatta

SEQ ID NO: 3874 - DNA, 120 bp, synthetic construct
  source 1..120: mol_type = other DNA
ctctccgccgccccccaccccccacccgactttttctctctttctttctttttctttttcttgtggggcagggaggaaaataatacataatcagaatttttaaatttgtgtctgtttctt

SEQ ID NO: 3875 - DNA, 120 bp, synthetic construct
  source 1..120: mol_type = other DNA
agaaaagaattcctggtggtccactgtacccacccagcagaagctttatggactagtctagaatgtgttcagtatctgacagtacacattgtggaacttagctctcataaatctctaatc

SEQ ID NO: 3876 - DNA, 120 bp, synthetic construct
  source 1..120: mol_type = other DNA
cttaaagagcaccttaagatacaggaaaatgaaattgcagctctctttagtgtgatgctaatttaaattttaattataaatgccacacccatttcacttgagtgccttgaagcataagta

SEQ ID NO: 3877 - DNA, 120 bp, synthetic construct
  source 1..120: mol_type = other DNA
gttcctcagctctgtttaacttgtgctgtttcagctaataacctctattttgttctcaccttgcagagcttcaattccattcttttcttgactcttttccccatttattctcgcagatgg

SEQ ID NO: 3878 - DNA, 120 bp, synthetic construct
  source 1..120: mol_type = other DNA
tccttgggtttctggcctcaataagtaattgctttgtttgtctctgtgtggatttgggaggatccaaaaattaggctgccatctctcacacatcttcctagaattctgtgaagtatgact

SEQ ID NO: 3879 - DNA, 120 bp, synthetic construct
  source 1..120: mol_type = other DNA
tttctaccattgtccactttctctttcactgattttggcccttgtctttattatttcttccctctacttattttagaattcattcgctcttctttttctaatttattaaggtcagaactc

SEQ ID NO: 3880 - DNA, 120 bp, synthetic construct
  source 1..120: mol_type = other DNA
aaaaaaaaaagaatcactaacctggttcagccttttcatttggcagatgagaaaactgaggactcagaaattaaataacttgcctaagatggtagagctctcttcaaacaggtaactgta

SEQ ID NO: 3881 - DNA, 120 bp, synthetic construct
  source 1..120: mol_type = other DNA
gttcttcttggagcatgggatttaaaaatattttgcaatggctcaaccccatcttgcccaagaaatggtaagtaggcaaatcaaaaaggaggaaggaaggaacccatcactttacattac

SEQ ID NO: 3882 - DNA, 120 bp, synthetic construct
  source 1..120: mol_type = other DNA
ccccaagactggctgagtcatgagcctcaagtccggatgtagtcagtctaaaaaacaactcaaaagatccatcttaggctctacaatagtgatgttatctacagaagcaattaggcaagt

SEQ ID NO: 3883 - DNA, 120 bp, synthetic construct
  source 1..120: mol_type = other DNA
agaaaattcccatcactctgtgagtaggaggtgtagccccctagggtgatgacacacttatttttcttgcagaacataaatggactctgtaattttcaagagtcaggccagctacaacta

SEQ ID NO: 3884 - DNA, 120 bp, synthetic construct
  source 1..120: mol_type = other DNA
agatcgctggctctcgacgcattactctttacgccttacatttctgtcttccttcctgggtcagtgattcccggaccctggaagagaagagggtggctaatgattaaggtgaggggaacg

SEQ ID NO: 3885 - DNA, 120 bp, synthetic construct
  source 1..120: mol_type = other DNA
ctaacagttgatagatgactgcaaatcattagtgtggctattagtgtaatgggatgttggaggtgaaagatttgactaaatggagacaatggtgcagggcttctgggatttctggaacca

SEQ ID NO: 3886 - DNA, 120 bp, synthetic construct
  source 1..120: mol_type = other DNA
aacattggctccttccaccaggtaacagggccagttaggctgtacaagggatccatcttccactggagatgcctccagtgcctccaggttcactgatcattggctgcagtgtgtgctcta

SEQ ID NO: 3887 - DNA, 120 bp, synthetic construct
  source 1..120: mol_type = other DNA
atagaaattcttgtccttggataagtcactggccctttctatcctcagattcctcattaatcagtaaagcacgaatacacaggaaaattaagtcgtgaagcactaaaccacagggcggtg

SEQ ID NO: 3888 - DNA, 120 bp, synthetic construct
  source 1..120: mol_type = other DNA
aacatgttggtgcagatttgctggcctcggtgaaaacaacctgaatcagtaggtcttggggtatcttcacttttaacaaacactacaggggattttgatgcagtcagttcaggaattaaa

SEQ ID NO: 3889 - DNA, 120 bp, synthetic construct
  source 1..120: mol_type = other DNA
gacactgtcagagcagtttgcttgcaaacccttgagtttcttcatttattcctggaaggtacattttaactgcaaacaatagctagagccactaggggactggaaaattatcttcccatc

SEQ ID NO: 3890 - DNA, 120 bp, synthetic construct
  source 1..120: mol_type = other DNA
aaggtccaggtagtgggaacagcataaggaataggagctgcattatcttaggcctcataacttctctgggtcatggcttctttatcagtaaaaacagtgttggactaagataaactccat

SEQ ID NO: 3891 - DNA, 120 bp, synthetic construct
  source 1..120: mol_type = other DNA
ggccctcaagtatctgcagtaaggatcatgtgactgacacctcacaggaaaaaatagaccaccacaatgtcggattacacagacacatgtttgcaaaacaaatagccaaaggtattcttt

SEQ ID NO: 3892 - DNA, 120 bp, synthetic construct
  source 1..120: mol_type = other DNA
gaagcgaggacacacgcacactcgcacactcattcacatccacagacacactcgggcacacagttcgatgacttgacagccgagcaaccatgcagcgcggcgctaattgcacaggatccc

SEQ ID NO: 3893 - DNA, 120 bp, synthetic construct
  source 1..120: mol_type = other DNA
tgacggtcagccttctctcatccctacctcgtagcaagtgtcagttacagtgtccgaactgctggtctttcaatgatgttcgctggggtttaagagatgaaaatgcctcacgtggtatca

SEQ ID NO: 3894 - DNA, 120 bp, synthetic construct
  source 1..120: mol_type = other DNA
attctcccatccccatcagcacaagctgggtgcatcgtggggggactggctgcaaaagggaagctagggtgccctccctggccctaccctaggcctctaagaaagagagaagataaagga

SEQ ID NO: 3895 - DNA, 120 bp, synthetic construct
  source 1..120: mol_type = other DNA
gaagctgcagtgagccgtgaacacaccactgtactaatgcctgagtgacagagtaagaccctgtctcaacaaatgaagttctacttcttcattatgccccaactatttaatgttgacttt

SEQ ID NO: 3896 - DNA, 120 bp, synthetic construct
  source 1..120: mol_type = other DNA
tatacttttcttatggatatggaactgaggaccagaaaggaaggtaacttacccaagatctcacagatgggtaaataggggtagaaggtgtggatcaagggattgtatgcagcctttatc

SEQ ID NO: 3897 - DNA, 120 bp, synthetic construct
  source 1..120: mol_type = other DNA
gaatagactttgcatattctataaaaaatgtagaagaggtgctcaggaagacctatctgaggaggtgctgtttgagctgagacctaaagacaggatggaatcagtatgggaaaatctggg

SEQ ID NO: 3898 - DNA, 120 bp, synthetic construct
  source 1..120: mol_type = other DNA
tcatatggtagctttatgtttaactttttaataaactaccaaacttttccaatctgttttacaccactttgcattcataccagcactgtataaggttccattttcttcatatttttgcca

SEQ ID NO: 3899 - DNA, 120 bp, synthetic construct
  source 1..120: mol_type = other DNA
acgtctgtgtgaaagctcccagtcaaaccactccaagtccgactactcacttgcacgctccctagcaacattctccactgcctgagggccacctccacctgcccacgagcactgcaaagt

SEQ ID NO: 3900 - DNA, 120 bp, synthetic construct
  source 1..120: mol_type = other DNA
ctgatgcgaagctctcttcctcttttccagctgtgggctgcttctggtacacagggatagtaataatacctacctcactgggctgcaccaaagacagaaggggccaatatactaaataaa

SEQ ID NO: 3901 - DNA, 120 bp, synthetic construct
  source 1..120: mol_type = other DNA
aatataaaaacagttcagtacaatgacttttcattctttttttcttcgggaataactttcttctaccctcaccctcccttctggctagagccttaacaagaggtggcagatggacatctg

SEQ ID NO: 3902 - DNA, 120 bp, synthetic construct
  source 1..120: mol_type = other DNA
gggcagagacagagccccattctatctacctaccatcttattcacaaccaaagagcatacctgttccgtaaattaaaataaaaagggttagagggtcttctttctccaaataaggaaggc

SEQ ID NO: 3903 - DNA, 120 bp, synthetic construct
  source 1..120: mol_type = other DNA
aacacttatagatatcagggaggttcacattgctccagttcatactcgcgcgtggatcctagaattgggccatgaggtaatgccgagagtatgtgaactgttataaattaatacactgat

SEQ ID NO: 3904 - DNA, 120 bp, synthetic construct
  source 1..120: mol_type = other DNA
aaaaaaaaaaaaaaaaaaaaaaaaaacctgtaagaaaccctcatgggtgaccttttaaaagcaccctaactcgctggagacagtgtgacaaggcaggatgacagtgccctcctacctgtt

SEQ ID NO: 3905 - DNA, 120 bp, synthetic construct
  source 1..120: mol_type = other DNA
aaagaacaatgcaagtatgataaatgatataaatcacccatattcataaataaaggggtaataaactgagacttaacctcagtgttggggggcaacagggaggggtggggactggggcaa

SEQ ID NO: 3906 - DNA, 120 bp, synthetic construct
  source 1..120: mol_type = other DNA
ctctgtctctgtctcacactctgtctctctcgctctctgtctctcctgctctctgtctgtgtctctctcttgctctctatctctgactctctgtcttgctctcttgctctctgtttctgt

SEQ ID NO: 3907 - DNA, 120 bp, synthetic construct
  source 1..120: mol_type = other DNA
atgtatatgtatatatagatacgtatatacatgtatatctatatataacctttcttcctctcttactatttatctgtctgttttggtggttttctggagagttaagctttaattcttttc

SEQ ID NO: 3908 - DNA, 120 bp, synthetic construct
  source 1..120: mol_type = other DNA
cgcgcccggccttattgtctgtattcttaccacatttaccaacttgtttcaacatcttgaagttagttttctgtacttctctaggattcttctcccattcttgcatgctaagtagcatgt

SEQ ID NO: 3909 - DNA, 120 bp, synthetic construct
  source 1..120: mol_type = other DNA
tgtatacccctgttctaagcagtcaagtttgttgtcttttccacgctccccaaactgctttcaggtcgctgattacatttctcattccagattctggcatttgattggagaatttgtctt

SEQ ID NO: 3910 - DNA, 120 bp, synthetic construct
  source 1..120: mol_type = other DNA
ctggccgagaaatacttttaattagtatcagatggatgagtacctgttagctaaattgagggctagggtaaggaaaagacaatgagactaggggcaggattgggatgaaaggagagaaat

SEQ ID NO: 3911 - DNA, 120 bp, synthetic construct
  source 1..120: mol_type = other DNA
ggcagtctatgtgtgcagcttgcttcaggaataggggcttaaatgatggttttagggctctatatccttctagcttccatctctgcctctgttcatttgtttggatcaattctttagatt

SEQ ID NO: 3912 - DNA, 120 bp, synthetic construct
  source 1..120: mol_type = other DNA
tcacttctgactcatcagcaagtcctgttgattccctcctaaataaaccttgaatctgatccctctcttcttctctactaccaccctttgaagccacaccaccctcacctcttacaggga

SEQ ID NO: 3913 - DNA, 120 bp, synthetic construct
  source 1..120: mol_type = other DNA
tctctccctccctcccaatttcccagggcatcacctgccccaaaaaagcagtcagatgattgcctgcctaggatgtttcctctacacatccgtgatcctcatctgtggactctgagatgt

SEQ ID NO: 3914 - DNA, 120 bp, synthetic construct
  source 1..120: mol_type = other DNA
ttattttctatcttacatgttctcgaatgtttatatttcaataaacctctacctcttcacacaagcaggtctctctcagttgctttgagtggcctttccactggacagtactggggagag

SEQ ID NO: 3915 - DNA, 120 bp, synthetic construct
  source 1..120: mol_type = other DNA
gaggagggaggaggaggaggaggagaagcagcagcagcagcagtagtagtagtagtagtggtagtagtaagcatctttcagtgtgagaaagtacctaagtactaaaaaaaaaaaaaaata

SEQ ID NO: 3916 - DNA, 120 bp, synthetic construct
  source 1..120: mol_type = other DNA
aggaggcaggggcaagggatggttcctgtacttagtggtgactgagtcatgtggatggaggcaggtttcaggctcatcctccttgggcctcagtgtccctgcctaaacagcaggattgat

SEQ ID NO: 3917 - DNA, 120 bp, synthetic construct
  source 1..120: mol_type = other DNA
agaaaatccctggttggctcagtgatctctacacccctctgggggccaggctgtgagccctacaatgggggagacccctgagcaaagcaggtgggatgtgtgctcccggggagctgctgg

SEQ ID NO: 3918 - DNA, 120 bp, synthetic construct
  source 1..120: mol_type = other DNA
ccaccgtgccctgccaaaggcaccatttcaaactgggaacaactacctgcccattgagccctcctgccgtcctctcattaggattatttcaggagtactgcactctacagatggagctag

SEQ ID NO: 3919 - DNA, 120 bp, synthetic construct
  source 1..120: mol_type = other DNA
gactttcagccccaactcctcagccttcagggagggagaaaggaaaggagctgaaggttaggttgcttgccaatggtttaatcaatcatgcctagataatgaagtttctataaaaacctt

SEQ ID NO: 3920 - DNA, 120 bp, synthetic construct
  source 1..120: mol_type = other DNA
ggaattatctcaataaaaagtgcaaataacccaagtcgacatccatagaaggaggagcatggatgttccctcctaaaacaaagtctttaaataaattataaaaggaaaaaactgtggcat

SEQ ID NO: 3921 - DNA, 120 bp, synthetic construct
  source 1..120: mol_type = other DNA
gaaggagggagtccccggctccagggaactgtccctgaccttcatctctggcagaggggctatgggaggaggaaggagagaagccaccccaacagtgggccacagttcactgtccacagg

SEQ ID NO: 3922 - DNA, 120 bp, synthetic construct
  source 1..120: mol_type = other DNA
ttctcacttattcctcatatcacatgcacaaggcaggcccatcatcatgtccattttttgaggcttaagagctaatataacttgtctgccaacacaggtagaagcctgggccacagtcta

SEQ ID NO: 3923 - DNA, 120 bp, synthetic construct
  source 1..120: mol_type = other DNA
gctctcggccgtgtgacttttaatacccctctctcaccttgagaagctgttgactctacctcctatgggttcattattttactagacattttagagcagatattcttaatctagagtcag

SEQ ID NO: 3924 - DNA, 120 bp, synthetic construct
  source 1..120: mol_type = other DNA
gatgagtgtggaaaaagagggaggaccagatcatgagggtccccctcagggtaggaccctgggaaagcagggacactggtgtgttcaaaggttggcgttggcaagaggagtgtttcagaa

SEQ ID NO: 3925 - DNA, 120 bp, synthetic construct
  source 1..120: mol_type = other DNA
tggaactaagtgagggactaagtaccttgacaatctaaatagaatcaggcaaggaaactgtgagagagtactaactctattctatcccagcttccacacctctactgatcacacttagga

SEQ ID NO: 3926 - DNA, 120 bp, synthetic construct
  source 1..120: mol_type = other DNA
tggtataaataaaagtcacctgtggagtttcttcaatcatcaggtttccctctttttctcccatctaggttccccttcagacgtcccaccttcagaacaggaaataccccattctggaga

SEQ ID NO: 3927 - DNA, 120 bp, synthetic construct
  source 1..120: mol_type = other DNA
aagacggatgctgccacacctggctttggcttttcttgatgtgtctaaattgttccatgtaaccaggcaatttcatgtgtctttaatttttctaaaagccatgcattccactgctcaagg

SEQ ID NO: 3928 - DNA, 120 bp, synthetic construct
  source 1..120: mol_type = other DNA
gagagaaaattccagagaaaatgcatgttttgtggcagaaggaggagtggtgctatgaaaattccagtttgctaaagagattcttcctgtgatagatttaaactccgggaaggagcctgt

SEQ ID NO: 3929 - DNA, 120 bp, synthetic construct
  source 1..120: mol_type = other DNA
accccaggtagctgggattataggcattaggcatgtaccaccacccctggataattttttttgtctgtattttgtagaaatgaggttttgctatgttgaccaggttggcctcaaactcct

SEQ ID NO: 3930 - DNA, 120 bp, synthetic construct
  source 1..120: mol_type = other DNA
tatatgactttgcagatagataatgtcccctttatgataagcagcttgtcacatggtcatctgatgggtcatggtcaggtgttccaccatggtcaggtgtttagtatctaaaaacgccta

SEQ ID NO: 3931 - DNA, 120 bp, synthetic construct
  source 1..120: mol_type = other DNA
aaagcacctgcctctctttagtgcctatggggatgtcaataatatgagggcagacagtattgcaacaaaaggaagataaaaaggaagagcagagagggaaaagatgttttgtcatgtagg

SEQ ID NO: 3932 - DNA, 120 bp, synthetic construct
  source 1..120: mol_type = other DNA
ttaaaactggtgcacccacccaccccaccaccaattgtttttggaagtgtggaggccaagggaaaatttcccctacgtcctctgaaggttcactgaaaaatcagctcacaaaagggagat

SEQ ID NO: 3933 - DNA, 120 bp, synthetic construct
  source 1..120: mol_type = other DNA
ttcctgcacctttgaggttcttgtatgataaacagctgcaattatcctggagcatttttatgagacgggcttgaaaaatgaggggagagttctagtccgtcatagtgcctggtgccccct

SEQ ID NO: 3934 - DNA, 120 bp, synthetic construct
  source 1..120: mol_type = other DNA
tatcagtaggagataccacttcacacccattaaaatggctgaaataaaaagacagaaaatagctagtattggcaaggacgtggggaaattggagccctcatactctgatggcgagaatgt

SEQ ID NO: 3935 - DNA, 120 bp, synthetic construct
  source 1..120: mol_type = other DNA
ctctctgttttgaaggctaatgtaacagactcagctcaacaagtgatattcctgccaggctggacgtttaaggatcctgatgtatttgagagttgtcttgtgttcttactcaaggaaaag

SEQ ID NO: 3936 - DNA, 120 bp, synthetic construct
  source 1..120: mol_type = other DNA
cagctaggtgtgtatggaaaagaatctctcctagatttcttatctccatggggtttcagaatgaaatataccagctccacaggaaagcctctgacagatgggaacctatttaacaagcca

SEQ ID NO: 3937 - DNA, 120 bp, synthetic construct
  source 1..120: mol_type = other DNA
aaaaggaaactacaccaatatcttatactgtgcttctcatactttgatgtgcatcggaatcacccagagggcttattgaaatgcagactgctgaatcccatgcccagagtttcggattca

SEQ ID NO: 3938 - DNA, 120 bp, synthetic construct
  source 1..120: mol_type = other DNA
accggctagtaaaggactcttaattagtctcaaagtgtggcgttttctctaacaccccgggtacaacataatggaggccccagcgagaaattaatgccactgggtgagagttggtcttgc

SEQ ID NO: 3939 - DNA, 120 bp, synthetic construct
  source 1..120: mol_type = other DNA
tcttcgaggagacgtcccctgtgggctcaccgcccaattgcctcccggctgtgaccgcgctgggaggaagcagcccctctactaccactgagagaggcacaagttcctccaggtgatgag

SEQ ID NO: 3940 - DNA, 120 bp, synthetic construct
  source 1..120: mol_type = other DNA
ttgctttaggtagaaatggaaaggtttctcagaggtgaactaaaaatggcttaagctgttctggcaggacctatgagtagggagatgtcccatgcttacaatcttgtcataggtgaacct

SEQ ID NO: 3941 - DNA, 120 bp, synthetic construct
  source 1..120: mol_type = other DNA
tgctccgtccctactccaagagtggtgttaactacttttctttttcactcttcattaattgattaataaataattgaattggcaaatgtttcccgagcgcctgctgtggcagcaggtctg

SEQ ID NO: 3942 - DNA, 120 bp, synthetic construct
  source 1..120: mol_type = other DNA
tcctagatgtgtgactttgggcaagttacttaactcttgtcatccaaattttattctctaatctgggctagggggattacaaggtgatgggggacccttgaatgaatgaatgaggcaata

SEQ ID NO: 3943 - DNA, 120 bp, synthetic construct
  source 1..120: mol_type = other DNA
atgatgggtggatggtgaatcctgtggatgatgggtggacggtgaatcctgtggatgatggttaatgaattttgtggattcaggaccccctgaggaacattatggatgactagatgcctc

SEQ ID NO: 3944 - DNA, 120 bp, synthetic construct
  source 1..120: mol_type = other DNA
gttggttttcaaaagctacgtgttagacacagtttggtctttttttaccctcctttcatggccttgagattatgaattgatgcttttcttagatgaataccaagagaaaagaactttaca

SEQ ID NO: 3945 - DNA, 120 bp, synthetic construct
  source 1..120: mol_type = other DNA
tttcactgacactaactaagaatgtttctcttcaaggaagaccgtcttggccttctcaggctctcagcagaggatgatgatgataatagcagctgtcattcactttacatggtaaagtga

SEQ ID NO: 3946 - DNA, 120 bp, synthetic construct
  source 1..120: mol_type = other DNA
tttacttgcatgcctttaggctaccatatgaaagtggtcatgaggagacgattctttttttgaaggtgggtggggaggattagagaaagtcaaacggggcaagataaaaaaaggatgtca

SEQ ID NO: 3947 - DNA, 120 bp, synthetic construct
  source 1..120: mol_type = other DNA
tctttctttgctgaaagtagtataacacatgactcaacctaaacaaagaacaaaggaaaaattacaggttgatattacatgtaaactagtatggacaaataataatatgttcgtaatctg

SEQ ID NO: 3948 - DNA, 120 bp, synthetic construct
  source 1..120: mol_type = other DNA
ggttctgttctcatggcagtttgggcagtaacttttgagagaggccaaaaaaaggaggatgacatgctgtctcctctcttcagtatagacattaggctcttattcagaaaggatttttct

SEQ ID NO: 3949 - DNA, 120 bp, synthetic construct
  source 1..120: mol_type = other DNA
ttgatccttgcattgatcctataaagatccattctataggtgaggaaactgaggcacagtctccaatctcactcaggttgctgcaaatgccattaattcgttcttgtttatggccaagta

SEQ ID NO: 3950 - DNA, 120 bp, synthetic construct
  source 1..120: mol_type = other DNA
tttaaagatgttttaaagtgactctgaatgacaacctacaaactaccccacttccatgccaaaagtaaaacatctgggaagtcaagagtgaaaaggcccaaaaaagggcaggagggcaca

SEQ ID NO: 3951 - DNA, 120 bp, synthetic construct
  source 1..120: mol_type = other DNA
atattgagaaggcagccatccttctaagtgtcgttcctttctaagtggcccatctgtctcagcaatattccttcaacacttgaaatacacttttccactgtcttcccttatgatattgag

SEQ ID NO: 3952 - DNA, 120 bp, synthetic construct
  source 1..120: mol_type = other DNA
ctctgtgccattcagtccttatagcagtcatagcctctgtcccattctgtccttacagcagtcacggcctctgtgcccactctgtccttacagcagtcacggtctctgtgccattcagtc

SEQ ID NO: 3953 - DNA, 120 bp, synthetic construct
  source 1..120: mol_type = other DNA
ttacctacgcatccatctgtggacactttgggttgcttccaccatttagttatggtgaataatcctgctatgaacattggtgtataaatatctgttcttgtccctgctttgggataaaca

SEQ ID NO: 3954 - DNA, 120 bp, synthetic construct
  source 1..120: mol_type = other DNA
ctatgttgagccatccttgcattccaggaataaagcccacttgatcatgatgtataatcattttaatatgctattgaatttggtttcctagtattttattgaggacttttacgtcaatga

SEQ ID NO: 3955 - DNA, 120 bp, synthetic construct
  source 1..120: mol_type = other DNA
ggggaaaaaatgtgaagatcaggaaagacaaatacaaaggaattaacccagattggagaagactcggaagacatgacagctaaatgcaatatgtgagtctagactggattctgtaccaag

SEQ ID NO: 3956 - DNA, 120 bp, synthetic construct
  source 1..120: mol_type = other DNA
catcataagtccattgggagcctgggtttccattaacagtctgttacatgccctagagaggagcatcataagtccattgggagcctgggtttccattaacagtctgttacatgccctgga

SEQ ID NO: 3957 - DNA, 120 bp, synthetic construct
  source 1..120: mol_type = other DNA
ggatatttgacaaaagctccctggacggggacacaggcagaactgaaaaagtgtacttttgccagatgtggggtgtcattattcacacaactccccactcacagcagtgaagacaggtaa

SEQ ID NO: 3958 - DNA, 120 bp, synthetic construct
  source 1..120: mol_type = other DNA
ccctcatcttctttgagctttactcaaatgtcccttccctgaggccttcccggtacaccctgaaatgcccttgtcaccctgccctgcttcatttttctccttagagcttctcatcatcta

SEQ ID NO: 3959 - DNA, 120 bp, synthetic construct
  source 1..120: mol_type = other DNA
cagcctgaattgtgttttataagtaatgtctctgcttagagacagttgggacttcaggcgtcagacccctccctccacactgccctctccagggccttgcagcagtgaggtgtggggcgt

SEQ ID NO: 3960 - DNA, 120 bp, synthetic construct
  source 1..120: mol_type = other DNA
ggccgtccagaatcttggattccaaagatccgctaacctctgttttaggggaaatcagtttctgcctgcgtgtgtgttcagctaggggttcaaggcccggcgacgatggctcagcctgct

SEQ ID NO: 3961 - DNA, 120 bp, synthetic construct
  source 1..120: mol_type = other DNA
tccccccatttcacagacaagttcagagaggctccccccatttcataggcagggaagctgggagagggtccccccatttcacagacaagttcggagaaggtcccccatttcataggcaag

SEQ ID NO: 3962 - DNA, 120 bp, synthetic construct
  source 1..120: mol_type = other DNA
atgaaccgcattttatctattcatggacgctaggactgcttccacgtggcttctgtggacaatgctgtgaacattgtttacgaggttttgcgtggacctgttttcatttatcttgcatag

SEQ ID NO: 3963 - DNA, 120 bp, synthetic construct
  source 1..120: mol_type = other DNA
gcttcatcacctcccttttgaattggagctgagtgtcggcaacgcccagataactggggcgcgcgggtcttttgtgctggatttttctgtacagttgcctcgatcttccatccagcttgg

SEQ ID NO: 3964 - DNA, 120 bp, synthetic construct
  source 1..120: mol_type = other DNA
agggcatgacctgctactacctgacacacggttgggcggggctcatcgtggtggtggagaaccgacaccccaaggcctacctgcacgtgcagtgtgactgcaccgacagcttcaacgtgg

SEQ ID NO: 3965 - DNA, 120 bp, synthetic construct
  source 1..120: mol_type = other DNA
ggattcgcaaggttttgttccctcgtggcatcagtcagcgtggatttgcaaagttttgttcccttgtggcatcatactcctttcctgtttggtttgggactcccatggcccccttgatgt

SEQ ID NO: 3966 - DNA, 120 bp, synthetic construct
  source 1..120: mol_type = other DNA
tgtacagaaacaggtgtcgcatcagtaggcattctccagaggccgaccaatatattggagagacggattaatagacggatgatagtgggtttgtcaggggaattggcccatgcggttagg

SEQ ID NO: 3967 - DNA, 120 bp, synthetic construct
  source 1..120: mol_type = other DNA
ttcgcactggaaacccagcataagaatgcggatgcgggtcgccattccagtgctattctcagaggtgaggccaccgtgaatgtggctgctggaaactgcccacagctcgcgtctgtcaat

SEQ ID NO: 3968 - DNA, 120 bp, synthetic construct
  source 1..120: mol_type = other DNA
ggctgaggaagctggctgggagggagagagggcaccccgtgggctgaggaaggaggctgggagggagagagggcactctgtgggctgcaggatacactccctgcccccctttccgtgacc

SEQ ID NO: 3969 - DNA, 120 bp, synthetic construct
  source 1..120: mol_type = other DNA
ggaggtgtcaggaggacacagaggacttggctccctgccccccacccccgtgcttcacgctggggcagggcgtggacctggggatgaggaggtgtcaggaggacacagaggacttggctc

SEQ ID NO: 3970 - DNA, 120 bp, synthetic construct
  source 1..120: mol_type = other DNA
gacaggatcacaccggacactttgatcaccaacgtctgaaacacagggagacgcatggcctctgatgaaaaggcaggcgctgtctttggacctgagccgtaaaacagcacacacagcccc

SEQ ID NO: 3971 - DNA, 120 bp, synthetic construct
  source 1..120: mol_type = other DNA
aaaagatgctgccttacatgctgacaaaccacctgccatgtgccaggcgctgtgctggggacacaggggacacaggacgtaagggcacagaacaagcttgggtaatgctgtagtggggag

SEQ ID NO: 3972 - DNA, 120 bp, synthetic construct
  source 1..120: mol_type = other DNA
agacacacctctccttcaaacctggacggagacacagactttgaaacagatggatgcatgcgcgcacagggacaggcagactgaaaacctgaaggtccactgtgcaccatttttgtcact

SEQ ID NO: 3973 - DNA, 120 bp, synthetic construct
  source 1..120: mol_type = other DNA
cacaactcgacagcccttgtgagtggcgagggctgtgccccgccctggctgtaagtgccggctggtgctgaggccgtacagtgggagaccatctggtgcaggagctgcctggtggagaag

SEQ ID NO: 3974 - DNA, 120 bp, synthetic construct
  source 1..120: mol_type = other DNA
gaatcaccctgcaggagaaagaggagcctaagtcccagccctcccaggacttcagttctcagggttccagacccctggcgtggtgcctctaggttggaggccaggatcctgagcctgagt

SEQ ID NO: 3975 - DNA, 120 bp, synthetic construct
  source 1..120: mol_type = other DNA
gtgtgtgtgtgtgtgtgtgtgtgtgtgtataaattatcctggaggaaaggttaaggtgacacatggagactgagtgtcaccgttatttccgcaggtcctctctgatgacatgaagaagct

SEQ ID NO: 3976 - DNA, 120 bp, synthetic construct
  source 1..120: mol_type = other DNA
tgaccaggtgtctgcggtggacagctactactacgatgatggctgcgagccctgcgggaacgacaccttcaaccgagagccagccattgtcaggttcttctcccggttcacaggtgggtg

SEQ ID NO: 3977 - DNA, 120 bp, synthetic construct
  source 1..120: mol_type = other DNA
ccagttttatcagagaaacaaagcaacaatttctacatctgcaagacaagtttggcttcagccattatgtatagatagatgtgtgtgggtgtgtacgtgtgtgcacgccggagtcaattc

SEQ ID NO: 3978 - DNA, 120 bp, synthetic construct
  source 1..120: mol_type = other DNA
ataatccagaatgatttataagtaatcttaaagctgtgatttaaagtagaaagcaaatggctaaggggagcaggaaagcctgagcccaaggccaaggctcagggtaagaaatgtggccaa

SEQ ID NO: 3979 - DNA, 120 bp, synthetic construct
  source 1..120: mol_type = other DNA
acctcttccttgttaacatagcagggagtgagctgacaaccctggaacacagctttctcattcagtgaaatggatactgtgccaacagatacttcactggatggccacagaggagcatac

SEQ ID NO: 3980 - DNA, 120 bp, synthetic construct
  source 1..120: mol_type = other DNA
ataaaatcatgcagcaatatcctgtctgctccttcctccgggtgcagccctcaggattgtggctgtttcctgacccggagttttgccgctgggtggttggcggtggctcccgcaccgtgg

SEQ ID NO: 3981 - DNA, 120 bp, synthetic construct
  source 1..120: mol_type = other DNA
gcttcctctgcggcctgggcatcccaaatgtcccctgctggcctcatactgggccatgggaggaaacgggcagctggcaatgctttcggaccaggctgtctagcagtttcctgaattctg

SEQ ID NO: 3982 - DNA, 120 bp, synthetic construct
  source 1..120: mol_type = other DNA
cagcaccatttactccacgctttcaatccaatacagaaagcaacaaccaaacaaatcaaggtgcactatttgcccaatgtttgttttacagagaagacccctaaagggctgtatatgagg

SEQ ID NO: 3983 - DNA, 120 bp, synthetic construct
  source 1..120: mol_type = other DNA
tagaaatctgtttagttaccacatcgttgaagggtaactgtctgcaagccacaataaaaatgtgtcctaagtgcagcagtcaaaatgcatttccagatttgctatccaggatgactggac

SEQ ID NO: 3984 - DNA, 120 bp, synthetic construct
  source 1..120: mol_type = other DNA
ctgggtgtgagctgagggtcattcctagtgtctagagggcgccattttttttttttttttttgtaattcatggctccttccttcatctttaaagccagccatggtttcatgaatcactct

SEQ ID NO: 3985 - DNA, 120 bp, synthetic construct
  source 1..120: mol_type = other DNA
atagatatgtacgaggtatctattatgtgtacgaggtatctattatgtcagtaaactatacctctcgggaaaaatccagctctcctcttgtttttgtaaatacagttatagtggaacaca

SEQ ID NO: 3986 - DNA, 120 bp, synthetic construct
  source 1..120: mol_type = other DNA
accatctgggtatggaatgaggtggggtaaggtggtttggaaagagaaaggaacagagagagacaaagagactagtacgaccaaagagaaagattcttattccatgaccaaagcaatatc

SEQ ID NO: 3987 - DNA, 120 bp, synthetic construct
  source 1..120: mol_type = other DNA
ttagtttgtattaataacaggcaataatacggcatttgaagcaatttcgcaaacagacaggtgaagccctacgcagcatgcctttccagcgcgaaatgcttcagtgcaatgttaggatat

SEQ ID NO: 3988 - DNA, 120 bp, synthetic construct
  source 1..120: mol_type = other DNA
tgagtcactcatgcctttatttacatcctcctgtgcccctgtgtctagaaaagcacgtccaggttttagttagaactccaggttgagcacgtgtacatctatacatatctacatgtataa

SEQ ID NO: 3989 - DNA, 120 bp, synthetic construct
  source 1..120: mol_type = other DNA
tcagggctttgcgtttctctacaacacagatgagcagatgaccctgtcagaaaaccaaaatggttttcattggtctattcaggagtttctagaaatacttctgactgagaggctctttga

SEQ ID NO: 3990 - DNA, 120 bp, synthetic construct
  source 1..120: mol_type = other DNA
actttcacacatttggtcccaccaggagcaaaggtcagatcttcccttctgtcatttatgtttatccagcagacttgccattgagcacagcatgttcaccatttattgacttgattcaaa

SEQ ID NO: 3991 - DNA, 120 bp, synthetic construct
  source 1..120: mol_type = other DNA
gaatgatctgagccaaggaacaaatgctattgaatttcatatctaaaaggcagtaatagctgtgctgttcagcaaaagtggatgggaggattccaaggcagataattcagctggacccaa

SEQ ID NO: 3992 - DNA, 120 bp, synthetic construct
  source 1..120: mol_type = other DNA
aaaatatgtctttttctttcacccctaggacagcagactagcaagacgatatggatttcaaatgccactcactcttcctgggcaggtattcctaatttgaagagacaagatagagcagga

SEQ ID NO: 3993 - DNA, 120 bp, synthetic construct
  source 1..120: mol_type = other DNA
aaaggagggaggctggacatctgcttcccaaacaaacctcgccaagcagccagcagtccagcgccagcccatctggcctggaaggacatttatatattttcatctcgacagacttccctt

SEQ ID NO: 3994 - DNA, 120 bp, synthetic construct
  source 1..120: mol_type = other DNA
aaggtaaagccaccacctgggaggcgaccattcattgccttggctttcaagtgaaacaagagggtttctagagcacaacagagttacaaaaccacccctagtttaggcaagtgagaagac

SEQ ID NO: 3995 - DNA, 120 bp, synthetic construct
  source 1..120: mol_type = other DNA
ctccaggccaggtagagcgatcccttatatacacaggcagacatacacacacacacacacacaccccctccaggccaggtagaatgatcccttatatacacaggcagacacacacacaca

SEQ ID NO: 3996 - DNA, 120 bp, synthetic construct
  source 1..120: mol_type = other DNA
agcatctcagtctgctggagtatgtcagtctgttggagcatctgtctgctggagtgtcttggctgctgtcgaggaaagctgggcacagccaccagggcattcctgagcccacttacccat

SEQ ID NO: 3997 - DNA, 120 bp, synthetic construct
  source 1..120: mol_type = other DNA
agaccagtcgctcatttatcacttcaagagatacttattgtgtgcctactctgtgccagacactggattagacagtggagaacaagacacataagacagctacaaaacccctgttctagt

SEQ ID NO: 3998 - DNA, 120 bp, synthetic construct
  source 1..120: mol_type = other DNA
cccccaaattctcaccacccccctctatcccacatgctcagagtgaaccatgctattgtttgaccgtagccctcctggacctcccaatccagcccaccactgaagtcctggggtttggac

SEQ ID NO: 3999 - DNA, 120 bp, synthetic construct
  source 1..120: mol_type = other DNA
tcaaaaaaaaaaaaaaaaaacacaactaatctgccactccttggccagccagaaccttggggggccatcctttgcaagcagggccatagtgacccaccctgctcctggtgcattcctgat

SEQ ID NO: 4000 - DNA, 120 bp, synthetic construct
  source 1..120: mol_type = other DNA
aggaggatgaaatgggaagaaattgcttaatgggtaagaggttttgctttggcgtggtagaaacgttctagaactggatagtagtgatggttgcacaacattttgaacgtactaaaggcc

SEQ ID NO: 4001 - DNA, 120 bp, synthetic construct
  source 1..120: mol_type = other DNA
aatcctccctgaagccctgacaaggtcacactttccaagttgactatgatgctgacatgtgtctctcccttcctgtcttaatgtcatgttacattgatttatcactgatcagtgttatct

SEQ ID NO: 4002 - DNA, 120 bp, synthetic construct
  source 1..120: mol_type = other DNA
aatgtctcacaatgcacaggacagctcccatacaagactgtgttctcaatagcgggtagccgtcaaatggtaagtgctctgtgccagggactgtgctaaatgcagaaagtcagagatcag

SEQ ID NO: 4003 - DNA, 120 bp, synthetic construct
  source 1..120: mol_type = other DNA
ggactttgattttcccagccttgatctcatgcctactctagggtcagagctggagcgggacccatagggagcccagagacaggctgggtggagagtgggtccctaaaggagaactgaaga

SEQ ID NO: 4004 - DNA, 120 bp, synthetic construct
  source 1..120: mol_type = other DNA
ccccccccacccccccccccaaaaaaaagaaaaaatcattacacttcaaaattgtcaattaacccaacggatgctgctgttttcaagaaagctaatcttggctcgaaatgtcatgcagtg

SEQ ID NO: 4005 - DNA, 120 bp, synthetic construct
  source 1..120: mol_type = other DNA
tcaaaccaggctccatgactatgaagttggacccagtgtggacacttaacagatcatgtgtctctccactaaaaacattttccatcccgtctgcccccgacattgtccttgataacagaa

SEQ ID NO: 4006 - DNA, 120 bp, synthetic construct
  source 1..120: mol_type = other DNA
agagagagagagagagagagagagagagagagagagagatcctcaggggagatcttcagagaacagaatagaaaacaatgacgaaacctctacctaccccttattctaatttatatttcc

SEQ ID NO: 4007 - DNA, 120 bp, synthetic construct
  source 1..120: mol_type = other DNA
tttagcttctcagcctctgacggcttcaacatccctgatgctttaacctggaaagtagtcctcattcctagtctttttgcacactgtggattttagagccatctaaatatttgctgactt

SEQ ID NO: 4008 - DNA, 120 bp, synthetic construct
  source 1..120: mol_type = other DNA
agagggccagtcaaaagaattcatcggccaacctcaagaggttctgatttgcaacactgggagaactggagcattagtaagggtcaaaactgtgactgactaaatcatattatagatttc

SEQ ID NO: 4009 - DNA, 120 bp, synthetic construct
  source 1..120: mol_type = other DNA
cacagatcacaaaataacccaaattggcttaagcccaaagagatcttactggctcacataactacaaagagcagtgttatgactgcctcaggcacgacatcaaccaggatccagtgtgtt

SEQ ID NO: 4010 - DNA, 120 bp, synthetic construct
  source 1..120: mol_type = other DNA
tctgtgacatgtgtcaaaatttgcaggaagatctgaaaggagaaaagttcagagtatgagcatcaaaacaaaactgaagggcgacacgcttgaagctaaaaataaatgctggctgggcac

SEQ ID NO: 4011 - DNA, 120 bp, synthetic construct
  source 1..120: mol_type = other DNA
ggctgtcctgtgcactgtgagatgtttagcagcatctctgtcattcacccactagatgccagtagcaccctttcctcccagttgtgacaaaaatatctgcagccatcaccaaatgtcttc

SEQ ID NO: 4012 - DNA, 120 bp, synthetic construct
  source 1..120: mol_type = other DNA
agttggttcttaaaaaggcaagcttcagattccagggaagattgcctctggagagctctgttttaatccatgggtttgccagattaatgaggatttactggcctcgtgccttcggccctc

SEQ ID NO: 4013 - DNA, 120 bp, synthetic construct
  source 1..120: mol_type = other DNA
attacaaaggaatttgaaggttggggttgttcttgctaacgcaggacagatggttcctaggtctatgcttagagcacacagtcagtaaagcttggatattccattagagaaagaaagaga

SEQ ID NO: 4014 - DNA, 120 bp, synthetic construct
  source 1..120: mol_type = other DNA
ttttataaggacaccagtcatattagcttagggacccccccgcttctagtatgactgcatctttgcaaattacatctgcaatgaccgtctttccaaacaaggtcaacttccaatgtactg

SEQ ID NO: 4015 - DNA, 120 bp, synthetic construct
  source 1..120: mol_type = other DNA
cctttacgataagagaaagaaaagctcaggactggttcaatttgtaggtaaggatgtctcacctatatataaaccaaatacacaagtctactgtgatttcagctctgcacatactgccag

SEQ ID NO: 4016 - DNA, 120 bp, synthetic construct
  source 1..120: mol_type = other DNA
taaaatgaggattacacatcttcaggtcaggaaaacagctcgattcatgaccatctcccattaccaaagacccttttaaggattgataaacaaaatagaaaaaaaaaaaaaaacagagtc

SEQ ID NO: 4017 - DNA, 120 bp, synthetic construct
  source 1..120: mol_type = other DNA
actttctttttacaaaatcaattatttacaaacagtgagggaaggcccaaaaatgctaaattccatctcaaactgtattaaataactctcagaaaagggcagcaacaaataattagataa

SEQ ID NO: 4018 - DNA, 120 bp, synthetic construct
  source 1..120: mol_type = other DNA
agagagaaaaagagagagagtgtcatctctggaaagtgtgaagtcagggaattccctactaggaagtatttccataaagcaccccaaaatgacttgatgcaaacaccatacctagtggtg

SEQ ID NO: 4019 - DNA, 120 bp, synthetic construct
  source 1..120: mol_type = other DNA
caaacacccatgtgtccatctcccagatgtcgtaagtcgccaatattttgccacatttgcttacttcaaatcactccctttcaatcaactgcattgaggcggaacttactgtttgttgat

SEQ ID NO: 4020 - DNA, 120 bp, synthetic construct
  source 1..120: mol_type = other DNA
aggcctgtaatgctatggagaaacttggtgactctaacaatttagatgttgggtaacaacaccaaactgaaaacacatgtcaacctatctcttgacatggtgaacgttctcaccattctc

SEQ ID NO: 4021 - DNA, 120 bp, synthetic construct
  source 1..120: mol_type = other DNA
gacaattgcagcggtgttattttacctgcttctgggaggtgctccaaggatggatttttaggaagatcaatttctaagactcctacataagaagtcagcaatgccgttgtttagatcagc

SEQ ID NO: 4022 - DNA, 120 bp, synthetic construct
  source 1..120: mol_type = other DNA
ggttccatgagacacccatttggtcttctcgtttcagctatcctgagtcagtttctgtcacttgcacccaaacaaccttaactaataaagaattggcttatgctggctggacaatctaaa

SEQ ID NO: 4023 - DNA, 120 bp, synthetic construct
  source 1..120: mol_type = other DNA
gaaatccttaaaggagtttattatttgccaagaatatggtttgatgaagaccgtgtcagactcatgcattctggaatccgtgagtgcctccaaccataaacccagaaatgctgccataga

SEQ ID NO: 4024 - DNA, 120 bp, synthetic construct
  source 1..120: mol_type = other DNA
ttctgtaaagtcactgcaaacattgaattagtgaatactggatcattgcccctgggggaaatagggttaggttcctgcaggtctctggtcacatttcatcaactgatcaatacataacct

SEQ ID NO: 4025 - DNA, 120 bp, synthetic construct
  source 1..120: mol_type = other DNA
tgagaagctggtaggtcttctttcctaagcaggtgacatactacatgaaaaggactgaaaaaccaaaccactttttgagaaaagattggcttgtcacagtggctcatgcctgtaatccca

SEQ ID NO: 4026 - DNA, 120 bp, synthetic construct
  source 1..120: mol_type = other DNA
cacctttcagagacagtttgtgctcacgctgagcgaactcaagcgcctcttcaatctgcacttggccagcctgccccccggccacacactcttcagcggcatctcggaccgcatgctaca

SEQ ID NO: 4027 - DNA, 120 bp, synthetic construct
  source 1..120: mol_type = other DNA
atttcataacgaaataccagtattaggtatcttttgaaaaagtgtcgtaactgacagcccaagtctgcattccttcatggcaccagggctagaactgagaagtagctgactttttggggt

SEQ ID NO: 4028 - DNA, 120 bp, synthetic construct
  source 1..120: mol_type = other DNA
cacactgagagcattctctgcctgctctaaagtggactctgtgagtctgtgttctctctcctcagtgagacaaagctcctgcgggaaggacatggcctgcttttctgtgtcccccacaga

SEQ ID NO: 4029 - DNA, 120 bp, synthetic construct
  source 1..120: mol_type = other DNA
gtgagaggatcacttgagccctcacttcgaactcctcaccaggagttcgaaagcagcctgggcaaaataagaacttgtttctacgaatatatatatgtgtgtgtgtgtgtgtatatatat

SEQ ID NO: 4030 - DNA, 120 bp, synthetic construct
  source 1..120: mol_type = other DNA
ggaggcgtgcgctctctactatgccttgatgttgcctaccttattgtggtatcgtggagtttaaaagatcaagttaggatgctgacttaggattattaatgaaagtgttgcaccagtttt

SEQ ID NO: 4031 - DNA, 120 bp, synthetic construct
  source 1..120: mol_type = other DNA
aagttggcactcacaaatggtcctttcccagtctgagtgaacagtggacaccttgcgagttgggccgtgtgctcacagacacagccagcacatcctcgagggctgttcaaaaagagtgat

SEQ ID NO: 4032 - DNA, 120 bp, synthetic construct
  source 1..120: mol_type = other DNA
caaatttctactggcttatgtgaagaaaaaggtagcggggcttcagtctcagctggatccaggtgctcatataacatcaactggtttcagtatctctctcaacttcccattgttcttcta

SEQ ID NO: 4033 - DNA, 120 bp, synthetic construct
  source 1..120: mol_type = other DNA
gctttgtaattttcttgtgatactttgattttggtattagaataatactgacctcttagaatgagttgggaggtgttccctcttttttgtgggtggggggggggcacagtttgtgaaagg

SEQ ID NO: 4034 - DNA, 120 bp, synthetic construct
  source 1..120: mol_type = other DNA
caagtgggaagtacaatgactaatgacagacccatgcttcccctgccccccagagtaaatgcaatcaaagaactataacaaaaatgagttaaaaaaacacacacacacttgcaaaatgga

SEQ ID NO: 4035 - DNA, 120 bp, synthetic construct
  source 1..120: mol_type = other DNA
agctcagttatcagtgtcctgtcttgctgctatgagctttttgtactgataacgaccatttctttactgagcgccttctgggttctggcagcatcctcggcacccacattatataattta

SEQ ID NO: 4036 - DNA, 120 bp, synthetic construct
  source 1..120: mol_type = other DNA
tctggttcccagtagatatagaagatgccttcctggccttgcaattagagagaaaagttcaacccatcaagactgactcctttgtgaaatgggaatcctcttctgtgcatcctgtacaga

SEQ ID NO: 4037 - DNA, 120 bp, synthetic construct
  source 1..120: mol_type = other DNA
tccccaactgtactcctgaattctcttttcctctccctctagaatccacagtatgaatttaaggaggctgcagggagttttacatccagcctggcacaaccaggagcctattatccctat

SEQ ID NO: 4038 - DNA, 120 bp, synthetic construct
  source 1..120: mol_type = other DNA
ttgatattgaaggcatttcttagcctgagttgtggtcaaaaagtgtgagatgctgcattagtggagaaaggaagctctttcaactgaaagtgtctccaaagaccatagagaaggtggcat

SEQ ID NO: 4039 - DNA, 120 bp, synthetic construct
  source 1..120: mol_type = other DNA
tcctttgccaatgcctgtattcatagcaacactcgcacaacttcaatgacaggtacctcaccacctctctaggctcttttcctttagagagctctatatatgggaaagttcttcatttta

SEQ ID NO: 4040 - DNA, 120 bp, synthetic construct
  source 1..120: mol_type = other DNA
ttgattaacagaagttgtctttttaaaagtgtttatttttggcaataaagagcacaacataatctccttcatgcgtcatcgtgccacttagctgagccagccagctctgcctccctcccc

SEQ ID NO: 4041 - DNA, 120 bp, synthetic construct
  source 1..120: mol_type = other DNA
gattctgtgttgttttcaactggggaaatctccacatcaaaacagtgaatagtggttatagacgtgatttgcattctctttaaattaactacttaaggccgggcgcggtggctcacgcct

SEQ ID NO: 4042 - DNA, 120 bp, synthetic construct
  source 1..120: mol_type = other DNA
gctgggaggctgcagctacacccaggagcatgggctcctgccctgccaacttagtagaggccagggctctcacctgttcccagttcccataggctctgcatagttctatgggaaaacaga

SEQ ID NO: 4043 - DNA, 120 bp, synthetic construct
  source 1..120: mol_type = other DNA
tagagaagcctgagggaggtgactcctgtgagtcggagggtggcactctacctctcccagacacctccctccattgcacagtgcagatatgcaggttcagcaaagtctccttgacttaag

SEQ ID NO: 4044 - DNA, 120 bp, synthetic construct
  source 1..120: mol_type = other DNA
ccaatcagccttaggaaagagctccttcctaaggagctgccacacctccccaggaccccagtggagggatgagagcgcagcaagcatctggccactgccagggaacattcactcaacaga

SEQ ID NO: 4045 - DNA, 120 bp, synthetic construct
  source 1..120: mol_type = other DNA
ttaaagcacttagcacagtcctggtcctatttaagtggtggtaactaaaatttttttaaacacgcaaccccccccccccaacatttctttaaaaacacacacacacacacacgcacacac

SEQ ID NO: 4046 - DNA, 120 bp, synthetic construct
  source 1..120: mol_type = other DNA
aagcagtgatcaggttttcgatttcatcgttgggttggcgagtgtttcccaatgacgtcaggcattttaaacctttagaggaaattcagctttctcggatgtctgctttacggttgtgaa

SEQ ID NO: 4047 - DNA, 120 bp, synthetic construct
  source 1..120: mol_type = other DNA
cttggtaattattaaacggccctgaactgaaggccatagctcctggctggactgaactgaagggaactgaaatattcagtgtggactaaacacttaactagacagaagctattcagcaca

SEQ ID NO: 4048 - DNA, 120 bp, synthetic construct
  source 1..120: mol_type = other DNA
aacgaaagagagccaacattgcatgaaggctgagattttttttaaaaggcaaggattcagaaaagggctgatcagtattttctgatcctagttcagtgctagtcagggagactgtcagta

SEQ ID NO: 4049 - DNA, 120 bp, synthetic construct
  source 1..120: mol_type = other DNA
attattcctcttgtccatcttcactattgttctcatagatcaatgggtcttaaatctgtctgcacattagaatcagctggggagcttttaacaattaccagtgcccagacctctccccag

SEQ ID NO: 4050 - DNA, 120 bp, synthetic construct
  source 1..120: mol_type = other DNA
cacagcatgaacatcctgaacagaatccaggagcattttagtgagtcccggggagggtcctgtgcctggcgccctttgctaagtagggcggggtggtgaaaggggtaggatcttctgtag

SEQ ID NO: 4051 - DNA, 120 bp, synthetic construct
  source 1..120: mol_type = other DNA
tgatgttgaacaagtgtctgtcgtcatcaactttgatcttcccgtggacaaggacgggaatcctgacaatgagacctacctgcaccggatcgggcgcacgggccgctttggcaagagggg

SEQ ID NO: 4052 - DNA, 120 bp, synthetic construct
  source 1..120: mol_type = other DNA
ccatcccttgactgcagggcgttcttccagccctgaggctttctgcaggccctgttggaggttataacagagctagtgctaatgaaaggaggagccaggaacatgcccctttccagatct

SEQ ID NO: 4053 - DNA, 120 bp, synthetic construct
  source 1..120: mol_type = other DNA
tacaaaactatgtctattttgcaaataagaaaaatgagattcagagtcacacaattagtacataatgacatcagggtaggaacctgtgtcggtttcataaaacctaggttcttttcagga

SEQ ID NO: 4054 - DNA, 120 bp, synthetic construct
  source 1..120: mol_type = other DNA
ttaagagggagttcagcctgtttttaaaacccttcttaacacttagctgggtacctcccagcagtgcgcactcccaatgcggctggcataattagtgtcaaaatggaaagaaaaaaaaaa

SEQ ID NO: 4055 - DNA, 120 bp, synthetic construct
  source 1..120: mol_type = other DNA
ttccacaatgtgtgcccaattgacaaaatggcttgggttggtcccaaagagggaaagttgctgttgtacccctgatattccctttgctgtccatgcatccaggactggagatttgaatac

SEQ ID NO: 4056 - DNA, 120 bp, synthetic construct
  source 1..120: mol_type = other DNA
ttctaaagtgtccaaaagttgacctgacactttaacgctgatgcagatactccacaaaaaaaagcggagctgttaaaagggaagcagaaaccattcctccagtcaaggccaaatgtacat

SEQ ID NO: 4057 - DNA, 120 bp, synthetic construct
  source 1..120: mol_type = other DNA
aaccatactggtcagcttccaggttcatttagataatcttgaagcctaatttagaaatatgaccccccccaataaatcctttgtctatcattaataaactgaatgagctgggtgcagggg

SEQ ID NO: 4058 - DNA, 120 bp, synthetic construct
  source 1..120: mol_type = other DNA
tcttatggaaaatatgttttggctgtttaggggatgctaggggctggaagtgagaaggtttcaacaccatatgggtatgtgagtatagatgcttacaagaagaagggtagacttagccaa

SEQ ID NO: 4059 - DNA, 120 bp, synthetic construct
  source 1..120: mol_type = other DNA
aggcttattgaaacttggagtggattcgtagtctgccacgagaatccttgtctgatgtttgtgggtgtgtaggactgaatttgaagtccttaaatggatgtcctaacagtgaataaagac

SEQ ID NO: 4060 - DNA, 120 bp, synthetic construct
  source 1..120: mol_type = other DNA
atgtttactttgcaaactgaatttctcttgctgctttttctgaagttccccagaggctcatcatcatcaataccatcaattaatagtcatccttggcttcctcgatcctcagcactgcgc

SEQ ID NO: 4061 - DNA, 120 bp, synthetic construct
  source 1..120: mol_type = other DNA
atgatctcatttgaaattagtcacctcccaaagccccacctccaagtactgtcacactggggcatagggcttcagcatatgaatttgggggagctggggagaggaacacatacatttagt

SEQ ID NO: 4062 - DNA, 120 bp, synthetic construct
  source 1..120: mol_type = other DNA
tgtatttctcagggcagcgtgggacctcagggtttgtcatggaccacacctttctcctttgtccctttttataactcataggctacctccaacttgacacttatttaagtttttatttat

SEQ ID NO: 4063 - DNA, 120 bp, synthetic construct
  source 1..120: mol_type = other DNA
ttaatctgtaaaaaatgaggatttgtttatagccccaaagacagtctagtttggattatttgaggacctagacttcacctgcacagtggtttcaccatccatccccccatggcctccatg

SEQ ID NO: 4064 - DNA, 120 bp, synthetic construct
  source 1..120: mol_type = other DNA
ctggtctccactaggagaaaaccgagccaagcttgaaagtactaagcgtgcccaggggaaatggaataagctagaaatttgttgtttccttttcactaggtttaagtgagaatatttgtg

SEQ ID NO: 4065 - DNA, 120 bp, synthetic construct
  source 1..120: mol_type = other DNA
tgatcccctgttcaacgcttacggtttagtgtagtgtttctcaaagtcagatgcaaacattcgttgctacataagatggccgagaaatgctaaataagagtgaatcacatcgtgagaaag

SEQ ID NO: 4066 - DNA, 120 bp, synthetic construct
  source 1..120: mol_type = other DNA
gaaggcataaaacccagtggtaatagcaagttcacagaaaaaaacggaatactataacattgtaactgtgggatgtaaactactcttattaaatagaaaggataaacaatgagcaggtca

SEQ ID NO: 4067 - DNA, 120 bp, synthetic construct
  source 1..120: mol_type = other DNA
gccataaaaaaatgaaatcctgtcatctgcaacaacacagatggaactggaggtcattctgctgagtgaaagaagccaggcacaaaaagacaggcattacctgatttcacttatttgtgg

SEQ ID NO: 4068 - DNA, 120 bp, synthetic construct
  source 1..120: mol_type = other DNA
tcgaggacttttattcttaatttggggtccgacatgcttagagcacctattttctctttcctgtgggcacgttggtgcaatatctgcaaagactcctttttcagggaggattgctggtcg

SEQ ID NO: 4069 - DNA, 120 bp, synthetic construct
  source 1..120: mol_type = other DNA
ggagagttttttcctttatttctctttaattaaatgcacaatgcatgaacggcttcctgcaataatttgaaacattgcagataaagctgagccctacccgttggtcctcccccgagccac

SEQ ID NO: 4070 - DNA, 120 bp, synthetic construct
  source 1..120: mol_type = other DNA
cagacgactctagtctatagaacacgtaacgtggccatgagcagcctcataagagaccgtttttctctcagcatctatgcttggccttcgttatttgcagcatcagtattggtgaatttg

SEQ ID NO: 4071 - DNA, 120 bp, synthetic construct
  source 1..120: mol_type = other DNA
gggttggggagacacaagcagttggcagggaacttacaaatctccaggaggttattgagaataaaaattcagatattgccatcttttccatttcaaagcaccaagagtctgtcatcagca

SEQ ID NO: 4072 - DNA, 120 bp, synthetic construct
  source 1..120: mol_type = other DNA
tggaacacaaagagaatgcttgaagaagttgcttgagttgaatcttgaagagtaagcaagagttaacagggtgaagaaggtgagaaatgccttctgcagagagggagcactatacacaaa

SEQ ID NO: 4073 - DNA, 120 bp, synthetic construct
  source 1..120: mol_type = other DNA
tatacatgagtgttagaagcctctacaacacagcaattgtggactgaatgcttcattcaggcaataagcaaaagcctccttcagcagcgtattatttaatcctcacataaccctgcaagg

SEQ ID NO: 4074 - DNA, 120 bp, synthetic construct
  source 1..120: mol_type = other DNA
cctcccaaagggtggggattacaagcatgagcacctggccttaatttcccccttttaaggcaactagcagttttattcaataactgaaacttaccataggctagagtataggagaaaaat

SEQ ID NO: 4075 - DNA, 120 bp, synthetic construct
  source 1..120: mol_type = other DNA
caaaatgcctctgttcccacgttgcaggtaggaaattaaagctcttaagaaaggatggcattgtttatccatattcagaaaccacagggctgggatttttttcaaatgaggccatgctag

SEQ ID NO: 4076 - DNA, 120 bp, synthetic construct
  source 1..120: mol_type = other DNA
gggtggtctccccatttcaagatccttaacaaagcctcttgtgccacctaaggtaaaatattcacagattccaggaattagaacatggccatctttgatagatgtttttctgtgtgccat

SEQ ID NO: 4077 - DNA, 120 bp, synthetic construct
  source 1..120: mol_type = other DNA
aaaaaaaaaacagtattgctaagtttcgcctggttttgaacctcacataaaggaaccacaccacatggaccctttggtgacttgtttctttcactcaacatcattcccgagactcatcca

SEQ ID NO: 4078 - DNA, 120 bp, synthetic construct
  source 1..120: mol_type = other DNA
cggaattccctaatgccagcgggggtctgaaaggtctcagctgcttaggatttcgttggtaaaaaagaacaaagtataagactgagttactaatttgacacaagatttcttggagagatc

SEQ ID NO: 4079 - DNA, 120 bp, synthetic construct
  source 1..120: mol_type = other DNA
caggaaagaaaagtctaaaagggatcaggatagaaaggcaaagaaacctacaaggcaaaggaatggcccgacccaagaccaagacctgttgaatcagaggctccacctcctgacacccca

SEQ ID NO: 4080 - DNA, 120 bp, synthetic construct
  source 1..120: mol_type = other DNA
acctaaatcccctagacaactgaacccccccagatcagctgactgaacctcccagaccagtgaactggaccccactcattaaaatgatgtttggaatatactgaattaaataaaacatat

SEQ ID NO: 4081 - DNA, 120 bp, synthetic construct
  source 1..120: mol_type = other DNA
aaagaaaaaaaggaaccccaacaaaatatcagactgcggtactgaggactatcagttacacactctgtgctgaatgaataaaaacgagccgctggggcgaaggcagggagaggagctttg

SEQ ID NO: 4082 - DNA, 120 bp, synthetic construct
  source 1..120: mol_type = other DNA
gtgaggagctgtgcgtcccttcccagaataaaggaaggtccctgcacacatgagggttggtggctctcctgagggttcacaggttcccggggacccatccacagatccccagataagaac

SEQ ID NO: 4083 - DNA, 120 bp, synthetic construct
  source 1..120: mol_type = other DNA
caaatcctatcccagcttctacaggtgaaaaggcaggtgcaaagcaaatcctaacccagcttctacatgggtggttctcagtggttttcttgtcttaatcgtttcctgcatctcccagca

SEQ ID NO: 4084 - DNA, 120 bp, synthetic construct
  source 1..120: mol_type = other DNA
cctgtgtgtggtgtcatggaaccttaccatgttgtgtgtgtaagtctgctctgttagcagctctgcaggattcattcacaggtgccccctccacagttgactcttctctttcagagggct

SEQ ID NO: 4085 - DNA, 120 bp, synthetic construct
  source 1..120: mol_type = other DNA
gctcagacagcagctcacagccccggattttctgctttgttttcattaactgaacatactgactcgaaaaattatttttaaaaataaaaagctaattttattttagtttattttaattta

SEQ ID NO: 4086 - DNA, 120 bp, synthetic construct
  source 1..120: mol_type = other DNA
tgtctggatttctctgaacaagactctgttctggtgtctctggttcctccgtcactgctgctgccccacgtgcctttgcactgcaagcagggtcgcaactgctgctcattcccgggtctt

SEQ ID NO: 4087 - DNA, 120 bp, synthetic construct
  source 1..120: mol_type = other DNA
gttggtgggcttcgctgggcgcacacggcccacctggcactcaccagcctccgggctgcccttggcaggtgccgtccacactccagcactcagggaggggcggtgcacatcctcaaaaac

SEQ ID NO: 4088 - DNA, 120 bp, synthetic construct
  source 1..120: mol_type = other DNA
tgggtggatggatagatacgtgggtggatgggaagatggatgggtggatggatagatatgtgggtggatgggtagatggatgggtgagtgcatggatggatggatggatggatagatggt

SEQ ID NO: 4089 - DNA, 120 bp, synthetic construct
  source 1..120: mol_type = other DNA
ctgtgtgactgcaggcacctcgcttaacctctctgagccctactgtgtgaccgcaggcacctcgcttaacctctctgagccctgctgtgtgactgcaggcacctcgcttaacctctctga

SEQ ID NO: 4090 - DNA, 120 bp, synthetic construct
  source 1..120: mol_type = other DNA
ttccccttcatggtcaatcacttgggtgagatctgtggtttccagcttatctgagatggagcaatccctcttcccaagctgtctcccaggacagcccagcatgtgaaacacacaggggcc

SEQ ID NO: 4091 - DNA, 120 bp, synthetic construct
  source 1..120: mol_type = other DNA
aggatgcttgctggggagtccccaggttcccaccccatccccaccgcaggggctttgccccgccacctgggctgcaccctcagggctccgggtggttgccggccttcagctctggagagg

SEQ ID NO: 4092 - DNA, 120 bp, synthetic construct
  source 1..120: mol_type = other DNA
ctcttgtggaccctttctgatctcacttttgtttccatagggaactgtacctggggaatgaattgtaggtttatacaccctggagtgaacgacaaggggaactactccctaatcaccaaa

SEQ ID NO: 4093 - DNA, 120 bp, synthetic construct
  source 1..120: mol_type = other DNA
ccccacacacacacacacgctcctgccctggttgaggctggagggtgccctctgctccgcatgcccttgggcaaaagatccctgggcacagaggtgggaagaataacaggaggttgtgcg

SEQ ID NO: 4094 - DNA, 120 bp, synthetic construct
  source 1..120: mol_type = other DNA
caagaactgctcccaccccactgagctcaggctcccagagcagagctggaggccagccaacctccgtccccgctccccattccttcatcgcttctactccagcatccgtgagtgcccagg

SEQ ID NO: 4095 - DNA, 120 bp, synthetic construct
  source 1..120: mol_type = other DNA
ccttttcgcccgcacagcaggagcccaggctgaagtctgcagctgccgaggggccttcttcccgaatcctgcgcggcagatccaggggctgtgggcagccacgcccagcccgtgtaaaca

SEQ ID NO: 4096 - DNA, 120 bp, synthetic construct
  source 1..120: mol_type = other DNA
aggcggcaatgccggggaccgatgcccaggacggccctcacaggcggcaatgccggggaccgatgcccaggatggcccttgcaggtgacagtgctgggtaaaacccgaaagaagagcggg

SEQ ID NO: 4097 - DNA, 120 bp, synthetic construct
  source 1..120: mol_type = other DNA
tatgcttctgttttggctttcagctgtgctggtttctatcacttgaaactctgaagcccccaatccccgcagcacactgggctgtaggcgccccccgacatggtctgggacgaggctgta

SEQ ID NO: 4098 - DNA, 120 bp, synthetic construct
  source 1..120: mol_type = other DNA
actgatgctgctgacagcccagtgggactgaagcatcggcttagaaaagaaaaagcacctgcttatctctttcataaccttcacgctccttaaaccagctgggacctcaccccaaaaaca

SEQ ID NO: 4099 - DNA, 120 bp, synthetic construct
  source 1..120: mol_type = other DNA
acgccaggctggctcgggggacacaggtccaggacactggggatgccccctgtttggactttccaaagccctcccatggaggcggctacatttgagccacgagacttgaataaaacagaa

SEQ ID NO: 4100 - DNA, 120 bp, synthetic construct
  source 1..120: mol_type = other DNA
ttttgcgctcccccagtgcagggtcccagactgcacgcctcacagtgccacacgtctgcacgcctctgcacacgtcacgtgcctctatacgcctcacacgcctcacagtgccacacgtct

SEQ ID NO: 4101 - DNA, 120 bp, synthetic construct
  source 1..120: mol_type = other DNA
tggtgaacaggtcaggtgtcgttttattcatgttgaaagcagcccttcatttgaatgcgagtgtcattctcatctagtaatttttgttgcgaggctccatggggagcaccctgctgagca

SEQ ID NO: 4102 - DNA, 120 bp, synthetic construct
  source 1..120: mol_type = other DNA
ctccaaggactacgacccggaagactggctgcaagtggacgcagccactggccggatccagacccagcacgtgctcagcccggcgtcccccttcctcaagggcggctggtacagagccat

SEQ ID NO: 4103 - DNA, 120 bp, synthetic construct
  source 1..120: mol_type = other DNA
tcaggactccactgggggaggctcagggctccagtggggctctctggcccttgccaggcacagggtgcccacctgcgaagtccttgacgttgacgtctgccccctcgctgatgagctctt

SEQ ID NO: 4104 - DNA, 120 bp, synthetic construct
  source 1..120: mol_type = other DNA
tgcagagaacggtgctccacttctgaagggaggcagatcaaagattctgtggacactctttaaacttcccccagtggcttttgattaaaacctggtaatttgactgtacagttctagtta

SEQ ID NO: 4105 - DNA, 120 bp, synthetic construct
  source 1..120: mol_type = other DNA
ggaataatgacaaaaatgtgtctgtgcatgttgagtatagatgcacgtttttccccagatacattcattctgtgcttggttaaacctgcagagatgaaacctgtggctgtggaggccaac

SEQ ID NO: 4106 - DNA, 120 bp, synthetic construct
  source 1..120: mol_type = other DNA
acgccctggtaccaggtggccctggccaccagcacctcgaggaaacagggcctctggcaacccatctggaaccacagacgccctggtaccaggtggccctggccaccagcacctcgagga

SEQ ID NO: 4107 - DNA, 120 bp, synthetic construct
  source 1..120: mol_type = other DNA
tgggaacgaaacagtgaagagaccacactgccctgagctgggaatgcctggtccttggatgccctcagctgagaggtggcgttctaaacaccgaagagttcatttctcacgaattccacc

SEQ ID NO: 4108 - DNA, 120 bp, synthetic construct
  source 1..120: mol_type = other DNA
tctctccattttacagctgggcattggaggcccagagaaagggttctgtggggagaacagaaaccactcatgcatttcaagtggaatgaagtgtaaagcagacagaagcttacagaattg

SEQ ID NO: 4109 - DNA, 120 bp, synthetic construct
  source 1..120: mol_type = other DNA
ccttcttatgactgatattccacgcacctgctacactccttcttagggctgatattccactgcagggacagacttcatttgtgtatccattcatcagtggatggacacttggggtgtttc

SEQ ID NO: 4110 - DNA, 120 bp, synthetic construct
  source 1..120: mol_type = other DNA
gacgtcggggatatccaaagtgccccacagggaaaagattctgaagagatcggaacacgaaatttctttgcaaatttctctttcaatccacaaacttttcccgagcacctttatatacaa

SEQ ID NO: 4111 - DNA, 120 bp, synthetic construct
  source 1..120: mol_type = other DNA
gcacgtcccctgccctgccccaggctcctgccagcctcctgctgggggtccaggatatggcacatcccccgtccagggctcctgccagccccctgctgggggtctgggatatggcacgtc

SEQ ID NO: 4112 - DNA, 120 bp, synthetic construct
  source 1..120: mol_type = other DNA
aggcaaccaccccagcaagtgcggctcctccttcttccagggctgtgatcgctccccaccttacaccctggcattttcacctcttcgatcttgtttcagggacacgttcactgatataac

SEQ ID NO: 4113 - DNA, 120 bp, synthetic construct
  source 1..120: mol_type = other DNA
gctgtgtagtggagaaagggcaggcagtgagcaagcgtgtacaaggtatatacgtgccacatgctgctgtgtagtggagaaagggcaggcagcgagcaagtgtgtacaaggtatatacgt

SEQ ID NO: 4114 - DNA, 120 bp, synthetic construct
  source 1..120: mol_type = other DNA
tctaggacagaaagagctggtgaggacgcaccagcaggcaaaatattaagtgatcatgaaaatggtccttacaaagaccatagcgacacggcaaatttttgcgccacactgtttagtaaa

SEQ ID NO: 4115 - DNA, 120 bp, synthetic construct
  source 1..120: mol_type = other DNA
aaggaaagggagagcccaggagtgtccacttccagcagtggctctgggtgcggcaaaggcacaaactggacaaaagcagcaatccttctgattaaacctgttctacatccttccaattac

SEQ ID NO: 4116 - DNA, 120 bp, synthetic construct
  source 1..120: mol_type = other DNA
atgacgtcatgggaccagatgtccgcagccgaggtgaggtgtgctttgctctccacttctgagggtctcagtaacgtgggtccaaacacggtagccaggttgtgaagtgacattttgttg

SEQ ID NO: 4117 - DNA, 120 bp, synthetic construct
  source 1..120: mol_type = other DNA
cccaaatatttctcaaaacagaaaaacatgagtgcaagaacttggaaagcaaactctcactccccacagacagcccgatggaggccagcgcccacgaggagggactgaggaggtggggtt

SEQ ID NO: 4118 - DNA, 120 bp, synthetic construct
  source 1..120: mol_type = other DNA
acctgaggggatgggggcacaaggaacctgaggggatgtgggcacaaagaagggacaaagaagggaggccagtttgcccccaggaactcagggaggcttcctgggaaaggctgctctaac

SEQ ID NO: 4119 - DNA, 120 bp, synthetic construct
  source 1..120: mol_type = other DNA
gctctgagctcacctcccccttgggcgttgtcactgcagtccggcgggggtcgatgtcctcgttgatgctggacaggaagttctgggagatgcggagggcatcctgcagcagcgggtagt

SEQ ID NO: 4120 - DNA, 120 bp, synthetic construct
  source 1..120: mol_type = other DNA
ggtactgagttaactgctttgctctcattatttcctgtgattaaaacgggaagcaattctcactagccccattttacagacaaggcaactgaggccagagacttgtggctacaagtggtg

SEQ ID NO: 4121 - DNA, 120 bp, synthetic construct
  source 1..120: mol_type = other DNA
gagggctgggggtccaggcacacctgcgggagggctgggggtccaggcacacctgcgggagggctgggggtccaggcacacctacgggagggctgggtccaggtctaccgaacctgtcag

SEQ ID NO: 4122 - DNA, 120 bp, synthetic construct
  source 1..120: mol_type = other DNA
caggagaagcaggaatgcggtactcacgcacaagggaagtatgcggtactcacacacaggagaagtaggaacgcagtactcacacacaggaagcactcagtaaaagccagtgacacttac

SEQ ID NO: 4123 - DNA, 120 bp, synthetic construct
  source 1..120: mol_type = other DNA
aagggtaagagtgcgggagaaagaacacagtttacagcagggccaaccgagcgcacagtccctggcttgtagtctgcgaccttgaattaattaatttagtttgtttatgtatttatttat

SEQ ID NO: 4124 - DNA, 120 bp, synthetic construct
  source 1..120: mol_type = other DNA
tcacctcagtccacccaacacatcacctcagtcaacgcaacacatcacctcagtccactcaacacatcacctcagcccacccaacacatcacctcagcccacccaacacatcacctcagc

SEQ ID NO: 4125 - DNA, 120 bp, synthetic construct
  source 1..120: mol_type = other DNA
aactggacatatggatgataaacttcacccaaacttgccaatgagtcgtccccccaacaagacttgccagtgagtctagtaagacaggttaacacaggaggacctatcatggtgaggatt

SEQ ID NO: 4126 - DNA, 120 bp, synthetic construct
  source 1..120: mol_type = other DNA
gggggggaatctggggatgcatctagagtgtgacggggctgagggagggcccactttcaccttgaaattacagacaacactataaaacagacaaagatttatgttggaaaaaaagaattt

SEQ ID NO: 4127 - DNA, 120 bp, synthetic construct
  source 1..120: mol_type = other DNA
atttttttttttttttttttttttttttttgtcttcctttgcacaggggaaatgctgatagaaagtggggctgtgtgtagctccagtcacaaagagtgacacgaatcggtgtcagggcag

SEQ ID NO: 4128 - DNA, 120 bp, synthetic construct
  source 1..120: mol_type = other DNA
ataagcaggaggagggggaatcacccaacatctgtagagagctggaccacaggaatagaaacagaattgtttaagagaccaataccaagctaaatagttagtgtaaccagtgatgaaaca

SEQ ID NO: 4129 - DNA, 120 bp, synthetic construct
  source 1..120: mol_type = other DNA
atgctggagccagctcagaagagctcgcaagagctgatcgttaaattctcatgaagcttgtgagctggttgttaaacacagccattattcagaactaaatcaatgaataagatgaataag

SEQ ID NO: 4130 - DNA, 120 bp, synthetic construct
  source 1..120: mol_type = other DNA
atcttgggcaggggaggaagggaggagggaagtagctcttcaagagggcagggattaggtggcatccgtggtggtagcaggagggacctaaggacagtaccctgcttgagaagggccgag

SEQ ID NO: 4131 - DNA, 120 bp, synthetic construct
  source 1..120: mol_type = other DNA
cagtagtggttcttggggccaaagtggcatgatttcaggaaagatctgtccttgacgtccatcacattgcttctgggtggaggccatgggcagccgagaaatgaagtaagacttgatgtt

SEQ ID NO: 4132 - DNA, 120 bp, synthetic construct
  source 1..120: mol_type = other DNA
aagtttctgctttggtgggaaagcagacaacaagcaaataaacgagagaaacagggagatactatgtattggcaaggctatgagaaaaattaaaatactgttggccgagtgcggtggctc

SEQ ID NO: 4133 - DNA, 120 bp, synthetic construct
  source 1..120: mol_type = other DNA
actgatatgtgggctctgggggagacacaggtgctgcctaactgatacgtgggctctgggggagacgcaggcgccgcctaactgatacgtgggctttggggccactcctccaatccaaag

SEQ ID NO: 4134 - DNA, 120 bp, synthetic construct
  source 1..120: mol_type = other DNA
cagaagaggaactcatccctcctggctaggaaagagccatcagggaaggaggcaccccattaagaggggagctcagaaggaggagtgggaggaaggagctgggaaaggtgttccaaagca

SEQ ID NO: 4135 - DNA, 120 bp, synthetic construct
  source 1..120: mol_type = other DNA
caaacagtggatcccccttgctcgcaagctccaggtctattgctgactttcatttctcatcttaactagactagaaattctctgagggaaaggaccatgtcttatttatctacctagaga

SEQ ID NO: 4136 - DNA, 120 bp, synthetic construct
  source 1..120: mol_type = other DNA
ttttgaacttccgctccccctccccacttccgggcagtgtggacagggagatggtggtgggagcagcggtagtaaaccaatatactttcgcttatgctgtctcagaacttctcacaaagt

SEQ ID NO: 4137 - DNA, 120 bp, synthetic construct
  source 1..120: mol_type = other DNA
cccaagtccaagccagatttccttttctaaaaaaagaattttcctctaagttcccctttttaaatgagctctttagcctgggtagttatgcagtgctagaaccgtaactgcatgatcaaa

SEQ ID NO: 4138 - DNA, 120 bp, synthetic construct
  source 1..120: mol_type = other DNA
ctgccatttggagagctgaatgatttctctcaatcttcatttcccccaatctttcccccaccctatacatatgtacacaagataatagatatgaaagcactcggtaagctatcaagggct

SEQ ID NO: 4139 - DNA, 120 bp, synthetic construct
  source 1..120: mol_type = other DNA
ctagtttaagaggatgtgaatgacagaggaggtagcaaagaaaatcagaaagggctgattcataaggcacctatactcaaggtagaaacaatgaagcagacagctactattccaggactc

SEQ ID NO: 4140 - DNA, 120 bp, synthetic construct
  source 1..120: mol_type = other DNA
tctggaaaaatcaggattttctgacgatgtatgacagcaaccatgcgaattcctagaactaaggacccacatcttccatgagatgctagtgtgtttagagggctgaggatgtcccaaagg

SEQ ID NO: 4141 - DNA, 120 bp, synthetic construct
  source 1..120: mol_type = other DNA
cgggaggtccgcgagcccgggggcagccggccggtgtcggcgcagcggcgcgtgtgtccccgcggcaccaagtccctttgccagaagcagctcctcatcctgctgtccaaggtgcgactg

SEQ ID NO: 4142 - DNA, 120 bp, synthetic construct
  source 1..120: mol_type = other DNA
tatatgacattgggcaaattactccaccagctgtctccacttcctcctctatgcaatacggttagagatagagcccatctcacagcattgttttgaggattaaatggattcatgtaggta

SEQ ID NO: 4143 - DNA, 120 bp, synthetic construct
  source 1..120: mol_type = other DNA
cactccttgaggcaaaattcttgttcttcatctcatatgaggggaaagttggtactggattttgtctacattatatcctccatcctcttctaagcccaaacagatttgggccgttatccc

SEQ ID NO: 4144 - DNA, 120 bp, synthetic construct
  source 1..120: mol_type = other DNA
tacctaacctctagcaatcctcaggccctggcctcccaaagttttgggattataggcattagccattgtgccaggcaagttatttccccaaaaaacactttcttaagggatggtcccagt

SEQ ID NO: 4145 - DNA, 120 bp, synthetic construct
  source 1..120: mol_type = other DNA
catgcactcctttaggtattagggctataatcagtgaacaagacaagtatggtccctctgtccaagaagatatctaccagtggcaaccaatgagcaaacacacaaataagacagatgcaa

SEQ ID NO: 4146 - DNA, 120 bp, synthetic construct
  source 1..120: mol_type = other DNA
cgagcatcagaagttctaatattttcttggcactttcgcatcacttctagcaacccacaaatacttcctgtgtatttagtgtgtcctaccactccactatacaggaggcacacaaaacgt

SEQ ID NO: 4147 - DNA, 120 bp, synthetic construct
  source 1..120: mol_type = other DNA
ataatcatgtttcttcttttggcctctggttattttgtgtcccaacttgggttatcatttctgcctccagctctcaatccacttactcatttccagtcatccagctgcctaaaatgtgga

SEQ ID NO: 4148 - DNA, 120 bp, synthetic construct
  source 1..120: mol_type = other DNA
ttgtctgggtcatcctacaaactgtgttgcttgtgcccaagatagttttagagagaatagtcatctcagaaatgtcagattgactatatcgaaactctgggacagtctgtctttccttcc

SEQ ID NO: 4149 - DNA, 120 bp, synthetic construct
  source 1..120: mol_type = other DNA
acagcaaccttgaagaaacagaaaaaggaaatgtcatcgtcctaagtcttgtttggaaggagaaaggtctggaacagagactctgttttcaatgagttcccagacctttaaaggggaggt

SEQ ID NO: 4150 - DNA, 120 bp, synthetic construct
  source 1..120: mol_type = other DNA
atgcgtctcaccttccttggaaaactcctggagctttttcttatagttctccagcaactggattaagtgtacagtggattccgtgataactttgcggatgcccgagagtttatccttcag

SEQ ID NO: 4151 - DNA, 120 bp, synthetic construct
  source 1..120: mol_type = other DNA
cactcagctatcatttgcaaaaagacaggtgtgcttccttctccaggaagccttacttccaggctcccctctacttgcttcctacggtgttatcacagcccacaggttctgtgtcctaca

SEQ ID NO: 4152 - DNA, 120 bp, synthetic construct
  source 1..120: mol_type = other DNA
ttgagagacatctgcaaaataagcacgcaggtcaaaaggcaaactgaacagtagcctccagctctagagtgggttgatttcagtttcattacctccttttttttgagacagtctcactct

SEQ ID NO: 4153 - DNA, 120 bp, synthetic construct
  source 1..120: mol_type = other DNA
gcagataaaataggctaacaaagcacctggtggggcacccagtggggcccagttaaagaggagctcatgataattagatggtttcaactttccaacagggtcgtttccaaaagttcaatt

SEQ ID NO: 4154 - DNA, 120 bp, synthetic construct
  source 1..120: mol_type = other DNA
agttggttaactgttcttacaagcatttacacagtaagataaacatatgataatatacactgaaattatgcaccctgcaccccgccgtccccaccctggccagaactatcttgcaaacct

SEQ ID NO: 4155 - DNA, 120 bp, synthetic construct
  source 1..120: mol_type = other DNA
acaatgtgaactttaaaaaatcagactacataagaaaaagtgtaacaataaaacatacagattgttttacatacatatgtatatatctctgtgtatacacacacatacacaaacaccgaa

SEQ ID NO: 4156 - DNA, 120 bp, synthetic construct
  source 1..120: mol_type = other DNA
atgagatggatttataacagttatcagatatattttctaattgatgactgcaaatcagaaaaattttctttattagcattcttagaggaagaaataatttacatttgttcttacagactc

SEQ ID NO: 4157 - DNA, 120 bp, synthetic construct
  source 1..120: mol_type = other DNA
tatgctcagtgggggtctgtaccttccttcactcaatgaacatttattgagcacctactgtgtgccacatgctattctaggagctgagaacaagctagacagtttgtccccatgggattt

SEQ ID NO: 4158 - DNA, 120 bp, synthetic construct
  source 1..120: mol_type = other DNA
ggaaagccgggcgagagatgttggtagatgggaccagactgatttgaagctatgaagttcccattaatgagcacattaagtacatttaactttcagtgggctggattaggactacatttt

SEQ ID NO: 4159 - DNA, 120 bp, synthetic construct
  source 1..120: mol_type = other DNA
aattccctcttcttcagtgaggttagccttttcttttaaggccttcacctgattagatgaggcccacccacactaactggggtcatttgctttgccgaaagtctcctgctttaaatgtta

SEQ ID NO: 4160 - DNA, 120 bp, synthetic construct
  source 1..120: mol_type = other DNA
agtgggagccagcattttctctgctggacagagaagttacagataaactggaggggaaggctagaataatccctatagaaatggattagagttggagatataaacatgaactcatgtaga

SEQ ID NO: 4161 - DNA, 120 bp, synthetic construct
  source 1..120: mol_type = other DNA
gcatttccatcaccaagaaccccgtttttggtatgtctcatcatcaatcccatgctttgtaagattttaatagtaatgataaatcccagcctttgggaggccgagacaggaggatcattt

SEQ ID NO: 4162 - DNA, 120 bp, synthetic construct
  source 1..120: mol_type = other DNA
tactgctgcacttggggaagggtgtggttctctctgaagctcacggagtcttctttctccacagacccccccggaacctggactcccggaccttcatcaccattggagacagagtaggtg

SEQ ID NO: 4163 - DNA, 120 bp, synthetic construct
  source 1..120: mol_type = other DNA
ggtaattattacaagaccaatccttcctccaggcatgccacaaagccgaatccttgtttgattccaaatgctcgggggtgactctccctcagttttattttcttaaaagctataaaacca

SEQ ID NO: 4164 - DNA, 120 bp, synthetic construct
  source 1..120: mol_type = other DNA
cagaggctttgcagctccacaggaagggtctgcagagatcatgtttctagactacagtaggtgagcccaccctccagtttttgtttttaataacatttgttatttctctcactatgaaat

SEQ ID NO: 4165 - DNA, 120 bp, synthetic construct
  source 1..120: mol_type = other DNA
tcccctgagctctgcagtggggccatggtggcacgtagcgtggattgagttgataatcagtgccgcccaaacttcatcaaagctgaaaaccatctttatggtttctgtctgaaccaggta

SEQ ID NO: 4166 - DNA, 120 bp, synthetic construct
  source 1..120: mol_type = other DNA
gaacgttgaaagggacttagagaggctgcaagttgctccttctgcccaagcagaaactgagacggggagaggaaaagtgacttgaaaaaggtcactcaggtcgtggtggaatcaggtgga

SEQ ID NO: 4167 - DNA, 120 bp, synthetic construct
  source 1..120: mol_type = other DNA
cctagatggagacttcatattctctcgtctcctgcaaaggaaagagactgctgggagttggaaacttgtattaggtttgccaggccataattcaccttccctaggaaaagggaaaaagtg

SEQ ID NO: 4168 - DNA, 120 bp, synthetic construct
  source 1..120: mol_type = other DNA
tgaaagaaagcccaaaggagtccaattctgaggctggagtcatggccaccccctcatgaagcagctgggcttggagatagcttctgagtaagattgcttctaaaattctgcagaatgtct

SEQ ID NO: 4169 - DNA, 120 bp, synthetic construct
  source 1..120: mol_type = other DNA
aaactgctatcacataaggctcttcatgatctagcctcttgagtctcatctcccatcatgccccttctctgacatagactctccactccaaccacataaaatcacatgtatttctacaaa

SEQ ID NO: 4170 - DNA, 120 bp, synthetic construct
  source 1..120: mol_type = other DNA
gctggcgaggatgcagacaaagggaaactcttataccttgttggtgggatgtaaattagtagagccactattgaaaacagtatagaggtccctcaaaacactaaaaacagaactaccata

SEQ ID NO: 4171 - DNA, 120 bp, synthetic construct
  source 1..120: mol_type = other DNA
agccttgggcaggtattgagtttgctcaaatatttatctagtatctcctttgtgcacatatttatctggtgccacattgggcaaagcactgcgctagacactagggatagagttgtaaaa

SEQ ID NO: 4172 - DNA, 120 bp, synthetic construct
  source 1..120: mol_type = other DNA
gtctctctggatctgtttcctggatggggctggagaatctctcatcccaggaaggaacttccagccttaaaacctgaggactccttgagtcagggtattagggtgcagtggggtggcagt

SEQ ID NO: 4173 - DNA, 120 bp, synthetic construct
  source 1..120: mol_type = other DNA
ggcagaagtcaataaattgagcaggaaatgaaaaaagaagagctgaattagagcatttgtctaagcatcctgaggacaggaaccttgtttatcctgttcatggctatatccctagggcag

SEQ ID NO: 4174 - DNA, 120 bp, synthetic construct
  source 1..120: mol_type = other DNA
aagttgcaagaatgctacaaataatgggacaaagaacaccaatataccctctacctaagtcacctcttattaatattttcctccatttgctttattatttgttcttcagcacagtaatgt

SEQ ID NO: 4175 - DNA, 120 bp, synthetic construct
  source 1..120: mol_type = other DNA
gattaagctgccttttaattattcaatgagatgtcaatggtgcatgccattgtgacattataatggactacaactccctcgcagatgtcaagaaaggcagggggccattaccttgtcaaa

SEQ ID NO: 4176 - DNA, 120 bp, synthetic construct
  source 1..120: mol_type = other DNA
gggtgagggctggatttttaaagggggcctgttttggggagggggtgatgagcgttggggaggcagctctcagggctgaagccttccctgacagcagtgaggtcacaggtcatgaactca

SEQ ID NO: 4177 - DNA, 120 bp, synthetic construct
  source 1..120: mol_type = other DNA
gagttaaacatgaaaacatagtaagtggttttagtgtccttcaccttctaagaagatggtcattaggtggtagttaagacccagtctgccctcagggagcatacacagtcatttgtgcta

SEQ ID NO: 4178 - DNA, 120 bp, synthetic construct
  source 1..120: mol_type = other DNA
tgatgtgctgatactttgatgcagtcaggagacgtgcattatcattatttcaattttcaaaggggtcaacaggatcggcacttgcacacacaagatttttttcccctacaacctctgaac

SEQ ID NO: 4179 - DNA, 120 bp, synthetic construct
  source 1..120: mol_type = other DNA
ttgcaattgcttattgcaggaacactaggtaaaggctactataccaactgaaaaaagaaggacaccagtgaatctgcctcaacaaacaaggccactcacaaggctcatgtgaatgctaag

SEQ ID NO: 4180 - DNA, 120 bp, synthetic construct
  source 1..120: mol_type = other DNA
gatggccttaggattataaaaatattttcttactttttccccagtgcttttataattttcacagttggctctgccgtgtgattgcatttgtgtattgtgagctagaaatgatccccccgc

SEQ ID NO: 4181 - DNA, 120 bp, synthetic construct
  source 1..120: mol_type = other DNA
atgatttcaaccgtactttaagagcctacttttggctgaaacctggggatgtcactcagggccacagcccctgacattctgccttagtccctgggcaagaaatctggttgttgtacagaa

SEQ ID NO: 4182 - DNA, 120 bp, synthetic construct
  source 1..120: mol_type = other DNA
tagaagttgacttcatgtccttgccttcttttgaaacagaagaatgagtacacctagacaggagggaggtgtcccaggcttggtttattctgcctcttctcctccaccctgtggagaaat

SEQ ID NO: 4183 - DNA, 120 bp, synthetic construct
  source 1..120: mol_type = other DNA
gtctggatatgcctttctaattcacccagcttgatgtcaaagccatgccatttaggattcttaaccaaatcagacctgtctgactcaccccttatggtggtttgcctataaacttatcaa

SEQ ID NO: 4184 - DNA, 120 bp, synthetic construct
  source 1..120: mol_type = other DNA
ctgtcgcccaatctagcacaaacagatgaactagaacagttttccttataaaattaatgtctatacttctctcccacaatgacctctttgtattaggaagaagaacactgaaacgatggg

SEQ ID NO: 4185 - DNA, 120 bp, synthetic construct
  source 1..120: mol_type = other DNA
ctaaatcatgaagaaacaatcagacaaatccaaattgtgagactctaatcaatgatcccaccccccacccaaaacaggtggaactgttctaggttaaaggagactgaagagacacaacca

SEQ ID NO: 4186 - DNA, 120 bp, synthetic construct
  source 1..120: mol_type = other DNA
atcgcttttggtgttttagacatgaagtccttgcccatgcctatttgtacaaatctttaaacatatttcagatgtcctagaatgaaattcatctaaatgaaactgctaagtcaaagggta

SEQ ID NO: 4187 - DNA, 120 bp, synthetic construct
  source 1..120: mol_type = other DNA
ccagacctactaagtcagaaactctggggatggcactcagcaatctatttttacaaaccctccagatgcgtctggtgcacagtcaagtccgctgctctaagacctcaccactcaaaggag

SEQ ID NO: 4188 - DNA, 120 bp, synthetic construct
  source 1..120: mol_type = other DNA
tagggattggctttctcagcctgtgcctgggacccccaaaggacatagactctggcttatctggtaacagccactaggctccttgcgtctcgtctccagggtgtccatcccgatggtccg

SEQ ID NO: 4189 - DNA, 120 bp, synthetic construct
  source 1..120: mol_type = other DNA
ccttatgaatccatttcagcctctttttgtccgagagctgagaccactgcttccccagggagtccttcacctccttcgtagtggcctgcaaaccaaaagccgtcagacacgcacaggcag

SEQ ID NO: 4190 - DNA, 120 bp, synthetic construct
  source 1..120: mol_type = other DNA
agcagggaacataaaactttattcactgcaagagctgcggtcctgagggaagaatcctctgaactgagtcagcactgagctgagcgatggagcctcagggatgaaagaataaagcagaga

SEQ ID NO: 4191 - DNA, 120 bp, synthetic construct
  source 1..120: mol_type = other DNA
atgacaagggtcactgccccctccccaatcatgctgagatgagggagggactgctctgataacgccccctccctctgggcctcacagatccttcccactctttcctgtcctcccagcccc

SEQ ID NO: 4192 - DNA, 120 bp, synthetic construct
  source 1..120: mol_type = other DNA
aggctttagctcccaatttttatcgccagcctggaccttgttcttgaaatccacattcatatatccacctgtgccatacatgtccactaggatctcagctgacatgtccaggatgaattc

SEQ ID NO: 4193 - DNA, 120 bp, synthetic construct
  source 1..120: mol_type = other DNA
caaaccagcttctgcaggccagctgggaggccacaactcctacctacgggaaaactgaagggcatctctatttttagattagcaaaagaaaataaatttaagtttgagtctcctttgcaa

SEQ ID NO: 4194 - DNA, 120 bp, synthetic construct
  source 1..120: mol_type = other DNA
attctcgctacacccaaaccagataccatctagaggctagaatctttgggaggctcaaattccctagaaagcaggagaagcttctgtagccctcccgctttcccagtagattaagcccag

SEQ ID NO: 4195 - DNA, 120 bp, synthetic construct
  source 1..120: mol_type = other DNA
agtgtatgcaaacctgagaaggttggggatgaggatatgggatctttcatccctggaaatttagtccagaggcctggggctggagcagaacaccaagccaatcagcttaatgaatggctt

SEQ ID NO: 4196 - DNA, 120 bp, synthetic construct
  source 1..120: mol_type = other DNA
cagaagcaccaggtcatgagcacatctgacataaaacattacaaacttaaagcagtattttttaaaatctaaagggcttagggaagacagccatgctcctagctatgaagcctctgtggc

SEQ ID NO: 4197 - DNA, 120 bp, synthetic construct
  source 1..120: mol_type = other DNA
gctgagaccacattcctgccagctctgcctcttgccatgtcctgtttccctccctcctctctacatcctcagcgagtcccttaaataagatcctcatccaagctgtacttctagggaacc

SEQ ID NO: 4198 - DNA, 120 bp, synthetic construct
  source 1..120: mol_type = other DNA
tgttacacaaatatgaaaacagggtgacgaaagtttgaacgttcatgaatggcagtagctgcaatggagttgtgtatgcagttggtattaatgacgttttcagtccctctggcgagagaa

SEQ ID NO: 4199 - DNA, 120 bp, synthetic construct
  source 1..120: mol_type = other DNA
acccagaagtgggattactggatcatgtggctttgctttttcatagagagttagtaagggctgttgggaagcttcctaaactccttgatattcttacctacaaacaacattcatatcctt

SEQ ID NO: 4200 - DNA, 120 bp, synthetic construct
  source 1..120: mol_type = other DNA
agctgggctttctcttatggaaatattttacctgtgccagagaaactaagtttatcattcaaggccagaaatcaggatatcctagccaacccctggcctctactaacaaaatatacatgt

SEQ ID NO: 4201 - DNA, 120 bp, synthetic construct
  source 1..120: mol_type = other DNA
catcctgtgactccctcccacagagtgactatatagagatcaggacctccattttttctaattgtcaacagttaaccttaaaaagtgtgtggtgggggagacaaatagcaacaaacaaca

SEQ ID NO: 4202 - DNA, 120 bp, synthetic construct
  source 1..120: mol_type = other DNA
gagagggggtgagagagaatgaatacggattaaatctgtttaactacctacattaatgagatatctctcgcctcacaacaaatcaaataccttcgcagaccacccccaaagactgatgtg

SEQ ID NO: 4203 - DNA, 120 bp, synthetic construct
  source 1..120: mol_type = other DNA
gctcagacttttcagatgtggactttatttggttctacaagacttctcttaacagtcttagcaaccactccctgctcacctggtagttcccacctattgtcttgcgtaacaattttgttg

SEQ ID NO: 4204 - DNA, 120 bp, synthetic construct
  source 1..120: mol_type = other DNA
cttcctccaaggacaaaggaggaaacgaatattatacataccagatgtccttcaaacttgacatcttacaggagacaaaaggagagccatagaaactgtcaggtgaaaagggacttcagc

SEQ ID NO: 4205 - DNA, 120 bp, synthetic construct
  source 1..120: mol_type = other DNA
gaccgcggcgcactgcgcacatcgcgccccaaatgcttgcacacccggggctggaaggtcgcctggtccctctgagggtcatctaggccaacttctctaactccagacagtacttttctt

SEQ ID NO: 4206 - DNA, 120 bp, synthetic construct
  source 1..120: mol_type = other DNA
gtcttcctctcctctgggctcttgggcatttagcatgggattcttttcccagtgcctttcacacatacacaccctcacacacacacacacccacacacaccctcacacacaccctcacgg

SEQ ID NO: 4207 - DNA, 120 bp, synthetic construct
  source 1..120: mol_type = other DNA
tagaggggtgggggcacaggagtttctggagccttccttgccacactgtcccaatgccccaagtctgcctatttctcttacctagggagaattctccatttctgtcctcagaggaaatgg

SEQ ID NO: 4208 - DNA, 120 bp, synthetic construct
  source 1..120: mol_type = other DNA
tgcatagctggctgtctgcctgcctgctggccctgactctgcccccaggcctgcctttgaacagtctgaaagtttatctctctctgagtaactgttgtccccgaggctcccaaatgccgc

SEQ ID NO: 4209 - DNA, 120 bp, synthetic construct
  source 1..120: mol_type = other DNA
gcaggtcctaggaaggtgaaggaacacaggccccgttcacctggagagaaacagggcaccatcctgtctattaacaccgaagcctggaaggagaggtgggagcgatgtcccagttcatca

SEQ ID NO: 4210 - DNA, 120 bp, synthetic construct
  source 1..120: mol_type = other DNA
gagttaggctctggctccaagtcctgggtcttctggtcttctttgaacttcaatttcttcacaggcaaaactgtgatgacaacataaccactcaaataatcgtgctgattaaatgaacca

SEQ ID NO: 4211 - DNA, 120 bp, synthetic construct
  source 1..120: mol_type = other DNA
cgcccgccgattttcctgtacaaagttaagctcctagtttgaacctgttctctctttctatcagatagtctttttattgagaaagttctttctcatgtctagatgaaatctctgacgcac

SEQ ID NO: 4212 - DNA, 120 bp, synthetic construct
  source 1..120: mol_type = other DNA
ccttccttccaccttatttttcactgactggacagggttataaggtcaccgctagttgcaaaaggatctgacaaggaagaatgtgatagtcatggttagcttagaccaaccatgctttat

SEQ ID NO: 4213 - DNA, 120 bp, synthetic construct
  source 1..120: mol_type = other DNA
acagaacccagactcaagtcccatcaactctgacttcagaggccatgatcacacttgcacacgttactgcttcccatgtagtaaggtttacatatattatctcaattaaatttgagagtg

SEQ ID NO: 4214 - DNA, 120 bp, synthetic construct
  source 1..120: mol_type = other DNA
tgaatgttgagagtgaaagcacagggagctgtcatgcatgagagtggtagagggatctgaaagtgctagcagtgcctattatacatccaaatactaaagacgcttagatgtgaaaaatgt

SEQ ID NO: 4215 - DNA, 120 bp, synthetic construct
  source 1..120: mol_type = other DNA
caactgcaggggaagactacctcccttgtggatcctccgtccgctgagagctacctccacgcaataaaattttacactcattctccaagcccacgtgtgatttgcttcttccagtacacc

SEQ ID NO: 4216 - DNA, 120 bp, synthetic construct
  source 1..120: mol_type = other DNA
attcctctgcttactggggaataagacagactgacctggcttggagacaaccagatgtgtccaagcctgaggaaagcttccacttttgttgttgttgcccttttttttttttctttttct

SEQ ID NO: 4217 - DNA, 120 bp, synthetic construct
  source 1..120: mol_type = other DNA
cctcacatacatcctcacacacatgcatcgctctcccacactcctcatgcaccctcacacaccttcacatactcctcacacacatacccctcatacaattctcacattcgaatacacaca

SEQ ID NO: 4218 - DNA, 120 bp, synthetic construct
  source 1..120: mol_type = other DNA
gaggttgctttttgtttccataaacagatgatctgatggatagatgaggattttcttagtagtttctgctcttcccagacaacgtgctattattagaatagccagactggccctggtctg

SEQ ID NO: 4219 - DNA, 120 bp, synthetic construct
  source 1..120: mol_type = other DNA
acggctttaatatcatgatgtctggcgtgtctggtcacattccttcattttctggaaaggcattttattatagtttacagcaaccagctgccaaactactggtgtaaacgaggaagcagg

SEQ ID NO: 4220 - DNA, 120 bp, synthetic construct
  source 1..120: mol_type = other DNA
aaaaagtttccattccatactaatttgccacagttttaaaggccaccgtctgtctaaaaacaagggtgttccttaactgaggccattgtcctcatttccagatgctccaagacagcaaac

SEQ ID NO: 4221 - DNA, 120 bp, synthetic construct
  source 1..120: mol_type = other DNA
tttccctgtatctccgctttctccccaaactggctggtcttctcgacctttcaatgtctattagtggtactaatattctcctactttttaagctcagatacttgggacccaaagtacttt

SEQ ID NO: 4222 - DNA, 120 bp, synthetic construct
  source 1..120: mol_type = other DNA
tgtatgttccatgcctctcccctggcttctggtggtttgctggtaatctttgtcattctttggcttgtaggtgcatcacccggatctctgccttcatgttcacatggtgttctacctgtg

SEQ ID NO: 4223 - DNA, 120 bp, synthetic construct
  source 1..120: mol_type = other DNA
atgaaaagtaacggtttctaagatgaagaaaatctaaccccttccatgagttccagtatcttattataactacactaagctacaataatagcttaatattaaacattaatgtttcttcga

SEQ ID NO: 4224 - DNA, 120 bp, synthetic construct
  source 1..120: mol_type = other DNA
cagatgccataaccatgttcctaaatttaagtccaggtattaacatttcatttaatttcaacaaataggtaaacttactaaaaaatacagctttggggttggggatggggaatataggaa

SEQ ID NO: 4225 - DNA, 120 bp, synthetic construct
  source 1..120: mol_type = other DNA
ttcttaggcctgggataattctcttcctctgcatttggatggtgttgcagagtctagacctggaaaaatgtctagattggtataatgtaaattcataaatggggactgcgcacgttactg

SEQ ID NO: 4226 - DNA, 120 bp, synthetic construct
  source 1..120: mol_type = other DNA
ctgtgggtggctcttttaaaggataattttccctcccaagtgatatggatattagtaagcattctcccagatagctattatatagcaaatgacaagtaacagactattttactaagaaaa

SEQ ID NO: 4227 - DNA, 120 bp, synthetic construct
  source 1..120: mol_type = other DNA
atggagttgtttgcattaatacaagtgtttgtggaaaaagatgccaaactttcctgtgattggtaatgcacctttattgtaggctcagcaaaacagtccctcatctacgggatctggcaa

SEQ ID NO: 4228 - DNA, 120 bp, synthetic construct
  source 1..120: mol_type = other DNA
acatgttgttctgaccagttataagtgagcaatgccactactgtattgagaccctaagaatgcctaagggtgttggaccagtacatgcttctctttaaaaatgccctgtagggcattttt

SEQ ID NO: 4229 - DNA, 120 bp, synthetic construct
  source 1..120: mol_type = other DNA
gcctttgcatacttttttcccctgcctggaaaactaccacaccttggttcaccccttgtccttcttcatgtctcagcttaaatattgcttcttctaaaaaagctttctctggctctccta

SEQ ID NO: 4230 - DNA, 120 bp, synthetic construct
  source 1..120: mol_type = other DNA
attagcagttattcccctttctctcctcttctcagctcttggtaagcacttatctttctgtctctttggatttacctattctgaacatttcgtgtagtgcaatcatacagtacgtgacct

SEQ ID NO: 4231 - DNA, 120 bp, synthetic construct
  source 1..120: mol_type = other DNA
aaccaatgatgggcacacagggacctatatttgccaaagcaatcattctgacttctgctataggtgttccaagagactcctgctacagaacagctaaagtgtaggaaaaaacaccatttg

SEQ ID NO: 4232 - DNA, 120 bp, synthetic construct
  source 1..120: mol_type = other DNA
gtgagaaactttcaatacgctagcttcaaagaaaggacttagccctggtggtgcagtgatgccagaagaatgttccacagtctctttaaagaactatttctaacgtttccccaaatgaac

SEQ ID NO: 4233 - DNA, 120 bp, synthetic construct
  source 1..120: mol_type = other DNA
tgttcatgctccagcttcagctctactatctgattggacaatgaggaggacagttcatcaacagaacatccttgtcgtcatgacaactcatgtacagcttaatttttctctaatttgtcc

SEQ ID NO: 4234 - DNA, 120 bp, synthetic construct
  source 1..120: mol_type = other DNA
agtaaatcttactgttattcaattcagactatggaagaagccagcaggaaatacgtcaaagaaaaatggtgctgcttcctggcctccttaagatcctcaacagtagaggcccaaacccac

SEQ ID NO: 4235 - DNA, 120 bp, synthetic construct
  source 1..120: mol_type = other DNA
agtcctgcttttcatgaagtcacaaaaagccaagtccccctcttgatcccacttgaatgttcagctcttgagtctggaaaacaaaccctgctttcattaagagtcacatttgcatatgct

SEQ ID NO: 4236 - DNA, 120 bp, synthetic construct
  source 1..120: mol_type = other DNA
accggtgttctctgataggaggtagcaggatgatagagtaatgctaggagctaatactcgttgggtgcttatcactgtcaaagtctttataagcatcctgttgtctaatccttatgaggt

SEQ ID NO: 4237 - DNA, 120 bp, synthetic construct
  source 1..120: mol_type = other DNA
attttggtggattccaccaaatagatatgtacactcactcctaccaagagtatatgagagtgctgcatcttacaaccttgtctgccagcatattctctgtgtgtgtgtgtgtgtgtgtgt

SEQ ID NO: 4238 - DNA, 120 bp, synthetic construct
  source 1..120: mol_type = other DNA
ctttcctcccttttcctctttctctttcagtctttgtctatgtctctctcccaatctgtttctcagtctctctgtgtcactatctctatctctttctcttttttctctccttccactgtg

SEQ ID NO: 4239 - DNA, 120 bp, synthetic construct
  source 1..120: mol_type = other DNA
aagtggtacttgagatggtctttgagtaagatttaggaaagaaatttcgggctgagagtaccatggccaaaaaaaaaaaaaaagacctgacagcaggaagttttccagggaagggggagt

SEQ ID NO: 4240 - DNA, 120 bp, synthetic construct
  source 1..120: mol_type = other DNA
atgtgcattctgggccagtgaaacctagagcagattggcaggaaaccatctcagtgtcttaccaagctttaccttgttacctttatgtgtacaaaggaaattgtgcccttaaatgatcaa

SEQ ID NO: 4241 - DNA, 120 bp, synthetic construct
  source 1..120: mol_type = other DNA
tccgcccgcctcggcctcccaaagtcgtgcacaaaagttttaattttcatgaagtccaatttttatttttctttcgttgcttgtgcttttggttccacatccaagaacccatggccaaat

SEQ ID NO: 4242 - DNA, 120 bp, synthetic construct
  source 1..120: mol_type = other DNA
ccattagggaaataatgaatccttaggtgaagacattcctcctgcctctggccatgatgcttcttaatgagctgagtgtctgcatagctcactgcagacccatcacatcaggtaaatgtg

SEQ ID NO: 4243 - DNA, 120 bp, synthetic construct
  source 1..120: mol_type = other DNA
taacagctcagccgccctctagtgctcaaacccatgacaacagatgatgaattaaggctccaaaaaagatcagggcttaagaagctgtctgaaaagtgaaagaaaatcctaaaaagtgga

SEQ ID NO: 4244 - DNA, 120 bp, synthetic construct
  source 1..120: mol_type = other DNA
gagctattctgtcgctcagtgaagctcctcacctccagttattcacatacctcattcttcctggacatgggacaagagctcaggacctgccaaatggtgggactaaaaaagctgtaacac

SEQ ID NO: 4245 - DNA, 120 bp, synthetic construct
  source 1..120: mol_type = other DNA
tgaagtgatgtggttttcagtataatcaataggtttgtatattaaactattctaagagttgtgaatttttttcttttaaaaaatacttaaattcatttgttgatgggctttgatgagcta

SEQ ID NO: 4246 - DNA, 120 bp, synthetic construct
  source 1..120: mol_type = other DNA
aaccagccaatccaatcctttagacataccttctctaaagcaccagaaaattctatctcagtcatatcggtttgtccaccagccctgaaaaaaccttggcacctaccttggcatttgctc

SEQ ID NO: 4247 - DNA, 120 bp, synthetic construct
  source 1..120: mol_type = other DNA
gattcttttaatttcagcttttagtttggatatgagggtacaggtacagctttgttacatgggtatactgcacccaggtagtgaccacagcacccaatagtacttttccaaaccacatcc

SEQ ID NO: 4248 - DNA, 120 bp, synthetic construct
  source 1..120: mol_type = other DNA
aaaagtttgttggtgccagagggaatgtcgaaactcatctgtaatggaagaaaaatcaaagaaaatgtatcatcaggcttaggacactgattcagacccgtgtcacctctatgggcctca

SEQ ID NO: 4249 - DNA, 120 bp, synthetic construct
  source 1..120: mol_type = other DNA
tatggtcggtctgtactcctgagcatgaaacgaaaaagaagccacattccaaccatcatccatctatggacgttgcagccattggccagatcttccagaagagtccttcattgccagttc

SEQ ID NO: 4250 - DNA, 120 bp, synthetic construct
  source 1..120: mol_type = other DNA
agctgagtacctgcttctggagaaggggaaatactggctctcttcattttccttcctatccctagttgggcctgtcatgaggccaaattccatgtcctgccaagatgtccataggacaca

SEQ ID NO: 4251 - DNA, 120 bp, synthetic construct
  source 1..120: mol_type = other DNA
gctggctcatgttgtgagcctattgtgtacatctcttcccagccttgagttcagtgacttcaccttggtagcttgaaattggccatggcaggagaatttacaccacaagaaatggcaaat

SEQ ID NO: 4252 - DNA, 120 bp, synthetic construct
  source 1..120: mol_type = other DNA
aaatatcacactaagttcttttcgccacagacgtgctgcactcagatattccacatgactactctgagaacaatttttaggacatacaaggttgacacgcatgagacgacagtctttgca

SEQ ID NO: 4253 - DNA, 120 bp, synthetic construct
  source 1..120: mol_type = other DNA
taacccccatggggtgccagtttccacggtagcccatctccattcagtccacaaggagcagaagtgggcggaggaggagacttcggccgtttcaaaatgtttggggtttggagagatctt

SEQ ID NO: 4254 - DNA, 120 bp, synthetic construct
  source 1..120: mol_type = other DNA
ctgtctcaacaagatcgatttgaggagcgaatgaagtcatctatttgaaagaccttccgagcccagtgctgagtaaatgacagctcttgctaccattagtttttccaaagactgtcactt

SEQ ID NO: 4255 - DNA, 120 bp, synthetic construct
  source 1..120: mol_type = other DNA
tattgtttctctgggaaaatctacagtttaactaggaacaccgaaatgatacccacagaggcccatttgtgggaaatcttttcaccctttcctcctcctagctgcctccaaaatatgagt

SEQ ID NO: 4256 - DNA, 120 bp, synthetic construct
  source 1..120: mol_type = other DNA
tgtgtactacagtgtttacaacccaagcaatgtgggagccgtcccatgagtgcttgggacgagctgggacgagctgcctggagccctggatcctggcaccaactagccagcagcagggtc

SEQ ID NO: 4257 - DNA, 120 bp, synthetic construct
  source 1..120: mol_type = other DNA
accatcactgccaccactattatcatcagcaccaccatcactaccactatcaccatcatcaccaccatcattaccaacattaccatcaccatcactattgccatcatcaccaccatcact

SEQ ID NO: 4258 - DNA, 120 bp, synthetic construct
  source 1..120: mol_type = other DNA
tcggcacgagtggacagtccgtttccaatgcagggttgctgaagagaattatttatgaagtctctgaaccacttggggttcagaaaatattttgggaagagtaaaacctaggttacaata

SEQ ID NO: 4259 - DNA, 120 bp, synthetic construct
  source 1..120: mol_type = other DNA
cactcctcatgctaaatgaaaaggcaagagtttaaagcgcaggggggcggtataggggggtggtgaagaatgaagtgcgtttgttgaatttgtaaaaagacagagaaatattttgttacc

SEQ ID NO: 4260 - DNA, 120 bp, synthetic construct
  source 1..120: mol_type = other DNA
tagtaaggagctcaccctgcaaggccccttgtggtgagaggcgtatggtaagagctccaaatggcggtggctgctgttgctgggatttcatgacaaaatgcagacacaaaggacaaaccc

SEQ ID NO: 4261 - DNA, 120 bp, synthetic construct
  source 1..120: mol_type = other DNA
ataatttgatcaggttgtcttaaacctggagtctcatatttgtgatctacagttttaattaagctttgaatctccactgcaggatctcacgttatcttgctgcatcgcaccaagcaaggg

SEQ ID NO: 4262 - DNA, 120 bp, synthetic construct
  source 1..120: mol_type = other DNA
aatctgccactgggaaaacgtgcaatgaggcacgattttttttaattcgggagtggtgggaatgaagcctctcagaccgtccatgccgtgcttcccttcgttaatgcagatcgtccaccc

SEQ ID NO: 4263 - DNA, 120 bp, synthetic construct
  source 1..120: mol_type = other DNA
caggcacacacactatgacacacacacaccatgacacacaaacacacaccatgacacacaccatgacacacacaaacacataccatgacacacatgtatttctcctaatttgttgtttgc

SEQ ID NO: 4264 - DNA, 120 bp, synthetic construct
  source 1..120: mol_type = other DNA
gactcaggcggggagggcaggagggttctcaagtgaggcctctgaaactcagtgtgtttcactcacttttctttggggaggatgatctgactgattggtaaggcttctcaaaatactgag

SEQ ID NO: 4265 - DNA, 120 bp, synthetic construct
  source 1..120: mol_type = other DNA
cacctcaccctcacacccagggatggtgccactgcttccgcgttccgcctgcccttagcatccccagagccaggaaggaaacctgccgcttgtctgtctggtcctttgtctctgtgcttc

SEQ ID NO: 4266 - DNA, 120 bp, synthetic construct
  source 1..120: mol_type = other DNA
ctttttctttgttacttaaaaagtttagtggcatagagttgttcaaagtcacctcttgtcaatgtggatagttctctcttttagaattctgtaccgtggttttgcctgcctgcctgccca

SEQ ID NO: 4267 - DNA, 120 bp, synthetic construct
  source 1..120: mol_type = other DNA
agccacacggctcatccaatggcttggaccttgtttcattcactaaagcaccagctctagcactgtgaggtcattattgagtttgtaagcaaaaatcttcttaaggaacagactaatgtg

SEQ ID NO: 4268 - DNA, 120 bp, synthetic construct
  source 1..120: mol_type = other DNA
ttccagctcagaattgtcatcccggcccggacttgggagttccagctcagaattgtcaccccagcctggacgtggggcacaccagggtccctagcgggagctcatatgaggcatatggac

SEQ ID NO: 4269 - DNA, 120 bp, synthetic construct
  source 1..120: mol_type = other DNA
agcaggcaaacccacgtttaaaagtgttcccggcaaattggagcggctgacatgggggtctgtgtgcttggatgatgggattagatggcgtgggaattcattcctggtattaaaatgagt

SEQ ID NO: 4270 - DNA, 120 bp, synthetic construct
  source 1..120: mol_type = other DNA
gagaagcggacgctaagcgaggatcagagcgctcggagaagcggacgctaagcgaggatcagagcgctcggagaagcggacgctaagcgaggatcagagcgctcggagaagtagcgcttg

SEQ ID NO: 4271 - DNA, 120 bp, synthetic construct
  source 1..120: mol_type = other DNA
tcttccctccagctcagcgcttaccatcgtatccctgcatccgagggtagctttgccacaggaagcatttgcattcagcgagacacacaggcgcacagggactcaagtgtggccacgatt

SEQ ID NO: 4272 - DNA, 120 bp, synthetic construct
  source 1..120: mol_type = other DNA
tatgtgcgtgtgtgtgtgtccattgagggtgtgtgtgtgtgtgtgtgtccatgaggatgggtgtgtgcatgtgtgcgtgtgtgtccatgaggatgggtgtgtgcgtgtttgtgtgtacat

SEQ ID NO: 4273 - DNA, 120 bp, synthetic construct
  source 1..120: mol_type = other DNA
atgtgactgatggtgtactgagtgatgtgactgatggtgtactgagtgatgggactgatggtgtactgactgatggtgtactgagtgacgtgactgatggtgtactgagtgacgtgactg

SEQ ID NO: 4274 - DNA, 120 bp, synthetic construct
  source 1..120: mol_type = other DNA
ggtcactggtactggttgggggaggacagcgtgttgcagcggctgtgcgacatgtcctcgtacaccacacatgccgccgaattcttatcccgccacgagcacagtttctttatctgaaag

SEQ ID NO: 4275 - DNA, 120 bp, synthetic construct
  source 1..120: mol_type = other DNA
ccacaagccttatttatttaaatcacctttgtcttaggacactaaactcccaaaaggtgaggcctgggaccagcatcaggctggacaagtgctgcagaggccacgccaaccctgtgcggc

SEQ ID NO: 4276 - DNA, 120 bp, synthetic construct
  source 1..120: mol_type = other DNA
ctgaaaaaagtgtgtctcgatccctgcctcaggcctcaccccagctggaggcagccattcatgtcaaaggtaaaacgatgcttgtagagaacattttttttttaaatctgggagcagcaa

SEQ ID NO: 4277 - DNA, 120 bp, synthetic construct
  source 1..120: mol_type = other DNA
ccagccctgtcctccaggcgctcaatctccagggcagcgctggccctcggactttgccacagcgacatccgaactatctagaaatgtgacgaatggaagctttttgttttctttccttct

SEQ ID NO: 4278 - DNA, 120 bp, synthetic construct
  source 1..120: mol_type = other DNA
attcttctttcaaaggtaaggtttacattcagtgaagggcacaggtcttaagaggatcatttaacgagttttgacaaatgtgttctcccattatggccccagagagttccgtcacagcag

SEQ ID NO: 4279 - DNA, 120 bp, synthetic construct
  source 1..120: mol_type = other DNA
ttttcttttccttgttgaagcctgttccatcgtgtggcatcttagtcagctcaggctgtggaaacaagtcaccacagatgggggctcaagcagcacaaatgtatccctcacagttctgga

SEQ ID NO: 4280 - DNA, 120 bp, synthetic construct
  source 1..120: mol_type = other DNA
ggacagctgagcagaggcttcgttttcttttcctatgtgcaggaggctgaacaccgcttcaagtggttgaagtgtgtgtgtattttctgtaaactttttgatgatatttctgctacacta

SEQ ID NO: 4281 - DNA, 120 bp, synthetic construct
  source 1..120: mol_type = other DNA
atggtgtggggtctgtggctccgggccaacattgccacctccctaaagagtgcactttgttatagcttatggttcttctgtgattctttattgctttccaggttctcacaggtttaagag

SEQ ID NO: 4282 - DNA, 120 bp, synthetic construct
  source 1..120: mol_type = other DNA
cgtgtacagtgtgtgcaggtgttcggagtacatgcctgtatgtactgtgtggatgtgtgtacacgcatgtgtacacgtgtgtgcagtgagggcctgtgcatgcagtatgagtacatgtat

SEQ ID NO: 4283 - DNA, 120 bp, synthetic construct
  source 1..120: mol_type = other DNA
aacggacgcctacaggtgcgtcccacgggggatggggacacggacgcctgcaggtgcacccccacggggggacggggacacggacgcctgcaggtgcaccccacggggaggacggagaca

SEQ ID NO: 4284 - DNA, 120 bp, synthetic construct
  source 1..120: mol_type = other DNA
actccctgcccccggagcgaagagcacggtcagaggagagcccacaagcactccaacttcaagagctgagtcagtcactgcaacagcttctgcctctccaaggcccagtctggcatgttc

SEQ ID NO: 4285 - DNA, 120 bp, synthetic construct
  source 1..120: mol_type = other DNA
gcacacgtaacacctcattcctattttatggctgaatagtatttcattttatggatatatcacattttatttatccattcattttgttgatggaaatttgaattgtttctcctttttggc

SEQ ID NO: 4286 - DNA, 120 bp, synthetic construct
  source 1..120: mol_type = other DNA
tgtgcaaaagataattgctgactgcagtcaccctgttgtgctatcagatactagatcttattaactctgtctaactatatttttgaacccatcaaccacctccactgcccttctccccag

SEQ ID NO: 4287 - DNA, 120 bp, synthetic construct
  source 1..120: mol_type = other DNA
ttcccgtgttccctcctaagagactgtgtctcgtccaaaaactgagatggcaaatcccaaaccaaggtgcttcatcaagagatggtaatgagatactttaaaaagaaacaaagaaaggtg

SEQ ID NO: 4288 - DNA, 120 bp, synthetic construct
  source 1..120: mol_type = other DNA
ctcatgcctataattccagcactttgggaggctgcggtgagacaatcatttgaggccaggagtttgagactagcctgcacaacaaaatgagctcctatctctacaaaaaaataaaaaaat

SEQ ID NO: 4289 - DNA, 120 bp, synthetic construct
  source 1..120: mol_type = other DNA
ctgacactttatcaatgatttaattagtattttcctaattttgaaagagtttgggcatcttttaatatttactacccatttaggtttctcttgctgtgaattgcctattcagagacattg

SEQ ID NO: 4290 - DNA, 120 bp, synthetic construct
  source 1..120: mol_type = other DNA
ctcaaaagctctacctggttccatgattgttatctgaagggcagctccagttaaaaatatgtattaattcaaatgtacatcagttttcctggatgactgctctaggccctgaggatttgc

SEQ ID NO: 4291 - DNA, 120 bp, synthetic construct
  source 1..120: mol_type = other DNA
atatttactgcctagtatatacaaaaatctttgcaagaatccagggagatgcaacataaccacgcattccttggtggggcggggggcggggcgctaaaatttgatttttattttctttcc

SEQ ID NO: 4292 - DNA, 120 bp, synthetic construct
  source 1..120: mol_type = other DNA
ccttccacaccttcacctccacccctaccctccacaccttcacctccatccccaccctccacaccttcacctcttaccctccctaccataccttcatctccaccccttctctgcatacct

SEQ ID NO: 4293 - DNA, 120 bp, synthetic construct
  source 1..120: mol_type = other DNA
gagtgtgtgcatgtgggtgtacacatgtatgtgtggtttctgtatgcatcagagaggacatggtcaatgacagctatacatgagcatcacttgtctgcctacagttactattttgtagag

SEQ ID NO: 4294 - DNA, 120 bp, synthetic construct
  source 1..120: mol_type = other DNA
agaaagagagcttccaagagttatcaagacaagtggttccatggtaagttatagttgtggggggatggtggtaggcatgaaataagccatttcttcaagatggttgagcaaaacttgaaa

SEQ ID NO: 4295 - DNA, 120 bp, synthetic construct
  source 1..120: mol_type = other DNA
ccgtgtccagcggatccacaccataggagccatgggcccattggtcactttatagctgtctaggttcgcagatcgactgtggcagtacagcggggcttgtgttcaggtcaccctgatttt

SEQ ID NO: 4296 - DNA, 120 bp, synthetic construct
  source 1..120: mol_type = other DNA
gggatcaaacttagtgagtttggctacttggatggctacctacagaaaacacaggccaattataagaaagacagtgcacagtgcattgcagcacatagattataatccagtctccatgta

SEQ ID NO: 4297 - DNA, 120 bp, synthetic construct
  source 1..120: mol_type = other DNA
aactgacatttctgcctgtctgccggatgtgtctccagtcgctttccactggaccctcccctgactcactgtgctgttgtaaatagcctaaaatgttagaatctcattcaacgtttttgt

SEQ ID NO: 4298 - DNA, 120 bp, synthetic construct
  source 1..120: mol_type = other DNA
taattatgttctctgtttccacaggcttttcaggaggatttaatcagttggcatttatgagcctattttgaaaatgcttttagcagccataaccccacacctcccccacccccaaatagt

SEQ ID NO: 4299 - DNA, 120 bp, synthetic construct
  source 1..120: mol_type = other DNA
ttcccatccatttcattaagagatgcctttttgataaaatgttatttactaggttttttcaatctgtaatatattctggttgatcaaccaagtattaataatggaaactcaataaaactt

SEQ ID NO: 4300 - DNA, 120 bp, synthetic construct
  source 1..120: mol_type = other DNA
attcctttgcctgggaggaggatgtttgcatgtttaacccaaatcccgtacttttatttcagatcatcagaaaagcccttactgaggaaaaacgtgtctcaacaaaaacatcagctgcag

SEQ ID NO: 4301 - DNA, 120 bp, synthetic construct
  source 1..120: mol_type = other DNA
atgtgctgtttacagtaggatattcccccctagcaagtaatatttacacaccttaagtacgagaggtagagctccaggaaacacttggtatataagtgtgttctagtgcagctttccctg

SEQ ID NO: 4302 - DNA, 120 bp, synthetic construct
  source 1..120: mol_type = other DNA
tggaaagctgacagctaacatcatactcaataagggaaaactgaaagcttttcctccaaaatcaggaacaaggcaaggatgaccacttctatattcaacatagtactggtagttctagcc

SEQ ID NO: 4303 - DNA, 120 bp, synthetic construct
  source 1..120: mol_type = other DNA
caacaattcagaaggctccactgcttggtattttccacatggctgtaaaggtcccagcactggagctgtttagcagttgttttgaatatgctcttgtgtcagtcttctgagttctaaaag

SEQ ID NO: 4304 - DNA, 120 bp, synthetic construct
  source 1..120: mol_type = other DNA
ctgggctgataatcgcctctcttccagagtctcatggagtcgtcacaggccaagggtcttcaaacttggctagaagtcaagtcccgggtctctgtgttttttcaggatactatgtttaaa

SEQ ID NO: 4305 - DNA, 120 bp, synthetic construct
  source 1..120: mol_type = other DNA
taaatgggggcctctccagggagtgctctgttcacggctccatcgctgttagtaagtatcttgtgatttcggaatttaaatgaggttgtgtttaacctgcataacatctggcttttaaaa

SEQ ID NO: 4306 - DNA, 120 bp, synthetic construct
  source 1..120: mol_type = other DNA
actttcagcaggctactactgcagattttccatatatagcagtttggaaagtgagactttcctgatgagattttcaatgttttgacctggagtaatttctttttgagtaccaactgtgtg

SEQ ID NO: 4307 - DNA, 120 bp, synthetic construct
  source 1..120: mol_type = other DNA
atgttttaaacaacagtcacaacgaaagtcctagaacctagatggcatcaagcagagtctcctgcatctacagcttccctgtcattagtttgttgctgggagatgttaatatgacctttc

SEQ ID NO: 4308 - DNA, 120 bp, synthetic construct
  source 1..120: mol_type = other DNA
gttgtatttagaattcaaataaaactactatgtttgcttcttaaagtgaataagatacttccatgagctcctctccttccctgctttcctctcccctcccccatccccttaccccatacc

SEQ ID NO: 4309 - DNA, 120 bp, synthetic construct
  source 1..120: mol_type = other DNA
gaaactttgtgatacatcctgttgtaaattgttcagtgctcttttcaaaaccattctttttttgctttgctttgcttttcttcctctctccctccctccctccctctctcccccctccct

SEQ ID NO: 4310 - DNA, 120 bp, synthetic construct
  source 1..120: mol_type = other DNA
ggcgggaggccccgtctctaccgccctcaggcctaaggctaagattccaccctctctagtgcgtcccaaggtcatctcgggtggaggaggagagagaccgagcagcaccgaatcagacct

SEQ ID NO: 4311 - DNA, 120 bp, synthetic construct
  source 1..120: mol_type = other DNA
taggaggggaagcttgctagagcagtgactctcgactctgtcacaccaaatgcccccttttgctaacaattccccttttatgattgtaattccccttttatgatcctgaaatgaaattga

SEQ ID NO: 4312 - DNA, 120 bp, synthetic construct
  source 1..120: mol_type = other DNA
caaacatggatcgttcctgatttcatttctccctttttttcgcttcctccttggcctccacttacactttgcctcccgaatctaccaccttcccaaagaaataatcctgaacaacaataa

SEQ ID NO: 4313 - DNA, 120 bp, synthetic construct
  source 1..120: mol_type = other DNA
tctccccgccccccacccctccaattttagctattctggtttggtatgtagttgtagctcactgtgactttaatttgcatttccctagtgactaatgatgttgagtgcatttgttcttat

SEQ ID NO: 4314 - DNA, 120 bp, synthetic construct
  source 1..120: mol_type = other DNA
tgacatttggaagactgggctgttcatttcacccgacccatcatgttcccctttctttcactgaggctccaaaaacacaaaatcacactaagattcattctgttttcaaaagacacatcc

SEQ ID NO: 4315 - DNA, 120 bp, synthetic construct
  source 1..120: mol_type = other DNA
ccccttcctgtgtccaagtgttctcactgttcaattgaacaatgaggaggcccttttcatttatcaagcttgagaaacattgttttcaggaaatgtgtggattaatttatcagatctctc

SEQ ID NO: 4316 - DNA, 120 bp, synthetic construct
  source 1..120: mol_type = other DNA
tgttctctccttttccctctggcaatgatcacagtaagaagcaaagatagaaagcaggttggcaaacagaaccctatcaaacaattcctcagcaaaattgaaaatgaagtgaatattgca

SEQ ID NO: 4317 - DNA, 120 bp, synthetic construct
  source 1..120: mol_type = other DNA
cgtctccagaaaaaaaaaaaggggggggggggcggtgggggaggagagaaaaaaatcaaagctagcagctagcacaatcattaaaaacagtatattttggtgtcttacactgatttattt

SEQ ID NO: 4318 - DNA, 120 bp, synthetic construct
  source 1..120: mol_type = other DNA
caacgatctaagcttcttcctctcccccaaaagggtgctgcaagcttagctctccacttctctgttgtgaagtattgatattctttcctgtgaaaaccatttccctcagtacataattaa

SEQ ID NO: 4319 - DNA, 120 bp, synthetic construct
  source 1..120: mol_type = other DNA
cctcccaactccatggcctctgcttagcaagaaactctcctctgataacacacattattcaactgtacacaatctactcaggtaagtatcttcccaattgagtcaaggggaaaaaaaaga

SEQ ID NO: 4320 - DNA, 120 bp, synthetic construct
  source 1..120: mol_type = other DNA
atcaagtgggtaagatggtccattcagtcaattatgaattagcctcttttctcaaccacgcctggcattgtccaatgagcttctgaacaaaatggccatggtgtttatggcaattaatgg

SEQ ID NO: 4321 - DNA, 120 bp, synthetic construct
  source 1..120: mol_type = other DNA
gactgtgaatctgaagttggacttctcagacatgatgttaggcatggaaaaatacataactctttgggaaaacttttttgcattgtctactaaagctgaacatgtgcattctttggccta

SEQ ID NO: 4322 - DNA, 120 bp, synthetic construct
  source 1..120: mol_type = other DNA
ggtaggatacaagacacaaaaatagtcaaatctcattctacatttttgagcaatggtaaaaatgacaatatggtgctattaacagcaggcaagtcaagaggaacttactggtgtcttgat

SEQ ID NO: 4323 - DNA, 120 bp, synthetic construct
  source 1..120: mol_type = other DNA
aaatgacacacctagtcctaataggttttttacgccctatgtagatgaaatactccctccccagtaacttgcttataaaaacccttgcatttccctgaagaacggtaaccctttttcggg

SEQ ID NO: 4324 - DNA, 120 bp, synthetic construct
  source 1..120: mol_type = other DNA
gccaccgcgcccggcctgtgatttatttttaatcattcttttcatctcattctaacacacagatccaggaacacatcacttgttctatcctctatctctcttactgcctcaagtctactt

SEQ ID NO: 4325 - DNA, 120 bp, synthetic construct
  source 1..120: mol_type = other DNA
gacgtttgtgcccagaaatcagcattggtttgcctaccaaattagttaagcttcttcttttcctggcatttaaagccttgagcaatctagctgcattccacctttccaacatttatcccc

SEQ ID NO: 4326 - DNA, 120 bp, synthetic construct
  source 1..120: mol_type = other DNA
tctggctagttagtgtaggtttacaggggaccttgccagtgtttcagaactttctaatgccactatcctagaagttgaagcagaaaaagtgaagagtagaacttactgagggttagagat

SEQ ID NO: 4327 - DNA, 120 bp, synthetic construct
  source 1..120: mol_type = other DNA
aatatcaaagacatagtattaagttacacacacacacaaacacagtaaacaataactatatctttgggaaagatcaagaagaatcgggggggggggaagaaggggagttaccaacaaaga

SEQ ID NO: 4328 - DNA, 120 bp, synthetic construct
  source 1..120: mol_type = other DNA
cacgttatatacaatatgcgtattatacacgttatatacaatatgcgtattatacacgttatatacaatatgcgtattatacacgttatatacaatatgcgtattatacacgttatatac

SEQ ID NO: 4329 - DNA, 120 bp, synthetic construct
  source 1..120: mol_type = other DNA
tgaaatttccatgtttcaactcttttttacatgcctgttaacaggctacaggtagatgttgtgcaaacttcattgatttactctgcaataaattattaccatccagatcaataaacagac

SEQ ID NO: 4330 - DNA, 120 bp, synthetic construct
  source 1..120: mol_type = other DNA
acaccaacacacaaagacacataccccaacacatacatagacatacacactaacatacacacaccaatatgcacaccagcacccacccctcaacacagatacacatacacacacagatac

SEQ ID NO: 4331 - DNA, 120 bp, synthetic construct
  source 1..120: mol_type = other DNA
actgtcactgacaccattgtcaccactatcattgtcaccattatcagcacctctgtcactgtcaccactgtcactaccaccatcatataaccagtaaaaaatattgcttagctcaaagag

SEQ ID NO: 4332 - DNA, 120 bp, synthetic construct
  source 1..120: mol_type = other DNA
agcataagaagcaggcagggagagaagcctcttggtgaaaggcccctgcctttagttcatatttgtctcctgagggggcagagggtcagggaccccaaaccttttcttaaccatctagga

SEQ ID NO: 4333 - DNA, 120 bp, synthetic construct
  source 1..120: mol_type = other DNA
caaccttcaaattctgtccaaggcccgtggccatgggtttcccatatcttcctgggcttcgaccactatttctgtctacatatcccctcaccatgtcacctcgtctatgccatgttcact

SEQ ID NO: 4334 - DNA, 120 bp, synthetic construct
  source 1..120: mol_type = other DNA
ttaggtaaaatgcagtattctgcttggagggcctgacttgactgagctgtcaggtcgtgtgtgtgtgtgtgtgtgtgtgtgtgtacactataaaaggaaagtcgcctggaataccaagag

SEQ ID NO: 4335 - DNA, 120 bp, synthetic construct
  source 1..120: mol_type = other DNA
tgatcaagggtgcataagcaagtctaaccattagtcgggcggggggtggggggaagtataaaaatgtaggttgccagtggagactgtttgtagatatagaatattgagttatatatttct

SEQ ID NO: 4336 - DNA, 120 bp, synthetic construct
  source 1..120: mol_type = other DNA
ttagtgtccattgtaagcagagaagctacctaagccatctgtggtcacttgcaaaattgttccttgtttgttcaggctccccaccgaagcaaatctttgtggcttctgataatttgcata

SEQ ID NO: 4337 - DNA, 120 bp, synthetic construct
  source 1..120: mol_type = other DNA
gtattttggacaacaggaagaatgtgggtctcctgatgacccctgaaggttgacagagataaagcagagagattagagaccctacagtaaggggccatgattccagttcaggaatcctcc

SEQ ID NO: 4338 - DNA, 120 bp, synthetic construct
  source 1..120: mol_type = other DNA
ttgattccaatccattccatttcatttctgacaataactcagtcctaagctgtgtgctttatactgccttacactagatatgtgagactatgccccctttacctccccagtcttgccaca

SEQ ID NO: 4339 - DNA, 120 bp, synthetic construct
  source 1..120: mol_type = other DNA
tttctagggatctgtgagtataacgtcttacttcatgatggtcattttcatgtctgcgtgtcctactgtacctgattaaaacaaatcccagaaacactttgaaaccttctccctcacgtg

SEQ ID NO: 4340 - DNA, 120 bp, synthetic construct
  source 1..120: mol_type = other DNA
tcccctttctagagtcacggcctcaccaacaccctctctccctgactgtctctcactataaagtcagtcactgaattgtacacctaaaacaaagtgaattctatggcatgtaaattattc

SEQ ID NO: 4341 - DNA, 120 bp, synthetic construct
  source 1..120: mol_type = other DNA
cccatgtttcaggagcacctgctgtccaatagattggaagtccccacagtcactctatccttgggaggaggagggattttagccctattctaaaggagggaaactgaggcacagaaatgg

SEQ ID NO: 4342 - DNA, 120 bp, synthetic construct
  source 1..120: mol_type = other DNA
tcaaaccggaatgtgcatatgaatcacgtgggattttgtttaaatgcagattctgatgcaagaggcctgggatgggcttgagattctgcgtttcaaacatgctcctggtagatgctagtg

SEQ ID NO: 4343 - DNA, 120 bp, synthetic construct
  source 1..120: mol_type = other DNA
actacaagtgttgatccttcttcaatacagcatgccaagattatcatgcaaaaaagaacatggtttaagcaaaggtttcttcaaaattccgtgcttggtggcagaggagtgggccagtgt

SEQ ID NO: 4344 - DNA, 120 bp, synthetic construct
  source 1..120: mol_type = other DNA
aaaacctgatcatgttactctgtgcttaaaaaaatctcaatggcttctcaatggaaaccactgccacagaagataccaaaaagtagaggcagcgcctccgaaccatggtgttcataatct

SEQ ID NO: 4345 - DNA, 120 bp, synthetic construct
  source 1..120: mol_type = other DNA
taatgcactgagggtgcaggtacaataagcaactcctgcttataacacattcttcatattctagaggggatagtagttaggtaacagagaagcctagggcagtttaagaaccaatggcta

SEQ ID NO: 4346 - DNA, 120 bp, synthetic construct
  source 1..120: mol_type = other DNA
gtgtgtgtgtgtggtggggggagagaaagagaaagggggagagagagagaagaaagtacagaatgagacagaagaggagaaaaaacacaacaaatgggataaaatgttaacaataaatca

SEQ ID NO: 4347 - DNA, 120 bp, synthetic construct
  source 1..120: mol_type = other DNA
gtttaatccaagtagctctgcagggtttggaggtccatgcaaggggattttactccctcctcagaatataggatgatggcctttctttcctttcctttcctttcctttcttttcttttct

SEQ ID NO: 4348 - DNA, 120 bp, synthetic construct
  source 1..120: mol_type = other DNA
gagctaacagtagggcaggggttctgagtcagtctttctgtgtcctctaataaataattctctgatgctgagcacatggtcatcacctgaggaaaaccccaaacagactcgtttgggcag

SEQ ID NO: 4349 - DNA, 120 bp, synthetic construct
  source 1..120: mol_type = other DNA
gctattaagccgtaaagctgttaacttactgactttgaggagctggtgggacaactgatgaagatatcatgttacacgtaaataaatgtagctatattactgaagatttgggaacttaat

SEQ ID NO: 4350 - DNA, 120 bp, synthetic construct
  source 1..120: mol_type = other DNA
ggggaaggttctgaaagcaagaagctgacagcaattatctgaagaggttacaatggatagcaatagttccttgaggccacagacactcccatctggaactttccttccacatcccaacca

SEQ ID NO: 4351 - DNA, 120 bp, synthetic construct
  source 1..120: mol_type = other DNA
agttaaaagtttcattaaaaaataaaacaaattaggagttaaatcaaggtcacaaggcccctcgctggagccttgtgtttcttgtacttgcagcttcttaaagaactcccaccccccgcc

SEQ ID NO: 4352 - DNA, 120 bp, synthetic construct
  source 1..120: mol_type = other DNA
ggacgttagtcattcagtttctgttcagttatcagggaacatgtaagagtcagacttaagtaaaaaggggaattcattggcttggtctggagatagagctgacctcagattgctatatcc

SEQ ID NO: 4353 - DNA, 120 bp, synthetic construct
  source 1..120: mol_type = other DNA
agaaggaggtcttgcttgggaagaagctggacctagttgaacaaattgtctagctggaggaactgcagtgtaagacttctcttctaacctggacctcactggattctatgtacttttaaa

SEQ ID NO: 4354 - DNA, 120 bp, synthetic construct
  source 1..120: mol_type = other DNA
gcactaaccagacaacaaaggttgacatgacaaaagccccatagggatgagacttcttcagatgaacacctgcaagaggtttacacattcaggacaaaaagtgtgctgcttaaaatctta

SEQ ID NO: 4355 - DNA, 120 bp, synthetic construct
  source 1..120: mol_type = other DNA
ctttaaaatgaagtgtattagctttatgaaatttaaagagaagatacaggaaggcacctatgagaaggctcacgtgttcaagtctgaagaaaaaatcattggttttaagtttggaatccc

SEQ ID NO: 4356 - DNA, 120 bp, synthetic construct
  source 1..120: mol_type = other DNA
acctggtcgtggaaggcatttgcagttttattccttagactaaggggtgattgccctcctagtcaatggcgtttgccaaactgcttttttcattctaagacatttatatctaactccctt

SEQ ID NO: 4357 - DNA, 120 bp, synthetic construct
  source 1..120: mol_type = other DNA
tgtttacagacagcaacttgctgtgtttcttctaagcacttcagaaataacaaatctatttcttcatccccctcactatgtcaggtattatcccaattttaaaaattaggtaagacagag

SEQ ID NO: 4358 - DNA, 120 bp, synthetic construct
  source 1..120: mol_type = other DNA
atcagagggcagtgcttgtctagtggaccaagatattaattaagggtttttaataatgttaatttataattgtcatgccttgagatacgaacttggtaaggagaatatagtctatgtctt

SEQ ID NO: 4359 - DNA, 120 bp, synthetic construct
  source 1..120: mol_type = other DNA
tcctcctttcatcataaaggtttttcacgtgtagtgggagcactttatttttctacaggcgggaatattccctcacagtaaggaaaggtgatctgctctgataaaactttaacaggtgct

SEQ ID NO: 4360 - DNA, 120 bp, synthetic construct
  source 1..120: mol_type = other DNA
catgaaatatggcaatgggtttccaaagaaaaagtgccaataatctacttcccaccatttctttaccttttttgtttttgcattaacattttccctttcttcctcaaacattgcaagttt

SEQ ID NO: 4361 - DNA, 120 bp, synthetic construct
  source 1..120: mol_type = other DNA
agggaagccaaaatattggacacccctgtgttagaatatatgccctctgagagaaggttctctcttccataaagccctctatgtcctctaattgctaacatggagatatgagaatagcag

SEQ ID NO: 4362 - DNA, 120 bp, synthetic construct
  source 1..120: mol_type = other DNA
gattataaaagcctgtcgtgggcacaagaatgtggtaccttgtgctactcttggcttcagcattaagctgacaaagacttcctactgcaatacctgactttcgtttctattatgaacacg

SEQ ID NO: 4363 - DNA, 120 bp, synthetic construct
  source 1..120: mol_type = other DNA
aaatgtggcaaagacatacaaatatgtgatacatagtagacataaaatgttgtgggagttggattcactgtggactaacttccttggcagaattagtctctttctcccacccccctcccc

SEQ ID NO: 4364 - DNA, 120 bp, synthetic construct
  source 1..120: mol_type = other DNA
gctttgtggcattgggtagaacttccaatgatatgttaagtaagagtggtgagtgtgactatctttgccatattcctgatcatagggcaaaagcattcagactttcaccattaagtgtaa

SEQ ID NO: 4365 - DNA, 120 bp, synthetic construct
  source 1..120: mol_type = other DNA
caggcaggaaggctatttgacctgaccaaaggcatttatcaaagtagggatggctcaggttataagaggaacccagttgtaatggccttttctaaaatctttacatctagagtattccca

SEQ ID NO: 4366 - DNA, 120 bp, synthetic construct
  source 1..120: mol_type = other DNA
aaagtttcaaatatagtacataagtaccttcacatttgtgtaacgaagtgggggggggggtgtgcatgtgtgtatgtatgtatgtgcgcgtgtgtgtgtgtatgtatgtgtatgcttgga

SEQ ID NO: 4367 - DNA, 120 bp, synthetic construct
  source 1..120: mol_type = other DNA
ttccagatagtctgcaagaaatgcagcgttattgagcttgggatgccccctaatgcagatatgggttcaatcataatatccaagttcttttgaatacctggaaatccttcccaagaagga

SEQ ID NO: 4368 - DNA, 120 bp, synthetic construct
  source 1..120: mol_type = other DNA
gtgaccactagccttagccctcagagctgattcatggcagctgctgccattatttttattatttttgataaaataatattataagcctcaaggcctctggccctcacagtctatgaagtc

SEQ ID NO: 4369 - DNA, 120 bp, synthetic construct
  source 1..120: mol_type = other DNA
cctttcacagaggagacctcctgttcctcacaaatttccgggaagacccaatcagagctggtgaaatagttgtttttaaagttgaaggacgagacattccaatagttcacagagtaatca

SEQ ID NO: 4370 - DNA, 120 bp, synthetic construct
  source 1..120: mol_type = other DNA
cggactaatacacaaactcaaagcctttgtatgtgccctgagagaatccatccagaagacaagtttgattctatgactctcctgcttgagattggcaagttaacagtttcctattgctgt

SEQ ID NO: 4371 - DNA, 120 bp, synthetic construct
  source 1..120: mol_type = other DNA
gaagactgttttacactgatactattatgtctaaatatcatataatgttgaaaaaaactgtatggtgctaacattacataccttatctcccattaaacacaattagtaaccaattgcatc

SEQ ID NO: 4372 - DNA, 120 bp, synthetic construct
  source 1..120: mol_type = other DNA
tcatccctcctcagtctcctaaagtgaccctattctctaagcaaattaaattattattaatctcccagacaggccctttgcatcctgcatctgcaccatggtatctgcgttttctttaac

SEQ ID NO: 4373 - DNA, 120 bp, synthetic construct
  source 1..120: mol_type = other DNA
cacatatcatgcacatatgcattgggctttttacctctatggctttactcatgtccatctgtctgtctaaaatagtcttcccaaacctgtaagtcccctaattgaaattacaaaaggtgc

SEQ ID NO: 4374 - DNA, 120 bp, synthetic construct
  source 1..120: mol_type = other DNA
ggaaacttagtagctgctccttacctatttaatctatagcagttggcaggacagttttggaggacaatcagagaaatgccctcagaacttcgagtaggggattgagcagggcatccaaga

SEQ ID NO: 4375 - DNA, 120 bp, synthetic construct
  source 1..120: mol_type = other DNA
ggtattcccagattaaatagaatgttgaactaaccagaatacgtcactcttctagctgcctgggggtttactgcacttaagataaactgggatttaccatattactcagccctgatcttg

SEQ ID NO: 4376 - DNA, 120 bp, synthetic construct
  source 1..120: mol_type = other DNA
cacatagacacagacacacattgacacacagacacacatagacacagacacacattgacacacagacacatagacacagagacacacacacagacacacactgacacacagacacagaga

SEQ ID NO: 4377 - DNA, 120 bp, synthetic construct
  source 1..120: mol_type = other DNA
tttctaccacaaacttggaaaccttgaagtagagaagtaacttccttttttaccactatgtttcacaagttgtccaacctaaatcagtaggtgcaaagagttgttagtcaagtagttgta

SEQ ID NO: 4378 - DNA, 120 bp, synthetic construct
  source 1..120: mol_type = other DNA
atgagccagtgtctttttcaaagagcccatagatagattttttttttgctaagcctaagtgacttaaacaattactgattattattaagcatgaaagtctcacggagttataggtatcca

SEQ ID NO: 4379 - DNA, 120 bp, synthetic construct
  source 1..120: mol_type = other DNA
tatagaagtacctggactttagactcttaaaaaaaaaaaaaggtacttgactacatgttaagtttgtgttccagtgatgtgactaattaaagctacatgtaacatgacggatggggatgc

SEQ ID NO: 4380 - DNA, 120 bp, synthetic construct
  source 1..120: mol_type = other DNA
gtgcatatgtatttcttgctcttttctaacatagaggccgtgcatgagctgctcgtctgcctaccccagcctggcaccaacacctcacccaaccgactcctacatttccttccattttca

SEQ ID NO: 4381 - DNA, 120 bp, synthetic construct
  source 1..120: mol_type = other DNA
gtctgctcactggtattagttacagggcagcgtctgctcactggtactggttagaaggcagtgtctgctcactggtattagttacagggcaacgtctgctcactggtattagttagatgg

SEQ ID NO: 4382 - DNA, 120 bp, synthetic construct
  source 1..120: mol_type = other DNA
tttcctgccttcctgcctgccttcctcatgacagaaataatgaatgtccacgtattaacacccccttttctgtaaatattttttattttaaatatatttcctatgggtaccatcaatata

SEQ ID NO: 4383 - DNA, 120 bp, synthetic construct
  source 1..120: mol_type = other DNA
ctgtttataggctctcaagagggacagggaaaaccagtattgtttgagtgccaactctgcataaacaatttccacagaatgactgcacatgcatgtgcgtgcctatgtgcatgtgtgtac

SEQ ID NO: 4384 - DNA, 120 bp, synthetic construct
  source 1..120: mol_type = other DNA
gccttctgtggccaacacgaactctcccgaacatcagccaaaattcagtgtattctggcattctgagtgtattctggcattcctaactatccttcccagcacttgacgaagtaaaaaatc

SEQ ID NO: 4385 - DNA, 120 bp, synthetic construct
  source 1..120: mol_type = other DNA
tgtctcttgtcccagagaggaaatgatttgggcaaacgctctgccctgagatctctctcgccctaactagatattaagcacacctcgggggcagtgctggaattacagcatccacaggtg

SEQ ID NO: 4386 - DNA, 120 bp, synthetic construct
  source 1..120: mol_type = other DNA
ccaccaccaccaccaccaccaatatagtagcagtaagggaatttggaaaagaactctagcttagctatttggaaaatggctggtttattaacgtggtcttccgcagatgctaaacaaagg

SEQ ID NO: 4387 - DNA, 120 bp, synthetic construct
  source 1..120: mol_type = other DNA
gcacaagacgtgtgctgatggcctggtgatggtgaccacttgtgggaggctgtgccactcaaagagagaaacttatttgtggttttcaagctaattaaagatacatttactttgtgtaaa

SEQ ID NO: 4388 - DNA, 120 bp, synthetic construct
  source 1..120: mol_type = other DNA
tcctatggcagcatgaattctacaagggctctcaggcccttcagcttccctcctttctggcagcctcattcagagtccatagtgcagagttcaagctcctgtcatttctcacccagttca

SEQ ID NO: 4389 - DNA, 120 bp, synthetic construct
  source 1..120: mol_type = other DNA
cactgaactgtacatttgaataaaggaggaattggtcggagtcccccgctttgacctcacatttcataatgtcaatcctgccacgtgcattacagcctagccctcggcgacttgctgttg

SEQ ID NO: 4390 - DNA, 120 bp, synthetic construct
  source 1..120: mol_type = other DNA
gtgaacacagccgcgtgtgcacttgtcctcgtctcagtgcctgagtgtccatgcagtggtgaacctgtacgtaggaaaatgtgaaatgttcctgttcttacataaaagaactctcagaaa

SEQ ID NO: 4391 - DNA, 120 bp, synthetic construct
  source 1..120: mol_type = other DNA
tttccaggtgacttcgctgcagagaggaagaggcagacgcatttccaggcgaggtcactgcaaagaggaagagggggatgcgtttccaggtgacatcgctacagacaggaagagggggat

SEQ ID NO: 4392 - DNA, 120 bp, synthetic construct
  source 1..120: mol_type = other DNA
aaaaaaaaaatcatcttacctttttaacctttagggtgttttcttaaagaaaataccatccagtttgtttcttcagtccctgaaccagtagaagagaaaggcgtcccccacgccatcccc

SEQ ID NO: 4393 - DNA, 120 bp, synthetic construct
  source 1..120: mol_type = other DNA
gggagaacattgcatgttaatggaacagaagaatcaatattgtgaagatggcagctttctccagattgatctggagaatcagtgcaatctccatcaaaactccagcaattttttcttcta

SEQ ID NO: 4394 - DNA, 120 bp, synthetic construct
  source 1..120: mol_type = other DNA
cgtcgttacccctcagtcctccccacgtcccaccgtcgttacctctcaggcctccctcctgtccctgtcgctgttacccttcagggtccactcatggcttcattatttctttgtagtgtc

SEQ ID NO: 4395 - DNA, 120 bp, synthetic construct
  source 1..120: mol_type = other DNA
gcgtgctgctctctgtagaccaggtttcagccctggagattcctagtgtggggggagtagctagaacaatagtgtttgtctgcttttataatatttatgtggagtacaattattttaata

SEQ ID NO: 4396 - DNA, 120 bp, synthetic construct
  source 1..120: mol_type = other DNA
accttcccgcgtgggtgtgtggggcctcattgctgccggtggggttggatgtcaggctcctccatggccttctctgagaccccagaggtggggtgtttggcgggagtagagcagttatca

SEQ ID NO: 4397 - DNA, 120 bp, synthetic construct
  source 1..120: mol_type = other DNA
acgggtgggactctcatacccacggccgggacgggtgggactcggcgcttgctccctgcctgcaccacgcctgccgtttgcggatcgctgtggacgtgtggccgcgatagcagcctgact

SEQ ID NO: 4398 - DNA, 120 bp, synthetic construct
  source 1..120: mol_type = other DNA
tagacttttgattaggtaatggattggctacatcttttgacctcctctgacttcttgaacccaactgaaatgatcgtaaagggagaaaagagtgtaaatccacatggacggtgcaggcag

SEQ ID NO: 4399 - DNA, 120 bp, synthetic construct
  source 1..120: mol_type = other DNA
ttctgctaaagcacaaatcctctgccctacaaaccatgaaatcaaagaggctgtgaacctacaaagcctggagaggggaagccaggagtggggggtcacaagaggctcccaagagagaaa

SEQ ID NO: 4400 - DNA, 120 bp, synthetic construct
  source 1..120: mol_type = other DNA
ctcttcctttgggtagaaacacaatagtaagactgctggatccaatggtaactctattttcagttctctgagatatctcatactgtttgctacagaggctgatgaatttaaaatgttgta

SEQ ID NO: 4401 - DNA, 120 bp, synthetic construct
  source 1..120: mol_type = other DNA
cgtattttagcgtgtggatggccataccatagccacatcatatttcagtgtgtggatggccacgccatggctgtgctgtatttcagcgtgtggatggccataccatagccacgtcatatt

SEQ ID NO: 4402 - DNA, 120 bp, synthetic construct
  source 1..120: mol_type = other DNA
gtgcgtttctccgtttcattgaggttggggcatcgtactgacttggggggaattcctgcataggtgtgcgtttctccatttcattgaggttggggcatcgtactgacttggggggagttc

SEQ ID NO: 4403 - DNA, 120 bp, synthetic construct
  source 1..120: mol_type = other DNA
cgatctgctgtcaatcaacaaacttactgagattctttgtgtctctccattcaccagtcctgtggcccagggcaggggccgcctctgtctttgggaaaaggggcaaaagtccccaccttt

SEQ ID NO: 4404 - DNA, 120 bp, synthetic construct
  source 1..120: mol_type = other DNA
ccttggaggctgctggaaggagagggcatctcatttaccatcctggctgcttcatggggatttgggagataaaaagcagctctttcagtttaactttggttgtaggagtcacagtgaatt

SEQ ID NO: 4405 - DNA, 120 bp, synthetic construct
  source 1..120: mol_type = other DNA
caggtccagctcaggggaccctaacccaaatcatcccaggcaggtccagctcaggggaccctaacccaaatcatcccaggcaggtccaggtcaggggaccctacccaaatcatcccaggc

SEQ ID NO: 4406 - DNA, 120 bp, synthetic construct
  source 1..120: mol_type = other DNA
gggcgcatgcccagggatcttaccttggtcatgtgtggagggcctgctgccagtttccttctgtggatgatcctgggaccgtccttgcttggacactgttgacctgctgggtacgtcaca

SEQ ID NO: 4407 - DNA, 120 bp, synthetic construct
  source 1..120: mol_type = other DNA
gtgtgctcaggacggtgggaggctcctgaaccacagtgacctttgtcccctcacagtctgagctgccctttctgccccgtttccatctttccccgcccccagttttgcttgtcctgtttc

SEQ ID NO: 4408 - DNA, 120 bp, synthetic construct
  source 1..120: mol_type = other DNA
tccagaaactctgggagcttctagaagaaatctactgagtgtatttctgttttttgtttaattccttgcttttgtcgactgacctgcttggtagtgtctgaggtgaactgtgggggttgc

SEQ ID NO: 4409 - DNA, 120 bp, synthetic construct
  source 1..120: mol_type = other DNA
cagccccaggatgacctgcacggcctgctgcaggatgagcagcttggtctgcgctttgtccgacttgaggtgcatctggcacatgcgccccagctcccggaaggcctcgttaatatcccg

SEQ ID NO: 4410 - DNA, 120 bp, synthetic construct
  source 1..120: mol_type = other DNA
ggtgtcatcgatatcttagacccccccaaccccccatcacccggttgctttcactctagcatgaattcccaagtgtcttgttcagaggagacagacaatcagcctattcttgtcttgttg

SEQ ID NO: 4411 - DNA, 120 bp, synthetic construct
  source 1..120: mol_type = other DNA
ctggggctgaagttgctctgtacccatgaactcccagtttgcgaattatagagacaatctattttgttacttgcacttgttattcgaaccactgagagcgagatgggaagcatagatatc

SEQ ID NO: 4412 - DNA, 120 bp, synthetic construct
  source 1..120: mol_type = other DNA
gcaccatgtgcaccagaaatgcaaagtcggagacctctccgggctctgcacaccttccggccttgcactgtccgcactggaaatgcaaagtctgagcctctccgggctctgcacaccttc

SEQ ID NO: 4413 - DNA, 120 bp, synthetic construct
  source 1..120: mol_type = other DNA
tcggacaccctcctggttccctctcagaaaccctcctggttccccctcggacatccgcctggtcccccctcggataccctgtcttgttcctcattcccaggacttgacagctgcttctgc

SEQ ID NO: 4414 - DNA, 120 bp, synthetic construct
  source 1..120: mol_type = other DNA
cagcttcctaggcagagtctctgggggttcctgttggacacaagtgaaccaggtgaaccagggcagctgctggaagctcggccatggccctcatcctcatggccttggggactgcctgtg

SEQ ID NO: 4415 - DNA, 120 bp, synthetic construct
  source 1..120: mol_type = other DNA
agccaccgggcccggcctggttactgttttctgtttttgttgccctggttcgttgttccttattttgtcttccactctttttctgccttttttggttttgattgcatgttttgtgtgatt

SEQ ID NO: 4416 - DNA, 120 bp, synthetic construct
  source 1..120: mol_type = other DNA
tgctcccctgcctagcattgactccacccctcccccagcccgcccaccccagctctgactccgccccaacacgcccagcgtagctctgattccgccaccagtgtactctgctcagctctg

SEQ ID NO: 4417 - DNA, 120 bp, synthetic construct
  source 1..120: mol_type = other DNA
ccgtgtctacacctgtctgggcagcccctttggccacattcacagcactggtcaccccactgccaaaggtgttctttgtacctgtcgcgatattttgggtcgttttcagcccagtttgca

SEQ ID NO: 4418 - DNA, 120 bp, synthetic construct
  source 1..120: mol_type = other DNA
agggtgctgagcagtgtccctggcctccactcaccccatggcaagccaggagcacccccgcccaagtgtgccgtctaaaaacgtctctggacatcgccgagtggccaggtttggaaagtg

SEQ ID NO: 4419 - DNA, 120 bp, synthetic construct
  source 1..120: mol_type = other DNA
gtacctggttcatgccacggacgatctgctggaacttggtggagcgattcatgagggcacagcccccaccctggaagagacaggcgggtggagggagggcaggacgtgggctgacccaag

SEQ ID NO: 4420 - DNA, 120 bp, synthetic construct
  source 1..120: mol_type = other DNA
actgagcaggggtctggcatggtgtttgttttgttttgtcttttttgcttcaagacaatcggcagaaggaaatatttctgccatttcttctagtgaccagccccctgaggcaaagggcag

SEQ ID NO: 4421 - DNA, 120 bp, synthetic construct
  source 1..120: mol_type = other DNA
atggatatgcatccaccagtacaggagagaagacagagtgtccaccctggaaggtgacaccaagtcatagtccttctggaggggggtcctggtccccagtcccattcttcatccatggaa

SEQ ID NO: 4422 - DNA, 120 bp, synthetic construct
  source 1..120: mol_type = other DNA
attcaacatccattcatccatctacctatccatccacccatccactcatacatccaattatctactcattcatccattcacctatccatccatctacctgtccaaccattcatccatcca

SEQ ID NO: 4423 - DNA, 120 bp, synthetic construct
  source 1..120: mol_type = other DNA
agatgcacccacactcagcccctacaacccagatgtacccacacttagtccccccacaccccaggtgcacctgcagctccttcaccacagcctgggcagcccatcccactgtgaagggaa

SEQ ID NO: 4424 - DNA, 120 bp, synthetic construct
  source 1..120: mol_type = other DNA
atccacaccccgttagaacgtaactaaacattaaaggaagttactatggaagaaatcctgatgtgacattgacagataatcttccccaccccccgccccccaccactttttttttttttt

SEQ ID NO: 4425 - DNA, 120 bp, synthetic construct
  source 1..120: mol_type = other DNA
ggagatctaccaggagctgacccagctgaaggctgcagtgggtgagttgccagaccagtccaagcagcagcaaatctatcaagaactgaccgatttgaagactgcatttggtgagttcct

SEQ ID NO: 4426 - DNA, 120 bp, synthetic construct
  source 1..120: mol_type = other DNA
gaacccagattcctccaacctggtgcctagatccctccaacctggaacccagattcctccaacctggggtctagatccctccaacctggggcctagatatctccaacctggggcttagat

SEQ ID NO: 4427 - DNA, 120 bp, synthetic construct
  source 1..120: mol_type = other DNA
cctagatgagctgctttttgttttgccattctttgttgattgtcacagtgtccctctgagctaccatgcatacaggttgcgctggttttgctggtaaagcgctagagacagaaagagctt

SEQ ID NO: 4428 - DNA, 120 bp, synthetic construct
  source 1..120: mol_type = other DNA
catccactcatccacccatcctcacctatccatccatccacccattctttcttgcttctatccattttcccatccacacacctatccattcatccattcatacatcaatttattctccat

SEQ ID NO: 4429 - DNA, 120 bp, synthetic construct
  source 1..120: mol_type = other DNA
agccccttctaaagcccccaaaactcttccccgaaaggtgggagggacccaggccctgtgttacccagccttgcctgggatgacgggtgcaggctttcttcatcaccttccctcccttgg

SEQ ID NO: 4430 - DNA, 120 bp, synthetic construct
  source 1..120: mol_type = other DNA
gaaatgagtgtctgctcttggtcataaaagccaaaccaccacagccctgcgggtcatacaccctgggccaggagctgtaacagggctgatttttgtgttaccacatccagtcttcctgcc

SEQ ID NO: 4431 - DNA, 120 bp, synthetic construct
  source 1..120: mol_type = other DNA
cctttccaatttaaaagagtatatttaacattccagcgtaaggcaaggtgatgccagcgtggacaacatggcgagaccccgtctgtacaaaatattttaaaaaattagtcgggtatggcc

SEQ ID NO: 4432 - DNA, 120 bp, synthetic construct
  source 1..120: mol_type = other DNA
agaggaaaacaggcccaagtcagccaaaaacccgctttgtccaaattatccgagctccctcgcaaagtgcattttccggtttccattcctggagtttccagacttttggatgattttgtt

SEQ ID NO: 4433 - DNA, 120 bp, synthetic construct
  source 1..120: mol_type = other DNA
aagatgctccctgttggactcatgtccgtcggctcttccaaaaccctgggagagtcccaggcacttgccaggatcctactggcaaaatctcacacctcccagttcctgcatgatctacaa

SEQ ID NO: 4434 - DNA, 120 bp, synthetic construct
  source 1..120: mol_type = other DNA
cccttcatggtctcctcccttcctggcagcagccggcccctccacacacagccctctggctgcatctcctgcctcctgcccactccccaaacccagccgcccatgagcccgcctccttca

SEQ ID NO: 4435 - DNA, 120 bp, synthetic construct
  source 1..120: mol_type = other DNA
gaggtagtgatggtgttggtgatgaccatgtttaaaaagaaaaagaagcttctcctctctgagtctaggccagatctccagaaactcaggtatctgcttgcataagatatgggaaatgtt

SEQ ID NO: 4436 - DNA, 120 bp, synthetic construct
  source 1..120: mol_type = other DNA
ctcgctaccacccccagcggggccccaaagtacttaccgagaaagacgagaaagacgcggcctcccatggttccagctgagctgccggcaggagcagcaggggaaagagtgagtgggaca

SEQ ID NO: 4437 - DNA, 120 bp, synthetic construct
  source 1..120: mol_type = other DNA
ttctgcttgttctgtcacttcaaattctagctggcttcaagatacctccctgtatgatcctgggcaagtcactttccctctctgagcctgtttcctccgctgcaaaatggagatgaaaac

SEQ ID NO: 4438 - DNA, 120 bp, synthetic construct
  source 1..120: mol_type = other DNA
cattctttaacagccagactttctgagacaggaaataataatggctccatatatttagcattcattgtgtgccaggcacagctctgagtcccttatattgagacctcaggaaaaccctga

SEQ ID NO: 4439 - DNA, 120 bp, synthetic construct
  source 1..120: mol_type = other DNA
ttcttaattgctgcggtctctactcccaaacgtccaaatctggcagagattaaatgatgacagtaattataggatcactgagtgcctctcatatgctaggcactgttctaagcgcttttt

SEQ ID NO: 4440 - DNA, 120 bp, synthetic construct
  source 1..120: mol_type = other DNA
tcctgccctcaatgtcagtggctttaactctgggttgacaagatgagagaccaggcttggccagagggactggattttatcccgagagcctaggggatgacttaagagaggatagaagtg

SEQ ID NO: 4441 - DNA, 120 bp, synthetic construct
  source 1..120: mol_type = other DNA
tccacaccaaacccctccacacacaaacccctacacacaaccacacaaacacaacccagacataaacccccacacagccacacaaacacaactcacacataaccacacacacaaccacaa

SEQ ID NO: 4442 - DNA, 120 bp, synthetic construct
  source 1..120: mol_type = other DNA
cccctgtatgcttcaccttggggagctcagtatcttttcttcatagcactctaggccagcgtccctgtgcgagacccccttgctccctagtgcccctgcctggcccctcatggcaatgct

SEQ ID NO: 4443 - DNA, 120 bp, synthetic construct
  source 1..120: mol_type = other DNA
gagttccacattcacacccatgcacactaatacaccctgactctcaggtcagaaacacacacatgtgcgcacagccccctgctgagggtcactcagactcacacacatccacagatcaca

SEQ ID NO: 4444 - DNA, 120 bp, synthetic construct
  source 1..120: mol_type = other DNA
tcccgcctcagcctctcaaagtgctgagattctaggagtgaaccaccacctttgcatgtgtttattggccatttgtatgtctgtctgtgagaaacgtctattcaaatcctttatatattt

SEQ ID NO: 4445 - DNA, 120 bp, synthetic construct
  source 1..120: mol_type = other DNA
tccaagtgatccttccaccttggtgtctaatgtgttgggattaaaggcatgacccactgtacccagccaatattcctaaatttagtaagacttgatttgtgtcctaacagaatacaccag

SEQ ID NO: 4446 - DNA, 120 bp, synthetic construct
  source 1..120: mol_type = other DNA
tctgtgttccaaaggaaatagtttctgggaagcctgaattttttaaattttgctttcacatagaagcatcttctgtcttatatttttaaaatctctgaagattttactttccctttggtg

SEQ ID NO: 4447 - DNA, 120 bp, synthetic construct
  source 1..120: mol_type = other DNA
caaattatatctgctgaacgatttggtgaccgaaatttgccttgcttttacctactggcttttagtaacaatgctaaaataaatgtgggtatgcaaatgactcttcatgtgaccatatat

SEQ ID NO: 4448 - DNA, 120 bp, synthetic construct
  source 1..120: mol_type = other DNA
ctggtttgtgctacagatagtggcccaggtacggctctactctgattaatttttgggttcatgctggcagatgatattatgaacaggttgtccagaacctcatgttggtggaaaaaacat

SEQ ID NO: 4449 - DNA, 120 bp, synthetic construct
  source 1..120: mol_type = other DNA
agagcctgggactgaagtttaagaatagtgtggtctttggtctatagctagtgccactaaaaattttgttggcatttattgaatgttgtgagtaagattccagaatgcacctaaaatgtg

SEQ ID NO: 4450 - DNA, 120 bp, synthetic construct
  source 1..120: mol_type = other DNA
cactgtagctggttctaggcatggtctcaatcctatgacccactcatggtgtgagcttccccttccctggaggacagttcctggagagggtgtgggccaagaaaaagctctaaccagcac

SEQ ID NO: 4451 - DNA, 120 bp, synthetic construct
  source 1..120: mol_type = other DNA
agccaggagacccagggtcaggctccaaagggaggaaggacatgtgcccttagctatgggtgggttgtatgtcacgtgctgtgcgctgtccagctggcgcaccaagcacccagctcatga

SEQ ID NO: 4452 - DNA, 120 bp, synthetic construct
  source 1..120: mol_type = other DNA
atgttgtccaggctggtcttaaacttctggcctcaagtaatccatccatcttggcctccaaagcactgggattaaaggtgtaaaccactgtacctggccctgccttttcttgacactctt

SEQ ID NO: 4453 - DNA, 120 bp, synthetic construct
  source 1..120: mol_type = other DNA
cccgctcattcatccattcattccctcacttagcagacattcactgagaccgcctctgtgcaggccccacgctccaggcacagagagagtcagctcccatcctgccttggggaaccttat

SEQ ID NO: 4454 - DNA, 120 bp, synthetic construct
  source 1..120: mol_type = other DNA
aagctagtgtttctggtaatcagaccccaccctgaagctttctaaggtcctaccatgaattaccttattagcataacaaagacctcctgtcaggaaattccaagtgtttttgaagctcag

SEQ ID NO: 4455 - DNA, 120 bp, synthetic construct
  source 1..120: mol_type = other DNA
tttccacttctatgtacctgctcccagggtgggctagacttaacaagttgtttctaaagagtagagaatggaaaaggaaaaaatagtacatttggagtgaagaaacctggcagacactac

SEQ ID NO: 4456 - DNA, 120 bp, synthetic construct
  source 1..120: mol_type = other DNA
aggtctgtcctcctggagttcattgtttaggttgggggacacagtcaaggaagaagtaaacagattaataagataattccagatggggatgaataatgctgtggagtcaggaaagcagaa

SEQ ID NO: 4457 - DNA, 120 bp, synthetic construct
  source 1..120: mol_type = other DNA
cccagatgaagagacatggtcatccctggcctgggcttcactaaccaagtgccctccacaccaaggagcctgtcacacggtgctcctgatgccctgctcagcaatggcagccactcccgt

SEQ ID NO: 4458 - DNA, 120 bp, synthetic construct
  source 1..120: mol_type = other DNA
acatccaaagtgtctggaaagcctgtcactctacatgacaatgtaacctggtgctgcgggctcctcttccttgtcactccccttcctcgtcatcccccttcttcgtcaccccccttcctc

SEQ ID NO: 4459 - DNA, 120 bp, synthetic construct
  source 1..120: mol_type = other DNA
aaaacacctctgactttaatctgaataaaatgtgaatgttttggcctacccatttgaaatgtcagaaactttgatcacattctttattactgaggctacacagggagtcatattttaggt

SEQ ID NO: 4460 - DNA, 120 bp, synthetic construct
  source 1..120: mol_type = other DNA
tctctgtgcttcttgccacctctctttttgcccactgtcccaaccactcttctctcatttcctgtgccttcagcacttacccccatacagtgagatgtcagacaatgctcagagaagcaa

SEQ ID NO: 4461 - DNA, 120 bp, synthetic construct
  source 1..120: mol_type = other DNA
gcttcctcaccaagatggcagaggtaatccctacctggaaatcccacctctagtctgacctgaaattctcctgctgcccctgcctcaaacccacagggaccccagatggggcagggttgg

SEQ ID NO: 4462 - DNA, 120 bp, synthetic construct
  source 1..120: mol_type = other DNA
tttgtatcatttcttagtacattgtaatagattcaaaccagtcttggctgaattaaagtgagaatgagagtcatttaggatggggagaagggagctggctgcagagatggagacactggc

SEQ ID NO: 4463 - DNA, 120 bp, synthetic construct
  source 1..120: mol_type = other DNA
actcacagacatgacacgctcacagacatgacacgcccagacatgatgaactcacagacgtgacacacagacatgacgcactcagacatgacacgctcacagacatgatgcactcacaga

SEQ ID NO: 4464 - DNA, 120 bp, synthetic construct
  source 1..120: mol_type = other DNA
tggctcaccctggccctggccttggctcctgcttgcccttgacacagccagacccccttggggagcaggctcccatctgttggagtgcacagctgaggctttcccagtcaaggcaggagg

SEQ ID NO: 4465 - DNA, 120 bp, synthetic construct
  source 1..120: mol_type = other DNA
gaagccttagtaaatagaagaaatgtgaacttatcaaataggctagagtagacccctgcagattcttgattaaatcaattaaccagattttagaaaggtaatgaggcaatcatatgcaag

SEQ ID NO: 4466 - DNA, 120 bp, synthetic construct
  source 1..120: mol_type = other DNA
tgctgtttgccaggagctgggagtggggagaatcagaagttgttcatgggtgtgcagtttcagttatgcaaggtggggaggttatagagattggctgtcgagcttgatacctatagttca

SEQ ID NO: 4467 - DNA, 120 bp, synthetic construct
  source 1..120: mol_type = other DNA
cgtatgtaaacctctgagacaagctttaagagacatcctttttattttccccaaggttctttgtcttcatgaaaagatagagaccactcagatcctacaatccatttccttaagttctgc

SEQ ID NO: 4468 - DNA, 120 bp, synthetic construct
  source 1..120: mol_type = other DNA
atagtccttgtagtgagggcttagtgcatgttaaccagttgttatttattccactgttcatttgttcaaaacaaagatgtgatgggccagtgatcttcattgccctcacaaagggatccc

SEQ ID NO: 4469 - DNA, 120 bp, synthetic construct
  source 1..120: mol_type = other DNA
ttagtacaaaagagcagccagaaaagtcctgttaaagcacagtcctataaacctgaacccgtccctatcctggtgagaacctgccatggctccccagtgccctctggaaaacacccaggt

SEQ ID NO: 4470 - DNA, 120 bp, synthetic construct
  source 1..120: mol_type = other DNA
gctgtagaagaaataatccagaatcaaggctaagcaggaagtttctgtagtcagctctccacacctctatccaaggcatgaccttgggaaaattaccaaacatgtctgagtcttttattt

SEQ ID NO: 4471 - DNA, 120 bp, synthetic construct
  source 1..120: mol_type = other DNA
ctgagggaaggagggatggggcatagtgggagacccagccaagagctgagggtaagggcaggtaggcgtgaggctgtggacattttcggaatgttttggttttgttttttttaaaccggg

SEQ ID NO: 4472 - DNA, 120 bp, synthetic construct
  source 1..120: mol_type = other DNA
ggagcagggaggaagaaggaagaggaagagaaggaggaagaggagacacagagaaacagaaagagtgagacaaaatgacagggacagggagatgcagcaaagagagacaaagacaccagg

SEQ ID NO: 4473 - DNA, 120 bp, synthetic construct
  source 1..120: mol_type = other DNA
ctatttacaggcccagtaacagtggtgatcctgttactattttgtgatcacacttcttaccacgaccatcatttttgtataccctaagatccccattcaggttctaaacactctccacac

SEQ ID NO: 4474 - DNA, 120 bp, synthetic construct
  source 1..120: mol_type = other DNA
tcttataccttctcagctcctgctctatccacctgttcccctggttctgtggcaccatcatgtccccttctttgtcccacacccctgctccctttgccccgcccaccgcccttccccctc

SEQ ID NO: 4475 - DNA, 120 bp, synthetic construct
  source 1..120: mol_type = other DNA
tataactgagacctcaccttcttttgtgaatatggagacatgtaagcaagactgaagtcacttttgatgactcagggtggactagaagtaatcacggactgtgtgcaatggtgccagtca

SEQ ID NO: 4476 - DNA, 120 bp, synthetic construct
  source 1..120: mol_type = other DNA
ctgcctgcacacagtcactgccccagtgcaggccgcacccttcaatccctcctgcttcctggctgtgtgaccttgggcaggttacttaatttctctgtgctttgctctctcacgactgca

SEQ ID NO: 4477 - DNA, 120 bp, synthetic construct
  source 1..120: mol_type = other DNA
atcagattgtggaacagcgtaaggtagtacgacttggaaagggagagaggatccaaattgtaccattttggaaattcacagtaataggaagcacagaacagtaggtaattggaccatagg

SEQ ID NO: 4478 - DNA, 120 bp, synthetic construct
  source 1..120: mol_type = other DNA
gtctgagggaggggcatgggtgtgcagaccgcatgctcaactatgactgtcccctaccttacagcggccaaaaaggcccccaaaggcaaagatgcccccaaaggagcccccaaggaggct

SEQ ID NO: 4479 - DNA, 120 bp, synthetic construct
  source 1..120: mol_type = other DNA
ggagagcagaagtgagaaaaaggagggtggccacagagaggacagcgagaaaaagagaacaggaagaggggaaaagagaagaaatgggagagggaagaagggtgggagagaaaacggaac

SEQ ID NO: 4480 - DNA, 120 bp, synthetic construct
  source 1..120: mol_type = other DNA
ggtctaggcacacaatcttgcccagcgttttcctgcagatgcccctgtaccccaggaactcctttgaacccccaccatgccacacagcctttactccaaccctgatataccacacctgat

SEQ ID NO: 4481 - DNA, 120 bp, synthetic construct
  source 1..120: mol_type = other DNA
gggagagcaagctagctcaacacagagaaaaaacaaagaggaaaagaatgaaatgaaattatgtcacaaagagagatgtgggaagactgttcagaaacagaggggatgacaaaaggccag

SEQ ID NO: 4482 - DNA, 120 bp, synthetic construct
  source 1..120: mol_type = other DNA
tggactcctgggtcctgagtagagagaggagggcctgggcagctgacgaggtccatcccaccgtgaagaccatcatttgtcccgcatcgtttcctcaatccagcttctgtacttgcacag

SEQ ID NO: 4483 - DNA, 120 bp, synthetic construct
  source 1..120: mol_type = other DNA
acggacggacagacggacagatggatggatggatgaatggttggatgaataaacaaaaataaacccacaagccttctccttggaacttcctatttcttctacattgcattttccctaaag

SEQ ID NO: 4484 - DNA, 120 bp, synthetic construct
  source 1..120: mol_type = other DNA
actctgctctgtctgacccggctccacatccctcctcctctccctcactctgatgagcctccacatttctgcccctctccctaccttgctgtccttcatctctctgtacatctagctttt

SEQ ID NO: 4485 - DNA, 120 bp, synthetic construct
  source 1..120: mol_type = other DNA
tttgattatactttctgaagagctcaggataccctctcagtatgaattgcttacgttagaaataaataattagccgggtatggtggcaggcatctgttgtcccaactacttggaaggctg

SEQ ID NO: 4486 - DNA, 120 bp, synthetic construct
  source 1..120: mol_type = other DNA
cctttagtctttgagataggaaaaaacccaactctacattctgctctcacactaaacacagaatacttcacctctagtcaccaaaatgtgtgtgtggcttttcccacaatgaccagggga

SEQ ID NO: 4487 - DNA, 120 bp, synthetic construct
  source 1..120: mol_type = other DNA
ctcgttcacctatggggtgggaaacgcccatcagctggatcccacggctcccgttcatttgtttaacggatgtttaatggggcacgcactaaactctggagactggccaaagaccatccc

SEQ ID NO: 4488 - DNA, 120 bp, synthetic construct
  source 1..120: mol_type = other DNA
ccaggtccctcctcctcactggggacaaggggccacccccgtgcagctggggatggggaatagcagttctggactgactgatgggggcatctggagggtcctgggctgagagctgagata

SEQ ID NO: 4489 - DNA, 120 bp, synthetic construct
  source 1..120: mol_type = other DNA
tatgggccaggagtggagatatgggcctagaggtcgatatctgggcctggagaggagatatgtgcctaggatggagatacgggcctgggtgtggagatatgggactggagaggatatatg

SEQ ID NO: 4490 - DNA, 120 bp, synthetic construct
  source 1..120: mol_type = other DNA
gtacctggtactcctcatgctgctgcagcagctgacagcggtggcggaggagctcctccaggcccagttccggctcccgacactcgcgcacaccctgcggaaagtctgtcaccaggctgt

SEQ ID NO: 4491 - DNA, 120 bp, synthetic construct
  source 1..120: mol_type = other DNA
tccacacagttcagccttttaaagatattcacagggttgtataaccatcaccactaactctaggaaattttcatcaccccccaaaggaaacctatgagcagtcattcccaatttcccttc

SEQ ID NO: 4492 - DNA, 120 bp, synthetic construct
  source 1..120: mol_type = other DNA
aggccggtaaggaagacggtgaatagttggccctgtgaggcctagtgtgacctgtgaggcctgcgggtttagtgtggcctagggtgaccccgtgaggcctagtgtgacctgtgaggcctg

SEQ ID NO: 4493 - DNA, 120 bp, synthetic construct
  source 1..120: mol_type = other DNA
aaaaaaaaaaaaaaaaaaaaaaaaaagaaaaagttccttccttatcaaaaacaccagccatccccgcccactctgcagccagatgcagtggggtctcttctgcgtgttcacagcgctcct

SEQ ID NO: 4494 - DNA, 120 bp, synthetic construct
  source 1..120: mol_type = other DNA
gtcctaagtgccctccatgcacggcagttctacgacacagggattggcaggttacaactgagagtccaacgctggcccactgcctgttttttgtttttttgttgtgttttttgagacgga

SEQ ID NO: 4495 - DNA, 120 bp, synthetic construct
  source 1..120: mol_type = other DNA
ggctgcctgggtcttggaacgaccgcttattttgagccagatgggagggaagcaatactgagaggcctccagggtggtcacgcctggcagatggaaatgaccccacatagtgaggttggg

SEQ ID NO: 4496 - DNA, 120 bp, synthetic construct
  source 1..120: mol_type = other DNA
tgattacggccgcagggtgatacggccgcagggtgatatggccacccgggtgatacggccgcagggtgatggagcctaggtgataaggcggcaccagagagaagtggcacagcaggacac

SEQ ID NO: 4497 - DNA, 120 bp, synthetic construct
  source 1..120: mol_type = other DNA
atcccccatcactcctctgaccttgacctctgcttccatccccatcactcctccgaccttgacctctgctttcatccccatcactcctccgaccttgacctctgcttccatcccccatca

SEQ ID NO: 4498 - DNA, 120 bp, synthetic construct
  source 1..120: mol_type = other DNA
tgcagtccctgttcagcccttcagagtctgttccagattgtcccctcctcagtgccacatctgcacttgaaaatctcaaaagcacaaaactcaacatgcctaacaaggaacccatgatct

SEQ ID NO: 4499 - DNA, 120 bp, synthetic construct
  source 1..120: mol_type = other DNA
ccatcttcatggacaatgttaactgtaaacgtgatagctgtgacttacttgtcttactgccaaatcgcccaaatttggaactgcttgtcccatgctgctctgatttatacagtgataagg

SEQ ID NO: 4500 - DNA, 120 bp, synthetic construct
  source 1..120: mol_type = other DNA
tcagcctgaaggatccttccatggctgtcaatttctcacggcctttctcttccctcagggtcccctggcgatggcagaaatggaccctacacaggtgagtagagtgtttcctactattca

SEQ ID NO: 4501 - DNA, 120 bp, synthetic construct
  source 1..120: mol_type = other DNA
actcagggatggattcatatcataccagtaggcccagatattttgataccaaggcaaggggttgtcgctgatttctatcttttcttccttagtcacccatttatatctattctgatgttt

SEQ ID NO: 4502 - DNA, 120 bp, synthetic construct
  source 1..120: mol_type = other DNA
tttctgtactattttgttttctttcctgtggtccatgatgagataagtcattctggctcagtgctgccactcacctgtcgttttccttaggacttgcatcttccaagacccatgaaataa

SEQ ID NO: 4503 - DNA, 120 bp, synthetic construct
  source 1..120: mol_type = other DNA
gatgtataggcacctaaaggcatggcacttgagaaatgtgaataagattgtaagttacaaatagcaaggtacagtcagatgttaacagtctcagcccctaaatgtcaccttgtattacag

SEQ ID NO: 4504 - DNA, 120 bp, synthetic construct
  source 1..120: mol_type = other DNA
gttagagtagtgagtgagtagatggatggctggacagtgacatgcagaggcaggggggtagaaagatggataggtggctgggtgaggatcgtcacgcctgtaatcccaggacttagggag

SEQ ID NO: 4505 - DNA, 120 bp, synthetic construct
  source 1..120: mol_type = other DNA
ccccagccctttgcagctaagttgtgtctccttgatggcagatgtcagtttcacggagacgtaattgtttccaggagtattatttctatgcctttttattgttttccactttggaaacat

SEQ ID NO: 4506 - DNA, 120 bp, synthetic construct
  source 1..120: mol_type = other DNA
cccatgactagtattgtagtgaatggggaaaagctgaaaggctttcctctaaaaattgtaataagacaaagatgcccacttttatcactcctattcagcatagtcctggaagtcctagac

SEQ ID NO: 4507 - DNA, 120 bp, synthetic construct
  source 1..120: mol_type = other DNA
aaagtataataataaaaaaaaaggaaaaaaaaaagaaataagtcctcctcaagagctttagcaaggcactcaaatgtgcgtaagatgacctgggcagcctgctcagggccatgtgcctgg

SEQ ID NO: 4508 - DNA, 120 bp, synthetic construct
  source 1..120: mol_type = other DNA
aactttaccactggctcaggtaaccagtgatgaatgttcagaacaaaagttattcggaatcatttgaagtggtttgggcaagtgcgaaattaaggtgagtagctctgatcccatcctcca

SEQ ID NO: 4509 - DNA, 120 bp, synthetic construct
  source 1..120: mol_type = other DNA
ggaatatcctagcctggcaaactgccaggcagtgtcacagggtgggacaggactctgccctgctgcgcttccagtctcggggaccatggcatgagtgagatgggctgaacaaaagttcag

SEQ ID NO: 4510 - DNA, 120 bp, synthetic construct
  source 1..120: mol_type = other DNA
ctccttgagcatcccttccatttttaatgcacaattgttcattttatatagacagtattaaaaataacagcaaacactataagaagtcattgcaggcccaggctgggcccccagggccat

SEQ ID NO: 4511 - DNA, 120 bp, synthetic construct
  source 1..120: mol_type = other DNA
gacacactatctaacgaagtaatggggtgttcagtctgtcttgtacatcatccccacccaagaaagctgtggcagagcacgaaagtgaagggcaaatatggacctttgcaaaatgctaat

SEQ ID NO: 4512 - DNA, 120 bp, synthetic construct
  source 1..120: mol_type = other DNA
cacataggacatgacgcacacaccacacacacacagattatatatgcagatacacacaaaaatcacacatccatcacactacactcagatacacacgacacacacatcacattagacaca

SEQ ID NO: 4513 - DNA, 120 bp, synthetic construct
  source 1..120: mol_type = other DNA
tgtgtgtggtttgtgtctgcatgtgtgtctataaatggtgggtggagatggtatgtgcgtgtgtggtgtgtgtgtgtatgtgcgtgtgtgtgtggatggtttatgtctgtgtgtctataa

SEQ ID NO: 4514 - DNA, 120 bp, synthetic construct
  source 1..120: mol_type = other DNA
cacacacacacacacacacacgtacacatatcctgtggtttccatttctctggagaaccctgaccaacccagtgttcgcaatgtgtgtcacatgacctggtcctcccggaccgcagctgg

SEQ ID NO: 4515 - DNA, 120 bp, synthetic construct
  source 1..120: mol_type = other DNA
cctgtgtaatcctggaattcgctgagatttttcacactcgggggttacctgatgttttctctttcttcctcccaaattctgcctcgtgcccctatcctcttgtttataagtatgatttta

SEQ ID NO: 4516 - DNA, 120 bp, synthetic construct
  source 1..120: mol_type = other DNA
cttttaacatttaaagaatcagagaaatagtgatctgcaatgggaaggttttgattaatagacgtgacttagagagtgggtacagataattttgaggcagatttgatccttgctagtttg

SEQ ID NO: 4517 - DNA, 120 bp, synthetic construct
  source 1..120: mol_type = other DNA
agtacatcccaacctaacccagtacatcccaacccagcccagtacaacccaacccagaccagtacatcccaacccaacccagtacatcccaacccaacccagcacatccgaacccaaccc

SEQ ID NO: 4518 - DNA, 120 bp, synthetic construct
  source 1..120: mol_type = other DNA
acccctgaggcagagcaataccacacctgcgggcaacaccacccctgaggcagagcaatactgcacctgcgggcaacaccacccctgcaggcagagcaatatcacacctgcgggcaacac

SEQ ID NO: 4519 - DNA, 120 bp, synthetic construct
  source 1..120: mol_type = other DNA
ccacactgtctgttcccgacacctttgatcagcatatccatgctacagaagctacctgcccctgagccaaccacactgtctgttcccgacacctttgatcagcatatccatgctacagaa

SEQ ID NO: 4520 - DNA, 120 bp, synthetic construct
  source 1..120: mol_type = other DNA
tctgcagataacaactagaaaaactaaaagaataacctgaatctgtttcacagcctcagataactaccaaggcaacaaagaaatgccaagatccaggacaggaggaagcctaggggggaa

SEQ ID NO: 4521 - DNA, 120 bp, synthetic construct
  source 1..120: mol_type = other DNA
ccagaaaggagagagatggtccagggctgtgtcctggtcccagctgtgtgtgagaggcgtctcctgccgcccgtggagagcatcgtgtcctgtgagcagcctttacttaccctggactct

SEQ ID NO: 4522 - DNA, 120 bp, synthetic construct
  source 1..120: mol_type = other DNA
cataataacggtagatcggggcatgatgatgctgggcatgacactgggcatgatgacggtctgcatctgggcatgatggctctgggcacaacgatgctgggcatgaagatgggacacgat

SEQ ID NO: 4523 - DNA, 120 bp, synthetic construct
  source 1..120: mol_type = other DNA
agggagatgagcaaagagtgacgaggctggccaggtggatcccggagagagactgccagagagtgatgagggtggccaggtggatcccggagggagatgagtagagagtgataaggctgc

SEQ ID NO: 4524 - DNA, 120 bp, synthetic construct
  source 1..120: mol_type = other DNA
agtttgttcaccagagaggacagaatgtgctgagccaggttactaccaaagacctgggcacgatgaaagaggatgtgaactcatacgtggcctggccagagatgctggaaagacaaggtg

SEQ ID NO: 4525 - DNA, 120 bp, synthetic construct
  source 1..120: mol_type = other DNA
ctgtgacaaagcgctgcagactgggtggctcagaacagcagaaatgtattggctcagtcctggagctcagaattctgaaatcgaggtgtcagcagggccctgcctgctctgaaacctgta

SEQ ID NO: 4526 - DNA, 120 bp, synthetic construct
  source 1..120: mol_type = other DNA
tcatacactctcacaaccacactcacacaacatgcaatcattcccaatcactcacatccacactccacacaaccacacaaaatcacatccacacacacactcaaccacactcatacccca

SEQ ID NO: 4527 - DNA, 120 bp, synthetic construct
  source 1..120: mol_type = other DNA
cgcgcttttatggttattgggtctggataaaataggactaaagatgggaagctgcactgaggagaggaatctgtgtaggacatagtggaaaacttgtatgtctaaatagtaagacacagg

SEQ ID NO: 4528 - DNA, 120 bp, synthetic construct
  source 1..120: mol_type = other DNA
ccatgtaacacaccgtgcatgctagtgacaccctcctgtgccagtgacacacaccctgtgccagtgtgacacgtgtgcatcgtgcccagtccagaagcagccaaagaaacctgggtgctg

SEQ ID NO: 4529 - DNA, 120 bp, synthetic construct
  source 1..120: mol_type = other DNA
cattgctgtcatcatcaccattcaccatcaatgtcgtcatcaccatcatcatcactatcatcattatcaccatcatcaccatcaccatcatcattactgtcatcatcaccattcaccgtc

SEQ ID NO: 4530 - DNA, 120 bp, synthetic construct
  source 1..120: mol_type = other DNA
cacccagattagtttctaagggatttatatttgtttgcagagtggtgcgaactgttttcatcctcagaggagcagagtgctcatagatgagtttgacattactgggattcactttcagaa

SEQ ID NO: 4531 - DNA, 120 bp, synthetic construct
  source 1..120: mol_type = other DNA
aagttctcagtggtatttagtaattcctgaaactgctaaaatatctcttccatgggttcctaaccacagaatacacatagcctagaacagtgatcctcaacctttttggcaccagggact

SEQ ID NO: 4532 - DNA, 120 bp, synthetic construct
  source 1..120: mol_type = other DNA
ttgccctacggacctatcctgctgtcaggttagggatgcatcccatacacccaatacatataccctgtccataagtcttatcattctatttgccatactgtcattagaattatctttgtg

SEQ ID NO: 4533 - DNA, 120 bp, synthetic construct
  source 1..120: mol_type = other DNA
tatatttttgtttcaagaaaagacagtttttagctaaacttgccagtttttaaaggctgttagttaaaaatctaagatatacattaacgttaaagaaccaaaactctctatggtttatta

SEQ ID NO: 4534 - DNA, 120 bp, synthetic construct
  source 1..120: mol_type = other DNA
cttacagtctttcatgtgagtgaaatcactgcattgttttcatttattcactaaatatttagtgagcagccaatccccatgctcaggagtacccagcccagcagctggggcagatgttag

SEQ ID NO: 4535 - DNA, 120 bp, synthetic construct
  source 1..120: mol_type = other DNA
gtaatgatctcatatgatgaggatcttagaggttggcagtttcaggcttgatgaatttgggttagcttctttgtgattttctcagcttttccttgatggtcacaaggtgactgccgtaca

SEQ ID NO: 4536 - DNA, 120 bp, synthetic construct
  source 1..120: mol_type = other DNA
acaatgcagtttgtacattctgactttccccctccatcttagggaagaatatagagttattctacctggctagatccatgcagctatcagtgaggttggtagaagaattgaagtactctc

SEQ ID NO: 4537 - DNA, 120 bp, synthetic construct
  source 1..120: mol_type = other DNA
ctggaacagccatttttgtaagtgggaataattttttctaaaaaatcaattccctgtctttagactgctaaaataaaaaatcaaacttcacgggagggaggtgggggggtcagccccccg

SEQ ID NO: 4538 - DNA, 120 bp, synthetic construct
  source 1..120: mol_type = other DNA
cagctccaacccaggaccatcatcctcaaaccctaccacaagcagctccaacccaggctgtcagccctttaaataccttttggcaaggaaatgacatcatctggtccctttaaaaaaaaa

SEQ ID NO: 4539 - DNA, 120 bp, synthetic construct
  source 1..120: mol_type = other DNA
tctcaaaaaaaaaaaaaaaaaaaaaaaaagctaggctccgtgagtcatggcccaaatccaggagccctgggctctgacaaagtgcagagccttggttcccattccctggtggggagagaa

SEQ ID NO: 4540 - DNA, 120 bp, synthetic construct
  source 1..120: mol_type = other DNA
tacaaagtcttactctgcagaaatctccatagactccctgctcctcctcagggcgatcccacagcacatgtgcgcatgtgcacacacataaaccagcctcctcccccagatcctaaggtt

SEQ ID NO: 4541 - DNA, 120 bp, synthetic construct
  source 1..120: mol_type = other DNA
gatggcccttcaaagacagctgttgggagcttcagaacttccttcagaaactggtcaaacttgctaaatatcattaagccattggaatctgacatctgggagaaaacatctatgagaaca

SEQ ID NO: 4542 - DNA, 120 bp, synthetic construct
  source 1..120: mol_type = other DNA
cctctgtcccttgcatttcctgaaaattagaatcgaaatctagaggcttgctcagattcagattttattttagcaagaaaacttcataggcttatggtatacttcctaccacaccacatc

SEQ ID NO: 4543 - DNA, 120 bp, synthetic construct
  source 1..120: mol_type = other DNA
ctaataacaaagtagctttgcattcgtggaataaacttccaattaatcatggagctacactggctacctcatcattcctagactaaggcaggcactctcctgcttcagaatctttgcacc

SEQ ID NO: 4544 - DNA, 120 bp, synthetic construct
  source 1..120: mol_type = other DNA
agaatgtattgttgtcacttagtatggtttggcttctagagcaaggctgttccctttaacatttgactagtgaatcactcagaccaggttcagcagtaggtcagcaatagtccagtttgt

SEQ ID NO: 4545 - DNA, 120 bp, synthetic construct
  source 1..120: mol_type = other DNA
agtggttacccttagtgggaatggtcttcatgaacttgtggggtcagtagtaggctatcgttgtgggctaagggtaagtggaagagaagggaatagagagtgtgtagatatctcttccaa

SEQ ID NO: 4546 - DNA, 120 bp, synthetic construct
  source 1..120: mol_type = other DNA
tgggagcactggtgagagggtggccgaggggcattgcaattgcatgaacgatcccagcagacatcggatcttaggaatctggatggcaaatggggcaacactaatgtggcctcagttact

SEQ ID NO: 4547 - DNA, 120 bp, synthetic construct
  source 1..120: mol_type = other DNA
ttacaggcattctttaactagtctggatgtgagggaccctttgcacaacccaggaaatgctgaagtgctgtgaggaaaaccatttacaaaaacaactgtgtgctagatcattttcacagt

SEQ ID NO: 4548 - DNA, 120 bp, synthetic construct
  source 1..120: mol_type = other DNA
gtagatacgaaatgctggctaagagctaaaggaagaagcagaagcagcaaaagctgaaagactttatatccacccaaatgctgatcatagaactccataatgttggagctgagggaagga

SEQ ID NO: 4549 - DNA, 120 bp, synthetic construct
  source 1..120: mol_type = other DNA
catatgatatttaaagctgcaagactgaaagagatcacctaaggaatgagtgtggatggagaagagtaagatcccagcctagttaatagtaggcagtacaatattagggatcggagaacc

SEQ ID NO: 4550 - DNA, 120 bp, synthetic construct
  source 1..120: mol_type = other DNA
ccatccttcagtcccttcctaccctcctttcccttactccctctcgtcttcccttctttctttccttccttttcctccctccctccctttcttccctccttccttctgtttctttccttt

SEQ ID NO: 4551 - DNA, 120 bp, synthetic construct
  source 1..120: mol_type = other DNA
tctgagggaggtcctggaactaatctcccatggataccaggggacagctgtaccagcagtgcttttggaccacaatgcaagtagaaaggaaatttctataattcaaaatctatttaactg

SEQ ID NO: 4552 - DNA, 120 bp, synthetic construct
  source 1..120: mol_type = other DNA
cagcacataaccatgcagctctttatgaaatggaccagaatgcactcacagctacaagactgtgcacttagggtttgatgcttctctgtatatgttacgggtcagtaaacgtttacttaa

SEQ ID NO: 4553 - DNA, 120 bp, synthetic construct
  source 1..120: mol_type = other DNA
agctttctgctgtatttctgtgactgtcaatataaccccattcggaaagaatgtcaaatgccttaatttaaagccttacatgcgaggtcaaggcaaaaatggaccttcctgtgctatggg

SEQ ID NO: 4554 - DNA, 120 bp, synthetic construct
  source 1..120: mol_type = other DNA
aaggcaggtggatcatttgagctcaagagttcgagacgagtttggcccacatagtgagaccccgtctctattaaaaatacaacaatgagccggtggtgcgtgcctgtaatcccagttact

SEQ ID NO: 4555 - DNA, 120 bp, synthetic construct
  source 1..120: mol_type = other DNA
cttagaactatatattatactgcaaaagcaaacagcacaacactcatcatactcatcattatctgctgtgtatactacctccaaaaatgaaaatacaaaacagtaaaatgcacctatggt

SEQ ID NO: 4556 - DNA, 120 bp, synthetic construct
  source 1..120: mol_type = other DNA
tcacagcaagccccatgaggaaggtacattcatcctcaatttatggttgaggaaacttgacaactattgcactagtgaactgaagagctagggtttggcttaagccctgatctctccttt

SEQ ID NO: 4557 - DNA, 120 bp, synthetic construct
  source 1..120: mol_type = other DNA
gtctactcgaatgcacctcacgtaatccaaccttgctactgctttgcttaggggttttcttaggggttgtggagggcttgtattatgtgatttgttgttttcctgttttgtggttttaat

SEQ ID NO: 4558 - DNA, 120 bp, synthetic construct
  source 1..120: mol_type = other DNA
actgtgtgttatctgtcaccatcaccatcatcatcatccatcaccatcactatcaacaccatcatcattaacatcaccatcactatcaccaccattatcaccatcactgtcaccaccatc

SEQ ID NO: 4559 - DNA, 120 bp, synthetic construct
  source 1..120: mol_type = other DNA
aaggaaaaaaataagtaaagaggaattgtaattttaaatagagtgccaggcaaagacctgaaggaagtgagaaagttcgcttatgggtactgaggggaagaaacggagcagccagtgtca

SEQ ID NO: 4560 - DNA, 120 bp, synthetic construct
  source 1..120: mol_type = other DNA
ttacttattttcccatgtatatctccactcccaactccaacaggaagttaccagaatttgacattctgaggaatttcattcactggtttgcgcctttctgcctgtgaggtagcccagact

SEQ ID NO: 4561 - DNA, 120 bp, synthetic construct
  source 1..120: mol_type = other DNA
tgtctaaaaatgtgccaggtgctgagttgatggctaacactgaccgaaggtagcttcagggaagaaatctttcctttcttctcctccttcacagaaaactcgtgtattaatgattagtga

SEQ ID NO: 4562 - DNA, 120 bp, synthetic construct
  source 1..120: mol_type = other DNA
attcatgtacggaaacagaacccatgatggatgagcattggttactcctcattgctggaggttttataagcaaacaggccagttttcttcttttgtggctttgtgagttttgccccttga

SEQ ID NO: 4563 - DNA, 120 bp, synthetic construct
  source 1..120: mol_type = other DNA
ataaccctgctatgaacaaaggtgtacaaatggagacatttttatgattctttcttttcccccatcaatctgtagctcatgtatgatccgtgtagcccggcgcaagttacttaacctacc

SEQ ID NO: 4564 - DNA, 120 bp, synthetic construct
  source 1..120: mol_type = other DNA
ctttcccgccccccccccaaacaagctgatcctaaaattcatgtgaaaatgcaaggaacccagaataggcaaagcaatgttgaaaaatgaagaaagaggactcacacatcctgatttcaa

SEQ ID NO: 4565 - DNA, 120 bp, synthetic construct
  source 1..120: mol_type = other DNA
atctatctggatagaattctcactctctggatataactctcactatctggatagaattttcactctctggatataactctcactacctatctggatataattctcactctctggatagca

SEQ ID NO: 4566 - DNA, 120 bp, synthetic construct
  source 1..120: mol_type = other DNA
gttgctaactggaattgcatgattagattgagtaatcacacgtgtcggtaaaaagctgtaattacctaagaaaagcatagcatttttgtctgtgcagggctcacctatttcgtatgtctt

SEQ ID NO: 4567 - DNA, 120 bp, synthetic construct
  source 1..120: mol_type = other DNA
atattttttctaatgttattacccagcccccttcttggttgccttttgtggagcaatcttttgggtaactccctgtaaatttgagggttaattttagttcggtgtggtagaggaggcagt

SEQ ID NO: 4568 - DNA, 120 bp, synthetic construct
  source 1..120: mol_type = other DNA
agagtagaattacatgatcattatgaatacatcattcctatcatagttataatagagaaagacaggatttgtatcccagccccttcacatgatcttaggcaagtgatttaaccactgtgt

SEQ ID NO: 4569 - DNA, 120 bp, synthetic construct
  source 1..120: mol_type = other DNA
tctcaaaaaaaaaaaaaaagaagaaaaagaaaagaaaccccgtctctactaaaacacacacacacacaagctgggtgtggcggcgtgtgcctgtagtcccccgtctctactaaaacacac

SEQ ID NO: 4570 - DNA, 120 bp, synthetic construct
  source 1..120: mol_type = other DNA
tgaccttggacgtggtactcctcctctcagtcaacttcatttgtagcacaagaataacaatacttaccttgcagggttgttgtgcaaagtgagatgctatgtacaaagctaacctaaaga

SEQ ID NO: 4571 - DNA, 120 bp, synthetic construct
  source 1..120: mol_type = other DNA
gcccagccaatttatgcttgaactcaaatctctgtctggttagtttttctgtgcttcacagtgactgcctcagtgcatactgaacagacacttgttgaataaatgagtgaatgaatggga

SEQ ID NO: 4572 - DNA, 120 bp, synthetic construct
  source 1..120: mol_type = other DNA
tagtggggtggggggtgggaagaccgtgtgcaggggaggtaaggatgattaatgggtactaaaaatagaaagaatgaataagaactactgtttgatatcacaacagggttactatattca

SEQ ID NO: 4573 - DNA, 120 bp, synthetic construct
  source 1..120: mol_type = other DNA
ttattaagcaagagttcaaaagcaagccagagcaaaaaatcgtactcagaacatcagtttgttggtgcctttccaaaacagcaatttgataaaagtgcatctgcaagtcttttatctgca

SEQ ID NO: 4574 - DNA, 120 bp, synthetic construct
  source 1..120: mol_type = other DNA
agtcacaaagaacatgggcattacccttgtcacacgcagggtattactgtttttattcattcaaaagttatttaacgagctcctactgtggtgagcaagtccagtggaatccaggccctt

SEQ ID NO: 4575 - DNA, 120 bp, synthetic construct
  source 1..120: mol_type = other DNA
tacgatgttaaatggtagtggtaattatcctgactctattgggaatgccattaagtaacagtccttggagtgtgcacacacaaatatgacgaataagctattccagtgtgttctatcttt

SEQ ID NO: 4576 - DNA, 120 bp, synthetic construct
  source 1..120: mol_type = other DNA
aattctcccaaatgtagcaatataatttcccttttgcagatgtaaaacctgctctaaaggctgtgtaacttgctcaaggtctcaccatcggtgcagggattcagggtttcatagcgctct

SEQ ID NO: 4577 - DNA, 120 bp, synthetic construct
  source 1..120: mol_type = other DNA
tgctgggattacaggtgtgggccactgcgcctggcccttattggcacttttaccaagttgtatagttcatcttttaatcaactggacagaaagatgggaagatgtcattaacatatatat

SEQ ID NO: 4578 - DNA, 120 bp, synthetic construct
  source 1..120: mol_type = other DNA
gaggagaatttggaaagtagaaccagactgacagagggaagggcagttacagtgagtgaagaaagcctgaacataaggaatctcagaccatttcctattgcgatggcaaaagttgtaaag

SEQ ID NO: 4579 - DNA, 120 bp, synthetic construct
  source 1..120: mol_type = other DNA
ccaaaagatgaacatcaagtgctttgcttatgagactgaaatcctgtcatatttggccataaatcactgtgagatctgagccatgaggactgtaggaatctggcatatgtctttagaaat

SEQ ID NO: 4580 - DNA, 120 bp, synthetic construct
  source 1..120: mol_type = other DNA
ttaattgtatttgtttcctgagtcatgtttttaggtgatgtactgccttgagatgacaccacgtaattgtgtcttgaggagtgaggcctagaggggaaagctcgggaattggtagatgct

SEQ ID NO: 4581 - DNA, 120 bp, synthetic construct
  source 1..120: mol_type = other DNA
ccttcatgaaagaatagatgaaaaaaggaagaataagctattgtgccaaagggagatgatgaaattcaagatccacacacataatctctggctcagcctctgaaatgttaatccctgggt

SEQ ID NO: 4582 - DNA, 120 bp, synthetic construct
  source 1..120: mol_type = other DNA
atttctgaggtaggctcaagaatttgcacgtctgacaagttccaaggtgacacagaagctgctgattggggatcacaatttgagaaccactgcttaaagtgatcgttcaaattaacaaac

SEQ ID NO: 4583 - DNA, 120 bp, synthetic construct
  source 1..120: mol_type = other DNA
tcctaacactgaggtgaggggaagaaccttaatatttgacactaaggaggtggtcaaataatgaaacatcaaactgatatcagcaacatggaaaatttcatatgagaatgttagggcaat

SEQ ID NO: 4584 - DNA, 120 bp, synthetic construct
  source 1..120: mol_type = other DNA
gtcgacttgcatgctaatgataccactatttagaaaacaacttaattatgcaatttctagtctcccctgaccacagagcagcttcaggtctaattctggcttagaggtagggaaacagca

SEQ ID NO: 4585 - DNA, 120 bp, synthetic construct
  source 1..120: mol_type = other DNA
gactactgggatactgtgggactgtaacccatagagtttcttagatgctattggagagataaaaggattggcaccgaggattcaagagaacaatggaatcaacactgaatgggaatcaaa

SEQ ID NO: 4586 - DNA, 120 bp, synthetic construct
  source 1..120: mol_type = other DNA
gacagtattggatatcaggttttccataatcattactgagttacacctggtcaagccaagatttttctctacagccaaaaagcccaatgaaattatttcttccagtgctgcccccttccc

SEQ ID NO: 4587 - DNA, 120 bp, synthetic construct
  source 1..120: mol_type = other DNA
taacaggcatattcagcagacaaataccccgatgatcatcaagccagtcctctgtggtttgcatatgaagcacatcagctgcttcatcaggggtattctacttggcatttataaggggag

SEQ ID NO: 4588 - DNA, 120 bp, synthetic construct
  source 1..120: mol_type = other DNA
aggctttacaataaaactactgggtacaataaaaacaaatgttcaaagagcataaaatatacttactgcttgtatctttcttttgactgctaggggttgttgcccaattcactttgactt

SEQ ID NO: 4589 - DNA, 120 bp, synthetic construct
  source 1..120: mol_type = other DNA
agaagtccaaggctgtgctggattaccatgacgacaacttcgccatcgtctttgcagccatgggggtgaggagacttagtagactggcaagttctggaggctgtgagcaggcagcctgtc

SEQ ID NO: 4590 - DNA, 120 bp, synthetic construct
  source 1..120: mol_type = other DNA
tagccattaaagaaatgcaaattaaaaccacaataacctatcactacacatataaaacctaggggaaaaagccaacaataccaagtgctaagtgaggatactgagcaactggaatgctca

SEQ ID NO: 4591 - DNA, 120 bp, synthetic construct
  source 1..120: mol_type = other DNA
ttttgactccccagaaacttaactactaatagcttactcttgactggaagccttattgataacatggtcagttatcacatactttatatattgtatgtattatgtactatattcttacag

SEQ ID NO: 4592 - DNA, 120 bp, synthetic construct
  source 1..120: mol_type = other DNA
ctggctaagttctttaccttctctgagatttggaacatactgctgtttcacctaccaaagcaacttgcaccttttctattgtattaaatatttcagtttctccattgtatggaggcttcc

SEQ ID NO: 4593 - DNA, 120 bp, synthetic construct
  source 1..120: mol_type = other DNA
cattactaggaaaccacagatattcctcccacgttggcatggacccgatcagtaggtttccttgagcttgtcccccttttcagggctaaggagccactgtgagtttgggattactcagca

SEQ ID NO: 4594 - DNA, 120 bp, synthetic construct
  source 1..120: mol_type = other DNA
tccttctccagttttttgggtcttccccttggtttccttcccagagttgtggtggttttcccggtcttggcagcacccttgtttttgcttccctttggtcggccccgaggtctcttaggt

SEQ ID NO: 4595 - DNA, 120 bp, synthetic construct
  source 1..120: mol_type = other DNA
gaaaaagaaggaggtaaaaatggctttcagagttgtttgctcctctgcatctgcatctatcacatctcatcttgaagcccttcctattttgggcacctacattggctgccttttctcaac

SEQ ID NO: 4596 - DNA, 120 bp, synthetic construct
  source 1..120: mol_type = other DNA
tggtaaggaaagaattctaccagccatccaagaaggtaaacattttgcctataaaggaaaaatatcaggctgggctctaatcttctattataatgccagaaaataacagagccacattta

SEQ ID NO: 4597 - DNA, 120 bp, synthetic construct
  source 1..120: mol_type = other DNA
ctttcctagctagctgtgtggccccatctcattttgcccgtttgtaaaataggggtaagagtccctacacacaggcttgttatgagaactcaggcagttaataagaacaacatggcaagc

SEQ ID NO: 4598 - DNA, 120 bp, synthetic construct
  source 1..120: mol_type = other DNA
tcctacatctagtaatcattggtggatttactttgcttcctgctattctttgttgttctctccagactgacattgatgccccttcctcacctctcccatagtcctctctgtgtttctttt

SEQ ID NO: 4599 - DNA, 120 bp, synthetic construct
  source 1..120: mol_type = other DNA
caacacagacacaatttgtgtgtagctaggggcagatattgagatattgaagtgataagtaactggggatggggaagtactggtcacttaagagcatatagaaaaccgtcccagattgtc

SEQ ID NO: 4600 - DNA, 120 bp, synthetic construct
  source 1..120: mol_type = other DNA
gtgcatgaatggaccccagctcctttttgggtgggagcagccatgacaaggaactgtattaaacttcgaaatgcagaactctagagtagcctgtgtctacactgattttaagttatgaat

SEQ ID NO: 4601 - DNA, 120 bp, synthetic construct
  source 1..120: mol_type = other DNA
ccaagtccactgcattcagggctgtgttaggtggggagcccggctgcccttctccgagaaagggaatgcagattttattcaaaagggaagaaaaggcactaacaaagtatgagcaagttt

SEQ ID NO: 4602 - DNA, 120 bp, synthetic construct
  source 1..120: mol_type = other DNA
gaagggaatgtctgcaaactgcttacagcagtgcctaaggcctgtgacccacttaataaatggcagcttttactgccaccaccacagagccacattattatttaaatgaaaacataaaaa

SEQ ID NO: 4603 - DNA, 120 bp, synthetic construct
  source 1..120: mol_type = other DNA
ttcctccctttgtatttgtactttatgatatctttgcatttataactgtaattagctgatgatttataatgtctaattgcttgtccattttctgctgggagtacaatttgaggagggttg

SEQ ID NO: 4604 - DNA, 120 bp, synthetic construct
  source 1..120: mol_type = other DNA
cgggaaagaaaatgtcggagcctggctgtttaaaaattggaccccaggttgttattgcctgattggagggggagggtgtgaataccaaagggagcaggtcagttcatccaaagagggctt

SEQ ID NO: 4605 - DNA, 120 bp, synthetic construct
  source 1..120: mol_type = other DNA
ccttcctgcctcacaatccgtcatccttgggaaaatgattgctacaccaggggtctccttagttctcctacagtgtgtacgggttattacaagttttctgtctgtttttagcagtacgat

SEQ ID NO: 4606 - DNA, 120 bp, synthetic construct
  source 1..120: mol_type = other DNA
ttttatccaagagatagctcctggaacaaggaagccaatgtattcatattcaagtttatctcatttttataagtcaacaaaacatgtatctctgatgcctaatagtaacaaaaaggagta

SEQ ID NO: 4607 - DNA, 120 bp, synthetic construct
  source 1..120: mol_type = other DNA
ttgacagaaacaggaaggctatgccacaagcgcgcacgcgcgtgcacacacacatacacacacacacaaacacatgtgcaaatacagacaaacacacatcttgaaacttctgccttgaaa

SEQ ID NO: 4608 - DNA, 120 bp, synthetic construct
  source 1..120: mol_type = other DNA
ccttgtgtctctgtctgtctgtctgtctgtctctctctcgcaggctgttacaaacagctgaaacccattcttagaataactgttctcgatccacagcctgtaaatgtcccacagtctacc

SEQ ID NO: 4609 - DNA, 120 bp, synthetic construct
  source 1..120: mol_type = other DNA
tgtggtcaatgctgttgtttccacagtggctgggtgagtcacactggctttcatctgtagtgtggaaaatgcctgggccttgcgatagctatgctccatgatgctcaacttagattattt

SEQ ID NO: 4610 - DNA, 120 bp, synthetic construct
  source 1..120: mol_type = other DNA
tttccgggttgtgtactggcctttatactgcacacaagaaaggagtaggacgtgttcactgaatggagaagtacagctggtcaacagggaagaataacttccctttcctacaaatctgag

SEQ ID NO: 4611 - DNA, 120 bp, synthetic construct
  source 1..120: mol_type = other DNA
tttagagaatagtatgatcctcctaacaagacaattttaaaaacaaatataatgttgagttcatcaactgactcttaaaatggtcattttcaatgaatattggagtgatttccaaatata

SEQ ID NO: 4612 - DNA, 120 bp, synthetic construct
  source 1..120: mol_type = other DNA
ttgctaatactgatttagctttataaagttgtggtattttctctcatgaatcaatcaagtaagagttcatgatggtttacagcgggggggggcggggggggatcaacctaagcagtaata

SEQ ID NO: 4613 - DNA, 120 bp, synthetic construct
  source 1..120: mol_type = other DNA
ccagcctggtgacagagtgagattcggtctcaaaaataaagtgcaaagaagtgcgaaaaagagataaaaggcactacacattagtacagaagaaaaatctgtttttattcagataacatg

SEQ ID NO: 4614 - DNA, 120 bp, synthetic construct
  source 1..120: mol_type = other DNA
gagtcagaagttcaaaatttaggaacctctttgtttgtatctatggggtagctttgtgatatcaacttgacttgaactaaagtccccagaactccctttctagtatgtttctggttaggg

SEQ ID NO: 4615 - DNA, 120 bp, synthetic construct
  source 1..120: mol_type = other DNA
atttatttgctatcattttgacaggggtatatttttcccttgtcataaaacaaatttctatcatgaatatctagtatgttagaataattactagagctgacaatgcatacactgaacatg

SEQ ID NO: 4616 - DNA, 120 bp, synthetic construct
  source 1..120: mol_type = other DNA
atccatttcagtgatcacatctgaatttggagggagaatctcaaatcctaaatacgtgatcttgtctcctctgtccatcacaatgtcccagaaatgccaacatttcaaagcctacctctc

SEQ ID NO: 4617 - DNA, 120 bp, synthetic construct
  source 1..120: mol_type = other DNA
gagggcttgcactctgtaaactcttagtcagctggtcactgacccaactgagccttttactgacactgtttttttaaagaatggaaggactaaggattgtatgagctgaaatgttgagta

SEQ ID NO: 4618 - DNA, 120 bp, synthetic construct
  source 1..120: mol_type = other DNA
cacagcaacagcgagcatcccagaaaattgggcatcacttgaagggctgggtgtctcatccggtttcctttttctgagcatgctgcatatcacatgggaatctctacaagcagaggagga

SEQ ID NO: 4619 - DNA, 120 bp, synthetic construct
  source 1..120: mol_type = other DNA
acctcacagaagtgtggaacacagcatagtgtactaaaaccaaagatgaagaggaaatcttgacaacagccagagaaaaatgacacatcataaacaggcaaacaacaatataaatgacca

SEQ ID NO: 4620 - DNA, 120 bp, synthetic construct
  source 1..120: mol_type = other DNA
tgtgaagttcccaggattttgctcaaaaagataacaacataaagccttgagtctgtgtccagcatagcatccatatctaacaaaggatttagagccccgcacctggttccgttgcttttt

SEQ ID NO: 4621 - DNA, 120 bp, synthetic construct
  source 1..120: mol_type = other DNA
aatcccaatatattttccttccctgaagagcaatatggatgccgtctccctccaagtataagacttgggctgaggggaaagcagaaacccctccttttccttctgcgttagagaaaacca

SEQ ID NO: 4622 - DNA, 120 bp, synthetic construct
  source 1..120: mol_type = other DNA
aggctccctcatgggcatctggccaggcttccatctcctgccacaccattgcctgttcctgttcctaggcggcagcttcgatctgcacacagcatcattgtgaatgacagctgtaccagg

SEQ ID NO: 4623 - DNA, 120 bp, synthetic construct
  source 1..120: mol_type = other DNA
ttacaggcgtgagccaccgcgcccggccgctttatatcatcttgatattttcccctcaatcatcataatttaaagcctgcattgctgtattgtgcctctaatttattatataaatctgga

SEQ ID NO: 4624 - DNA, 120 bp, synthetic construct
  source 1..120: mol_type = other DNA
gccgtagtggcagttactctgaattatttagaagttgattacagattctcaggcccctcacctagggattttgatccagtagatctgggtgaggcccaggcatatttaattaaaagtaaa

SEQ ID NO: 4625 - DNA, 120 bp, synthetic construct
  source 1..120: mol_type = other DNA
gtctttattttacatatggggattcacatatcagcatatgggccatcaactctccgagcaagtactttttctccttggatacgatgtgctgggtgttagcagtactttgcttactggata

SEQ ID NO: 4626 - DNA, 120 bp, synthetic construct
  source 1..120: mol_type = other DNA
ttcttgaaaaagtacataaaagtacctaaattggtagggtaagagcagtatctaaaagaactaacataactttaagattattttagaaaacatgtaggatgttttattttgtattctttg

SEQ ID NO: 4627 - DNA, 120 bp, synthetic construct
  source 1..120: mol_type = other DNA
gcatctttcacagcagcctggacctgttgcagagcctttttttgttctaggtcctactcaaaactatcaattttgggggtcacttaataaataggccaaattaatacacccatctgagga

SEQ ID NO: 4628 - DNA, 120 bp, synthetic construct
  source 1..120: mol_type = other DNA
aaaagacgggggatgggggagatttaggttaaatgtgacatgaccccatttttacgtatgaccttagaaatcctctggtttattcactccagctggactaaagacatctaagcattggag

SEQ ID NO: 4629 - DNA, 120 bp, synthetic construct
  source 1..120: mol_type = other DNA
cgcctggccttccacccccctctcttaaggtgaaaggttagattactgctttgagacattgcttcttgcctaatataatcaattcacactaaaatttcctttaagcattgctttagctgc

SEQ ID NO: 4630 - DNA, 120 bp, synthetic construct
  source 1..120: mol_type = other DNA
aatggaaatagcctagatatctaccagcagaagaaggatagataaacaaaccatggtatattcacactactcagcaataaaaaagcacaaactactggtatctgtaacaatatgaattaa

SEQ ID NO: 4631 - DNA, 120 bp, synthetic construct
  source 1..120: mol_type = other DNA
gaaggacacaaaacaaaataagtaaaacatatagtatattatatttaattaagtgagaagaaaaaaaaacaggtaaatggcactaaaggtatggaggcaggtgtaattctatagagacag

SEQ ID NO: 4632 - DNA, 120 bp, synthetic construct
  source 1..120: mol_type = other DNA
cgtgccatttaatcccaggctctagtatgtttattcgggttgtctgcaattagtaacaacataaaatttgaactttttctgtaaaagatcaaagactaaatagggcagtttgctgtccac

SEQ ID NO: 4633 - DNA, 120 bp, synthetic construct
  source 1..120: mol_type = other DNA
agcatcttcatgtcagggaagccacattccttctaaaagatgtttgggccccatgtgctgtcagagaagcttcttgtttttggagtcccctcttcttggcttgttcattataacatctct

SEQ ID NO: 4634 - DNA, 120 bp, synthetic construct
  source 1..120: mol_type = other DNA
gagtaagtttgaaacatgagattacttggtcaaatgatatgaagcctttatggctcttgctctgtgttatcctcttgctttttcaaagggccgtgagctaacagggagcagttcatgacg

SEQ ID NO: 4635 - DNA, 120 bp, synthetic construct
  source 1..120: mol_type = other DNA
cctctttgcctgccccagttgtgacaccggctatcagcatgggaacctcttcatgtccttccgaagcctcttccaggatgtgactgatgccatgaataacatccaccagtcggtgagtga

SEQ ID NO: 4636 - DNA, 120 bp, synthetic construct
  source 1..120: mol_type = other DNA
cataattttactcagctcacaggttttgctcttttcatcactttggtcaaaacaaatgacccatctctgctgccttcaccctcttgaattcttgaactccaagtcaactcctcgctttag

SEQ ID NO: 4637 - DNA, 120 bp, synthetic construct
  source 1..120: mol_type = other DNA
aaggactcctagatccttatctatgactatagagaaacagatcagagagtgtgctaaatctataggtgctggccctgtatatgtcaaaaggataataatttctataaatgtattctgtac

SEQ ID NO: 4638 - DNA, 120 bp, synthetic construct
  source 1..120: mol_type = other DNA
ctagctcttttgaacagcatttttttttcttagtatgatgcctatgagaaaaactacctgccttggaggaatttgtaatagagaaagataatatgtgtgtgtgcgtgtgtgtgtgtgtga

SEQ ID NO: 4639 - DNA, 120 bp, synthetic construct
  source 1..120: mol_type = other DNA
agacgtgagccatcgtgcctggccccgtttgtagttctaaaattcaagtctggatatattagttccccgcttaaaatgcctcatgtcttcccactttctataataaaaagtctactatcc

SEQ ID NO: 4640 - DNA, 120 bp, synthetic construct
  source 1..120: mol_type = other DNA
tggttgatgttaccttgtttctaatagagttaaggattttcttctgtttaatttcacccacagttggtgagagtccccattacatgccaaacaaagtgttgaagcattatgggaaatgct

SEQ ID NO: 4641 - DNA, 120 bp, synthetic construct
  source 1..120: mol_type = other DNA
gcctccgaagtacctgggacaacaggcatctgattcatttagagttaatttttgtatatgctatgaagttggggtccaccttcattctttagcatgtgaatatccagtgatcctaacacc

SEQ ID NO: 4642 - DNA, 120 bp, synthetic construct
  source 1..120: mol_type = other DNA
ggcagatgcatgcagaagattcgagagttttttctcttctttctgttctcttcacagagaccagggaaagctgtgcctggccttagtctgtttttctcatgggctaacatacttgagaac

SEQ ID NO: 4643 - DNA, 120 bp, synthetic construct
  source 1..120: mol_type = other DNA
cacacgggaatgcggtaaacaccactgccacagtgtctacgaatgcagcaggaacatggttctgctacaacattcactgaaaaataaggacacagaatcaaggtgtgacatgattgcaat

SEQ ID NO: 4644 - DNA, 120 bp, synthetic construct
  source 1..120: mol_type = other DNA
tccacacagtggaacgcagctgctttatgccagtctgtctcacttactgtctcatgcttagaagagtttcagtaagtatttgtgtgctgcatgagaccaaggaccatggtttgatttaca

SEQ ID NO: 4645 - DNA, 120 bp, synthetic construct
  source 1..120: mol_type = other DNA
ccctgctcagaggtaatgcccagggtcacctggaggtctggcaagagagaaaagatgaggcatggactttgattccttcaaaaatttccattagaacttgaaattgagttttttgtttgt

SEQ ID NO: 4646 - DNA, 120 bp, synthetic construct
  source 1..120: mol_type = other DNA
cacaggtgtgagccacagtgcctgacggctcttgatcttaagtttccaaaaccgtctttgcttttcaacctggaagtctttatcctgttgtgcccagtagaaagaggccgaacccaaagg

SEQ ID NO: 4647 - DNA, 120 bp, synthetic construct
  source 1..120: mol_type = other DNA
tgtaccacagcttgtttatccagacacccactgatgagcacctgggttttggatattatgaacagagctgccataaacattcgtgtacaggattttgtgtaaacctcttttcatgtatcc

SEQ ID NO: 4648 - DNA, 120 bp, synthetic construct
  source 1..120: mol_type = other DNA
ttttattttcagtgtagagagataacagatggtccgagtggatactttcagtccaggctcagtatggggcctgcaggaatccactagataaatacagtctataaaccggaaggctgaaaa

SEQ ID NO: 4649 - DNA, 120 bp, synthetic construct
  source 1..120: mol_type = other DNA
aagaaaaaaaaaaagaaaattcatggagtatcagggaagtagtgagcaggtgcctggtggtagagagatggatggcaagagttgttacagtagtcagaaaacagtattcgaggaactctg

SEQ ID NO: 4650 - DNA, 120 bp, synthetic construct
  source 1..120: mol_type = other DNA
gctcactaagggaagagatgtcctttatacatcatttgaaccttgactggcacaggaagagaagctatcatataaagaatcactcaaagattccaagttgtctaccccaggcctatctga

SEQ ID NO: 4651 - DNA, 120 bp, synthetic construct
  source 1..120: mol_type = other DNA
tgtagtaaatttccagtgaggtgcatgaagtggacctttttgaacctgaaaacatcccccttcatgtaatatgagataagaagaccagcctgttacaagcagcaatagtcgcttgtgcat

SEQ ID NO: 4652 - DNA, 120 bp, synthetic construct
  source 1..120: mol_type = other DNA
atttccgtattctgaggctttgacatctgggaccttgctgactctggaggggcagtcccttcaaggttggccaattgctagagacagtgaacaactcactcgtgagcaaattttgcaaat

SEQ ID NO: 4653 - DNA, 120 bp, synthetic construct
  source 1..120: mol_type = other DNA
aaaatgaggtcctcggttctgcaacttcagggaaccagattctgccaacaacctgagtgaatctgaaagcaaattcttcccagagccttgcaataagagtccagcagaccaaaacttgat

SEQ ID NO: 4654 - DNA, 120 bp, synthetic construct
  source 1..120: mol_type = other DNA
gaggtaagcctgttttctttatggtgctagatgtttgtaggatatttcgattggtgtactcattgctcattcatgtccatgtcctactccttcttcttcttcttcttcttcttcttcttc

SEQ ID NO: 4655 - DNA, 120 bp, synthetic construct
  source 1..120: mol_type = other DNA
cagtcagagctagaaaccagacaggaagcatcaagccctgtgaaagagagtaaaaggggaaaagtttgattcagtccttttaatgtatcggtgtggtcaaaagagattggacctttttat

SEQ ID NO: 4656 - DNA, 120 bp, synthetic construct
  source 1..120: mol_type = other DNA
agagagagagacagatacagagataggaacagatggatagaaaaagagagaaaaacaacgagagggaaaggtcagagacaaatcttacatttgaaatggagtacattgattccattaata

SEQ ID NO: 4657 - DNA, 120 bp, synthetic construct
  source 1..120: mol_type = other DNA
gtgaagctgaggccagcttggtaacacactacctcatgttagcgtcccctcctttcctgcttcagttatattttacctctactctagtcatactgggattgcttcttagtgtgaaagttt

SEQ ID NO: 4658 - DNA, 120 bp, synthetic construct
  source 1..120: mol_type = other DNA
ttactccatgaatgaaaatataaagtagttggaggcttgaggttctagtgtcaggctgccagggtaccaatcctggctccagtatttcctaggtatgtgaccttgggtaagtttcataat

SEQ ID NO: 4659 - DNA, 120 bp, synthetic construct
  source 1..120: mol_type = other DNA
ttgatcatgtgtgctctccattaccggtctcttcacaattgttaaccttctctatttcttctagtgaccctttctccaaaattgcattaatttataccggtaccacctactgagtgttca

SEQ ID NO: 4660 - DNA, 120 bp, synthetic construct
  source 1..120: mol_type = other DNA
atatatcctagttgtactatggtacaattaagaactctctttgacaggttttcaagtggcaacaagagcacctgttctcaacatgaatgtgatttgcctgtgccatccagctgccctttg

SEQ ID NO: 4661 - DNA, 120 bp, synthetic construct
  source 1..120: mol_type = other DNA
tagaaacaaaaacataactaaccaaggaaagaagcttggacataagtgcgggataaagttagagcattaaggatgggctggctaacaaaatcacaatgtcataggacttaagaatgtcaa

SEQ ID NO: 4662 - DNA, 120 bp, synthetic construct
  source 1..120: mol_type = other DNA
cacaaagggctgcattttgtctctttgcaatcagcaactcaagcagtcatatcacttttgttcatagctactgtgttactgccaaattggtctgggaaattgaaaaacagcattagaggt

SEQ ID NO: 4663 - DNA, 120 bp, synthetic construct
  source 1..120: mol_type = other DNA
ggaggaggatatactggcgagaatattttttaagaaagcacatgtgaaattgtggtgtgacaaaagagataagctattaggattttgccagcacagatcatctttcacatgtagccacaa

SEQ ID NO: 4664 - DNA, 120 bp, synthetic construct
  source 1..120: mol_type = other DNA
tgggagctggttagcatagtgatttggggggtttctatgaatagagcatacagttggaggagtcatggggcagagatgagactagtacactgcagtgagttggcatgtctttgatgttat

SEQ ID NO: 4665 - DNA, 120 bp, synthetic construct
  source 1..120: mol_type = other DNA
ggcgtgggtggggggcgggaatttaagaaggaaagtgaagcatcatttgggggtaaaataatgtaaccaaatgtgtcctcattctgtgctctttaatagaaatcattgaaacagacaaga

SEQ ID NO: 4666 - DNA, 120 bp, synthetic construct
  source 1..120: mol_type = other DNA
ggatgtttgagttgttttctctttgtactgaaatccaaattttccttcctagttgaaatcctatcaaactgttgacatggactgaatcttatttgattgctatgtggaaacataacaatg

SEQ ID NO: 4667 - DNA, 120 bp, synthetic construct
  source 1..120: mol_type = other DNA
tagattacaaaaatagaactcccgtacacaatgccttcaaggaccagtggactgccataccctatgtctatgaagtgggttcaaatgagctaaaacagaaccatttcagctgttccactc

SEQ ID NO: 4668 - DNA, 120 bp, synthetic construct
  source 1..120: mol_type = other DNA
gaatttaacatgccacttctgatttttcttgttagagtgtttgagtcttgagagcagatgtcacatttcgtacaattctttggcctgtctagtaccctgtgggctgcccggtatggagtt

SEQ ID NO: 4669 - DNA, 120 bp, synthetic construct
  source 1..120: mol_type = other DNA
aagaaaactggattattgtatctgtttctccgttcagtttttgtgatatgttattttgattgaagcatatgaaggaaatctggtcatacacagatacatagttagaaaaaaaggaatagt

SEQ ID NO: 4670 - DNA, 120 bp, synthetic construct
  source 1..120: mol_type = other DNA
aaaaaagggtatggtgggtcataggatgaaatgttcagataggttgatatgagactcccagcttctctctctctggattagcggcatttttaactccagtcttggtagccctgacagttt

SEQ ID NO: 4671 - DNA, 120 bp, synthetic construct
  source 1..120: mol_type = other DNA
ttgagaatcacttctgcaaacagccattgtcactattgacagcatggggatgtggcctgaaaaggttgaggagcaggtattactaccccatctgaaaactagtgtcatgttattattaag

SEQ ID NO: 4672 - DNA, 120 bp, synthetic construct
  source 1..120: mol_type = other DNA
caatccagccctgataaaagtattactcaaagacttgaagatttccccgaaagatgccatcgtctcaagatggctttatcttctcaccctcctcaccagaaacaccccaaattcttttct

SEQ ID NO: 4673 - DNA, 120 bp, synthetic construct
  source 1..120: mol_type = other DNA
actgtatctctaaggtcttgacagagggcctgtttatagtggatgcgggaaaaaaggaagagatggatggagaaagggagaaaggaaggaaatattaagttactgtgccttaaaaagcag

SEQ ID NO: 4674 - DNA, 120 bp, synthetic construct
  source 1..120: mol_type = other DNA
atattaaatcagtttaatatataaaaataaataagaaacatacatagcacagttttatgtattgatcagttgacaaaaatgttgcaaccagaggctctggggagcctaaccgtgtatttc

SEQ ID NO: 4675 - DNA, 120 bp, synthetic construct
  source 1..120: mol_type = other DNA
acacttgaccagatgcagggtctagataagcaaaaataaatattaatcctactagagctgtagcttgaaatgtagtgtaccctggtttaaaatgctgtaaatggccaggcacagtggctc

SEQ ID NO: 4676 - DNA, 120 bp, synthetic construct
  source 1..120: mol_type = other DNA
ttaaaacggcacgttacaatcaaaggtatttatcgcccctcccctccagggcagggggggagcaggagaagagtgggagcgcacccggacacggatttgtgagaccccatgagtctgctg

SEQ ID NO: 4677 - DNA, 120 bp, synthetic construct
  source 1..120: mol_type = other DNA
gtatcaattaacatattcttcaagtcttctctcactcttccagttccattgtcctcatcatttgctgcctgagggtttgcaatagcttcttaatttatctccctgttgccggcatcatgg

SEQ ID NO: 4678 - DNA, 120 bp, synthetic construct
  source 1..120: mol_type = other DNA
ccccctctccctgacgcagggtttcggtctcccagttaatatagggcctatggccattccaaggcttctcctagaacctccagatcaatccttcaataaaatctgtatcccaaattcctg

SEQ ID NO: 4679 - DNA, 120 bp, synthetic construct
  source 1..120: mol_type = other DNA
ctttaaaaaatctgtgattgcccaactggtttatgtcagcattttggaaagaatatcagtctttaaagcggtgttagagatataaaccctctggggagtgaagaatgcctggtgcatgct

SEQ ID NO: 4680 - DNA, 120 bp, synthetic construct
  source 1..120: mol_type = other DNA
ttttattgtgtttctccctcttccacacaccaaaatgtaagcaacatgagagtaagaactctgcctggctcatggctacatactcatgcttggcacctaccaggtgcacaatataaatta

SEQ ID NO: 4681 - DNA, 120 bp, synthetic construct
  source 1..120: mol_type = other DNA
tttttgaaattcacatcttctgggaacagcttaaatggatggtgctttgtgcggcctaactgtggactactgacaattttaagaggctgagacgtcattctgtagctgccttctttagaa

SEQ ID NO: 4682 - DNA, 120 bp, synthetic construct
  source 1..120: mol_type = other DNA
ttatggcacattgtaattactaccaaaagtcagaggaagtaagagctagagatttcctccttgtgagctcacaaccaggcatgaatgaaaataaggcttaggtggagttctgcccataca

SEQ ID NO: 4683 - DNA, 120 bp, synthetic construct
  source 1..120: mol_type = other DNA
gccagtggctctttctcctttccccactggtctttctttaatctttttgctacaactttaatggtgttttgagagggagtggaggcaaacacgtatcatctgctctgcttaatgcaaagt

SEQ ID NO: 4684 - DNA, 120 bp, synthetic construct
  source 1..120: mol_type = other DNA
cacagagaactgaagttgttacgcctcttggaaaaatattgtagcatcaggtgtcagagcatcttgacagctggcagatgcctgctccctctggtgctcagataaggcctggggagctgg

SEQ ID NO: 4685 - DNA, 120 bp, synthetic construct
  source 1..120: mol_type = other DNA
ccaccgcgcccggcctcatattctattttctaaagtcaggttcttatgctagatgagagcataagatcacataaaatgagataaccagggttccagatcaggcaaaagataaaacattgg

SEQ ID NO: 4686 - DNA, 120 bp, synthetic construct
  source 1..120: mol_type = other DNA
tttttcagatgtcacttgcacaacagcagactagaactttaaaactccttgatttcagtgaaatccaagctttgcctattcccgttcctcttccatccaggggttatttggctgaactgt

SEQ ID NO: 4687 - DNA, 120 bp, synthetic construct
  source 1..120: mol_type = other DNA
aaacttcaccaggcacacactagaaatataaacttcgtgcagcaggagtcttatgtgttttgtttcctctgttggctgttcctataaggttacctggcacacagtaggcgtttcatctac

SEQ ID NO: 4688 - DNA, 120 bp, synthetic construct
  source 1..120: mol_type = other DNA
ctcccctccattttccacccctttcttctcttttcctctgctttcctttctttctttctctctcttttgctctttcttttgactggagatctacccagttaagactttcgatcacctttt

SEQ ID NO: 4689 - DNA, 120 bp, synthetic construct
  source 1..120: mol_type = other DNA
aaaatcaagaggaaaccctaaattttaaaattgcttataatttggccctgtctttgtttctttcttacttgtttgctcatcgtgagaatggataacatttgctggggtagttttgatatt

SEQ ID NO: 4690 - DNA, 120 bp, synthetic construct
  source 1..120: mol_type = other DNA
tatttccatttccactgatgaagaaagtgaggacagggcagaaaggtaacatatcacacaatgtgtatgttccagatttggacctaggcaacatgactccagtgttcacaatatgaaaca

SEQ ID NO: 4691 - DNA, 120 bp, synthetic construct
  source 1..120: mol_type = other DNA
tgtttacagatgacattattttatatggagagtaccctaaagactccacacatcaggaaaatctgttagaactaataaacaaatttactagatgttgaaggatataaaatcaacatacaa

SEQ ID NO: 4692 - DNA, 120 bp, synthetic construct
  source 1..120: mol_type = other DNA
ccttgtctcagagtcaatcagatggcatttggttgtatctaaatgaaagttatgcccatgaaacagtggtggtctatagaagccccctaaaagagagggagaagtaacacttgttgagca

SEQ ID NO: 4693 - DNA, 120 bp, synthetic construct
  source 1..120: mol_type = other DNA
gttgtttgttatcagaaaggacaatagctactgggtggataagaacagcatcttacattaagatttcctttggaaagtaggagagtctgagctgagagcagccacattgcaggatttggt

SEQ ID NO: 4694 - DNA, 120 bp, synthetic construct
  source 1..120: mol_type = other DNA
tattaactcttccacccatttcctcttatccatagaatcaacagttgcattaatttttataatctggatttaaaagactatctaaaactttaagagatagataagagatagaaacaatta

SEQ ID NO: 4695 - DNA, 120 bp, synthetic construct
  source 1..120: mol_type = other DNA
cccaatctgtataacttttatttccttttcttatcttgaggcattagctagtacttccagtatgatgttgaaaagaagtggggagtggggacatctttgcctagttcctgatcttagtga

SEQ ID NO: 4696 - DNA, 120 bp, synthetic construct
  source 1..120: mol_type = other DNA
gactgcacaagagtggcttccattccttatgcccacattccattggccaatacttagtcacatggtcatacctaattataaggctgggaatataatctagttttgtgtgcagaaggaaag

SEQ ID NO: 4697 - DNA, 120 bp, synthetic construct
  source 1..120: mol_type = other DNA
caggacttataattgttatctgtgggagagctggcctgaattgaattacttttgtgaccagaagcagaactctattatcccactttacaggtgaatttaaaatacgcgcgtgtgcgcgcg

SEQ ID NO: 4698 - DNA, 120 bp, synthetic construct
  source 1..120: mol_type = other DNA
gaagtcaggcaggcagacaggaaggaaagaaggaaagaaggaaggaagcaaaaccttggagccaataaagcaagttgattattttgatagggttgtgattgttaaaggaattctctttga

SEQ ID NO: 4699 - DNA, 120 bp, synthetic construct
  source 1..120: mol_type = other DNA
tctgttttcagctctaaagaaaaatagacgcgtgacatagtcacagagttcttcactcaccacatcatttttcctttctgcacttccctcctcgagtgcatgtcctgaggggaattcatc

SEQ ID NO: 4700 - DNA, 120 bp, synthetic construct
  source 1..120: mol_type = other DNA
aggtaggaaaatacacttgtttacttactcaggatatgtaagttcagttaatgtcatgcacatgtcccattaaagttatataactagattatgtaacctttagaaggtcacctttttcat

SEQ ID NO: 4701 - DNA, 120 bp, synthetic construct
  source 1..120: mol_type = other DNA
ggtgttttctgtggtctgctgggctatgataaaggcaaactcaaatcaaagtgagtccaacttagtatttatttaatgcctgtgataatatacagatgataaaggaagcttgtctcctgc

SEQ ID NO: 4702 - DNA, 120 bp, synthetic construct
  source 1..120: mol_type = other DNA
taaaaatatcagttatgctggcacacagaaatgttaaaataatcagaaagtttcattcattcagtaattacacatgaaacaccttctatgggtgagggtgtcagttacgaggcgggtcca

SEQ ID NO: 4703 - DNA, 120 bp, synthetic construct
  source 1..120: mol_type = other DNA
gctgggattataggcatgagccaccacagccagcctaggttgcagactttacgacacttaacttaaatacatcagcaccatctcctaaagacagaagaatagtgttcttctttataacta

SEQ ID NO: 4704 - DNA, 120 bp, synthetic construct
  source 1..120: mol_type = other DNA
tccgatctttgtccatgtgagcaagtatcctctttcaatacttcactgccttgtgagaagctagaaaggaggatttagtggaagattaatgtgattctttctcataagtggcagtccagt

SEQ ID NO: 4705 - DNA, 120 bp, synthetic construct
  source 1..120: mol_type = other DNA
aacatctgggcagccagcagctgtgaattttaattgatgctattcaggagaaggagaagggaatacaccactttgccttgtttcttatatccttatatcctgtagcttgcacgtgttctt

SEQ ID NO: 4706 - DNA, 120 bp, synthetic construct
  source 1..120: mol_type = other DNA
ctgctttcccagaaaactcatgaataatctactccttgtttagcacataatcaaaaaataaccataagtatagtcagtcaagcagcccatgctgctatctgcctatggggtagccaccct

SEQ ID NO: 4707 - DNA, 120 bp, synthetic construct
  source 1..120: mol_type = other DNA
ggcctaaaattcaaggttgggaataattttcctttagaatattcaaggctttagtccactgccccctagcttctgaacttactgttaagaagaccaaagccattctaaaacctaagtttg

SEQ ID NO: 4708 - DNA, 120 bp, synthetic construct
  source 1..120: mol_type = other DNA
ttattgggcattttcattttggccattgtgagagcagttatactgtttggttgaggtatagtgttaactgttaaagacagtagagtgcttcatgcttgtaatcccagcactttgggaggc

SEQ ID NO: 4709 - DNA, 120 bp, synthetic construct
  source 1..120: mol_type = other DNA
aaaagcaaattgtgacacatgctacactgtggatgaaccttatagacattacaataagtaaaaaaagctaatcatgtggggtggggggaggggggagggatagcattggtagatatacct

SEQ ID NO: 4710 - DNA, 120 bp, synthetic construct
  source 1..120: mol_type = other DNA
catgtgaaaggtgatcatatgaattgggtcattcttgtcatactcaacaaaaacggatttcagaggtcagggaggaaaaccactcggcacaaaacattgccccaaaaatgtaattccctg

SEQ ID NO: 4711 - DNA, 120 bp, synthetic construct
  source 1..120: mol_type = other DNA
atcccccaaaatgcctgccacatgtgcctcgcacacagaatatacacgtatttattgaggagctctatttgatcatccacctgtgtcagaaaaatatgtcatgtaagagaattcttcctg

SEQ ID NO: 4712 - DNA, 120 bp, synthetic construct
  source 1..120: mol_type = other DNA
ttgactgtgttagattcctcatataaatgaaatcatgcagtatttgtccttctgtgataagccaatttcacttaacatagtccctccaagtccaacatgttgcatatggtacgatttcct

SEQ ID NO: 4713 - DNA, 120 bp, synthetic construct
  source 1..120: mol_type = other DNA
cgcatcctgctaaactttctttatgtctctctcccaaggaactcttcatcccatcttagcccaaacatataagcatccctacaatacaaatgccttctctcttttttattatctcaaggg

SEQ ID NO: 4714 - DNA, 120 bp, synthetic construct
  source 1..120: mol_type = other DNA
ggttaaaatttgaaaaacaaatatatgagtgtgtgtttgtgtgagagaacaaacccacagaacataaatgcactagagctttgttttatgtcccccatttacatcttatgtactgaactt

SEQ ID NO: 4715 - DNA, 120 bp, synthetic construct
  source 1..120: mol_type = other DNA
aaaggtcctatctcatgacctcttctcaatctaattacctccaaacggggctacctccaaataccatcatattggggtttagggcttcaacttattaattttggaggggctgtagacatt

SEQ ID NO: 4716 - DNA, 120 bp, synthetic construct
  source 1..120: mol_type = other DNA
tctgtagtgtttgtgtatggttgaaataactgtacacatagaactccatggaatgatttctcatgaaaatagtgttcattattttatccctatttcccctaccttaatatgtcattgtcg

SEQ ID NO: 4717 - DNA, 120 bp, synthetic construct
  source 1..120: mol_type = other DNA
caactttctccaaactcaaatatctacaaatcaccttcatgtcttcatactattttggaaaatagtttctccagttctcaaatgttactgagtgtatttccatgtcccaggagcttggca

SEQ ID NO: 4718 - DNA, 120 bp, synthetic construct
  source 1..120: mol_type = other DNA
gtatacactgcatactgcactgtagagcattcagcacagtacctgccgttcgataaagactcacacaatattactggttttcttattgccatcacctcaatgacataggctgtctttaac

SEQ ID NO: 4719 - DNA, 120 bp, synthetic construct
  source 1..120: mol_type = other DNA
acaggagtgaagctgtggaaatgtttgtctttctgagtgagtggtatttactgctgtgaatttgctgttccatttcccaatacactctccctcactcatgcttttactctaacttcacgt

SEQ ID NO: 4720 - DNA, 120 bp, synthetic construct
  source 1..120: mol_type = other DNA
gcctgtagcagaagtgctcactaaacatttagttaaaattatttacttaattatgactacaattatcttgtgaggaagaaaaaggtaatgctctccactgtattcccagcccttagaatc

SEQ ID NO: 4721 - DNA, 120 bp, synthetic construct
  source 1..120: mol_type = other DNA
ctttggttaggcagctgaagagttactatgtagatcctggcagccttctacccatcagacaagcaagggcacaatcaattcctgttttcttgaaacgtataccaaataatcagaaactct

SEQ ID NO: 4722 - DNA, 120 bp, synthetic construct
  source 1..120: mol_type = other DNA
gccatttgtgcttcctgtaacaaacaacaacaaaaacacctcaccaccatttcacagtatcattgtggtaggcggttccccacaggttgttcaagcagatttttttatgttgctgttggt

SEQ ID NO: 4723 - DNA, 120 bp, synthetic construct
  source 1..120: mol_type = other DNA
ttctcagaaagcattatatataatgctctcagagattatatagaaaacccggattatcacaaaagccaaaggagaccaaaaaaggagtgggtggggggtgggggttaggatactgctcaa

SEQ ID NO: 4724 - DNA, 120 bp, synthetic construct
  source 1..120: mol_type = other DNA
ttactaaaccacaacttttctggggcagggagtatgcctcacttgcatttgcatttccggttcttaacaggacctagtacatagttagcacttaattcatgtctattgaatgaagagctt

SEQ ID NO: 4725 - DNA, 120 bp, synthetic construct
  source 1..120: mol_type = other DNA
cctccaaatgtctccttcatgtccattttttcccagtcatgcctaccggtaagataattaaatcagtgctagaatcaagcacactagagcttggtctagagtatgatctgtagacctaca

SEQ ID NO: 4726 - DNA, 120 bp, synthetic construct
  source 1..120: mol_type = other DNA
gaaaagaaaaaagaaaaaagtacaaaccaataacccttattaatgggactaggaaggacacagacacacacacacatatacacacactccctaacaaaacactagtaaatataacctgtc

SEQ ID NO: 4727 - DNA, 120 bp, synthetic construct
  source 1..120: mol_type = other DNA
gggctcatcatccattgtttttcttttaagttttcaatttaatccaaataagtcaaaaattttcaggtacctactatctgccaggtgctgtgccgtgcgctggggctacacagatggaga

SEQ ID NO: 4728 - DNA, 120 bp, synthetic construct
  source 1..120: mol_type = other DNA
ctcctaatgctatccctacccccgaggtaagaattttaaaagtgtgtgggtgttttgtggctgttactatagcctcaagcaagaaagcccttccataggattttcttatttcttcatctg

SEQ ID NO: 4729 - DNA, 120 bp, synthetic construct
  source 1..120: mol_type = other DNA
gccacattgagtggaggaataaaattagaaaacctctgtgctgaagtcccaggagatcacttattaggcttgagcttgctaatggaagtggtgatcgtttaaccatgtggttattgtagt

SEQ ID NO: 4730 - DNA, 120 bp, synthetic construct
  source 1..120: mol_type = other DNA
atacatatgtagcggactgtatatataaaacaaatatacatatatagcggactgtatatataaaacaaatatacatatatagcggactgtatatataaaacaaatatacatatatagcgg

SEQ ID NO: 4731 - DNA, 120 bp, synthetic construct
  source 1..120: mol_type = other DNA
aagttcaccccctttccctatctcctcatgaccctagagaatttgaacaaaaaagggtccagtttcaaagacactgagcataagagaaagtgaagctggactgaaaccagggaatcaaat

SEQ ID NO: 4732 - DNA, 120 bp, synthetic construct
  source 1..120: mol_type = other DNA
tctctgtaagtttttctttgataacaagattttcttttgcaatttgagcactactaacggctagctggtttcctttagacaggtgttaacactgcgatcttctcgcgatcacctagcctg

SEQ ID NO: 4733 - DNA, 120 bp, synthetic construct
  source 1..120: mol_type = other DNA
aaagtgttgggatgcctctgcacttgactcagtttttgtttcaaatgaaaacattatattccacaggatcttataccaatatgcaaatctgctgctctttagagaaaaagtagttgttaa

SEQ ID NO: 4734 - DNA, 120 bp, synthetic construct
  source 1..120: mol_type = other DNA
gaacacaatataatctaatcagcacatagatcctgtacatatcttactggatttatacccaagtatgaactgttttctggttttttttttttttgtgtgtgggggtggggggacatgtgc

SEQ ID NO: 4735 - DNA, 120 bp, synthetic construct
  source 1..120: mol_type = other DNA
ataccaatgagtaatctttagaggtaggttttccttacatagggtccattgatgaggcttgcggggggtgtctataaacccctgtttcagagatctttttgtgtgtgtgtgtgattaagt

SEQ ID NO: 4736 - DNA, 120 bp, synthetic construct
  source 1..120: mol_type = other DNA
ttcaaggatctcaagcagacgatgaagaaggagcagtgtgaggtgaagctcctggtgaccgcttcaatgccaggtaagccactactactttttagtaacataactttaaaaaaaaattat

SEQ ID NO: 4737 - DNA, 120 bp, synthetic construct
  source 1..120: mol_type = other DNA
ttagcattgtatgtttgtttgttgtttttctgtggtgtttggctggagtggagcaattattgtctaaaaggtttctgtcttgtctacctgcccctttccagattctttgagtagaaagaa

SEQ ID NO: 4738 - DNA, 120 bp, synthetic construct
  source 1..120: mol_type = other DNA
atatatatatatttttttttttaaagatggggtcctactctgttgcccaggttgctctcaaattccaggcttaagggaatcctcccacttcagcctcccaaatttctgggattacagcat

SEQ ID NO: 4739 - DNA, 120 bp, synthetic construct
  source 1..120: mol_type = other DNA
aaacgtgactttcttaataatatttacagatgatgccttcatacacaaagaaaatgagtttcagaggggtcaaatgaattgccaacttttcacagagagcaagagaggttgaagtggatt

SEQ ID NO: 4740 - DNA, 120 bp, synthetic construct
  source 1..120: mol_type = other DNA
ggtgtccttatgagataaaagcagaggagatttgaaatactcagagaagaaaaccatgtgaagatagagaaagagactggagttaacacagctacaaccaaggaacacttgggggctact

SEQ ID NO: 4741 - DNA, 120 bp, synthetic construct
  source 1..120: mol_type = other DNA
caatggaggagggaaactacagggtaacctaaagtagaactccttaactgatagatttattagacaagtttcttcatgtagctatagggaaagcaaaaagagctgctgacctgaaggcac

SEQ ID NO: 4742 - DNA, 120 bp, synthetic construct
  source 1..120: mol_type = other DNA
gtagggacttctactaccagacaagatgttgtaacaaagaccaaccagatttattcctaacctaaaacgattgaaagaaacaaaaatgtatgtacatatatgaaacaagggctttcagac

SEQ ID NO: 4743 - DNA, 120 bp, synthetic construct
  source 1..120: mol_type = other DNA
ctgcaggtacttgacgccagtcccccatttctgaaagaacaaccttatcatactgggactccattggaacttctaagaaatcatggtgccaatcctttctgtatgaataattgctaaggt

SEQ ID NO: 4744 - DNA, 120 bp, synthetic construct
  source 1..120: mol_type = other DNA
aacaaaaaatgtcaaaagtagggagagtgagtttatagacaatgataggggctattacggtagataggatagttgggaaaggcctttctgagctgtggatctttgagtagaaaccccagc

SEQ ID NO: 4745 - DNA, 120 bp, synthetic construct
  source 1..120: mol_type = other DNA
tcaccatgccacaacccctcaccatgccacaccccctcactatgccagaactgcacactatgccacactaccttgcttacccacaccatcatgtgagccacataacctcatcatgccaca

SEQ ID NO: 4746 - DNA, 120 bp, synthetic construct
  source 1..120: mol_type = other DNA
tttacatctttatgtagcatcttaatttgcacagtgaacacataatttttttttttctgctccttattttcccaggagagtcagtcagttgctccgtgtgttgtgttggaagtcaggtcc

SEQ ID NO: 4747 - DNA, 120 bp, synthetic construct
  source 1..120: mol_type = other DNA
cacatacaccacacacacacaaaccatgcatacatacatatacagaccacacacatacacaacatatacacaccacacacaacacgcaaacacaacatatacacacaccacacacacaca

SEQ ID NO: 4748 - DNA, 120 bp, synthetic construct
  source 1..120: mol_type = other DNA
cttttcccacactgaacccagatttgacttcagaatccttcttaacatagcattctgggcggcctctataatagacgagaattggcatgtaagttaaaatatttttgccacctgtcatat

SEQ ID NO: 4749 - DNA, 120 bp, synthetic construct
  source 1..120: mol_type = other DNA
cagctacttatattggactgaatcaatccttgaaaaattatcaagtgttttctgcgaatagagaggtgggaggacattccagatacacagtggctttaggaaagggacagcaagtcctga

SEQ ID NO: 4750 - DNA, 120 bp, synthetic construct
  source 1..120: mol_type = other DNA
gagaaggcaatttcctcgttcttggagatgttgttgaggaagagcaggcggctgcacttgctctgcacaggtatgtttcccagggaaatatgagactgggacaggaagacattctgtggg

SEQ ID NO: 4751 - DNA, 120 bp, synthetic construct
  source 1..120: mol_type = other DNA
tgcactcaggggctctaggaacttaccttttggtaaggcagaaggtaaattgcagaaccagcatttgaacccaatgttacttagaagttatttcaactcatcagcagagacattaatgag

SEQ ID NO: 4752 - DNA, 120 bp, synthetic construct
  source 1..120: mol_type = other DNA
atgaggcggaggcccagatgctgggttctgcagacctggacgacatgaagagtgagtgagaccttgtggcagcccccatggtccactgcgacggactcccagcctgcgagtgaccttgga

SEQ ID NO: 4753 - DNA, 120 bp, synthetic construct
  source 1..120: mol_type = other DNA
atacaagtactgacactttccatccttaattttaccagcagttctaatacattttaacctaccaagcaatacccctggtacatgtagcctgggaaagcctcgcctgaatcagtgaccttt

SEQ ID NO: 4754 - DNA, 120 bp, synthetic construct
  source 1..120: mol_type = other DNA
ctgaatgcatggatcctgcggttcgccttaagggaggaagaaccaaagccgacttgtccgcgcccccccccacccccccgtaaatcaagtttcttttttttcctttcttccctttttttt

SEQ ID NO: 4755 - DNA, 120 bp, synthetic construct
  source 1..120: mol_type = other DNA
ctttatttcctccttctggaagtcagtaagactactactgtcaatatgcgaatcataaaactgatcacacagcctttaaacctcagttgttatcacacagcatccctgagaaagagggga

SEQ ID NO: 4756 - DNA, 120 bp, synthetic construct
  source 1..120: mol_type = other DNA
aattgaggagctgtctccagcttctcatttttaggacaaacagaagacggtgtctgcttagaactgaaactaattgaaaaatggtttcattttttactaaaataagcttttttcccccct

SEQ ID NO: 4757 - DNA, 120 bp, synthetic construct
  source 1..120: mol_type = other DNA
ttctgaaagttactgtcttttaacacaaactagaagataaagtcaagtcatggtgcagacatgagtacctcaacagaggtcagcatccgtgcaaatgaagaggagggagaacaccagatt

SEQ ID NO: 4758 - DNA, 120 bp, synthetic construct
  source 1..120: mol_type = other DNA
tggtggaatactgatttttatggtatgccccgtgaaatcaaaagaccctagaggtctggccaaccttccacattccgagatataacattagggtgtcaggattggaaagagagagaaagt

SEQ ID NO: 4759 - DNA, 120 bp, synthetic construct
  source 1..120: mol_type = other DNA
atattaaccatcaaagaatgagacgagtaggtaaagggaaaggtaaaaaacaaaacagagccaagagaggcacaaaggaagggacagagttgagcaaaaggaaaaacacggaggtggggt

SEQ ID NO: 4760 - DNA, 120 bp, synthetic construct
  source 1..120: mol_type = other DNA
aaaggaaaggaaaggaaaggaaaggaaaggatcagcacctttaaacatggcactcatgagatgctcctgcacatacctcactgtctttctacctacccccatcacctgctgaatctaaca

SEQ ID NO: 4761 - DNA, 120 bp, synthetic construct
  source 1..120: mol_type = other DNA
cattccctgacattcccagggacggaggtccatctcctgcttagatgtctttaaacctcatttggcttgagagaaggtatctgacaattctctccagagaaatgtggcctctctcataag

SEQ ID NO: 4762 - DNA, 120 bp, synthetic construct
  source 1..120: mol_type = other DNA
tgattcacagcattaataattgactagcagaaatataatgcacacaaaaattataatcaaaaagagaatttgtgtacaagaatgggggaaaaaaaacctgttccattagggagccaacta

SEQ ID NO: 4763 - DNA, 120 bp, synthetic construct
  source 1..120: mol_type = other DNA
tttcataaatgcacagctgggatgttaccatgttccccaaacctcagctctgtaaacatgagaagaagctttataacaacagaggcgtttagcaatcagctgctattttcctctatcatg

SEQ ID NO: 4764 - DNA, 120 bp, synthetic construct
  source 1..120: mol_type = other DNA
cgtgttcagaacccattgttagctcagtgagggaaatttttctgactggtgattggtgattctgactgtgttggatggtttggggcttgtgattgttgatgtctttgttgtagggctgtc

SEQ ID NO: 4765 - DNA, 120 bp, synthetic construct
  source 1..120: mol_type = other DNA
tacctgtgtgagccaccgcacccggccaagataggattctttctagggcatctaaggcccccaaagcatgagctctttcagcatgctgatctgttagatttttatctgccataagctgtc

SEQ ID NO: 4766 - DNA, 120 bp, synthetic construct
  source 1..120: mol_type = other DNA
gcctccgcctcccaaagtgctgggattacaggcctatttctgcttcttaattttgtcccatagatcactgtctcttccttcaccagtactgtacaatcttgattactgtagctgtataat

SEQ ID NO: 4767 - DNA, 120 bp, synthetic construct
  source 1..120: mol_type = other DNA
agagaggagaagagaagaggaagaaaggcggaagcaggaagaattgttacgcaaacaggtgaccagatggttttgtcttctaattgttcctttgaagctgggaattagtgatttagaaaa

SEQ ID NO: 4768 - DNA, 120 bp, synthetic construct
  source 1..120: mol_type = other DNA
ggaattgggtgatgaacccagacctgttttgaatactgactcacagctgggacctgtcgtgctaagcatttgttagcccatttcatcctcaccacaacctaaagtgaaggtcctgttaaa

SEQ ID NO: 4769 - DNA, 120 bp, synthetic construct
  source 1..120: mol_type = other DNA
tggagcctctttgtgggagagtgcatgtgtcatggcgagtatgtggctctgcgattggaggaaatgtcaccggaccagtcaataggtcttcctctttacaattagcttttgtcaatgtac

SEQ ID NO: 4770 - DNA, 120 bp, synthetic construct
  source 1..120: mol_type = other DNA
tgaaccaccactcacggccagctgtgggtctagaccaccacccatggccaggtgtgagccaggatcatcctcccagggccaggtgtaagccagggtcatcctcacagggtcatgtgtgag

SEQ ID NO: 4771 - DNA, 120 bp, synthetic construct
  source 1..120: mol_type = other DNA
gcacgccctcccatgtttcctttgggtcttccggtttccgtcgacgtcccaaagctgtgcacattaggtgactggcgtgtctacagcatcccagtctgagtgagtttgggcatgtgtgag

SEQ ID NO: 4772 - DNA, 120 bp, synthetic construct
  source 1..120: mol_type = other DNA
cgccttttgttccatcccctttcaaaatgggagcatattacctctaaaaacgacacactattttggatctgcagctttcagataggaacgactaattggtatgaggccttctagtttctt

SEQ ID NO: 4773 - DNA, 120 bp, synthetic construct
  source 1..120: mol_type = other DNA
gggaaaatagttcagtatttttattggacaagagtggtgagagctaacatttatggagggctttggcgctctgttaagcacttgagtattatctcagtgaaccctcgcaacagtatcatg

SEQ ID NO: 4774 - DNA, 120 bp, synthetic construct
  source 1..120: mol_type = other DNA
gggagagagtctccactgcggaaaattctctgttatttttcaaatgcgtgaaattagacacccttagcacaacaaatgcacagtaatgctggtcaccgtatgtgctttctgtttgcaagg

SEQ ID NO: 4775 - DNA, 120 bp, synthetic construct
  source 1..120: mol_type = other DNA
gagaccacatggtcccactaggcccgggttgcaggggactcacatctgtcctgtttggcagataagagttaactgcttttaggaaattgagatattttgtttggattttaccttaacaga

SEQ ID NO: 4776 - DNA, 120 bp, synthetic construct
  source 1..120: mol_type = other DNA
cccagaaaaaggaaaaatctctacaccgaggtcactggtcagtcaccccgggtgccaagctctgctgtttctaaaggcatggtcccacccattggtcacaagccctgagcacccagtttg

SEQ ID NO: 4777 - DNA, 120 bp, synthetic construct
  source 1..120: mol_type = other DNA
tacacaaaaggcgtggacagttttcagagcttttgggccggtcagcaggttgcaagagttggcttcccatgggagcattagatttctctaatgcttaacgtttgcttgtatagaaataat

SEQ ID NO: 4778 - DNA, 120 bp, synthetic construct
  source 1..120: mol_type = other DNA
catgctggggcctgtgtgggctctgggtgtatgctggggcctgtatgagctccgggtgcaggtgaggcctgtgtgggctccgggtgcaggtgaggcctgtgtgggctctgggtgcatact

SEQ ID NO: 4779 - DNA, 120 bp, synthetic construct
  source 1..120: mol_type = other DNA
gtggcagggcacagggttgtccctccagttccctcctgagggctgtgccaggatgactgtctcatgccccctctgcattttgtcctggagtgccagcgagtgtgcacccccagtttcctt

SEQ ID NO: 4780 - DNA, 120 bp, synthetic construct
  source 1..120: mol_type = other DNA
ctgttggtgttatcacccactagtgacacccacagatcaggccacttaacccacaccgcatctaaccgacagaccagactcaggggctgaatggtccatttggggtcagtggggtcaact

SEQ ID NO: 4781 - DNA, 120 bp, synthetic construct
  source 1..120: mol_type = other DNA
cacaccaactaaccgacaactgagcacagtcacggatgtccagaacattgacaaagaaagctgtggaggccacagcagctatatcttggaagctaagcctccatgctgatttttgattaa

SEQ ID NO: 4782 - DNA, 120 bp, synthetic construct
  source 1..120: mol_type = other DNA
cttggtggggctctgtaggacatctagcagcatccctggcctcacccacaatagaccagggagaccctggccaagtatgacaatcagagctgtcaacagacattgccagatgtttctcgc

SEQ ID NO: 4783 - DNA, 120 bp, synthetic construct
  source 1..120: mol_type = other DNA
atgaaacatcagcgttcacctacatttgcttcagactttcttttaaggaataaaatatatgaaaggcagggaggagagctaagtcagcaaactcgcaaactcggagaaaagagaacgggg

SEQ ID NO: 4784 - DNA, 120 bp, synthetic construct
  source 1..120: mol_type = other DNA
tgtgtcctgaggagtatgcaagcgtgtgggtgggcctgtggctggctaaatatttgtggggacacaagcatgccatgtagtttggatgtgtgtcccctccaaatctcatgttgaactgtg

SEQ ID NO: 4785 - DNA, 120 bp, synthetic construct
  source 1..120: mol_type = other DNA
ctgatggatgaatggatggtaggtgggtgggtgattgggtgggtggatggattgatgaatgaaaaagcagccacttattctcagaaaatatgcattctgaaacagtttagtgacatctga

SEQ ID NO: 4786 - DNA, 120 bp, synthetic construct
  source 1..120: mol_type = other DNA
ttgaaatatattcctcagtatttaacatcagattcctggcccaggttagtaggatcaaagcatcaggtaatgcgtggcatgaggaacagactgtgttctttctcttgagggaatcctgtc

SEQ ID NO: 4787 - DNA, 120 bp, synthetic construct
  source 1..120: mol_type = other DNA
ccacgtgttcttagtctcttggaactcctcacacgggccgcacagctcttcacaattcacacagttctctgtccccacacagccaccgccgagttccctgtgcgtttcccagtgagcacc

SEQ ID NO: 4788 - DNA, 120 bp, synthetic construct
  source 1..120: mol_type = other DNA
tgctgagcagagggctcccagtctgcagcccctgtgtgtatgttcgaggcaggggtgtcaatgtggcctccctcaccacggccatcctgggctctaggacacacacatgccagggccacc

SEQ ID NO: 4789 - DNA, 120 bp, synthetic construct
  source 1..120: mol_type = other DNA
ggccagcccagaacaaagcatcggcatgggccacttcctgaaacactgatccttcttgaagagtttgagaaaaaaaccacagcaggtttttcttagaattacaaccgattgtcatagagg

SEQ ID NO: 4790 - DNA, 120 bp, synthetic construct
  source 1..120: mol_type = other DNA
aactgtcaggagcataaagatttctgtatcaaaatgaaagaagcaatcctgagttgctgaattacccatctgctaatgaaaccgggatggactgatcatctaaccaagtgcagactgagg

SEQ ID NO: 4791 - DNA, 120 bp, synthetic construct
  source 1..120: mol_type = other DNA
ccatccccacggacggctcttgatgggccgtgcctgtgtcacgcatctcctttgttaaactgtcatggagattttcagaaaataagtgatttttacattctaccagttgtttatgaaatg

SEQ ID NO: 4792 - DNA, 120 bp, synthetic construct
  source 1..120: mol_type = other DNA
caaggaagacacatttcccccaatacatattggaaagatgataaacactgactttgtatttggctacaaacaaagtcccaggaaattcccccaacactgtaataacagggacagctcctt

SEQ ID NO: 4793 - DNA, 120 bp, synthetic construct
  source 1..120: mol_type = other DNA
ttcatgtgtggggcttgctgtctccagggtttatttcatgtatggggcttgctgtctccagggtttatttcatgtatggggcttgctgtctccagggtttatttcatgtgtgggacttgc

SEQ ID NO: 4794 - DNA, 120 bp, synthetic construct
  source 1..120: mol_type = other DNA
atgaggggatcctgacccagggcgccagggtcctgctctggagctgggcctctccccgcaaggccgggctccaggccccggtcactctgtggtcgggcgcctgcactgttgggtgttgag

SEQ ID NO: 4795 - DNA, 120 bp, synthetic construct
  source 1..120: mol_type = other DNA
tctctggcacatctggtgcttttagcttctgcacaaattcaacatggtaaccctcacagcattctagggcataaaagggtcaagtacaataaatatccactgtaagtggtcataaggaag

SEQ ID NO: 4796 - DNA, 120 bp, synthetic construct
  source 1..120: mol_type = other DNA
gaatgaaataccaccatgacctacaagatacggaaactgtaaaagactccggcaccctcttttgagaaggcaattaggcagagtctattatctgtagcctgaggtagtaacagcatttta

SEQ ID NO: 4797 - DNA, 120 bp, synthetic construct
  source 1..120: mol_type = other DNA
tcgctttatgattttgggtcaatttcttcatagtctctacattttccccattctttggaagcaaaatctcttcccagtattgatctcccagtgctgaaggataaggcaacatcatggcgc

SEQ ID NO: 4798 - DNA, 120 bp, synthetic construct
  source 1..120: mol_type = other DNA
tatgacaggaagcagtcacacagtcaagcaataccaattctctgctaacttgtaggtgaaaaacgcagtgtgctttaggggttacagagaagaagataggcactttgttacccaaaaaac

SEQ ID NO: 4799 - DNA, 120 bp, synthetic construct
  source 1..120: mol_type = other DNA
gctttccccagtgcaatgtaagttccatgagggcaggggcccagagcatagttcacaagtccagtttaggctgatctgttttccccagtgcaatgtaagttccatgagggcaggggcctg

SEQ ID NO: 4800 - DNA, 120 bp, synthetic construct
  source 1..120: mol_type = other DNA
cccgcccccgccaccaaatccaagaattgggagagttccattctagcgctcaatattcatgctggaagcttaaattaacccagatggtctgtttggtttatttaaagataaaactagttt

SEQ ID NO: 4801 - DNA, 120 bp, synthetic construct
  source 1..120: mol_type = other DNA
gccccaacacacggtgtctgcagcctgtgctttggggaattttgggaatttgtggatagtgagtatggataagcttcggttttgttgtttttttttaaattttttcagtgacctgccact

SEQ ID NO: 4802 - DNA, 120 bp, synthetic construct
  source 1..120: mol_type = other DNA
agtgctgtgtgctttagcatcattggaaggtgaacctcaggtagcagtccttaccttggtgtatgagagtctgcatttccaccttcgaagattctgaaaaggaattaaaaagtagtgtct

SEQ ID NO: 4803 - DNA, 120 bp, synthetic construct
  source 1..120: mol_type = other DNA
gctccattgtgtcaggttagtttaaatttgagggtgttggcatattaacagctaatcagactaaaaagatgatgtgatactttcagctattaggaaagaaaagggtttaccttttttatg

SEQ ID NO: 4804 - DNA, 120 bp, synthetic construct
  source 1..120: mol_type = other DNA
aggcccaaaactggcatattgtcactttgaccacattttactgtccaaagcaaaccccaataactgcccagattcaagtgggaaagaagtagactttaagtgttaataggaggagctgaa

SEQ ID NO: 4805 - DNA, 120 bp, synthetic construct
  source 1..120: mol_type = other DNA
ttcatgtaacattgcctaagacttctccatggtgtcagttaggaggatgtttaaaatcagtggcagagctattttcctagctctgcctaaaagtgccggaggtatattgtgttttcagtc

SEQ ID NO: 4806 - DNA, 120 bp, synthetic construct
  source 1..120: mol_type = other DNA
tggtcaaagcagaactctgcattgttacaacatcactcaggctttcttctgtaagttctttcaaggaagaaagtgcaaactttcttctgcgatgagacctcctcacatagctcttggact

SEQ ID NO: 4807 - DNA, 120 bp, synthetic construct
  source 1..120: mol_type = other DNA
ttctgttgttgttgttgttttacctgacatttcaaacaatctttacaaatgtggaaattatctcttggaggcataataaatgttaagaaacttgttaatctggaaataaaaccagtaggc

SEQ ID NO: 4808 - DNA, 120 bp, synthetic construct
  source 1..120: mol_type = other DNA
gataatacctacctcacaggggcttagatggggtaatgtgtgttcaaatatgttactaactatgagccccagtcctacatcccaaagtgagttcgcatctcacagaaacaaacaaacaaa

SEQ ID NO: 4809 - DNA, 120 bp, synthetic construct
  source 1..120: mol_type = other DNA
caatatattattaactatagtcaccatgctgtacattaggtctccacaacttatgcgtacaacataattgaaacgttgtaccctttgaccagtatccccctattttcaccatgcccccag

SEQ ID NO: 4810 - DNA, 120 bp, synthetic construct
  source 1..120: mol_type = other DNA
ctacatgaatcacaaaagtttgggcaagtctactctagtgctaaaaaaactgctctacactggacaaggatatgaatttttgacccttaaatgtgcaagatacacgcttttgcataatca

SEQ ID NO: 4811 - DNA, 120 bp, synthetic construct
  source 1..120: mol_type = other DNA
cacttcaattctttctatggccaaataaaataatatgctccatggctgtcattcagggacccaagcagatattaaatagatactgtgccagcttcaacatgcggattccaaggtctcctg

SEQ ID NO: 4812 - DNA, 120 bp, synthetic construct
  source 1..120: mol_type = other DNA
ttataccatgacttcaaagtcatctctgattccaaagcctccctctaactaggctgcttgcaggagactttggtgtctttcttcagtagaagaagaaagaaagagagaggaagaaaagga

SEQ ID NO: 4813 - DNA, 120 bp, synthetic construct
  source 1..120: mol_type = other DNA
acaaatagaatgctagggactttgcagcaacatgagaaatctatttattattttgtgtcagagcaagctgggcatcttcctctttgtagactgccagagttcattgttatttgggacaga

SEQ ID NO: 4814 - DNA, 120 bp, synthetic construct
  source 1..120: mol_type = other DNA
atttcctggggtttgaattctcattccagcattttatggaaccataaaatatgaccagtttacctcttctaccttttctaaacttctccctgctttatgacactgaaaacaaacacacat

SEQ ID NO: 4815 - DNA, 120 bp, synthetic construct
  source 1..120: mol_type = other DNA
atgtttaattttacaaggaaccactaaacagcttttcacagtaggtgcatcagcagcagcgacgtatgcaagttccaatttgcccgcatggttgccaacacttgtagtttttgcttgttt

SEQ ID NO: 4816 - DNA, 120 bp, synthetic construct
  source 1..120: mol_type = other DNA
aagggtttgaaagattgatatctgaggtcatttccagacctgaggttagagtagcccatgatttcagcttcaagttcctggacaataattatgtatccatagcactcatgagccctgtac

SEQ ID NO: 4817 - DNA, 120 bp, synthetic construct
  source 1..120: mol_type = other DNA
cacagggaggaaaacaaaactatttcctttcatataaatgttgtcatctggggagaagccctcactatctccttggtgcctttggcttttggtattcaaatcccagaactctacatttgg

SEQ ID NO: 4818 - DNA, 120 bp, synthetic construct
  source 1..120: mol_type = other DNA
tttctcatcaaacaaaaacacccacaaggtgatcttcttcggcactgttaaacattcaaactatgaagactaccatgggccacacctggtatctgtatactgaacgaaagcagagctggc

SEQ ID NO: 4819 - DNA, 120 bp, synthetic construct
  source 1..120: mol_type = other DNA
gttgataataatgggaaggcagtgcatgtgaggagacagaggatatgtggaactctctgtgccttcttctcaatttgctgtgaacctaaaactgctgaaagacacatagacgaaagaaag

SEQ ID NO: 4820 - DNA, 120 bp, synthetic construct
  source 1..120: mol_type = other DNA
tcctttgtcagtggacacttgggttgcttctacattttagctattgtgaacagtgctgttatgaacacgtatatgcaagtagctattcaaaaccctctttcaattcttttgggtatatgc

SEQ ID NO: 4821 - DNA, 120 bp, synthetic construct
  source 1..120: mol_type = other DNA
cattttttctttgctatgatcattgaaatgatcagtagctaaagtcctatgaatctcagggctgactgctagcagacaggaagagtactttcttccagggtgagcgatctccaagctttt

SEQ ID NO: 4822 - DNA, 120 bp, synthetic construct
  source 1..120: mol_type = other DNA
tactgcagggatacttcgttttgatatttaagtattcctctgacttgttaaaacattaaacccgacagaaatgccatatgcacccccttagcttgtcttcctgtcacctgcctgccaggt

SEQ ID NO: 4823 - DNA, 120 bp, synthetic construct
  source 1..120: mol_type = other DNA
gatgggaataaaaagtaaggaagggaggagggagggaggagggagggagggactggccttcagcatgccagcatatgccaagatacattattggataaaccagggacctcaggtgggcat

SEQ ID NO: 4824 - DNA, 120 bp, synthetic construct
  source 1..120: mol_type = other DNA
cacgttcctcacctgagcactgccttctgtagccccaggaggtgggcacctgagcagcacgttcctcacctgagcactgccttctgttgcatcgggtgggcacctgagctgccatgttcc

SEQ ID NO: 4825 - DNA, 120 bp, synthetic construct
  source 1..120: mol_type = other DNA
tggagcatcagagtcggagggaacccgagtcggacctagcccatccgtctcatggctgtaacccccaccccaccagtggaccctggctgtggccgagtccccctccacctccggccaaaa

SEQ ID NO: 4826 - DNA, 120 bp, synthetic construct
  source 1..120: mol_type = other DNA
gctgacacttgctcacagcagttgagcagattatatgagctgaatgttaagtgcctggaatggtgtttgttgccaataccactgggataaatgtcagtggataaaagactgtgatgatta

SEQ ID NO: 4827 - DNA, 120 bp, synthetic construct
  source 1..120: mol_type = other DNA
tggtttgctgggcactggaggcatgctggcagctgatggcatcctcgcaggccaaggtggcctgctcggcggaggtggtctccttggtgatggaggacttcttggaggagggggtgtcct

SEQ ID NO: 4828 - DNA, 120 bp, synthetic construct
  source 1..120: mol_type = other DNA
ggccaggcatgggcaggctcaggtggggctggggcaagggccaggcatgggcaggctcgggtgggtgctggctggcacttctcaaggctctgctgtcatctcaggtggatccctttggtg

SEQ ID NO: 4829 - DNA, 120 bp, synthetic construct
  source 1..120: mol_type = other DNA
gactgacccacccctaaactaaatgaggttcccagcttctcccacatagccttgtcacatcctctcattgcacctatcacagttgtattttattagtgatttgtttaatgtctctcttct

SEQ ID NO: 4830 - DNA, 120 bp, synthetic construct
  source 1..120: mol_type = other DNA
cctttatcccctcctctaagccctcctctgtgtcccccttccccagccccaccccgtgtcccctccctcctctgctgtcctggtttgtgcctggccgacattcaaggtggcagctttggg

SEQ ID NO: 4831 - DNA, 120 bp, synthetic construct
  source 1..120: mol_type = other DNA
ctaaataaactatcaaacatggtcatatacacaaaaggacatgtgcagagatgtacgggtgaccctcaaacaacacaagggttagtggtgccaacccactgtgtagtcaaaaatccacat

SEQ ID NO: 4832 - DNA, 120 bp, synthetic construct
  source 1..120: mol_type = other DNA
agttaacaaccaaaagctcactgctctggtcacactgcagaaagaacaggcccagagttagacaaacctgggttggaatcctggctatgtaatttagagcctccatttactgatctgtaa

SEQ ID NO: 4833 - DNA, 120 bp, synthetic construct
  source 1..120: mol_type = other DNA
aagatgacctacggctgggagagagcaaaacttgccacctcagtgttctctgtgatcctctcctgacactgagcaggggcagggcaggagtgctgctgagggcctctgtgtgcaggtaga

SEQ ID NO: 4834 - DNA, 120 bp, synthetic construct
  source 1..120: mol_type = other DNA
ctgcacctagtaggtgctcaataaacaggagtgattttgattttttcttatcagaaaatgttaactcattgcccatgggcacagcagggatgggaggaaaaggtgcaagcattgatgaaa

SEQ ID NO: 4835 - DNA, 120 bp, synthetic construct
  source 1..120: mol_type = other DNA
agaggggaaaactgaggcttagagaggcgtggtgagctggggccccacacctagttcaaagcaagggtgcagagcccaaccctatgttcccccagcccggcattttaagggtgtctcttg

SEQ ID NO: 4836 - DNA, 120 bp, synthetic construct
  source 1..120: mol_type = other DNA
tagtcaggaaccaggcatgtgtgggcagaaatcactaccactttcctttgttgcgggtggggaaattaagagcagagattcttggattcttaaattccttctctatgtttatgtcatcta

SEQ ID NO: 4837 - DNA, 120 bp, synthetic construct
  source 1..120: mol_type = other DNA
gaagaggggtctgggtgggcataggcaaataatttattttccaaaagccaaactctctagctgtagacagcatcaactttgagccatttccagacatggaaaaacattgaggctttgaga

SEQ ID NO: 4838 - DNA, 120 bp, synthetic construct
  source 1..120: mol_type = other DNA
ccagtcctgggtatttatagcaatgtgggaatgaactaatacacctatgaagcaggttccatcattatacctatttctgagatgtgggaacagcctctgagagactaagtaatggtagca

SEQ ID NO: 4839 - DNA, 120 bp, synthetic construct
  source 1..120: mol_type = other DNA
atatcatcccagggctgtcagtttcctggagatcaaaaatgagccggtcattacgccaagatcagtcagaaacaagaaagagaaagactgtaaatacattcttttcccttctcccttaaa

SEQ ID NO: 4840 - DNA, 120 bp, synthetic construct
  source 1..120: mol_type = other DNA
cacacataccagtacacaggcatgcacacacaccacacccatacacccccatacacacacacacacgcatacacacacgtatacacactataagatccagatttattgggccactatcaa

SEQ ID NO: 4841 - DNA, 120 bp, synthetic construct
  source 1..120: mol_type = other DNA
tttctgccttggagcagtagctgccagtgagcctttaaaaagaaaagaaaggagaaaaagaaaaaagagaaaaccggatgaagccgctggtgcaaaaccttggaaaatagggtagaaaga

SEQ ID NO: 4842 - DNA, 120 bp, synthetic construct
  source 1..120: mol_type = other DNA
ggaggggaggggaagagaggggaggaaggaaaaggagggttgaaaggaaaggaaaaaggaaaagggaatgaaagggaagaaaaaaactaaaaaagaaagtgcatgtgaaaactagtgaag

SEQ ID NO: 4843 - DNA, 120 bp, synthetic construct
  source 1..120: mol_type = other DNA
actctagcctggcaacagatcaagaccctgagatatgattgcacagcagcacaatcatagctcactgcagccgcaaacagacatcactttttaaaggaataactgaaatgcagaaatatt

SEQ ID NO: 4844 - DNA, 120 bp, synthetic construct
  source 1..120: mol_type = other DNA
aggccccacgtggactgtcattgaggaggccataaggatcagatcagactgatgttggggctgaaagtgaagatttaacttgggggaggaaggtgtggaaagattctccagatgttctaa

SEQ ID NO: 4845 - DNA, 120 bp, synthetic construct
  source 1..120: mol_type = other DNA
ccaaattcttgcactctcatacctttgaactcttcatagcaacttgctgctttatacaactaagctcccagcccatgcttgactatttcccaatcattggaaatagaaggtcaatggtgc

SEQ ID NO: 4846 - DNA, 120 bp, synthetic construct
  source 1..120: mol_type = other DNA
gaaagacggatggaagtgccctgcacctttggacagtattcccttactggtctgtggggaggggctcatggctgctgacttcatggggtctttggagctgtggtaactactgggctaaag

SEQ ID NO: 4847 - DNA, 120 bp, synthetic construct
  source 1..120: mol_type = other DNA
ctactggcagctgttattttgttacattccttgccctctttatgttagaaggttcatcccaatgatccataagctacttcacgtccaccatttggggatgaaggtaacaattccagttcc

SEQ ID NO: 4848 - DNA, 120 bp, synthetic construct
  source 1..120: mol_type = other DNA
taacccctcataaagaagttaactacctgtggccagacagaacctttgagtcaatctaactacctttaactaggggtctgtaaaccatagctaagttttggccagcccacaggtaatttt

SEQ ID NO: 4849 - DNA, 120 bp, synthetic construct
  source 1..120: mol_type = other DNA
tcccgcctcagctctggagtagctgggacctcaggcatgagccacggactgttcctggccataatttccttaatatttctcttgcaatcaattcactttttaaaaccttacctatattta

SEQ ID NO: 4850 - DNA, 120 bp, synthetic construct
  source 1..120: mol_type = other DNA
tgcaagtgcaaaggctctgaggaatgttctagaaacaggaaaatggcaccttggcgggggttaaaggtttacctgtcctgttgaaaggacaggaaactcagggatcccccaggaccttca

SEQ ID NO: 4851 - DNA, 120 bp, synthetic construct
  source 1..120: mol_type = other DNA
acatacattcattcaacactcattatatacataagatgttccaggactgccctatactctaaagataaagagatacaagtaagacacagtccctgccatcaccttgcaatggaagaatag

SEQ ID NO: 4852 - DNA, 120 bp, synthetic construct
  source 1..120: mol_type = other DNA
gttcattaacccgtatggtggcttaggcataattttccatgggcgaaatgagtagtattgaagacactatggtatttggttggctacagtattgctcgggcaccttcccctcacacgaac

SEQ ID NO: 4853 - DNA, 120 bp, synthetic construct
  source 1..120: mol_type = other DNA
aggaccactggcccagaagaatgacagctgtcaagactgggtgatggtacgtggggactcatcatagtcccctcattgcttttatatgtttcctataaatatgaaaaagtttccttataa

SEQ ID NO: 4854 - DNA, 120 bp, synthetic construct
  source 1..120: mol_type = other DNA
ggaccaggacacagtctgtctcctcagggtttattcactggcaaatcttgttagcagatgctagaggtttttatttgcactcctgaactcccaaagaaacatatggcatcttttttcaaa

SEQ ID NO: 4855 - DNA, 120 bp, synthetic construct
  source 1..120: mol_type = other DNA
tagcatcattccaccatgtcttcctgtttatttccttcctgactgtgctaagtgttactttatgtgtttgcttattgcctgttcccaccccccgccccactagaatgtaagcttgtccat

SEQ ID NO: 4856 - DNA, 120 bp, synthetic construct
  source 1..120: mol_type = other DNA
aaattaaattggctgtcaaagacttacggcccatggagctcccaggtgacagtgtcaatggcgctttatgtaagttctttccagattgatgaaccaagaaaaaggtcaactgaatcctta

SEQ ID NO: 4857 - DNA, 120 bp, synthetic construct
  source 1..120: mol_type = other DNA
actggatggtgaagactgactcctctaagagccagtaattctctccctatcctataataatctagtaatgactgtcttcatagttgtacagttctaatgaaagatgaaaaatgaatttaa

SEQ ID NO: 4858 - DNA, 120 bp, synthetic construct
  source 1..120: mol_type = other DNA
aaaaaaaaaagccacactagcaatcctagtctctcagatgcctggagcagaattttgctctgtaaaattgaagagtgttgcatattgagaaaaagagagggagcgagccaggttgagaaa

SEQ ID NO: 4859 - DNA, 120 bp, synthetic construct
  source 1..120: mol_type = other DNA
agtccacaagcctgccagaaatcacttgccaaaaactacatgagttaacttaggagtggactcttcattcccagtggcttgactgcaacctggtgagagattctgaatcagattcactga

SEQ ID NO: 4860 - DNA, 120 bp, synthetic construct
  source 1..120: mol_type = other DNA
aaccaaaattgtctccagactttgtcacatgtccagttggggggaaaaatgccccccaactcctcctggttgagaatccgtgcccgaaagacacagcttccctccactgtaatagaaggg

SEQ ID NO: 4861 - DNA, 120 bp, synthetic construct
  source 1..120: mol_type = other DNA
caaatgctcgatctcaggtgatccgcccgccctgacctcccaaatggccaccgcactcagccaatccagtgtttttaattgaaacatatgctcaccttttttccccctaattagtgaatc

SEQ ID NO: 4862 - DNA, 120 bp, synthetic construct
  source 1..120: mol_type = other DNA
tggtcaacccaactttcctaatttagctgtggaaagatgcttccaagttaagcgaaagaaaaagattggaatattcaaagtttaaggttacaacctaaactcttcaacttgggaagcttg

SEQ ID NO: 4863 - DNA, 120 bp, synthetic construct
  source 1..120: mol_type = other DNA
ttcattcctactttctaattctaaggcttgaaaacagccattgctcagtccttcagcttcaccttcccaattcattcattaaacattccgctcagggattaaactgaaatgggaaattag

SEQ ID NO: 4864 - DNA, 120 bp, synthetic construct
  source 1..120: mol_type = other DNA
atgatggccggttttcatttcatatttatgtggccaattgactcatggtcagctctcccaggaagcaataatgtacaggagggcaggagagctgtgcctccttctatctttatcatttta

SEQ ID NO: 4865 - DNA, 120 bp, synthetic construct
  source 1..120: mol_type = other DNA
cagtctgcacaacttagtgggtttaaaacagaccactgtgagccgacccatattcaaccctctactgtccccaaccttttcagtaccagggaacactcttgtggaagacaatttttccat

SEQ ID NO: 4866 - DNA, 120 bp, synthetic construct
  source 1..120: mol_type = other DNA
ttaacaggatcccagtttgcaatctgtaatacaacaggcattgtatcacaaagcattaatgtagatgagtagtgacctggcttccaggctgtcttctggtaacaggcttctgtttagtgt

SEQ ID NO: 4867 - DNA, 120 bp, synthetic construct
  source 1..120: mol_type = other DNA
ttgagaagacataatgcgttacagcaacataatcccagagctgtccttacccaccacaaaagacaaccaaaagatattctctgcagataggacatttagggctgctagttggtaatctgg

SEQ ID NO: 4868 - DNA, 120 bp, synthetic construct
  source 1..120: mol_type = other DNA
tcttttgagtgccaatatgacactcaaaggaatgctcattggagcattttggatttcgaattttcagattggggtactcaactagtaggtattctgcaaatattccaaaatctcccgaaa

SEQ ID NO: 4869 - DNA, 120 bp, synthetic construct
  source 1..120: mol_type = other DNA
tgtgatgatggtggtgattgtgatgatggtggtggttgtgatggtgatgattgtgatgatggtggtgatgatggtggtgattgtgatgatgatggtgattgtgatgatggtgatgattgt

SEQ ID NO: 4870 - DNA, 120 bp, synthetic construct
  source 1..120: mol_type = other DNA
ctccgcagtgatcccaccccctccccaatattttagttcagcaacagatgtttcctgaacagcctctgtgtgccactctccgcactgggcctaggatggggggaagaacaaagcagatgc

SEQ ID NO: 4871 - DNA, 120 bp, synthetic construct
  source 1..120: mol_type = other DNA
ggcaaccactggtctttttactgtctccccacttttgccttttccagaaggttatatagttggaatcatacactatgtagccttttcagactggcttctttcacttggcaatatccattc

SEQ ID NO: 4872 - DNA, 120 bp, synthetic construct
  source 1..120: mol_type = other DNA
tgagtggctcttctgcccttggcttctgtattttataataagagagggctcttgctctctctctctctctcctgctttgtactttcaatcaatctctttccagcatagttccccctaaaa

SEQ ID NO: 4873 - DNA, 120 bp, synthetic construct
  source 1..120: mol_type = other DNA
ggtagtgtgatggtcttggtggtggtgatggtgtagtttgttgatggtagtgtgatggtcttggtggtggtgatgatggtggtgctggtggtggtcatagcactggtggtgatgctatgg

SEQ ID NO: 4874 - DNA, 120 bp, synthetic construct
  source 1..120: mol_type = other DNA
tgcctttcaccgctggcctggaagtgctttccagctggttgtgtttctctttgtacctcccacagcttccagcatggcttttggcttttgtcctggcagtcaggaccctagtggagggga

SEQ ID NO: 4875 - DNA, 120 bp, synthetic construct
  source 1..120: mol_type = other DNA
ccctaccccacaactgtggactctgagacataggatctgagcttcatggcttaaggtaaaccttattcctgtcttcatggcaatctaaaaatattcatgtaattgctggttgatcacgaa

SEQ ID NO: 4876 - DNA, 120 bp, synthetic construct
  source 1..120: mol_type = other DNA
tgctattgttgttgctgttctctgtgaggcctgatcagaccatgtaacaaccctagaaaggctatgaggaagagctcagccacctccttggggctgtttcaggcatttcttccctggcat

SEQ ID NO: 4877 - DNA, 120 bp, synthetic construct
  source 1..120: mol_type = other DNA
gtctgggtgcttgcctgtccctgtgcagagagcagtgaggagcatcagatgtttgaggggagacgggggttgtcacacacgcgttctgtgcagaccattccctgggtcccatggaaggca

SEQ ID NO: 4878 - DNA, 120 bp, synthetic construct
  source 1..120: mol_type = other DNA
tctgccctggctcctgtcactgccaagagaggagaacagaactatcacatgtgtgtcccctcaacgtcaacagcagccggggtttccaaaacggcatgctgtgcatggaaggactgtacc

SEQ ID NO: 4879 - DNA, 120 bp, synthetic construct
  source 1..120: mol_type = other DNA
aggcacttaccgtgccagcagcagggcagcctcagacaggagccagcatagccagcgcctgtgttgtaggtaccgcagttcagaaccccgtgtcccgccaagactccccatgaaggccct

SEQ ID NO: 4880 - DNA, 120 bp, synthetic construct
  source 1..120: mol_type = other DNA
aggtggagggagagagagaaggaaagggagggagagagagagacagacagacagcttcacacagacataaaacatctgctgttcaggatcccagctgccctccgactctgcctccttcta

SEQ ID NO: 4881 - DNA, 120 bp, synthetic construct
  source 1..120: mol_type = other DNA
atctctaaaatcctaagtttagtcctcataaaagccatcaccttcccagcaatcactttgtactgaccctttcttcaccatagtatcctgagccccatcagccagttgctctcctgtgta

SEQ ID NO: 4882 - DNA, 120 bp, synthetic construct
  source 1..120: mol_type = other DNA
tggcaggatgaggacttgaacccagagctctttgtatcccaaacccatgcttatgattgttgacatggtatcttcaccgtgaatttgtatattttgaacccaactgaattgctaaatctc

SEQ ID NO: 4883 - DNA, 120 bp, synthetic construct
  source 1..120: mol_type = other DNA
gctgtcggcagcttcagcgtggcctgcaaaatgttccacataaaatgctcatttaaaagccattagaggtgtggttgacagacggagatttatgaagattgaggaacatgaggagacgct

SEQ ID NO: 4884 - DNA, 120 bp, synthetic construct
  source 1..120: mol_type = other DNA
ttggatgatggatggatagataatggatggatggatagatggatggtggatgggtgagtgaatggatggatggatagatgatggatgggtagatggatcgatgatggatgagtgagtgga

SEQ ID NO: 4885 - DNA, 120 bp, synthetic construct
  source 1..120: mol_type = other DNA
tccctgccatggcctgccctgctctgacggctggtgtccgctgccagtggtggggcattggtggtggtgtctaaccatgaggggggactgattgtggggggagaggggatgtgatcgtga

SEQ ID NO: 4886 - DNA, 120 bp, synthetic construct
  source 1..120: mol_type = other DNA
aacactccctccagggcacactcacaggtgcagcccctccgaggaacccctataccccaatactccctttagggcacactcacaggctctagccccccaaggaaccctcatacccccaat

SEQ ID NO: 4887 - DNA, 120 bp, synthetic construct
  source 1..120: mol_type = other DNA
cacactcagtgtaaaggccacgtatgatgacagacccacagctaacaccacactcagtgtaaaggccacgtatgacagtcccacagctaacaccacactcagtgtaaaggccacgtatga

SEQ ID NO: 4888 - DNA, 120 bp, synthetic construct
  source 1..120: mol_type = other DNA
tgacaaccctgggccaccagctcggtggtggccagggccactcaccaccctctttcctccccacagtggcatttctgttaacatccaggacttggccccgtcctgcgccggctttctgtt

SEQ ID NO: 4889 - DNA, 120 bp, synthetic construct
  source 1..120: mol_type = other DNA
acggtctctggctttaacttaaagttgccatgttcccaggttcactcaagccaggccactgggagcaggtggtcccactacctctgacccctttgggaacctccagcctgggtctagggg

SEQ ID NO: 4890 - DNA, 120 bp, synthetic construct
  source 1..120: mol_type = other DNA
tcatcaaggtcagactaatccaggaacccatatccccacaatttgtcagcatcaagaggaaggaaccctctggcttgcaggagacatggcaggacccacactgaactcagagtggcctct

SEQ ID NO: 4891 - DNA, 120 bp, synthetic construct
  source 1..120: mol_type = other DNA
gaactgtgcacctggcaccaagcggaaaataaactccaagcagccagtagccccgatggtgtgtgcctgagctgtgtggcccgaggttccatttgagtgtgagaaatggctgaatccctc

SEQ ID NO: 4892 - DNA, 120 bp, synthetic construct
  source 1..120: mol_type = other DNA
aatcctggttctcaagggcggggttgttggcacgagcgtgatgcagactgcctttgctgcctttctcttgcccagggctgaacatggagctggaagacattgcaaagctgaagagtaagt

SEQ ID NO: 4893 - DNA, 120 bp, synthetic construct
  source 1..120: mol_type = other DNA
taagtatggcaacgtgtctataacatagatctacttccgttgtactatgacatagttccccctccattttcctatagcacagtcccaacctcccttttcctctgacatagttccatcctc

SEQ ID NO: 4894 - DNA, 120 bp, synthetic construct
  source 1..120: mol_type = other DNA
cccctctagctctgcagcttgacctcagggagctcccacaggggtcgttaccccaaatgggtatccaccactgcactggaaaagcagcaaccaacagaacctgacctctggcgctcggtt

SEQ ID NO: 4895 - DNA, 120 bp, synthetic construct
  source 1..120: mol_type = other DNA
tattgttttttagagcagcgtaaagaaacagagaaacagatatacttcccaaatcccagcatcaaggacagctggcacgtttccttccttcacttccctcaatactcagcaaacaatgtg

SEQ ID NO: 4896 - DNA, 120 bp, synthetic construct
  source 1..120: mol_type = other DNA
ggtgcagtgggtgcagatgggcacaggtgcaggtgagcacaggtgcagtgggtgcaggtgggcacaggtgcagaaggtgcaggtgcagtgggtacaggtgggcataggtgcagtgagtgc

SEQ ID NO: 4897 - DNA, 120 bp, synthetic construct
  source 1..120: mol_type = other DNA
tgttttctctccaacttcggtttccccatccccactcttagggcacaaatgcaggtgtagcttccccatgcccactctttaggcacaaatgcaggtgtagcttccccatccccactctta

SEQ ID NO: 4898 - DNA, 120 bp, synthetic construct
  source 1..120: mol_type = other DNA
actgcacagacttttcataacctcagtacgagagcccgggatgtccctgtagggtatgacagagaggggccgacatctccccagctgcacagtcaaggggtttccagttgccttgtgtga

SEQ ID NO: 4899 - DNA, 120 bp, synthetic construct
  source 1..120: mol_type = other DNA
gtcacatttgaatgtttttaaagcaggtgccactttgttgccataaaccaaaccgtagtctgtctttgaaggtggcatctccagcgtgggaacactgattcccacctgggcactcctccc

SEQ ID NO: 4900 - DNA, 120 bp, synthetic construct
  source 1..120: mol_type = other DNA
tgtgcacttacaacattatttgtaacagttgtgtgatatttcatggtgtagatgtgctataattcatttaatagtcagatattgctgaacaattcagtttttttacaagtttttaactta

SEQ ID NO: 4901 - DNA, 120 bp, synthetic construct
  source 1..120: mol_type = other DNA
gatgctgtctgcctgtctcacatactgaggcttcactcacttttatcagtcgaatgctgtcctgagggctgcttgcctgcattgtcctccccaggatctgggatgtccttcaaaattccg

SEQ ID NO: 4902 - DNA, 120 bp, synthetic construct
  source 1..120: mol_type = other DNA
cccccgctgcactctgccttccatgtctcgtgttagtgcattctaatggatgaggcctaagtttcatccaaaaccctaactgccagtgaataaggaagatagtttttctgttttttttta

SEQ ID NO: 4903 - DNA, 120 bp, synthetic construct
  source 1..120: mol_type = other DNA
accagctggtaatacctggattttagccactgcatgtcttatacttaagagcttgggtagtatcattggaaaggccaggggaggaacccttatgcaggattttgctttataaaaagtttg

SEQ ID NO: 4904 - DNA, 120 bp, synthetic construct
  source 1..120: mol_type = other DNA
acacatacctaggatatcaacgctgttcaaatcaatatggaaagtgaccagttggctggatttatttgcttcaaggccttgaatcagttcttcttttacattttcatctgacacccactg

SEQ ID NO: 4905 - DNA, 120 bp, synthetic construct
  source 1..120: mol_type = other DNA
tgtctattgtacatgtctgcatatgatagaaatactatgtaactccgtattactgtgcattttttgaataccacattcagtaatgtcacattagtggctggtgtgccatttttgtgtgag

SEQ ID NO: 4906 - DNA, 120 bp, synthetic construct
  source 1..120: mol_type = other DNA
aaaaatggtggtttaaacaaaatgcgcatttactagcacatttacttatgtgctaaagtgagtaagaaactgtcattaagtagggaatgataaacttaatccatcttgcactctgttctt

SEQ ID NO: 4907 - DNA, 120 bp, synthetic construct
  source 1..120: mol_type = other DNA
gcaatgccctgtggtcagggatgcctgctggaactatttagttgcgtaccctatggttactaactgcttatgttttgtagaaaaccaaatatttcagtggttctcaaatttcagtgagca

SEQ ID NO: 4908 - DNA, 120 bp, synthetic construct
  source 1..120: mol_type = other DNA
gtcaccagactcggcgtttcctctagccccagacaccactgttggaatgggatttccaatagataagtcttttgtagtgtcttcatttataccagcgatagtagctaaggaatataatta

SEQ ID NO: 4909 - DNA, 120 bp, synthetic construct
  source 1..120: mol_type = other DNA
gagtggtatgaggatgaggggctggatggggtttccagggggtatttccccagcaccatagatcacctcattgccttgtcctttcaccttcaggaaagggaggaggatgggctagagaaa

SEQ ID NO: 4910 - DNA, 120 bp, synthetic construct
  source 1..120: mol_type = other DNA
cccttggtatcctcacatacttctgaaatgtcagatggactaggtttctctttatccagatattaaacatgtatggaaactccgggggagaggaattaagatgcttaatctggtttccct

SEQ ID NO: 4911 - DNA, 120 bp, synthetic construct
  source 1..120: mol_type = other DNA
tttacccatctaccactgaccactaacaaagtcacagcaggtccgcagtcatcgggtggggaaaaaaaatctctaaatatggtattatgctaaaaacaaacaaaagaccaggctacacac

SEQ ID NO: 4912 - DNA, 120 bp, synthetic construct
  source 1..120: mol_type = other DNA
tactctcccttctggtttgcctacagccctctcacacatttgtaaatatagtcctgcaacccctaatgatgtcttgggcaaagatggaccttttatatgacgatagccccataagattat

SEQ ID NO: 4913 - DNA, 120 bp, synthetic construct
  source 1..120: mol_type = other DNA
tacgcaagctctctgtccctcagttccttcacctcaaaatggggataacaatgtatctacctcataggattctgaggattacacaagctaatactaaggcatggagaacagtgcctagca

SEQ ID NO: 4914 - DNA, 120 bp, synthetic construct
  source 1..120: mol_type = other DNA
tgcctcaagtcctccatcagtttcccagcaagttggatttgatgagtcccaattcatctcccctcccaggaggacactgtctgcttatacagctggttctagtgttaacttatttcattg

SEQ ID NO: 4915 - DNA, 120 bp, synthetic construct
  source 1..120: mol_type = other DNA
tagagtgactcatggtgaggacagcaaagatctcaaaatgctgtctagaccttaactctgcccatcaccccatccatttggttttgtttccctttcatttgcatgtgtagtcacatgctc

SEQ ID NO: 4916 - DNA, 120 bp, synthetic construct
  source 1..120: mol_type = other DNA
cagaggtttctgtctggtgaaacgacaccccaaggatcctgtgacattaggggtaacgtttataaaatacctagcaagggctcaataaatggcttattattatcataagtgtctacaggg

SEQ ID NO: 4917 - DNA, 120 bp, synthetic construct
  source 1..120: mol_type = other DNA
agacaaatctctgatcagactggccaagtaaaaggtgtagaaggcaaaaataaatggcattgggaactcaaaggtatacataactttagaaacagcagagactgaaaacacaaaaggaga

SEQ ID NO: 4918 - DNA, 120 bp, synthetic construct
  source 1..120: mol_type = other DNA
tatgatatgactgttagacaaacacaattctgaagtaaaactgtcattcagcagttttacttcaacctctctcctcgtgttcaactcctgtcagaaatgaccaaaaactggatggcttaa

SEQ ID NO: 4919 - DNA, 120 bp, synthetic construct
  source 1..120: mol_type = other DNA
agcagtgagaatccaggtctaagatccttcttcaatcatccgatgctgaaaatttattgatgtgcacaagatggacactggatagaagaggacatccaggtaaagccagctttacacctg

SEQ ID NO: 4920 - DNA, 120 bp, synthetic construct
  source 1..120: mol_type = other DNA
tattaatcagacttggcttctttctctcctgcttcatcagaggctggactctgcaaaagaaaggaaattgagatctttagcatttaacacgttgtcgttttatttatatgcaactatcag

SEQ ID NO: 4921 - DNA, 120 bp, synthetic construct
  source 1..120: mol_type = other DNA
gcgctgggattacaggggtgaaccactgcgcccagcccagcacgcatctggcattttctaagtcactggcccctgcatcctgtagctctcctagcggctaatctgaaactatgggatgca

SEQ ID NO: 4922 - DNA, 120 bp, synthetic construct
  source 1..120: mol_type = other DNA
tatgcgttgaaaggacacatgaatcaatgaatgttattacttcagttttatagactagggaaacggagcatggctaagttaataacgcagatcagggtgacccccaaagcctgaggtctt

SEQ ID NO: 4923 - DNA, 120 bp, synthetic construct
  source 1..120: mol_type = other DNA
cagccacattattgcagtcatatcccataaagttcctatcagccacattattgcaatcatactcctaacagttcttatcagccacattattgcaatcaaactccacacagctcctatcaa

SEQ ID NO: 4924 - DNA, 120 bp, synthetic construct
  source 1..120: mol_type = other DNA
gcaattgagttgccagataaaaatatgcacatgttgaaagctgcatataagagaaaagaagagccccctaaagagaagacatctaacctgacgttatgagctgaatttcccccttcctca

SEQ ID NO: 4925 - DNA, 120 bp, synthetic construct
  source 1..120: mol_type = other DNA
gggattacaggcgtgagccaccgcgcccggccaacaatgaaaacttatacataaacctgaatgccaatcaagggataaataagtaaataaattagggtacatctatactctgcagttaca

SEQ ID NO: 4926 - DNA, 120 bp, synthetic construct
  source 1..120: mol_type = other DNA
tctcaatgctaagaagggagattaatttaaacacaagagaatttctcattatagcaatgtaatacgcagctcattctttatcatgtaagagagctggagctataaataatgccttgtagt

SEQ ID NO: 4927 - DNA, 120 bp, synthetic construct
  source 1..120: mol_type = other DNA
ttttggaagttgatgtcagtccgtgagtgtcacttgttacacaagcaagggaagaactttcatcaggccctcagtttccaagagcacagtcatttgcagccataaattccaagaaaataa

SEQ ID NO: 4928 - DNA, 120 bp, synthetic construct
  source 1..120: mol_type = other DNA
gggaagggagacctgagcacctgtgtcacaagaaatacagtaattactaagagaagtaatttggagtatgaaagtaattaaggttaaatcgggtcataagggtggcccctaatcggatag

SEQ ID NO: 4929 - DNA, 120 bp, synthetic construct
  source 1..120: mol_type = other DNA
ctgggaagagcttcagaacctatctgtcctgcatgctaatccaagtttccaagtgattttatgtgcattttctcatccagtgctcccaacaattacagcttgtctttcactaaccgaaag

SEQ ID NO: 4930 - DNA, 120 bp, synthetic construct
  source 1..120: mol_type = other DNA
cttttccagattataaaaatgccctttttttgtagagcccttttttaaggagcccaatttgctttaaaggccttgtctaattccaccttgtcatgagcctgtgacaccgggaggcagcag

SEQ ID NO: 4931 - DNA, 120 bp, synthetic construct
  source 1..120: mol_type = other DNA
agggaggtcttggccagtgactcaactgctggttctcatttaaagcatttgggaaactaaaaaagtagacacaggtcccaggccacaccccaggcctacacacagaatctctagagttgg

SEQ ID NO: 4932 - DNA, 120 bp, synthetic construct
  source 1..120: mol_type = other DNA
tagcaaacgggatctcaaaaaacacaacaacaacaaaacgcggcatcctgacgtgtcgccctcgtaaattcctgtgctgtaaagactctcctgtggataagttcaagcctcagcagttta

SEQ ID NO: 4933 - DNA, 120 bp, synthetic construct
  source 1..120: mol_type = other DNA
gggtcctgggttgccagctgctggcccaggaagattccctggaagattaccttgctttgggagggggtggaaacaccaggggaccccagtgacactggagtcgaaacagcatccattgtc

SEQ ID NO: 4934 - DNA, 120 bp, synthetic construct
  source 1..120: mol_type = other DNA
ctcctcgctgcctcctcctttcccatgtcgtgaggctccttcttcctcccgggccccagctcctctgcctgccaggctgcacccacccagagctgcccaggactagctgtgatctctgtt

SEQ ID NO: 4935 - DNA, 120 bp, synthetic construct
  source 1..120: mol_type = other DNA
ggggagaacttgggggcctgattaacttgctttaactctcttttctaagcatgcttgatgaaagagctccttccatggacctaaaacacatttgaggaactgattttatgtccagcattt

SEQ ID NO: 4936 - DNA, 120 bp, synthetic construct
  source 1..120: mol_type = other DNA
ggggagagttggtgtccacagggccaattcagtgatttgggtagctttccattttggaacaacagttactaattcttcctcctcttcctcttctcctctttcctattttaagtgcaaaaa

SEQ ID NO: 4937 - DNA, 120 bp, synthetic construct
  source 1..120: mol_type = other DNA
ctaccagcctttgttcatatggttggggttagctctaccacgttgctatttgctgtttcttgatcttgggttttgtttttctgttcctccttttctgccttctcctgtgttaattgaata

SEQ ID NO: 4938 - DNA, 120 bp, synthetic construct
  source 1..120: mol_type = other DNA
tgtgctgtgtgctgtgttatcctctcttccctggcgctggtggcacctgtgctatgtgccgtgttatcctctcttccctggcactggcggcacgcacgctgtgtgctggggtattcacct

SEQ ID NO: 4939 - DNA, 120 bp, synthetic construct
  source 1..120: mol_type = other DNA
tgggatctcattggattcctgtagtgtggggatggtggcagatactctggctgctacgtgagaacagtgtgccgatccctggggtttctcaaggcgtggcacctcacctcacacctgctc

SEQ ID NO: 4940 - DNA, 120 bp, synthetic construct
  source 1..120: mol_type = other DNA
tgtggggtgggcacttgtaatacctccatgttacagaaaggaaactgaggcacagagagggccatgcctcgcccaaggttagccagccaatagatgggagggctgagatttgacccatga

SEQ ID NO: 4941 - DNA, 120 bp, synthetic construct
  source 1..120: mol_type = other DNA
gaaggagaaatgtgaggctcctccttgcacgcactctgtctttattaaattttacgacagcatcgttgctgtcagatgctgccagcagtggagacagagcattcattactttagatgccc

SEQ ID NO: 4942 - DNA, 120 bp, synthetic construct
  source 1..120: mol_type = other DNA
tgtaacccaggctcacaaacctggtggcttaaagcagcagaaacttagtctatcagatctggaatccgcgtcgattggccatcatccagccatcggtgttggcggggccacctccctcta

SEQ ID NO: 4943 - DNA, 120 bp, synthetic construct
  source 1..120: mol_type = other DNA
ctggaagctgtgctcagagctgggtcagggtggagggcacgaggtgggccggggcaccgctcaggtgtccctcgctgtcgggcttaccctgccctgcccatccaggtgtacaaaggctac

SEQ ID NO: 4944 - DNA, 120 bp, synthetic construct
  source 1..120: mol_type = other DNA
tcctgtctgtggacccccgaggggcatgggatgaggcaggaagcaatgccttctggtgctggcctctgtgaaccctgaaggccagtctccctcttagccccgtgggcccccaaccccagc

SEQ ID NO: 4945 - DNA, 120 bp, synthetic construct
  source 1..120: mol_type = other DNA
gccaccccgagcctcctgtccagtacaagagctcagagcaaacgataaccaccacccattcattctccacacgccctctgatgaaagggcaccaaggattgtggttttcattttactgtc

SEQ ID NO: 4946 - DNA, 120 bp, synthetic construct
  source 1..120: mol_type = other DNA
actccaatcccataacacacacacacacacacacacacaaacacagtgcacgctgaaaagagctctgtgctcatcaccagtcaccagacaaaggcaaattaaaactccaaatgacagatg

SEQ ID NO: 4947 - DNA, 120 bp, synthetic construct
  source 1..120: mol_type = other DNA
gcagccctggtttggtttgcacttgctgccctggtgacggctgctctcattcctgccccattgctaacaagggtgtcataagctactttcccggcccacatcctattaagcccatggaga

SEQ ID NO: 4948 - DNA, 120 bp, synthetic construct
  source 1..120: mol_type = other DNA
ggtgggttggttaggtctgggttcagaagccccttcagtgtaggtgctcagctgggccatggagtcctggccttccctctgagcacagacccaccaggaatgggcagcccgttcttagtg

SEQ ID NO: 4949 - DNA, 120 bp, synthetic construct
  source 1..120: mol_type = other DNA
atacatgcacacacatgcacacacacatctccagcatatgtgcgcacacacatacacgcacacacacatctccagcatgtgtgtacacacacacacacctctccagcatatgtgagcaca

SEQ ID NO: 4950 - DNA, 120 bp, synthetic construct
  source 1..120: mol_type = other DNA
ttctaactttttaaatgggattcgtgactcactaattttgtgtttctttactccttttaaaagctataaactttactgtgagttctgttgcagctgtttgctacaaattttggcatgcaa

SEQ ID NO: 4951 - DNA, 120 bp, synthetic construct
  source 1..120: mol_type = other DNA
tcgaaggtcgaggcaaggaacgtggcctggaaaagacaagggaaaatttccccaaagccttcagaaggaacacagccctgcagccaccctgacttttgttcagaaggaacacagccctgt

SEQ ID NO: 4952 - DNA, 120 bp, synthetic construct
  source 1..120: mol_type = other DNA
tactggtgagaaccaaaagcctcattttttcaacagggcagaattttcccaaaaagtggaaggccccttggcacttagtcctgttctctcctttaaaaaatgtggaaattgagtccaaac

SEQ ID NO: 4953 - DNA, 120 bp, synthetic construct
  source 1..120: mol_type = other DNA
tttctagttttcttcctctttccagggggagatggggtacccaggcctgccaggctgcaagggctcgcccgggtttgacgtaagtcacttcctctcactgatactttaaaactagcgctg

SEQ ID NO: 4954 - DNA, 120 bp, synthetic construct
  source 1..120: mol_type = other DNA
caggtcatgaagccctgagggtagagcctggatcatgtgggaggacaggtcatgaagccctcagggtagggtgccacccactaaagaattctagtcagagtaaacaggagcacttttcag

SEQ ID NO: 4955 - DNA, 120 bp, synthetic construct
  source 1..120: mol_type = other DNA
aaataatagtaataaaatagagacttcaggattcggcagcagacactccatctcagaaataatagtaataaaatagagacttcaggattcggcagcagagactccatctcagaaataata

SEQ ID NO: 4956 - DNA, 120 bp, synthetic construct
  source 1..120: mol_type = other DNA
atgcctttcttaacacaacatcaccctatacttcctttagatctctgttcagcctctgggtctaggtctccctgtgcagcctgtgggtctgggtctctgttcagcctgtgagtctgggtc

SEQ ID NO: 4957 - DNA, 120 bp, synthetic construct
  source 1..120: mol_type = other DNA
tgtcctggtgacgttgaaggatgcacctctctgcaagcaagaaggcgtgatgtcagtgctcaccgtctgccagaggcagctgcagtcggagctgctcttggtgaaaaatgaaatgcgcct

SEQ ID NO: 4958 - DNA, 120 bp, synthetic construct
  source 1..120: mol_type = other DNA
aagtgattcacacacaggctcctcagaaacctgtcttgtctctcttgagccgtgagctcttgtttagttttgcataatggtcacttggggcgcgtatgcaactttgagtgcccatttatt

SEQ ID NO: 4959 - DNA, 120 bp, synthetic construct
  source 1..120: mol_type = other DNA
attcagtaccacagaaaaagagggaaagctgtccattttttttaaagctagtataagcttaattctaaaacttgacaaatcttatacaaaaagaaaaactatggaccaatctcatttatg

SEQ ID NO: 4960 - DNA, 120 bp, synthetic construct
  source 1..120: mol_type = other DNA
actcatttgaagtatacagttcagtggttttagtatatttagagtgcgcagccatgaccacagtcaattttagaacattttcaacaccccaaacctttcagcaggcacactccactcacg

SEQ ID NO: 4961 - DNA, 120 bp, synthetic construct
  source 1..120: mol_type = other DNA
tgcagttctgctcactgctctggcttttttgttcactcttagattttagactctgggtactgctctttcctgtgaactagttattcattttagggacgagggttgcatttaatccagcat

SEQ ID NO: 4962 - DNA, 120 bp, synthetic construct
  source 1..120: mol_type = other DNA
gctctggtgaacctcaggcccctgagagggaaaaagtgttttccagggaatgactggcctggctgtggccttacagcggccttacagccagtgctaaggatcactttcccagcaagccta

SEQ ID NO: 4963 - DNA, 120 bp, synthetic construct
  source 1..120: mol_type = other DNA
tcaagaactttaaagtaatgatgagtgaaacaggacactgtccagaaaccatggacagcagggctgaaggactttggtgtcagctgccctctgtacaggaactgggcccacctcccacct

SEQ ID NO: 4964 - DNA, 120 bp, synthetic construct
  source 1..120: mol_type = other DNA
cttgttgatcttggctgcaggggcagggtaggcagaccaggtcaataacaggcaaggacacctgccatggtgagaggtcactggacccagactgaagcagctccaggcctagctagctac

SEQ ID NO: 4965 - DNA, 120 bp, synthetic construct
  source 1..120: mol_type = other DNA
aaggagatcccagaaggtggtttctgaagcactgcacttacttgatgatagccgacacgttggtgatcttgttaaagaaatcaaactcccgctggtaaaagtccttcgctgggccggaca

SEQ ID NO: 4966 - DNA, 120 bp, synthetic construct
  source 1..120: mol_type = other DNA
accctttcggtgcacccatgtgagcctcgtctcggcctccttgcctccccagccctctgattccacccctccggttcctcggtcccatttcacccctgtgcgccttgggcgctcgcctga

SEQ ID NO: 4967 - DNA, 120 bp, synthetic construct
  source 1..120: mol_type = other DNA
cacagagacagagagattgagagagacagaggcagagagagagagaaacacacacacagacacagagacagagagattgagaggcagagagagaaacacacacacacacagagacacaca

SEQ ID NO: 4968 - DNA, 120 bp, synthetic construct
  source 1..120: mol_type = other DNA
gtgtgagattgcttgcctggtggttgaagcggcttgcaggaccttgtcacagttgctggaaagacataaagttaacatgttttgttgaaatctgttgttccattacctgggtcttctact

SEQ ID NO: 4969 - DNA, 120 bp, synthetic construct
  source 1..120: mol_type = other DNA
tgggatgcaggggcagctctcagggaaagtgatgagcccagtaaagctgagagggggcactgggtctggcagtgtgggggtcaccagagaacttggcaagtgtgctggcatgagagtctg

SEQ ID NO: 4970 - DNA, 120 bp, synthetic construct
  source 1..120: mol_type = other DNA
cttgcacccagtatcacagccctgattagaggggctaggcttctgcatcctgtgtggctgaatttgcaggcattgcaccatttgcagcttgtctctattgacttggcccagacgggttca

SEQ ID NO: 4971 - DNA, 120 bp, synthetic construct
  source 1..120: mol_type = other DNA
tgaaataacttgtcccaggtcacacagcagtaagtaacaaaactggtatttgaacccaaatctggccttaattacccaactgggccatattctaggagaccattctggtgaagaaccacg

SEQ ID NO: 4972 - DNA, 120 bp, synthetic construct
  source 1..120: mol_type = other DNA
tttccattaagtgacactcactgctggcagttcattactgcacagtgtgttcaattgcttggagaagtccttcctccaagggatctcattaagtccattttgaaatgagaacacttggtg

SEQ ID NO: 4973 - DNA, 120 bp, synthetic construct
  source 1..120: mol_type = other DNA
cactcctgccatcgaagttatttttgaaaaattagaatctaggatctaagttccaattaataagatccttttggggacctgaagtgtaactcagggctgggaagcatcagagtagctccc

SEQ ID NO: 4974 - DNA, 120 bp, synthetic construct
  source 1..120: mol_type = other DNA
gctgaagacattgaattaattatctcgctcatcatcaacaccctgtttataaattcctggcacaagttcaagttcttcttctctctccccctccccctcctccccctcttccccctcccc

SEQ ID NO: 4975 - DNA, 120 bp, synthetic construct
  source 1..120: mol_type = other DNA
ggcatattcatctcttctccaatactttcacattactttgcttatgctttttcttcctgctctctcatgatgggcagggaccacatcttattcagcaattagtacagtgctgtgcaatcc

SEQ ID NO: 4976 - DNA, 120 bp, synthetic construct
  source 1..120: mol_type = other DNA
ccttttagtagtcaaaggcttggttaaaactgttagttccacataatagaaactcagcctgagctctgttgagcagaaagaggaatttgctctgaggattctgggctatgtcacagaacc

SEQ ID NO: 4977 - DNA, 120 bp, synthetic construct
  source 1..120: mol_type = other DNA
acagggctgggcaccacgagggcatgggtgaaagtggcctggatttggatttcagaagaactgggcttgagtcctagttctgccataaaccatgtgactcttaggcagtcactttatgtt

SEQ ID NO: 4978 - DNA, 120 bp, synthetic construct
  source 1..120: mol_type = other DNA
aggtgtgagccaccacacctgatcccatcaaatttttgaatgtgcctcttctagaaatctttcccacaaaaatatctgcacaaggatggatgggcttacagcagcccctttgtgggaccc

SEQ ID NO: 4979 - DNA, 120 bp, synthetic construct
  source 1..120: mol_type = other DNA
ctgggcaccacgagggcatgggtgaaagtggcctggatttggatttcagaagaactgggcttgagtcctagttctgccataaaccatgtgactcttaggcagtcactttatgtttttatt

SEQ ID NO: 4980 - DNA, 120 bp, synthetic construct
  source 1..120: mol_type = other DNA
agacaaattccctgaaaaggccaaaagccctgtcaaggaggaggtcaagtccccagagaaggcgaaatctcccctgaaggaggatgccaaggcccctgagaaggagatcccaaaaaagga

SEQ ID NO: 4981 - DNA, 120 bp, synthetic construct
  source 1..120: mol_type = other DNA
gcactgcttagactgacagggaacagagaacaaggtgagggagagataaggcactgtgtagactgacagggaacaaggggggatgttctgattagaaacagattatcactcttcttcctt

SEQ ID NO: 4982 - DNA, 120 bp, synthetic construct
  source 1..120: mol_type = other DNA
actgccgccagccagaatgacactgttttgagtaaacccagtatagtatgtgatattaaattaaatttggaggattctagaattttagattggctgcctatgaatacctcttttggctcc

SEQ ID NO: 4983 - DNA, 120 bp, synthetic construct
  source 1..120: mol_type = other DNA
cccatgaggctcagatgctgttgaagaaataaatggtatgttgctgctgacagtagtgcttgcctattgtaacagcattggttctgctgtagcctcggtgaccatttaagttgaataaat

SEQ ID NO: 4984 - DNA, 120 bp, synthetic construct
  source 1..120: mol_type = other DNA
tggcatctgtgcaggaaagagacccacagattacaggaagccaaagttggactccaaggtcacacacagttggcaactggctgcctgcagctctgaggatggaggttagacaactacgtc

SEQ ID NO: 4985 - DNA, 120 bp, synthetic construct
  source 1..120: mol_type = other DNA
ttagatttgtacctgaaacttctatcacagggcatatcacaccatactacaatggtttgtgcacattcgagattggagagctttattaagggcgggctggcactgtatcatcgatggcca

SEQ ID NO: 4986 - DNA, 120 bp, synthetic construct
  source 1..120: mol_type = other DNA
tggggagccccagcacaatgatattgtgtggtcttccctcctgtggaatcgaggggaaattattcttcccaataccttgatttgattttcagtttcataagcttcttcctctgaatctta

SEQ ID NO: 4987 - DNA, 120 bp, synthetic construct
  source 1..120: mol_type = other DNA
gtgcccagccaagagttgtttttagtgtggttggcagagccagctcttcctcaccacaggttgcctccctaggttcctactttttgttactagctttattatagctacattattattatt

SEQ ID NO: 4988 - DNA, 120 bp, synthetic construct
  source 1..120: mol_type = other DNA
agctgtgggcagccaggattcttatagctaaggaaagttctagattatgggatcttcccactgaccccactcagctccttagaggtcattctggtgtcttttggaactttgtcaatgggc

SEQ ID NO: 4989 - DNA, 120 bp, synthetic construct
  source 1..120: mol_type = other DNA
ctatcaccaccaccaccatcaccatcatcaccaccaccagcagcacatctgaaaaactctgattctggcctttatgtctcagattcttttcttttcctgtcaacttctttatttatacat

SEQ ID NO: 4990 - DNA, 120 bp, synthetic construct
  source 1..120: mol_type = other DNA
gacaaatcttcccggcatggacggctctcactttcttttaattgaagggaagctatggaagtgttttccttcatttaaaaaaaatcttcctttttttttctctcaggccatctgtctggc

SEQ ID NO: 4991 - DNA, 120 bp, synthetic construct
  source 1..120: mol_type = other DNA
ttctttattcccaggccgggcagccaggcccttctcatccagactcaactctccccaccctgggccttgggctccctcctgccttgtccagcatctgggagttgggggttcccgctgtat

SEQ ID NO: 4992 - DNA, 120 bp, synthetic construct
  source 1..120: mol_type = other DNA
atctggcctgagaagcacgtttgggagacctcatggcatccaaagggacgtggaaaatgctatgaattatccaaaaagatgtccctggcaggctcctctccccaatgatccccctcagga

SEQ ID NO: 4993 - DNA, 120 bp, synthetic construct
  source 1..120: mol_type = other DNA
atcttcctccctaactttcctgggatcagattgtcgaggggttttgcctcttaccaaaaggccttgtttagcgcccagcgccctcactcttgactttgtttcccaaaatcttgtcatgga

SEQ ID NO: 4994 - DNA, 120 bp, synthetic construct
  source 1..120: mol_type = other DNA
tcatccaaccatccatctatccatccatccatccattaatctatctaaccatccattcatccatctaaccatccatccatccaagcatccaactatccatccatccaacaatccatccat

SEQ ID NO: 4995 - DNA, 120 bp, synthetic construct
  source 1..120: mol_type = other DNA
ctcaaagtagtaagatgcagggtagacttctaggtatctatagagttctcaacgaattgggtagccaaggtgataaataccctttggtaacagccaatggtgacaaatagccaatggcaa

SEQ ID NO: 4996 - DNA, 120 bp, synthetic construct
  source 1..120: mol_type = other DNA
actgtcctttaagccaagggaggacagaatcaggaaaggggtgttcattcatttgacaaatatttattgagcatctactatacttcacgcctggcactattctggatgctgagaataggg

SEQ ID NO: 4997 - DNA, 120 bp, synthetic construct
  source 1..120: mol_type = other DNA
tggaactgaacgaaggcccaactctgtgcttttaagccccctgctgatttctacttcctttcttcctgaacaggtcatgacagcataacagctgatctccccagctaagagtttagcttg

SEQ ID NO: 4998 - DNA, 120 bp, synthetic construct
  source 1..120: mol_type = other DNA
gtgggatttgttcttgagcatggtgtcagatagtgattcattttcttttctttttttcttttttgtgttttaaaagttcgatttttcggccgggcgcggtggctcacgcctgtagtccca

SEQ ID NO: 4999 - DNA, 120 bp, synthetic construct
  source 1..120: mol_type = other DNA
acagggacagaaggggctccttaggtcagtgtgcagtgtccctgacctcagggaactcaaagaaaccaggggccaaagagcgctgccacccagaaagggctgcccactaacaaatcgcta

SEQ ID NO: 5000 - DNA, 120 bp, synthetic construct
  source 1..120: mol_type = other DNA
atggttgtggtggtggtggtggtggtgatgatgatgatgagggtgagggtgagggtgatgatagtatggtgatggtggtggtgtgatgatgatattgagggtagtgatggtgataatgat

SEQ ID NO: 5001 - DNA, 120 bp, synthetic construct
  source 1..120: mol_type = other DNA
ggtgggggatgggagggaggcagcccaggtcacaggtgggagggcagtagcccagtggggcatggcctgctgtctctattattgtccttggctctgctcagggtctctccgggtaggcac

SEQ ID NO: 5002 - DNA, 120 bp, synthetic construct
  source 1..120: mol_type = other DNA
catcctgaaaggcaaagatttggagagaaaggaagggagtagagagaggggtgatttggacaaccttcaagtaagccctatacagatgtatacctcacaaagtgcttccaaacaaaattt

SEQ ID NO: 5003 - DNA, 120 bp, synthetic construct
  source 1..120: mol_type = other DNA
ctggatttcacccaagagcgaggcccgaggagagctgggacgctgtgtcctgagagctgtccaaggggggcccttgtgacttggcaggggtggttttggagcctgagtttatccgcactc

SEQ ID NO: 5004 - DNA, 120 bp, synthetic construct
  source 1..120: mol_type = other DNA
gaaatggccgtgctctgcaaactccctcataccccactcagctccacgcccgtcagctcccctggtctccaggaaaaaccaaaatgaagatcctgcttgagggcgatgagaattattttg

SEQ ID NO: 5005 - DNA, 120 bp, synthetic construct
  source 1..120: mol_type = other DNA
actagagacagggctttgggccctgaggggactagattacttagactatgatcaacctgtctcccataggagttggaaacggaggctaggacaggccatctaagtgctctgtgtaacagc

SEQ ID NO: 5006 - DNA, 120 bp, synthetic construct
  source 1..120: mol_type = other DNA
gctctcatacacacacacctcttgtgcacacgcttctccatcactaagttgactaagtcacatgctcagcacagactgggtgttcagagtgaaagactaacctaaagtagattgactcat

SEQ ID NO: 5007 - DNA, 120 bp, synthetic construct
  source 1..120: mol_type = other DNA
catcatcatcaccaccacaaaagggccagtaagagctgaagaagcatgaccttcacatctttccatctggtcaggtggccagggaaaaggttaaccttacccagagccttggttctcaaa

SEQ ID NO: 5008 - DNA, 120 bp, synthetic construct
  source 1..120: mol_type = other DNA
atcttagcgaccactttgtggggttgtaatacactctgtattacacaatacaccagaataaggaagcttactctggtgtattgtggtgttgagagcaaacaagagtggggagagtatcac

SEQ ID NO: 5009 - DNA, 120 bp, synthetic construct
  source 1..120: mol_type = other DNA
tcaagctttgcctgctctcaagtggaacaggaaagaattcttggccagtttatttaaaaatccagttctagaaatgtcctggtgggcaggtctcactcttttctgtcactttagctcttt

SEQ ID NO: 5010 - DNA, 120 bp, synthetic construct
  source 1..120: mol_type = other DNA
ggggtgcgggaggcctttggccggcggcagaacaagcccatggagtccctggacttgaaggacaagaccaaggtgtgggctggggctgcgggcagcctgcaggtgtggggagttctgtgc

SEQ ID NO: 5011 - DNA, 120 bp, synthetic construct
  source 1..120: mol_type = other DNA
ttatctttttaaaaatgactgcatcagcagaaatacgtctttctaaggagaaaatacatcaagatagaaggtagtttcaggccgtctgggagagggctgaaaaggttctatgtcaggtcc

SEQ ID NO: 5012 - DNA, 120 bp, synthetic construct
  source 1..120: mol_type = other DNA
cattttgcagacaggaggaaggagatgtagtgggatgggaagatctgggctctgaggtcagtccccgctggacggaaacctgcggccctgttagctccgtgatctggaaggtgctactag

SEQ ID NO: 5013 - DNA, 120 bp, synthetic construct
  source 1..120: mol_type = other DNA
tctccgtttttctgtctgacatattccatttccctttcagggcccaggtgaaagccccactgtgctcaagctcctgattccctggcactgagggggagcgcggtgggcactggttttgcg

SEQ ID NO: 5014 - DNA, 120 bp, synthetic construct
  source 1..120: mol_type = other DNA
actcacttctctagtagggctctctagctcagagatttcttttgcattctttcattcaagacccactggccttcaaggatcagagtccagatacgttttagctgctgagtcttttaaatc

SEQ ID NO: 5015 - DNA, 120 bp, synthetic construct
  source 1..120: mol_type = other DNA
atctattcacccatctactcactcgtctctccatccctatatccatctacccacccatccactaatcccatccctccatccacctacccatccatctgctcactcactcattcctccatc

SEQ ID NO: 5016 - DNA, 120 bp, synthetic construct
  source 1..120: mol_type = other DNA
aagttatgccagagacaggccctttgcctcagactgtggcctcggtcaggaaaggaggcgcgagcgtgtggctggagaactctacaccaaacaccctggtttcctgagtggaaatcacac

SEQ ID NO: 5017 - DNA, 120 bp, synthetic construct
  source 1..120: mol_type = other DNA
gaaggctggaaggtccatccctggcagtgtgtggtgacatgtgtcgtgacatggagtttgattcttaactgaccgaagcttgaaaagtctgtctttttgatggacccagggagttgggtg

SEQ ID NO: 5018 - DNA, 120 bp, synthetic construct
  source 1..120: mol_type = other DNA
ggtggagggctgcagtgagggggccagggccagggttgcaggtattggtctggttggagcagcaggaggtagggctgtgggatcatgggagtcttcacctggggcagaacatctggattt

SEQ ID NO: 5019 - DNA, 120 bp, synthetic construct
  source 1..120: mol_type = other DNA
aggtagacaaatgaaccaataggctgtttcctccaccaggcatactcttttgcatatactttaaggccttactggccaccttccagagctccagatgcaccaccttgctcccattctgtc

SEQ ID NO: 5020 - DNA, 120 bp, synthetic construct
  source 1..120: mol_type = other DNA
tttgtcacaaatgtttcaatttgggagaagtgaagcccatccgagatcgagggacacggtgattgtttcttaaatcaagaagccctccacttccaaggcccccatgtctcctgcaaagtg

SEQ ID NO: 5021 - DNA, 120 bp, synthetic construct
  source 1..120: mol_type = other DNA
gagcacaggagcccagcgccagcttcgtcggaaacctccttgtagaggctgtgatctgtgcactttcctgtctttgtattaaacttgaatttaaaactgtataaaacatacaaagatatt

SEQ ID NO: 5022 - DNA, 120 bp, synthetic construct
  source 1..120: mol_type = other DNA
tctctcccagaggacggcgtccaaccggaaaggtcctttgtgtttggaaagggcccttttctggcacaggctacagcataaagatgaagaagtgagaccacttctaccatactccagaac

SEQ ID NO: 5023 - DNA, 120 bp, synthetic construct
  source 1..120: mol_type = other DNA
ggggtgtcaggcaggagatgggggtgtccaggtgggattccaggggtctccgaccaggctgaactgtggaagaatcaggattttccatagagacaggatgatgggttgggtgtgtggacg

SEQ ID NO: 5024 - DNA, 120 bp, synthetic construct
  source 1..120: mol_type = other DNA
atggcaatggtgatggtaatgatgatgttggtggtggcagggatggtgatggtaatggcaacgatggttgtggtggtgatagggcctacttttttatgtcttactgcatttcatccacca

SEQ ID NO: 5025 - DNA, 120 bp, synthetic construct
  source 1..120: mol_type = other DNA
acattctttccacagaagggggtctctgtgaaatgatgcgtgacaaacaccacctatggaaaggaggtttcatatgatcaacccatatgcagcccgacagaaagtcaaatttggggatgt

SEQ ID NO: 5026 - DNA, 120 bp, synthetic construct
  source 1..120: mol_type = other DNA
ccgtactcaccagtgccgggtaggaggggtagccgctgcacttggcccacaccaccttcagaggctccagcaccgaggcggcggcatcagtggagatccacatgctgctctggccgactt

SEQ ID NO: 5027 - DNA, 120 bp, synthetic construct
  source 1..120: mol_type = other DNA
ggcctgtttctattggttggtttttctcctggtcagaggtggttttctcccgcttcatcgcaggtctggttgtttttgtcagccattttgtattttactttattgggtgcaggattttgt

SEQ ID NO: 5028 - DNA, 120 bp, synthetic construct
  source 1..120: mol_type = other DNA
ctgcaggccactcacctccccagccaggcgctcctgcgggccgttctgggtgtcccaggatgcaccctgcagccttgcactgaccttgaagcgcacgcactggatggcggtgcccgtgtt

SEQ ID NO: 5029 - DNA, 120 bp, synthetic construct
  source 1..120: mol_type = other DNA
tgttccaggtgccgacttcacaaacaccttctacttgctgagctccttcccagtggagctagagtcgccaggcctggcggaattcctggccaggctgatggagcagtgtgcctccctgga

SEQ ID NO: 5030 - DNA, 120 bp, synthetic construct
  source 1..120: mol_type = other DNA
cggagggagggaaagggagagggaagtcgggtggtgggaaagctttgccttccattgtaggaagttaattcataatgtctaaaattggtgaacaaagaagaaatgtatgtgtgtattatt

SEQ ID NO: 5031 - DNA, 120 bp, synthetic construct
  source 1..120: mol_type = other DNA
tcacgcttagctgtctacaccttgttggcactggtcatcagccagctgcaggatgcctctttttcttttctaaaacctcagtcttctttccccttcaaccgctcatgggttttggtcagc

SEQ ID NO: 5032 - DNA, 120 bp, synthetic construct
  source 1..120: mol_type = other DNA
caggaggcttgaggatcccagggtggaaacattcccacccactgggccctcatctggcaccagatcagccacagctccctaaaaatagctccgtatggagagtctgcttgacagctgcag

SEQ ID NO: 5033 - DNA, 120 bp, synthetic construct
  source 1..120: mol_type = other DNA
ggctgacctgggaagctggagctgaccacaacagcaatattagcggtaggaagacttgggataactgttttcattactctagatagtcaaaattaatagcgaagtcactttttaaccact

SEQ ID NO: 5034 - DNA, 120 bp, synthetic construct
  source 1..120: mol_type = other DNA
ccaatctcctattggtggacatttagtttccatcaattttgtttccaattttttgtaatcatgaataataatgtaatgaatattcttgtggctgtattttgcttacgttcatgtaaactt

SEQ ID NO: 5035 - DNA, 120 bp, synthetic construct
  source 1..120: mol_type = other DNA
tgattgcacctgtcccccatccagtgagtgaaatcatttctctttgtgattgcacctgtcccccatccagtgagtgaaatcatttctctttgtgattgcacctgtcccccatccattttt

SEQ ID NO: 5036 - DNA, 120 bp, synthetic construct
  source 1..120: mol_type = other DNA
ttcaaacaatgatgtgtttctcggactctaagaaaattttcagcagaagaaaagtccgtgataatggtgactggggtagtgcagtagtggaaatagcagtggagaggggacgtatgaagt

SEQ ID NO: 5037 - DNA, 120 bp, synthetic construct
  source 1..120: mol_type = other DNA
gcaataggttagagatttgaaagtacaaaatgcaactgtgtgagatgctcccttcgcttaacgtacttgactgccttgtgccacagtttcctcatctacaaaatgagaacagtgtatctc

SEQ ID NO: 5038 - DNA, 120 bp, synthetic construct
  source 1..120: mol_type = other DNA
atgaatgagataagtagtgaactatggatgtttaatagacatatattgagtctctaatggatacagatactatgctctatgtcagccccactgtcaagaatattgtttaccagaggagga

SEQ ID NO: 5039 - DNA, 120 bp, synthetic construct
  source 1..120: mol_type = other DNA
gggaatcctaaaatcatctaaaattttgttagagaaggatcaagaataaaatgtagtgccttttttccccttcccacttttttctcagcttgcttattctgtatgtacgacaccattgct

SEQ ID NO: 5040 - DNA, 120 bp, synthetic construct
  source 1..120: mol_type = other DNA
agtgatcctcctgacacagcctccggagtagccagaactacaggtgcatgctactacacaaacaactttttaaatttttcatacagacacgatctcattatgttttccaagctgttcttg

SEQ ID NO: 5041 - DNA, 120 bp, synthetic construct
  source 1..120: mol_type = other DNA
ttctcacattgcataacaaaatacgttccaagtgagtcaaatatttaacttaaaaaattatagagtactaagagaaaacatggatgaaaacttctgtactctggaagtgggctcattttt

SEQ ID NO: 5042 - DNA, 120 bp, synthetic construct
  source 1..120: mol_type = other DNA
agacagcattttcacattataagacagaatctgacatagcttcctacaaaaaggctagtagttccgttttgatgaatatggcagaggattaaagggagcccatggattctggcaggagtc

SEQ ID NO: 5043 - DNA, 120 bp, synthetic construct
  source 1..120: mol_type = other DNA
gaaaaatccacacggtctgattggtgttatgtatatcaggcaacagatttttctactctgattgttgcttttcatctggcagttgtggcagattgctatattttgcctgggaggctactg

SEQ ID NO: 5044 - DNA, 120 bp, synthetic construct
  source 1..120: mol_type = other DNA
gtatctgcctaattgcccttccttccactcagcaccactgtcaagataatggcattccatgttttactttactttgctcatgtagacctgactagagtaaatcaatctgtccactgtcaa

SEQ ID NO: 5045 - DNA, 120 bp, synthetic construct
  source 1..120: mol_type = other DNA
tgagatcagataatgagttaaaaattcatttaggatgagctgaatgtcagagcataaaagcctcaactctaacctgcagtggaagagccagaggtgagtgatttacacctaaccctctgc

SEQ ID NO: 5046 - DNA, 120 bp, synthetic construct
  source 1..120: mol_type = other DNA
tcgaatattagatcgagccctgggtttggtctcaggagatctgaattcaagggctgtctctgcttccccccttcccctttctcctcggccctccctactatctgctaggttttaagattt

SEQ ID NO: 5047 - DNA, 120 bp, synthetic construct
  source 1..120: mol_type = other DNA
ttgaattcccaccacacccagcctccttgtgtgaatttcttacttcttggaacctcagtttcttcctctataaaattggagctattccttagggcttctgagagaattgaattcacacca

SEQ ID NO: 5048 - DNA, 120 bp, synthetic construct
  source 1..120: mol_type = other DNA
gccttggcagcctatggatttctgccattctcctggcatgaaatcactccttcttgttgttttaatttgcatttcttcagttaccagcgcagttgagcatcttttcatacacttactgac

SEQ ID NO: 5049 - DNA, 120 bp, synthetic construct
  source 1..120: mol_type = other DNA
gaaaggttcaagatacctttagaaagctggtattcaaactagtccaccatgtaccagatgagtgaccttagacagggaaccattctgggcctcagttttctcatctgtaaaatggggcaa

SEQ ID NO: 5050 - DNA, 120 bp, synthetic construct
  source 1..120: mol_type = other DNA
aattagtccctcttgcaacatcctcctcttcttctgtccccccagttgattccagctgtagtgatatggaaggttcctggagtagaagggcagtgggttttggagtagggaaaggatttg

SEQ ID NO: 5051 - DNA, 120 bp, synthetic construct
  source 1..120: mol_type = other DNA
ttgaacttgttctgtcgccatcattcaacaaagttgaccattccttcttctttccccctacttggtggctgctcttttttagtatcttttcatcatcattcccccagtaccagatctcta

SEQ ID NO: 5052 - DNA, 120 bp, synthetic construct
  source 1..120: mol_type = other DNA
cacccctccaagacagtatagctaggactggctctgaatggagaccctccctctgtcaactgccttgttgggtccaagttgtctgcagccttgtccagccaagactgaggccttgttctc

SEQ ID NO: 5053 - DNA, 120 bp, synthetic construct
  source 1..120: mol_type = other DNA
aagaccagggctctaggctcagttctttttggtgaccctgcacaaatcacttgatctctgtgcctcacttcccttgattataagatgaggaagttgaactcagtaatcttaaaggagaaa

SEQ ID NO: 5054 - DNA, 120 bp, synthetic construct
  source 1..120: mol_type = other DNA
gggaggaaaaacaatccaggccttttggaggttctaaataacagacagaccagttgaattgttagagaggatgactcaagtttctaattcagcacatggacagatgctcatagcttcagt

SEQ ID NO: 5055 - DNA, 120 bp, synthetic construct
  source 1..120: mol_type = other DNA
atacacttgtatatacacttgtatacatatacacatgtatacacatgtacgcacatgtgtgcgtgtatacacatgtacgcacatgtgtgcgtgtatacacatgtacgcacatgtgtgcgt

SEQ ID NO: 5056 - DNA, 120 bp, synthetic construct
  source 1..120: mol_type = other DNA
cctgtgtcgctattctctactggccccatctctctttccttttgcacataaggccaaattcacattaggagaataagacaactcctaagaaatgcaggcatgtaaatacctgctgcaata

SEQ ID NO: 5057 - DNA, 120 bp, synthetic construct
  source 1..120: mol_type = other DNA
aagaaactgctctgcactaggacttgtctcagagcctatagaggctaccagagttaagatttgtaggttcctgaaaatgagagtttagtggaccattttgaccttctctccataatgaca

SEQ ID NO: 5058 - DNA, 120 bp, synthetic construct
  source 1..120: mol_type = other DNA
ggggggggggtcccaagactaccaattaggtttgatgatatactagaagaaaaagctgttacactcattccagattaaggccaagaaaggaaaaaggttggagtcaaagagaaacaaagt

SEQ ID NO: 5059 - DNA, 120 bp, synthetic construct
  source 1..120: mol_type = other DNA
aaattaatatttctgggttctaccacccacatctattacaagagggggtggtaccagatcatatctgataatccaaatcacctgggaacaggtatataggtagtatgcatgtgtgtgtgt

SEQ ID NO: 5060 - DNA, 120 bp, synthetic construct
  source 1..120: mol_type = other DNA
cctattagtagtgcttggccattttctaatgttttgattaaaatgctacttgtctcttatccctacacctcaatgtcttgatattcctccccccccccaccccactacataaattgagct

SEQ ID NO: 5061 - DNA, 120 bp, synthetic construct
  source 1..120: mol_type = other DNA
gaggtatcaaactcagtgctttcctgttagagcagaatggaaaactgaaccaaactcagctgatgcccgtccccagaggcagcatttaaatcagccccaccagaaaaggaattgccaatc

SEQ ID NO: 5062 - DNA, 120 bp, synthetic construct
  source 1..120: mol_type = other DNA
caccgcgcccggccatgaacttctaataaaataacacatatttttccagagtagaacctgccttttgtcaccattcacattctggtaagttgtaagtccattcctggcagtaacaacctt

SEQ ID NO: 5063 - DNA, 120 bp, synthetic construct
  source 1..120: mol_type = other DNA
cttgagactgtgaacagatcctactttggtattctcaacaatttaagcctgcaaaatggagtgaaatattctggtcattgttagactcatggaggcatgggtcatagctggggagggtgt

SEQ ID NO: 5064 - DNA, 120 bp, synthetic construct
  source 1..120: mol_type = other DNA
cactcccttctgcaaccctggatggtgtcataagaaaagactctagtacttgaccccttgatagtatcatctgaaatttaaaagaaaattcaatcttgtcccagggagacagtgtctctc

SEQ ID NO: 5065 - DNA, 120 bp, synthetic construct
  source 1..120: mol_type = other DNA
aaaaaaaaaaaaaaagatcaagagcaggaacatgcaagaccttttggagaagcctaggatcagaactggcatagtgtcacatctgcctcatgaatgtctcatctgcctcaacagtcccaa

SEQ ID NO: 5066 - DNA, 120 bp, synthetic construct
  source 1..120: mol_type = other DNA
tcacccattacaatagaaaatcaaataccataagaaaaagaataaaaagtggagacgtggccattttgtgggaacagaactaaagtttcaaagggatggggcataaaactgtttttctct

SEQ ID NO: 5067 - DNA, 120 bp, synthetic construct
  source 1..120: mol_type = other DNA
agggagaaagaaagagaaggagaaaggggtgacaaagtggcagggagaaaggaaggaaagaagaggcagaaggctgtgtcaaaattgtcctgaaatcagttttgtctcttcttttaattt

SEQ ID NO: 5068 - DNA, 120 bp, synthetic construct
  source 1..120: mol_type = other DNA
taagatgtgttcaactatagttcaatttaccgtggagaattcctctaattgcccatgcactatggtatttaggacacactaggcttgtccgaaccagcaacatcactctcagttctcagt

SEQ ID NO: 5069 - DNA, 120 bp, synthetic construct
  source 1..120: mol_type = other DNA
gcacgcctcccctctctgaatctctgcgaattttcacttataaaacagtaacaactctctcaaggtcatcaaaaatggcagaacagtgttcccccatctctgaaaaatatgaatgtgaga

SEQ ID NO: 5070 - DNA, 120 bp, synthetic construct
  source 1..120: mol_type = other DNA
ccactttgcatcctccatccacaccatttgcttggggccttgcaattccaagtaccaagactccttttggatgctttattttgaaaacatgaaaaattgtctttctgctgacaaagctca

SEQ ID NO: 5071 - DNA, 120 bp, synthetic construct
  source 1..120: mol_type = other DNA
caaggaggaacgtctgacccgtcaagccccagaacttacagtaggctttaggctgtttcctctgtgcataattgttgagtcttcactgtagtaagtcgaattgattattgagcttttttt

SEQ ID NO: 5072 - DNA, 120 bp, synthetic construct
  source 1..120: mol_type = other DNA
acttgcctgagatcacacagatagttactggcaatacccttacctacaaaccccgtcttggactttggtatcccagtacagtttcctcagagcaaatttctgtaagcacaagtcataata

SEQ ID NO: 5073 - DNA, 120 bp, synthetic construct
  source 1..120: mol_type = other DNA
catgctcacaccatccatcagcactgacaccatccattagcatgctcacaccattatttttctcatagcaaagatatttatttgtacccagaaaacaagggatacatctagaggatgaca

SEQ ID NO: 5074 - DNA, 120 bp, synthetic construct
  source 1..120: mol_type = other DNA
gctatttaaaagtttggtataatttttctgtcaaaccatttgggcctggtgcttttggggcatggggtggctctggtcttccttcttagctggaaatgccagttttgttttgtgtgtgtg

SEQ ID NO: 5075 - DNA, 120 bp, synthetic construct
  source 1..120: mol_type = other DNA
ccatagggttttatagttgtacatttgtgtccttttccctgactcaactccagtagcctgaagaatagggatgaaagtatcctattcatctgtcgcaagcctggcatgatctatgtgctt

SEQ ID NO: 5076 - DNA, 120 bp, synthetic construct
  source 1..120: mol_type = other DNA
atgggtctctgctcttccccttgctggcacagataataagagaatattgctctttcttatcataatttgttattattttgaattcttttcataagcagctagcagccggacggatccttt

SEQ ID NO: 5077 - DNA, 120 bp, synthetic construct
  source 1..120: mol_type = other DNA
ctccctccccccaccccccttctccctccctatcataatgatattgacaaattgccctctatagaggtggtataaatttacattcctaatagcaatgtatgaaagtgcctatttcctcat

SEQ ID NO: 5078 - DNA, 120 bp, synthetic construct
  source 1..120: mol_type = other DNA
actcatctgaataaaattaactagttttgctaggagacataaagactgaataagtgcggaaacatattctgtgtatagatgggaaaacttcacacttttatagaagttggttttccccaa

SEQ ID NO: 5079 - DNA, 120 bp, synthetic construct
  source 1..120: mol_type = other DNA
cttatgaaatagagtagcactttctaactttaaaacggggaataattctttggatcttgattattggaaaagtgaattatgaattgctagtataaaactgtggttttaaaatatgtctgc

SEQ ID NO: 5080 - DNA, 120 bp, synthetic construct
  source 1..120: mol_type = other DNA
cagcagttaaaataaagaaactaatctacacgagtaaacattgttaagtctcaaaaatatgaagggacatgatggggcttctggggtactgcgatgctgtttgtcagcctgggtgctgct

SEQ ID NO: 5081 - DNA, 120 bp, synthetic construct
  source 1..120: mol_type = other DNA
atgtcaatttaattcttgggaccattcaggaccctaagaggatgaggtagagttttgcagtccctacagtattcacaggagaatggatattggtggagaacttgaagtctctgccaaatg

SEQ ID NO: 5082 - DNA, 120 bp, synthetic construct
  source 1..120: mol_type = other DNA
ggctgggagcctaggaagcgctgcagggcggtgaagacgcggtccgctctgggaagttaagagatggcgtccataaagcacatctcccaagccgaaacacacaagcactctctctccccg

SEQ ID NO: 5083 - DNA, 120 bp, synthetic construct
  source 1..120: mol_type = other DNA
gtgaagtcagagaaaggggggttgtgtgaggccacaggaagaagcagtgtgaagccacaggaaggggctgtgtgaatcacaggaagaggcagtgtgaagttacagaaggggctttgtgaa

SEQ ID NO: 5084 - DNA, 120 bp, synthetic construct
  source 1..120: mol_type = other DNA
gacaatgaacacatctgggctcttctgccaaaacacagatctcttccagcatcctttatctcaataactggccctcctccagtacccaagccagaaacctacagtcactcatgatatttc

SEQ ID NO: 5085 - DNA, 120 bp, synthetic construct
  source 1..120: mol_type = other DNA
caaaaaaaaaaaaaaaaaaaaaaaaagaggctagcagccctccaagacagaagtctctccctagcgtgggcccttccttggcctgtaatcttgcctctgagtcccccaaactcttcctca

SEQ ID NO: 5086 - DNA, 120 bp, synthetic construct
  source 1..120: mol_type = other DNA
ctttgtattctttgaatttctggctaagtcttcctgtacaccccccatatttctttgaaactcctctcagtgcagttttctgcacgttccaacctgccaggtaatctatccatttcctta

SEQ ID NO: 5087 - DNA, 120 bp, synthetic construct
  source 1..120: mol_type = other DNA
ggcgtgagccaccgcgcccggccgctttatttcatacatttggtatattgtatttttgttttcatttgtctcaggtattttctaagttctcttgctgggattttttctttgaaccagtgg

SEQ ID NO: 5088 - DNA, 120 bp, synthetic construct
  source 1..120: mol_type = other DNA
gtcaatacagcccagcagactaaagtcagttttccaaaaggactctggaattcagcaaaatgaatggaaggtcctttacagcgtactcactccaccattgtacagatggcagcactgagg

SEQ ID NO: 5089 - DNA, 120 bp, synthetic construct
  source 1..120: mol_type = other DNA
gcccaaactaggtcatgtcctgaagggaacaattagtatgagtgtctgggactctttcctatttcaactttacctgctttagtgtacaaaagaacccgagagatcatttaatccgggttt

SEQ ID NO: 5090 - DNA, 120 bp, synthetic construct
  source 1..120: mol_type = other DNA
gagactatgaccacgataatccttcagatctctaaaacacctaatgacagtattacagtaagaacttgagcagctcagagacaaagagatgcacaaacactccagggtagcagaagacag

SEQ ID NO: 5091 - DNA, 120 bp, synthetic construct
  source 1..120: mol_type = other DNA
tcgatactgaagggtctggggtcctgaggagtctcagtcccagagttaggcttttggtcgatcgggagttggtctgtcaagggcctggtcttttgtgggtgatgctgacacttggggtct

SEQ ID NO: 5092 - DNA, 120 bp, synthetic construct
  source 1..120: mol_type = other DNA
cctctctagcctcttcctgagctcttcatttcctgttccatccaccatactcaatgctcttgcccatctcagggcaatcatacatgctgttttctccaccaagaaagctgcaaaccctcc

SEQ ID NO: 5093 - DNA, 120 bp, synthetic construct
  source 1..120: mol_type = other DNA
caatttcccctttcatccccagagggttgtctctgttgatttcggcttcatactcatctttgagaaagtagtcagtcagtggtgcagtgttgctcaaacactgaaacagaacatgatgag

SEQ ID NO: 5094 - DNA, 120 bp, synthetic construct
  source 1..120: mol_type = other DNA
acccagcatctgcccctgcatgtacctgccctcaccttggccccagcctggccccttgtagcttctgactgaccttgtaaagaacaaactcctccagggccttttctttacaagtttaat

SEQ ID NO: 5095 - DNA, 120 bp, synthetic construct
  source 1..120: mol_type = other DNA
tctagatatgctggacaactcacccttttccagacaggactataatgttcttacctttattgctttactcagggtgttgttatatcattggaatcccatgattccctttctctgcttggg

SEQ ID NO: 5096 - DNA, 120 bp, synthetic construct
  source 1..120: mol_type = other DNA
tacagtagccacaatgattctttcctttacaaaactgtagcaaactcttgtctgtctcagcatattaaagtgtttcttctgaaaggacaggaaatgcaaatatcatagctgcaaagctta

SEQ ID NO: 5097 - DNA, 120 bp, synthetic construct
  source 1..120: mol_type = other DNA
aagagaattttgaaagcagcaagatgaaaaggacttgtcttatataagagagcctccataaatctgctatcagcagatttctccgccaaaaccttgtaggccagaagggagcaggatgat

SEQ ID NO: 5098 - DNA, 120 bp, synthetic construct
  source 1..120: mol_type = other DNA
ccagaaagaggcggtctcggtactcatctaggtacatggcctggaggttcagggagccctgggggcccagaaagatggcagagcggttggcagacaggaggtctaggaggatgtatgggg

SEQ ID NO: 5099 - DNA, 120 bp, synthetic construct
  source 1..120: mol_type = other DNA
acgcacccaaacagggcacatgcacacaaacacggcacatgcacccaaacagagcgcacacacacaaacagggcacatgcacacaaacagggcacgcaggggctggtacctcggtaggag

SEQ ID NO: 5100 - DNA, 120 bp, synthetic construct
  source 1..120: mol_type = other DNA
taagtcttattcattttcaaaatggattagactatccaagtttccccagatcactctgggccaggatttggatcaggatctgtgatcagcatcacaacactaccttgccattgttgctaa

SEQ ID NO: 5101 - DNA, 120 bp, synthetic construct
  source 1..120: mol_type = other DNA
agctagccacggagctgtcagcatgactcagcacttccacatgccagcaggccaggagcactccctgcagcctctcctgcctcatactgctcttctgtggcctccaccacaggaggtggt

SEQ ID NO: 5102 - DNA, 120 bp, synthetic construct
  source 1..120: mol_type = other DNA
ctggaatttctgaggaatgaagcatatttttgaacaggactctaatcagtaaccaaaaatagccgtgacacatcggcttctgagtctgccaactgcatatactataaagagcaccactgg

SEQ ID NO: 5103 - DNA, 120 bp, synthetic construct
  source 1..120: mol_type = other DNA
ggtgtatccacgctgtctacactactcacccattagtcaggcggctcaattatcagatctgctgttgtggtatggcagtgcttatgttcagataacccttattttacttaataatgcttt

SEQ ID NO: 5104 - DNA, 120 bp, synthetic construct
  source 1..120: mol_type = other DNA
atgaaatgcctacacctgtgaaatctgccatgtgttgtgaaggccagccatttcacactcgtggagtcatcactgagaaagaggctccccagggactggtttctaagatgagaggtcagt

SEQ ID NO: 5105 - DNA, 120 bp, synthetic construct
  source 1..120: mol_type = other DNA
tttttctctctctctgccttttgggaggagggattttaatcctacacatgcgcaatggaagaagaaactatgccactacccaaagtgtttccatctgccttatgtttttataccttgcca

SEQ ID NO: 5106 - DNA, 120 bp, synthetic construct
  source 1..120: mol_type = other DNA
tgttttatgaaaaacttctttgtgtgatagttttcatctggtattctcccaaggaggccactcccctatttttgcagcttggttttccaagttctgagttaaagcagtgtttgcccctgc

SEQ ID NO: 5107 - DNA, 120 bp, synthetic construct
  source 1..120: mol_type = other DNA
attaagtattattttcatttgagttacatataaggcaggattacagaatttgctaggccttgaatctaagggagacactgccagcggccacactagtttctgccacactcattttggcct

SEQ ID NO: 5108 - DNA, 120 bp, synthetic construct
  source 1..120: mol_type = other DNA
atatagcaaaataactgtattgtattcttaagtgacagctgcattctttaggtcattccttagttaaacaaaagtggaggtggggaaggagacacagcaattgtcctgatatggaggcac

SEQ ID NO: 5109 - DNA, 120 bp, synthetic construct
  source 1..120: mol_type = other DNA
gagtttacagtcttgtcaggcctgttacatgaaacagtattgattaggaaaaaaggcaaagaatgggacctgaatacactgttgactccctagtcaacagatgttatctctcctgctgtg

SEQ ID NO: 5110 - DNA, 120 bp, synthetic construct
  source 1..120: mol_type = other DNA
gtatactcatctaaacaatggagctaacaatagtacctaccttataggattgttgcaagaagtataggcgataagaacaatgtctgtcagtgtacagtgtataatatttgctaccattac

SEQ ID NO: 5111 - DNA, 120 bp, synthetic construct
  source 1..120: mol_type = other DNA
cacacacacacacactcaacgatttttcttgctttgtcatacctgtttagcaaaacgcatacctctttgtctttagttttccacccactttgtgccaccacctttgtaactatacatggc

SEQ ID NO: 5112 - DNA, 120 bp, synthetic construct
  source 1..120: mol_type = other DNA
acagacttaatttggcttccttttggaacttggaattccagtcccctcttgtctgcatggtaaacttgaactcattcttgaactttggcttaactgttgtcttctctgtgaaagcatccc

SEQ ID NO: 5113 - DNA, 120 bp, synthetic construct
  source 1..120: mol_type = other DNA
tcaagacagaaattgctccccttttaagatttctcattgtccatacactcagaaatgagaagagggattttctcattctgatcctaaatctatcactgaaatgatgacttcacttgcatt

SEQ ID NO: 5114 - DNA, 120 bp, synthetic construct
  source 1..120: mol_type = other DNA
tatatcttcttttcatgtctacccaataagggtcaaacagacaatttccccaaagtgcatttatgcacagaaaatggaattcaagtggtcaggcgaccacttgacgattgagctggtcct

SEQ ID NO: 5115 - DNA, 120 bp, synthetic construct
  source 1..120: mol_type = other DNA
ctttgcctagcacaaggttaagcaatttataaggaattcaccctcacaatggtgggcgtgaaattctcattgcttacagatgaggaaactgaggctcagagaggttaatcgacttttgaa

SEQ ID NO: 5116 - DNA, 120 bp, synthetic construct
  source 1..120: mol_type = other DNA
tgctgatgcctaacaactagtgttctaatttcacaactaaatgaatcctatccacagacagaaatctaaatcaagagcccccatgcatttccatgaagagacatctcttcttcagcagct

SEQ ID NO: 5117 - DNA, 120 bp, synthetic construct
  source 1..120: mol_type = other DNA
gtccttgcgatagtttgctaagaatgatggttttagctgtgatatgtaaaacctgagtcgccttgtctcctgagtcaaagtctttttgggatatttagggagtttctaaagggactcagc

SEQ ID NO: 5118 - DNA, 120 bp, synthetic construct
  source 1..120: mol_type = other DNA
tcttaaatctggtatagcctatgtatctgtgggccatctttggctcatgacctgccattttgccacctttgatttttaccatgtagtggcactatgtcttactagaacaacacagacagc

SEQ ID NO: 5119 - DNA, 120 bp, synthetic construct
  source 1..120: mol_type = other DNA
ccctggccagggcctgatgagagccagtcagtacattctttttttcctacagttcttgggtttcaaacttcagtttcagggaatttcaagtcaacaacaggtagaatgaataaacttggt

SEQ ID NO: 5120 - DNA, 120 bp, synthetic construct
  source 1..120: mol_type = other DNA
cattgttaagctctgagtgtagcagggagagtgagacctgcctgattgtcaacactaggaaacagaccgaccacaaaaccatcacctgtttggtagataaaactttgaataacaaaggat

SEQ ID NO: 5121 - DNA, 120 bp, synthetic construct
  source 1..120: mol_type = other DNA
cccgcatatgactagcacaagcaattgttcacaatcgttgcattctactgccagaatctggaataagagaaagaaactttgatgtgcccggacaggccagacccttaagtatataataca

SEQ ID NO: 5122 - DNA, 120 bp, synthetic construct
  source 1..120: mol_type = other DNA
tacccgtgttgctccaattcaaatttgtgacaagtaaccagttattataggattatgctggacaatgagatacaccccctcccatattgttctaaatagatactttatacagaaaactca

SEQ ID NO: 5123 - DNA, 120 bp, synthetic construct
  source 1..120: mol_type = other DNA
acagtatctcctcctgatgattaacaattttgtatagcttaccaagagcaaaccctacaccacacccactgtcccaggaagagaatctcatcagggaaataaactagcaatagacaagga

SEQ ID NO: 5124 - DNA, 120 bp, synthetic construct
  source 1..120: mol_type = other DNA
aaaatgagaaaggagagaaaactagccagaccatactttccccaggtagcagcccaggtatggtttgtgcaatgcacttttatttttagatggctagatggctaggtggcacatttattt

SEQ ID NO: 5125 - DNA, 120 bp, synthetic construct
  source 1..120: mol_type = other DNA
gtgcataagaaattatgaacaatgcatacgtgaagataatttgccagacatccatccaaccattcatctattcatccaattgcctacccaccaacccacccacccatccaatcatccatc

SEQ ID NO: 5126 - DNA, 120 bp, synthetic construct
  source 1..120: mol_type = other DNA
tctgcttttctttctccctttcctttcctctcctttcctttcttttcctttccttacccttcccttcccttccctttttcctttttccttttccttcctttctgcttttctttctccctt

SEQ ID NO: 5127 - DNA, 120 bp, synthetic construct
  source 1..120: mol_type = other DNA
gtgacagacactgtatggcctgcaatgctgaaaatatttactgtctacccctttatggaaaaaatttgccatgccctcccctctgtgtgggactttttaccagaggtttctgattaaaac

SEQ ID NO: 5128 - DNA, 120 bp, synthetic construct
  source 1..120: mol_type = other DNA
gtggagtttttactcaggtgtactctaaatgtgcattaaactgcagctccattaagcagttacaatgaaggtaaagggcacaaggctaaacaccacaggaccttgtatggatctcatagc

SEQ ID NO: 5129 - DNA, 120 bp, synthetic construct
  source 1..120: mol_type = other DNA
ctgaagtggttcaaatgaacaaactcctacttgctcctcaaagaaaacacgaagagctttcagaaacatctcctctgagagatgcaagagaatatgagtaaattacaacaattaaaaacc

SEQ ID NO: 5130 - DNA, 120 bp, synthetic construct
  source 1..120: mol_type = other DNA
tttcccactttatattttaaattgtctaagccatcaagtggcagtccctggaattgcatgaagagagcttaggaggcaaaaacccattcggaaggaacgagatctaactggattccaaag

SEQ ID NO: 5131 - DNA, 120 bp, synthetic construct
  source 1..120: mol_type = other DNA
acacttcatccatatgacacaatgctgcgctgccattacaaagaatgatacatacctacattaatgatagagcagaatggcacacacacacagacatgcccacacacacatatacacaca

SEQ ID NO: 5132 - DNA, 120 bp, synthetic construct
  source 1..120: mol_type = other DNA
aaatattgagctaaaatttggtgaaaccctcaaaataagactttccgaggaactcgtcttcaagaatcaccgtcattgaaagacagctaaatcaccccacggtgcctgatctcactcacc

SEQ ID NO: 5133 - DNA, 120 bp, synthetic construct
  source 1..120: mol_type = other DNA
ccagtcctggaaatggctaagatgttgtactcaatgcatatctaggagaaggtatgtgcttcctgaggaatttgaacccaatttgattcagcaatagagtacacttagatggatgagtgc

SEQ ID NO: 5134 - DNA, 120 bp, synthetic construct
  source 1..120: mol_type = other DNA
gtgttctactgtgctggtgttaaattctcatagcactttgttgttaattgcctcatatgttcttccttatgggataccttcaacttgtcttttaagactgttcagatggcccccattcaa

SEQ ID NO: 5135 - DNA, 120 bp, synthetic construct
  source 1..120: mol_type = other DNA
tcccagctgtttttaaaaatgttttgcagagatgaggtcttgctattttgcccagctgttctcaaattcctgggctcagaccatcctcctcccacctcagcttccccaaaatgctgatat

SEQ ID NO: 5136 - DNA, 120 bp, synthetic construct
  source 1..120: mol_type = other DNA
gttgccatccaagactttcattgttgtagagatgacagtgcctggcttaaaagcttcaaaggacaggctgattttcttggcaggagataatgcagctggtgattttaagttgaagccaat

SEQ ID NO: 5137 - DNA, 120 bp, synthetic construct
  source 1..120: mol_type = other DNA
ctcctctgctgcctgtcaggccatctgcagataaaatggttcagaatgaatcgccaatttgttttttttttttttttgcgcacacacacacgtactatatatatatatttatatgagcca

SEQ ID NO: 5138 - DNA, 120 bp, synthetic construct
  source 1..120: mol_type = other DNA
gaaagcagaaatcatattgacctgacatctcttgctctttccttttcttttctcccttgatttactttgcaaaaaatgctttctgggttatcataaaaccctttgttttcattacattgc

SEQ ID NO: 5139 - DNA, 120 bp, synthetic construct
  source 1..120: mol_type = other DNA
ttttatgtaattatgtatctacagatacataaggatttccttctgtagatgatagtaattttatacttttgtacatgaaataaagcatttaaaatatctcactaggtcctcagtttcctt

SEQ ID NO: 5140 - DNA, 120 bp, synthetic construct
  source 1..120: mol_type = other DNA
tcagagagaaaatacctcactttgtgctattactgactgaaaaataattctaggttgacgtacaccttaaaacattattgaatgtgaacaaagaatgattaaggcttttagcaggaggtt

SEQ ID NO: 5141 - DNA, 120 bp, synthetic construct
  source 1..120: mol_type = other DNA
tagtttctgattcagcatgttttggttgtttttataacataacatgaatttctgttatgcataatacaaattgacaatgtcgaaaaagcagcatttcagaagcctggcaaatgccataac

SEQ ID NO: 5142 - DNA, 120 bp, synthetic construct
  source 1..120: mol_type = other DNA
ccccccccacatggagatgtctttaagtcggtctgaagttctggcagaaactaaggactgaagatttacacttgggaattgcctacacaaaatggatatttaaagcaatgggaacagaaa

SEQ ID NO: 5143 - DNA, 120 bp, synthetic construct
  source 1..120: mol_type = other DNA
cataagagactttagccctaggggaactgttggacctgaactctgcagggttgtcttgcctatcaaacaaggccagtctgacctgaccatccttggtctgtggccactcccagggccgca

SEQ ID NO: 5144 - DNA, 120 bp, synthetic construct
  source 1..120: mol_type = other DNA
ctcatgtacctactcatgggaagaacatctaaggcaaatgaaaaattcccctccagggacataaccagctcagaaccatctgaaaaaattcatacaaaagcagaaattacccaaggcctg

SEQ ID NO: 5145 - DNA, 120 bp, synthetic construct
  source 1..120: mol_type = other DNA
tgtacacctgtaggtacctactctttattgaatgaatgataaaaatatctttgttcttttagaatgtagtagtgaaaggaaagacaaaagcatccgttctgttcaaaggatgattagcaa

SEQ ID NO: 5146 - DNA, 120 bp, synthetic construct
  source 1..120: mol_type = other DNA
agctgctgtctttacccagaaatcctgagtgggctcatctcttcacaccttgtcaacaatgggtgcttttctcatttatttagtaaatggatttccctgaaatccgtactatgttctaat

SEQ ID NO: 5147 - DNA, 120 bp, synthetic construct
  source 1..120: mol_type = other DNA
ttccagacatagaaaaatgagaggtctaacagctcaataactcattgattttgagttccattcagcattacctgattttattttgcataccaatgtttatggtcttagttatcctcaagt

SEQ ID NO: 5148 - DNA, 120 bp, synthetic construct
  source 1..120: mol_type = other DNA
cattagagggtgaaccctactgtgaactgtgcatgcgagggatttaggaggttgtgcgccccttatgagaatctaactaatgtctattgatttgaggtggaacagttttatcccaaaacc

SEQ ID NO: 5149 - DNA, 120 bp, synthetic construct
  source 1..120: mol_type = other DNA
ctgaggaaactggaacaataggaagagacaaaccattctatgtttttaattagtttgtacatgataggtggcctcaactgtcaaaagcctatagtaagtgaggacccagactggggctga

SEQ ID NO: 5150 - DNA, 120 bp, synthetic construct
  source 1..120: mol_type = other DNA
agtaagagtgtgtgtgtgtgtgtgtggggggggggggcggtgtatgaattcctgtgctaagattcagatctttgaaactgttttctagaatgttatcctacatgtctaaaactttttttc

SEQ ID NO: 5151 - DNA, 120 bp, synthetic construct
  source 1..120: mol_type = other DNA
ggaggctaacagaaaaatcaatgggtgggcataaagagaaagaaatcatatgaggctaccacacatattctgttactgaatttctttcacctaaatatacaatggaatgctctgaattgt

SEQ ID NO: 5152 - DNA, 120 bp, synthetic construct
  source 1..120: mol_type = other DNA
taatgaagacatatcaacattggtaactgtcagagtgagaaaaggaaattgaacattcaatgtgaccagaggaagggtgaacatgggagatactgcccaggaaaagtgctcatgatgagt

SEQ ID NO: 5153 - DNA, 120 bp, synthetic construct
  source 1..120: mol_type = other DNA
taccacctctccaagcgtttcagctatcattgttttttaactgcctctataatatacaatatgcagccaaatatttggagatattttggtcaaaaggtatgttagcaacaacaatagaaa

SEQ ID NO: 5154 - DNA, 120 bp, synthetic construct
  source 1..120: mol_type = other DNA
ccacattttcttaatccagtctatcattgttggacatttcatctttttaaaggacactttcttccttacacctgcaccgaaaccggcagtgacattccatctatagaactggaggaggct

SEQ ID NO: 5155 - DNA, 120 bp, synthetic construct
  source 1..120: mol_type = other DNA
cagacagcacatctagggtggtgcctagaagcctgtattctgacaactataccaggcaattgctcagtctgggtaaaattaacagtttagagaacatatgcaaaagttaccttcattcct

SEQ ID NO: 5156 - DNA, 120 bp, synthetic construct
  source 1..120: mol_type = other DNA
aagcagctatgagcggagacagccaaatctatgccagcctcggcaaacgccgattcgtccgcagtcacttccggcagtcgctctaaaaagtacaggaagtcctgcttctctctgacaggt

SEQ ID NO: 5157 - DNA, 120 bp, synthetic construct
  source 1..120: mol_type = other DNA
agagattatgagaaccaaaaaattataactctctagcaagaacaaaggaagggcgtttgctgagtttgtcctttgtgctaggctgtgctgacgcactttattgctctaagcaatgctacc

SEQ ID NO: 5158 - DNA, 120 bp, synthetic construct
  source 1..120: mol_type = other DNA
catttacacctactgccaaaggatttaaataaaaagagagtagaaaacaaggaaatgggttgggaggagaagacagaaaataaacataggagacagggttccaaaggccctgccaccatg

SEQ ID NO: 5159 - DNA, 120 bp, synthetic construct
  source 1..120: mol_type = other DNA
gtagcagctccttcagaacagggatctgtatggtaaggctttttagtcccacactcttcctaatagtagcttatgtgcaaactgactagcataatgcctgacacttctgtagatccataa

SEQ ID NO: 5160 - DNA, 120 bp, synthetic construct
  source 1..120: mol_type = other DNA
ctatgatccagggcctgctgcccttttatcataaataaggttttactggaacacaaccagcccaattgattctatattgtctatggctgcgtttgtgttacaactgcaaagatgagtagt

SEQ ID NO: 5161 - DNA, 120 bp, synthetic construct
  source 1..120: mol_type = other DNA
tagctgacattttgtatgaagtatatcttttgttaatatagtatgctgttttatttttaaacccagtttggcactttctatttttattgggagaatactgtctattcagtctattcacat

SEQ ID NO: 5162 - DNA, 120 bp, synthetic construct
  source 1..120: mol_type = other DNA
aaaaaagaaccagatgatggcaggtaatggtgttaagcctgagagttctccaaaacggaaaacattctgacaacatggacaacagggaacctttaccttgtgcatttccatgagggactt

SEQ ID NO: 5163 - DNA, 120 bp, synthetic construct
  source 1..120: mol_type = other DNA
agagtgagactccgtctcaaaaaaaaaaaaaaaaaagaaggctcccaccttgaattccatgggtgtgtacttttcattcttcggggtgcctccgcccttgtagtgcaaatggttgggggt

SEQ ID NO: 5164 - DNA, 120 bp, synthetic construct
  source 1..120: mol_type = other DNA
ttactcccatttctaccacagggtgatttggcaaccttgggaaacatctctttaccttttggttcctataaaatcaggatagggcttccgcatattcgatggagaagtttctagtgatca

SEQ ID NO: 5165 - DNA, 120 bp, synthetic construct
  source 1..120: mol_type = other DNA
agtcaccatgcttttcttccatgttcttttaaaatcctgtgggacagacctctgccgccagtagatagcctctgctacagattgtaaagtgctacacaaatgtcatgcaacatatttgaa

SEQ ID NO: 5166 - DNA, 120 bp, synthetic construct
  source 1..120: mol_type = other DNA
gctattatgacctgtttttaactcccagaacacttctgacacccagctatgtggagtttttttcctcataccaactgaatctctctctagacaccagctgcgtcttacaatccaattcaa

SEQ ID NO: 5167 - DNA, 120 bp, synthetic construct
  source 1..120: mol_type = other DNA
tgccaagtaactgggaccacaggtatggtccaccaagcaccgctcatttatgtacttattcatttatttttattatttgtagagacagggcctccctgcatcgttcaggctggtcttgaa

SEQ ID NO: 5168 - DNA, 120 bp, synthetic construct
  source 1..120: mol_type = other DNA
ttaaaaaaacaaaaaaaaaaaccatcagagtctgactcaaacagaggaatgttcaaggttttcttccagaatgaattccaggctgctgcagtgtctgcctttggtcagacagacacagct

SEQ ID NO: 5169 - DNA, 120 bp, synthetic construct
  source 1..120: mol_type = other DNA
ctgtctctctctgattgtttgctctgggagaagtcagttaccccttgtcttaaggatactaaaacagctctcaggaaagaaccacatggaccactgaggcctcctaacaagaagaaatac

SEQ ID NO: 5170 - DNA, 120 bp, synthetic construct
  source 1..120: mol_type = other DNA
gatatttctttatagcactgtgagaacagactaacacagaaaagtggtactgaagagtggggcactgttataaagatacctgaaaatgtggaagcgaccttggagttaggtaacgagcag

SEQ ID NO: 5171 - DNA, 120 bp, synthetic construct
  source 1..120: mol_type = other DNA
ctcacaccacagtgcagccctggacttctggcctacttccttctcctccagcatgactctctctggaaacccaacatttcaaaactgcacatttcatcttcccctagcactaaagttctg

SEQ ID NO: 5172 - DNA, 120 bp, synthetic construct
  source 1..120: mol_type = other DNA
tttgggtcctttccattttttggctattacagataatgctgatgtgaacacatgttttcatttgtctttggtgtacaatgagaagtggaattgccatatcaagtggtaactctccatatc

SEQ ID NO: 5173 - DNA, 120 bp, synthetic construct
  source 1..120: mol_type = other DNA
tgtatcttgaaagtgtaaattcagttcaacatatatttatgcatcatgtgcctaccaagtttcatgccaggtgtggggacacagaagtgactcagggctgctgctttcatgaagcccctg

SEQ ID NO: 5174 - DNA, 120 bp, synthetic construct
  source 1..120: mol_type = other DNA
tttaatgaaattgttttgttcatcagattatttcaggagagcaagcaacaagtgagcaaaataatctgggcctggcaggactacagaggtcaaaagggaggacatgagaagccacaagct

SEQ ID NO: 5175 - DNA, 120 bp, synthetic construct
  source 1..120: mol_type = other DNA
taccaaaggatcacaggtcaccaagcatgaggaagtactgtctatacgttttaagtaagagtccaggtaacacttattgttgttgctgcttcagagaattctccttggccagaattgtca

SEQ ID NO: 5176 - DNA, 120 bp, synthetic construct
  source 1..120: mol_type = other DNA
agagactgggagggaagatacaaaaatacacagggtattaatgatgggtattttttccttttatcatctttcagtttttccaaaaattttctgcattgaatatactcactttaaaaataa

SEQ ID NO: 5177 - DNA, 120 bp, synthetic construct
  source 1..120: mol_type = other DNA
atttgagggttttgagaagagacacgcgatctcacttctgttttaacagtgccactctggctactgtgttgcaaattgactgcaggaaactagggcagaaataagaaaatcagtttggag

SEQ ID NO: 5178 - DNA, 120 bp, synthetic construct
  source 1..120: mol_type = other DNA
tgacttgctccactctgcagatttccatgtattcccaacagtctgcttccaacttaagcccatttcctgctttcttcagattcttcactgtccttcagtctaatttttcctctatctctt

SEQ ID NO: 5179 - DNA, 120 bp, synthetic construct
  source 1..120: mol_type = other DNA
tcaaggagagggaattacacaaaaacatgactactagagggtgagagttataggggccaccctagggtgtgaccatcataatttaggtgaaggaagaaactataagcactttcatctgta

SEQ ID NO: 5180 - DNA, 120 bp, synthetic construct
  source 1..120: mol_type = other DNA
tgtgtgtgtgtgtgtgtgtgtgtatctccaacaaaacatgccaaaaccagaattgttttttccactcccttctcccatgtgcacccatgtgacaccacagtgtcttttgtttctataagt

SEQ ID NO: 5181 - DNA, 120 bp, synthetic construct
  source 1..120: mol_type = other DNA
gaatactagattcattcatttcagggctactcaactgtagtttcagatcaaccccttaccagccccgtggccttggataagttagcaaatccctctgttttctcttctaaaaaatgagga

SEQ ID NO: 5182 - DNA, 120 bp, synthetic construct
  source 1..120: mol_type = other DNA
acactgcccaacatcacacactgagtttcttagacttggcccaggcatgtgtactgactgctgggtgggctggttaaaatattttcagaagtacacatggcaccccagtctataaaccac

SEQ ID NO: 5183 - DNA, 120 bp, synthetic construct
  source 1..120: mol_type = other DNA
aaaatatccaagaaagcaaaggaagtgatcaagtgtccactggaagagaagtccagtgagacagggagggacaggaagctgcataacagggctagggggcctcatataactaatgaccag

SEQ ID NO: 5184 - DNA, 120 bp, synthetic construct
  source 1..120: mol_type = other DNA
catagagatgggagaaggcggaaaaagggctttttataaccaaattatctctgtgcattcatctaccattatgttaatgcatcgcgaagcccggcagatggtacaaagtcaattatgctg

SEQ ID NO: 5185 - DNA, 120 bp, synthetic construct
  source 1..120: mol_type = other DNA
gggcctttcaggaacacaacaaggaccaaggaaagggaatcccaaggagccagccttctgaaagttggaaccagctaacaagaaaatgtctctctgggaaagtagtaagtgcctcatctt

SEQ ID NO: 5186 - DNA, 120 bp, synthetic construct
  source 1..120: mol_type = other DNA
atggggagaacttgcgcattaggatgtgtggcaagcggctcatgcattttctagagggctccttggcctaaggcctgttcctgacatcctttcttttttttttttttttttttttttttt

SEQ ID NO: 5187 - DNA, 120 bp, synthetic construct
  source 1..120: mol_type = other DNA
aattttaaacagttttcaaaagtcgaccttttgacaagtgtttacttgggttaatctagggcttgcaaaatggtaaaagaaggctgctttgctccagctgagctttacccatcgctgacc

SEQ ID NO: 5188 - DNA, 120 bp, synthetic construct
  source 1..120: mol_type = other DNA
aactctggcaatcagtggggtgacagatgtctcagccagatcaccctcacatccttatttcctactatatacagttcaggctataaaattgccctctaaacaatcccacaaattttgata

SEQ ID NO: 5189 - DNA, 120 bp, synthetic construct
  source 1..120: mol_type = other DNA
gctgatggcttgcattttctcctggattccttttgttcctgaccttgacattagctacagtggtctctatgctctgagagagaaaggatggataggggacattcgtttcttggggaatca

SEQ ID NO: 5190 - DNA, 120 bp, synthetic construct
  source 1..120: mol_type = other DNA
tgttcacaattacaggtcttgtatagttaatgagctcatcagtcaaaacaccactttccaccactctatgatgattgagcccctactgtgtgcaagcaccatgtcaccaaagggcgataa

SEQ ID NO: 5191 - DNA, 120 bp, synthetic construct
  source 1..120: mol_type = other DNA
tggaatccacaccggtcatttctctgtgtattctctcacctccaaggatatgggtggagggcctttaaatctccttatgaaggaaggatcccttcctattggagtcagggctgtacatga

SEQ ID NO: 5192 - DNA, 120 bp, synthetic construct
  source 1..120: mol_type = other DNA
gatatctcagcaagaagataaaagcgctgggcttgatgactgttttgaaatggaaccatggccactgaatgccccgtccaagcctgaggcttttggaggatgggcagggatgctaccaca

SEQ ID NO: 5193 - DNA, 120 bp, synthetic construct
  source 1..120: mol_type = other DNA
tactacactaggttattcaccagcacttgacaatagatagatgttttagaaacttcgttctaaaggaaagatggatagaagttggctctgaatgaaacattaggaagtaatcaggaacag

SEQ ID NO: 5194 - DNA, 120 bp, synthetic construct
  source 1..120: mol_type = other DNA
cgtatatatatacacacgtatatatatatatggagagagagacagagtgagtgtgtgtgtgtgtgtgtgtgttttgagagcttgttttgggatctgagtcagagaatccttggatctcag

SEQ ID NO: 5195 - DNA, 120 bp, synthetic construct
  source 1..120: mol_type = other DNA
gtttcctgtggccctgatcccctatatcccctccctttttctgtgctgctttcagtctgatatccgctaagaaagaaaataacaatgcttgatagaacagtgtgtacattaacatagaac

SEQ ID NO: 5196 - DNA, 120 bp, synthetic construct
  source 1..120: mol_type = other DNA
ctcttccaaaaagtctgattataagaggaagaacaaatcacagctggaagtagacgtcaagttgaagaaagtgtttttgcttttgtcttgttaaatcaaggtataattcacttgcaaaca

SEQ ID NO: 5197 - DNA, 120 bp, synthetic construct
  source 1..120: mol_type = other DNA
ggaataattgagaatgtaattattttactttgcttcatatggtctgaaactattaacatgtttgtccttacattaagtggctttagactgttgtgcattgatagtgattttgctgtactg

SEQ ID NO: 5198 - DNA, 120 bp, synthetic construct
  source 1..120: mol_type = other DNA
catgctactgcaaccaggtgagccacatggcttgcctagcaacaaagaatgccaagaacagaatgcacaaagtgaagaattcctaattttgaatccagtgctttcaactaccagattgta

SEQ ID NO: 5199 - DNA, 120 bp, synthetic construct
  source 1..120: mol_type = other DNA
acacagaaaactggtgggtattttgcagggcagctgtcctggatcatggattattttcaatttattcttctccctgttagatcagcttccatacagccaccagttctctgcattataaca

SEQ ID NO: 5200 - DNA, 120 bp, synthetic construct
  source 1..120: mol_type = other DNA
gacggttggttttgtgcttgtctgaaaacactgtctacagtaccttgtagaagaaacagcaaatgtactacttgatctcttcattaccatctgttagttgcctggagttcaaactcttgg

SEQ ID NO: 5201 - DNA, 120 bp, synthetic construct
  source 1..120: mol_type = other DNA
tcgtccccatgttccaatgatgctgatcaactgctttattcagtttcccatctttcttcttgcccagtcatcgtagcctttctttttttaaacacatgatccctagtactcatctttgga

SEQ ID NO: 5202 - DNA, 120 bp, synthetic construct
  source 1..120: mol_type = other DNA
tcctggaatgtttcacaaacgtctttttggcctcggcaggtttcagtggcttgctcttctatgtcctgggcttgcttccctcatttttaaaataggttttagttacacacatacacatat

SEQ ID NO: 5203 - DNA, 120 bp, synthetic construct
  source 1..120: mol_type = other DNA
gcagttgtggagtcacatatacctgggtgcccgggtttaatattagctctgaccctgtgtgatctaattggatatcctagtcacactacccatatgcatgagacaggggtaaaaaagcta

SEQ ID NO: 5204 - DNA, 120 bp, synthetic construct
  source 1..120: mol_type = other DNA
aaaaaaatctgtccattgtcatttcagtaccagatgctttcattacttgggtataatggtaagtcaccaatttctttgagtagccaatttactgtattttagctggactttagcaaaggc

SEQ ID NO: 5205 - DNA, 120 bp, synthetic construct
  source 1..120: mol_type = other DNA
acataatatctatatccgaataatgcccaaatatacatctttcttctagacctcttcactgaactccagattcatgtaactgactatttacttggcatctccacttggtggtctcatagc

SEQ ID NO: 5206 - DNA, 120 bp, synthetic construct
  source 1..120: mol_type = other DNA
atcagggctttaaataggactggagaagaattggcagttggtgacagattggtcaaaggaaaggaagagaggagaatagacaacactcatatttcttggaacactgttcagctaggatag

SEQ ID NO: 5207 - DNA, 120 bp, synthetic construct
  source 1..120: mol_type = other DNA
tacgacttacacctttgtgttcttaacctcttagtaagaaatgcctgacacgtagtagactgactagaagtgtacattgaatgtttgctggttaaaggaatggaacatggacttcactca

SEQ ID NO: 5208 - DNA, 120 bp, synthetic construct
  source 1..120: mol_type = other DNA
ctcagggcttcttaattgtgacatgacttcttcctcacaatgattacgctaaggccaaggacagtgtttgcatgtaaagaaatgttccaccacttctcagttgctgagaactgttagttt

SEQ ID NO: 5209 - DNA, 120 bp, synthetic construct
  source 1..120: mol_type = other DNA
gactttttaagaattttgactaggtagaggaggggccaagctgtttagtgatgactgaactcaagctatgcttatgcagtgtgactgatgccatgttaaaaccatagtgataccaagagg

SEQ ID NO: 5210 - DNA, 120 bp, synthetic construct
  source 1..120: mol_type = other DNA
aagaatgatcagaagaaaagagaaaagatgagcctctatctttggaagagtgactcaaaagggaattgacagaatgtatgattccatgagctagataaaaccaggttgtggggggactgg

SEQ ID NO: 5211 - DNA, 120 bp, synthetic construct
  source 1..120: mol_type = other DNA
ggttggttgacttcattgttgtggattcacagatggggaggactgactgtactagccttggtttgacaacacagtttttaacatctaaggcatagataccatattttttcttgctttttt

SEQ ID NO: 5212 - DNA, 120 bp, synthetic construct
  source 1..120: mol_type = other DNA
aatacgcataaagaaaattcataattactttcttttcagatgcttctgcatgtaaattgcttaatggctgcttccccttaggtcctgccttatcagggggatcttcagggcattgccagc

SEQ ID NO: 5213 - DNA, 120 bp, synthetic construct
  source 1..120: mol_type = other DNA
gggctatgaattgcgactgagagaaaccctccaacctcatcttgaggcattttaaacctggctgccaatgttttaagactctagcaggggaaagataggaactgtagcatataaaatttt

SEQ ID NO: 5214 - DNA, 120 bp, synthetic construct
  source 1..120: mol_type = other DNA
catagctgtatctttcattttatttggagagagaggaacaaacaaccaaaaatgagcaaccattgttatttacccaaagctaagctgtttcttaatagctgtactctatctcttcagtaa

SEQ ID NO: 5215 - DNA, 120 bp, synthetic construct
  source 1..120: mol_type = other DNA
ctttcagcgctggtttgtcaaagccatttcctcctcctaacatccccatcaaatttgaaaagattctctataatgaccaagggaattacagtcctgtcactgggaagtttaactgctcta

SEQ ID NO: 5216 - DNA, 120 bp, synthetic construct
  source 1..120: mol_type = other DNA
gtgacataaagaggatttggaggattttgtgaaagtttattctggcaagcaggccttgagatacttccactataccaccctgcatcataatatcacccaagatggtaaaggtgagattgg

SEQ ID NO: 5217 - DNA, 120 bp, synthetic construct
  source 1..120: mol_type = other DNA
aaatgtgataggttataaagttcaactgtgtatttattgctgggaaattagaactcatttcttggagttagaaccctgggaaataatgtgacaaatggtatagtttgtcctagttctact

SEQ ID NO: 5218 - DNA, 120 bp, synthetic construct
  source 1..120: mol_type = other DNA
tgccattttgggaatctttgtgataaagcagattatattctgttgaggatcagtggtaaaataatttatgctagtgctgaagttaaactggaaaaaacatcatacgtgcataatttgttt

SEQ ID NO: 5219 - DNA, 120 bp, synthetic construct
  source 1..120: mol_type = other DNA
tcatttcatatggtaactgtttaaccttgtgaggaactgccagttttccagagtggctacaccatttaccttcctaccagcagtgtatgagaattccaatttctctatatacacttagac

SEQ ID NO: 5220 - DNA, 120 bp, synthetic construct
  source 1..120: mol_type = other DNA
catttccactccagggaaatagacagcttcctgtaataatgcatgaatgagctttggctgcccaactatcagaacagcccatttcaaacggcatctctgtttcttctcaactccttactt

SEQ ID NO: 5221 - DNA, 120 bp, synthetic construct
  source 1..120: mol_type = other DNA
ggaggggaggggaggggagagacaagacgaggagaaaaaaggagaaaagaaaagagaacctgctgtatacatgttggctatcattactactgttattatttcctctgatattatctttct

SEQ ID NO: 5222 - DNA, 120 bp, synthetic construct
  source 1..120: mol_type = other DNA
gagttagacactccagaggccaaaaacaagtcatttaatccaataaaacagttggcagcactgacagagttcatttggtcttaatctcacactcaggacactgttgggaagatggggcct

SEQ ID NO: 5223 - DNA, 120 bp, synthetic construct
  source 1..120: mol_type = other DNA
actgcaaggttggaatagtgactagcctattttatagataaggaaaccagagctcttaaatattgcgttgtttgtactctagaatatacacttaagggccgggtacattggctcacgcct

SEQ ID NO: 5224 - DNA, 120 bp, synthetic construct
  source 1..120: mol_type = other DNA
gtctgctgctccttgcttctcttcctgtcacctttgggcctttgttgaatgaacaagtggagagtaagtagagaaaggggtttcctgaaacatttccagcctgttcttttaagtgctttt

SEQ ID NO: 5225 - DNA, 120 bp, synthetic construct
  source 1..120: mol_type = other DNA
aatacgttgacaagtagtgaatgtggatctggtcattccggaattaccacattttgaaactaaatgcaataaaaaaactcccttagtggaggcggagcttgcagtgagctgagatcgcgc

SEQ ID NO: 5226 - DNA, 120 bp, synthetic construct
  source 1..120: mol_type = other DNA
tgagtgactttcggtcactcatcaatctattcactcactcagcaaatatgtgagtgtttactttgtgccaggtacttttaggagttgtgcacacagtggggaagtccacagacaagcccc

SEQ ID NO: 5227 - DNA, 120 bp, synthetic construct
  source 1..120: mol_type = other DNA
ctgaactctaaccatgattcttggttctaaatgtcttcctgaggggtctggaggaagtcacacccacatgccagagctaacattcttttctgctgacctcaaattttaaaagaaagcttc

SEQ ID NO: 5228 - DNA, 120 bp, synthetic construct
  source 1..120: mol_type = other DNA
tatgtttccattttcattgatgtacctggagtagtcaaatttatggggacaggaagcagaatggtgattgccaggggacaggaggaaaggggaacagggatttgttatttaataggcata

SEQ ID NO: 5229 - DNA, 120 bp, synthetic construct
  source 1..120: mol_type = other DNA
attttgggagaagtgcacattaatgtatggcaggaagatcaggaacacagggccccagataatcacctgcacaatgagtaagcaaatgtcttcacaaaatgtaaggtcctttcacaatct

SEQ ID NO: 5230 - DNA, 120 bp, synthetic construct
  source 1..120: mol_type = other DNA
agcctttaggaaagaaatcacatatgtaaaaatattcactacatgctctaaaatgagccttggtggaaacatgaagaggatataacataacgttaagttcagaaaagaatacgagtttta

SEQ ID NO: 5231 - DNA, 120 bp, synthetic construct
  source 1..120: mol_type = other DNA
ggtaaggacagaggtggaggaacagtcaaatacatgctccgaaaggctcagggaaagaaactttctcctcattatcattttggtgccataaattccattttacttctgcagaaattcagg

SEQ ID NO: 5232 - DNA, 120 bp, synthetic construct
  source 1..120: mol_type = other DNA
gcattttatgtaattctctgcaaaagtataaatttttatttttaggattcgaacatagaattattagaccttgtggtgattcggtgaaataaggaattgtaaaacactattaggttagct

SEQ ID NO: 5233 - DNA, 120 bp, synthetic construct
  source 1..120: mol_type = other DNA
ttcctgcaccaacaggaattttcaatcctccaagatatttaagttttgtttaaatgaaataataaggaacatctggttattcttgactcatggcatttcaatattaccacacaaaattat

SEQ ID NO: 5234 - DNA, 120 bp, synthetic construct
  source 1..120: mol_type = other DNA
gtatttctaaagacaaaaaggaaatttgtattcacattcagttagtcattccaccagaatgacttcatcacacaatattttgtgacaagaacctgaacagcctgttttacagtattcttt

SEQ ID NO: 5235 - DNA, 120 bp, synthetic construct
  source 1..120: mol_type = other DNA
ttcaagccccagattaagtgggtgaccttgaacaaattcttaacggtttcctcatctgtaaactggggatgatcatgatgcctattcctaagggctgtttaagttttcagtgagacaatc

SEQ ID NO: 5236 - DNA, 120 bp, synthetic construct
  source 1..120: mol_type = other DNA
tgtgtttctcttgccttctaaaacataaattaaacactgttacgtctcttccattagaagcaaatcttaacctacctgctccaacataatttacagctttagcagctctgactgcagctt

SEQ ID NO: 5237 - DNA, 120 bp, synthetic construct
  source 1..120: mol_type = other DNA
aggaagtgttagggttttgatttcaggatcttagtaattgtagagagtaagaaacgaacaagccgagctcaggcttctgtgactgtccgtgtcttcaagtatgatttggaaggcttcgtg

SEQ ID NO: 5238 - DNA, 120 bp, synthetic construct
  source 1..120: mol_type = other DNA
aaagtataattaaaaaaaaaaaagaaaaataaaaagtcggcctgcaaagccaaagttgcaagtaagcaggagggctccgcatgaaggacaggtcgaggccaactccctaagtgttgatct

SEQ ID NO: 5239 - DNA, 120 bp, synthetic construct
  source 1..120: mol_type = other DNA
aacattttcatcatcacaaaaagaaaccacatacccattagcagtcactcctcatttctcttcaccccccagccctagacaaccgccaatctgctttctctatatatagatttgctcagt

SEQ ID NO: 5240 - DNA, 120 bp, synthetic construct
  source 1..120: mol_type = other DNA
attagattcaatctagctgtccaacaaaagagagcttgttaaacatcacagaggaatactatgtagccattattttaaaaaccctagaagatcattcaatgccataagagggtttttaca

SEQ ID NO: 5241 - DNA, 120 bp, synthetic construct
  source 1..120: mol_type = other DNA
gagccaccgcgcccagccccaattctctctttttaatagtaatctaattacatttatttggctgctttgttttctgtctcaggtacgctaagtttgtctctcaaaactctttgtgggcag

SEQ ID NO: 5242 - DNA, 120 bp, synthetic construct
  source 1..120: mol_type = other DNA
caaagtgttgggattgcagacgtgagccactgagcctggccctatcccccctttcttgtactctactttgttctctaagcacttagcatcttttaagataccaaataatttttttaattt

SEQ ID NO: 5243 - DNA, 120 bp, synthetic construct
  source 1..120: mol_type = other DNA
aagtttttgttgttcataagctaaatatgagccaacagtggcttttgttgggagtggcttccgaaatgctgatgcagccttcacctgcgtttaatagagtatggcatctagaacaaagtg

SEQ ID NO: 5244 - DNA, 120 bp, synthetic construct
  source 1..120: mol_type = other DNA
ctggtccattggctagcatgaacaaccaaccccaaagcttccacttttccggtagctgtagaagatacattgatatattaacacagaaaacgagaaagaagggttaagagtgtcaatttg

SEQ ID NO: 5245 - DNA, 120 bp, synthetic construct
  source 1..120: mol_type = other DNA
attacattctgtcttggttccccttaagtaagctgagaggaaaaggttatctccctcttcctgacaaggaagtcagaggagagaaacagcaagaatttcaggctggaaaaggtattagag

SEQ ID NO: 5246 - DNA, 120 bp, synthetic construct
  source 1..120: mol_type = other DNA
ctctctctctttctccttccttccctccttccttccttctccctctctccttcttattcttcctctttattttccaagacaataaactgtctgactttgcatttcacttagaaaggagaa

SEQ ID NO: 5247 - DNA, 120 bp, synthetic construct
  source 1..120: mol_type = other DNA
agaaccatcctgctcaaaaggtaaaaaatctttagtttttcttagataaaattacacacaggcaacacaagcacacttatttgagttgatttagatatgctcaaagctttgcacgttgtt

SEQ ID NO: 5248 - DNA, 120 bp, synthetic construct
  source 1..120: mol_type = other DNA
atgggacaggacaaatcaggcttgaaagtcatcccaaaactgatggtttcagctgctgatgctagatttccacggataggaaaacatgagctcaacaatggacatcatctattctaaaat

SEQ ID NO: 5249 - DNA, 120 bp, synthetic construct
  source 1..120: mol_type = other DNA
cgtttagataatgccaaattcagcttagcataagaggatgataatcaacacatttggaagtggtgaagtatgagttaatcatacttgactgtaattctcaaaactcattatgctgtagag

SEQ ID NO: 5250 - DNA, 120 bp, synthetic construct
  source 1..120: mol_type = other DNA
caggcctgtgtatttttttgttcattcattcatcaaatttacatgaagcttgttacacgcaatgcaaggcaccacattcatttctgattctacagcaagaaacgatacaggatatttgcc

SEQ ID NO: 5251 - DNA, 120 bp, synthetic construct
  source 1..120: mol_type = other DNA
gaggaaagacagataatataggaagtaggacaaaatctgaaaacaaaacaaaaactgtaattaagtgtgaagatggagggtgctgtcctcaaggtccgggctgcagtacttctgcacttg

SEQ ID NO: 5252 - DNA, 120 bp, synthetic construct
  source 1..120: mol_type = other DNA
ggaaggaggaagggaagggaaagggaggggaggggagggggaaaaagagaattgtctggtatatctgagtctatgttttccaacagaatagaatgaatgtcttctgaattctatgtaaga

SEQ ID NO: 5253 - DNA, 120 bp, synthetic construct
  source 1..120: mol_type = other DNA
tggactgtatcctgagattaggttacttatacaggagcactgactgtaaaatagggagactatgcagtgggccggacctaatcacaacaatcttttaataacagagttttcaccagctgg

SEQ ID NO: 5254 - DNA, 120 bp, synthetic construct
  source 1..120: mol_type = other DNA
gtggtatactgtttctttggtggcctacaataagccatgcatcctggtattcacacccttgtaaaaatctctttctacactgaattttgcttgtccacgtaactagctttagccaatgag

SEQ ID NO: 5255 - DNA, 120 bp, synthetic construct
  source 1..120: mol_type = other DNA
agggacgctgagggtgcggaaccaaggagggcttcgcaatgcatagagaactttttctatactaatcgtttgaaattaaggacaaaaacactatgaagcctcaaactgaaaaagtttcac

SEQ ID NO: 5256 - DNA, 120 bp, synthetic construct
  source 1..120: mol_type = other DNA
ctagcagagcccttcccatcactgacagtgtcgggttgagagccacccccagcagagcccttgccacgtacagagattttctgtcagcagtttcccagtatttcagactcataatctgtg

SEQ ID NO: 5257 - DNA, 120 bp, synthetic construct
  source 1..120: mol_type = other DNA
tcccacacaactatatcaggtcactggacaagatctggaaaactcaaagagctccacctatgttgacctctcatgatgtagaaaatgtcttctatgagttttctgttatgtcttcagccc

SEQ ID NO: 5258 - DNA, 120 bp, synthetic construct
  source 1..120: mol_type = other DNA
caccacacccagaggcattttatttttaatattttgagaaatctccatcccaattttcttgggggctgcattattctcttccaccaacagtgcatgggggttccaaatgctctgtatcct

SEQ ID NO: 5259 - DNA, 120 bp, synthetic construct
  source 1..120: mol_type = other DNA
gtatgagttcatgctcagggacttgtgccacagcaccctggacctcagtggcttgagcgcctgtggcagctctttcactgctgtgatagcaggcctggggcatgcagagccacagggtgg

SEQ ID NO: 5260 - DNA, 120 bp, synthetic construct
  source 1..120: mol_type = other DNA
ccctgagcgcacgggacgcggggaacccggggtgtccgcagggacggtgtcccctgagcgcacgggacgcgggaaacctggggtgtctgcagggacagtgtcgcggggaacctggggtgt

SEQ ID NO: 5261 - DNA, 120 bp, synthetic construct
  source 1..120: mol_type = other DNA
gggagccactaccttgaggtccctgtggatgatgggcggctcctaaccgagcgggacccgcacacagaggcctcagcagccgctaccttgaggtccctgtggatgatgggcggctcctaa

SEQ ID NO: 5262 - DNA, 120 bp, synthetic construct
  source 1..120: mol_type = other DNA
cgcggcccctgtagagaacagacagccccaggcatgcgtgcacgggcgccgagaccgggggagagcgcagcccctgtaggagacagccccaggcatacgtgcacaggtgccgagactgag

SEQ ID NO: 5263 - DNA, 120 bp, synthetic construct
  source 1..120: mol_type = other DNA
ctgtcccctcggaatgcaggcctcatgggaattcagcccatctgcaagtgcagtggcagggtggcccccttctccctttcctgtgcactcatgttgcctcttggggtgtgggaggggaaa

SEQ ID NO: 5264 - DNA, 120 bp, synthetic construct
  source 1..120: mol_type = other DNA
ttgagattggatgagcgtgcctggtgttggatgaagtcgagactggacggggcctgaatccatatttagatgctgtccagaaatgcgccctgaagactccaaatgacacgaaaacatgcc

SEQ ID NO: 5265 - DNA, 120 bp, synthetic construct
  source 1..120: mol_type = other DNA
ggccacctccccgcacggtgctggtgcgcgggccccgtggccttgtgtggcctggctccgtgggggctgggcttggagccgcagtcccctgcacacctgggctttgtctctggtgaacat

SEQ ID NO: 5266 - DNA, 120 bp, synthetic construct
  source 1..120: mol_type = other DNA
tcgtcgtcctgtgcctgcacaagaaatgaccttttagctggctataaaatcctgagcttgaacttctccttcggcactttcaaagtgaccttctaagatcttgcattcacggttgctatt

SEQ ID NO: 5267 - DNA, 120 bp, synthetic construct
  source 1..120: mol_type = other DNA
attaaaatgtaaatgaatcagccaagcgttccctgtttcaatgatataactgagtgcctactgtgtactaggcactgggatgtactggtgagtgttgtgtgtacacacagccctgccctc

SEQ ID NO: 5268 - DNA, 120 bp, synthetic construct
  source 1..120: mol_type = other DNA
gaaatgccagaaaattacgcaatacgtaaaccaaatggcagactccggacagcagactgcggtgaaaggcagtgttttgggttaaattgtgcccctcccccaaaaaaaagtactaagcca

SEQ ID NO: 5269 - DNA, 120 bp, synthetic construct
  source 1..120: mol_type = other DNA
ggctcaagtgatcctcctgcctcggcctcccaaagtgttagaattatgattgtaatccactgcacccagctgctaattccattaaaataaaataagttttcataattggttggactccag

SEQ ID NO: 5270 - DNA, 120 bp, synthetic construct
  source 1..120: mol_type = other DNA
tgtgtctttgtggtgtgacagcacagtcttttctcctgactggtgtgcgtgtacccgagtaccactgagtatgaaagttcttgcaggaaaaataacagggcttaaagaaaaagatagttt

SEQ ID NO: 5271 - DNA, 120 bp, synthetic construct
  source 1..120: mol_type = other DNA
cgaggatgctggttttgtctgagagatgtggcttagcccaggaatggtgatgtggtctggtctatacgtgctccgccttctgtcatactgcctgccatgcctgtcgtacctaatgtagac

SEQ ID NO: 5272 - DNA, 120 bp, synthetic construct
  source 1..120: mol_type = other DNA
ctcatctccagcctcatctccagcctcatctccagcacgggatgagctcctggtggccagctgtgttacgccagtccctgtccagaacctctcagcacagctgacttttacactcatctt

SEQ ID NO: 5273 - DNA, 120 bp, synthetic construct
  source 1..120: mol_type = other DNA
tgctcgcatccagtggacaagggtgatgaacggggatttcctggggacctcccttctctttattcgagagctcaggagatactgggaaccaaaggctactgagggccgttttgcagacac

SEQ ID NO: 5274 - DNA, 120 bp, synthetic construct
  source 1..120: mol_type = other DNA
gctggtgctgcggaagccgtcgcccgtggcaggtgagcggggcgggcgggggacggggggcgcgggggtagcgacacgggttaccgaggcccggggcagtaatgccagcttgcccaaaat

SEQ ID NO: 5275 - DNA, 120 bp, synthetic construct
  source 1..120: mol_type = other DNA
gtccaagatcaaggcagcctgggtgtctggtgaggatccgcgtcctgggtgtctcgtgaggaccatgtcctgctgcataggtggcgctttctctgtccttatatggtgtagggggaggaa

SEQ ID NO: 5276 - DNA, 120 bp, synthetic construct
  source 1..120: mol_type = other DNA
ctgagacgccgactggagtcacacacggcagtcaacgcgtggacactggagactgctgagacgccgactggagtcacacacggcagtcaacgcgtggacactggagactgctgagacgcc

SEQ ID NO: 5277 - DNA, 120 bp, synthetic construct
  source 1..120: mol_type = other DNA
tatatatgttattggagtttgattgatttcgttgataagatgattatggaagctgccaaatgcaaatctttaggatgaacagtcaggctggagacgcaggaaggagctgagctgcagatc

SEQ ID NO: 5278 - DNA, 120 bp, synthetic construct
  source 1..120: mol_type = other DNA
gaatggatggatagatggtatcaagtaattacatgaaggcatcatataattacaataggaagaactaacctgtgccttcgggaactgtgctctgggaacagcccttacaccattgctcag

SEQ ID NO: 5279 - DNA, 120 bp, synthetic construct
  source 1..120: mol_type = other DNA
tccccatttctgcagggtgtccttagagaacaaggaagctctccccatctctgcagggtgtctgcagaggttgggacctgtcctccccatttctccagggtgtccccagaggagagaacc

SEQ ID NO: 5280 - DNA, 120 bp, synthetic construct
  source 1..120: mol_type = other DNA
ttcactcaagctcttctgcacacgcaggtcacccccctgagctccacgttccacatttttctgaacagccactgagctgaccttatttcttgtaaacactgctaactgcaaggcctttgg

SEQ ID NO: 5281 - DNA, 120 bp, synthetic construct
  source 1..120: mol_type = other DNA
tgtctgcactgaactccctttccctaatgcttgctctgccacccctccggggactgcctgcggcttctcctcctcgtaaggatcgccatttcccttcatggaggctcagggaggtgacat

SEQ ID NO: 5282 - DNA, 120 bp, synthetic construct
  source 1..120: mol_type = other DNA
cctttcccacagtgagaatcgtatgcatctgcctaatcaccctaaatgtgataggaagtttctgggattcactcagttattcctgatggaaatattctctgggccctttttcaggaagca

SEQ ID NO: 5283 - DNA, 120 bp, synthetic construct
  source 1..120: mol_type = other DNA
ttagggaggactctggggcacagaggtgggtatgtgaaccccgctgggctcaggtcagggaggactctggggcacagaggtgggtatgtgaaccctgctgggctcaggttagggaggacc

SEQ ID NO: 5284 - DNA, 120 bp, synthetic construct
  source 1..120: mol_type = other DNA
catcctcatcagccttgctagtttctgtctttgcactggcagttccatctgcctggaacctcctcctccagcctcccatgcagctgctccaaggtctcagctccttgtcaccacttctgg

SEQ ID NO: 5285 - DNA, 120 bp, synthetic construct
  source 1..120: mol_type = other DNA
tttttccctccttccttcctttcttctccttcctcccactcttccctctttgtcactccctccctcttccctccctcctccctccttcctccccttctctcccctttccttcctcttccc

SEQ ID NO: 5286 - DNA, 120 bp, synthetic construct
  source 1..120: mol_type = other DNA
gccacaaaagaggtaaaaataaagtgcggttgtgcttcaacgcatgggaaatagaacctagctgaagtaaattgtacactaaaagagcccttcaatggcttactgttgctttcacaaccc

SEQ ID NO: 5287 - DNA, 120 bp, synthetic construct
  source 1..120: mol_type = other DNA
accgatacgggcagggaacacttctggcacatgcattccttcccgttgaaggtcactcggtccccgggggggaagggcagcctgaaacaagagagctcgttaccagccaggcccaccttc

SEQ ID NO: 5288 - DNA, 120 bp, synthetic construct
  source 1..120: mol_type = other DNA
cccctgcacagcagcccgcatcccctgcacagcagcccgcatctccagcacagcagccagcatccccagaacatcagcctgcatccctgagcacagcagcccgcatcccctgcacggcag

SEQ ID NO: 5289 - DNA, 120 bp, synthetic construct
  source 1..120: mol_type = other DNA
agggctgctgatgacccgtgagtcccagcttgagcttcccttgttgggtgacacgtcttcccatccctgcttgcacacctccccaaaggtcatctcaaccccagcagaagcagttacatg

SEQ ID NO: 5290 - DNA, 120 bp, synthetic construct
  source 1..120: mol_type = other DNA
tctaatgtcagaagcgttgtgatggctgcatgacagtaggaaaaacactttggttttgtcctgtaaccttacaatgaaaaaaatctctctggtctgcaacagctcaaacgtcaggtcaac

SEQ ID NO: 5291 - DNA, 120 bp, synthetic construct
  source 1..120: mol_type = other DNA
tattcctgtgaacctctagaggatctgcacctgctcttcaagcgacaactgcgaggaaagtaactggaatcgtagagctccatggccccccccgtcatatttttctctttactgttgtct

SEQ ID NO: 5292 - DNA, 120 bp, synthetic construct
  source 1..120: mol_type = other DNA
ctgatctaatttttgtctctatgtatattcctattctggacatttactatgaacagaataagaaatatgtgatccttcatgtctgccttcttttatttagcataatgttttcaagattca

SEQ ID NO: 5293 - DNA, 120 bp, synthetic construct
  source 1..120: mol_type = other DNA
ggactggtaggtttaaagggaatatttatgggagattatgggttataggctcctgtgcatatctcagtaactttctcaataaaggacacatggccttgagcccgaatacgctgggaagct

SEQ ID NO: 5294 - DNA, 120 bp, synthetic construct
  source 1..120: mol_type = other DNA
cccagataaatcctactcatcctcaagccatgagtttagatgtcactgctgcaggaaaaccacccccgatgccctaccagaggtcagtgcctattttcctattacctgtggccattggtc

SEQ ID NO: 5295 - DNA, 120 bp, synthetic construct
  source 1..120: mol_type = other DNA
agccttggccaatgctatcaaaacttgttctagaaagactcatacacacaaacttcttgaaaactgagataatcaaggaaatttctgtgtcactcggccaagtgtggcatccccaaaggc

SEQ ID NO: 5296 - DNA, 120 bp, synthetic construct
  source 1..120: mol_type = other DNA
gtgagtcctctgcatgtgaatggtggcagctcacaccaagggaaaccaagagtgagcccaataccctccccaaccccccacttggtctgccccctgttcaaggagaaaagtccactgata

SEQ ID NO: 5297 - DNA, 120 bp, synthetic construct
  source 1..120: mol_type = other DNA
gtgttctagaggtgagatgtgtgtgttctagagatgatgggtgtgtgtgttctagaagtgagaggtgtgtgtgttctagaggtaagggatgtgtgtgtgtgtgtgttctagaggtgagtt

SEQ ID NO: 5298 - DNA, 120 bp, synthetic construct
  source 1..120: mol_type = other DNA
caagcttggctacatgttggaatcacctgggaagctttaaaatgcactgatgcattcaaaaaatagaacaccattcagcactgaaaagaaatgagtgatcaagccatggaaagacacgga

SEQ ID NO: 5299 - DNA, 120 bp, synthetic construct
  source 1..120: mol_type = other DNA
ccgagccgacaagatgttcttgctgcctcttccggctgcggggcgagtagtcgtccgacgtctggccgtgagacgtttcgggagccggagtctctccaccgcagacatgacgaaggtgag

SEQ ID NO: 5300 - DNA, 120 bp, synthetic construct
  source 1..120: mol_type = other DNA
gaatatttttctatgcctttttgtcagaagagacaatgccgggaagtgctctggccagaagcagaagtgaaagcctgtgtctttggaatgcactttggtactttctgtttcagtatggat

SEQ ID NO: 5301 - DNA, 120 bp, synthetic construct
  source 1..120: mol_type = other DNA
aagccgagtgccatggtagtttccaaaaataatttgcagctttcttttgatctcattttgagatggctgaagaagggactaaatgatcttagggtagaaacatcctagagctcctgcaca

SEQ ID NO: 5302 - DNA, 120 bp, synthetic construct
  source 1..120: mol_type = other DNA
ttgtttttgctagaaaggacaccattccttcatcatactgtttggtatctttcatataaatctcaaaacaataaatacctctctgagttcaaagctaggaaagaaaaactcttgatgagc

SEQ ID NO: 5303 - DNA, 120 bp, synthetic construct
  source 1..120: mol_type = other DNA
ggctgagagttcatgtttagacaactcactgctgaactggaatgcaggctctgtctcttccttactggctgtgttatttaatctgtgccacatttattcctgtgtaaaatgaggatgaaa

SEQ ID NO: 5304 - DNA, 120 bp, synthetic construct
  source 1..120: mol_type = other DNA
cctcctgcccagagcatgaaggaagatacagtgcagcagctatttttgaattaggagaatgaagactaaggagactggaatagaatcaagattaattcagcagttaccataataggcagc

SEQ ID NO: 5305 - DNA, 120 bp, synthetic construct
  source 1..120: mol_type = other DNA
tatgtatttcaggtatacaacacgatgctattcctgctctgtttgctattcaaaatctcccccttttgaaataatatcactaaaaggactaaaagcaaattgtttgcttaatgggttgac

SEQ ID NO: 5306 - DNA, 120 bp, synthetic construct
  source 1..120: mol_type = other DNA
agtaggtcaagaagtaggtttataagaaacacctctttcaaacctctcaacttccttccccattcaacacatttgctctaagataaaggtgaagtaattgagaacagcctggcctacagc

SEQ ID NO: 5307 - DNA, 120 bp, synthetic construct
  source 1..120: mol_type = other DNA
gcatgcctgctaatccagacagagttctcagcagatgataaacagacatggccaaagagttcatgttcaggaataatttagaaacttctcagctgcagactcattctttctgtagaggta

SEQ ID NO: 5308 - DNA, 120 bp, synthetic construct
  source 1..120: mol_type = other DNA
acggtattatagtacaccttgttaccaaataggttgttctcttccccacccacctttgagcttttgctctaaaatacattcaggttccaagcctgaccatccttgtttaatctatcatac

SEQ ID NO: 5309 - DNA, 120 bp, synthetic construct
  source 1..120: mol_type = other DNA
gtgtgatgttccccttcctgtgtccatgtgttctcattaataattctgttttcatgatctctgagcaatcttggagactaggaatggcatgtacaggctggcaggttttttgtttgtttc

SEQ ID NO: 5310 - DNA, 120 bp, synthetic construct
  source 1..120: mol_type = other DNA
gtttttatatgaccatgtgactaccatgagatggataaggaactccaggagtaaaaagatcaggaacctgattttacgttgtggctttgccccttctgcttgattgctggaagtttagtc

SEQ ID NO: 5311 - DNA, 120 bp, synthetic construct
  source 1..120: mol_type = other DNA
ccataacttagtgtcatgctttctatactagagttaattccagtaacatgtttggtgcatcatgtcccttcccctatcaattacagaagaaagccactaggttcttggtaagtagaaata

SEQ ID NO: 5312 - DNA, 120 bp, synthetic construct
  source 1..120: mol_type = other DNA
taatttttaaatgtccctcccccactaactgggagctcttagaagttagcaatcacattatttatatcttcatagtaccagaatctgttatagcagaggtccccaactcctggaccgtgg

SEQ ID NO: 5313 - DNA, 120 bp, synthetic construct
  source 1..120: mol_type = other DNA
ttatttgatactgcttctactgagaggtgaggtctgtatctcgtccccttacatttacactctactctccctgacccacagaatgtgttgggaatgatgcattatcactttccagcctca

SEQ ID NO: 5314 - DNA, 120 bp, synthetic construct
  source 1..120: mol_type = other DNA
cctctggttttctcccccaggtttctgcatatgaagtgtgtaaaatagattgcttgatccaaaacagaaaaacagtgataactgttttgctgagttcccagacccttcccaagatggaac

SEQ ID NO: 5315 - DNA, 120 bp, synthetic construct
  source 1..120: mol_type = other DNA
tcttgtacttttctcttccttttccctcatccttaaggctcgactcaaatgaaggattctgtggaaccttgattgctcagttagaaatgagcaaactgtcgcaaggacagaaaaccaaac

SEQ ID NO: 5316 - DNA, 120 bp, synthetic construct
  source 1..120: mol_type = other DNA
aggaaggggaggaaggaaagaaaggagggagagagggggagagagagaaggagagagagaaagaaagttaagaaagagagagaaagaaagaaaaagagagaaagaaatagaaagagagaa

SEQ ID NO: 5317 - DNA, 120 bp, synthetic construct
  source 1..120: mol_type = other DNA
taggactcgtggttgaaaatgacagaagcccaaatcaaactgacttaaacaaaaactagaaattttcggttcacataaataaaaagtccaaggatagagtctagctttagacatagctgg

SEQ ID NO: 5318 - DNA, 120 bp, synthetic construct
  source 1..120: mol_type = other DNA
agtatcctttacagaaataatcatatctagctcatggacttcccagccaatttgggagcttatgctacacatcactaatagatcttcaaactcttcctgcagggtccagagagggttccc

SEQ ID NO: 5319 - DNA, 120 bp, synthetic construct
  source 1..120: mol_type = other DNA
cagactcatccctgggagacaagcacaggctacaaacctatcagcttaaccatcatccctgtcattgttttaatgtgttgaatgtaagctattaagacttcaaatgtggctcgagtattc

SEQ ID NO: 5320 - DNA, 120 bp, synthetic construct
  source 1..120: mol_type = other DNA
tccttgctttctttccctttcttttctacctaggacagtgtcaatcaatgaaacatatatggccaagaaagtggaaaactgcaaaactcaggggatgggagggaactcttacatttgata

SEQ ID NO: 5321 - DNA, 120 bp, synthetic construct
  source 1..120: mol_type = other DNA
acaaaaaaactcacccgatgcaaccactcctccattaagccacatcccttttcaactctttcacatttcaccttctctaaaccatcactcatctatccccttcattcccagtcttttcct

SEQ ID NO: 5322 - DNA, 120 bp, synthetic construct
  source 1..120: mol_type = other DNA
ttcatgaataaggtcccagttggtatttttgtggatttttcacaaggctacccactatggtaggttactgggtgatacaactcacacagggacataagaaggaacaaagccaccacaata

SEQ ID NO: 5323 - DNA, 120 bp, synthetic construct
  source 1..120: mol_type = other DNA
tatgccctacataagtataggcataaaaatgttttattgaaacaattatctgagctttctttcgcagactaccatttaaattctattttcacaactaattttcagaaagaagagtctccc

SEQ ID NO: 5324 - DNA, 120 bp, synthetic construct
  source 1..120: mol_type = other DNA
catatatatatatatgtatatgtgtttattatgggtacaggtgaatgtcttactttcccagtattctgtaagcttcttaaggtcaagaaacttacttcgtttctctttatatcccctgag

SEQ ID NO: 5325 - DNA, 120 bp, synthetic construct
  source 1..120: mol_type = other DNA
ccaaaggttgaaattatcaccaatcacttaacactttacctggctgatctcaaatctacagccactgccacctgcccttttgactaatgacttccattttatgctcttttttctcagtgg

SEQ ID NO: 5326 - DNA, 120 bp, synthetic construct
  source 1..120: mol_type = other DNA
tggaattctgggttgaagttagcaggttaaggtcaagtttttttgaaagtctctccaaatatgcaacagatgacactgcaattccagctgtgttcacctattcttagaacaaagccctac

SEQ ID NO: 5327 - DNA, 120 bp, synthetic construct
  source 1..120: mol_type = other DNA
acttgaaggtggagggtaggaggagggagaggaacagaaaggataactattgggtactgggtttaatacctatgtgatgaaataatatgtgcaaacccccatgacatgtatttacctatg

SEQ ID NO: 5328 - DNA, 120 bp, synthetic construct
  source 1..120: mol_type = other DNA
atgaggcacaactcagatatatatggaatggcataaggtcaagaaaggcaatttgaaaggggagaagaacaatgctattgccatattccacaacatcccccttgtctgtgtacatatgct

SEQ ID NO: 5329 - DNA, 120 bp, synthetic construct
  source 1..120: mol_type = other DNA
gccttggcagttatctttcaaagactatgaaagcctccatctccacagagaccccttggagtattttggagaaagggagatgcctccctgagcctatctattagctctttacaccagagc

SEQ ID NO: 5330 - DNA, 120 bp, synthetic construct
  source 1..120: mol_type = other DNA
gattagaggtgtgagccaccatgcccaggcagtttagtgctttttacagcactattgctgtatctgaaaagcatggtgatgtaaactgccacaaatataatgttaaaataaggtaggcta

SEQ ID NO: 5331 - DNA, 120 bp, synthetic construct
  source 1..120: mol_type = other DNA
tggaagcctacagacctaagaaaaggggcaggcacatgaattcttgtctttcttcttaagtaataaacatcaaatattacccaaaattcttccttgatgtgctaaagatattggctgctg

SEQ ID NO: 5332 - DNA, 120 bp, synthetic construct
  source 1..120: mol_type = other DNA
gacacagaggatgactttcacagttctcactcatatttagaaactaaataagttgatctcatgcaagtagagagtagaaagataccagaggttgagaagggtgattggatgggaaagggg

SEQ ID NO: 5333 - DNA, 120 bp, synthetic construct
  source 1..120: mol_type = other DNA
gctttgtaagccggaaaaaaggtaatattctttagtaaataataatgtttcttaaaaaaatcattatacatttgcatcatgcctggaaattttaaggcagcatatactgagaagtcacat

SEQ ID NO: 5334 - DNA, 120 bp, synthetic construct
  source 1..120: mol_type = other DNA
taattttctcagagtattgaatactatggcagaattgctctagtgatactgtttttgtaaaaattccatcactaataaacttttcttataaaaccctgcaacttcaaatgggctctctgg

SEQ ID NO: 5335 - DNA, 120 bp, synthetic construct
  source 1..120: mol_type = other DNA
aactgagactcaggatatataatcttgtctaaggtggcacaggaagtggtggctctgtaatatgaacccagggaagccatctttagatcttgtgttaagcgcattaagtgactttgacaa

SEQ ID NO: 5336 - DNA, 120 bp, synthetic construct
  source 1..120: mol_type = other DNA
acgggcccgtccgtcagtccgtctgcccggatacgcgcgtcgcacttggcctcttaacactcagccttctcgactcttcccgctttttccctttctcccttcctttcactccagcatcca

SEQ ID NO: 5337 - DNA, 120 bp, synthetic construct
  source 1..120: mol_type = other DNA
tccccagaagagggactctgtttaggtcaggactaatttctttacttacctcccactttacattgagataaattcttgactccttcagttgctccttcagatgctaatgtggattgtcac

SEQ ID NO: 5338 - DNA, 120 bp, synthetic construct
  source 1..120: mol_type = other DNA
aagaggagacaaggggaaacagattttgtctcacgctgtctcaggacttttaattgtttagaaaactgagtttcgaagagtaaaggtttttgctttttaaaacctgttaattctcatatt

SEQ ID NO: 5339 - DNA, 120 bp, synthetic construct
  source 1..120: mol_type = other DNA
aactcctatcctcacagagttagtccataaggcctcagtgacctcacagaaatatggagttaacctctactacagaactatttacactgcactgtaaatacacatatgtgtgtccaccct

SEQ ID NO: 5340 - DNA, 120 bp, synthetic construct
  source 1..120: mol_type = other DNA
gggagggggagggagagagagagacagagagagagggagagacctatctcaaaaggaaaaaaagaaaacacatacttcagaaataattaaggaatctgaagtaacatggaatacagccaa

SEQ ID NO: 5341 - DNA, 120 bp, synthetic construct
  source 1..120: mol_type = other DNA
cagtgtcaggttagaaggcctggggaaaacccctgctttaccacttagtggaataaccttgagcaagttacttcatctctttgagaatccatttctccctcagtaaaacaagaatgataa

SEQ ID NO: 5342 - DNA, 120 bp, synthetic construct
  source 1..120: mol_type = other DNA
ggctttagcccttaggagagaagaagccattgtgatgttgaatggaggattgtcctgtgaaagaggtttgagactagaaacatgctgtttctgcattctagctataagccgatagtagaa

SEQ ID NO: 5343 - DNA, 120 bp, synthetic construct
  source 1..120: mol_type = other DNA
aaaactctacccccacctgtaccaacccactgtgtgtggggttttggtaccttcttttttttgatacatccttgttcacaactttaacctaccaaaatctaatctctttcacaccaatcc

SEQ ID NO: 5344 - DNA, 120 bp, synthetic construct
  source 1..120: mol_type = other DNA
cagaagataaaaattgggggggggggagaatgaaacattttataaatatttatcaaaaacccattataagccatgcaccttgcatgtgcctgtagtcccagctactcagaagctgaggca

SEQ ID NO: 5345 - DNA, 120 bp, synthetic construct
  source 1..120: mol_type = other DNA
tgtctgagtttccacccacgtcataatggtgcttatctaataatgaatgaatgaatgaatgaacatggccatttattgagcaggtattgtttgcctggctctttgctaagcactttacat

SEQ ID NO: 5346 - DNA, 120 bp, synthetic construct
  source 1..120: mol_type = other DNA
aattctgtccatcctggtttctcctctcttggactcttaagaaatctgattgattttggagaatacacacacagagagaggggaactatctcagaagggtctatgcttgaaatacagcac

SEQ ID NO: 5347 - DNA, 120 bp, synthetic construct
  source 1..120: mol_type = other DNA
gagctggtggcaaaaacgccatgaaaaatgcccttccccacttcatgtgaagaattgtgttatcatggaagaagccctgaatcacatgttagaagacatagattgcattgctgaaatcta

SEQ ID NO: 5348 - DNA, 120 bp, synthetic construct
  source 1..120: mol_type = other DNA
aaacaatagcattctttttttttttcagggaggtaattttcctgcactgtgccatatactttgatatcatatagatctaaaactcactgggtttctctctgtacttttcctctgacacgt

SEQ ID NO: 5349 - DNA, 120 bp, synthetic construct
  source 1..120: mol_type = other DNA
acactgggaaaggccaaattagggctgaggcagaaattgattccctcattaaatatgcctgccatgggatctacatagtgtatctggcacaagtaatacagaatgattcaggttcttaat

SEQ ID NO: 5350 - DNA, 120 bp, synthetic construct
  source 1..120: mol_type = other DNA
acaggatggaacatgtgctttggcgtttcgaggattccatgcaaaaatgtatatcattctggcatatagtgtctaataatggttctctttgtttatttacaggtccttggtttattccag

SEQ ID NO: 5351 - DNA, 120 bp, synthetic construct
  source 1..120: mol_type = other DNA
caacacaacatctccctccttggtctccttgtctgtagtcttgcccccctcaaatccatcctccatagagccacccacactgcatatcaagacatgaaaccaaactgttgttgttgttga

SEQ ID NO: 5352 - DNA, 120 bp, synthetic construct
  source 1..120: mol_type = other DNA
aggctaggctgccttttctctggtggcaaacgtaatctacttttatcagtgggaaattcagccgtatattttgggcttaactactttgtgctgcattttcccactcaggaaaatgaagat

SEQ ID NO: 5353 - DNA, 120 bp, synthetic construct
  source 1..120: mol_type = other DNA
tttccatctgtcagcacaggtttacataaattctctcacacgttgtaatggtgtggtatgattaaattctatcctagcccatgaaggggagcacagctattgatacagagaaaactgctc

SEQ ID NO: 5354 - DNA, 120 bp, synthetic construct
  source 1..120: mol_type = other DNA
atagaaataaaaatgcgaaatgccgagcgagcaaaagaagatgccgagaaaagaaatgacatgctacagaaagaaatggagcagtttttttccacgtttggagaactgacagtggaaccc

SEQ ID NO: 5355 - DNA, 120 bp, synthetic construct
  source 1..120: mol_type = other DNA
aatgcagtttgtttactggggaaaaagccagattaggcatttatgtcacaaaaagtatttttcccttaagctaaagcctaagtggaccagggttaaatgcccaaatctagttctcagctt

SEQ ID NO: 5356 - DNA, 120 bp, synthetic construct
  source 1..120: mol_type = other DNA
tgctcaccattgtattacaactgcctatagcattcagtacagtaacatggtgtacagctgtgtagcctaggagcaatagtctataccatatagcttaggtgtgtagtagactataccatc

SEQ ID NO: 5357 - DNA, 120 bp, synthetic construct
  source 1..120: mol_type = other DNA
actgcctttggggtaattcttccgttatcttggagaatacctcctggcttctgttgacatggctgatacatattaatttccttataaaacaatggcttggccacacttttagtgttcccc

SEQ ID NO: 5358 - DNA, 120 bp, synthetic construct
  source 1..120: mol_type = other DNA
gctgattgtagtgtcaggctataccattgtcttgtttgtgattctgttgagctcacgtcagtaacttgttgagtcgtgtggtgtaaaatgaaaatacttctagtggtctctgacaggagt

SEQ ID NO: 5359 - DNA, 120 bp, synthetic construct
  source 1..120: mol_type = other DNA
gcaatttcaattataatagacctgatatattccaaccatctgtcataaaatgaaaggttactattggcacacagcgacaaagttaccagaatttgggtgatatgaggtaagcctgaccaa

SEQ ID NO: 5360 - DNA, 120 bp, synthetic construct
  source 1..120: mol_type = other DNA
ggctaccgtgataagctgctattctgctcatcacaaggagttagagtcctaattatttaaataaacagaaggaagaaaggaaggaaattaattttgacaaaggacctgaataatccataa

SEQ ID NO: 5361 - DNA, 120 bp, synthetic construct
  source 1..120: mol_type = other DNA
gatttccatttactcactatttgtgcttgatcaagtttcttaacccctttgaggccttaggttcctcctataaattatgattaaaataagaatagttacctcatgaagcggttttgaaaa

SEQ ID NO: 5362 - DNA, 120 bp, synthetic construct
  source 1..120: mol_type = other DNA
gagagaacagctctgctttcaaatagccagtgattaaatattgcacttgtattcagcattttatttgtattctgattctggaatatctaaaatgacatttatcttttggtattaccctgt

SEQ ID NO: 5363 - DNA, 120 bp, synthetic construct
  source 1..120: mol_type = other DNA
accttctcctcttgcaatctgtatttttaaatcattgaattattttcaaggtatttaattattttattcctttgtattgtgccttctgtaagagtcccagatatttaaggcataagaata

SEQ ID NO: 5364 - DNA, 120 bp, synthetic construct
  source 1..120: mol_type = other DNA
ccagtatctccccatttccaccgccagccttctctagctcctggcaaccagcattttaccctctacttgtatgaatttgatatcttttagattccacatataagtgagatcatgtagtat

SEQ ID NO: 5365 - DNA, 120 bp, synthetic construct
  source 1..120: mol_type = other DNA
tactccaagaggaaacttggtacccattgagtatttactccccatttctcctggcagccatcagtctgttttctgtctttacggatttacctattctgggtatttcatataaatggaatc

SEQ ID NO: 5366 - DNA, 120 bp, synthetic construct
  source 1..120: mol_type = other DNA
catatggaggcttttataaggaataactctcctcttgtacctctcattagtcatcaatgagaattttagacggtcccagtttgttgctggagttaatagaaagtgatagtgcagggcgct

SEQ ID NO: 5367 - DNA, 120 bp, synthetic construct
  source 1..120: mol_type = other DNA
tacacaaaagtggagggtggaagagggatgagggatgggtgcaatgcacattatttgggtgacagttacactaaaagcccaatatttaccattgtgcagtatattcatgtaacaaaactg

SEQ ID NO: 5368 - DNA, 120 bp, synthetic construct
  source 1..120: mol_type = other DNA
ataaagacactcagtaataaggaaaagcaactaccagtttaagtctgaaagactgtttagagtttatttctttcaaactccaatatgtttaaggccatttgtcttactagaaaatgtcca

SEQ ID NO: 5369 - DNA, 120 bp, synthetic construct
  source 1..120: mol_type = other DNA
tcttgccctctctccagtctatcctccatagaacaaccagaaagatcatattaaaatgtaaatttaactgtttaggccaggctcagtagctcacacttgcaatcccaacactttgggaag

SEQ ID NO: 5370 - DNA, 120 bp, synthetic construct
  source 1..120: mol_type = other DNA
tatatatatattttttttttacccaataccaatataaatgctctggagggtggaaaacattgcccctgtgaaatgttgaccatgggtattatggccatgcctggggccttgcaatagccc

SEQ ID NO: 5371 - DNA, 120 bp, synthetic construct
  source 1..120: mol_type = other DNA
tgaaatccctctaccttttgatctgcacttttactcaaaaacagaaagaattttcgatctgaaatgataggcactttgaagtccagaagaaactaaatgccttttaccactctccattgc

SEQ ID NO: 5372 - DNA, 120 bp, synthetic construct
  source 1..120: mol_type = other DNA
ggggggggggtgggcggtggtaatggaataggaggagaaagaggagagaaaaggtaagatgacaacattagactaaggtttatttatcacatttaccctcttcctgtagtgaaatatcca

SEQ ID NO: 5373 - DNA, 120 bp, synthetic construct
  source 1..120: mol_type = other DNA
acaacactgtcacatatttattgactacagcaaatttaatttcaaaccccaaatacagcagaatataaaattacctaatataggagacttggctatacaataactcacagaaaaaaggta

SEQ ID NO: 5374 - DNA, 120 bp, synthetic construct
  source 1..120: mol_type = other DNA
gcaattagtcacgtttcatcttctgccatatctctgatactagtatcagtaatatggttaaagtattactataagtgaagaagaaaagagacccataaaatctccagtttcatataacat

SEQ ID NO: 5375 - DNA, 120 bp, synthetic construct
  source 1..120: mol_type = other DNA
ccagactttcagtcacttatttgtttatttatttatttatttggctcttttcttgtatttcccttttccttttctttcctttctttttccatttcctcctcccttcctttgcttacttat

SEQ ID NO: 5376 - DNA, 120 bp, synthetic construct
  source 1..120: mol_type = other DNA
ttaggccctgcctcttaaaggttccaacatgatttttggcagagacacggaaaccatggcattccacccttggaaccccaaactcatgtccctcttacactataaaatgtaattattcaa

SEQ ID NO: 5377 - DNA, 120 bp, synthetic construct
  source 1..120: mol_type = other DNA
gctatcagtgtactccagtgcccttgaataataggggtaccttttcattcaagtttttatcataattacctattcttacacaagcttagtttttaaaatgtggacattttaaaggcctct

SEQ ID NO: 5378 - DNA, 120 bp, synthetic construct
  source 1..120: mol_type = other DNA
gtaaaagagttcagtttttggacatgtttggcttgaagtctctggatggcacaggcatatattaagaatgcaattggaaaatctgatctacagttctagagagcagtgtgaactgaacta

SEQ ID NO: 5379 - DNA, 120 bp, synthetic construct
  source 1..120: mol_type = other DNA
taggctccttctacagtactagtcagtgcccctgaaaaggggtaaaagaaagaaggcagatactccatactccattttgcatcagccaggaagaaaaagaaatccatagtgtgcctgaaa

SEQ ID NO: 5380 - DNA, 120 bp, synthetic construct
  source 1..120: mol_type = other DNA
atcagagaactaaggcatgactctaggaccattcttaggataacagtattgatcctgagtcacctgcatgttggaaaagggcctatttaaatgcctcatgtttaaggtctccattgaacc

SEQ ID NO: 5381 - DNA, 120 bp, synthetic construct
  source 1..120: mol_type = other DNA
cagcttacaactttttgactttcacaatggtgcaagagcattccatagaagcttttgaattttgctcttttcccaggttagggatacatggtgcaatactctctcgatgttgggcagcag

SEQ ID NO: 5382 - DNA, 120 bp, synthetic construct
  source 1..120: mol_type = other DNA
caaactctcataccaatcatagctatggttaatctccataattctgaatgttcaggtcctaagtggggaacaacaagccttggctttggaggggcaatccctgcccctttccactttaaa

SEQ ID NO: 5383 - DNA, 120 bp, synthetic construct
  source 1..120: mol_type = other DNA
agtcaacactgacatgttcattggggctgatcttcggagtcgctacgtgttctctatacaaaataaaataatctgtaaagcgcttgatttcgagtgttctcctgtctgcttcccccaccc

SEQ ID NO: 5384 - DNA, 120 bp, synthetic construct
  source 1..120: mol_type = other DNA
gaagatgaactctccatcagaagagaacataaagtaaaaagataagatgccctatagataagcccctaaggagttctaactaaactcagaagggaatgggccagcggaagtagaccaaag

SEQ ID NO: 5385 - DNA, 120 bp, synthetic construct
  source 1..120: mol_type = other DNA
agtgagtcctagcttatactctgtaaggtagatttggctgcgttgagctattgtctaagagtggtagactccagtatgcaaattgcacccaatttatacagcttgggagtgtgttttctt

SEQ ID NO: 5386 - DNA, 120 bp, synthetic construct
  source 1..120: mol_type = other DNA
aaaagtgtgcgtgggggagtgcatctctttcaatagctggaaaaatcttggttggcattctttgttttgggtttatattctgaataaaatagttcatatatgttcaagaagaagcacgta

SEQ ID NO: 5387 - DNA, 120 bp, synthetic construct
  source 1..120: mol_type = other DNA
gaccattgttccttcttttctttgtcatcttggaggcacggaccggagagaggagccaaaatgctgttttatacagaagttatgattatttaaataaacaatctggaaaaatctacaaat

SEQ ID NO: 5388 - DNA, 120 bp, synthetic construct
  source 1..120: mol_type = other DNA
ccaccgcgcccggccttttcttatttcatattttgtggccccactgataaaatttcaaaactcctggcctgaagtgaaagatgactggtggattcttgttacccagaaactatcttaaga

SEQ ID NO: 5389 - DNA, 120 bp, synthetic construct
  source 1..120: mol_type = other DNA
ttaatggcatcaggggaatattgaaaccctgaattcctaatcactgattttttaatatccacagtgagtacctcagacacaacccttccactggagtaaactcataaacatgactcttac

SEQ ID NO: 5390 - DNA, 120 bp, synthetic construct
  source 1..120: mol_type = other DNA
ttattacagctatgaagtcttacactccatatttcattctcctgtggagtgctgttgggatagcgaaggctgccaaaatcatcatcgtgccgccaattatgtttgaaagccatatgtaca

SEQ ID NO: 5391 - DNA, 120 bp, synthetic construct
  source 1..120: mol_type = other DNA
actagaccaggagatattcactgtttgtcattttgttatttgctggaactccctcagagaatgatcttggggacaatgagagattgagcaacagagttattagattagccacttgtgagc

SEQ ID NO: 5392 - DNA, 120 bp, synthetic construct
  source 1..120: mol_type = other DNA
gacagagacttctggcttgggcttggaaactccccggtcagagatcaactattttgaccaatcagaaatgaacaagtttgaagtcttcatttgcataaatggacctgattgagaacatag

SEQ ID NO: 5393 - DNA, 120 bp, synthetic construct
  source 1..120: mol_type = other DNA
tatacacattccatatatacacacgttccacatatacacattccatatatacacacgttccacatatacacattccatatatacacacgttccacatatacacattccatatatatacac

SEQ ID NO: 5394 - DNA, 120 bp, synthetic construct
  source 1..120: mol_type = other DNA
ccagggacacttggcaatgtcttctgaagacaattttgcttgtcactactagggagaacctactggcctctagtgagtagagtccaggaatgctgctgaacatcttatactgcacagaat

SEQ ID NO: 5395 - DNA, 120 bp, synthetic construct
  source 1..120: mol_type = other DNA
cttgggatttttactcatatgaatattgttttacagatgttgatggcatggacctgggcaaaaaggtcagcatccccagagacatcatgttggaagaattatcccatctcagtaaccgtg

SEQ ID NO: 5396 - DNA, 120 bp, synthetic construct
  source 1..120: mol_type = other DNA
ggggagggtaaggaaatgggaggggaaggaaaggtgaaggaaagaaaaggaaaaaggagaaaggggaaagagaaaggaaagaaaagaaaagttgctatttaatatcaatttcctgagggt

SEQ ID NO: 5397 - DNA, 120 bp, synthetic construct
  source 1..120: mol_type = other DNA
gcagccctagtaactatctcaacaattttaatcataaggacacaaaactttatttgtgaaatatgtctagtggtttacaaagattctgttgttgcaagaacttctgaccttctgaggaag

SEQ ID NO: 5398 - DNA, 120 bp, synthetic construct
  source 1..120: mol_type = other DNA
gtgtcaataaatcttatacacctacagattaaattaaggagaaaaccagcttacttccagactgccaaccctatgactttaaggcttggaggtactctctccaataacaggtcactttag

SEQ ID NO: 5399 - DNA, 120 bp, synthetic construct
  source 1..120: mol_type = other DNA
caggcatgagcaaccacacccggcctagagaagcgttcagttcagttcagtttagtttaggttaggttaggttaggttaggttaggttaggttaggttaggttagtttagtttagtttag

SEQ ID NO: 5400 - DNA, 120 bp, synthetic construct
  source 1..120: mol_type = other DNA
cattttagttttggttcaaacaaacacaaaagttagtgtaaacgctgggaaaaagcaggtggagtgggagactaatgatcacttttctgtgtgatcctgagtgagtggactggatttctg

SEQ ID NO: 5401 - DNA, 120 bp, synthetic construct
  source 1..120: mol_type = other DNA
tactgctggttggagtatcagttgctacaaccgttctgaaaatctgtctggcagtatctactgactgaacattctcatattccactactaagtatataacccccccaagaagcatataca

SEQ ID NO: 5402 - DNA, 120 bp, synthetic construct
  source 1..120: mol_type = other DNA
taagaaataaaatgctgaaactactacaagtgtcatatatgttggttctaaggcatacaaactttagtctgggtttagagggttgcaatcaagaatcagcctgtgggctaggcgcggtgg

SEQ ID NO: 5403 - DNA, 120 bp, synthetic construct
  source 1..120: mol_type = other DNA
catcatattggttcctagcaaagctaaagaaagagctttatcagttcaggagctacaataaacttgaaaatcagttttggaaagcaggcaagcctcttcaaggaatcagtgtagagaaga

SEQ ID NO: 5404 - DNA, 120 bp, synthetic construct
  source 1..120: mol_type = other DNA
gggcagctgggactacaggtaatcaacaccactcctggcctttccagtgatatttcttggttaatctatccctttggtactgagttccaatgctatatcatcatatgccaagtctgtata

SEQ ID NO: 5405 - DNA, 120 bp, synthetic construct
  source 1..120: mol_type = other DNA
aaacatgactgggacattcatctttcaagaatcagtttcttttttatacatttttttaatttttatttttagttcagcagtacaagctcagatttgttacacaggtaaacttgtgtcatg

SEQ ID NO: 5406 - DNA, 120 bp, synthetic construct
  source 1..120: mol_type = other DNA
gtaccagttaattagatgattttaaatgccttgctttttacatgagggcagagggaacttcacttgttttataagctcttatgaggcttctttcaagtactcagggttggttagaaaggt

SEQ ID NO: 5407 - DNA, 120 bp, synthetic construct
  source 1..120: mol_type = other DNA
cattggggtttacagatgaaaaatgattgtagataccatctactcggcgctttattgaaaaggcacaagaaaactgaggcccacgggtgttaaatgatttttcatggctaaactagtctg

SEQ ID NO: 5408 - DNA, 120 bp, synthetic construct
  source 1..120: mol_type = other DNA
agctaagcgctttggtatatatcttacataatgtttagagaattgctatgtggtaagtattgtattattggccttattttaaaattaaggggccagaagcccctccagaatttctgcata

SEQ ID NO: 5409 - DNA, 120 bp, synthetic construct
  source 1..120: mol_type = other DNA
ctatcttctctgaataagttctggacttcaccttaaaataagtttttaggagagtaatatatattcatgggattgtgagggagcattgtagagctgttttcttctcagtcatagtggtgg

SEQ ID NO: 5410 - DNA, 120 bp, synthetic construct
  source 1..120: mol_type = other DNA
tgacaagtagaacatgcaagtgtaaagtgaaagtgatacacaaccaatggtgcgggggggggggggaggaagaaaacaactctagaaacctgtcaagctaaaaatttttaacatttcttc

SEQ ID NO: 5411 - DNA, 120 bp, synthetic construct
  source 1..120: mol_type = other DNA
cctcagataggactttttaaagcaaaagcatcagctaacttgttgcctgacattacaaaagaaatcagtccttaggctctggccctttactctccatcagcgttagtcaaagacctcttg

SEQ ID NO: 5412 - DNA, 120 bp, synthetic construct
  source 1..120: mol_type = other DNA
acctatcagggttaagttccaaagtggtgcaataagataagcatttggaaggattcttaacctctcagacccttagttcctttaaaaaaaaaaaaaagttggccgggcgcggtggctcac

SEQ ID NO: 5413 - DNA, 120 bp, synthetic construct
  source 1..120: mol_type = other DNA
tgcccataataaaccaatgaacaatgatcccctgctgctgaggtttatgagtgggcctggattaacatgttttaaaatgccagggggaaaaagaactgacttgagaagtaagtacaggtt

SEQ ID NO: 5414 - DNA, 120 bp, synthetic construct
  source 1..120: mol_type = other DNA
ttctgctttattttctctttccccacatacttaaatccagagggactactctccatcctgaatatcaaaagctaaaattacccccccaaaaaaacccaggcaagaatcatagcagaaatt

SEQ ID NO: 5415 - DNA, 120 bp, synthetic construct
  source 1..120: mol_type = other DNA
atgaagaactatttgattcattctctttgttatatgcgtaaactcatcccttaaaaagtgacatgagttttacctcttaagcatctgtatggtacgccagttctgagtaaactcctttct

SEQ ID NO: 5416 - DNA, 120 bp, synthetic construct
  source 1..120: mol_type = other DNA
attgtgtaagtcaacatttataggatgtcagggactgctcaaatacaggtttagctctggctgccaatggcaaaaggcaccaaagtggtttctaacagaagttatatcatcctggcactc

SEQ ID NO: 5417 - DNA, 120 bp, synthetic construct
  source 1..120: mol_type = other DNA
ccacaacaaccaacacctctaagccctcccatccctgaaaaagtgctttcaccaaattgtacttcaggcttataaataaaatgagggtcaacatttagtatactactacattttatgaaa

SEQ ID NO: 5418 - DNA, 120 bp, synthetic construct
  source 1..120: mol_type = other DNA
caacatgtgtataaaggaagctcaggggaggggggtgggaaatggaggaaaaacaatatttgaagtatcgtatagaaaaatgacatcaatctagagattaaaagtacattccagatgcca

SEQ ID NO: 5419 - DNA, 120 bp, synthetic construct
  source 1..120: mol_type = other DNA
taagtacagctgacctgtgtaagcaataagatagtgcagaggtgacagtgggagttcgaagactagtcataaaagatattgtggcttccctcctcctctcttttgaatcatttgatctga

SEQ ID NO: 5420 - DNA, 120 bp, synthetic construct
  source 1..120: mol_type = other DNA
tactgatgttaaacgttctcagtgccaatgtcagactgtgctcctccctctcctgaacctctaccctcaccctgagctgtcttgttgaaaacagtaataaaaacattactttacattgta

SEQ ID NO: 5421 - DNA, 120 bp, synthetic construct
  source 1..120: mol_type = other DNA
gttgcctgaaaataatgaggacaattaccattattatacacactggtggcagacatcaagttatgtataaaagcaaaaatcaaagggagaatttcaaaatgagagaatgtaaaagtattt

SEQ ID NO: 5422 - DNA, 120 bp, synthetic construct
  source 1..120: mol_type = other DNA
taacagggtgcaatagctctgaaaggacagaagagggaactataatatttaggaattccacactaaatagccctttttaaaaaaaactaaacactgactttcaacttggcaacagctaaa

SEQ ID NO: 5423 - DNA, 120 bp, synthetic construct
  source 1..120: mol_type = other DNA
aatggttcaggatttcctttctataaatgtaccagaagatttgtaattgcttggaaagcagatgtttgcatgtctgcatgagaacaataaaaaatgggctgggccaggcacaatgactca

SEQ ID NO: 5424 - DNA, 120 bp, synthetic construct
  source 1..120: mol_type = other DNA
cagaaagtccttaaaatcagaaaatgcttagttcttagaacatggcagacctttaataattcctgaatttgtaatcactcaattagattgagatttatctgcagtcatccgtggaagagg

SEQ ID NO: 5425 - DNA, 120 bp, synthetic construct
  source 1..120: mol_type = other DNA
tgttatttttcccccacatccctactgccagtgggctggaagagaggtgtatatcctctttgctgcttccaagctatttctctttcctccttcttggaatccataatccctttaaggcac

SEQ ID NO: 5426 - DNA, 120 bp, synthetic construct
  source 1..120: mol_type = other DNA
tgccacaagaataatatggcaatacaggacaagctttccattcacatgtaacaaacaaagtgaagtgggaggtttgtttgttttttgtcaatgttaacacccatatcctcattccatgtc

SEQ ID NO: 5427 - DNA, 120 bp, synthetic construct
  source 1..120: mol_type = other DNA
tctagaatgctacagcagttaagacagtgtcattcatttaagaaaaacaaaattgaccaaagtaacagaagaaacagagcagactacatatagaaacccgatctgcaagtcagctgactt

SEQ ID NO: 5428 - DNA, 120 bp, synthetic construct
  source 1..120: mol_type = other DNA
caggaattgggtgcctgacaaaaacctgccaaaaaaaaaaaacattactaactgagaaattgtgtagaatgctctttgtccttccaaataatttggtgatatttataattacaaaaggac

SEQ ID NO: 5429 - DNA, 120 bp, synthetic construct
  source 1..120: mol_type = other DNA
aacagtagataacgagcctttgggaactccttgcaagaaaattgggcatgaaccattttatatagcaattaatgtaaaaagtatccccaggaggctgaaatacccaaggatatgtaaaca

SEQ ID NO: 5430 - DNA, 120 bp, synthetic construct
  source 1..120: mol_type = other DNA
actaaccaaacatgacacacagctgaagtcagaaaaaccagattgataatttcacttgaactattttctgtcattccaacaatttactggagtacacaattgtgactatttttagctata

SEQ ID NO: 5431 - DNA, 120 bp, synthetic construct
  source 1..120: mol_type = other DNA
cttggcccacagttccgcattctgctttgctgcttcaggtctccatgcgatagtacatcatgttctctttgggattcttttgctccttctcgatccagctaactcttacttgtttttaga

SEQ ID NO: 5432 - DNA, 120 bp, synthetic construct
  source 1..120: mol_type = other DNA
tgctcagggacagggagtttccctactcttcttttgttttcctgtgactaacctattaggaaatggggaatatgcagatgttctttgttgggtcttacttttaatctcataaactgtagg

SEQ ID NO: 5433 - DNA, 120 bp, synthetic construct
  source 1..120: mol_type = other DNA
aaaattgtgcttagcctcatcattatagaaatggttgcagtaagaaacctaggaacatggaaattataattttactaaatataatatattgtcagctgtatttaatggtttgcacttttg

SEQ ID NO: 5434 - DNA, 120 bp, synthetic construct
  source 1..120: mol_type = other DNA
gatgctgggatttgaacttgaagatggatcttagagccaggagttaccatgagaatttaagcccctgaaaattcatagacatcctgcaggtctttaaactttccataggtgccgaaatga

SEQ ID NO: 5435 - DNA, 120 bp, synthetic construct
  source 1..120: mol_type = other DNA
cccaacgctttggagccttgaaagcattcaatacaaattttcacaatgtaggtaactttgaagtgtggcttgtcaggtcatgctgacttatttttgtacttgcatagggaattggtgagg

SEQ ID NO: 5436 - DNA, 120 bp, synthetic construct
  source 1..120: mol_type = other DNA
cattttggtggaaaaactacctgcgctagtttgcatgtgatctaaatgatccaaactaatgggtgagctttgggtgcttgaggactatatgcaggagaaaagaggagggatggataaaac

SEQ ID NO: 5437 - DNA, 120 bp, synthetic construct
  source 1..120: mol_type = other DNA
gtaccattcatgtgcagaaaagcacctttatttataaaatatgaattcaacttgctctacttggcaggaaggtacctagacctcactcacctattcaaggaaactgagtcacttcctgtt

SEQ ID NO: 5438 - DNA, 120 bp, synthetic construct
  source 1..120: mol_type = other DNA
gagatatctcaaacttatggacaggaagcttcaatatcattaagatgtcagtttttttccaacttgatctttggatttaacataatcccagccaacccagcaagctcttttgtggataca

SEQ ID NO: 5439 - DNA, 120 bp, synthetic construct
  source 1..120: mol_type = other DNA
cagggcatgggttatgccacacaacaaagctgacatttgtagaagggcagtgatctttttttatcttgctcactaattcagtcaacaaatatcattgagcaaactgtgtaccaggctcca

SEQ ID NO: 5440 - DNA, 120 bp, synthetic construct
  source 1..120: mol_type = other DNA
catttgacccttcattagattaaaatctcaggttgtcactacctgttgaatgaattaatgaatggatggaatatgggcttgagaaaggctggacactggtgcatgggtgactgatgcagt

SEQ ID NO: 5441 - DNA, 120 bp, synthetic construct
  source 1..120: mol_type = other DNA
gctcagtagcactccattgtgcatatatgccacattttcttcactcatttatctgctgatggatactcagattgcttccaaacctttgctatcatgaacagtgctggaataaacatggga

SEQ ID NO: 5442 - DNA, 120 bp, synthetic construct
  source 1..120: mol_type = other DNA
aggactacctgaattgtgacatctattctgcttgtatctataaaactaattggctattggttctaataaggagtcaccatggaatactatgcagccataaaaaatgatgagttcatgtcc

SEQ ID NO: 5443 - DNA, 120 bp, synthetic construct
  source 1..120: mol_type = other DNA
tttattctaatgaagtggaaatacctgagctttgtgtcttgaaacagccccctactccatgcagctggattttataaactaccttgttcagttgagccagttggtcttaagacggccctt

SEQ ID NO: 5444 - DNA, 120 bp, synthetic construct
  source 1..120: mol_type = other DNA
ctcaagcataccttattataccaagtagtttctttgtctcttactctctgggacactctctgtccttctctaattaatctcaatgccagtattacagatacctggaaagtcatccagaga

SEQ ID NO: 5445 - DNA, 120 bp, synthetic construct
  source 1..120: mol_type = other DNA
acacctcttcttatgtcaacttggattgtgatgagagaatggggccagtcaaccacccagtgaactctgtaggtaggctgaacccgattactttggtttctcagaacctctgatgtgggc

SEQ ID NO: 5446 - DNA, 120 bp, synthetic construct
  source 1..120: mol_type = other DNA
agttgtgttaagttcagttagcataatttttctaactgttctcattaagggcattttgtttgtttctagtagattggctagtatacaggctgcagtgagcatttctgcataatgtctctt

SEQ ID NO: 5447 - DNA, 120 bp, synthetic construct
  source 1..120: mol_type = other DNA
accccccaccctgtctctctcccttcttccttctctgaagcaatatgggattgtcttgaatttcttccacatgtcttttcagagtttttacctttttcatttcttttttctgagtctagc

SEQ ID NO: 5448 - DNA, 120 bp, synthetic construct
  source 1..120: mol_type = other DNA
tcctgctacccaatcttgatatttttttactccattctagttatttcacccactgctaagcatttctttttttcttccataaggacaaattcaaggaaaaatggtagttatagacaacac

SEQ ID NO: 5449 - DNA, 120 bp, synthetic construct
  source 1..120: mol_type = other DNA
attctaaacaaaatggatgtatttctttttacctaaaataggaatttgagacagccaagttaaaagggctccccagagaatccccagctgtcttgtgcattcggaggatggagttgggcc

SEQ ID NO: 5450 - DNA, 120 bp, synthetic construct
  source 1..120: mol_type = other DNA
acgaagcatttgccatttttgctttccagtccttataataaaggtggcaagaagaaagtggtttgaatccacacagccgatcccagggactcaatagtaggggagaaattttgcaataga

SEQ ID NO: 5451 - DNA, 120 bp, synthetic construct
  source 1..120: mol_type = other DNA
aaaataattttgggaagctctttagacagttcacactgttggagaaaaaccctgtgatatgaatggctttgaaaccagcagcagagaagtaggtcctttcctgtgggtatgggtcctgga

SEQ ID NO: 5452 - DNA, 120 bp, synthetic construct
  source 1..120: mol_type = other DNA
aagcattgccaggcctaaagagaaattgctcgcaaatgaaaaaaaccatgcagggaaggtgtttctatgcatctttcgtattcttcccatgcagttattgaaattccttaaactctgtgc

SEQ ID NO: 5453 - DNA, 120 bp, synthetic construct
  source 1..120: mol_type = other DNA
tccaattatttctccatggttagatttagattaagcatttttttgcaagaatactgtgtaagttgtgtggtgttctggacacaggaaggggaacatcacacagtgttgtggggtgggggt

SEQ ID NO: 5454 - DNA, 120 bp, synthetic construct
  source 1..120: mol_type = other DNA
aacattgaacttgccaagtgaagtctacaaaactgaggtacccaaaaaatgttattttgtactgtcaattttgagaaaaccacaacacaaaaaggtaacttacatctttcatggaatgtg

SEQ ID NO: 5455 - DNA, 120 bp, synthetic construct
  source 1..120: mol_type = other DNA
acccaagggactattttgacgctaatccttatttttctgaggaatctttaccaccaattaaaaaagaagagaagaagaaaacaatttcaaatacttttaaaccgtcttctcctggtaaaa

SEQ ID NO: 5456 - DNA, 120 bp, synthetic construct
  source 1..120: mol_type = other DNA
acaccagatttttttctgagctaaattgtgggttttctacttcaataatacttttgttcaatatttcactgatttccgactgtacctttaaaagataaattgagaaaaatttgatttcag

SEQ ID NO: 5457 - DNA, 120 bp, synthetic construct
  source 1..120: mol_type = other DNA
gctgttccctggtcacggtgaggctgggcatgcctgggcgctgtggccacgctgttccctggtcacggtagggctgggcatgcctgggctctgtggccacgctattattccctggtcaca

SEQ ID NO: 5458 - DNA, 120 bp, synthetic construct
  source 1..120: mol_type = other DNA
acatctacagaataatcctgtgagtaggaaatgcaaaggcactatattcctccagagtggaggcagagggtgggttggctttcggtttcttgccatttttgttttttgggttaatttttc

SEQ ID NO: 5459 - DNA, 120 bp, synthetic construct
  source 1..120: mol_type = other DNA
caaacacaccacacaccaaacacacaccccacacaaacacaccacacaccaaacacacaccacacacaaacacaccacacacacagaaaatacataccacatacacacacaccactcaca

SEQ ID NO: 5460 - DNA, 120 bp, synthetic construct
  source 1..120: mol_type = other DNA
acagttcacgtgaagtaccccacatttattgatcttagggttgaatataaacgcaattaaaagctatggcaggtgatgtcatctttattgtttacagtcgaagctcctccatgggagggg

SEQ ID NO: 5461 - DNA, 120 bp, synthetic construct
  source 1..120: mol_type = other DNA
tgccattatcagaagcttgaaccgtgagcgtgtaacctgaaatcttttcaggcaaaagacagaatgcacgttcattttcacaaggccgacagagctccaatgaggagtgtcctcctgaga

SEQ ID NO: 5462 - DNA, 120 bp, synthetic construct
  source 1..120: mol_type = other DNA
atgtctttttttgattttggtgtcaaggtgatactgggtgtcacaaaattagatggaaagtgctgtctcctttcctatttttggaaatagctgtgtagagatgggtatgagttgttcttt

SEQ ID NO: 5463 - DNA, 120 bp, synthetic construct
  source 1..120: mol_type = other DNA
tagcacggctgtaacttataaacgtgcccccttttgtatctgtagttagaaaggtgcagatagtattaaaagggtagcttacttcagacactctgtctctggatctgaccaccgctcggg

SEQ ID NO: 5464 - DNA, 120 bp, synthetic construct
  source 1..120: mol_type = other DNA
taagcttcttctgcctttcatctctgtaggatgaagccccacccgcccttcaggatgccagccttggcaacattgtgagaccctgtttctacaaaaagtaaatgagtgtagtggtgcacg

SEQ ID NO: 5465 - DNA, 120 bp, synthetic construct
  source 1..120: mol_type = other DNA
cccacattaagctcctgttctagggaagacagaaagaaaatacacgtgtccttagtatattagaagattccaagtactgtagagaaaaataaagcaggctggactcggtggctcatgctt

SEQ ID NO: 5466 - DNA, 120 bp, synthetic construct
  source 1..120: mol_type = other DNA
gcctcgtaggctgggacagagaaggcagcccgagagctctcggccttgtgtgctacatcaggaaatcatcctcattctgcaccgtctgcttttgcttgtcggtgagagaaccttgtacaa

SEQ ID NO: 5467 - DNA, 120 bp, synthetic construct
  source 1..120: mol_type = other DNA
tagtgtagatgtgttggaaggctacatggagcttcctcaaaaaattcaaaatggaaaacggaacttccatgcaacgcagcagcccccctgctgggcatttacccaaattaaaaatggaac

SEQ ID NO: 5468 - DNA, 120 bp, synthetic construct
  source 1..120: mol_type = other DNA
acttacgcgcccgtgcagcttctcgttgagccgaggttcccggtgctcgctcctcttcaccttcagccactgcaccagaggcttgatggtcaggccctggaggacagggtctcgtgaccc

SEQ ID NO: 5469 - DNA, 120 bp, synthetic construct
  source 1..120: mol_type = other DNA
tcctcttcaaggatgctgttttgcctctggtcgctctatcttatcttttttctccgcactcctggacgtctctcggacctttcgctctgacagtggcttgagcctcggccgccacttccg

SEQ ID NO: 5470 - DNA, 120 bp, synthetic construct
  source 1..120: mol_type = other DNA
ctcccacttggtcttaggacagaaatctgtgcatgctgcggggaagggcactgaggggctccacggtttcaggctgtgagacaaagcagccatcgtaagcagctgtgggcactcatccgg

SEQ ID NO: 5471 - DNA, 120 bp, synthetic construct
  source 1..120: mol_type = other DNA
gccgtgcgggatccctgagtctcacccgccgcacccgccgtgcgggatccctgagtctcacccgccgcacccgccgtacctgccgcatccgccatgcgggacccctgcgtctcacccacc

SEQ ID NO: 5472 - DNA, 120 bp, synthetic construct
  source 1..120: mol_type = other DNA
ccagcaggagggaaggcccgaaggctcaacggtgtgctgcggtgctcccggccgctgtgtgtgtatgtgtgtatgtgcgtgctcacacactggggagagagacacagagcaggtgtgact

SEQ ID NO: 5473 - DNA, 120 bp, synthetic construct
  source 1..120: mol_type = other DNA
aagccatgtcctcctgaagcatgatctagcctgtcctgtcctatcctgttctctcccctcccctcccctcccatcccatcctgttccatcacctctcctcccctcccctcccatcctgtt

SEQ ID NO: 5474 - DNA, 120 bp, synthetic construct
  source 1..120: mol_type = other DNA
tctgagtaaatgcctgaatcctccctgaaccaccagcccctgagaggtggctttggcccactgggcaagtgtgacctgcgtgcagggattggggagtcagaaacgtctgggatcaaatcc

SEQ ID NO: 5475 - DNA, 120 bp, synthetic construct
  source 1..120: mol_type = other DNA
gcagcacgttattcctacatttggaacagattattggcagcgttttgccacctcttgcattttgaaactaaaagaaattgtccagtgaatttgtccttgcctgagtgacacttacacagc

SEQ ID NO: 5476 - DNA, 120 bp, synthetic construct
  source 1..120: mol_type = other DNA
agaggagaatggggtcagggaatgagggagggaaatctaccaggagggaagaagcgggaaacacacgcagaccgaatctgccagctgatgaggatttagtagggaaccaaaaacaagaaa

SEQ ID NO: 5477 - DNA, 120 bp, synthetic construct
  source 1..120: mol_type = other DNA
cagttcctgggcctgggtggtgttgccataactactgatctaggtttgtaatatcagcaaatagaaacagacctgccctacagtgctcagaccatttgttcatatttatttatgtctcct

SEQ ID NO: 5478 - DNA, 120 bp, synthetic construct
  source 1..120: mol_type = other DNA
atcagtggaactattggattgaaaaaaatatattttttttttcaaatttgtaacctgctgctggtgaaaacctcaatgttggtttcaaacataaggtgaaatgagtactattggagggag

SEQ ID NO: 5479 - DNA, 120 bp, synthetic construct
  source 1..120: mol_type = other DNA
aaccaactgatcccccttctccacttgcaaaaggcccacactggggaagggcacaagccacaggtacaacgagggcaagagttttgactatttcttttttttttctttttttttttttga

SEQ ID NO: 5480 - DNA, 120 bp, synthetic construct
  source 1..120: mol_type = other DNA
ttaagtcctggccttcaggacctcagcatgtgactgtatttaaagacaggctctctaaagtgatttaaggtaaaatgcaatcgttagtgtaggccctcatctgatatgagtgttgtcctt

SEQ ID NO: 5481 - DNA, 120 bp, synthetic construct
  source 1..120: mol_type = other DNA
cagtctctgtctctttacctgtccggtggctaggaaaatagttaccctgctcatttctcagggctactgtgagaccagctgagataatccgtggaaagcatttgtaaattaactggaagt

SEQ ID NO: 5482 - DNA, 120 bp, synthetic construct
  source 1..120: mol_type = other DNA
catgtagtcagagagatttaagttttcaatttagaaaccatagagaggcaggtggcaaattggaacacagatttcattttttctgcttatcccagcatttgtgagtgagaaacaagcagt

SEQ ID NO: 5483 - DNA, 120 bp, synthetic construct
  source 1..120: mol_type = other DNA
catagccttgagatgaccaagaaacatccctatgagttatggacagagttagggaggacaaagcccccatggaagccggcactcagaagcacatgtacacacacagctgaaggatgaaag

SEQ ID NO: 5484 - DNA, 120 bp, synthetic construct
  source 1..120: mol_type = other DNA
acccttttatggtcaactttgtcccccatttccagcccctggcaactactgatctgtttctgtccctatcattctgctttttccagaatgtcataaatagaaccatacagtatgtagtct

SEQ ID NO: 5485 - DNA, 120 bp, synthetic construct
  source 1..120: mol_type = other DNA
gtgatttcttggatcatcgaaagctcaggcctgtagtcagaacaagttgactgcatgttggtttttctggactcaacataatacgcagaacagatctatataatgggtggtttgctctgt

SEQ ID NO: 5486 - DNA, 120 bp, synthetic construct
  source 1..120: mol_type = other DNA
atgggtagaaaacattttatcttagttatgcctctattcttagtcccaattcttggaaatcatcattatcaagctctcaagtgactggacagctgctaagtcctgctcagcagccaagcg

SEQ ID NO: 5487 - DNA, 120 bp, synthetic construct
  source 1..120: mol_type = other DNA
tttcattgtcttatttttcaattagtcctaaacttgggagaagaaaagggtgcatttattgggcccctcagtcctaaaatacggattttaaggaggcatcaaggaggcatcagggaggca

SEQ ID NO: 5488 - DNA, 120 bp, synthetic construct
  source 1..120: mol_type = other DNA
ctggggctcagactcatgtggtctgtctgtgtgtctctaaagtgagaaattcattccatttgaacagaggaagttcttcctccagggttctaatcatattgattcactcatgtgactact

SEQ ID NO: 5489 - DNA, 120 bp, synthetic construct
  source 1..120: mol_type = other DNA
tataatttaaaaaaaaaaaagaaaaaaggtgaaaagttctgttatgaacttgtgaaaacagcatatagcatatagataacccagcattgctaggcagttctaaggacccgtaccaggctt

SEQ ID NO: 5490 - DNA, 120 bp, synthetic construct
  source 1..120: mol_type = other DNA
agtggtgcttgtacttcctatgggattactcaggagacacataatgtctagttctctcttttgtctctgtgattggtaagaagattgatcagtggttcaagtacggtcagtgcagttcat

SEQ ID NO: 5491 - DNA, 120 bp, synthetic construct
  source 1..120: mol_type = other DNA
gaatcatccttgtaacgccagctgggtgccacaaagcattattaattgactgtggttccttctctcatgcgtgcagaggccgctggatctgctgaacagtagggaggtctgtgtgcttca

SEQ ID NO: 5492 - DNA, 120 bp, synthetic construct
  source 1..120: mol_type = other DNA
tctcttgccccctccttttctttcccaaagcacaaagtgatgggttggaatggaaacatataactttcatgaagtgttccctactttaacctctgggtggaaagctgaaaacaaggttat

SEQ ID NO: 5493 - DNA, 120 bp, synthetic construct
  source 1..120: mol_type = other DNA
ctgtgggctgtgctcatgatcacttgccattttgtagtgtctccttagatttcaccagcactcttcttacatctgggttaatcctgcatcttttctcaagcaaaattctcaattacacag

SEQ ID NO: 5494 - DNA, 120 bp, synthetic construct
  source 1..120: mol_type = other DNA
ataccattgtagactagattatgctcaatcaatagattttaaatcaagatctgcagaactctaaaagtttcacagaaaccactgctaagaaatggggtggggggtgggaggctgctgtcc

SEQ ID NO: 5495 - DNA, 120 bp, synthetic construct
  source 1..120: mol_type = other DNA
tcctaagccttggccattttatcttaggtaatatggactcttcagggggggaaaaaaggggaaggggggctcttgaataaaatgggtagccttttcacatattgacatcttcagtattaa

SEQ ID NO: 5496 - DNA, 120 bp, synthetic construct
  source 1..120: mol_type = other DNA
ttcacaggctgcttttcactctgtagattgtttcctttgttgtgttaaaaatttacaacttgatatagtcccatttgtctgtttttgttattattgcctgggatttgcaggtcatatcag

SEQ ID NO: 5497 - DNA, 120 bp, synthetic construct
  source 1..120: mol_type = other DNA
gggttttgaatataccattgctctgtccaaaactttcaaagcagtgccaattactgacatgtaaattacatcttctggtttcttccactagtgctggctcccaagttgctttccacagtg

SEQ ID NO: 5498 - DNA, 120 bp, synthetic construct
  source 1..120: mol_type = other DNA
actatgattggtagaatcactgattatcctttcagattcacaaatagcttgttccaattcattctatatatagaatatttatgttgagtaatatgggaaagcattgaaattctactaatt

SEQ ID NO: 5499 - DNA, 120 bp, synthetic construct
  source 1..120: mol_type = other DNA
gcttttacaaaatatccttacaaagactcagagggggaaattacaagaaaatattctgtgaaacatcagattatttacttaaagttattgttgatggccattattttctgtactcttaga

SEQ ID NO: 5500 - DNA, 120 bp, synthetic construct
  source 1..120: mol_type = other DNA
ctggaatacaagggtgataatccttgctcttctaggattaaaatgatctcataaatgttgagtactgaaagaagtattggcacataataggcagttaataaatagcagtgaggagactcc

SEQ ID NO: 5501 - DNA, 120 bp, synthetic construct
  source 1..120: mol_type = other DNA
agaaaaagctctgaaattaatatctaaccatatagtcaagctgtgccaaatgattgtagattaaccagtgaaaatctattcacattttgttcagtagtgtgagagatacagcagccaaaa

SEQ ID NO: 5502 - DNA, 120 bp, synthetic construct
  source 1..120: mol_type = other DNA
taattttcctattaagaataacttagggactgcaagggagaaaggaatgttttattgaaataagtggacattatcatagccaatacttacaaatgttagaatttggaaatgaaaatgagg

SEQ ID NO: 5503 - DNA, 120 bp, synthetic construct
  source 1..120: mol_type = other DNA
gagcatgttttgccattttctctcctttatttcttgttcctaaatttagctcaatatgagggaataaaagcctggtgtgaaaaactcttttttcctaggtggcatctctcctccctctct

SEQ ID NO: 5504 - DNA, 120 bp, synthetic construct
  source 1..120: mol_type = other DNA
gggagggggggaaagagagagagagagaactctgatttggaaaacatctctctagttctaatattttggaatctcttgtatctctaaattcaatactgacttctatccaggcctcgtttt

SEQ ID NO: 5505 - DNA, 120 bp, synthetic construct
  source 1..120: mol_type = other DNA
caccgtgtctggccaaaggccagctttttactaggaaaacaaagctctactgatttatagaatcccagactcacttagtcattgaagctcgttaaagcctgaaagtacttagggaagttt

SEQ ID NO: 5506 - DNA, 120 bp, synthetic construct
  source 1..120: mol_type = other DNA
ctcctattgaatccccatcaagatgtggaacctaattcctcttcccttgaatattttgtaatggagagaacgtaagtagctaaggtgatactgcatcatttttgaggttgggtggggcaa

SEQ ID NO: 5507 - DNA, 120 bp, synthetic construct
  source 1..120: mol_type = other DNA
ccacggtatccttagtattcatttaattccaacttttacccaaacccatttcactgacagttagtcatcagagtctctgcttgattacctttaggagcagggaactcaccactcataaga

SEQ ID NO: 5508 - DNA, 120 bp, synthetic construct
  source 1..120: mol_type = other DNA
gggcccattaaagggtctccactggttacaaaggctgtttgttggcagtatcatatgttctgggcatttctggcaaagataaaaatgtgttcagaagttatcatcacaggttcttttgca

SEQ ID NO: 5509 - DNA, 120 bp, synthetic construct
  source 1..120: mol_type = other DNA
tggtttatggagtcttagaaattatccaggaaataacatttataataacaacaatgacagcatacaggtcctctgctgcaactctcccagagctcccaccaccatgacctataggtgtgc

SEQ ID NO: 5510 - DNA, 120 bp, synthetic construct
  source 1..120: mol_type = other DNA
cagtctgtgctgccctaagccaagaacccagtcatgctgtgccagatttctggcctacggaattgtaagctaataaacaggtattgttccaaactttctaagtttgtggtagcttattat

SEQ ID NO: 5511 - DNA, 120 bp, synthetic construct
  source 1..120: mol_type = other DNA
tgatgaaaggtatatgaaaggaatgtattgtgaaactaatatcggtttattacacttcctgtaagaactagcatgaccactcttttactctaaatatgccaaccgccttggctattcagg

SEQ ID NO: 5512 - DNA, 120 bp, synthetic construct
  source 1..120: mol_type = other DNA
ttgttgttgttctcccacagcaaaagttccaaaatgagttagttgtctgtagtctctgtctcatttcttgtctgtcattcacctcagagcccatttcagttaagctttgatccacaccgt

SEQ ID NO: 5513 - DNA, 120 bp, synthetic construct
  source 1..120: mol_type = other DNA
ttgtggttggggacatatctttggctttagataaaacaacactgtcaagttgagtacttcccacttctttgtagtttgttgttcataggattttgaattatggctaaaataagtttgtct

SEQ ID NO: 5514 - DNA, 120 bp, synthetic construct
  source 1..120: mol_type = other DNA
gggaatttgaattcagctgggctcacctactaagccagcatcaataagacttgattaaattacttcttggttctcattcacctagaggtatcatattatgaaggttccagagcagttgtt

SEQ ID NO: 5515 - DNA, 120 bp, synthetic construct
  source 1..120: mol_type = other DNA
acaaatgtatgacatgtatctaccattatggtatcatatagaatagtttcactgccctaagaaccctctgaactctgcctattcatcccttgctctctcctaatacctggcaaccactgg

SEQ ID NO: 5516 - DNA, 120 bp, synthetic construct
  source 1..120: mol_type = other DNA
actagacataaaggcagtgattcagcaatgcaatgggaggagtctgatatagcagaatgggtcctggattctgatgacttgtgttcagatttctgcatttcaacaaaacagctgcttaac

SEQ ID NO: 5517 - DNA, 120 bp, synthetic construct
  source 1..120: mol_type = other DNA
acagaaggagagagagagagagagagagaacccaccaaagtgcaagcttcctttcaaaagccatatccttctgatgctatgggtaatagttttctcccattaacagtcagtttacaattg

SEQ ID NO: 5518 - DNA, 120 bp, synthetic construct
  source 1..120: mol_type = other DNA
gtatgtagtttgctagggctactataacatatgtcacagactgggtggcttaaacaacagaaatgtactttttcataactctggaggccagaaatctaagatcaaggtgttggcagggtt

SEQ ID NO: 5519 - DNA, 120 bp, synthetic construct
  source 1..120: mol_type = other DNA
cagaaaggcatctctggtggttggaaggccagggggtcttacatgcccagattactacagaaagccattcaactgcaaagataaacaactaggaaggaaaaaagaaacaaaagatattca

SEQ ID NO: 5520 - DNA, 120 bp, synthetic construct
  source 1..120: mol_type = other DNA
tccttctcccccatgcccctgctttgcctgactaaggccagaaattttttcatgaagtcactttatagagcaatagcaacatttactattcgtgaagtcgcccctccataatttttaagt

SEQ ID NO: 5521 - DNA, 120 bp, synthetic construct
  source 1..120: mol_type = other DNA
gaactctctgacattgaaagcagttgagcttatcttcagttccaaagaaactaatgaagcatctaattttatcaaatcaagtggttgctaatcccatttaaggaaaatcaaagcgttgga

SEQ ID NO: 5522 - DNA, 120 bp, synthetic construct
  source 1..120: mol_type = other DNA
ttctcacgtgaaatctcacaaagtgtgttcatctgcatgtttacactcaatcctatgaacgactccatgaagtagtgtatgaaggagagttcctcatgcatgtggatttgcacatgggga

SEQ ID NO: 5523 - DNA, 120 bp, synthetic construct
  source 1..120: mol_type = other DNA
gcactcagaaaggtgaatctcattggcatgcccttatgtaggaatttaggttgcagttttcttccttgtctgcaaagttgcttatcactaattttcttgccatctctccatctccccaaa

SEQ ID NO: 5524 - DNA, 120 bp, synthetic construct
  source 1..120: mol_type = other DNA
tcttaacagagatggggttatagcctcattaagctagttttatatctcttttagtggctgcagcatctttgtaatggtgcagcatctttgtaatggatatgctattacttaaccaatgcc

SEQ ID NO: 5525 - DNA, 120 bp, synthetic construct
  source 1..120: mol_type = other DNA
gagaactcagagtcatataacctatacatggtactgccgagatcttgggctgcagctcctggtttctatactaagccatgttattatgctactttagcaatttctagccctagatctcct

SEQ ID NO: 5526 - DNA, 120 bp, synthetic construct
  source 1..120: mol_type = other DNA
ttttgatggcttctgaatcccatatctgcttcaacgtcctgctctggagagccaaactagagtttttaaacttcctgttaaacatctctatctagatctcccttaagtactctcaaacta

SEQ ID NO: 5527 - DNA, 120 bp, synthetic construct
  source 1..120: mol_type = other DNA
cttttaattttcaaaagcactgcaattgcttggtgtggtttcaagagctggggtgccattctccctgatgatgactctgctgacgtcaatggcattcttatcatgcctagtgcgacatca

SEQ ID NO: 5528 - DNA, 120 bp, synthetic construct
  source 1..120: mol_type = other DNA
ggagtaaagtaacttgagcatcattaatagtctggggtttcactctaaattttggcaccacaagtattctcagaatacggtttgttctgggaagtgaacctagggtctgagttcatttgc

SEQ ID NO: 5529 - DNA, 120 bp, synthetic construct
  source 1..120: mol_type = other DNA
gtatagtatccttttgtttcattaatgtgataacttgtcatctgtctagggctacgaagtttattttttctgaaacgtctatttgtttcttaaactctttttatatcaacctaatcatca

SEQ ID NO: 5530 - DNA, 120 bp, synthetic construct
  source 1..120: mol_type = other DNA
gagaactcattaactagatactcaaatgataagaattgaagaaatataagggagagagggagaaatggaggaaaggagggagagcagaaggaaggaaggtgggaaggaaggaaggaagga

SEQ ID NO: 5531 - DNA, 120 bp, synthetic construct
  source 1..120: mol_type = other DNA
gtaactcatctttacattttcagcatatttaaacaaaccaacaaaatgaaatactaatagtaaaaaggctgacccatgtggctttgcagtgctgttcgtccagaagcatggcacacgatg

SEQ ID NO: 5532 - DNA, 120 bp, synthetic construct
  source 1..120: mol_type = other DNA
cccccacttctcctcctcctccccctcttcctccccctcttcctcttccttctcctactcctcctctcgtcctccactttattcttcatctgcccctaccttactcaacctctactcctg

SEQ ID NO: 5533 - DNA, 120 bp, synthetic construct
  source 1..120: mol_type = other DNA
caagttgttttttttcttctaaaacttctcactcccataaagcaaatacagaatgctttggtttggtcatttaaagaagaatatgtttctttgttttaattccattttgtggagttcggc

SEQ ID NO: 5534 - DNA, 120 bp, synthetic construct
  source 1..120: mol_type = other DNA
agtgaggagcgcctctgcctggccacccttcgtctgagatgtgaggagcacctctgcccagcctccctttggctgggaggtgaggagtgcctctgcccggccgccccgtctgggatgaag

SEQ ID NO: 5535 - DNA, 120 bp, synthetic construct
  source 1..120: mol_type = other DNA
aatcaaagcatactactacagaaaatcatcaaattacaaaggaagacagcaaagaaaaataaaggaacaaaaaaagtctacaaaactgccaaaaacaattgacaagatataactagtaag

SEQ ID NO: 5536 - DNA, 120 bp, synthetic construct
  source 1..120: mol_type = other DNA
cctgctatgttgatctttggcagtgccagaggcttaaattttgacctgctcaattaaaaataaacactggcgtttataatgaaaaggtttttttgtcgggggggggggggtcaagagaat

SEQ ID NO: 5537 - DNA, 120 bp, synthetic construct
  source 1..120: mol_type = other DNA
gaccaatctgagttcaaactgaggaaacgtaccttatcaatattaagaatagattgtattttaggcagaaactccaatgaggatgctagtacaatctataatgagtaacaggtctgggag

SEQ ID NO: 5538 - DNA, 120 bp, synthetic construct
  source 1..120: mol_type = other DNA
aggaaggaacggtaccgcattaatctacacaagagatcgtggaagccatgaccagggtcatggcaagtgaggagaagacatgaaaatctattgttcctttatcattttatacagagtgaa

SEQ ID NO: 5539 - DNA, 120 bp, synthetic construct
  source 1..120: mol_type = other DNA
agcactgcagtctggattccttccgtactgtgaacctgtgtatcagcgttgtgtaaacctagtacagaagactcttgcacaagccatggtaatttttttaaaatgtcttcctcttcttga

SEQ ID NO: 5540 - DNA, 120 bp, synthetic construct
  source 1..120: mol_type = other DNA
ttcatcaaagtcttaatgcctaagagaaaatctctggtcaactatttgatgaaaatccttctagacaattctgagtgtacaggcacatggtgatacctatacatacattgatggaaaatg

SEQ ID NO: 5541 - DNA, 120 bp, synthetic construct
  source 1..120: mol_type = other DNA
tattttgagattatcactggaaatatctttgtcatctagatgtggggaatgttaaatgacctgcctatttgagcatcagatgcactaggtgtgccactgctaggaccactcagtatgtag

SEQ ID NO: 5542 - DNA, 120 bp, synthetic construct
  source 1..120: mol_type = other DNA
cttctgagtactcttacttggaaacccttctaagtagcaggaagatttttcaagtgcctgtgtgtccacaactactctttctacctccacttttttgtctgttcagtctattcagcagtc

SEQ ID NO: 5543 - DNA, 120 bp, synthetic construct
  source 1..120: mol_type = other DNA
tactgttagaagagaagagagcaagactgataatacatgtcagtttttatttttggatggggagatgaagaaaagttacaagagaaagaaaggatacaactaccttgagagggcaggata

SEQ ID NO: 5544 - DNA, 120 bp, synthetic construct
  source 1..120: mol_type = other DNA
aatggctacaaccattagcagctcttcaactaactcttcttaccttggcaatttaaaaacccaggactttcaaagaagtacagatgcttcctttcccagggaagaaaggggaatggtaag

SEQ ID NO: 5545 - DNA, 120 bp, synthetic construct
  source 1..120: mol_type = other DNA
acataccttcaatattttggtggttcaatgaaagtccagactggcgaaacgacccaatgaacattgaacagttttttctagtcctaaaaaatcaattaataaaaataaattttaaaatgg

SEQ ID NO: 5546 - DNA, 120 bp, synthetic construct
  source 1..120: mol_type = other DNA
gcattgcaactaataaacatccaataataatacgcaaaagaaggggagtggaggatcaaggaaaaacacttcaagatcgcaaggtacatttcaatccactattctgtccattgatatgaa

SEQ ID NO: 5547 - DNA, 120 bp, synthetic construct
  source 1..120: mol_type = other DNA
gcctccttcctttttcttgtatactataagagtgtgatactgttttaggagaatcagctgcttatccctctgccataaggaatagaaggatgagtattcacctaggacaaaaatctggct

SEQ ID NO: 5548 - DNA, 120 bp, synthetic construct
  source 1..120: mol_type = other DNA
ctcgctaggataagtcctttgactctccgttttgccattccctatgctcttgttaattagcctaatgtttttattagcatctgtaagacccatgaggggaagttgagacagcaaatttga

SEQ ID NO: 5549 - DNA, 120 bp, synthetic construct
  source 1..120: mol_type = other DNA
agtctacaaatcatgttcagtactttgtattatttagtctttatggtcttttgggcaaattattaggaactgaggttttaacccagatcttcagactagaagcttaggatgttatgttcc

SEQ ID NO: 5550 - DNA, 120 bp, synthetic construct
  source 1..120: mol_type = other DNA
tggcctggaggagtgtgtgggtgtgtgtacgtgagttcattttctacatggacaaataggtcatctgcaagcagagacagttttactgcttcccagtctacacattttaaatttcctttt

SEQ ID NO: 5551 - DNA, 120 bp, synthetic construct
  source 1..120: mol_type = other DNA
attcacagaggatcttaacaaacagtgctaaatgacttctggattttaacacggaagtacctcttccttaaaatttttagcaactgagaactatatgacaaatttctatacaatttgggc

SEQ ID NO: 5552 - DNA, 120 bp, synthetic construct
  source 1..120: mol_type = other DNA
agtggttgagttttatgcttttcgctggcagactcggatgtgtgcttgcagtttatgtaattgaataacagccccagctcatggccaagacctgaatagatagatactccctaaatattt

SEQ ID NO: 5553 - DNA, 120 bp, synthetic construct
  source 1..120: mol_type = other DNA
aacttggctataagcaccctgagggtgggaccatgtccttgctatgttcagcacataggaggtactctggaagtagctacttacagaggagaaggaaaaaagaaaggattaaaaaaaccc

SEQ ID NO: 5554 - DNA, 120 bp, synthetic construct
  source 1..120: mol_type = other DNA
ttgtgttacactgacaggacacccacttgttatctgtttatgtgttttcagtgcacgtttgtagaatttattcccctttcacaaaacaagtcaggtgccactttgcccccctgatgtgat

SEQ ID NO: 5555 - DNA, 120 bp, synthetic construct
  source 1..120: mol_type = other DNA
agatttgttgggagaattaagaaaaaaatatacataaaacactgaacatagtgactggcacacaggatggcaaataaataatagttatttttgttgtattgttgtttaggggtatttctg

SEQ ID NO: 5556 - DNA, 120 bp, synthetic construct
  source 1..120: mol_type = other DNA
ccctcttctttcctttcctctttttctttttttctttgctcctctgactgatttcaaatgtccatctagaagctcactgattctttcttcagcttcctcaaggcagctgttcaagcttcc

SEQ ID NO: 5557 - DNA, 120 bp, synthetic construct
  source 1..120: mol_type = other DNA
cacggattggctgagcttcttgaatctatgaatgtatgtctttcaatcaaattgggaaattcttggctattatttttaaaatgcttttctacctccattctcttttttccttttcttcta

SEQ ID NO: 5558 - DNA, 120 bp, synthetic construct
  source 1..120: mol_type = other DNA
ttcagcccagtatttccccacctccatagagtgcagtgccactgatagagtttgtataaggtattgtcttcctgaacctacaaaagctcaattctttattttgttatgccggatgcttac

SEQ ID NO: 5559 - DNA, 120 bp, synthetic construct
  source 1..120: mol_type = other DNA
ccctctcctccttccatctccatatccaatgagataccaaatcttattcatttttcttcagaaatgcctgtctctacttccactgccaccatcttagctttggcttccatcaccatttga

SEQ ID NO: 5560 - DNA, 120 bp, synthetic construct
  source 1..120: mol_type = other DNA
agccaccgcgcccggcccttttttactacttttaatgactttcagaaccactactagctgtttccataatggcaagcaaatcggtgcagtgagatattgggtaaaacatcataacatcta

SEQ ID NO: 5561 - DNA, 120 bp, synthetic construct
  source 1..120: mol_type = other DNA
ccattaacaaattttgtgatttgaaaagtttgaaaaccatgactcttatgaaagagtcaccagacaacactgtaggtgaaatagcttaataacttcaaagatttttctatgctttttagt

SEQ ID NO: 5562 - DNA, 120 bp, synthetic construct
  source 1..120: mol_type = other DNA
tgagttatagctgcagctatcatgtatctttctctgaaatatttttcatatgaggaaaacctaacccaagtttgcctgcacaccaagagcatgtcctcagagaaagtgagcttcggggtt

SEQ ID NO: 5563 - DNA, 120 bp, synthetic construct
  source 1..120: mol_type = other DNA
gcatagataacggatctgaaatcctatattgctaaagcgtgggcttcatctgattccaggcactgccagcccatgattccttaccccctcccatgtgtttgttcactacacaatctaggt

SEQ ID NO: 5564 - DNA, 120 bp, synthetic construct
  source 1..120: mol_type = other DNA
ctctgcataacaatgctttatataaaggactaccagatgtagtttccaaggcagggcttacctgtactcaattatatcaaataagcattcacaaaatgaaattaaacctgtgcttttagt

SEQ ID NO: 5565 - DNA, 120 bp, synthetic construct
  source 1..120: mol_type = other DNA
ccaggatttctgtttggttcttttctatgattatctctttgttgaatttctcattgagatcatgaattattttcctgcttaccttgtattgttcatctgtgtacttttctatctcactga

SEQ ID NO: 5566 - DNA, 120 bp, synthetic construct
  source 1..120: mol_type = other DNA
aacagctgaggtgccatagggtcttaaattctatgattccaactgaagtagactcaatctctgaatattaacttaatcctaagattaaggggatagctactttagggatcttacagtatt

SEQ ID NO: 5567 - DNA, 120 bp, synthetic construct
  source 1..120: mol_type = other DNA
gaacactggtagtgggctgggacagaggcaccactataccacctgtgtccgtgaagtgtgacaaagttatctagcccacacgggagggaaatactcatttctatcaatccctttgctaag

SEQ ID NO: 5568 - DNA, 120 bp, synthetic construct
  source 1..120: mol_type = other DNA
ctatattcatagcttaacgcattgtgggagtttagagtagaaagaatttccatggaatagaaagatctaggaaaactttgtgggggagaaatatttgagctggactttgacagggggtag

SEQ ID NO: 5569 - DNA, 120 bp, synthetic construct
  source 1..120: mol_type = other DNA
ccttcaccacagatggtttcagaagtaatgatctagggtatgactactgattgtattttccaaagatggtagccacaatagctttatcctatatgctcttctgcagtacctacatgctct

SEQ ID NO: 5570 - DNA, 120 bp, synthetic construct
  source 1..120: mol_type = other DNA
gcagcagaaaagaaaacaattattagaagacgggacctttgctctatctgggggaaggtaagctcccaaacaaaacctttttaaaaatccgactttctgaatgctctcttctccattccc

SEQ ID NO: 5571 - DNA, 120 bp, synthetic construct
  source 1..120: mol_type = other DNA
ctctctatttgtactacaaaccctagaatccactttaatataactgttagacttcagcaaaagcctcccttttcttttcctccacatttatctcctgtattttttcttctatcagcagag

SEQ ID NO: 5572 - DNA, 120 bp, synthetic construct
  source 1..120: mol_type = other DNA
atgttgttgttgtttttttcccctggggagaggggatataaataaattgacatctattcacataggtctcaatggtctaccagatccacccaggccctaatcctctttgttgtcatggaa

SEQ ID NO: 5573 - DNA, 120 bp, synthetic construct
  source 1..120: mol_type = other DNA
cctatattccatgtatcatgtggtcacctactttaaggtgggacaaataattttatctaatgttagttattatctgcttcaatgataaactggctttaacagggtggtattgaaaatagc

SEQ ID NO: 5574 - DNA, 120 bp, synthetic construct
  source 1..120: mol_type = other DNA
catacttgtagtttattttctatagttgtatattaaaggacaactctgacctgtaagtagtgaaatacacatcagttaatactttggaatttaagttcttgagcaatttaaatttaaaca

SEQ ID NO: 5575 - DNA, 120 bp, synthetic construct
  source 1..120: mol_type = other DNA
gcacctgcaacctcatcagctagagtgtagccagattctgataggatcagaatcctgtgcttacagggatagctgtttctgtgaggtttggctttatttagttttttgttgagtacttct

SEQ ID NO: 5576 - DNA, 120 bp, synthetic construct
  source 1..120: mol_type = other DNA
agggacaaaataaaagaaaacctccctgagatgaaagaagggataattctctagactgaaagggctcccagcaagcttaggcagcaataagaaaagacacatgcctaggcttggtaaaat

SEQ ID NO: 5577 - DNA, 120 bp, synthetic construct
  source 1..120: mol_type = other DNA
caatacttatctttgttcttttgttcttttcatctgtccatccacgtagttatccaacgcctacagtgagcccagcactttacaaaatgattctcagcagggctcccttgaataaagggt

SEQ ID NO: 5578 - DNA, 120 bp, synthetic construct
  source 1..120: mol_type = other DNA
gcatccctccccatttcattccctgagagtttttcctttacagcacatatcaccactgaacatttgtgtactgtctatgtatctgtgtaggatgcatagaacagggactacatcagtttt

SEQ ID NO: 5579 - DNA, 120 bp, synthetic construct
  source 1..120: mol_type = other DNA
tactgactagaggttcttgatttctcattgcaatagaaattgacatgaggccaaaagaattttcccagacaagccttcattaaaacttatgcttgggcataaggaaggcagagggtgggg

SEQ ID NO: 5580 - DNA, 120 bp, synthetic construct
  source 1..120: mol_type = other DNA
atatacacgtagtatgctaaaggttctgtgactgttctctacccaacagctttgtgtattcttcttttagccacagtcatagctgccttgggtaataagcacaattccaaatcttattgc

SEQ ID NO: 5581 - DNA, 120 bp, synthetic construct
  source 1..120: mol_type = other DNA
aagctttctgaatactgattattctctgtgaagctgtgtgtgtgggtgtttgcatgcacaaacacatatgaggtcagcaattttatttactttttttattactctgtcatatggccatgg

SEQ ID NO: 5582 - DNA, 120 bp, synthetic construct
  source 1..120: mol_type = other DNA
gctaacggcagccttgatctcttaggttcaagcgatcctctggcttaagcctctcaaagtgctgggattataggaatgggccgccatgcttggacagcaaaacttttaaaattttcattt

SEQ ID NO: 5583 - DNA, 120 bp, synthetic construct
  source 1..120: mol_type = other DNA
ttgcgcagatcggactctccttccgcaactccgcctactttggctggcgtctcctccgacccaaaggagagctgtggtgtatgtgagtgcgagtgagcgaggcagaggcggagaaactac

SEQ ID NO: 5584 - DNA, 120 bp, synthetic construct
  source 1..120: mol_type = other DNA
atatataatagttcctgtgtccaaattagaagactaaggctcaaaaacagagtacacaacacgcccaaagccactggctaataaaagggttgaacccatgtctgtccagccaaggatctt

SEQ ID NO: 5585 - DNA, 120 bp, synthetic construct
  source 1..120: mol_type = other DNA
cattttatatttttgtacatattgttagagtcagccatttttaatgatctccgatgaccaaaccagccttcggagcgttctctgtcctacttctgactttacttgtggtgtgaccatgtt

SEQ ID NO: 5586 - DNA, 120 bp, synthetic construct
  source 1..120: mol_type = other DNA
agccacatttcaaatgctcagtagccacatgtggctacttgctaccacattggacagcacagatacagaacatttccataagccagaaagttctgctggacaatgctgtattaaaatatg

SEQ ID NO: 5587 - DNA, 120 bp, synthetic construct
  source 1..120: mol_type = other DNA
gctaccctgagactcagacataagttagaacccaaatgtttcagctgggggattttgtgtattaaaaaataacattggaatataacatgtatcttgatggcagttggtcaacttttctgg

SEQ ID NO: 5588 - DNA, 120 bp, synthetic construct
  source 1..120: mol_type = other DNA
tccttctctccctccctccttccctttttctctccctcctttttttcttccctcctccttttttctctctttatctctttctcaacagcagttagccctgaaaggttatcttaaagaatt

SEQ ID NO: 5589 - DNA, 120 bp, synthetic construct
  source 1..120: mol_type = other DNA
tcactgttaatattgtggcctaaggaggaagaggaaaaatatatgaacacagaacaatttgtttgtggagttaaagggctcacaaggtaaggacagctgtaagaactgtctgccctgagc

SEQ ID NO: 5590 - DNA, 120 bp, synthetic construct
  source 1..120: mol_type = other DNA
cagtcttttgtcagtacaatgtaaaaatcaatccagtattgattattctacttaacaattgtatatcagagcttttaagagctaaatgtaatgagcatatatggaactgcactccaaaaa

SEQ ID NO: 5591 - DNA, 120 bp, synthetic construct
  source 1..120: mol_type = other DNA
cattaactctttcattaaaatatgtgtgtatgtgggggaggggggtgggtgtatttatgtataattggccacactatccaattctgagcctggcactgggaaccagtagagaacaaaaca

SEQ ID NO: 5592 - DNA, 120 bp, synthetic construct
  source 1..120: mol_type = other DNA
tctgaatcacctgagatgcatattaaaaatgtgagttcccagacaatttcccagacattcagaatcagaggttctgggagtctagcctaggaatcttcacccactgcataagttattggt

SEQ ID NO: 5593 - DNA, 120 bp, synthetic construct
  source 1..120: mol_type = other DNA
aaattatgggcaagtttttttgtttggtttggtaaaaccaccctaaaaagaaagcttagaatgaaagttaatactttatgcctgggtctatgaaaatccagggctaaggtgttactaaac

SEQ ID NO: 5594 - DNA, 120 bp, synthetic construct
  source 1..120: mol_type = other DNA
gcacacacacacatcacacagcacatacacgcacacaccacacacacctcacacatcacacaaaacacaccccacacataccacatgcacacacacacatcacacagcacacaacacata

SEQ ID NO: 5595 - DNA, 120 bp, synthetic construct
  source 1..120: mol_type = other DNA
gccagaacttctccaaaaagaaccttgcaaaaagtccagtgaatcagtcgaatcattctgtggatgccaaagaatattttgaccataatacagcacagcctggacctgacaacttgtcat

SEQ ID NO: 5596 - DNA, 120 bp, synthetic construct
  source 1..120: mol_type = other DNA
ggttctggacccagggaatcattgttctgggattagctggtttctttgtccctataaatatctaatattccaggagcccttagctacctggttaaatcacctctactaacacagatattt

SEQ ID NO: 5597 - DNA, 120 bp, synthetic construct
  source 1..120: mol_type = other DNA
tgcagtagtatccattgtggggaaaacagtacctacattcagtgtgacagtttcacatttatggatccaaatatcattatgaaattagtgttccaaatttaaggagctatttgcagatgt

SEQ ID NO: 5598 - DNA, 120 bp, synthetic construct
  source 1..120: mol_type = other DNA
ttagacattaagcttgatatgcctaggggcatccaagtggaaatgctaagtagtcattacatatttaagtctggagttcaaggaagcaggcaggttagctggtgacagacaggcaaatac

SEQ ID NO: 5599 - DNA, 120 bp, synthetic construct
  source 1..120: mol_type = other DNA
gtgtgtaagtacaggtggttgtatgtttatacacacactctaaatcaccttcaccctgaatagagcaattctttgataaattggtctgacatttggtttaaagtcctccaggtcttagac

SEQ ID NO: 5600 - DNA, 120 bp, synthetic construct
  source 1..120: mol_type = other DNA
atcttaaaataaaagcaagagagcaatcttctttggatggtaagaatttattcttgggctggaagctgggaaagtactggattctccctccattccctttctgatcccagaagtctttgg

SEQ ID NO: 5601 - DNA, 120 bp, synthetic construct
  source 1..120: mol_type = other DNA
cctgataaacatctgtaaacctgctgtttaactcagaggcaagtttttaacccaaggaattttaaaaagatgtgtctgttccagtgctcacacagaggactcacctactcctacctaggg

SEQ ID NO: 5602 - DNA, 120 bp, synthetic construct
  source 1..120: mol_type = other DNA
aaaaaataaataatcagctgggtgtcacgtgatgcaggcctgtagccctagctattcaggaggctgaggcaggaatatcactcaagcccaggagttagaaactgcagtgagctatgattt

SEQ ID NO: 5603 - DNA, 120 bp, synthetic construct
  source 1..120: mol_type = other DNA
gagtgagttctcacagatctggttgtttaaaatctccccctttgctctcttcctcctgctctcgccatgtaagatatgattcctttctctttgctctgtgccatgattgtaagattcctg

SEQ ID NO: 5604 - DNA, 120 bp, synthetic construct
  source 1..120: mol_type = other DNA
taggatagtgattccagctttttctctgttatacattattttctccactgccttcatactttacatttctgcttctttggggggtggggggggtacacatttgtcacttgctttcctttc

SEQ ID NO: 5605 - DNA, 120 bp, synthetic construct
  source 1..120: mol_type = other DNA
ccgtagtatgctgataatatgtggtaaagtggccttgaaaaaggctctgtaaggagcatttgaattaaacactgacctgacgtgactacctgtgacatcttgggtattttctcagtactg

SEQ ID NO: 5606 - DNA, 120 bp, synthetic construct
  source 1..120: mol_type = other DNA
caggatttgggggggcagtttgctcctggcacaggaaggcttgggtgagatgtttcagtgcagtgggcacaaagacagacagcaccctctgaggaggggtctctacaggtcaacagagat

SEQ ID NO: 5607 - DNA, 120 bp, synthetic construct
  source 1..120: mol_type = other DNA
aatctccatagatgcaggaaacacacacagaggaaagaaaataggagttagtatgtcattggcttgaatttctttgcttagaactgcaaggttcttagaactctggaaagacgtaggttg

SEQ ID NO: 5608 - DNA, 120 bp, synthetic construct
  source 1..120: mol_type = other DNA
tgggtaccactttcacttctcacatcagtcctttcattcattcatccagcaagtatttactaaacacctgttatgggccaggaattgtgctaggcactggtgatacattggtgaataaac

SEQ ID NO: 5609 - DNA, 120 bp, synthetic construct
  source 1..120: mol_type = other DNA
atattgattctactttttctgtagttaatccttgcatattctcctttcatcctggcttgccaacgcagtcttaattccgccttttttttttctaatggggagcaaaaagaaattcactgt

SEQ ID NO: 5610 - DNA, 120 bp, synthetic construct
  source 1..120: mol_type = other DNA
atggcttctcccagccctacctgcctctccctgaggcggccccggcccaggcccaggccgactctctcaccgtctacctggtggtggcgttggcctcggtgtcgtcgctcttcctcttct

SEQ ID NO: 5611 - DNA, 120 bp, synthetic construct
  source 1..120: mol_type = other DNA
gcatgctccctctagctctccttctcatctatctatctatacacatgcacacacacttatacacgtaagcttttctctgagcaattttattttgattcttggtggctggtaatatgctta

SEQ ID NO: 5612 - DNA, 120 bp, synthetic construct
  source 1..120: mol_type = other DNA
ggttcttgtaaaataggaggggcaggttcttctatggccgtggattttactctgagggcttaggaagccattgaattttagaaatttcttctccctgctccagggtctcttggggcctcc

SEQ ID NO: 5613 - DNA, 120 bp, synthetic construct
  source 1..120: mol_type = other DNA
ccccattggctcagtaccagccagtgcctactcaccatgctgggtaacaaaactgatgcaggcatccacgatgatggggatgtcaccccggctcatctgctgctcctgcagccctgtgcc

SEQ ID NO: 5614 - DNA, 120 bp, synthetic construct
  source 1..120: mol_type = other DNA
agatgtttcttgtgtgtatcatctcccaatcgacagtcagtaaacttcatcattcccagtacctaagattgcagtgtgtatacttgtgtatactttattacccagcgtccctgagattac

SEQ ID NO: 5615 - DNA, 120 bp, synthetic construct
  source 1..120: mol_type = other DNA
aggcagtccaggcaaaggatgatggcagcttggatcaaggtattagcaatggatatggtgaagagtagttagattctggatacggttttaagttattagtgacaggattggttaatggat

SEQ ID NO: 5616 - DNA, 120 bp, synthetic construct
  source 1..120: mol_type = other DNA
agagctttttaattccttttcccagatgatagactgtccagatgtgaaacactatccagcgggttttgctgtatttaccttctgtccatgtggctttgtaccttcccaactgtatacctg

SEQ ID NO: 5617 - DNA, 120 bp, synthetic construct
  source 1..120: mol_type = other DNA
acgccacctgattcttcctggatgcaggacaaggagccgggtgcaagtgcaagaggctgtcacactgaccctccactgagctgcttaacacttaagccatctatgaatgacaaagctaaa

SEQ ID NO: 5618 - DNA, 120 bp, synthetic construct
  source 1..120: mol_type = other DNA
taaattatacaacatttcttacataaattcccttttaaaacttttttttccttcacaactttcacagacaattctttgacatgcctcaactttctgacttgttgtaaacatccctttctt

SEQ ID NO: 5619 - DNA, 120 bp, synthetic construct
  source 1..120: mol_type = other DNA
gataatgatgtaggtctggagccaaggagaaaaactgagactttgcaaacacaggtttgtgacccaaagcaggtcacaaattgctggccagagtcccaggactaaatgtaatcacacagg

SEQ ID NO: 5620 - DNA, 120 bp, synthetic construct
  source 1..120: mol_type = other DNA
tattccattgagattgctgagctaaggagaaaagagtgtgggaataccagtggccatgattgtcaaacatgaagaagccatctgcaaaataaagtcttagctctgaccgtataggaaagc

SEQ ID NO: 5621 - DNA, 120 bp, synthetic construct
  source 1..120: mol_type = other DNA
ctctgcaccgtcaccttgtggaagggctcctggctcaggacctcagggtatgggtcatcccagacctgcagcacttgggcctcatcacacctggcaaaagcagaatgtggctcagagctt

SEQ ID NO: 5622 - DNA, 120 bp, synthetic construct
  source 1..120: mol_type = other DNA
gattcaatgttgttattaaaatccctagcaaggtttggcatgtaaccaacgccgcctcatcacagtaaccccttgtctcaggacccatttatttgcttattccctctgcctggaacacgc

SEQ ID NO: 5623 - DNA, 120 bp, synthetic construct
  source 1..120: mol_type = other DNA
tcaggcatgcacacgtgcccacatgtatgcacacacctatacacatggtgacttggtcaacgcagatcattttcactgggttataaatggaagatttcccagatacagcagaggcctatc

SEQ ID NO: 5624 - DNA, 120 bp, synthetic construct
  source 1..120: mol_type = other DNA
ttagtctctggagctggaacaatcaggcttggccatggcggctggtgctgataaccatttcttggcagaagtgcccgccaaagctgtggccctagtcctcaccaccacagagagccagca

SEQ ID NO: 5625 - DNA, 120 bp, synthetic construct
  source 1..120: mol_type = other DNA
agacatgagtacttgtcttcagactcctaggaatgaagcacccttttctgtgaccctgctcatcccaaaccagtgtaagatcttttatctcaggcaacagatatttctaaattcagccac

SEQ ID NO: 5626 - DNA, 120 bp, synthetic construct
  source 1..120: mol_type = other DNA
tgtaggtttatgcaatatatagaatctcagccctgtttgtgacaggtattatgaccttaagtaacagtttcaggaagaggatggggtgatgcagaaaaacagcacggaccggagtcaata

SEQ ID NO: 5627 - DNA, 120 bp, synthetic construct
  source 1..120: mol_type = other DNA
cctgtgtccatgtgatctcattgttcaattcccacctatgagtgagttttgaaagatgtgttgtggttacgtaagatgtcatcagtggagaaaagtaggtgaaaagtacacaggaactct

SEQ ID NO: 5628 - DNA, 120 bp, synthetic construct
  source 1..120: mol_type = other DNA
caaaacaaatccctctactgccaccaggaggtgcagcgattgtggaaaatatacccccacttccagaaaaagtcttcaaggtctcaaaagccagtgtttgaaatacatcattatcacttt

SEQ ID NO: 5629 - DNA, 120 bp, synthetic construct
  source 1..120: mol_type = other DNA
aaaaaagatgaacatatggcacgtggggcttttctgtaaaccattcacgcacctcaggtttgctgtgagtgaaagagacactcattccagacacacacatttgaggaagaatgataatgt

SEQ ID NO: 5630 - DNA, 120 bp, synthetic construct
  source 1..120: mol_type = other DNA
tcacaaatgaatccagggcagtcatctgacgaattgaatcttctgtctttcaggaggtcacattaatgcaaacagaggccagaatgacacataggctagtcatcattctaactagacagt

SEQ ID NO: 5631 - DNA, 120 bp, synthetic construct
  source 1..120: mol_type = other DNA
agactgtcttttctatttggggacactgaaatagcacttctttgatggaacgatggtaattagtggcaatagtgtgtgaatgtctctgtgcgtgtgtatgtgtgtgttgatatcctactt

SEQ ID NO: 5632 - DNA, 120 bp, synthetic construct
  source 1..120: mol_type = other DNA
tcctaaatcaaaactttgcctcagtgacaagctaagagatctgttagaatagaagacatcttctggatgtattaaatctgaccatgcacctagacacagacctgccctgacatgtcaggt

SEQ ID NO: 5633 - DNA, 120 bp, synthetic construct
  source 1..120: mol_type = other DNA
gacttacacattatgtgtagggtataacatgaccttctagggataaatttatactgacagtcttaactcttcacaagtaaattgctaagggaaaagggccagctcttgatttctaaagga

SEQ ID NO: 5634 - DNA, 120 bp, synthetic construct
  source 1..120: mol_type = other DNA
attcattgtcctgcattggtatcccaatattgtactccttccaatggtcagtaacaaaagatagctaagagaaaaataggtgtacatgtgaaattattttggccgggcgcggtggctcac

SEQ ID NO: 5635 - DNA, 120 bp, synthetic construct
  source 1..120: mol_type = other DNA
tcagtaaccctatcctttgaataaatacaaccaaattttagttaggtaaattttgttttgcaaacttctacaggttattgaaattcttaaagactgctattgtgtttttttaaaaataac

SEQ ID NO: 5636 - DNA, 120 bp, synthetic construct
  source 1..120: mol_type = other DNA
ttaatgttcagactaggctgataactttttccttatatgttctccctaatggtatgttcctgtatttcctgttttattctatgcatttaactgaatattggatttttacattaaaaaaat

SEQ ID NO: 5637 - DNA, 120 bp, synthetic construct
  source 1..120: mol_type = other DNA
gaaggaaaaagggagggaggggtggaggaaggagggaagaaagaaggaaggaaaggggaactagaaggaaagagatacatacttaaagtaggcagtctatgggattcattgataattatc

SEQ ID NO: 5638 - DNA, 120 bp, synthetic construct
  source 1..120: mol_type = other DNA
tgggattataggtgtgagccaccatgcccagcctaatcatattttctattcctgattttccacgttggaactttagatcatcagagttagcagggttcttgtacccagtctgattcagtc

SEQ ID NO: 5639 - DNA, 120 bp, synthetic construct
  source 1..120: mol_type = other DNA
ttcaggtcttcatgcttgaaaaaggtcaggttggagtggcggtaaaaaaaaaaaaaaaaaaggtccctttgggcacgtatcaagacttttgaaggctgccctggccatgtagtcattaga

SEQ ID NO: 5640 - DNA, 120 bp, synthetic construct
  source 1..120: mol_type = other DNA
ctcaatggtcagccagaaaaaaaaaaaaaaatgaagctgcatcaagattagggacacctttgttggctttttttttcttctcttgctccattcatcactctctggcagcgaggacaccag

SEQ ID NO: 5641 - DNA, 120 bp, synthetic construct
  source 1..120: mol_type = other DNA
tcagagacccccttgactcatcgatggtaggaatctctccgcactagttgcttagtcagaactgctaacagtgatgtccaaagcgtatccatttcctctcttccgttcttcattggcagc

SEQ ID NO: 5642 - DNA, 120 bp, synthetic construct
  source 1..120: mol_type = other DNA
aagcacgagatgcagaacctcagcaaggcaaaaaaaaaaaaaaaaaaaaaaaaaaaaaaggcacaaagaaggcagcacaaacagaagagacataaattctcaattatgatacactccttt

SEQ ID NO: 5643 - DNA, 120 bp, synthetic construct
  source 1..120: mol_type = other DNA
atttgacttttaggatcactgggaatggtaactgattttagctccagtcactgaggatcatggatgggtgtctgcaccttgagaggatgcttcaattccagatcacctagtaggatccaa

SEQ ID NO: 5644 - DNA, 120 bp, synthetic construct
  source 1..120: mol_type = other DNA
gaagagcaaagggaagagtgaagaagaagaggaggaagaggaatggcaaagggaagagagagaagagggagaaggaagaagaggaggagattatgcacgacacttgttaaaattggtaag

SEQ ID NO: 5645 - DNA, 120 bp, synthetic construct
  source 1..120: mol_type = other DNA
acacacaagaaagaaaaagcactcttaagcactcatcactcatataaatatcagcatatctatatatgtttatatataaatatcagcatatctatatatgtttatatataagtatcagca

SEQ ID NO: 5646 - DNA, 120 bp, synthetic construct
  source 1..120: mol_type = other DNA
ttttcttttatagttaatactggcttagattatcctctggcaggattcacatttaccagaaaaacacaacctcgcaatgaaggagggttctgcgtttgaggggatcacagatgcttccca

SEQ ID NO: 5647 - DNA, 120 bp, synthetic construct
  source 1..120: mol_type = other DNA
gtggaatgatttggggagtgctaatctcctgatcacaatcacctagtatcccagctaattaattttgatcacacaatactgggtttctcttcttctctctcaccatcacacagtgaagag

SEQ ID NO: 5648 - DNA, 120 bp, synthetic construct
  source 1..120: mol_type = other DNA
aaatgaccagcctgaaaatttccatgaaatgcttcagggagctccatggggttaggccttgtcttttcatattgcttaatctaaaactcggcatagagctgaacccaaagtacttaccat

SEQ ID NO: 5649 - DNA, 120 bp, synthetic construct
  source 1..120: mol_type = other DNA
actatagcagagagggctctcttccagtctattgcagatggatgccctcgtgagctgagttttgatgaacatcccatgtccccagccaccccattcagagcctctttctactctggtcct

SEQ ID NO: 5650 - DNA, 120 bp, synthetic construct
  source 1..120: mol_type = other DNA
cagtgagaagagtgtgctctgaaagttaagtaacttacccaaggtcacacaaggtctgagtctcaaatgcatacaatttgaccccatagtctaaggtcttgaccgcaatggaataagaaa

SEQ ID NO: 5651 - DNA, 120 bp, synthetic construct
  source 1..120: mol_type = other DNA
acttcgcacacagtgctgaagacatgctgctgttgttaattacaggaaccagatgaaagtctggaaaaacttcaataataaattaaaacaattaaaaggcacaaatttcaaagctcaata

SEQ ID NO: 5652 - DNA, 120 bp, synthetic construct
  source 1..120: mol_type = other DNA
acttgcatgctactactggaatttttcatctcctccatggaagacctcttcctcctcctcctcctcaaggagaccatgagaggctcctggaggtgactcatgtacataaaggggatgggc

SEQ ID NO: 5653 - DNA, 120 bp, synthetic construct
  source 1..120: mol_type = other DNA
atgggggaattgcaaatacttataggggataggtagggatagaaaatggcaaactggaaagctcaagcctcacatataagatataatcatctacctttagcccattgatgcctgggggaa

SEQ ID NO: 5654 - DNA, 120 bp, synthetic construct
  source 1..120: mol_type = other DNA
ggtcttagaggaaaagctttcaggttttcatcactgagtatggtgttagctatgggtttgtcgtgtatggcctttattatgttgaggtacgttccttttatatgtaatttgttaaatttt

SEQ ID NO: 5655 - DNA, 120 bp, synthetic construct
  source 1..120: mol_type = other DNA
aaggtgctggtgtcatggggatcctggtgctgtggaaggtgctagtactatggagggtgctggtgtcttggtgatcctggtgctatggagagtgctggtgtcatggtgatcctggtgcta

SEQ ID NO: 5656 - DNA, 120 bp, synthetic construct
  source 1..120: mol_type = other DNA
caccctcatgcactcgttgacacgttaaattcaacccggcacacacgtcctcaggatctaccatgtaccaggacatgtagccaattctggggacaggagaaatgaaacaagatactggtc

SEQ ID NO: 5657 - DNA, 120 bp, synthetic construct
  source 1..120: mol_type = other DNA
cgtgagaggacaggtcaagcataaatgaaatttcttatctttcctccacttgtgaagacccattcagtgtagaggcccagatctgggttcaaattttagccccacgcttaaaaactgtca

SEQ ID NO: 5658 - DNA, 120 bp, synthetic construct
  source 1..120: mol_type = other DNA
tgtgcgaatctctgtgctacaaaattcttttcaatttagcattaactttaatttccatacagttggcacctcactgccgccaaaagtgagtccgcaggaactccactggaatatttgctc

SEQ ID NO: 5659 - DNA, 120 bp, synthetic construct
  source 1..120: mol_type = other DNA
accactggaaactagaaatttgagctattgggcccaccagtagcagcatgtgatactagatggttaaaatcatgaaagcagtcactatccaattagaagcagagtcacaacaactgttgg

SEQ ID NO: 5660 - DNA, 120 bp, synthetic construct
  source 1..120: mol_type = other DNA
attacaggcgtgagccaccgcgcccggccccaaatttatttcttgaagcaaaggacagaaggactagacaagtgacttcaaggcctctttgaacccccagctccttgttttctggctata

SEQ ID NO: 5661 - DNA, 120 bp, synthetic construct
  source 1..120: mol_type = other DNA
gagcaaagcacttcacattccaaagtgaattcccaccagtcagcttcattctttccttcttctccaggccttcctgtggcagggaatagtgggtttgtccaagattatacaacaagtaaa

SEQ ID NO: 5662 - DNA, 120 bp, synthetic construct
  source 1..120: mol_type = other DNA
gtggcttcctgcctgatgtgacggtcactctggctcctcaccctggggcctgcgagctttcaggccttgggcaggaatggctcctggagggttttaaggatggcccaggaattggcatcc

SEQ ID NO: 5663 - DNA, 120 bp, synthetic construct
  source 1..120: mol_type = other DNA
agtgccccacacctgagcctctggaaacagtaaggagagatgtgttataaccactagttatcacaaaaaaatgaaattggatccctgcctcagcatcaaccaggatgaattccaaaagga

SEQ ID NO: 5664 - DNA, 120 bp, synthetic construct
  source 1..120: mol_type = other DNA
acagtggaatattattcagccttaaatgggaatgaagttctgatacatgctactagatagacagatgaaccttgaaggtattttgctaatgagcttttgaaagaagccagacacaaaagg

SEQ ID NO: 5665 - DNA, 120 bp, synthetic construct
  source 1..120: mol_type = other DNA
ggcaatgcatcagatgggacaaagatgcctccaggaagcccactcctgaaactttgtaacttaattaaagaaaggtagaagtttattcatatgaagagtcatatctgtacaagcaaaaac

SEQ ID NO: 5666 - DNA, 120 bp, synthetic construct
  source 1..120: mol_type = other DNA
tatttctcccaaaggagagttaaaaagataaacaagtgtggttcccatataaaaaaatctcacctttcttcagggaggagaaagctctccccagcacaggggctgtggggaccgaggctg

SEQ ID NO: 5667 - DNA, 120 bp, synthetic construct
  source 1..120: mol_type = other DNA
tggaggatgtctcttccttgcttgggttccgcagctgtctcagccattcttgaccgttcgtgttcctagatggtgcttagaatcacttcataacatttccaactatgaatctgggaaagg

SEQ ID NO: 5668 - DNA, 120 bp, synthetic construct
  source 1..120: mol_type = other DNA
cagccattcttgaaatcacctccaagaaaaaagaaatgcttcagcttccaaagatatccccaggcaggaaatgggccgcaggcagcatgaatgtttaattacgttaattgtccaagtcca

SEQ ID NO: 5669 - DNA, 120 bp, synthetic construct
  source 1..120: mol_type = other DNA
catgatttggggagcagcattattcccccatgatttggggagcagcattattattgagcattaatgaacccgcatggcattcaggtgcccggccttttcccaaccagaccagcgcaccag

SEQ ID NO: 5670 - DNA, 120 bp, synthetic construct
  source 1..120: mol_type = other DNA
tattatctgacagttctagagatctgaagtccacaatgggtctcactgggctaaaatcaaggtgtggggagggctgcattccttctggaagctctaaggagaatgtttccttgttttttt

SEQ ID NO: 5671 - DNA, 120 bp, synthetic construct
  source 1..120: mol_type = other DNA
agtccctggggtccgagaggccctcggaatccaccatggcatgggccggagtcgctggggtccgagaggccctcggaatccaccatggcatgggccggagtccctggggtccgagaggcc

SEQ ID NO: 5672 - DNA, 120 bp, synthetic construct
  source 1..120: mol_type = other DNA
aacaaaaaatatggctaaataatccatctaagcaacaggggaaggcaaaacccgctccacacaaatctcaaaggttaaaataaaaccaatgtctgacactggtttctgagcccagatggg

SEQ ID NO: 5673 - DNA, 120 bp, synthetic construct
  source 1..120: mol_type = other DNA
accaaagacaaggttagactacggcactatgaaaaatcataggccaacaaaccagataacctagcagaaaccaaagacaaggttagactacggcactatgaaaaatcataggtcaacaaa

SEQ ID NO: 5674 - DNA, 120 bp, synthetic construct
  source 1..120: mol_type = other DNA
tgaccccacacacacacacacacacacagagtgctcctgcactcccagggattgcactctagtagggacacacccaggtttaatatgacaaatgaccatcttgcacatgggagagaagaa

SEQ ID NO: 5675 - DNA, 120 bp, synthetic construct
  source 1..120: mol_type = other DNA
agcccctcctgcccttgccactgtgagcaggtgtgcaagcccctcctgccaatcccaccctgtccacacaactgaagcattattccccgcagaaactgaagagtcctaggaaaataagac

SEQ ID NO: 5676 - DNA, 120 bp, synthetic construct
  source 1..120: mol_type = other DNA
gtgaaaccaaagtctggccttatggctatgtctattttcttcctgggcaaaaacgctgtgtcacacggattccttagattaagggacttttagacgttttaaagatacgacgttactgaa

SEQ ID NO: 5677 - DNA, 120 bp, synthetic construct
  source 1..120: mol_type = other DNA
tgggtggcaaatcccaccccggaagagaccctggaggcctttcccctggcttcaggccatcataaaacttactaaattttgctaaagaaaatcaccttctaaataaaattatttggcaat

SEQ ID NO: 5678 - DNA, 120 bp, synthetic construct
  source 1..120: mol_type = other DNA
ctgtgtgcacatgctggcttgtgaaaggctgtaatgacaccgccttgtcaaacaatcataaatgacttcactgaacacgacctttttgcaccaacccctactggagccaaaatgtatata

SEQ ID NO: 5679 - DNA, 120 bp, synthetic construct
  source 1..120: mol_type = other DNA
ttatcccccccccccaaaaaaataaaaataaaaactttctaaggcaaataaaactgagggaatgtattgccaggagacctgcctggcaagaaatgctgaaagaaattcttcagcgagaag

SEQ ID NO: 5680 - DNA, 120 bp, synthetic construct
  source 1..120: mol_type = other DNA
taattcagtttcttgggccctttcccaggggccacagatttaattcctatggctatttttattcccacctccattcctttaactagcttttctgtctcatccctcctagattctaacttc

SEQ ID NO: 5681 - DNA, 120 bp, synthetic construct
  source 1..120: mol_type = other DNA
tagtggtgacagctaccatgtattgtgcacacacattatgtaccactcttctaagcactttgtttaactggttgctcctgctaacagccctttaagatagatactattagccccatcgta

SEQ ID NO: 5682 - DNA, 120 bp, synthetic construct
  source 1..120: mol_type = other DNA
agtccttggcgatattttgtatggtaggggtattatgttagtccttggtgatattttgtatagtaggggtattatattagtccttggtgatattttgtatggtaggggtattatattagt

SEQ ID NO: 5683 - DNA, 120 bp, synthetic construct
  source 1..120: mol_type = other DNA
tgcttatagtgactgagaaatcagctctcccataactttaccaacaataattcttgaagatgagagcctcttgtctgaaatcattttccatttatagttatatgaaagatataatggaat

SEQ ID NO: 5684 - DNA, 120 bp, synthetic construct
  source 1..120: mol_type = other DNA
acctcttcttataaactgaaagctcctgaaggtttggccaactgtagtttcctaataaatcttgttgaaggatacatatttgaagggtgctgtctttgggtaagagcagagggtggcact

SEQ ID NO: 5685 - DNA, 120 bp, synthetic construct
  source 1..120: mol_type = other DNA
taacctcatatttaatggtgaaagactgaatgctttccctctaagattgggaaaacaacaaagatgtctgcttttaccagtcttgacatcatactagaagttctagccactgcaataagg

SEQ ID NO: 5686 - DNA, 120 bp, synthetic construct
  source 1..120: mol_type = other DNA
tggagatgtcccgggcttcctctcgagttggagatgtcccgggcttcctctcgagttggagatgcagacaagaggccacatgcagaagcactgtgctttgggctttcctttgcaaatgct

SEQ ID NO: 5687 - DNA, 120 bp, synthetic construct
  source 1..120: mol_type = other DNA
agggcctgaggaggtgaggtggaattgggaagctagagcaagtatttttccaggagaaaactaatcatagcccaaactaatagcagtagtatggcaggaataacagaattactagtaata

SEQ ID NO: 5688 - DNA, 120 bp, synthetic construct
  source 1..120: mol_type = other DNA
gccacaccaggcaaggattaagtcatgaacccctgcatttaaagaataaactatgttctaactgccacaaagtttttctttttgtctagcagctaaacaagccctggtctcaagatgagc

SEQ ID NO: 5689 - DNA, 120 bp, synthetic construct
  source 1..120: mol_type = other DNA
ttctcttcagagctgcattttaacatgtgcaacattatttggatggtccccttagcatgtgtggcccacttgctatttgcttttcatccagacctagctcaagtatccctttctctctct

SEQ ID NO: 5690 - DNA, 120 bp, synthetic construct
  source 1..120: mol_type = other DNA
gtcaccccccatcctctcctttccccccactgccagtccctggtaactagtaatctgttttttgtttttatggatttgcctattctggacatttcatatatggaatcacacaacgtttgg

SEQ ID NO: 5691 - DNA, 120 bp, synthetic construct
  source 1..120: mol_type = other DNA
ctttatctctcaacagtgagttgtttttcctgtttttgagtgcttcttttaattttttgattgaaaaagtctcactaaagactgaggtacaaggccgggcgcggtggctcacgcctgtaa

SEQ ID NO: 5692 - DNA, 120 bp, synthetic construct
  source 1..120: mol_type = other DNA
acaaacatggaattagtctacccaaatgagaagaagccagaaaagtagttctggtagtatgataaaacagtgttctgtaatacccccgatcataccagcttcccagcaatggatccaaac

SEQ ID NO: 5693 - DNA, 120 bp, synthetic construct
  source 1..120: mol_type = other DNA
acttctgcctctgtccctgccttccctcccagtaatcccagtgcaataaaaccaaagattagaccactgtgagcttggactttatctatgcctttaaatggaaaaaaaatgaatgtttgc

SEQ ID NO: 5694 - DNA, 120 bp, synthetic construct
  source 1..120: mol_type = other DNA
aggcgcttatctgcagactatcgtctcaacaaacattttcatagtcttattgtaaggcctgcaccaggcccctgaatactaagaggaagtaaacacagtcctgagaagcaccacaattta

SEQ ID NO: 5695 - DNA, 120 bp, synthetic construct
  source 1..120: mol_type = other DNA
gtgcacagctgtacttccagaattggaaaatttcctacatacacagcttcttcattagatactgataccggttaattcacagtcacctgtaattggaaacagctgctgtttcccagctga

SEQ ID NO: 5696 - DNA, 120 bp, synthetic construct
  source 1..120: mol_type = other DNA
gagggaaccaaaacatttgttgagtcccagcttttcatcaggactcctgtgctttgtgtcagaaatagatgccatccctttttctgtaggaaggaatttatagtttggagaaggtagagt

SEQ ID NO: 5697 - DNA, 120 bp, synthetic construct
  source 1..120: mol_type = other DNA
gttagttaaacctgcactttttggtaaaatctggagaggtgataatttattcactttttttagaggactctaaagccagaggattctaagcctccaggccacctctcccagtccgtccaa

SEQ ID NO: 5698 - DNA, 120 bp, synthetic construct
  source 1..120: mol_type = other DNA
tcaatagagaagtgacttaaatggagttgtgccctgaaaacatgaagccggcatcgatgatgaggacttcttaaagggaaataacttgaaggggaaatgcacagcgaggttgtaattgta

SEQ ID NO: 5699 - DNA, 120 bp, synthetic construct
  source 1..120: mol_type = other DNA
tttatgtatttgttgtccctttgtaggcatccgagtaccaagtcttttgtgaagtcatatgaaaagaaaaaatccccacaagccactacctgggatataggtctctgcagagtccttcct

SEQ ID NO: 5700 - DNA, 120 bp, synthetic construct
  source 1..120: mol_type = other DNA
cctcatcataccttcttcattctggagtttagacaggctgaccagcactaactttaaaacacagatcctaagacagacagaacaaactctttgcagcaataagataccactccaacctga

SEQ ID NO: 5701 - DNA, 120 bp, synthetic construct
  source 1..120: mol_type = other DNA
gatctttaaaacgccgtctccaggcactctggtcaacaggtagggggtgagacctgggcatcagaactctgaaaggttcccaggtgattctaagcaaagtttgggaaccgctgggtatta

SEQ ID NO: 5702 - DNA, 120 bp, synthetic construct
  source 1..120: mol_type = other DNA
ggcctcttatagcagcatctccctgggtctattcacagaataccagttccttagaaaactgtgggtgaaattaaaagctccgtggatcaaaaagcttgaaaaacatcaggttacgcaaag

SEQ ID NO: 5703 - DNA, 120 bp, synthetic construct
  source 1..120: mol_type = other DNA
attttgaaaatttcatgacacttcttaggaacgatcaataggatatccagcaaaaataaggctgggaaccactaggctatatatactcactagaaagtgacaagaacattcctgtgtaca

SEQ ID NO: 5704 - DNA, 120 bp, synthetic construct
  source 1..120: mol_type = other DNA
tcctatcaagtgacatacttcatttgattttttgtttaagaagccatggtacttttttcttgagttactttggatatgttttttcaatgccatctgaagattttgtaattgagtagcagt

SEQ ID NO: 5705 - DNA, 120 bp, synthetic construct
  source 1..120: mol_type = other DNA
aaaacgttatcaccccatagccatatacgctctcctgtataccaataatactacttgctatttaagatgctgccatgagtaagatctctggggacaatggaaaatgcagaaccagggcta

SEQ ID NO: 5706 - DNA, 120 bp, synthetic construct
  source 1..120: mol_type = other DNA
tgggagcgttattccctaaagtgcaacaattgtcaaaggatggaatggctggctggttccttgtgttagtgattgctgttgtatttcagttgtttgggtgcatgtttgagattagttttt

SEQ ID NO: 5707 - DNA, 120 bp, synthetic construct
  source 1..120: mol_type = other DNA
agcctgagacgagcagcagatcgagaaaacgggaagtaatgggagcaaggtaccaggagtcgtttttatataggacctctcatgcaaataaggtgaagagtgaaagtcctgtatctgatt

SEQ ID NO: 5708 - DNA, 120 bp, synthetic construct
  source 1..120: mol_type = other DNA
aagtcaacctctgagtctctggttccctctgttttcttctgtgtttcatagggtcttgttttttctctttccatttctgggtctctgactctccctatctgtctttctcttatcctgtgt

SEQ ID NO: 5709 - DNA, 120 bp, synthetic construct
  source 1..120: mol_type = other DNA
ttggtgatgccctggatattgtcgcgcagtactttacggtggcgcttagcgccgcctttgccaagacccttcccgcctttgccgcggccagacatgacgagcaagaggagtctcacccaa

SEQ ID NO: 5710 - DNA, 120 bp, synthetic construct
  source 1..120: mol_type = other DNA
attaaagagaataatttccttcatacgttttggggggaaactagaggctgaacggtatctatcctcataaataattgtaggcctattgtgtatggagcaccacgtaggcaccacagagga

SEQ ID NO: 5711 - DNA, 120 bp, synthetic construct
  source 1..120: mol_type = other DNA
tggtgggcagactaagccaatttcccagaaaaaggttaaaactataaagaagattgtgctgaggctagagtgcatggaacccaactgcagatgtaaaagaatgctagcttctaagacatg

SEQ ID NO: 5712 - DNA, 120 bp, synthetic construct
  source 1..120: mol_type = other DNA
gagaacatcctaagacactgtcatatgattatgacctaaacatgcattacagattccaggaatggagaataaaagagtgtaatgtgagttgcagcagttaggggaagaaggcctcaggga

SEQ ID NO: 5713 - DNA, 120 bp, synthetic construct
  source 1..120: mol_type = other DNA
cctgctgtgggagttggagcagcagatagatactcaggcttgggtgggaggccaggcatttttcactagggcctctgctttgcagacagatcttggagctgccctggaaggaggaaactt

SEQ ID NO: 5714 - DNA, 120 bp, synthetic construct
  source 1..120: mol_type = other DNA
ttttgaaccaatctaatacatctgaagggaatttagttttctcatctctcatgacgtgtgcctttggtgactggaactgccctactcgacctttggatccaaagcagcctcagattagat

SEQ ID NO: 5715 - DNA, 120 bp, synthetic construct
  source 1..120: mol_type = other DNA
tgaagagggaaatggaagtggggttttggattctaccatgatagaagggaagacctacaacaaggctattcagcagcctttgttttagtgaaagccaatgagaagagatcacttcttcca

SEQ ID NO: 5716 - DNA, 120 bp, synthetic construct
  source 1..120: mol_type = other DNA
caatagaagtgaaaacaagtaaaaagtgattgcctctgaaccaacaccagggaaggtatagggaatagcaggggagactgctgggcctccacataaattcttctctactgtttttcttaa

SEQ ID NO: 5717 - DNA, 120 bp, synthetic construct
  source 1..120: mol_type = other DNA
acctttctgaattacctgagggactgtatccctcaactccctgggtttgggcagtcagtaactatagtcatagtcactattctttcattcactcgacaaaaactgagccctattccacac

SEQ ID NO: 5718 - DNA, 120 bp, synthetic construct
  source 1..120: mol_type = other DNA
ggatggttggtctcaggggaaggagagttccttggaagggggcttgggtctcacctggagctgcatttgcatagcactttacataagataaaacaaaccccctgtccatatcacagactt

SEQ ID NO: 5719 - DNA, 120 bp, synthetic construct
  source 1..120: mol_type = other DNA
cttcctcattctgcagaatcccagcctgtaagtggccacagcctgccagaatcatggtgcttaaagagactgtggagaccacataatccaactggttcattttacagatgagaaaacagg

SEQ ID NO: 5720 - DNA, 120 bp, synthetic construct
  source 1..120: mol_type = other DNA
aaagtgcctgatatacatgatctcctttaatcttcacccaatcctgtaaagtaggtgttagatccccattttgcaagtaaataagtggaggcttagagcagttaaccgctggcaggtagg

SEQ ID NO: 5721 - DNA, 120 bp, synthetic construct
  source 1..120: mol_type = other DNA
aaatccgtcgtcgccatcaaatccagagcccccatctccggtaaaccgatagcattcccctgcaaaagtctttgccttcgcactctcccaccaaattaaatcacaatgcaacccaagacc

SEQ ID NO: 5722 - DNA, 120 bp, synthetic construct
  source 1..120: mol_type = other DNA
gcaccattttaagtccctgtcacctcttccgactctttctgagtgccttctgtggggactccggctgtgctgggagaaatacttgaacttgcctcttttacctgctgcttctccaaaaat

SEQ ID NO: 5723 - DNA, 120 bp, synthetic construct
  source 1..120: mol_type = other DNA
tatcaggagggagccaggcgggctgtgtcaggcagaaatacgggctcattgatgctgtcatagttacgatgggccctgcgaggggcagagcagcaagctgcttgaaataccataaatccc

SEQ ID NO: 5724 - DNA, 120 bp, synthetic construct
  source 1..120: mol_type = other DNA
gaaagaaagctagagagtgggaatgagagaatcaaacctctctgaaagcatcctgttctttccctccacagcacttgttagaatgggattatctaatatctatctcctccactagagaac

SEQ ID NO: 5725 - DNA, 120 bp, synthetic construct
  source 1..120: mol_type = other DNA
catgtgttgaacctaatctccaatgtaatggtagtagaggtggggcctttgggtggtgattaagtcatgaaggtagaactctcatgaatgggattagagtccttataaaagagacattgg

SEQ ID NO: 5726 - DNA, 120 bp, synthetic construct
  source 1..120: mol_type = other DNA
cacttgaccacttgattctgtcacaggaaactcttctttttctttctattctctttctttctttcctttctctctctctctcctccttccttcctttccctctttctttcctcctactcc

SEQ ID NO: 5727 - DNA, 120 bp, synthetic construct
  source 1..120: mol_type = other DNA
tttctttcaaaactgggtaaagctctaggatgagttatagcttgaggtataaacctcaacattcccactgtgttccactttgagtttggtgtggggtggggatcaccaatctaaacccaa

SEQ ID NO: 5728 - DNA, 120 bp, synthetic construct
  source 1..120: mol_type = other DNA
ggccaccaagacaaaacaaacatctcaattttgcctatttgtcatggccacaaggaaagagttaacactgttgactgctactgaaaggtaaaatgggatgaagactgaacaaagcccact

SEQ ID NO: 5729 - DNA, 120 bp, synthetic construct
  source 1..120: mol_type = other DNA
ctcactctgttggcaacccaaccagcctttaaactgtgtcttttcatgtataacaaaagacctttctttttgtctttaaaggaacttggggggccaaagggatggtggtcaatatgccca

SEQ ID NO: 5730 - DNA, 120 bp, synthetic construct
  source 1..120: mol_type = other DNA
gcaaccctcatctccccctacctttatcccgaccctcctctctgctgacacttcccccaccttcctcccaccaactccgctccccactgaccctcatccttcctgatcctcctttcacct

SEQ ID NO: 5731 - DNA, 120 bp, synthetic construct
  source 1..120: mol_type = other DNA
accaggctttgtcctgggtggagattccagtgctctgacaaagtctgagttttatgtaaaacaagtttatgtttggaaaaagttcaaggtgcccaacagatgtgcagccttaacagtaac

SEQ ID NO: 5732 - DNA, 120 bp, synthetic construct
  source 1..120: mol_type = other DNA
agagagagagagacagacagacggaaacccttcccagaggcaaattaagctgtttgagtgaagcacttaaaattggagaaaggagaacagtgagtgagaaaaacaaatctctttgctttc

SEQ ID NO: 5733 - DNA, 120 bp, synthetic construct
  source 1..120: mol_type = other DNA
atactagggtttcccaccaatgacacctgatccctaaggatctgagccctttggggaaacaatgctagaagtcaggatgtctggattgcagtctcagttctgccatcttttggaaaagag

SEQ ID NO: 5734 - DNA, 120 bp, synthetic construct
  source 1..120: mol_type = other DNA
attagggttctaaagtgcgcagaacctcagcaccttactatacactggggggattcacaagacacaatccctgaacttgagagctgctacaagaggagatatagcactccaagcttatgc

SEQ ID NO: 5735 - DNA, 120 bp, synthetic construct
  source 1..120: mol_type = other DNA
tcacatcatttctctcacctgtccgctttgggatacgaagagaggcttctgcgtcaagcctatatttcgtgttaaggatctaggggaggtcttctagctcctgtctgccaatgcctacaa

SEQ ID NO: 5736 - DNA, 120 bp, synthetic construct
  source 1..120: mol_type = other DNA
agacactcagtgcccagaactgtgcctagcacacctacagcttagtgactctctgttaggtggacagaactgatttatgactgggcatagtggcttacgcctataatcccaacactttgg

SEQ ID NO: 5737 - DNA, 120 bp, synthetic construct
  source 1..120: mol_type = other DNA
acacatacacactcacatacagacacaaccacaccacacacacacacactcacatacagacacaaccacaccacacacacacatacacactcacatacagacacaaccacaccacactca

SEQ ID NO: 5738 - DNA, 120 bp, synthetic construct
  source 1..120: mol_type = other DNA
ggagggattacagccctcgggtgatgggaacggacggcctttcggagaagcctagggccccagggcttgggaccgctctcctccacgccctacggatgccccactttccccctcttcttc

SEQ ID NO: 5739 - DNA, 120 bp, synthetic construct
  source 1..120: mol_type = other DNA
ttaacttgaaaaccttctctccaaatatcctgcttaagaagatttactgtgcttgtcaggctttggcgccctggctgaaatttctttgcttagttatgctgctatgcagttcactccaga

SEQ ID NO: 5740 - DNA, 120 bp, synthetic construct
  source 1..120: mol_type = other DNA
gccaccgcgcccggccatgaatactaatttttattctagtttgatctgcctataatcatgaggatctggagaaagggtcagaaaaagtaactaagcatttaggctgaattagtcttgcag

SEQ ID NO: 5741 - DNA, 120 bp, synthetic construct
  source 1..120: mol_type = other DNA
tggtcagagaaaatctctctgaaaatatgatatgtgagtagagatctgaggaaaatgagagagctagaaaacagcacatgcaaaattctggaagtggcagtgtgctggttcagttcaggg

SEQ ID NO: 5742 - DNA, 120 bp, synthetic construct
  source 1..120: mol_type = other DNA
agggtacaaagagggtagaaagatccaccccaggcaaggggggcagggtggagcaggagttttctttcctacatatatgtaatagactcttggcataatttttttttctcttttattccc

SEQ ID NO: 5743 - DNA, 120 bp, synthetic construct
  source 1..120: mol_type = other DNA
cattgaaaaaccaactacgttagccctttatgaaagaaaaaatgctgtagtgaagtggcatgacctggctttctgaaatatgagaaaacatggtttaagcaaaccgcacatcatagagtt

SEQ ID NO: 5744 - DNA, 120 bp, synthetic construct
  source 1..120: mol_type = other DNA
tgctattcatagatattgcattatttttatttttatttttttactaattaaaggtttgtggcaaccttgcattaagcatgtctactggtgtcatttttccaacagcatgggctcacttag

SEQ ID NO: 5745 - DNA, 120 bp, synthetic construct
  source 1..120: mol_type = other DNA
gatggctggagaggaggcatttgccaatagcagtagcctgtgtgcgtgtgcgtgtgcgtgtgtgtgtattgaaagtgaagatctacaggcaatatgaggtttctcataacatgttacatt

SEQ ID NO: 5746 - DNA, 120 bp, synthetic construct
  source 1..120: mol_type = other DNA
cctacaccatggtaatgatagtgaacgtggaaaggctagctacgaagtcagtactacaaacttacagaaacccttatctcttgacagtgtctcaggaagttgagaagtgataaatgagct

SEQ ID NO: 5747 - DNA, 120 bp, synthetic construct
  source 1..120: mol_type = other DNA
tacagtggctggcacataaaaggcattcaattatcagctattgttttcatatgcccaacatgtagcttggagtacttgctctatacctgtcacttcgctattgtgtgaaccaaagagaca

SEQ ID NO: 5748 - DNA, 120 bp, synthetic construct
  source 1..120: mol_type = other DNA
tacagataaagtggtgtcttcttctctaccttgttgctctattttttttttcttccatagggagcgagaatgggcatgaaaagacctggagctcacttctggagccatcagttgtctgtc

SEQ ID NO: 5749 - DNA, 120 bp, synthetic construct
  source 1..120: mol_type = other DNA
aaaagcaaggactttttgcaagagttacttgcaaagctctttaaaccacacagttaactcacaatgttaaccagctgcgaccaagttaggtgtcgttctcctctactatgggacatctga

SEQ ID NO: 5750 - DNA, 120 bp, synthetic construct
  source 1..120: mol_type = other DNA
agaagaagaagtggtgataacttttaattgagtgaagcacactgttatttggaaaaagacaacgataattcacacacagaatgctccttgctggtgggtgaaggccagattgctgcagtt

SEQ ID NO: 5751 - DNA, 120 bp, synthetic construct
  source 1..120: mol_type = other DNA
agtggccaagtctataaagctctgtgagaacaaggaacgtatctgtcttgctccttgtaatccctagtagctgttcttgggacacagaaaggaatttagtaactccctgtttcatcatat

SEQ ID NO: 5752 - DNA, 120 bp, synthetic construct
  source 1..120: mol_type = other DNA
taaatggatcaagtccactgatttttgtagttccttcctattctctgaaggtcacagcagacgttgtttgtgttcattaatcatttgtgaaattgaacattagcagccctgggatagtca

SEQ ID NO: 5753 - DNA, 120 bp, synthetic construct
  source 1..120: mol_type = other DNA
cttggtccaacaattattctaatggaattatcttccccacaccctttaattttaagctgaagtttaggacaaaagtataaatattttcacaagaaattgtcctctctaattactcccaag

SEQ ID NO: 5754 - DNA, 120 bp, synthetic construct
  source 1..120: mol_type = other DNA
gaggagggagaaggaggaggaagaagaagaggaggaggaggaagtagtagtagaagtagtagtagaaaaagaagtagtagtagaagaggaagtggtagtagtagaagtagtagtagtagt

SEQ ID NO: 5755 - DNA, 120 bp, synthetic construct
  source 1..120: mol_type = other DNA
cccaccccacacagaagagcagatttgcctctggcattatgttctcttcctctctcatatcagagttactctcaataacgcttttgaaatgtatctgtactagtgaagtgtaaataacca

SEQ ID NO: 5756 - DNA, 120 bp, synthetic construct
  source 1..120: mol_type = other DNA
aggtgctggaattacaggtgtgagccaccgtgcatggcctacattcttcataccagatgtagattttaaagtaggtgattcagctctgtttaccatatattggagagtattgcttcctct

SEQ ID NO: 5757 - DNA, 120 bp, synthetic construct
  source 1..120: mol_type = other DNA
tgttctcatagtggtttttggcatcaaattattatggaagccaacctggtattattttatgtatatttattgggcagttacagtaaaatattgatacattttatatttggagaatggaga

SEQ ID NO: 5758 - DNA, 120 bp, synthetic construct
  source 1..120: mol_type = other DNA
ttaaaaaattgtgaattttatttttggatagtaatacaagtattgcaacatattttaagtattaaaatatttaaagaagcattgggtctgatcaggttgttaaccactagttccacccaa

SEQ ID NO: 5759 - DNA, 120 bp, synthetic construct
  source 1..120: mol_type = other DNA
taaacaagtgatcttattagcagtgatatttttatttctcaagttaaaactgtttggtttttgtaggtgtggttagttgtaatcttggaactaattttttgtgataaatatgtaattcac

SEQ ID NO: 5760 - DNA, 120 bp, synthetic construct
  source 1..120: mol_type = other DNA
gagaaatgaaccttggctttagcagtactgaatggcaaaagtggaaagaaactcatttttcccttccttccttccctacttctctttctccttccatgctttccttccttctttccctgt

SEQ ID NO: 5761 - DNA, 120 bp, synthetic construct
  source 1..120: mol_type = other DNA
aatcacttttggctaattgtgtacttatggacatcagattgctcttgtattaaaatttattaggcagactttgagtgggaaaataaaaatcttgatttggtagatgctggagaacagtaa

SEQ ID NO: 5762 - DNA, 120 bp, synthetic construct
  source 1..120: mol_type = other DNA
gtgctcatctggagaaactgtcaggaaagatgatttttattaaaggcactgctgttacattcactcaggcatgattctgtcataacttcttggtatttcctttctatctttcttaattgc

SEQ ID NO: 5763 - DNA, 120 bp, synthetic construct
  source 1..120: mol_type = other DNA
tagctaaagtattctgttgtgtggcagttgaactgatgtgtgcttccctgacatttacttggtaagtagttaattgcttaccaagttagaaataactgtggtatcagtaatacaaatact

SEQ ID NO: 5764 - DNA, 120 bp, synthetic construct
  source 1..120: mol_type = other DNA
ggcaaataagctgttcattaccttttctagctcaaattgtattatattttatttttaggaggaccttttatttttttcttttccttttttcccccagacaccagtgttacttgccaacag

SEQ ID NO: 5765 - DNA, 120 bp, synthetic construct
  source 1..120: mol_type = other DNA
gatgttaaacccttatcaggcgtaacacttggaaatattttctcccaattcataggttgtctctgcatattgttgtttccttggctgtgtagaagctttttagtttgatgtaatcccagt

SEQ ID NO: 5766 - DNA, 120 bp, synthetic construct
  source 1..120: mol_type = other DNA
aggagacaaaaatgatgaatgaaaatacaataataataaggaattttagaacttcagttattgcctcacaaatttattaagtgaatgaaaaatctaggaatttaaatggtttttagagtc

SEQ ID NO: 5767 - DNA, 120 bp, synthetic construct
  source 1..120: mol_type = other DNA
gtggtgaaaccccttcaattactaaaaacttattttttttttcttgctttcattccattattcaaattgaagttcttaataccatgtacttgttacccttactttatttagggcactgta

SEQ ID NO: 5768 - DNA, 120 bp, synthetic construct
  source 1..120: mol_type = other DNA
gtgtgcgtaagtacattgtatatacattccctgatatttagcgatgacactagcatttttatataaagaaaataaaaagtgaccagtgtattagttttctattccaatcttaacaaatgc

SEQ ID NO: 5769 - DNA, 120 bp, synthetic construct
  source 1..120: mol_type = other DNA
ttggctttggctacatggcatgtgcatgagaagggtgcaccaggcagggctagcagagtgagaaaaatgagaagctacagagcatgactgcgtggtcatgggatattgaataatccagtg

SEQ ID NO: 5770 - DNA, 120 bp, synthetic construct
  source 1..120: mol_type = other DNA
atgactaccttatatttattgcttatttattcatttattatctgtatcctacaattagaatgtaaactatataaaagcaggtatcttgtctttcttgttgcctgctgcatgttcaggcac

SEQ ID NO: 5771 - DNA, 120 bp, synthetic construct
  source 1..120: mol_type = other DNA
tatttcagagaccagtagatctcagcatcagcatcatttgggaatttgttagaaatgtggaatctcagaatcaagttctggggtcagggcccacaattggtggtttaacaaatcatccag

SEQ ID NO: 5772 - DNA, 120 bp, synthetic construct
  source 1..120: mol_type = other DNA
gcatattgggtagcagtagtttgaaccctctgttttgttaagttcttcaacaagtcttcatctaatggtttgtctatcgaatgatctttccaaaatcacttatattatttttatttctaa

SEQ ID NO: 5773 - DNA, 120 bp, synthetic construct
  source 1..120: mol_type = other DNA
ttttttgtgggttcttgggaggagcggggataatgtctgtcaagtgcctgacacactgctgagcacatataggcactctgtacgttgtagctgttgttaatttactttaaaaaaattatt

SEQ ID NO: 5774 - DNA, 120 bp, synthetic construct
  source 1..120: mol_type = other DNA
aaggcaatcatcagtctatgagaaattaggtatccacatcctacaatagcccacaagatccaaaaacctctgttattttgtttcaggaagaggaaaatgatgaatagtagaagctccgcc

SEQ ID NO: 5775 - DNA, 120 bp, synthetic construct
  source 1..120: mol_type = other DNA
tattaaatccaaaactggcaaatgccttttaatgaagaaatctttcaaaagggacagtttaaaagacttaaaagtaactgtcaagaagattttatgacaaagataaatttcaatgactgt

SEQ ID NO: 5776 - DNA, 120 bp, synthetic construct
  source 1..120: mol_type = other DNA
tgtgttttgaggaaccctagtcctgagagatctatgaaaaatggattctggggacaaattagtttgagaaacgttaccctattaagttctgctacaaagaaacttaggtaattgtggatt

SEQ ID NO: 5777 - DNA, 120 bp, synthetic construct
  source 1..120: mol_type = other DNA
ctttatctgtgaccctcatcagttctccattcttggtagaggtttttaagtatatgacttactgggttggaaatttgagttagtcaaatgtattcctgtatgctgaatagtgaatagttt

SEQ ID NO: 5778 - DNA, 120 bp, synthetic construct
  source 1..120: mol_type = other DNA
ccttgagtattcctttataacaatacaaaaaagactgagacagcaggttatggaaaggggtcacaagggaagtctctgggctgatagaaatgttctctactttgccacgggtattgttca

SEQ ID NO: 5779 - DNA, 120 bp, synthetic construct
  source 1..120: mol_type = other DNA
gatccaatatcatacttggaaaaccagaaacataagagcaaactaattccaaacctagcaaaagaaaagaactaaaatcagagcagaactgaacaaaattaagaccccaaaatccaggga

SEQ ID NO: 5780 - DNA, 120 bp, synthetic construct
  source 1..120: mol_type = other DNA
cccttcccctcccctccccttacctttcctttcccgaaacaaaattatgaatagaatgttgggtcttaacttcctttcatataaatacttgcctaaatcagctgatatatttggtaaggt

SEQ ID NO: 5781 - DNA, 120 bp, synthetic construct
  source 1..120: mol_type = other DNA
ataggggagggcaggaagaggaaggaagggagggagggaggaaagaggaaagagggaaggaaggaacgaaggaaagaaagaagggaaaaagaaagagaaacagaaagaagaaagaaggaa

SEQ ID NO: 5782 - DNA, 120 bp, synthetic construct
  source 1..120: mol_type = other DNA
gtaattaaaagcaatctttctacagagtgataaagtgagtgtgacttttttaaaaagagtaacatttgataaagtagcatagtttggatataaatgatggtgctctaatagcctatcatg

SEQ ID NO: 5783 - DNA, 120 bp, synthetic construct
  source 1..120: mol_type = other DNA
ttccccagattaagaacacttaaccttaccactctttagtggtttctgtgatgtctaacaacccctgcccaacccccaaacacaagtaataaagtgcttgtataaaatgcttccagagtg

SEQ ID NO: 5784 - DNA, 120 bp, synthetic construct
  source 1..120: mol_type = other DNA
catatatcatgccaggcactgataagaacgtcacatatgttaactcatttaattctcataataactctaagataggttgttctcatctttagacataaggaagcttaagtccagagaagt

SEQ ID NO: 5785 - DNA, 120 bp, synthetic construct
  source 1..120: mol_type = other DNA
cttcctttatcattgcaaaggagacccagacctcaagtgacagctggtattgactcaaaactgccatcatcctagatgggcaaccaagcacacctaacattctctctatcttttatgtat

SEQ ID NO: 5786 - DNA, 120 bp, synthetic construct
  source 1..120: mol_type = other DNA
ctgactagaagatccattaactcataactcaaatttgacttatgtagggcacttaaagcataggtatatatacctctacctaagcaatacaggtagctagctctggacagagtttctaaa

SEQ ID NO: 5787 - DNA, 120 bp, synthetic construct
  source 1..120: mol_type = other DNA
tgcccagatgttctaccattcctttcttctaggaacaacttaaatgaaaacttatacatgaaaaccttatctaatcaacagatagaaagatcatttccaccatcacctcacacaacccct

SEQ ID NO: 5788 - DNA, 120 bp, synthetic construct
  source 1..120: mol_type = other DNA
agctctttcacggtttcttcaaacaccaccctctgtcaccaactctctaaataggatatcaatgtccgagacttcagtagctcttttcctatggacaccagtattgattgaatacttcct

SEQ ID NO: 5789 - DNA, 120 bp, synthetic construct
  source 1..120: mol_type = other DNA
tctttctttctttctttctttctttcttttctccctcaactactgattgctggtttccttctccatgccaggcactctgtggctccttgggataaagttgggaaacaaaccaacattgtt

SEQ ID NO: 5790 - DNA, 120 bp, synthetic construct
  source 1..120: mol_type = other DNA
aataatttcagtgtgtgtcctagatacttttgctgtggatcagcagccatcctacaaaatgaatggtccaaatcctcagtatctgttgttttcccaaagcagtgctagtccctcaggtca

SEQ ID NO: 5791 - DNA, 120 bp, synthetic construct
  source 1..120: mol_type = other DNA
catatatggctcacactctgtatgcaacattgatcttatcagcactcacatgcttatcctttctaaactcaaagctaggaatttacattccattaaagaaaaaaaaggcatgcatagttt

SEQ ID NO: 5792 - DNA, 120 bp, synthetic construct
  source 1..120: mol_type = other DNA
agagttggttaaaagagtcaatcactggctcacatgcagtcgctggaagaaagttcagtggtgctcactctcagtcatcaaatgtaggtgttttcctttacacctataggatctttcatt

SEQ ID NO: 5793 - DNA, 120 bp, synthetic construct
  source 1..120: mol_type = other DNA
catctggttgatggaatattgtatatacaacttctctctgctgtccttgtcctttacattgggattttgtagaatgagtcaaattcacattttaatcctctgttcttcagacagtaagtt

SEQ ID NO: 5794 - DNA, 120 bp, synthetic construct
  source 1..120: mol_type = other DNA
ccccaaatagccaagaaaaaaacagtgaagaagattttctattgcctgaaattaaaatttactgcagtgccatgtaaacaagctatggctgggatttgacatatggaacagggggttagc

SEQ ID NO: 5795 - DNA, 120 bp, synthetic construct
  source 1..120: mol_type = other DNA
tctggaatttttcatgtaatatttccagactgtggttggttgaggttaactgaaaccccacagacagtgaaaatgtggatggggtggggaagaagtactgtatgactgtgttttcctccc

SEQ ID NO: 5796 - DNA, 120 bp, synthetic construct
  source 1..120: mol_type = other DNA
agcacagtctccaatcagcctcctatggaaacttccatgggtacagtcatgctcactcaagggtagccaaaaccagaatgttacatgttaaaatacataatgaagaggccagaaaaacat

SEQ ID NO: 5797 - DNA, 120 bp, synthetic construct
  source 1..120: mol_type = other DNA
tggtgagtactttattattattaatggaaagagctctggttttctttaaatatggcaataacttggtctacagtctaggtaactgtaatattttatctgctgttaccattttggtttgtc

SEQ ID NO: 5798 - DNA, 120 bp, synthetic construct
  source 1..120: mol_type = other DNA
tgtagtggcacactctgaggctgagattcagccctaataacatggccatgggctattttcttcctaatgttccttataggtttggctgttgacagactataatactgcttccactttaat

SEQ ID NO: 5799 - DNA, 120 bp, synthetic construct
  source 1..120: mol_type = other DNA
ttcgcctaaatttacgaataatatcgtcctctctgatcatttccgctggggctccagcgactacggaaacaattccaatcattcggcccaaagaaaaagatgtccctgttctacccaata

SEQ ID NO: 5800 - DNA, 120 bp, synthetic construct
  source 1..120: mol_type = other DNA
tggcattcactctacacttgaggggctgctactgccaccatgtgtgactcaagccacagatgccagaaagttcatacctgcaaacagcactcaatcagagagaaggcggtggatacatac

SEQ ID NO: 5801 - DNA, 120 bp, synthetic construct
  source 1..120: mol_type = other DNA
aaagtagggccttgaacagatatttgcacatccatattcatagcagcactattcacaatagccaaaaagaagaaacaacacaaatgtcaatcaacagatgaatggatacacaaaatgtgg

SEQ ID NO: 5802 - DNA, 120 bp, synthetic construct
  source 1..120: mol_type = other DNA
atccatttaataataaccagctgatgggatgctgtgaggttaaatgggatgcgtagggaacgtgggtttgtaggttctccatagagggtagctgctgctcttattattgagactcttgtt

SEQ ID NO: 5803 - DNA, 120 bp, synthetic construct
  source 1..120: mol_type = other DNA
taagtctacatcctaaagcccaggaatttctctggttaggacagtctccttagaaggagaggcacatggagaagcctttttacttagaatataagaagagaggccaacagtactgacatc

SEQ ID NO: 5804 - DNA, 120 bp, synthetic construct
  source 1..120: mol_type = other DNA
cccaccccacaacagtccccagagtgttcacacagtttttctcatactcccatccttatcaccattttttttttttttgatgctgtaggtctaagtaagtcttaccactatcttccactg

SEQ ID NO: 5805 - DNA, 120 bp, synthetic construct
  source 1..120: mol_type = other DNA
gcagagtctatgatattatcattctagtatttaactacatctccccttaagaatgattttatcacccattattctttaaacctctcaagatacttcttaggctctgttctctctggagtt

SEQ ID NO: 5806 - DNA, 120 bp, synthetic construct
  source 1..120: mol_type = other DNA
tccatcaaggctgtcagaacttaagacaaaatgcacaaccaactggctgtggcagggacctcgaaatccggccactaagtcgggctctgcagcccaggacaaggtgaaaagcaaagaaat

SEQ ID NO: 5807 - DNA, 120 bp, synthetic construct
  source 1..120: mol_type = other DNA
atggaacccatggacatggagggccatctgtaacaactgctggaggaagtataaattggaacaatatctccagtaggcagtttagggccactcatcaaaattttaaatgcatgtagtaca

SEQ ID NO: 5808 - DNA, 120 bp, synthetic construct
  source 1..120: mol_type = other DNA
agcaaggaactattgtaatgtagagcacctagaagatatatttgtgtttactttaagcattaggaccaccttaaccaattctttggtggatgaagggagaccaaattggagggggagagc

SEQ ID NO: 5809 - DNA, 120 bp, synthetic construct
  source 1..120: mol_type = other DNA
aaagatcattctagcttaagtgaacaatacgtggaaaagacatactgaaggcaagaataccagtgagcccagggaaacacaaaaatggcacaatgtaaggtggtagcagtgggaataaag

SEQ ID NO: 5810 - DNA, 120 bp, synthetic construct
  source 1..120: mol_type = other DNA
ggctcctcttccagtgcccattcctctacatactttattgcttccttaatctccacaggaatcatttccccttttctatcagccttcaaaagcttgttgattgctctctaattacaaata

SEQ ID NO: 5811 - DNA, 120 bp, synthetic construct
  source 1..120: mol_type = other DNA
gaacatgtggtactcggttttctgtttttgagtaaatttgcttaggataatgacctctagctgcatcctgttgctccaaaggacatgattttgtcctttttcatggctatctaggattcc

SEQ ID NO: 5812 - DNA, 120 bp, synthetic construct
  source 1..120: mol_type = other DNA
ggaaactttggaaagagatgggaagtcctcatgtctggaatgttgcctggtatatggcgctgtcaatatagaatgaatgaacagcaaccgttatgacacttttctaactagtttcccttc

SEQ ID NO: 5813 - DNA, 120 bp, synthetic construct
  source 1..120: mol_type = other DNA
tgtcacccctcatgacggtggaggaacctgagttttggcgatctgcccctcgtctgaccccagattctctgcttgttcttgtattttagcatgctggtagtgatatgggagggggctatg

SEQ ID NO: 5814 - DNA, 120 bp, synthetic construct
  source 1..120: mol_type = other DNA
aactgaaaaagaaaagagaatctgacttactagctcttttgtatgcaaagaagggagtgacactaacttgcaatctcctgttttctgatccctggtcccaaagcaggtttctgacccagt

SEQ ID NO: 5815 - DNA, 120 bp, synthetic construct
  source 1..120: mol_type = other DNA
ctgggattacaggcatgaaccaccgcacctggcctgttttccccttttaaaggtgactagaatagtgcttccttattctagaaatgaccaatgagaaatgagaggtaatcagggttctct

SEQ ID NO: 5816 - DNA, 120 bp, synthetic construct
  source 1..120: mol_type = other DNA
cctaggcagtctttcagtcccttgggatttcgataatcaactactaacaaatgtttatgtccttcttatttatccttttctctccttgaaatagaatggtggggtggggggtggggaata

SEQ ID NO: 5817 - DNA, 120 bp, synthetic construct
  source 1..120: mol_type = other DNA
agctctgtggctctgtagcaaatcctgcttcctgcctgattttctaaataaagttttataagaatacaccacagccatttagaatggtctatggctgcttatgctatagacagagttgag

SEQ ID NO: 5818 - DNA, 120 bp, synthetic construct
  source 1..120: mol_type = other DNA
actgaccaagacctaggctgtatctcacagctggtcccacaaaaccatcagaatggaagccaaagaattctagggtttagcaaaaattctcacagcaatagccacttgataacttgctta

SEQ ID NO: 5819 - DNA, 120 bp, synthetic construct
  source 1..120: mol_type = other DNA
atgtgaaacatggggttaattattcattctctcctagcctttgccatgactctcaattagatgcaacattcttctccatcccacttactcaggatgtggccaaatgacttgctttggtga

SEQ ID NO: 5820 - DNA, 120 bp, synthetic construct
  source 1..120: mol_type = other DNA
catctcttcacatagtctcacttcctcctggaggttagcttaggatttttatggcagttgcaggactccaagagaactaagaaagaaaactccaatgtgcaagtgctttttaagtctcca

SEQ ID NO: 5821 - DNA, 120 bp, synthetic construct
  source 1..120: mol_type = other DNA
ttttactggttcctgaacctgttctaaatgtgaagtttgccacatgggctccagagcctttgggagaaagagaatcgacacagttttgccaaggtgggatggtgctattagcatagcagt

SEQ ID NO: 5822 - DNA, 120 bp, synthetic construct
  source 1..120: mol_type = other DNA
tggcagattcaggattcctagttgatttttcattattagtttgcctttccagtggtttctcagccccactgtgctgccttttcagatcctgtggaaaagcacataaaggataagaggtta

SEQ ID NO: 5823 - DNA, 120 bp, synthetic construct
  source 1..120: mol_type = other DNA
agtttacctaaaatgtctagacaacatataatattagctgatttttacatgatgcagtaataaccggcgccccccctccaccccgcttttttttttgagacggagtttcactcttgtcgc

SEQ ID NO: 5824 - DNA, 120 bp, synthetic construct
  source 1..120: mol_type = other DNA
catctcattcgatgctcacaatgatttcatatagcaggtgctattattgtccttagttaactgatgagtggcctgaggcttggagatgtagggaacttgtccaagacacagcaaggaaga

SEQ ID NO: 5825 - DNA, 120 bp, synthetic construct
  source 1..120: mol_type = other DNA
tggaaatgaatgcttctaaacactttaaaataatttgtttcctgacaaagtttaaagatctctagctctcattagaatttcatttagtctgtaattgacttagcaagttaatgaggcttt

SEQ ID NO: 5826 - DNA, 120 bp, synthetic construct
  source 1..120: mol_type = other DNA
ttaacctttcagaacagtccatctagtgagcccaggagtagttaaagggaagtttatggccaatggccctagttagaacaactagttttttttcatagaatcatttttttcttcacccac

SEQ ID NO: 5827 - DNA, 120 bp, synthetic construct
  source 1..120: mol_type = other DNA
cgcccggccaatctgttcatccattttaccatgtgaagatgcagcaaaaaggtgccatgtaagaaacaggaagaagagggcttcaatagactccaaattttctggtacttttatcttaca

SEQ ID NO: 5828 - DNA, 120 bp, synthetic construct
  source 1..120: mol_type = other DNA
tctctcctccttcttcttcctcttcctcttcttcctctctctctctctcaatgtttgggaaagaatcctagcattttctccaattatctggtcataactccctgtcaatgccaatgaata

SEQ ID NO: 5829 - DNA, 120 bp, synthetic construct
  source 1..120: mol_type = other DNA
cctcccgagtagctgggactacaggctgttctcgtttttaatctcctgattgcctctacctttagcatctgataacctccttctaccatcaaaaaatgctttcatttagagtcttctgta

SEQ ID NO: 5830 - DNA, 120 bp, synthetic construct
  source 1..120: mol_type = other DNA
ttgcattatcaacatttctctctccattgagttctttccttcagtttagcgtctctttcaagtcattccaagaagtctttttatctttgtccaccttcaaactgccacccacccccactt

SEQ ID NO: 5831 - DNA, 120 bp, synthetic construct
  source 1..120: mol_type = other DNA
tttcctcagtccactctgggtctgcgggaactcagtgtagataagtctattaatcagctgtggccaataccagattttttttgctgtttaggagtttggtattaataagtgtctcctgca

SEQ ID NO: 5832 - DNA, 120 bp, synthetic construct
  source 1..120: mol_type = other DNA
aaaaaaaattagggttgaagattttatttaatcattcatccttcttctctccccaccccccacccacctcaatataaatcagtagtccctcagtatcgtgcaggggattggttccaggta

SEQ ID NO: 5833 - DNA, 120 bp, synthetic construct
  source 1..120: mol_type = other DNA
ggcttaataatacatacatcacagggtagttgtgagaattaaaatagataaggtctgcatgcagagtacttggtaaagaacctagcacttggtaaggtctcaataaatggaagctgtata

SEQ ID NO: 5834 - DNA, 120 bp, synthetic construct
  source 1..120: mol_type = other DNA
gcaggcaggctggcttagatattcctcacatgtgagcctccccagtgtgctctctttataacaaaaatcaagaaaatgctatgttggatatgctcccaaataggttctacaattttttaa

SEQ ID NO: 5835 - DNA, 120 bp, synthetic construct
  source 1..120: mol_type = other DNA
aactacctaattgatttcttgacttgagtgtcactataaactccatgaggtcaaggaccacatttgcttatattcagtatcctgcgtctaacatctcgcacaacgcgtggcaattagtgg

SEQ ID NO: 5836 - DNA, 120 bp, synthetic construct
  source 1..120: mol_type = other DNA
gaaggaaggaaggaaggggaaataagaaagggagggacggaaggaaggactcaccaaaggctttaaagtaggttatactgtatatccacacctctttttctctctctctaaactataata

SEQ ID NO: 5837 - DNA, 120 bp, synthetic construct
  source 1..120: mol_type = other DNA
tgagcttttaaccaggtactgtctaacaacagtcatcttttggttctgttcactgagctaaatttatctttgtaaatctttttgagtctggggggtggggggaaggggggcttcattaat

SEQ ID NO: 5838 - DNA, 120 bp, synthetic construct
  source 1..120: mol_type = other DNA
ccctaagtgaagacaattaggtcttcttcagtgggcatgttatatcaaggtttaattgaaaattagacacatgtacatatagaaagaaaaagaacaaacaataactacagtcctctgaag

SEQ ID NO: 5839 - DNA, 120 bp, synthetic construct
  source 1..120: mol_type = other DNA
ggggaaactgaagaagtaaaactggattccatcaatctagcaattccgccactaggtatctaccctgaagaaactcttacacaaggaaacatgtcttaaaatgttcactaaagaactatt

SEQ ID NO: 5840 - DNA, 120 bp, synthetic construct
  source 1..120: mol_type = other DNA
gccaacctggcttcttctcaccagacaaaatcccttcaaaattggtgaaaacgtcagtactaaaactgttctttcaatcactcggctttgaacttcaattaatttaaagatggcatagaa

SEQ ID NO: 5841 - DNA, 120 bp, synthetic construct
  source 1..120: mol_type = other DNA
tcctttgtagggacatagatgaagctggaaaccatcattctctagctcttcttaatgggactccagttacatgtatgttcgagttttgaatgttcctactcccattacttaccttcaatc

SEQ ID NO: 5842 - DNA, 120 bp, synthetic construct
  source 1..120: mol_type = other DNA
tggggtagaaaaataggaaagagatgcggggccagaattaagttttcagtgaaattataaagtataattattcaagaccatatataaaaaatgtcctttggaaaatgaagtttttaggca

SEQ ID NO: 5843 - DNA, 120 bp, synthetic construct
  source 1..120: mol_type = other DNA
tttaaaaatagaagagagaagtatacagaagtgggttaggggtaacagtaaacagaaaaacaaataggagagggaagagggaagcccaccagcactgagtattcaatgggcaggctccat

SEQ ID NO: 5844 - DNA, 120 bp, synthetic construct
  source 1..120: mol_type = other DNA
ctagtgagtatctgcgtatctaaccataaaaaaaggtacagtaagaagacgatattataatctttgagaccacgctgtcccacattgaccagcaacgtccttctgcagcgcataatcgta

SEQ ID NO: 5845 - DNA, 120 bp, synthetic construct
  source 1..120: mol_type = other DNA
ctgcgatatctcagggacccacgtgctctaggcagataaataagacagacaagcaccctcatcaaattcagaaggaggcccacaatctctcccaagacaaacatacttgtctacaccaaa

SEQ ID NO: 5846 - DNA, 120 bp, synthetic construct
  source 1..120: mol_type = other DNA
cttattaggtcaacagtgatgatgtgtatacactattaccaataacaaaaataaaaatattagaaaaaacagtaaaatattcatccatccactccctaccttggtcagaagagagtacta

SEQ ID NO: 5847 - DNA, 120 bp, synthetic construct
  source 1..120: mol_type = other DNA
ccttcagaaaatatcaaagctgcagtttattactctctcagagaaactagaaatcaagctaaaacagatgaaacagactatctgggagagtgaccggaccgttcaaaggaagactagggg

SEQ ID NO: 5848 - DNA, 120 bp, synthetic construct
  source 1..120: mol_type = other DNA
ctaatagtagtagtagtaaatctgagctcgccttccctcctttatctgaaactaaaaacttcaagcaaatttgagcaaacacccttgtattggtgcctcaaattttgcccacttactcag

SEQ ID NO: 5849 - DNA, 120 bp, synthetic construct
  source 1..120: mol_type = other DNA
tttacttagagcttgctctttctgttggtggaagaggacacagagagacaaaggaatcctgccttcctttgctcatcttcagggctttccaagtagggcagagttttacagaaaaaaaaa

SEQ ID NO: 5850 - DNA, 120 bp, synthetic construct
  source 1..120: mol_type = other DNA
gaaaaacaccatttatcccattacccaaacacaatcttttcatttttaaaaattttaatctattatttgtccccatgtaagcatattttcactgagatgtcctcataatgcacatataat

SEQ ID NO: 5851 - DNA, 120 bp, synthetic construct
  source 1..120: mol_type = other DNA
tgcaggtgcctataggccttaaaacacaactgtttcatgttgttcagtcatcttatttctttccttgtaagcaaaatgtcagaacatttagctcctttagtgcacttattgcccacaccg

SEQ ID NO: 5852 - DNA, 120 bp, synthetic construct
  source 1..120: mol_type = other DNA
ttttatgaactctgtgaatgtattcacactttctctctttttgcacttctgtcttttttggatgccccactctacccgtcctgagcatgtcttcccaagaagccttctatgctaagacct

SEQ ID NO: 5853 - DNA, 120 bp, synthetic construct
  source 1..120: mol_type = other DNA
gaacaccctgatatgcatagaaattgtgattaaattctcctttgtgtatgaaatgtgtccctgtgtggacctccataaatgtatgaagcctggattatctcataaatattttcccaaaaa

SEQ ID NO: 5854 - DNA, 120 bp, synthetic construct
  source 1..120: mol_type = other DNA
gagaatttgagacaatgagcatatatggctcagctgtgaattgtggaggcttttcctggggaggacttgaattcagacagtgttgcacattgcttttcataagcttatatctgattggct

SEQ ID NO: 5855 - DNA, 120 bp, synthetic construct
  source 1..120: mol_type = other DNA
tgatcctttgacttcctgcgtgcctgtgctaataccaagttgtctgcatgataatcatcatgtattgagggcacaccgtgtgccaggcactttccttaacactttagattttatattctc

SEQ ID NO: 5856 - DNA, 120 bp, synthetic construct
  source 1..120: mol_type = other DNA
taagcatcttttagaacatgggatcctgggcaaaaataaataataagaaacttgtgaaaattttggaaaccacccagtaatgcctaaaaaagctttattctgagacatgatgggttcagc

SEQ ID NO: 5857 - DNA, 120 bp, synthetic construct
  source 1..120: mol_type = other DNA
tcctccgggtccgcttcctgcggctgctgcttgccccataggccaggaggcttctgggtggaccagcgcgatctccccgaatatcgcggtctacccgaacatcgcggcctccccgaacat

SEQ ID NO: 5858 - DNA, 120 bp, synthetic construct
  source 1..120: mol_type = other DNA
accattaagccccaatgactggtaatcttcactaaattagctgtacctccttactgctgtgatggctagtacgactactaccaacttagaaagggaaaaaaagtcatgtggttggcctta

SEQ ID NO: 5859 - DNA, 120 bp, synthetic construct
  source 1..120: mol_type = other DNA
ggagggggtgcagtgggctttgggaagaggtaggagagtagtcgttgaaatcttgatattgcaaaatgtactttaaataagaatttcctaaccctaggtttagctgaagagaaggtattg

SEQ ID NO: 5860 - DNA, 120 bp, synthetic construct
  source 1..120: mol_type = other DNA
gtttgcgtgtagacagacagatcaatctttatagccttgctctacaaaggagtccaaatggagctctatgaaccaattaaaaaaacctcaaagaccaagtatagccatctcatgggggca

SEQ ID NO: 5861 - DNA, 120 bp, synthetic construct
  source 1..120: mol_type = other DNA
acctgatccgtgggtatctcagataacaaatacagatacacttgcggctgtagctcagatcttgcaaagtcctcaaggccagcaggtgagcggtttttctgttatatcaagaataattta

SEQ ID NO: 5862 - DNA, 120 bp, synthetic construct
  source 1..120: mol_type = other DNA
ccgaaccgtcccatgagatgaaaatgaactagaaaccgaaagctgtaagaattgggtcctctttgttgtctgcatggagacaaagtctgctcaccgtgtagctgcttttttttaatgtat

SEQ ID NO: 5863 - DNA, 120 bp, synthetic construct
  source 1..120: mol_type = other DNA
tgcaatcactcaacccacagtggactttgcaggactgagaagtaaatgctgatatgtaaagctacagagatttctgggttaatttgtttccatagcttataaactaccaagagaggtagg

SEQ ID NO: 5864 - DNA, 120 bp, synthetic construct
  source 1..120: mol_type = other DNA
ctaattcttttagaattaaaagaaggaaaatcctgacattctgggaatgggtctgagttgcctggagagtctgaggtggaccagagatagccagggccagaactcaagccttttcatatg

SEQ ID NO: 5865 - DNA, 120 bp, synthetic construct
  source 1..120: mol_type = other DNA
cctaaaactgacaagctgagcttttctgagccaaataacatggtcggccaattatttctggaaccatttatctggaagggcacaggactttctgcatagtgagctaagtgaggcaggatc

SEQ ID NO: 5866 - DNA, 120 bp, synthetic construct
  source 1..120: mol_type = other DNA
ggcatagtggtgctattcatgggaagagggaagccaggcacgtttgcttcaggaagatgatgagttcagtttgggtcatgttggctgcatagtgcctgtggaatttccagatgtggaagg

SEQ ID NO: 5867 - DNA, 120 bp, synthetic construct
  source 1..120: mol_type = other DNA
caccctagttgtgaaacggtgcccaatttttccagttgtttcacgtgagcctgtgttcgttatttagaatccatgtcaatgtttccctcctggaaccttggatttaagccagagagcgct

SEQ ID NO: 5868 - DNA, 120 bp, synthetic construct
  source 1..120: mol_type = other DNA
gcgcagtcgctttgtgtactgtatactagttgtccatactgttgaatatacacccctccccaaaaaaaaaaaatctggcagggtcaacatagcaggcattaaaggtggctaatttgattg

SEQ ID NO: 5869 - DNA, 120 bp, synthetic construct
  source 1..120: mol_type = other DNA
aagaacctagcactgcatagcacatgaaactcattcttcgaggccacctgtttctgttctctattaagtagacagaaaaaggttttctactaatacttccattgggctttttcccccgtc

SEQ ID NO: 5870 - DNA, 120 bp, synthetic construct
  source 1..120: mol_type = other DNA
tgcagggagactcctcaaagctcttgtctcagcttgcttaaataagcaaatccctatttaagtgggaagtgcttcaaaatcatagaaaaaatcccaagaaggcatctctcaccaggacta

SEQ ID NO: 5871 - DNA, 120 bp, synthetic construct
  source 1..120: mol_type = other DNA
ctttcatgtctgctacttcaaactgacagacctattgtaaactttaactctcaatgttcatctgacatcttgacattctcaacatcttgactcaaaatgaattattgcacccttactaat

SEQ ID NO: 5872 - DNA, 120 bp, synthetic construct
  source 1..120: mol_type = other DNA
attacaggtgtgagccactgcaactggcccaagctcctgtgtaccctcccctccctttagagcaatcactacaggggcatctgaatgtctcattcttttttgttgttgttttttcgagct

SEQ ID NO: 5873 - DNA, 120 bp, synthetic construct
  source 1..120: mol_type = other DNA
cccattctttagaaatatgcatcaaggcctgtaagaaccttgcctatggagaagaaaagaagaaaaagtgcaatccgtaagttgttttttttaagtttaacatgagacatattgattcca

SEQ ID NO: 5874 - DNA, 120 bp, synthetic construct
  source 1..120: mol_type = other DNA
acccacaaatttgccattttgccattgtttccaggcccaccaccctacctactgaagataactgtgaacttcaactcacttatcatctttctcataaatattcagtccaagggcatcaac

SEQ ID NO: 5875 - DNA, 120 bp, synthetic construct
  source 1..120: mol_type = other DNA
aatttcaagaacatgtaatgaaatctcaaatcctaaatagctctcctttttcctctgagagtaagccacttcctgcccctagacccacatcctgtcagaccaaggctgcttaacaaacac

SEQ ID NO: 5876 - DNA, 120 bp, synthetic construct
  source 1..120: mol_type = other DNA
ttctcccttcttcttctttcttcttactgtctcagctcatggtcagaagtcaagtgacctggatttctgcctggccagcactgtgattaagatccacataagtttctgggcactacagcc

SEQ ID NO: 5877 - DNA, 120 bp, synthetic construct
  source 1..120: mol_type = other DNA
tggactgcaggggcgcagcactcactgtgaaggtcaaggaaacagtaatgaaatccccaggtgggagcaggtttgtgagtgcctctctcaatttgttcttgagatatgttaatctgttca

SEQ ID NO: 5878 - DNA, 120 bp, synthetic construct
  source 1..120: mol_type = other DNA
actcattccttcctcactcgttcctccactcactcattccttcctcactcattcctccgctcattcattcctccgctcactcagtcctttctaacttattcctccactcactcattcctc

SEQ ID NO: 5879 - DNA, 120 bp, synthetic construct
  source 1..120: mol_type = other DNA
agcgtgcagtgttaggttctgttaggatcaaaacaatctccctcaggaagcttatataaaaagttgtccttgtccctactcttaggtcaagaaaacattgtcatcaatatgaatatgaag

SEQ ID NO: 5880 - DNA, 120 bp, synthetic construct
  source 1..120: mol_type = other DNA
acagtatggcaagacaggctggggaactccaagtctgccttaattagatgctaaaaatagatgtttctaaaagtcctgtttcctttctaggccatccaacattctggagaagtgctttta

SEQ ID NO: 5881 - DNA, 120 bp, synthetic construct
  source 1..120: mol_type = other DNA
cacttccatcctaagaggatggtggagggtgatgctttttgtttcttactcatttccctgtgcatccatacagttagccaataccctctaaagtaataaaagtgtatttctgctccgagt

SEQ ID NO: 5882 - DNA, 120 bp, synthetic construct
  source 1..120: mol_type = other DNA
taggtatcattttgcaaatgatgaactaataatgcccagaggagctccgttacatttccaccagtcacagcatttgaaaactggtggatttcactacataccagtgatggctttgaaccc

SEQ ID NO: 5883 - DNA, 120 bp, synthetic construct
  source 1..120: mol_type = other DNA
ggagggagggagggaggaaggaaggaagaagagagagagagaacaggcatttcctccaccagatattaagataaatttaaaacaacagtaattaaaaatgtgtggccccaacaatagcat

SEQ ID NO: 5884 - DNA, 120 bp, synthetic construct
  source 1..120: mol_type = other DNA
actgctttgtctttctgttacacatacagttttgatttatttacaatatatgctgtgccattttgatttttatattgtttggttggttgaataaatttgcgacactcaaacacttgaggt

SEQ ID NO: 5885 - DNA, 120 bp, synthetic construct
  source 1..120: mol_type = other DNA
ttttttctctgtcacctctgccgtcacccttgccatccctcctccatcacctctaccatcaccctccaccatcatctctgccattaccttccattatcttcaccatcacctccactatca

SEQ ID NO: 5886 - DNA, 120 bp, synthetic construct
  source 1..120: mol_type = other DNA
ccatccacgtccacacctgtcagccctgccccctcatccacccacgtccacacctgtcggccctgactcctcacccatccatgtccacagacccatgtccatccccacacctgtcatttt

SEQ ID NO: 5887 - DNA, 120 bp, synthetic construct
  source 1..120: mol_type = other DNA
gcagccggctgctgggctgctctgaggccccggaagaggtgtcagggcaatcttttcattttctctttctctctctgttttttttttaactctctttagacctaacaggtaatgattggc

SEQ ID NO: 5888 - DNA, 120 bp, synthetic construct
  source 1..120: mol_type = other DNA
tcgtatatttactctacactttgggtcaccatccaacaccacattatttctttattaaggtggtaagacacggggcttattctagcccccactgcgtagctgtcgctccattctccggca

SEQ ID NO: 5889 - DNA, 120 bp, synthetic construct
  source 1..120: mol_type = other DNA
ttgtgcatgtgtacatgtcagtggtgcgtaactgtgtgcatgtgtgtgctgcatgcatgtgaacaagtgtgagtggtgtgtaactgcacgtgtgtggcgtgtgcatgtgtacacgtgcaa

SEQ ID NO: 5890 - DNA, 120 bp, synthetic construct
  source 1..120: mol_type = other DNA
tggaacagccctggtttacagaccctgtctcgggaaaaggagtcaggaacgttgaatgatttatggtatctggtctggaacagccctggtttacagaccctgtctcgggaaaaggagtca

SEQ ID NO: 5891 - DNA, 120 bp, synthetic construct
  source 1..120: mol_type = other DNA
agtcacacacaaccactaatactctcacacactcatacccacactcatacaatcccccaaacacccccccacacacaaacatacccacagtcacacattcaccccacacacacacacaca

SEQ ID NO: 5892 - DNA, 120 bp, synthetic construct
  source 1..120: mol_type = other DNA
tggatggatgagtgggttggtagatgagatgaatgggtggatgagatgaattgatggatggatggatgaatgagataggtgggttggtggagatggatgggtgggtggatggatgagatg

SEQ ID NO: 5893 - DNA, 120 bp, synthetic construct
  source 1..120: mol_type = other DNA
ctactctaactgcccgaggcagctgcagtaataatggtggtgctgatagggcctttctatggagctcttaagagggtttaatgacaggagcgaacacttggccatgagcttagaacagta

SEQ ID NO: 5894 - DNA, 120 bp, synthetic construct
  source 1..120: mol_type = other DNA
tcacagtgtggcccacctcgcggatgcttccagtgcacctgtggagcagggacagtacccatggcagggctggacggcctgggccttctttgtggagcaccatggactatcacgatacct

SEQ ID NO: 5895 - DNA, 120 bp, synthetic construct
  source 1..120: mol_type = other DNA
cgcgatacagaaagctctgaggatagagcctggcacatggaaagtcctgtgtgtttactgccctcagtaatatactgaataatacctattggtaaatgaagggaaaattcctgtgtgttt

SEQ ID NO: 5896 - DNA, 120 bp, synthetic construct
  source 1..120: mol_type = other DNA
aagtcatgaagctcgatcttatctcaatccctgtgctgtctggtgttactagcagccaaatgcaatttccaacacagtagccaacagccctgcacgtttataaaggatttccagatatat

SEQ ID NO: 5897 - DNA, 120 bp, synthetic construct
  source 1..120: mol_type = other DNA
ggcacttgacactgctcgtgttgcagcagccggtgcagcgtttcacctccacgcacgggggccagatcaggaagttggcggacgtggggtcgacctgactccgaggaatctcgtaaatga

SEQ ID NO: 5898 - DNA, 120 bp, synthetic construct
  source 1..120: mol_type = other DNA
agctcaaatcacatgcccagctcaaatcaatcatgcccagctcaaatcacatgcccagctcaaatcaatcatgcccagctcaaatcaatcatgcccagctcaaatcagatgcccagctcc

SEQ ID NO: 5899 - DNA, 120 bp, synthetic construct
  source 1..120: mol_type = other DNA
tgtctctctgatcatagggggacggcttcgcaggcgtgtctctctgatcatacacgtcagcacgtgtggcaagtgtgttgtttgcatctctgtgtggctctaaatgtttgttttttgaga

SEQ ID NO: 5900 - DNA, 120 bp, synthetic construct
  source 1..120: mol_type = other DNA
ctggtgtgtgtgtgatccgctgtggaatcccacagtgcagaggggctggtgtgtgtgtgatccgctgtggaatcccacggtgcagaggggctggtgtgtggtgtccactgtggaatccca

SEQ ID NO: 5901 - DNA, 120 bp, synthetic construct
  source 1..120: mol_type = other DNA
cagtgtattctggcatcagggagtggagacagctgtttaatgttagggtcttcagcaaagaagcaaacaagaaataagacgtaacctttaaacctgcgcacttgagtagggtttaatagt

SEQ ID NO: 5902 - DNA, 120 bp, synthetic construct
  source 1..120: mol_type = other DNA
tagggacccccggcagactcgagccgcccctctgggcacaagatcccggaagaaatgcagggtcagcctcctgcccgggacgcttctcactctgatattagtttattggtttcttgtgcg

SEQ ID NO: 5903 - DNA, 120 bp, synthetic construct
  source 1..120: mol_type = other DNA
gcccatcaccacgaggagggcccccactgcagccagggcttccagatgggcagaggcggtgggaagcaagcaggaagcggagactggttggctgtggccctgacccctcttctcctgatg

SEQ ID NO: 5904 - DNA, 120 bp, synthetic construct
  source 1..120: mol_type = other DNA
tttacaacaatacccaggacagtcacgcagcagcccccaaacccccctccccgacacccgggcactctctttacaagatgcatgcttcaatgaagctccccttttgacctcagtgttgct

SEQ ID NO: 5905 - DNA, 120 bp, synthetic construct
  source 1..120: mol_type = other DNA
cccacatccttactcctcttttctcctttgtcccaggcgatgccggcctccttcacctgcgctgtgatgcccagcatcatggacacggccaggacgtcggtgatgtgcaccacgaagcgc

SEQ ID NO: 5906 - DNA, 120 bp, synthetic construct
  source 1..120: mol_type = other DNA
aacagggcctcgcccaccaacagggccccgcccaccaacaggaccggctctgggctaggcagccccgtctaattcccgcttccgcagacagggccctctggacacacccacccctggaga

SEQ ID NO: 5907 - DNA, 120 bp, synthetic construct
  source 1..120: mol_type = other DNA
tgcctgtgcatgtgtgtgcatgcatgcatgtatgtggctgcctatgcatctgtatgcatgggtgcagctgcctgtgcatgtgtgtgcatgcatgcgtctatgtgactgcctatgtgtgtg

SEQ ID NO: 5908 - DNA, 120 bp, synthetic construct
  source 1..120: mol_type = other DNA
ctggggatgtagattttttttgggggggtggggggtggggttcaattttgctggatgaagaccaaaaactgcaaatcctgttatctcatttcaaaatagattatgttagtttagccccta

SEQ ID NO: 5909 - DNA, 120 bp, synthetic construct
  source 1..120: mol_type = other DNA
cactgcagaagcatttgcaaatcataaattaaagagctctttctcaattaacagttacagatgtcttctcagtgcagggaagtgtgctagggactgcatcctagagatacagtctgtgct

SEQ ID NO: 5910 - DNA, 120 bp, synthetic construct
  source 1..120: mol_type = other DNA
gtgagcctggaaaggtagcagaagtgatccaggatcctaaggtgtgagaaagtgcttagattttattgattttcttttaggcataagagaaggccatggaggattttgagtagggttggg

SEQ ID NO: 5911 - DNA, 120 bp, synthetic construct
  source 1..120: mol_type = other DNA
catacctccaaggtccagttacctcccaccaggccctccatacctccaaggtccagttacctcccaccaggccctccatacctccaaggtccagttacctcccaccaggccctccatacc

SEQ ID NO: 5912 - DNA, 120 bp, synthetic construct
  source 1..120: mol_type = other DNA
cagagacttgatattctttaaatgtactttttaattaaatgcgacctagacagcttctccctcctcagcctcttctatgagtaaagaggttcatgtgggggaaattgactaggattaggc

SEQ ID NO: 5913 - DNA, 120 bp, synthetic construct
  source 1..120: mol_type = other DNA
aaagacagagaaacaaatgggctcctattacttgtattttatactgatgacacaggacaggctagttgggctgtttgcccacctgcctgtctatgttgcttaatttctgtggcttgaatg

SEQ ID NO: 5914 - DNA, 120 bp, synthetic construct
  source 1..120: mol_type = other DNA
tgggctgtgctcacacacacggcaagggcttgtggctatggtgcagtttattgcttggagcaagtatttcgatagtctggaaaataatctatcaaaagcagaagtgaaatcaatactttg

SEQ ID NO: 5915 - DNA, 120 bp, synthetic construct
  source 1..120: mol_type = other DNA
tcctggatcaatgcaaatctgagagttcttttactgcggagagtggtcctatcatttgagtgtagtcaattagcagaggtgatatgaaaacctccagctctgctatagaaagcaaatagg

SEQ ID NO: 5916 - DNA, 120 bp, synthetic construct
  source 1..120: mol_type = other DNA
gtgggggggggactgaccaacaaagtttcctaaagttgttgttcctgtttatctctaaggaccagctctaggtttgtttttaagtatctccctccagtcctaacttactaagtaaaagct

SEQ ID NO: 5917 - DNA, 120 bp, synthetic construct
  source 1..120: mol_type = other DNA
gaatttggtgtttggacttcttaagactccttccctccaggataccataacataaggtacactgaatgttgtaaatcacttcaagaaaatgtctaaagatgctggacaattcagggtcgt

SEQ ID NO: 5918 - DNA, 120 bp, synthetic construct
  source 1..120: mol_type = other DNA
attctagaactttaatggaatttttatctctagataacaaatggcaattttgtgttctattactctagtctgtgggcttttctttgtctctatagcaaaatagaaaaaaaatacacaggt

SEQ ID NO: 5919 - DNA, 120 bp, synthetic construct
  source 1..120: mol_type = other DNA
aacagaaaacgaataaaggacaatataaagaagcatagcttgtcagcatgaacctacatgcaagccagagatctatgattttgtttcccagggagggagtgactaatgcgcgcaccctga

SEQ ID NO: 5920 - DNA, 120 bp, synthetic construct
  source 1..120: mol_type = other DNA
acggactattcagcagccagaaaaatgatggcccagcagtacatttactgacagagaatatgcacaatgtattgttgagtagaaaagcaagtaagaaaagaatatgttaggacgatctac

SEQ ID NO: 5921 - DNA, 120 bp, synthetic construct
  source 1..120: mol_type = other DNA
aaccagttttaaggagaggagatctatgtaggaaaggggacccaaattgtggatatttgggcctgccacataggagaacttctattgggcaggaaagattgcaaagtatacctatacaat

SEQ ID NO: 5922 - DNA, 120 bp, synthetic construct
  source 1..120: mol_type = other DNA
tccttacaaaaggggcgagagaggaggcaaagtcagagagaagacaatctgaggacagaagcagaggctgaagtggtacactttgaaagaggaaaccattaggtatatctccaaatgcta

SEQ ID NO: 5923 - DNA, 120 bp, synthetic construct
  source 1..120: mol_type = other DNA
caaagtgctggggttacaggcttgagccaccgctcctggccttgactgattctttataaagatgctaatgctgtcatgtgttacagaggtttttcttttgattttcagttgcctaataac

SEQ ID NO: 5924 - DNA, 120 bp, synthetic construct
  source 1..120: mol_type = other DNA
ccccagtagctggttcaggattaggcacacgacccaggtgggaacaaccagagccaagaatcatctgtagaactaatatttgctaggcatataggaaacaagcctgtagctaagagacac

SEQ ID NO: 5925 - DNA, 120 bp, synthetic construct
  source 1..120: mol_type = other DNA
caggcatgagccaccgcactgggtcctaaagcttatttttaccatactgcactagcagacctcatcttttctgccttcatatagttcacatgtgcagcatattactttagttaatatctc

SEQ ID NO: 5926 - DNA, 120 bp, synthetic construct
  source 1..120: mol_type = other DNA
tcagtcgttgagttgcttgtggtttgcaaatatctacgaggatccagtgccttccagagagggcttgcctccctagttatgtggaatagacacatgttgttttttcttttacttactaat

SEQ ID NO: 5927 - DNA, 120 bp, synthetic construct
  source 1..120: mol_type = other DNA
cgactacccaaaattttgtttggtgttgagattgatgatgccatacttccaccaaaaggatgtacaaagttttattgttcacatgatgtgactttctgggggaagcaggactgaccccca

SEQ ID NO: 5928 - DNA, 120 bp, synthetic construct
  source 1..120: mol_type = other DNA
gtggatgaatgaggagtccacacgactttttccatggtttttgcatgtgtccagaggttgccctagaaacctcatacttgagagtgttgaggtcccaggaaatcattttctgagaatata

SEQ ID NO: 5929 - DNA, 120 bp, synthetic construct
  source 1..120: mol_type = other DNA
gatttattaattcattgaccagcaccgggagactcagagccatgtggtacctgaggagagttagtgaagtagcaagtcttttgcaatctgagaagataatacagctcatcatctatctct

SEQ ID NO: 5930 - DNA, 120 bp, synthetic construct
  source 1..120: mol_type = other DNA
aaggtcctgacttaaagagttctcttaaataactgctttcatcttttccctcccttctgccagactggaatattaacaagtattccaaaactctaggccagtggagtctagccaggcaag

SEQ ID NO: 5931 - DNA, 120 bp, synthetic construct
  source 1..120: mol_type = other DNA
agcggtaagctttccctaccccagaatccctggggaagagtggagacatgcactttggatgacgtttgatatcgttccattttattttatttatttatttttgagatggagtctcgctct

SEQ ID NO: 5932 - DNA, 120 bp, synthetic construct
  source 1..120: mol_type = other DNA
cccaccccccaccccccacacactgccctaagagttatcaaccaagagtatataaattagagctgcatattcagagtatttaatgcttttttcctgcacaatacaaccaccatcaatact

SEQ ID NO: 5933 - DNA, 120 bp, synthetic construct
  source 1..120: mol_type = other DNA
attttctcctggagataatggggaacccctggagaatgttaaaatggaggaacagaatgatgagattggcattttagaaagatcaatctagcagctgagtagaggagcacacatagtgag

SEQ ID NO: 5934 - DNA, 120 bp, synthetic construct
  source 1..120: mol_type = other DNA
tgggactacaggcatgagccactgcgcctggcctgtttcttttttaaacagttttctattgggtgtttgcagacctacagcttttctcgtagtcttattcataaagcttttcaaagcact

SEQ ID NO: 5935 - DNA, 120 bp, synthetic construct
  source 1..120: mol_type = other DNA
tgatgagttttacctatggcattaactccatatggacaaaagcaaagtgtaatgttagaaaacacattaattacaactagtgtcctgtttgtagttttactgtgaaggaaaacacataat

SEQ ID NO: 5936 - DNA, 120 bp, synthetic construct
  source 1..120: mol_type = other DNA
cctgtaggctgtccaagacagtttcctttgggagagattagttgcaagttcttgaaatactggctttacctcatcctcacagtggttatgttttactccatcatttcagccacaatgtgt

SEQ ID NO: 5937 - DNA, 120 bp, synthetic construct
  source 1..120: mol_type = other DNA
caatgatttccctttgaaactactttattttactaatttaaactattttgtactgatgtagccctgaggtagttcatgaaaatgctgtgcactcattccatggaataaatgttggaaagc

SEQ ID NO: 5938 - DNA, 120 bp, synthetic construct
  source 1..120: mol_type = other DNA
gatacttaggctattacattttcatggtctactatttctgtgtatatgtatctttctagcagaggattcctcttaatcacctgcctctccagaattgtttccgggattgcctgtgactaa

SEQ ID NO: 5939 - DNA, 120 bp, synthetic construct
  source 1..120: mol_type = other DNA
taagatcccttttaatagtggtgtttttagctctgttactcctcatacatcattaggcataaatcaagtcacgaggttatacattttggccatgagagttcatcaatctatggctttgca

SEQ ID NO: 5940 - DNA, 120 bp, synthetic construct
  source 1..120: mol_type = other DNA
ttaaaaaatattattattccataaaatagtgtttatttctgataaaattgttcctgtactgtgctcttcatgaagtgaatgttttggtactttaaaagcaggctactgtcacctggtgtc

SEQ ID NO: 5941 - DNA, 120 bp, synthetic construct
  source 1..120: mol_type = other DNA
tgacctctgtagtgtcctaaggaaggctgaatgtaagaaatatctaccaagctgtctggtttccaaaactgttgtgagaacctaagaaagtaagttttcccaccacagcatccagaaatt

SEQ ID NO: 5942 - DNA, 120 bp, synthetic construct
  source 1..120: mol_type = other DNA
tgaattctcactgttttggtctctgcaaactcagctctgacctctcaactcagggagtctggtgggctctgcctgtattctcccccactgccatggtctataccccctcaggaaataagc

SEQ ID NO: 5943 - DNA, 120 bp, synthetic construct
  source 1..120: mol_type = other DNA
aacagccacatacaatacttaacaacaacaaaaaaacagaccgtgttccaataaaactgtattggtaagcaataaaatttactttcatattattttcacatgtcaggaaatattacttta

SEQ ID NO: 5944 - DNA, 120 bp, synthetic construct
  source 1..120: mol_type = other DNA
cctagtgacatcatagccatcataatgcagcaacacaacatgttactcacgtttgtataaaatacatcatacttgattaatgataataaacaatgatgttactggtttgtatacgtacta

SEQ ID NO: 5945 - DNA, 120 bp, synthetic construct
  source 1..120: mol_type = other DNA
tacacttcaactctacagcaatggtctgcctgctcaaaaacaatgcatgacctttcaatcttaaattataaaatagtttgttgaaagtgtaatgtatttagcttttatccaataatgtaa

SEQ ID NO: 5946 - DNA, 120 bp, synthetic construct
  source 1..120: mol_type = other DNA
tctttaagacatattttgtgatcttacctttagccagtaattaatgccacttctaagataataaacaacattatttcctaaggaaatagtcagaaatggaatgaaaattttctgtacagt

SEQ ID NO: 5947 - DNA, 120 bp, synthetic construct
  source 1..120: mol_type = other DNA
ataataataataaaaaaaaaaaaactcactcatcggaaccccttggctggatggaatttgaccctcccaagctaacctgtctcaaccttttcttgcattcaactccccatcccccatgtt

SEQ ID NO: 5948 - DNA, 120 bp, synthetic construct
  source 1..120: mol_type = other DNA
tgaaaagtatcctaaaactttataaattttatttttgaacagcattttaagatttagaaaaatgaattccaaattaatagtgccctcataatttgagggtactcatttgacatgtgagta

SEQ ID NO: 5949 - DNA, 120 bp, synthetic construct
  source 1..120: mol_type = other DNA
gctataaggcatagaatgagccctcaccagacactgaatcttctgacgtcttgaccttagacttcccagcttccagaacagtgagaaatcaacttctcttatttataaattacccagtgt

SEQ ID NO: 5950 - DNA, 120 bp, synthetic construct
  source 1..120: mol_type = other DNA
agacaaggattcaccatgtgagccaggctggtctcgaatggttatgaaatgaaagcagaagaggaaatgtttccataaaaactgtttggttatctcagatctaactacggagaccctgga

SEQ ID NO: 5951 - DNA, 120 bp, synthetic construct
  source 1..120: mol_type = other DNA
aaattatcttatctctctctctccttacaatctgttgttgttgaagagaatcaaggcagagatactttgcatgtatccagatgaaggcctagcaataggtacgtgtaggaccatgtttcc

SEQ ID NO: 5952 - DNA, 120 bp, synthetic construct
  source 1..120: mol_type = other DNA
acacctgccatcaaagggctgcagagtcaaaagtgggaggggatgttcaaccttacacttattggtggatttttttttatgagcgataaggcattatgtgttcctaaaataatgtgtctg

SEQ ID NO: 5953 - DNA, 120 bp, synthetic construct
  source 1..120: mol_type = other DNA
gcagtgcctggaaacattttgttttaaaatcagcttacttagttagctgtagaagcattcatgtgctgcaactactctatcctagcagaaagaagaagtctctaattcccaccccccacc

SEQ ID NO: 5954 - DNA, 120 bp, synthetic construct
  source 1..120: mol_type = other DNA
actgacagacagggtttgtgtcagtgtcactcagacactgttgcagctgcctccaaattagtctctctgcctctgtcttctgccctctaattttgtgattcacatccttgagtatacact

SEQ ID NO: 5955 - DNA, 120 bp, synthetic construct
  source 1..120: mol_type = other DNA
tcctgtccagaagtaaacaaatgcagaaagtcagaatcatgaattctacccttctagtagctctaacatatagtctgctgaggagacaaactctgggtgaatttaagcctcccagtcaca

SEQ ID NO: 5956 - DNA, 120 bp, synthetic construct
  source 1..120: mol_type = other DNA
agttggagaagtgatgatggaagtgaggaggtgatagtggaggtgtgggggtgatggtggaggtggggaggtgatggtggatgtgatggtggaggtgagtaaactgatgatggaagtgaa

SEQ ID NO: 5957 - DNA, 120 bp, synthetic construct
  source 1..120: mol_type = other DNA
tctcagagcgagatttcctctcaaagaaagaaaaaaaagaaaaagaagaagaaagaagaagaaggggagagggagagggaggagaagagaagaagaaggagaagcagaaacagaagaagc

SEQ ID NO: 5958 - DNA, 120 bp, synthetic construct
  source 1..120: mol_type = other DNA
tctcagaatggggtaaggacccaactttgaccaacagaaaggtaagtgaattctcccaggggcttctggcgaaggccttcccactcctgtaaacgaagcaagggaaaatgcctcagcttc

SEQ ID NO: 5959 - DNA, 120 bp, synthetic construct
  source 1..120: mol_type = other DNA
tctggagatcacaggtttaacctttgagcctctcagaaatcaatcgaggtggacttaatcttcacaaataggacactgaatcagctgcggcactgactaatgttgatgaagcactcaaga

SEQ ID NO: 5960 - DNA, 120 bp, synthetic construct
  source 1..120: mol_type = other DNA
tgacacacattctatgctgggatggatgcagagatcagcactatgcagttcttgaggtctagaaactcactgcttaatgcagtagttagtgtacattcataactaataaggggcgaaaag

SEQ ID NO: 5961 - DNA, 120 bp, synthetic construct
  source 1..120: mol_type = other DNA
gcacatcaaagatgttcaaccagtatctgttgaatgaatgagtgtattcagttgagccagttgggaatgtgtacttattcctttgcctgaatttttgctgagagtagaacactgtgatag

SEQ ID NO: 5962 - DNA, 120 bp, synthetic construct
  source 1..120: mol_type = other DNA
gtcatgaactgggtgtcaggagccctcccatctagtcctaacttttacactctggagagccactcacttttcaggtgtcagctgcttttatctaagccatattattattgttgtcattat

SEQ ID NO: 5963 - DNA, 120 bp, synthetic construct
  source 1..120: mol_type = other DNA
agaggaagttgtttttatctgcgaaatgcatctcttctgaaccgataaaccccattttagctggggagaaatattatctagcagcatctgagcattagctgcagctgaactcaagcatgt

SEQ ID NO: 5964 - DNA, 120 bp, synthetic construct
  source 1..120: mol_type = other DNA
agtcctagaagaaaactgtcaacaaaaacaagaatgaaaacaactgcttgacagcagatgagtctaataagcacgatgccaacactaaggttggttgactggacacatcctggacatgga

SEQ ID NO: 5965 - DNA, 120 bp, synthetic construct
  source 1..120: mol_type = other DNA
attttactaaaacgaaaactttaaaaaaattacaagttgtcattctcagacccaaagggtattgggtatcaattctcttcttcattaggcatcgggggcggggggcggggtgccgaagtt

SEQ ID NO: 5966 - DNA, 120 bp, synthetic construct
  source 1..120: mol_type = other DNA
agacatatttcctctaatccctgctacaacccagataccactaacccttttctaccaaaacttcggtatggaaactgcggtagggaaagttgcaggatttctccaaggtcagagaattat

SEQ ID NO: 5967 - DNA, 120 bp, synthetic construct
  source 1..120: mol_type = other DNA
cttggctgctttcactcagtgtcattttgtgagattcacctgtgttttatggagctgtagtttgtgcattagtcattgctgaataatactctattatgaatataacacaattgatatatt

SEQ ID NO: 5968 - DNA, 120 bp, synthetic construct
  source 1..120: mol_type = other DNA
tttttcatgtaacgtccttatggaaggagatctgggcctgctattcattgtactacagcagtcaaataggagttggggtgttctccacccagatcttcacacacatataatattctgtgc

SEQ ID NO: 5969 - DNA, 120 bp, synthetic construct
  source 1..120: mol_type = other DNA
ttatctagcccaaaatgtcagtagtccactgttaagagacagtggacaactgtctccttctgcatagagaagtctccttctgcaaatactaatgccattggaaaacgaatactttgccct

SEQ ID NO: 5970 - DNA, 120 bp, synthetic construct
  source 1..120: mol_type = other DNA
cgaataatttgtttgctttcatcttttgaaccctgaattacataactgttttcatcctagtgatggttgctaaaaaatttagttagagacagatgtatgggctgactcttgactaattta

SEQ ID NO: 5971 - DNA, 120 bp, synthetic construct
  source 1..120: mol_type = other DNA
cgcccagccaggattcaatcttttggaactgtgattttcaagatattagaagttcaggctttggactttagagattttgatttttttatgatttcaacattgggattgtggcatttggga

SEQ ID NO: 5972 - DNA, 120 bp, synthetic construct
  source 1..120: mol_type = other DNA
ctatgactgcaatgaaattggaatgaaacatcaatttcaattcaggttatgggtcccataagttaaagagcttacagccagtgtggaggctcatgcctataatcccaacactttgggagg

SEQ ID NO: 5973 - DNA, 120 bp, synthetic construct
  source 1..120: mol_type = other DNA
aaccttgttttacttgagttaagatcttagatttcaataacctaaaaaattattcatccatccaaaaatactgacacgaaatacattcttacaattgcagttacatagtcataaaagaag

SEQ ID NO: 5974 - DNA, 120 bp, synthetic construct
  source 1..120: mol_type = other DNA
gctgctactgatacatatataaagcacataaaccattataaagtggtgaattgtatggcatgtgagtgatattttcattttttaaaaatgcatggactttgaaacaaaaaatgcacaaaa

SEQ ID NO: 5975 - DNA, 120 bp, synthetic construct
  source 1..120: mol_type = other DNA
ctgttgtctggatgtaccacagtttactcacccactgaagggcatcttggtttcttccaagttttggcaattttgaacccagctgctataaacatctgtgtgcaagtttgtgtttgcata

SEQ ID NO: 5976 - DNA, 120 bp, synthetic construct
  source 1..120: mol_type = other DNA
tagtattatggtacctcaaggtcatataaatgcccccaagatgtgaaatcaataatacaaattggccctagattcacagatatgcctggagctccctgcagatgcagacacaatgctgtt

SEQ ID NO: 5977 - DNA, 120 bp, synthetic construct
  source 1..120: mol_type = other DNA
tctattctctattttgttaatctctgctctaatctttattatttccttctgctagcttttggttcagtttgtcctgtttttagttcctgaagttttgaagttaggttgttgatttgaggt

SEQ ID NO: 5978 - DNA, 120 bp, synthetic construct
  source 1..120: mol_type = other DNA
atgccgttggggcagtgcccaagtgtatggataataggagagcccgaatgatttagattagaagatgctttcttgctttggggttgtgggacctttgtctctccccttcaattcttagca

SEQ ID NO: 5979 - DNA, 120 bp, synthetic construct
  source 1..120: mol_type = other DNA
cacgaacttgctaattttcttccattgtatagtatgaactcaatctacaaagatctggcaaaaaaaacaagtatcatgttctgtaacaaactcagttacactaacaccagaacttactga

SEQ ID NO: 5980 - DNA, 120 bp, synthetic construct
  source 1..120: mol_type = other DNA
gtggagcttacttgcagcatagcctcccttcaacttggaaaccaagcatttcaaagtacctgggaactttcttcatcacatccttccagcatttacattgtttacaaatgaaggagggaa

SEQ ID NO: 5981 - DNA, 120 bp, synthetic construct
  source 1..120: mol_type = other DNA
aatattttcactaaaatttctagtcctctagtaaatcagatataagcaaagatcatatgtctatttcagcctctaggtaggctggccagctttcttgctttctccctctcccctcccctc

SEQ ID NO: 5982 - DNA, 120 bp, synthetic construct
  source 1..120: mol_type = other DNA
ggtctgttgcgggcctttgctctcaagggagattaatattttagctattcctttttgttcagtgcttctaaatgtatttggaatgaaaagaaaggttaaagaggggctctgggacggcta

SEQ ID NO: 5983 - DNA, 120 bp, synthetic construct
  source 1..120: mol_type = other DNA
tttaaacaggcttatttcaccttcctcaagccactgtaataattagcagacatgttctctagaaaatggaaaggaaataatgctggtggcatgcatagtggtcggattttggggcaggcc

SEQ ID NO: 5984 - DNA, 120 bp, synthetic construct
  source 1..120: mol_type = other DNA
gagggaggagggtaagggttgaaaagtgcctactgggtactatgtttactatttgggtgatgggttcagtagaagcccaaacctcagcattatgcaatatatccatgtaacaaatatgta

SEQ ID NO: 5985 - DNA, 120 bp, synthetic construct
  source 1..120: mol_type = other DNA
gatttaattacaacctatcagtctgcaaataatgatcaactgacttcagaaattaggaaacatagaggtgaaagggacagagctacgaaggcagagggaagtgtgctagaaaaaggaggc

SEQ ID NO: 5986 - DNA, 120 bp, synthetic construct
  source 1..120: mol_type = other DNA
aacagaactgacctatcagggaagcaactggacaatctgttataagagccccgaaaacgtggagacgcgatgccccagtgttttcacttacacaagtcttggcttctttttttttttttt

SEQ ID NO: 5987 - DNA, 120 bp, synthetic construct
  source 1..120: mol_type = other DNA
agaaatccacaaagtaccaccaaagcttgagctgcttggatgcaatgccctcccagtgtcaagcccaatgtcagatatacaaggaatatttgaaaatgtttgctgaatgcacgaatgaat

SEQ ID NO: 5988 - DNA, 120 bp, synthetic construct
  source 1..120: mol_type = other DNA
agacccagtctccaagaaaaaaatggaagcatttatcaaataccttaaagtgtactatgctagacattgtgcagaattcagacataaggaaggaatccagctcaggagagagcagctaag

SEQ ID NO: 5989 - DNA, 120 bp, synthetic construct
  source 1..120: mol_type = other DNA
tcaatctcttcagtaaatttagaactagaaaaaacaaattcccccttaatcatcttctgatcaaattctcccaatattctttttctataaggattccacaatttattccacatttccacc

SEQ ID NO: 5990 - DNA, 120 bp, synthetic construct
  source 1..120: mol_type = other DNA
atttttgttttaagtagatcacatcgggttctccgttgagaacagaggggcaaggagagaggataatctgccgacagactataatataatacaaaaaggaaatggtggcttggaccaagg

SEQ ID NO: 5991 - DNA, 120 bp, synthetic construct
  source 1..120: mol_type = other DNA
attggcctcataaaatgagttcagaaatgttccccacctcttgtattttggggaagatattaagtaaaactggcattaattcttcattaaatatttggtagaattcttcaggaaaaccat

SEQ ID NO: 5992 - DNA, 120 bp, synthetic construct
  source 1..120: mol_type = other DNA
caaaacgggggcagggggagggggcagcacagaacagaaacagaactttggggaacagagacacggcgccgagttgagcagaaaccagggcagaagcaccaggcagagatggaagactga

SEQ ID NO: 5993 - DNA, 120 bp, synthetic construct
  source 1..120: mol_type = other DNA
tctgtcctttctcattttctctgacccaagagctccaaatgatctccttgctttgggatccaagtcagtaacagtccagcaccttggcctttcttctgattcttgaaggctgatgtagcc

SEQ ID NO: 5994 - DNA, 120 bp, synthetic construct
  source 1..120: mol_type = other DNA
gaagaaaatactaaaatactagtgtataggcactaatgcacagagtttccacatgtaactgatctaggatggggcctgggcgcccctaaggtaatgctgacatgctgctgggctgagagc

SEQ ID NO: 5995 - DNA, 120 bp, synthetic construct
  source 1..120: mol_type = other DNA
gccagaatcaaagaaatgcacagacttgagagctgagtgggaatagaggcccatacatcatgaggggctctgaatcggttgcagcaaaaggcctgcaatggggattaagagtaagattat

SEQ ID NO: 5996 - DNA, 120 bp, synthetic construct
  source 1..120: mol_type = other DNA
accaagcagggctacagacacttctccagttctcttttatcacactatgctgctgtttacctgtcagtctcctgaaccagcctgtgagcttctacagggccatgatggggtcatgttcat

SEQ ID NO: 5997 - DNA, 120 bp, synthetic construct
  source 1..120: mol_type = other DNA
ggtaaactgtgcgatgttacagagcacattgagtctgtggtcatcgtggttcttctatcttcactgtcacctgtatcctgttacacatactcagttcctaattgtaagctcaattttggt

SEQ ID NO: 5998 - DNA, 120 bp, synthetic construct
  source 1..120: mol_type = other DNA
tgagcaaatcaaaatcaataatatgggaaaaggataatgcatcatgaccaagtggggtttatctctcgaatgcaagattaattttatgactaaaaatcaagcagtggaccaggtgtggtg

SEQ ID NO: 5999 - DNA, 120 bp, synthetic construct
  source 1..120: mol_type = other DNA
ctgatagattttcaagattagaagagacctttaaggtaacctagtccaaccacaagaagtttaaagcaacatggcaaaccccaagattagttcagtacagggaggttataaccacaggtt

SEQ ID NO: 6000 - DNA, 120 bp, synthetic construct
  source 1..120: mol_type = other DNA
caaatatttccaaattgttaggtcatgcttagttgccccacccaatcccaaagggaaaaaaagacacagcaagttgaaatggtatgtacacaggctctgtgaagctatccaacagaactg

SEQ ID NO: 6001 - DNA, 120 bp, synthetic construct
  source 1..120: mol_type = other DNA
ccactggtcattcaggagcatattgtttaatttccatgcatttgtattgtttccaaagtccctcttgttactgacttccagttttattctactgtggtgtgagaagatacttgatacaat

SEQ ID NO: 6002 - DNA, 120 bp, synthetic construct
  source 1..120: mol_type = other DNA
ctgtaaggacaacataatcatagaagactctatgatgattacagcaaatcttctgcctccatagtaatccatgtcagactagtgctgcatagaaagattccttcacggccgggcgcggtg

SEQ ID NO: 6003 - DNA, 120 bp, synthetic construct
  source 1..120: mol_type = other DNA
gcagtctaccacatatgtaattgaaattcctgaaggtgaggagagaatgttcctaaacaatccaaatttggtgaaaaacatacttaagagattcaaaagttcattggatcccaggcagga

SEQ ID NO: 6004 - DNA, 120 bp, synthetic construct
  source 1..120: mol_type = other DNA
ggcaacaggaattatgtgaaatctctgtgtgttctcccccaccttccatctgattcctattcacttaagctcttcacatataggcaacaacgaggcattggaaatctaatgagcaattca

SEQ ID NO: 6005 - DNA, 120 bp, synthetic construct
  source 1..120: mol_type = other DNA
caaaatataagtcctacacagaagagacacctactgaagccataacactcggaattttcaatccagtcacagagcttttaggaaaagaacatcttggaatcataatttcattccagttag

SEQ ID NO: 6006 - DNA, 120 bp, synthetic construct
  source 1..120: mol_type = other DNA
gtatgttggaaacaaattgttgttatacatgtacagcatccccatgagagatggggacattgggaagactggcatacttctagcagatcttcagagggaagatccattgaaaatggagag

SEQ ID NO: 6007 - DNA, 120 bp, synthetic construct
  source 1..120: mol_type = other DNA
taaaataggcaactgcccaggtgatgtaatgtgaaatgtctggtaagaaaagtcttttctctggcttaacccattgccgtccatcattagagaagccagctacatgacatggcaacattt

SEQ ID NO: 6008 - DNA, 120 bp, synthetic construct
  source 1..120: mol_type = other DNA
aattacaagggtcatgctaatctctgttttgttccaattttagtgtatgtgctgctgaagctagcactatgtaaggtctgtgcctagcatgtattaaatattcaataaaacttaggtctt

SEQ ID NO: 6009 - DNA, 120 bp, synthetic construct
  source 1..120: mol_type = other DNA
gctcatcccgggcattccagcttaattcccctctccattcagtttgtaactatgataaagctaatccctgctagcaaaatgattaatgcctacaatgggtttaaagctgatgctctaaac

SEQ ID NO: 6010 - DNA, 120 bp, synthetic construct
  source 1..120: mol_type = other DNA
ggaggagtctatgaactggaaacagactgatttcagacttcctactagcctctatgaatgacaaaagacagtgaagcaatgtcccaaaattttgaggaaaataatacataattagccagg

SEQ ID NO: 6011 - DNA, 120 bp, synthetic construct
  source 1..120: mol_type = other DNA
taaatctagatgtgttcaaacctacagttctacttagagtcttttttcttcataaatgcgtccctatcccattaggagtttattagccagttggatagagttatactaatgggtgaacag

SEQ ID NO: 6012 - DNA, 120 bp, synthetic construct
  source 1..120: mol_type = other DNA
aggtttttcctgaccaaaggtctctccagatgtaaagtatgtagttgaaagctgctctttcattggaagggctattacagaagaaggtgggtgatcaaacacggtttcggataagctact

SEQ ID NO: 6013 - DNA, 120 bp, synthetic construct
  source 1..120: mol_type = other DNA
tgtgtgtgtgtgtgtgtgtgtgttggggagggggaaagagttttggagttgagatcagctagaaatacataatctgctctaacacagtcattgtaggattggaaagtaaagcacatagat

SEQ ID NO: 6014 - DNA, 120 bp, synthetic construct
  source 1..120: mol_type = other DNA
catgctttcatcatgttaagtagctactcagtaattctcacagctctctcttttcatatacatgattttctttcaagagtcttcataatttggcttaatcccagtcatcaaatttgtctt

SEQ ID NO: 6015 - DNA, 120 bp, synthetic construct
  source 1..120: mol_type = other DNA
atgactttcacctcatttagtaaatcagaatctaaaaaatgctacactctccttttgataagctctggagtttatcagccctgctttgccacttcattagctgtcaagaaccagtaagtg

SEQ ID NO: 6016 - DNA, 120 bp, synthetic construct
  source 1..120: mol_type = other DNA
ctccagcagcacctaagagcttgcttttcttacttgcttcctcattacccaggtcaatattgccattgcgttcgaaataaccgttcaaggacaggattttttctcacatgtggaatattt

SEQ ID NO: 6017 - DNA, 120 bp, synthetic construct
  source 1..120: mol_type = other DNA
gccatgaagacattccctactacattcttgagggagaaggcagggtagagggtggaggaagattgagaactccatttttggtgttacttctaaactttctatgtgattctacaaaagtct

SEQ ID NO: 6018 - DNA, 120 bp, synthetic construct
  source 1..120: mol_type = other DNA
gtcctctgagcttggcagagtcagagtaggttgtgggatatgtctttggtgttctggtgattaactgggtcaagggcataggatccccaggcagtgtgttggtgccacggatttatagct

SEQ ID NO: 6019 - DNA, 120 bp, synthetic construct
  source 1..120: mol_type = other DNA
ttaaaaagcctgagggagagaaaagagttagttgctattacccagaattagtaattgcaggaagtcactattgcccctagagctggaagggcaaaggggaaagtggtataagcagtatta

SEQ ID NO: 6020 - DNA, 120 bp, synthetic construct
  source 1..120: mol_type = other DNA
ctgctttcacacttcaagcaatggcagaattgagtagttgcaacagctagcagatggtcttaaaagcctaacctatttactctatagctctttcagcaaagatttgccaaatgctgcact

SEQ ID NO: 6021 - DNA, 120 bp, synthetic construct
  source 1..120: mol_type = other DNA
actcaccagcttttctcccttcatttaaatggtaattacacacttacaatgcactgcaagtatctctagttttactgagtcctctgggagctctagaaaccctaggactttcataatgag

SEQ ID NO: 6022 - DNA, 120 bp, synthetic construct
  source 1..120: mol_type = other DNA
agagagtgtggaatggaaggccaacttacttggtaagctaagcagttatttccccagcagcttgcccatgaacctgaaattctcattttttgagttatttctctccagaaagttctcatc

SEQ ID NO: 6023 - DNA, 120 bp, synthetic construct
  source 1..120: mol_type = other DNA
aagtgcctagagagtagcatttcttctttaaattatttcattcttagatgtggccagtgtacgtgagaagtccaaaaacaacactaagaatgatttggacttgcactacttacaacaatc

SEQ ID NO: 6024 - DNA, 120 bp, synthetic construct
  source 1..120: mol_type = other DNA
agtggccacattacaaaatataggttgtttcagcttgcaaaattaaacaactgtataaaacaaatttataactgattgctagtaagaggtaccatgtaagaattgtgtttccagctgaat

SEQ ID NO: 6025 - DNA, 120 bp, synthetic construct
  source 1..120: mol_type = other DNA
gggattacaggcatgagccactttgcctgcctgcatcctcagttgtaaagttgtcatctttagaaagccagacgtgcttatatgttaattacacttatgcgtcacatggtttttttagtg

SEQ ID NO: 6026 - DNA, 120 bp, synthetic construct
  source 1..120: mol_type = other DNA
ttggtaacagaaagaaaatatttactaactgggtatggcacatttttgtagtcctagctacttgagaggccaaagtgggaagatgacttgaacccaggagttcaaggccagcttgggcaa

SEQ ID NO: 6027 - DNA, 120 bp, synthetic construct
  source 1..120: mol_type = other DNA
aaatgtgcgcacacaaaaaacccattcctttcttttgtaatcatcagattttataaagaggggtggagggggtacataaggaatcactccctgggtattttttcggatcgttttctgggg

SEQ ID NO: 6028 - DNA, 120 bp, synthetic construct
  source 1..120: mol_type = other DNA
gcagagccagcactgtgatacctcatagtaggtgctcagtgaatgtctgtgaagtgaattactatctagacaaggatgagactggtatgactctccaaagctttcccacctccaaaacct

SEQ ID NO: 6029 - DNA, 120 bp, synthetic construct
  source 1..120: mol_type = other DNA
tcacatttagcaggattgtaaaaattaatagttagtgcagttcttccagctagataatgcatccaaatggcaagacagtccaaagatacacactatggagtaagtccctctccccaccgg

SEQ ID NO: 6030 - DNA, 120 bp, synthetic construct
  source 1..120: mol_type = other DNA
ttccttagtgtagacatctcaccacggtgttatcctaggagagttccttaccgccacgttctcatgggtcgcagccacttgctccaaagagggctctcagctgacggcccctttttggct

SEQ ID NO: 6031 - DNA, 120 bp, synthetic construct
  source 1..120: mol_type = other DNA
attgtgtctgatactatccacccccaggcgtccgtggaggtgaacgcgcccctgaagtttggcaagtgaagtgaagtgaaaacgggtttgggtcccagggaacgcacagtgaacttaata

SEQ ID NO: 6032 - DNA, 120 bp, synthetic construct
  source 1..120: mol_type = other DNA
acaaatgtgtgaggaatagaaacattttggagtccaggaagaactcgaagttaaacagcagaaattgtagcagacccagttggcatggcgtgtttttcattatttgacacaccaggacca

SEQ ID NO: 6033 - DNA, 120 bp, synthetic construct
  source 1..120: mol_type = other DNA
gctgatttttaagcaaaatgttctgtctttgaattagctgctaggaaacccagctccctcctccaccccatctttgcaggtgcataatgtgtgtgttttgtatatccgatgactttattt

SEQ ID NO: 6034 - DNA, 120 bp, synthetic construct
  source 1..120: mol_type = other DNA
caactcagcatgccaatactttgaaataagttggtcaacttcttaaagttcatgggaactttagtattgttgcaccacaagaccatttctcagtaacaggcttcaagccatgtactgcaa

SEQ ID NO: 6035 - DNA, 120 bp, synthetic construct
  source 1..120: mol_type = other DNA
atcagagggttattttgttgtggagattttgttttttgtttttactcctgcaagttttacaactcaaaataaattataaaaaacaacagacctctgaaaccgaacaagacaaaattgtgc

SEQ ID NO: 6036 - DNA, 120 bp, synthetic construct
  source 1..120: mol_type = other DNA
agattatatagaaaggccaggggggtgaggagtggggggtgggaaatgagagaaaaatgacaagaggtagaatgaagatgaacatggattagaagaggaaagttctacagaaagtgatac

SEQ ID NO: 6037 - DNA, 120 bp, synthetic construct
  source 1..120: mol_type = other DNA
tattgacagaactaatttatccaatcacaaatgagatttgggctttccacatactgaatagtgttccagaagccaaggagaataatgttccagaagtcacttaaatctaaggtagtccag

SEQ ID NO: 6038 - DNA, 120 bp, synthetic construct
  source 1..120: mol_type = other DNA
ttaaggtagaacctgttatctacgcccagttctgttaccaacagggggttgaaaagttactttactcatcaagtatcagtttcctaataggaagacagagctattcagcacttgctcctc

SEQ ID NO: 6039 - DNA, 120 bp, synthetic construct
  source 1..120: mol_type = other DNA
tgacgagacatatatttcactcaaatgttgctatggaatcctttcctgacttgaaaattaaatttctccatctgtttgcatgacttcgtgttcattgtagtgccaagggccagctgatct

SEQ ID NO: 6040 - DNA, 120 bp, synthetic construct
  source 1..120: mol_type = other DNA
tcccgaagtgctaggattagaggcctgagccacggcgcctggccaaaaatacttttatgactttaggataggcaaagatttcttaaacaggacacaaaatactaactataaagaaaagta

SEQ ID NO: 6041 - DNA, 120 bp, synthetic construct
  source 1..120: mol_type = other DNA
gtgcaattaagaggattgaaaggggaggcccagaaaaagagtcccaggcacaaagtttcctacttcctcattttatctaggaaattggatggctcttttatttccaaactctcatcagct

SEQ ID NO: 6042 - DNA, 120 bp, synthetic construct
  source 1..120: mol_type = other DNA
caatggggaacatctgaagggtgttaataaaaaaagtgacaagattatacttaattatccttctgaaactagcagcctgagggccaaatggactcagctgaacagccagcgactgatgaa

SEQ ID NO: 6043 - DNA, 120 bp, synthetic construct
  source 1..120: mol_type = other DNA
aaagtcatctacataaagtagtcctacataattagcttcaagtaaagagttattgtgaggcttctataaagttaagtgactgaactccatcctgggcgacaaaaggagaccttgtctctg

SEQ ID NO: 6044 - DNA, 120 bp, synthetic construct
  source 1..120: mol_type = other DNA
cccctcatcaatctcaaaagtttaactcataattaacaatcttcccaaaaagaaaattcctggaccagatggtttcactggtcaattctatcaaatatttaaggaagaattaaaccctat

SEQ ID NO: 6045 - DNA, 120 bp, synthetic construct
  source 1..120: mol_type = other DNA
tcgttcagcattctctgttggaaggcttccagcctctcgtagtcatgccctcgacacacaaactccttattctggagatgaaagcaaaaaagaaattagggctatataactgagtggatt

SEQ ID NO: 6046 - DNA, 120 bp, synthetic construct
  source 1..120: mol_type = other DNA
acaaatactcatatctctaccaccaggctcaaaaagggaatattacctttgaagtcccctgaatatcccatcctagcaatattcctccccctcctggaaaagtgggtaaacaacaattgt

SEQ ID NO: 6047 - DNA, 120 bp, synthetic construct
  source 1..120: mol_type = other DNA
ctaagcctcttcctcctttggtgtctttaccctagctaaggagctcacattattctagtttcttatgccaaaaatttgtcaccttcggttctttccctcactctcacatttagtcaggtg

SEQ ID NO: 6048 - DNA, 120 bp, synthetic construct
  source 1..120: mol_type = other DNA
gctgcagctggaaaccacagtaccattttattacttagaatttcttcatttctttaaagtgatttccacatttttgttgaataatgtatagtaacattgcgggggcggggggggggcttt

SEQ ID NO: 6049 - DNA, 120 bp, synthetic construct
  source 1..120: mol_type = other DNA
ccacttaacgaaatgaaatggtgactggatttctgcaaccaagaccacaaacatacccaaaacagaaaacaagacagaactctacaaaatgacattcagttttgcctgctatgagttcta

SEQ ID NO: 6050 - DNA, 120 bp, synthetic construct
  source 1..120: mol_type = other DNA
acttctggcactgtatgggtaaaagcaggggtgggaggtgaacaaaatagtcttgttgaaaaattatcatgaaacatatccttatatctcctaacaaattctacactgctgggcaactgc

SEQ ID NO: 6051 - DNA, 120 bp, synthetic construct
  source 1..120: mol_type = other DNA
ttagttagcaggtgatgcaacctcccaggcttggtctttttcttcagaacaacagatttcattctggcccagggtgtgtctagaaatgtcgtcctaaagctagagcctggaaagggggcc

SEQ ID NO: 6052 - DNA, 120 bp, synthetic construct
  source 1..120: mol_type = other DNA
agactccaaagccctaatgcatagtctttgtatcctatcacactgtggcattatatatataaaacaaaaaactttataataaagagaaatgtattttccaaactgtggttctccagataa

SEQ ID NO: 6053 - DNA, 120 bp, synthetic construct
  source 1..120: mol_type = other DNA
cagccaaacagtattctaaaggaaataaaaaattctctgaggtcagtgcaagagaagaaaatggaagacagttcccgaccttctaccccacagagatcagctcatgagaatctcatggaa

SEQ ID NO: 6054 - DNA, 120 bp, synthetic construct
  source 1..120: mol_type = other DNA
tttgaccaaaattagaagtaagtctttagagataactagcttgagggcttgcaatagagctacatggagatttaatcagtggccttggactcattagcgccacatcctccaaacctggct

SEQ ID NO: 6055 - DNA, 120 bp, synthetic construct
  source 1..120: mol_type = other DNA
tgtagttatttcctggccaccaaatttctgtgaaaagtcctacttttctgtggaagagatgctggatgaatgaactctaaacctcgactgagactacagaacgtgctccatacttctcta

SEQ ID NO: 6056 - DNA, 120 bp, synthetic construct
  source 1..120: mol_type = other DNA
taagtaaactaacttaccttgatcaattctcttacacttccttgttatctactcttagagaattcagctgccttcagcccaatcctttcccaaagcttctgcaaaacctcccagccttcc

SEQ ID NO: 6057 - DNA, 120 bp, synthetic construct
  source 1..120: mol_type = other DNA
agattccagaaggctgaagagggaaatgggcagtgtggctgtagtgtagggcagttttccaaacagtttattaaagaagagaaagaagaatgcagacatcctcatatcaaccactacatt

SEQ ID NO: 6058 - DNA, 120 bp, synthetic construct
  source 1..120: mol_type = other DNA
tccaagagctagaaatgagaatgatgttctctacaatcaaatattgccttaattccaaatttagcttctgccacttgatctaatgttacatcaaggcatatgggccctctgcatgtgaag

SEQ ID NO: 6059 - DNA, 120 bp, synthetic construct
  source 1..120: mol_type = other DNA
aacatgaaatctcagaaacagcataaataagtcatccttggatttctgctattttacttgcgaagaacaagagcatatggatggctacctggtagtgctcacgtaaaggcattctcccca

SEQ ID NO: 6060 - DNA, 120 bp, synthetic construct
  source 1..120: mol_type = other DNA
atttgtataaatgtgctccttctgtataaaatacaccaacttccacttccacatgacagcacctcattttaaagctaaggctaaatattcttacccaccaccctcagaacactgctacca

SEQ ID NO: 6061 - DNA, 120 bp, synthetic construct
  source 1..120: mol_type = other DNA
cccagactcttcagtggttcctcatattccaagacactttagtgattcctcatattccaagacactttagtaattcctcattacctctgtgacaaatctaaatgccttagcctgggttac

SEQ ID NO: 6062 - DNA, 120 bp, synthetic construct
  source 1..120: mol_type = other DNA
agccaccgcgcccggcctctttttctttaaagtaaagttagtgaggtgaaggactcttgctaagagtttctcagcccagaggttttttttattcatgctctttggttcttaagtcttaat

SEQ ID NO: 6063 - DNA, 120 bp, synthetic construct
  source 1..120: mol_type = other DNA
gtaggtggtttggcccaagtactgacagcaaagctggcgtgtaccagaggataaaacctgtgatcatcctaaaatctaattctagcctctcattaggaaatcaaaatgcattctttcttc

SEQ ID NO: 6064 - DNA, 120 bp, synthetic construct
  source 1..120: mol_type = other DNA
ccatttgtgtcctgggtttagctcctgattttaggattagcacagattacagggtctgtctgatgccttctccaagctttgtatcagatttatggctatgaattgagaagcttgcacata

SEQ ID NO: 6065 - DNA, 120 bp, synthetic construct
  source 1..120: mol_type = other DNA
tcaagcaaggcttcatttgagggaaaagtaggatttctgtaggtggaaaaagagaagacattgatttgaaactccctggttgttttataaacttcatattagctatgtccacagagcctc

SEQ ID NO: 6066 - DNA, 120 bp, synthetic construct
  source 1..120: mol_type = other DNA
ttattatttgtgtgacacagccccaggaggtcctgagaacatgtgccccatatttattattaagaagaccatcctacacatgcacacgtatgtttattgcggcactattcacaatagcaa

SEQ ID NO: 6067 - DNA, 120 bp, synthetic construct
  source 1..120: mol_type = other DNA
tatatatatacacatatacatatatatgtatgggtagggaagggcattaaagagggccagaatgaggaacaccagaagatggcagagctgcatatgcagtagagagatgtgagttaagct

SEQ ID NO: 6068 - DNA, 120 bp, synthetic construct
  source 1..120: mol_type = other DNA
tgcaaccacactggcattttaacagcagtacctagaactaattttcataagcattcactactttttttttttttgcctggctggctctgtgtagtagattgaatggtccctccccccacc

SEQ ID NO: 6069 - DNA, 120 bp, synthetic construct
  source 1..120: mol_type = other DNA
gttctgaagcttggtagcaaacttttttttaagtttctaaaacctaggaaaacttaattaccataatatttagaggttaatgccaacattataataggtctcagattagcagcttaaaaa

SEQ ID NO: 6070 - DNA, 120 bp, synthetic construct
  source 1..120: mol_type = other DNA
tataaaagaaacaggtacttatttacatatctaagaagcacagggatgaatgcagaatttatgggatggagggtttctagcatcccagcctttggatcacagccccaggtcctcagtggt

SEQ ID NO: 6071 - DNA, 120 bp, synthetic construct
  source 1..120: mol_type = other DNA
aggagaggaaggagaggaagaagaggaagaagaagaaagtagtagttgaaattgttgttttgtagcatctacaacttagtcctgatgaaagagagcccagactgacgggcagctggtgtg

SEQ ID NO: 6072 - DNA, 120 bp, synthetic construct
  source 1..120: mol_type = other DNA
gcaaccctagaattatgccagtgggtggctgcgtggtgaaagtaaaacaaaaatcaaaatgatctaccttgctgtttccaaagctgtctgctggctcttatatgcagcagacttttgcag

SEQ ID NO: 6073 - DNA, 120 bp, synthetic construct
  source 1..120: mol_type = other DNA
ctattaattattcaagccatgcttcataaatatttcacggtgggtttgcacaggaaatcaaattctgcattacttgccacctcttcacttggctccatgaatggaggtagagggaagggg

SEQ ID NO: 6074 - DNA, 120 bp, synthetic construct
  source 1..120: mol_type = other DNA
tatattttttttatcagcaaagagaagtggacagttgtttttcatgtacggcttaccccagacaatcagtagagcacctctgctgctttatactctctcagtcctcctgaaccaaccttc

SEQ ID NO: 6075 - DNA, 120 bp, synthetic construct
  source 1..120: mol_type = other DNA
cacacccggcccagttgcccactatttaaaggggacaatgaggagatagtttgactggaacagagttcctattagaatctagtaggagataatgttgaataggaagattaagaccaacta

SEQ ID NO: 6076 - DNA, 120 bp, synthetic construct
  source 1..120: mol_type = other DNA
cagtcctgcacacgactgatcaaaggttggtttctggagagagtaaacaaatttatctagataagtctctttacagtcctttgttatcgaccctttgctgtcaggctcccaataagagaa

SEQ ID NO: 6077 - DNA, 120 bp, synthetic construct
  source 1..120: mol_type = other DNA
gtaccatatttttatttttcttgttatccaaccactcatgcttccagtctcatgtttcatttctcgtgttgtcctcaactgactccttaaaggggaagaacacaggagctgaagccctct

SEQ ID NO: 6078 - DNA, 120 bp, synthetic construct
  source 1..120: mol_type = other DNA
taatgaaaaaaaaaaaaaaaaaaaaaaaagtgcagctttgaccactggggcagaagtggacttacagggctcattgggaaataagcaggcattggtcttcaggcagcttccagtccttca

SEQ ID NO: 6079 - DNA, 120 bp, synthetic construct
  source 1..120: mol_type = other DNA
tgtttgttttcttgtatgtgtacatattgtcatttcttagtctaggccagaatttctcaacctctacactactgaccaccccaccatgttctcccatgacatcctgtatatgcctgcatg

SEQ ID NO: 6080 - DNA, 120 bp, synthetic construct
  source 1..120: mol_type = other DNA
catctggagcgtatgcagttagcaaataaaaatagtgggagaataggacatttaatattaactagccctttgcacagggttaccactgagctgaagtctagctctgctttgtgcaagcct

SEQ ID NO: 6081 - DNA, 120 bp, synthetic construct
  source 1..120: mol_type = other DNA
tacaccactgtgctccagcccaggtgacagcaagactctcaaaaatttttttttattctggtcccagctgaggttctgtagcactggctttgggcaaaattagtaaatgagtttacttgt

SEQ ID NO: 6082 - DNA, 120 bp, synthetic construct
  source 1..120: mol_type = other DNA
agtaacatgatgtctcggagcagtctgtccgaacacagtgcctctttttaggacttatctagaggtaacattaagcttagttcttgccagttgctgccacgctatccactttggatttaa

SEQ ID NO: 6083 - DNA, 120 bp, synthetic construct
  source 1..120: mol_type = other DNA
caggtatgtcttccccaaattaggctgagctccatgaaggaaggggtcctgttatatttgtccctatagctttaatacctaggataatgccttgtagccagcagatgctcaataaatatt

SEQ ID NO: 6084 - DNA, 120 bp, synthetic construct
  source 1..120: mol_type = other DNA
tacagggaggcaaaaagagcaaaagtctgcccagagtctttgaactagttgttattaaagaaacttgtggctttttccactgtggtaccaccgcactaggaaaaaagattaagagaagat

SEQ ID NO: 6085 - DNA, 120 bp, synthetic construct
  source 1..120: mol_type = other DNA
atctgtttaatcaaattattcacctaagacagacacactgagaaaacaagagtgttggtggaagttggagaatgcagccggggaccaacagtttattttggaggtgaatgcctgggaaac

SEQ ID NO: 6086 - DNA, 120 bp, synthetic construct
  source 1..120: mol_type = other DNA
agcaggtggaacaggatattaaagttgctatatttacactgatggtagaaataaataaaaaaggaaaagctctactgcatcagttagaggtaagtgactgcccatgggatagtatattga

SEQ ID NO: 6087 - DNA, 120 bp, synthetic construct
  source 1..120: mol_type = other DNA
ccctggtaacacaattctttccttacacccagagcacgtaggactgactcggaggaaactgcagaggagaggggtcctataaaatttcatgtcctcccaacatcctgtcaatagccggcc

SEQ ID NO: 6088 - DNA, 120 bp, synthetic construct
  source 1..120: mol_type = other DNA
gtgtgctcttccccatccctattatgaggttctgttatgtccccagggtgtggcctaggttgggaatgatcaaggtagtatctgacatttctatctgttttgatattttccagatattta

SEQ ID NO: 6089 - DNA, 120 bp, synthetic construct
  source 1..120: mol_type = other DNA
acaatgaactacagactcccctacacacagacatttaaaggttaataagaatactatgaaaaactctacataaattcaaaatgttagaaaaaaatgaaccaattcctcaaaaaccaaaga

SEQ ID NO: 6090 - DNA, 120 bp, synthetic construct
  source 1..120: mol_type = other DNA
accaccatccccatcaccaccaccaccaccatattcatcatcaccatcaccatcactaccactaccccactaccaccccactaccactgccactaccaccatctccattaaaaacagcag

SEQ ID NO: 6091 - DNA, 120 bp, synthetic construct
  source 1..120: mol_type = other DNA
tctaaaaacaggagagatggagtgtctctacctagcatagggttcatttgggctctttgccctgttctttctctgtgcatatcgctgtctttggtctaaacaaattcaggatttttgctt

SEQ ID NO: 6092 - DNA, 120 bp, synthetic construct
  source 1..120: mol_type = other DNA
gggtgcacccacatgcacacacacagatgcagatgattaactctgatgaggttagatcaacttttaaaatgaccatagttcctatactgatgggaacattaattatctgagccacatttg

SEQ ID NO: 6093 - DNA, 120 bp, synthetic construct
  source 1..120: mol_type = other DNA
catctgaaatctacagatttcagaagtggctctttctttccagttaacagctagcactccccttctccttgagattatttagaacctctgccttataagggaacatgtcacccttccaga

SEQ ID NO: 6094 - DNA, 120 bp, synthetic construct
  source 1..120: mol_type = other DNA
ctatggatgggatatttaaagaatatctacctgactatattgtcagaaataaaagttccaatgtattttccacttatccatgatatgtaagactattttctgtgttctatggtacatgag

SEQ ID NO: 6095 - DNA, 120 bp, synthetic construct
  source 1..120: mol_type = other DNA
gacactaaggtggaaccatttcagactggaagtcattttgaggttcacactgaagctatttcgtatatatctcattatatatacatatcttatgtatacatatatagtatacacatctta

SEQ ID NO: 6096 - DNA, 120 bp, synthetic construct
  source 1..120: mol_type = other DNA
acaataacaatcccatagctgctgtttgttgagaatccccacgtgtttgtcctttcacagtgtctgtaagccgcgagacttactgtcatgtgtcatcagcacctgatgagatattttaaa

SEQ ID NO: 6097 - DNA, 120 bp, synthetic construct
  source 1..120: mol_type = other DNA
atgtgggcttttataagactctaaatcagactggaatggcaccatgctttggtggttaacatggagtgtcatttggggatccgcaagagaagtatgttgaatagagtctgtgcttatttg

SEQ ID NO: 6098 - DNA, 120 bp, synthetic construct
  source 1..120: mol_type = other DNA
gacccccctctgccttggttaacatttaaatgagatgcctcctgtccaggacgccatgagacgaagagaataatcattttccctaaacgaaaatgtacacatttgtcattttggagtcta

SEQ ID NO: 6099 - DNA, 120 bp, synthetic construct
  source 1..120: mol_type = other DNA
caccccaagagcaaataaacattccagagggctaaggttcctgagaaagtcagtccctggtaccctcagcttttcttcctctattagccaaattcccattccctgcgggaaggagttctt

SEQ ID NO: 6100 - DNA, 120 bp, synthetic construct
  source 1..120: mol_type = other DNA
tgcccctggccgactagactttataaggacagaacccagagacacctctgtgtacttcagggactgggtctagcttgagggggctactcgatttggccacagcagtgacatcagcatgat

SEQ ID NO: 6101 - DNA, 120 bp, synthetic construct
  source 1..120: mol_type = other DNA
ggcatctgcccactctccttctatctgcgctcattatcttccctccacctggcctgtccacccacccccagctctgcaggccaagctctcagactcagctcagatggcagcttctcaaag

SEQ ID NO: 6102 - DNA, 120 bp, synthetic construct
  source 1..120: mol_type = other DNA
tctttttgcccctgcatccacagagcctattcctatcctttgagcctttagggtcagtatgatctccttagaagccagaacgtgccctccattgctgaattgacagctgcttcaacatac

SEQ ID NO: 6103 - DNA, 120 bp, synthetic construct
  source 1..120: mol_type = other DNA
gccaggccactgaacgatcggtgaccccaaagctcacaggcctgacctggctctgaaaactcgggaggaagtgagttcctgatttatgaggacagttacttaatcatgcaaatatctaca

SEQ ID NO: 6104 - DNA, 120 bp, synthetic construct
  source 1..120: mol_type = other DNA
atcggatttgggaatcaaagacagctcagcaaaatactaggacatggctcatataagatggaataagcctggaaatacacccccctccccaatatttcggaacataaagtctacagaaaa

SEQ ID NO: 6105 - DNA, 120 bp, synthetic construct
  source 1..120: mol_type = other DNA
cgtgtgtgccccttacagtgtgtttcctattaaagttcctttcatgtttgggccaagggtgtttcctttaattcctgctagcataaaagaatgaggttttctgcagcaatttctaagtct

SEQ ID NO: 6106 - DNA, 120 bp, synthetic construct
  source 1..120: mol_type = other DNA
tagacaacccaaactttcttatcttcacagaatattttgcaagagttgagctcctagaaaatgagcttagatcatttctcccctctggccagtaacaagatgctcctacactgagcttca

SEQ ID NO: 6107 - DNA, 120 bp, synthetic construct
  source 1..120: mol_type = other DNA
tggaatgtggctgcaggggcacacagagatggtttgggaaaacagaaacaggaactgtgatatgaaagtgttttgaaagcatacaatggaaaacagcaatgggcttgtaaagttctagaa

SEQ ID NO: 6108 - DNA, 120 bp, synthetic construct
  source 1..120: mol_type = other DNA
ttggggaagatggggcatcagctcagggattccttctcaaatgcttcagggggcaaagtcctttgccctgtacttgcagctttccttaagtttgaagttgctgtaaaatctttttttttt

SEQ ID NO: 6109 - DNA, 120 bp, synthetic construct
  source 1..120: mol_type = other DNA
aaaaacagaccaagatattagcaggaaagggactgaatttccaagcaaattgggagtcagtgcaagagtaatatcggctcaatggccaacaacaattagatggttttcagcagatggggg

SEQ ID NO: 6110 - DNA, 120 bp, synthetic construct
  source 1..120: mol_type = other DNA
gatacatttcaacagaagatttggggagggacaaaataccaaaactccatcaggaggactgaaggaaaacaatgtctgtacggaccctagtacctttcttgtcctgttgtagacattcaa

SEQ ID NO: 6111 - DNA, 120 bp, synthetic construct
  source 1..120: mol_type = other DNA
ctccacctgcccacctctccacctgcccacctctccacctgcccacctctccacctgcctacctctccacctgcccacatctccacctgcccacatctccacctgcctttcctaacattt

SEQ ID NO: 6112 - DNA, 120 bp, synthetic construct
  source 1..120: mol_type = other DNA
tttaaagatgtctgccaagcccaccggcaccacaccatctagaaaacatttccctccacctggctctctgggatgagcaattcatgctcccgggctctctgcttcggactcatagcgaga

SEQ ID NO: 6113 - DNA, 120 bp, synthetic construct
  source 1..120: mol_type = other DNA
agtttgtccttcctgtcgcagggacatggccgcatcaaggacctactgcagcacggtgcctccttcaccaagcgaactgtgtctgcaacagtcctatgtccacggaaggtcccattctga

SEQ ID NO: 6114 - DNA, 120 bp, synthetic construct
  source 1..120: mol_type = other DNA
ttcacatttttcatggggtggatgcatgaccataggttcatagacttttaagggacttttgggatccacatattcttggctacagaatcctttcttggaacaaagtctcacccagaagcc

SEQ ID NO: 6115 - DNA, 120 bp, synthetic construct
  source 1..120: mol_type = other DNA
atgagtccttgtttgtacttaagcactttccactgggcctcctgtgaggccaggaacgcgctgcagcagaacttccggaaagggcgtcagctgcggccaatagtgactcagaggatgatc

SEQ ID NO: 6116 - DNA, 120 bp, synthetic construct
  source 1..120: mol_type = other DNA
cactccgggacacgtccaatacacgtccccctccccagctgaaggtccccaccatggcaggggctggccatgcaccccggccactccaggacacgtccaacacacgtcctcctccctggc

SEQ ID NO: 6117 - DNA, 120 bp, synthetic construct
  source 1..120: mol_type = other DNA
gtgtgtctatgtgggtggtgcctgtgtactgtgtgtggtgtgtgtgtgtggtgtgggttgtggtgcctgtgtgagaggagtggtctcagccggggtgatattaaggcctgcagtacagct

SEQ ID NO: 6118 - DNA, 120 bp, synthetic construct
  source 1..120: mol_type = other DNA
tccggccgcaggtggggtgcagggtgggggctggggtttggccgcaggtggggtgcagggtgggggctggggtttggccgcaggtggggagcagggtggggctggtgtctggccgcaggt

SEQ ID NO: 6119 - DNA, 120 bp, synthetic construct
  source 1..120: mol_type = other DNA
accatcagcactatcatcaccgtcaacaccatcatcaccatcaccatcatcaccatcatcaccatcaccatcatcatcaccatcaacactatcattaccatcatcaacaccatcatcatc

SEQ ID NO: 6120 - DNA, 120 bp, synthetic construct
  source 1..120: mol_type = other DNA
taagtcgctaagtcacgcccgtgtccggctctgattggaaaaggacgccctgggcttggctgggaggaaaggccagagggtccacaggggaaaagctcagctctggggggcatccctccc

SEQ ID NO: 6121 - DNA, 120 bp, synthetic construct
  source 1..120: mol_type = other DNA
gagggagtaactgtgggatggaaacaaaattcgactctagtgggtggccaggagaggtcacgtgctgcttctcttgtgttgtgaatgcagcggtcagccgcaaaacaccaaatgacaccc

SEQ ID NO: 6122 - DNA, 120 bp, synthetic construct
  source 1..120: mol_type = other DNA
ccggccccgacaggctgtaaggcagcacccccacaccctggccctgggcagtcgtggtgaccgcatggccttgttggtagcttccttctttattaacttggccccatttattaaccacca

SEQ ID NO: 6123 - DNA, 120 bp, synthetic construct
  source 1..120: mol_type = other DNA
acagagcgcaaatcccacggagggcgagccctgagcctgacagagcgcgagtcacacggagggtgagcaccacgcgtgactccaacacacccacctgtgctcaccagacgtgagccagac

SEQ ID NO: 6124 - DNA, 120 bp, synthetic construct
  source 1..120: mol_type = other DNA
gatctcctggtaccacatgggagaccagaaacctttccatgaaactttcagaactgtaaacacagatgcccaattcacatagacactgaaatcacatctgcaagccaaataggtcaggga

SEQ ID NO: 6125 - DNA, 120 bp, synthetic construct
  source 1..120: mol_type = other DNA
actatgcacacccacacacactcctggtggatcaacactatgcacacccatgcacactcctggtggatcaacagtgtcaggctttcagactgaggaaaggaaaacactgtttttggctgt

SEQ ID NO: 6126 - DNA, 120 bp, synthetic construct
  source 1..120: mol_type = other DNA
ccacctctcttgtccttttagcaggaacatgctcacgtgaaaaactggaaaaccagagaaatatgaagaaaataaaagtcactacccagagagagccactattcacagtgtggtgtattt

SEQ ID NO: 6127 - DNA, 120 bp, synthetic construct
  source 1..120: mol_type = other DNA
cgtaacagggtgttcagagggctggctcctggaggagaggaagagatgacggcctccgtgggacagctgggagcatgatgggttcccaggaaatgctctccaaacattcccagaaaaaac

SEQ ID NO: 6128 - DNA, 120 bp, synthetic construct
  source 1..120: mol_type = other DNA
caggactgaggggacactctctgagggcagttcccatgcccaggacagaggaggtcgctctctgagggcagtgcccatgcccaggactgaggggacactctctgaggacggtgcccatgc

SEQ ID NO: 6129 - DNA, 120 bp, synthetic construct
  source 1..120: mol_type = other DNA
aaacatttaaaggagctcacattcctcagattagtttcttttctttctcagtgtcatgcagggaacaggatgacgatgtggacgtcagcgctataccactgggtccatgtagatgaatgt

SEQ ID NO: 6130 - DNA, 120 bp, synthetic construct
  source 1..120: mol_type = other DNA
tcagataaaaaagcagacgttctttctgccagtgctagaagtcagtgaacatttgacagagtcaaaatggttcccaagaaaagcagagaaaagggacaaccccaaaaatagaatgacttc

SEQ ID NO: 6131 - DNA, 120 bp, synthetic construct
  source 1..120: mol_type = other DNA
cttcctgttatcaatacccgcaacagcctccctgttgtcaataccccccacagcctccccattatcaataccccccacagcctccccattatcaatactgcctgagtggtgtgtctgcca

SEQ ID NO: 6132 - DNA, 120 bp, synthetic construct
  source 1..120: mol_type = other DNA
tgttctctctcctctttttcttctcattcatatgttctctctcctctttttcttcattttattcttgatagaaacccaaggaatgaggttgtagatgcaacacttatgtgtccctgtgtg

SEQ ID NO: 6133 - DNA, 120 bp, synthetic construct
  source 1..120: mol_type = other DNA
ggggccctgccagggctcctgccgtggtgagaggccaccagctttcagatgaagctcccatcaaaggatataaggggaagaaaataaaccacggcttcgctgagccatgggaccaaactg

SEQ ID NO: 6134 - DNA, 120 bp, synthetic construct
  source 1..120: mol_type = other DNA
ggactcaacgcagatgtaatttttgctaagaagttcctccctcctaaattagggtgggtgcctcctccatgcataaacataatgccctgatctccactctgttaatttataactagtcgt

SEQ ID NO: 6135 - DNA, 120 bp, synthetic construct
  source 1..120: mol_type = other DNA
aaaataaatttaaaaaaaagaaactcaatccaggcttctccagtgtcaatgcagaggggcacccaagtcacccacttgttgtgatttcaaggcaaatggctgatttgttgggcagtggaa

SEQ ID NO: 6136 - DNA, 120 bp, synthetic construct
  source 1..120: mol_type = other DNA
aggtggttttctttcgcactggattttctctagagcggaaagatctgggttggggtggttttcttttgcaccggattttctctagagcagacagatccgggtggggtggttttgttttgc

SEQ ID NO: 6137 - DNA, 120 bp, synthetic construct
  source 1..120: mol_type = other DNA
gggccctggaatgaggggtctcagtctgcacagtgagccctggaatgaggagtctcagtctatagagtgagccctggaatgaggagtctcagtctacacagtgagccctggacgagggtc

SEQ ID NO: 6138 - DNA, 120 bp, synthetic construct
  source 1..120: mol_type = other DNA
gaggcagacaccccagccgccacccaccctccctgggggtggacagtcccgtgccgaggcagacaccccagccgccacccaccctccctgggggtggacagtcccgtgccgaaggagacg

SEQ ID NO: 6139 - DNA, 120 bp, synthetic construct
  source 1..120: mol_type = other DNA
caagtacttgtgggtcatattctaagcccagatgccacaaagcccaagtcagagggaagagccatgctcagaaccgccagggcctgtctctaaggcccttgcctgaaattgagctgcatt

SEQ ID NO: 6140 - DNA, 120 bp, synthetic construct
  source 1..120: mol_type = other DNA
gtggtgcacgtcctgtgcaagggcagtacacttaccgtcgaatgtggtgcatgttgtgtgtaagggcagtacacttactgtcgagtgtgggtggctgtgcaagggcagtacacttactgt

SEQ ID NO: 6141 - DNA, 120 bp, synthetic construct
  source 1..120: mol_type = other DNA
cgtgggcgggggtagactgtgagcagttaatctccagccatccgtggactggggtagactgtgagcggttaatctccagccatccgtggactggggtagactgtgagtgattaatctcca

SEQ ID NO: 6142 - DNA, 120 bp, synthetic construct
  source 1..120: mol_type = other DNA
tgccattgttgctcttacggcagagattttcttgttaaattctgtaatttgtctcatgatgagaatttgggaggccacagaacggtgagtatccagcatcttagcaaactgttcactgtc

SEQ ID NO: 6143 - DNA, 120 bp, synthetic construct
  source 1..120: mol_type = other DNA
ttttctgtgagttccggagctctgcttcatacctgggactggactcggaagtttctgtgaattctcgagctctgctccatacccgggactggactcagtattttatgtgagttcccgagc

SEQ ID NO: 6144 - DNA, 120 bp, synthetic construct
  source 1..120: mol_type = other DNA
ctgatgatagtgatgatgatgatgatgatcataatggtggtggtgatgaagaggaggaggaagatggcatgcttgggttcctcattgattcatgcattaattcatccccccaaaaaatgg

SEQ ID NO: 6145 - DNA, 120 bp, synthetic construct
  source 1..120: mol_type = other DNA
ggatccgggcatagacccgccaggctgctgtgggttcatccactggaggagacggatccgggcatagacccgccaggctgctgtgggttcagccactggaggagacggatccgggcatag

SEQ ID NO: 6146 - DNA, 120 bp, synthetic construct
  source 1..120: mol_type = other DNA
aagcacccttccaggacaatacccttccaggacgactcccttccaggacggctctcttccaggacagctcccttcctgctgagctcccaggcagctagtcactgtctccaatgactgaag

SEQ ID NO: 6147 - DNA, 120 bp, synthetic construct
  source 1..120: mol_type = other DNA
agttagttcagcttgaaacctttcttataatacaagcatcgtcattttcaccacactgtggaaccgaaaataaatttccctagtgggtgaccatcctccatggatgtaagggctgtctag

SEQ ID NO: 6148 - DNA, 120 bp, synthetic construct
  source 1..120: mol_type = other DNA
gttagagtggaggctgggtctcagttctccacaggctggttagagtggaggctgggtctcagttctacagaggctggttagagtggaggctgggtctcagttctgcagagctggttagag

SEQ ID NO: 6149 - DNA, 120 bp, synthetic construct
  source 1..120: mol_type = other DNA
agatctgtcccagtcccgttggtactcacctatgcctctgcttctccacatggaaggggacagccccttattctccgcctttctcccatctgcctagagaaacctaccatcaagaccgtt

SEQ ID NO: 6150 - DNA, 120 bp, synthetic construct
  source 1..120: mol_type = other DNA
actgtggcatgcgcacttactgttttattctatcgtttgcttattttttttttctgaaaggaaaataaagcagtgatttcagtgcagtgtctgattttctgtaaggaacatgagaaaagt

SEQ ID NO: 6151 - DNA, 120 bp, synthetic construct
  source 1..120: mol_type = other DNA
gcatctgaggttgggggcagggtcccactgccatcctcattggaaagtagtgtctgtctgcttctgagagtgccagagccagtggccagctctctgcactaggataagggaattcgccgg

SEQ ID NO: 6152 - DNA, 120 bp, synthetic construct
  source 1..120: mol_type = other DNA
actctgggccctcagagattgtagctggatcagaaaagaggcagcctggaagtcaggctgttcataagcaagtcagtcaccggggcctggtagatgacaaagacaggagaatccaggggt

SEQ ID NO: 6153 - DNA, 120 bp, synthetic construct
  source 1..120: mol_type = other DNA
tggccaccccaagtgcaatagccatgtgtgacttgagctgtcctgcgggccctctagaacctctccatcatcctggagaggaccggggagcagcaccgtttctgtcctgagggccctcta

SEQ ID NO: 6154 - DNA, 120 bp, synthetic construct
  source 1..120: mol_type = other DNA
acttttttcttttttttttattgtgtcaggtatacgtaaatattcctttcggtcagttcagcacgtaggactgagtggcattaggtacgctcactgtacagccaatgcctccataggcca

SEQ ID NO: 6155 - DNA, 120 bp, synthetic construct
  source 1..120: mol_type = other DNA
tgtgggtgatggagctgttctgtgtgccctggagttctccctcaggcttactgcggagatgttcacgtgcatttatacatgtgtgaaaatatatagagccgcacaccaaaaatagaaggg

SEQ ID NO: 6156 - DNA, 120 bp, synthetic construct
  source 1..120: mol_type = other DNA
aatgaaatattttcttttaagatggatcctgggattcagaacctcaaaaagtgatcaagttaggcgtcctaccagttagaagtctactcatgatggaagacacgttgtgggcggcttccg

SEQ ID NO: 6157 - DNA, 120 bp, synthetic construct
  source 1..120: mol_type = other DNA
atctccgtctttcctttctgtattttatattgtgaagaaggaagccggggatccgaaaaggctccattgtgctattgcaatgtcagtaagagctcaggctggaacacatggcctttctgg

SEQ ID NO: 6158 - DNA, 120 bp, synthetic construct
  source 1..120: mol_type = other DNA
tgaaattaaattttggaccttagaaaaccaacagaagaaaaaagtcattctagtttcccgagcctcttttgagggttgataggagatggcctctcaaggctcaaggccacagtgagacta

SEQ ID NO: 6159 - DNA, 120 bp, synthetic construct
  source 1..120: mol_type = other DNA
gtggcgcagccgcaggcaggcagtacctcggcgtgacgccatgacgcagccggagagagcttcacgcacaccatctcttcgttcttcctcaactctgtcacggagggggcctttgtttat

SEQ ID NO: 6160 - DNA, 120 bp, synthetic construct
  source 1..120: mol_type = other DNA
gaaaattaaccacataaaaaagaataaagagcgaacagggacacacggagccatggccggcaagcgtcctctcaaatgagatccagactctcctgagaaccccggaggagaacatttaaa

SEQ ID NO: 6161 - DNA, 120 bp, synthetic construct
  source 1..120: mol_type = other DNA
atttttgaggcagtcatcaaagggtcctatttgcacatcagtaaggaagtcgcttaatctgttatacacagccaaatgtgcaactctatattccaggtcatgctctccatccacggtgac

SEQ ID NO: 6162 - DNA, 120 bp, synthetic construct
  source 1..120: mol_type = other DNA
tccctgaaatatcgagtaggtctctaatgtttcttaacgataccatcggcatccaccgacgtcacgaactgaacgcctaatctatccatccctgaaacatcgagtaggtctctactgttt

SEQ ID NO: 6163 - DNA, 120 bp, synthetic construct
  source 1..120: mol_type = other DNA
ggactgccgtggtggtctggtgacctgtcatgaaagattggtgacatgtaaaggaccatggagaagtgttgaaggatattatgctgaagaataacatcctctgattttaactttgctatc

SEQ ID NO: 6164 - DNA, 120 bp, synthetic construct
  source 1..120: mol_type = other DNA
ggcttggtgaagcctgagggagctctggaggaacaaacatctatgtaattgtttgagttttgagttgagctggctgcttgcttttctactgaactcctcttaatttaaagaacgatagac

SEQ ID NO: 6165 - DNA, 120 bp, synthetic construct
  source 1..120: mol_type = other DNA
cactcaggctgaggattttcccaaactgacacccagaagactgatcaacagctctgcctgctgcacaccagggagtaactgtgtcaggcagacagctgcatacatgagtctgggaaagac

SEQ ID NO: 6166 - DNA, 120 bp, synthetic construct
  source 1..120: mol_type = other DNA
tcaactttctatctgtgtaaacacagattttgttcattgacttcaaccagaataacagagcacagcacattaaatacgaaagcagatatgagaaaccagcctctttcaccatgccagacg

SEQ ID NO: 6167 - DNA, 120 bp, synthetic construct
  source 1..120: mol_type = other DNA
catgtttatggctcacagttctggggtctggaggttcactatcaaggtgccagtggatcccacttctgggaaggactggattcctgattcagaggcaggacctcctccctgtaccttccc

SEQ ID NO: 6168 - DNA, 120 bp, synthetic construct
  source 1..120: mol_type = other DNA
aaaaaaaaaaaacacgtcttggaaatggaccaattctcatgctttgggaacacttaaaacatgtgaaactttcttaaaatctcaggagtaatacatttaactccaaaatatgatcaataa

SEQ ID NO: 6169 - DNA, 120 bp, synthetic construct
  source 1..120: mol_type = other DNA
ggatatacaattagaatccaggagtaattctattagcaatatataaaattgtgcgttcgttttttctcacgtaagtgtgacatttagtttagcctgtctgtaaagctgtacccattccaa

SEQ ID NO: 6170 - DNA, 120 bp, synthetic construct
  source 1..120: mol_type = other DNA
aaaaaagtgtcatatctccaaaagcacctttcttcctggtctgtcaggagggtgatcatcctattcaccatccacacaggggcacttttgagaggaaaacagggcattatattttggaat

SEQ ID NO: 6171 - DNA, 120 bp, synthetic construct
  source 1..120: mol_type = other DNA
cagggagtaagaagtggatttcctggcagccaggaagttcatttcaattattttgtagccacaaagttcatcactctgatattgatacacactggaagatctgcttgtgaatccctcctt

SEQ ID NO: 6172 - DNA, 120 bp, synthetic construct
  source 1..120: mol_type = other DNA
tgtgatcggtaaggccatgatagagcatgcagtgcggtgaccgtgtgtgatccgcaaggtcatggatagtgtacacggtgcgatgaccatgtgtgatccgcaaggtcatggatagtgcac

SEQ ID NO: 6173 - DNA, 120 bp, synthetic construct
  source 1..120: mol_type = other DNA
catgaatttcaagtaaattacagatttgtcacaaggcaaataaccatgatttactacttcttaagcatgactctgatgaaataaattatttctccagatgaaccacaggtttctcaccaa

SEQ ID NO: 6174 - DNA, 120 bp, synthetic construct
  source 1..120: mol_type = other DNA
gtatcagtgttccttgcccaaactactgcaaaagtctcctgccttacctccctgccttcacccttacctattcaccacacactctccaggaccttttaaaactagttcatttaaaatgtt

SEQ ID NO: 6175 - DNA, 120 bp, synthetic construct
  source 1..120: mol_type = other DNA
gcatctctactgtatgtggaatgaaatctgaactccttcgcatggtctaccaggtccttcaaagtcatgtcaccatcttcccatgagacatctgtaacttctaatcagagagcctaatta

SEQ ID NO: 6176 - DNA, 120 bp, synthetic construct
  source 1..120: mol_type = other DNA
gacagaaagacccgccaactctgacatctgggggttccctaaggaaatggcaaactccccatctgagaaggctgcctctgcaaacagcttccaaatggctcttcattaattgactgttaa

SEQ ID NO: 6177 - DNA, 120 bp, synthetic construct
  source 1..120: mol_type = other DNA
tctcaacaaccacattgcacaaggaaatgtgcaggcttacagaaagttatgagacttgcccaaggtcatgcatcttgcactgatgaagccaaaagtccacacgtctcatgttgagtggag

SEQ ID NO: 6178 - DNA, 120 bp, synthetic construct
  source 1..120: mol_type = other DNA
actaacttttcaaagttaaagaacacatctcaaacaacaaattacagcaggtaattttaaggttctgacccccccccccccacaaaagaaattaaccttggtaaacaattcagaaaaacc

SEQ ID NO: 6179 - DNA, 120 bp, synthetic construct
  source 1..120: mol_type = other DNA
ctaaagaatataatgatctagataaggagatttccaggcttggttaaaggtaatttctgacttcttattacgtatactgaaatgaaagaggaggccgggcgcggtggctcacgcctgtaa

SEQ ID NO: 6180 - DNA, 120 bp, synthetic construct
  source 1..120: mol_type = other DNA
tactgagactaagttgagcagccaattcatttgtctggcttaaggaagcaatctctcattggaaatctcatgactatcctcaaaagaatttatagaaatgactttagcctggctaggttt

SEQ ID NO: 6181 - DNA, 120 bp, synthetic construct
  source 1..120: mol_type = other DNA
ttaagtctttaatccatcttgaatccactcttaaaaattcgagtagagatgaaaaatcttctgtgaataatttgtctttaatacttttcagagagtaaaaatgtctattatttatcaata

SEQ ID NO: 6182 - DNA, 120 bp, synthetic construct
  source 1..120: mol_type = other DNA
gttgactgcctgtagtaccagctactgaggcgagagaatctcctgagcccaggagtttgattacaccaatacattactgtctacgcgacagagtgagagcttataaaaaaaaaaatatat

SEQ ID NO: 6183 - DNA, 120 bp, synthetic construct
  source 1..120: mol_type = other DNA
ctctcaaatctgagcaattgggagctcttagtcatttatacagtgggtgctttttcaggctactgactttcagttctgtaggtaagaaccacttagctaggaaaagaaagtgggcaatgt

SEQ ID NO: 6184 - DNA, 120 bp, synthetic construct
  source 1..120: mol_type = other DNA
ttgaaaaaaaagctatgaaaatgaatatgaaagggaagctgggaaggggaaggggacagagagggtggacgcctcacatgtcagttctgcttctcagttattctggaagatttcttttaa

SEQ ID NO: 6185 - DNA, 120 bp, synthetic construct
  source 1..120: mol_type = other DNA
tttgtggtgcacaatgcagtattttgagtacacatacatactgtacaatgattaaataaagctaattaacctatttctcacctcacatactgttttgtgatgagaacattcaaaatctat

SEQ ID NO: 6186 - DNA, 120 bp, synthetic construct
  source 1..120: mol_type = other DNA
gccctaccttttaaccttgaatagagacatacatcacaaaataaagcttcctccacctgtaaccacttattatcatatgccaacctcaaataacacaaaatgggggagtcctgccaagct

SEQ ID NO: 6187 - DNA, 120 bp, synthetic construct
  source 1..120: mol_type = other DNA
gcaggttcacaatgatcatttccaaaacttctacaggacaatctaatgtgccctgatgcttaggaaccatcgctttaaaacagcaattctcaactctttaagggcaaaaataccttttcg

SEQ ID NO: 6188 - DNA, 120 bp, synthetic construct
  source 1..120: mol_type = other DNA
tgtacaccaccacacccagctaatagtttttgttgttctttgtagagatggggtcttgccaagctggaaatgcaggtgtacaccaccacacccagctaatagtttttgttgttctttgta

SEQ ID NO: 6189 - DNA, 120 bp, synthetic construct
  source 1..120: mol_type = other DNA
gctcctatatgagatgtaatgggaataaagtcatctaggcaaaggctcagcagatactcactccgaagaacaacaagcccaaatgtctccacggatgttgacttctgataagcaatctca

SEQ ID NO: 6190 - DNA, 120 bp, synthetic construct
  source 1..120: mol_type = other DNA
actcctccatgaagccctccctgaacatctttgtctgagtttctctttcttctgtgaggtctcacactgccttttcttctcatctaagttactgtcttgggtctataagtcatatatata

SEQ ID NO: 6191 - DNA, 120 bp, synthetic construct
  source 1..120: mol_type = other DNA
ttgctctcctccaactcatctgcacacagcggccaaagggatctttctaaaacactagttgaatcatgtctatctcttgcttaaaatacttcatggctccccaccgtcttctggggaaaa

SEQ ID NO: 6192 - DNA, 120 bp, synthetic construct
  source 1..120: mol_type = other DNA
gcagagaacaaaggcctctcactcttcatgcaaagtccacagtgtgcaaagggcatcaatattggacatttctcactgtgacattttgaaagctcagcctagcccagaacaatggttacc

SEQ ID NO: 6193 - DNA, 120 bp, synthetic construct
  source 1..120: mol_type = other DNA
acatgtcacagtggaatctgggcagtgaggatgctattttcgaggaagagctcttgcctcacaccagtagacacaggcagccagctccttggcctaacttgatggactccctaaacactt

SEQ ID NO: 6194 - DNA, 120 bp, synthetic construct
  source 1..120: mol_type = other DNA
gctgaaaggaaagattcccataccctgcagacgaggtcaggacctggtattgtgcattcacagagcctggcacattcctccattgctaatggtgggtttacttgtgcagattatttgact

SEQ ID NO: 6195 - DNA, 120 bp, synthetic construct
  source 1..120: mol_type = other DNA
aaacacagtgtctatgaagcacaataaaagtatgcctgtataatctcgcaatttttatattatatctgttaatatttgggcatagatctttccagcatatagttctttttccacagcaaa

SEQ ID NO: 6196 - DNA, 120 bp, synthetic construct
  source 1..120: mol_type = other DNA
agttcacattttagcttggaactttctagagtttacaaacctcatagaagcctcaggattcgttttagccacaaaatcatttttgaccttctcctggctcctggttgtgggaggagggag

SEQ ID NO: 6197 - DNA, 120 bp, synthetic construct
  source 1..120: mol_type = other DNA
gtacatctgatgaccagaattctatcagagaatgttaatgaacgaaaagcctgagctttaagactgagattggtaccacgggtagtcatggccacctgctggcagcgtagggtactgcag

SEQ ID NO: 6198 - DNA, 120 bp, synthetic construct
  source 1..120: mol_type = other DNA
acacatgtgcacacatacacaaagtttagtttcctcacctatcaaatcaggagaaaatgttctctctctgtctctcagactagttgtagggatcaaatgggataacagatgtgagagcgc

SEQ ID NO: 6199 - DNA, 120 bp, synthetic construct
  source 1..120: mol_type = other DNA
agcgtgtagttatctctgcaaagcagagcacccttaattaactgactaattgttctttcctgcttggaatatgagttggtttgctttgggctttttctgggactcagagaaatctgtctc

SEQ ID NO: 6200 - DNA, 120 bp, synthetic construct
  source 1..120: mol_type = other DNA
ggatgtgctgctgttgcttcaaactcatatgtctgaaccagactctttactactaaaaacagctcctccccatctggacttaaatatttctctcaattctgccatccttctcctagtaac

SEQ ID NO: 6201 - DNA, 120 bp, synthetic construct
  source 1..120: mol_type = other DNA
cgggggtgggatggctgccagggccttggttttagaacagaattctgggtactcggaggaaaacctctcatagccgcctgtaaaggagaaagaagctcaggttaatggggtcactaagcc

SEQ ID NO: 6202 - DNA, 120 bp, synthetic construct
  source 1..120: mol_type = other DNA
ccctgagtagggaattcagcctctgtagattatatggaacctgcatttgtagagactgttggctgtccagtagccagtcagattggggtgcttgtaagtaactgtttatattcaaattaa

SEQ ID NO: 6203 - DNA, 120 bp, synthetic construct
  source 1..120: mol_type = other DNA
tggtggggtgggggcatgcagcattcagtacatagtgtgcacatgtaaacagacatatataaacattatgacacacgtaaacttttcctcatgtttgaaagaatgatgtgctctctaagg

SEQ ID NO: 6204 - DNA, 120 bp, synthetic construct
  source 1..120: mol_type = other DNA
aatggtttcagttagtcctttaaatatatttataatggctcttataaaatctttgcctagaaagtctgggcttccttccggacagtttctattggtgttcccaccccccaccccccacca

SEQ ID NO: 6205 - DNA, 120 bp, synthetic construct
  source 1..120: mol_type = other DNA
tttccactagcccttctcatagctcttagtatcacagaactgttggtagtccctagctgaagagaaagaagtactgcatcacgttttctgattgtggaaaatcattaggaacataagcca

SEQ ID NO: 6206 - DNA, 120 bp, synthetic construct
  source 1..120: mol_type = other DNA
acaagaaaaaaacctggatttccccccaagactcgactttcaggcaatgctcctagtaatattccaggcagtcaatgccactttctccagctatacttttggtcaagttgatattccttt

SEQ ID NO: 6207 - DNA, 120 bp, synthetic construct
  source 1..120: mol_type = other DNA
tcacaggctgttttttaatggcatggattttgaactgagagtacagatttgcttcttccttcctaagaaagacctcataaatgtaacgtcactcagaggaaaacagaaaaaaaatttgcc

SEQ ID NO: 6208 - DNA, 120 bp, synthetic construct
  source 1..120: mol_type = other DNA
aagaatgcctttcacatctcattaataaactcattccctgtaggcccgtgtctcacagatgtcagtggttagtatcccaactctagctgtgatcgtctccaaaattatgcagtctgcttt

SEQ ID NO: 6209 - DNA, 120 bp, synthetic construct
  source 1..120: mol_type = other DNA
agcaagactctgtctcaaataaataaataaagctggaagtagaaggggaggatgagattggtgggttctgagggctgggatggccaaacacagttctgctgtggtcaggattatgcagag

SEQ ID NO: 6210 - DNA, 120 bp, synthetic construct
  source 1..120: mol_type = other DNA
ttctaggatctccaaaaaactagtatgaatgcatcaaaaatttcatcctctgatgcagtgttttgttcatcccctaattcattcatttcccattttctccttgattcatttacttagctt

SEQ ID NO: 6211 - DNA, 120 bp, synthetic construct
  source 1..120: mol_type = other DNA
attcaaaagatacttgatgaagctttggctgtaagtgtattggatatcacttataattattaaacatgaaattcctcctctgtcacatggggagtaaaacctaccctatctgcctattca

SEQ ID NO: 6212 - DNA, 120 bp, synthetic construct
  source 1..120: mol_type = other DNA
agtgactgtgctagcagccatcttgcttcatctttgggaggaaacccaaggtttagtttggaaaggctgagcctactttctgcaagaactcaaactgcccgtcagagtaaaacactgtcc

SEQ ID NO: 6213 - DNA, 120 bp, synthetic construct
  source 1..120: mol_type = other DNA
ggttacaggccaggacccttaacttgggatttaggttggaaaactggtagaccttgcttttcacaatatgtgttattctagcaagtgaagaggttggattagataatatccatgggtgct

SEQ ID NO: 6214 - DNA, 120 bp, synthetic construct
  source 1..120: mol_type = other DNA
acggcctttatctctgtagcactttctagttgatattgtgcttttccatatattccgtatattcatgtaatccctacatacactttctaggtagatcactggagcggtcagtccagtggg

SEQ ID NO: 6215 - DNA, 120 bp, synthetic construct
  source 1..120: mol_type = other DNA
cctccatcgggaagctctgaagcagtctgcaactgatccccggactggcatcgtggacatatctattcttactacgggttcgttattttcagtgaacagaaaagcttttgaaaattattt

SEQ ID NO: 6216 - DNA, 120 bp, synthetic construct
  source 1..120: mol_type = other DNA
ttcctgtgtccatgtgatctcattgttcaattttccatatgtgctacttacctttactcaaattcacctttttcttacttaaaaaaaaaatagagcttcacttctccaagcccagtggaa

SEQ ID NO: 6217 - DNA, 120 bp, synthetic construct
  source 1..120: mol_type = other DNA
tgcccagggttaggaggaagatggtgcatcttccctttggaaggtgatagagaaggggtgcagagtttcttttttgtgaaataaaaaatgttctaaagttgaccatggtgatgaatgcaa

SEQ ID NO: 6218 - DNA, 120 bp, synthetic construct
  source 1..120: mol_type = other DNA
acacccacacaccacacacaacacatgcacaccaaacacaagatgacctctatgaaaccaaaaaaaggaaagttattttcccagttcttttaggaaaattatgctggacattccaggagc

SEQ ID NO: 6219 - DNA, 120 bp, synthetic construct
  source 1..120: mol_type = other DNA
cgttaataaaagttaaaaagttcttaagaaatgaaagatgggaaaagggatgtatgctttaagtgttcagggagccaaaatcctgtgacatgccccctgggccagcatgtaaggttcacc

SEQ ID NO: 6220 - DNA, 120 bp, synthetic construct
  source 1..120: mol_type = other DNA
gtactaagtgacagaagccaatctgaaaagacttcatattgcggaatttcaactatatgatattctggaaaagaatggagagaataaaaagaccaatggtggccgggcgcggtggctcac

SEQ ID NO: 6221 - DNA, 120 bp, synthetic construct
  source 1..120: mol_type = other DNA
ccacataggtacaaagatactctgtaatgtacaatgaggtggccaatcgtgggaatataggagcaataaatagtcctcttaagcaaggttcatgggtaagagttactctagcaggattgg

SEQ ID NO: 6222 - DNA, 120 bp, synthetic construct
  source 1..120: mol_type = other DNA
agaacatatttatagtcttttgtggttacggttgtttcaactgtgcaatcgaagtccctgaaattttgccttaagtttaggtattatcagtatcattcagattaactgctgccaaacact

SEQ ID NO: 6223 - DNA, 120 bp, synthetic construct
  source 1..120: mol_type = other DNA
tcagtgatttgccgttaaaagataaccacatcagccaaaggtaaccaagacacatccctgaaaaacaaagatcaaatgcaggacaaaagcctgaagcatccctcacatcaggggaataaa

SEQ ID NO: 6224 - DNA, 120 bp, synthetic construct
  source 1..120: mol_type = other DNA
ctctactggttattgtttgttgactttgtatcctggaactttaccacatttatttattaattaaaacggttttttggtggtggccatggtgacacagccaccaaaatatgtacatgtggg

SEQ ID NO: 6225 - DNA, 120 bp, synthetic construct
  source 1..120: mol_type = other DNA
agggagtagaatgattttttgcggcgggggggggggggcgggaggtttttttttattattattattttgccttaatcctctcatttggtttagaaacataaggccctgttcacttcattt

SEQ ID NO: 6226 - DNA, 120 bp, synthetic construct
  source 1..120: mol_type = other DNA
atttattcatttactcgctcatttaatcagtacaaaaggcttactttatgcctggcacttacttggtgctagccacaggggataaagttgtgagaaacagtagatcctgcctgggcatca

SEQ ID NO: 6227 - DNA, 120 bp, synthetic construct
  source 1..120: mol_type = other DNA
aacatctcttggcatgatgtgatattggtgggcagagttactttgtaccatcaagtgcagaagtgttcttgtaggtagctttcttcaagccactaagcgagcttgttggcagataattaa

SEQ ID NO: 6228 - DNA, 120 bp, synthetic construct
  source 1..120: mol_type = other DNA
ttagcaaaagcctccctcccagaattagccagcttgcctcctgcaccccacccccaccaaccaggggagccactaagctgactaacaactgtcccctcacccaccagctatttccccagt

SEQ ID NO: 6229 - DNA, 120 bp, synthetic construct
  source 1..120: mol_type = other DNA
tcattgctgaaaagacaaagaatttgagccttggcttctttccacccagattcctgggagagcatcattcaaagaaccaggagctttagtttttgtgatctcatccaaatccttctcctt

SEQ ID NO: 6230 - DNA, 120 bp, synthetic construct
  source 1..120: mol_type = other DNA
atgatgatggaacattttatccaagaaatgagatgcaggacgtgatttcaaaggtaacgacctctcccacaacctctccaatagtagaatgcatgttgtcattcttcagaagataaaagg

SEQ ID NO: 6231 - DNA, 120 bp, synthetic construct
  source 1..120: mol_type = other DNA
ttatacgtagacacatacatacatatacacaaacacacacacatatgaaatatatacacacagaccatattcctcttaatcattctaaccaaatctttgcacatgtatatccaagtcaca

SEQ ID NO: 6232 - DNA, 120 bp, synthetic construct
  source 1..120: mol_type = other DNA
ttttttgtgcagcccgagaagtttgtttcagtcgatgtcttctccagggagagtagatttgctcctggaaactaaatctgtttctaaaccttttccccagggtttagacacttaggtaat

SEQ ID NO: 6233 - DNA, 120 bp, synthetic construct
  source 1..120: mol_type = other DNA
tagaaggtcaactccacaactgtcaactgtgcctacgtcattcatctcccttcatctcatcacacagacattttataatctcacatcaccacaagaagggtgagcacagtacaataagat

SEQ ID NO: 6234 - DNA, 120 bp, synthetic construct
  source 1..120: mol_type = other DNA
attacacttaaagaacagttaggaacttgttaatcttctgtcacctaccttgatgtggtgctggggatctggattagtcatttaatacctgcaggcaagaccagagcacgtgaatacagg

SEQ ID NO: 6235 - DNA, 120 bp, synthetic construct
  source 1..120: mol_type = other DNA
ggcgtgagccaccgcgcccggccggacccttagttctgagatactacaaatataccttcttgcaagttacttattaaaatatattttccagggtgctggcataattccagaaaacagttt

SEQ ID NO: 6236 - DNA, 120 bp, synthetic construct
  source 1..120: mol_type = other DNA
acatgaacccagaagagccatattaggagatggcgatgagagttaatgatatatttttagataaagccatcctcccgtgcaatcacatcagagtcatcagctcatttgtcatggctgaag

SEQ ID NO: 6237 - DNA, 120 bp, synthetic construct
  source 1..120: mol_type = other DNA
atcatataagatggccattcactttttacagtccagacctcaagtcagtggtgtacttccattactaatggagaaggtgtgtcccaactcctgccctagattcataccatagctaagtaa

SEQ ID NO: 6238 - DNA, 120 bp, synthetic construct
  source 1..120: mol_type = other DNA
tttgctgagaatgatggtttccagcttcatccatctccccacttaaactcccaagcttcaggttcttgtttgtgaaatggagattaaaagatttagataataatttatatcaaacattta

SEQ ID NO: 6239 - DNA, 120 bp, synthetic construct
  source 1..120: mol_type = other DNA
gaggcagtgtcacctcattggacctcatctaggaacatgtaactcaaaatgtttaccctctatgcatgtttctgaatgatcataaaaaccctgcgagtattaattaggaggtcacaaaca

SEQ ID NO: 6240 - DNA, 120 bp, synthetic construct
  source 1..120: mol_type = other DNA
taataaaattaaaaaaaaagaaacagcatgggctcagccaggagcatccctttgatatataaactaaccagtcaaggtccagacctcctctctccagtccatacaccccaggtggcaata

SEQ ID NO: 6241 - DNA, 120 bp, synthetic construct
  source 1..120: mol_type = other DNA
atctcttttctgcaaaagttatagatggaatcacaacggagaaggaagacgactgtgttctagtcccaattctaccactaacttggacaagtcacttaacctttggggacacaactactc

SEQ ID NO: 6242 - DNA, 120 bp, synthetic construct
  source 1..120: mol_type = other DNA
atgtaaagcttatcctaaaaattctctgccacttgcagggtggcctgcttttcagcagtggtcagggtttgatgcaaaagtaacatgacatccttccatgagagttcaaatagttaggtt

SEQ ID NO: 6243 - DNA, 120 bp, synthetic construct
  source 1..120: mol_type = other DNA
aaatggcaagggaatagggggttagaaatggcatttctatagtcagtctgaagtgtctttctcagtgaattaaggatggaaaaatggtgaaggcagtgtgtcttaaacacaagtaacatt

SEQ ID NO: 6244 - DNA, 120 bp, synthetic construct
  source 1..120: mol_type = other DNA
tcaaggttctgaagttttgctgtagtgtgaatggcaaggacagtctttctatgatgttctcataagatccaatcttcgggttctagattgtgaaggggttgtcctcagtgaaccacaaaa

SEQ ID NO: 6245 - DNA, 120 bp, synthetic construct
  source 1..120: mol_type = other DNA
ttatttattcatttatgctgtcccactccttctcctacccctctctcccatcatttctctgtcaggattgtcctatactgttttactgtagatgggattctaccatgtagtggggaagag

SEQ ID NO: 6246 - DNA, 120 bp, synthetic construct
  source 1..120: mol_type = other DNA
tgtctaagtccttcagaaatgtcatccctcccacagctgttaccacctttattccagtgactcttgcttcttattctaatcaccacttcttggaggtacctaaggtaccaaatggatatt

SEQ ID NO: 6247 - DNA, 120 bp, synthetic construct
  source 1..120: mol_type = other DNA
ttgggggaaactgacccgtgcttctctaccttcggaggtgggacagttgcacgaagtgctagttagaccggatcagttggaactgacggaggactgcaaagaagaaactaaaatagacgt

SEQ ID NO: 6248 - DNA, 120 bp, synthetic construct
  source 1..120: mol_type = other DNA
tctcacttacccttcattcaataagttggcaagacctgtagattttacttactttaataccattgactctgccctggctttctaatccttctggtttggcacttcttacacaattcccgc

SEQ ID NO: 6249 - DNA, 120 bp, synthetic construct
  source 1..120: mol_type = other DNA
ggcgaaatgtaaagggagtaaaaagggtggtagtctataaaggaactagccatccagccacccagaaaccaagtccctcttttaattaatagagttatggagaggctccagcatattaat

SEQ ID NO: 6250 - DNA, 120 bp, synthetic construct
  source 1..120: mol_type = other DNA
cagaaatagagatgcaccctttcttcttcagtagctttgaggatcaaagaatcttagttgccagagctgggaggggaatctcaaagattgcctagtggaacaatatgattgttcatgtga

SEQ ID NO: 6251 - DNA, 120 bp, synthetic construct
  source 1..120: mol_type = other DNA
aagccaaacagaagtagaaaaaggtgtagccggcatacaaatgttatctacagtgtatttttagattttttatacttgaccaggtctcttatgtcctttttctggaaaactgtttttaac

SEQ ID NO: 6252 - DNA, 120 bp, synthetic construct
  source 1..120: mol_type = other DNA
ataccaatgtggacttgtctgtggaaaaaccatctctgtgtgctttctggcaaggcagcaaaatgaaaaggcagtttggacttttcctcccttcatcttctttgttataatctggaagct

SEQ ID NO: 6253 - DNA, 120 bp, synthetic construct
  source 1..120: mol_type = other DNA
ttacaggtgtgagccattgcgcctggcccagactcccttttatccaatcaattttatccaatccaatacttcgaattatacctactaggcttaagacaatccattaggcacaaacaccct

SEQ ID NO: 6254 - DNA, 120 bp, synthetic construct
  source 1..120: mol_type = other DNA
ttaggggtcggcatatgggcttggcctcagaaaacctgtgttcaaattctggctgtgcctcttgctagctggacaagtttcttaacctcttcttcattgttaaaatggaaataataatac

SEQ ID NO: 6255 - DNA, 120 bp, synthetic construct
  source 1..120: mol_type = other DNA
aggggcagcctgagatcctggttcccatgaatcatgatgaattaagaaaggaatgtgggatgccatgaaaacacacttagctctgtcttttagttctcaaaattaggtcagcaactttgc

SEQ ID NO: 6256 - DNA, 120 bp, synthetic construct
  source 1..120: mol_type = other DNA
gctagtattacaggcctgagccaccatgtctggcctctagttcttttcttactttcataaattttcagattccttgattgattcccctctccttcaaattctcaatcaaccccttggtgt

SEQ ID NO: 6257 - DNA, 120 bp, synthetic construct
  source 1..120: mol_type = other DNA
ctcaccatcattgtctggtatacattgttagtaaagattttcaagaatgattattctttaggtcagctacgtttagcttgtgcagtctttcaagaaatggacgtttcagaggtacattat

SEQ ID NO: 6258 - DNA, 120 bp, synthetic construct
  source 1..120: mol_type = other DNA
ccgcgtcagcctcccaaagtgctgggattgctccttggttcttataagtgatggattgagtttccaatgcaaatatttgtgtatttctgttgccagatcaaacatgtagtatcagtgctt

SEQ ID NO: 6259 - DNA, 120 bp, synthetic construct
  source 1..120: mol_type = other DNA
aagaaccttcacaatggccagcacacttacatagactggaatttcgccatccggatttggattagcttattagagtttattactgcaaaagtgattatccagaaacaatattgcccatct

SEQ ID NO: 6260 - DNA, 120 bp, synthetic construct
  source 1..120: mol_type = other DNA
gactttttatctctgggatgaccactaaaagaattgtttaaaaaaatgtgtaactttcagatatgtggggaaaaaccggagttaataaatactgaatccaaggaaggcaacaaaggagag

SEQ ID NO: 6261 - DNA, 120 bp, synthetic construct
  source 1..120: mol_type = other DNA
tctccataccaatcccaaaagataatgatatactttctatttccactgaagatgggggggggggggggcttgccacttaataggcagtctatttgatgttgggattaatcattagagagt

SEQ ID NO: 6262 - DNA, 120 bp, synthetic construct
  source 1..120: mol_type = other DNA
atgcttagaagaagactggcaaactgtaaatgctcaatacatttgagctattttgttaatcagcttgtaaattacttttgaggaaattcacacaatatttgttcttaccagtgctatgct

SEQ ID NO: 6263 - DNA, 120 bp, synthetic construct
  source 1..120: mol_type = other DNA
tcttaagaataattcttaaggaccctaggatttttgagttagtaaataagtattgtcttcaacttaaagttaccagctgcgttatcccccttacaagagagtcaacctgtcttttgaagc

SEQ ID NO: 6264 - DNA, 120 bp, synthetic construct
  source 1..120: mol_type = other DNA
aggaaaggttttgttttctgtttttgcattagattagtgtttggatgatcctgttctcaaatatgtcttaagaagtttctattatataaagcagattgccattgccttacaaagtagccg

SEQ ID NO: 6265 - DNA, 120 bp, synthetic construct
  source 1..120: mol_type = other DNA
taactttgctcctccaaatgatacttttctttggaaaacaagccctgtggagggcttacttttctttggaaaacaagccctgtggagggactgctacattacagatacagaggaagtgat

SEQ ID NO: 6266 - DNA, 120 bp, synthetic construct
  source 1..120: mol_type = other DNA
tatgtcaactgcttcaccgctttcattatggtgtatatttgtaccctggagttgggggtggggggtgggagtgccagatgattcattaggatatgacaaggaaatagactgtatattaaa

SEQ ID NO: 6267 - DNA, 120 bp, synthetic construct
  source 1..120: mol_type = other DNA
gcattccaggccaggcctcagaaagctagggacagaatcttgcaagcacagaaacatacgcaaatttctttcctttaaacctaacctcatgatttcagtctatatatcctaatgcctttc

SEQ ID NO: 6268 - DNA, 120 bp, synthetic construct
  source 1..120: mol_type = other DNA
tcccactgcttggcacaggtttggggaaaggacctgggctctgggaaggtgggacaggcaccaaggcagggctctcccagccttgcaggaactggaagacgaatgggagaatcctgatga

SEQ ID NO: 6269 - DNA, 120 bp, synthetic construct
  source 1..120: mol_type = other DNA
gtggtgatgaaatggaatagaaactagaagaaatggactaaaacagaattcaagctaaacctgtagatattgactgcatgtctatgatgtgcgaaacatcatattggaagccctgagtga

SEQ ID NO: 6270 - DNA, 120 bp, synthetic construct
  source 1..120: mol_type = other DNA
aggtccaagtactggctatgagctaagtggccctggagaaagaaattacctctctgcatctgagtttcctcatctgcagatagaaatgggctgaattacatgtataatgactagaacagt

SEQ ID NO: 6271 - DNA, 120 bp, synthetic construct
  source 1..120: mol_type = other DNA
ggaagaagattttttttttaagagttttgattacaagtttggataaatgggagccagagcgaggaggaggaggaggaggaggaaaaacatgtctacgtttccctatgtcgacataagcca

SEQ ID NO: 6272 - DNA, 120 bp, synthetic construct
  source 1..120: mol_type = other DNA
aattcctttctcagggcaaaaaaaaaaaaaaaaaaactatgtctggtacagagggagtgctcctaagtgtgagtttccattacattagtactagcattgaaactgattttaggattagtg

SEQ ID NO: 6273 - DNA, 120 bp, synthetic construct
  source 1..120: mol_type = other DNA
tctcctccatcactctctctcctcttcccctccagcttcacctggctctgcggacacgtgcaccggaacatcctctccaagttcacaggccaggcggtggagctgtttgacgaggagttc

SEQ ID NO: 6274 - DNA, 120 bp, synthetic construct
  source 1..120: mol_type = other DNA
attacaaaagagaaaataagatggatagagatgatagctcatcatcattgtcagtcttgttggtctgatcattgctctttctaccttcataatgggagcttaccttattgctgtgggaga

SEQ ID NO: 6275 - DNA, 120 bp, synthetic construct
  source 1..120: mol_type = other DNA
ctacttaggaatgtagacagataattttacaacactgttgataaataaaacccacagattcagtgtcaagaagtgtgcagagcagggagggaagcttgtgaaatgggaggggtagttagg

SEQ ID NO: 6276 - DNA, 120 bp, synthetic construct
  source 1..120: mol_type = other DNA
tcgccaggctacccattctgaaatgtgagttttgtttggctcacacagtgttgggatttgttgggtttcaaatgtgtttaggtaagagttgtgcctttctattagtcactattctgacca

SEQ ID NO: 6277 - DNA, 120 bp, synthetic construct
  source 1..120: mol_type = other DNA
gtgctaataagaggtcagtgtcaataaggggtagatctgtttccagaacagatctgcctatcccaaagttgatgccactttattcacaacaaaatgcctccatgagcacattcttcgaaa

SEQ ID NO: 6278 - DNA, 120 bp, synthetic construct
  source 1..120: mol_type = other DNA
atatatgtatatatatacacacatatatctggaacctcccacccaggaagtgtaagcacacccaaggtatgagcagattaaagaaatcctgcagaagggggaacacatgcatagagtatg

SEQ ID NO: 6279 - DNA, 120 bp, synthetic construct
  source 1..120: mol_type = other DNA
atctaagaaaaaaaagtattttttctcccctacccgatgcagtgatcctaggacaggagttgctgggacagcaaagatgatttttgttttttagctatggggtctcactgtattgcctgg

SEQ ID NO: 6280 - DNA, 120 bp, synthetic construct
  source 1..120: mol_type = other DNA
accaccatcagcagcaccattatcatccccattaccaccatcatcatatcatcatcaccatcaccaccaccaccaccatcattatcattgcattaattttctagggctgtcattaaaaag

SEQ ID NO: 6281 - DNA, 120 bp, synthetic construct
  source 1..120: mol_type = other DNA
accagatacattgttctatagtcccaagaagtattttctagtctttccttcgtttacccttcttggagaggaacatctgtgggcatgtggaaattaaaggaaagagctgggtaagcactg

SEQ ID NO: 6282 - DNA, 120 bp, synthetic construct
  source 1..120: mol_type = other DNA
atcaggataactatgttgtcagtaaaatgaccagaaagcttggagtctaagcttaaaaggaagctctggtgctttttatgtgattttgagcagctcattgacttggcagatcccggtcat

SEQ ID NO: 6283 - DNA, 120 bp, synthetic construct
  source 1..120: mol_type = other DNA
cctctcccacttgcaggctgtcaggtcttccagggcagaaagcccatcatctggagcagtctcttgatttaaaaaaagttaattatgacatttttacaatgataagtgatcaattaggta

SEQ ID NO: 6284 - DNA, 120 bp, synthetic construct
  source 1..120: mol_type = other DNA
ttaaacagtggatattcatgaatataaagatggcaacaatagatactggggctactagatgggggagagagagaagggggcaagggttgaacaactaactgttgggtactatgcttagta

SEQ ID NO: 6285 - DNA, 120 bp, synthetic construct
  source 1..120: mol_type = other DNA
ttgcagattgcacagaggacgaggcctgcagcttcttcaccgtgtccacgacggagccagagatttcctgtgatttctatgcttggacaagtgacaatgttgcctgcatgacttctgacc

SEQ ID NO: 6286 - DNA, 120 bp, synthetic construct
  source 1..120: mol_type = other DNA
tgatatcctcctgtttggaggtggttgttgttgttgttgttgttgttagttgttgttttctttggtcttcaagtgctccatcacgggtattctatccttttttgttccaagacacctcct

SEQ ID NO: 6287 - DNA, 120 bp, synthetic construct
  source 1..120: mol_type = other DNA
taaggaatccttggagtttggcccacagcatttactaaacaaaaggacctggaacaaaggcaaaatttgtcgggctttctcatctatctagtgcgcagagaacaaaaggtctagaattct

SEQ ID NO: 6288 - DNA, 120 bp, synthetic construct
  source 1..120: mol_type = other DNA
tggtacaagttttatacagcaaaacaggtcattgtgaaggatattatcaattcatctgtggggtgaaggggaagttgatgttttaattaagagctggaggctaggcgcagtggctcacac

SEQ ID NO: 6289 - DNA, 120 bp, synthetic construct
  source 1..120: mol_type = other DNA
ctttatgggatagaacagttattatatatttatatgtgtgttgggtcaagaagtttaactcaattgcaaaatgctgtataagaaattttctttttttatcctatgggtcacttaactttg

SEQ ID NO: 6290 - DNA, 120 bp, synthetic construct
  source 1..120: mol_type = other DNA
attcatccattcattaattctccaaaaatctcttatcaagttcctgtggtagctcaggcacggtggcagcagatagatagaaacagggcctggttgaggatgtgtgataaaatggcttaa

SEQ ID NO: 6291 - DNA, 120 bp, synthetic construct
  source 1..120: mol_type = other DNA
aaagttgaaggaaaaaaaaaatgtgtcaggcacacacactcttccccatgactgacattagggaaatcatttcccccagcggaatatcttctgtgctattgctttcagagctattagtgc

SEQ ID NO: 6292 - DNA, 120 bp, synthetic construct
  source 1..120: mol_type = other DNA
ctctgtgtcatcagacatctcctccatgtctccatcccaccaaagtgtattttcatcatgtgaggaacggagaataaaaaggatggcacaggactgctgtgagaattgaatgagaagctg

SEQ ID NO: 6293 - DNA, 120 bp, synthetic construct
  source 1..120: mol_type = other DNA
ggaagggaagaactaccattatcttcatttgactgatgaggaagctgaagtccatagagctcaagtatcttacctgagattatctgcaaggcaggagcagagccacagttcaaaccaaag

SEQ ID NO: 6294 - DNA, 120 bp, synthetic construct
  source 1..120: mol_type = other DNA
caaatccattcagcccttcctagctgtagcactgagcccatggattcaaccaaccgaggattgaaaatatttgggggaaaaaattgcatctgtgctgaacgtgtgtagtttttttttttc

SEQ ID NO: 6295 - DNA, 120 bp, synthetic construct
  source 1..120: mol_type = other DNA
gtgaccttggggtagcttcctaggttttcctctagaaatctggtaagtaggagtgtgtaattcatttactaagcaaccatctttacagtaaaaatcactcctgactggtgaattgctggg

SEQ ID NO: 6296 - DNA, 120 bp, synthetic construct
  source 1..120: mol_type = other DNA
tgcgcctgggcctcagtctcctcagtgcggagcacccctcagtcactgcttttcatcccaggactctgcttttggctggggttgcagttttgtgacctcagcttggcggtttggaatggt

SEQ ID NO: 6297 - DNA, 120 bp, synthetic construct
  source 1..120: mol_type = other DNA
ctttctccaatccttcctccccttccctctctcctgcccggtccctctcttccctccctccccctccctctctcccatcctttctcctccctctctcctctccctccccctctgctcctt

SEQ ID NO: 6298 - DNA, 120 bp, synthetic construct
  source 1..120: mol_type = other DNA
actagaattagggtcagtgtgtgaccaggatcagagcttagtttgtgaccaggatcagcgttcagggtgtggccaggatcagcgttcagggtgtgagcaggatcagggctcagtgtgtga

SEQ ID NO: 6299 - DNA, 120 bp, synthetic construct
  source 1..120: mol_type = other DNA
gtgagacctaaaactctaaaactacaatctccatctcatgccgtatacaacaatcaactcaaaatggatggaagacttacatgtgagacctaaaactgtaaaactactagaagaaaacat

SEQ ID NO: 6300 - DNA, 120 bp, synthetic construct
  source 1..120: mol_type = other DNA
gtaggtcccgccacttgtgcttcaggtccacaacgtcgcggcgacagtagcccagcgcattcacggcctgcaggatgcggctccacacgcggtacctgcgagtgggctcggccttcagca

SEQ ID NO: 6301 - DNA, 120 bp, synthetic construct
  source 1..120: mol_type = other DNA
tgctctgcccacctgagccacgtgaacctagaacatggcagggacaggcctgggacatttgctgtttgcttttgaatagaataatacccacaaattacagaaaaaatgtaaatgcagaca

SEQ ID NO: 6302 - DNA, 120 bp, synthetic construct
  source 1..120: mol_type = other DNA
ctgctaggtttcaggacaaggaggagcacaggaagcttgaggagggctcatgagaggtaggaacgctcatgggaggagggaagggattcaagtctgaaagagctgagctgaatcagagct

SEQ ID NO: 6303 - DNA, 120 bp, synthetic construct
  source 1..120: mol_type = other DNA
cgagggcatgtggaggggcggctgcaggggtccaggccacggggatgggcctggaaggccgtgagcctcttccgctcagcacccgtgtccctgtccccaggagcacaatggctcatttaa

SEQ ID NO: 6304 - DNA, 120 bp, synthetic construct
  source 1..120: mol_type = other DNA
gcgggtcccaggtgcgtgcatctgtgtgggccccaggtgcatgtgtgtgtgtgtgggccccaggggcatgcgtgtgtgtgcaggccacaggtgtgtgtgtgtgtgtgcatgtgtgcgggt

SEQ ID NO: 6305 - DNA, 120 bp, synthetic construct
  source 1..120: mol_type = other DNA
ccccatctgtaaaatgggggtgacagtggctgcctggggtctcctgaggattctaaggctaaagagtgggtgtgacctgccctgcatgccgaaggcgcttaataagtgccagttttcttc

SEQ ID NO: 6306 - DNA, 120 bp, synthetic construct
  source 1..120: mol_type = other DNA
cgccgccgccacccatgtactgtggcgctgacccctcctgtaacagctgtggtcttggcctctcgtgttggtggcagatgtcccatttcccagttactttctgttgtccaaaagtttaac

SEQ ID NO: 6307 - DNA, 120 bp, synthetic construct
  source 1..120: mol_type = other DNA
cctccatgggctgaaccaaccctacttagcagataagaggacttcagaaaactcaacacccgcttcagataacaattcttacaggttataaatagaaacagccccccctccatttaaaaa

SEQ ID NO: 6308 - DNA, 120 bp, synthetic construct
  source 1..120: mol_type = other DNA
gaaaagggaggggttcccactaagaagctgaaagcacccccacctcatcaattcattctcctgacctggaagaatttaaacccagtcatgaggatcacactttagaactgaaaacaccct

SEQ ID NO: 6309 - DNA, 120 bp, synthetic construct
  source 1..120: mol_type = other DNA
atccccattagccaccttaaaccgctcaccactccccattatccaccttgaaccactccccactccccattatccacctcgggcctatcccccacccccattatccaccttggactgctc

SEQ ID NO: 6310 - DNA, 120 bp, synthetic construct
  source 1..120: mol_type = other DNA
tgcaaaggatctacagtgacagaaagcaaattagtagttaccaggagacggagggtaaaaattaagaaggggcatgaagaaacttttttattgtagtaatggtctcatgggtctatacgt

SEQ ID NO: 6311 - DNA, 120 bp, synthetic construct
  source 1..120: mol_type = other DNA
gttagactggatactctgagagggcaaggcttctgttggtcttatttaccactatagcctcagtgtccagcatactgcctggtatataaacaccagcgaaagacaataaacaaaacaaca

SEQ ID NO: 6312 - DNA, 120 bp, synthetic construct
  source 1..120: mol_type = other DNA
ctgtcgtgccatttcatcatcatattacccacagtatgagttttcccctctaaagatgataaatttaaacaagaactaccaagggtgacaacttcacaactgagtgtcaaccaaaagcag

SEQ ID NO: 6313 - DNA, 120 bp, synthetic construct
  source 1..120: mol_type = other DNA
tcatttgctctaattctgcaggaagccacattggaagtgcaagaaaatataaatgattaaaaagcagaagtgaaaaaaaaataaccacggattttgccccaaccttctttaggtaatata

SEQ ID NO: 6314 - DNA, 120 bp, synthetic construct
  source 1..120: mol_type = other DNA
atacacactggtgtaaagactgcataaggacaacctaagaactctggtttatgactttgtgaaaagaggattccttatacctgtgtggcccttcttccgaggttttcagggctttcacta

SEQ ID NO: 6315 - DNA, 120 bp, synthetic construct
  source 1..120: mol_type = other DNA
tttagagaaattaggaaatgtgtggccagacatggtggcgctgggatttaaatccaggtctgtttgcctccagagtccatgctcttaagtgttatgctgcaggccagcagaggcaaatat

SEQ ID NO: 6316 - DNA, 120 bp, synthetic construct
  source 1..120: mol_type = other DNA
cttgagagacagtgtttgtttacctatggcatggtatcccatcaggagacacataatacttttctgtggtaagattcaggtgttgtcagcctgatacactcaaaatttgttaccagcttg

SEQ ID NO: 6317 - DNA, 120 bp, synthetic construct
  source 1..120: mol_type = other DNA
gatatgaggggaaaagccgtcatccattgaagtagaaatggatagcatgtttgggtaatattgagtagttttggctcaggcatatatgttccttgaaggagaagctgcacataaggctag

SEQ ID NO: 6318 - DNA, 120 bp, synthetic construct
  source 1..120: mol_type = other DNA
caggcgtgagccaccgcgcccggcccttctgtgttttttatttgacttttcttctcataatccttgctgctttccatcttggaagctttttgcttgtgactaaatctttacattttcttc

SEQ ID NO: 6319 - DNA, 120 bp, synthetic construct
  source 1..120: mol_type = other DNA
ggtctttcagaccccatgaggaaagggttttgcattttgatttaatggatagctgctgcagcttatatttatgcactggtgatgacagcgcattccttttttttaaaaagaaaagattta

SEQ ID NO: 6320 - DNA, 120 bp, synthetic construct
  source 1..120: mol_type = other DNA
aatcttgctttcgtctactctctcaagctgctcttcctttcctctgccttctttccaataaatgtgccttatacctgaggagctttctgcgttcacatttatcatcgtggcaaatgagat

SEQ ID NO: 6321 - DNA, 120 bp, synthetic construct
  source 1..120: mol_type = other DNA
ctacctacctacctatctcagttttctagtgcctccactttaatttacggaaatgggaagaacatttggagaaagcacagattctgtattttgaaatgcaatgtgaaaaaaatcatcatg

SEQ ID NO: 6322 - DNA, 120 bp, synthetic construct
  source 1..120: mol_type = other DNA
cctcattcctattacatgggagtatggtctcaaataacagtagcagcacataatttctgttctaatttctgggaaaactaggttaaagcatttgaaatcaggcatagcagcagaaagctg

SEQ ID NO: 6323 - DNA, 120 bp, synthetic construct
  source 1..120: mol_type = other DNA
tgacccaagtaaagaaacaatacaacttagcttttgttttcagaaatgcagaagtagaactcacttataggtcaagtatagcatgaaagaacaaaaatctgcaatatctaaaagtccact

SEQ ID NO: 6324 - DNA, 120 bp, synthetic construct
  source 1..120: mol_type = other DNA
ataaacctcctaaaatgagacctgcctggatcattttccttgattgacatatgcacacaaacacgcacacaaacacacattcatacatattttctagctgtaattactgcccctgcagat

SEQ ID NO: 6325 - DNA, 120 bp, synthetic construct
  source 1..120: mol_type = other DNA
tgaggaattaactatgtctgtggcataaaactgaaaaaaaccgagatcagatacatagtctctgtgagtgagttccaagggctgaccaaaggaacaaaaattggaaggaagggaggggag

SEQ ID NO: 6326 - DNA, 120 bp, synthetic construct
  source 1..120: mol_type = other DNA
tttatagcaataaagcagaacctatgagttctggtaaatgtcagggcagtcatgtccattacatatgtggataggtatgaagctgagtctccgtaggcccttcaaaaattgcacacagcc

SEQ ID NO: 6327 - DNA, 120 bp, synthetic construct
  source 1..120: mol_type = other DNA
gtactaaatataaaagctaaaacaataaaacccttagaagaaaatataggagtgaattttgttgaccttggattaggcaatggtatcttagatatgacacaaaaagcatatactacccaa

SEQ ID NO: 6328 - DNA, 120 bp, synthetic construct
  source 1..120: mol_type = other DNA
agccgagctcatctccgtgattccagaagtgaatgctgcaggttgtttaataacctggcaaattcacagtagcttgtcaaattattacaggaacagtgtcatcactaaacaagcctgatc

SEQ ID NO: 6329 - DNA, 120 bp, synthetic construct
  source 1..120: mol_type = other DNA
caaacatttcacaactgagaaaaccctctaagttgcgattatcactgccatacggaggtccactatttatttagctctcacatgcaggaaaactgtctggcactcttgctgcttgattaa

SEQ ID NO: 6330 - DNA, 120 bp, synthetic construct
  source 1..120: mol_type = other DNA
ccacaagtaaatcatgatccagttaggatcatttattccttgataaagacagaaaaatgaaaagaccataaagatacacctgagaatctacggagcagcatgtgcggtagatgtgtaaac

SEQ ID NO: 6331 - DNA, 120 bp, synthetic construct
  source 1..120: mol_type = other DNA
ttgtgagaacatagcacagtttacttgtccattttctccactgatgagcatttaggtgtttgcattttctagatattttgaatagcacagtttttttttttaattttttttttattatac

SEQ ID NO: 6332 - DNA, 120 bp, synthetic construct
  source 1..120: mol_type = other DNA
tcattaaccactacatgtagaaatatatttatataattatctcccaagtcataaagttgtttgaggactattgctgaagaatacggatgtacctgcttaaagggagaccagatattctag

SEQ ID NO: 6333 - DNA, 120 bp, synthetic construct
  source 1..120: mol_type = other DNA
tgtacggggtacagtcttctcacttccttcaactctttttttctcactctccaccacccccacccccattcattcaactcaactcagctaagaattaggaaaacaaaactacctaaacta

SEQ ID NO: 6334 - DNA, 120 bp, synthetic construct
  source 1..120: mol_type = other DNA
ctgttgagtcaggttctatctcccttttactgatgagaacgctgaggtacacagaaatagaaacttcactgtgaaatggtttaacatgacacagttagggagcagaaaggctgggatttg

SEQ ID NO: 6335 - DNA, 120 bp, synthetic construct
  source 1..120: mol_type = other DNA
actctactctctacactcctctgtattcagagatgaggcctctaatgaagtgattaaggttaaatgaggtaataagggtggggccctgatccaataggatcataagatataccagaaggc

SEQ ID NO: 6336 - DNA, 120 bp, synthetic construct
  source 1..120: mol_type = other DNA
tgctggatcatctcatggaggacagagatggcttgagccttctggaactggtggccatcaaactcctcctcggggaatccgaaatcatgtctgtccttcaggcaggagaaatgagagatt

SEQ ID NO: 6337 - DNA, 120 bp, synthetic construct
  source 1..120: mol_type = other DNA
cacatctcccatcctctttgagcctgcttatgctcaggctcttggaattttaataagattagaaattgctacctccttattctggctaagaactccaaagatgatccaggcatcttgtac

SEQ ID NO: 6338 - DNA, 120 bp, synthetic construct
  source 1..120: mol_type = other DNA
tttcacacttccactcaagaaaagtaaggccactttgaacttctgttccacacttaaataacaaaggtactttagacaagtcataacttggaggctcaagttcttcatttgtaagatgtg

SEQ ID NO: 6339 - DNA, 120 bp, synthetic construct
  source 1..120: mol_type = other DNA
gatggttaccaggggctggggggtagaacaaatggggggatattggtcaaagggtacaaactttcagttacgaaatgaataatttcaggagatctaacatacagcatggttactatagtt

SEQ ID NO: 6340 - DNA, 120 bp, synthetic construct
  source 1..120: mol_type = other DNA
cctgaatgtcctccagtttttcatttgcaagttcataggtttattcaaaaattttgatgttgcctatcctgtactacaattctcaggttcacagtatactctttaaatatgtgttcttgg

SEQ ID NO: 6341 - DNA, 120 bp, synthetic construct
  source 1..120: mol_type = other DNA
taaataggcagatgtaacttataaataggttacaaaaaccacttctatgatcagtatgccaaaaatatgtttatataaaataatggttgctgagtcatcagaacagtccatattctagaa

SEQ ID NO: 6342 - DNA, 120 bp, synthetic construct
  source 1..120: mol_type = other DNA
caggatgctcaaacccaaaccccaaacccttatcaaagcacccacaaaaggggggctcacccctagaaccataattccctttagtcttaagaatataagattttccctacctcgttatac

SEQ ID NO: 6343 - DNA, 120 bp, synthetic construct
  source 1..120: mol_type = other DNA
actggactgaggctataaagttgctttcagagagaactgagctccttgaagagcccaacagggattctgggtgaagtgagcacagaagagacagtttttgtttgtttgtttttttgtttt

SEQ ID NO: 6344 - DNA, 120 bp, synthetic construct
  source 1..120: mol_type = other DNA
aagaattcaccaccacagaagcaggcagaggaagcaggcagaggaaacaggcaggatgaatggagagtggagaggcaggagtggaccctcctagtaacggctggtatttactgaaggttt

SEQ ID NO: 6345 - DNA, 120 bp, synthetic construct
  source 1..120: mol_type = other DNA
ccctgaaaactcatttcacccgtgtacctcacccaaaaattcccctttgtactcctatctttatctctaactgacagcatgaaggtagcccgaagtcccctcaccctgtctgtcctcctg

SEQ ID NO: 6346 - DNA, 120 bp, synthetic construct
  source 1..120: mol_type = other DNA
ggtacttgagtggattagaggttcccgtgaaattgccatctgaccctatcagccaagtgattcatgcaaaacaaaatcctctgggcatccctactgcccttcctctgtgagctgcagact

SEQ ID NO: 6347 - DNA, 120 bp, synthetic construct
  source 1..120: mol_type = other DNA
acctccctctagtagatcttgttcctcctctaccccgacctgcccacctccctctagtagatcttgttcctcctctaccccgacttgcccacctacgcctggttatgcattaaagtttac

SEQ ID NO: 6348 - DNA, 120 bp, synthetic construct
  source 1..120: mol_type = other DNA
tctcgcttgagcctgggatgtcaaggctacattgagccatgactgtaccgctgcactccagactgggtgacacactgagaccctgtttcaaaatatatatatatatatatatatatatat

SEQ ID NO: 6349 - DNA, 120 bp, synthetic construct
  source 1..120: mol_type = other DNA
actacacaggcatatttcactttactgcgctttgctttactgcatgccacagatacgacctttttaaaacaaaaacaaaaaattgaaggtgtgtggccaccccatattgagcaaatctat

SEQ ID NO: 6350 - DNA, 120 bp, synthetic construct
  source 1..120: mol_type = other DNA
tattaataggtaagcagctgcattttctccttgtgttgctcaggggtctaagatgtgggaacaagaatttctgggctttctgaatggtggctacgtttacccatcttggagatgagctaa

SEQ ID NO: 6351 - DNA, 120 bp, synthetic construct
  source 1..120: mol_type = other DNA
atctacctgactgtgtgtgtgagtgagagaaagaaggaagcaagccatcgagcagccattaattattgtgaacaagatgagaggtgggggcgggatcctggtgatggcttgatggcccga

SEQ ID NO: 6352 - DNA, 120 bp, synthetic construct
  source 1..120: mol_type = other DNA
ttcagagctgccagtttccaggcggatttgaattacaaaagaagaagctggcatgaaaattgaaaggttttatcggctggtctgaagcctcatagcacattgcttatttatgcagtccat

SEQ ID NO: 6353 - DNA, 120 bp, synthetic construct
  source 1..120: mol_type = other DNA
ctattgtattctcactgacttcaaggatttcagtgtttaaaactgacatcctgataatgccaaagctctataaacttaataggcatactgagatagtccctaatacaactgcaactgaaa

SEQ ID NO: 6354 - DNA, 120 bp, synthetic construct
  source 1..120: mol_type = other DNA
tgagtgtagtgctttgactatagtagttgatcaatgtggtgagcagaaaaggtagcttccctacattacagctagtagtggtgtttgctggacttcagcaggtctttgtaaattcaaagc

SEQ ID NO: 6355 - DNA, 120 bp, synthetic construct
  source 1..120: mol_type = other DNA
tcattagaaacaggcagtctccttgtctaaaaatagcaaaagtgggagagtggggaagagcagcagccatgctcagggctgaaagtgagaaaggcagaaacaagcagatctctgaaagcc

SEQ ID NO: 6356 - DNA, 120 bp, synthetic construct
  source 1..120: mol_type = other DNA
tgatacaaatattttagtatagtacatgtcttttggtgaacctgggtacacatttctgttgtgtataccccttaagagtggagctgatgatcctggctaacaaggtgaaaccccgtctct

SEQ ID NO: 6357 - DNA, 120 bp, synthetic construct
  source 1..120: mol_type = other DNA
gggtatgggagactcagtcggccacactgcactagatttaatgaaagaggagagagagttgcattgggttgtctctcctccttcagaaacaaaattcctacctttgatgacatgcatgat

SEQ ID NO: 6358 - DNA, 120 bp, synthetic construct
  source 1..120: mol_type = other DNA
atatcctaacactcatgggaacgcctctcagagaatcactacctaaatcccaatattggccattcactgacaacacattgccccaacctcctgtctgtttggaaacccaggcccaattac

SEQ ID NO: 6359 - DNA, 120 bp, synthetic construct
  source 1..120: mol_type = other DNA
aaatggactaaagtctccaatcaaaagacatagagtcactcaatggataaaaaaaacaagatcgaatgatctgttgcctacaagaaacagacttcacctataaagacacacacagactaa

SEQ ID NO: 6360 - DNA, 120 bp, synthetic construct
  source 1..120: mol_type = other DNA
gtagcatgttcacaaggaaggagctggctagctttcatgggagccacatcatccatcaaatcacattagtgttgttgatttgaatgttgtttcctttgtaggtctgcttgctttgacttt

SEQ ID NO: 6361 - DNA, 120 bp, synthetic construct
  source 1..120: mol_type = other DNA
catagatcaccactgtgtgtcaagcaccactgtaaaaaaatttttgttgcctcacttaatcctcacaacctccctctgaggcagggactgttataatcgtcatctgacagataagaatgc

SEQ ID NO: 6362 - DNA, 120 bp, synthetic construct
  source 1..120: mol_type = other DNA
agcagaatgaatcaaatgaacttaattgtaccctggtaattggcctaaccacacagagaggaaatattccaagtttaaaactcagcaatttgactgaacatccatagtagaatatggata

SEQ ID NO: 6363 - DNA, 120 bp, synthetic construct
  source 1..120: mol_type = other DNA
tctgcttttttctttagggaaaaatttctcaactaggtttatttgattaagtcagtaagtttagataaaaccatatgacctagaaaactgtcactgtacctatgtggtttttctttactg

SEQ ID NO: 6364 - DNA, 120 bp, synthetic construct
  source 1..120: mol_type = other DNA
accccctccctccatcccccatggctgcctgtatctccaaaagattcatcagttgaatatcatcccttttctcaatcctcttggaaatgattttttaaaattcccttgcacattatttcc

SEQ ID NO: 6365 - DNA, 120 bp, synthetic construct
  source 1..120: mol_type = other DNA
tacaatccccaatgtgatgattcagcaatttaatggatcttaaatttggcagtagtcctctagcacacatctctggagaaataaacgaatacaggtgaggactctggcgggtctgtaact

SEQ ID NO: 6366 - DNA, 120 bp, synthetic construct
  source 1..120: mol_type = other DNA
ctttctctggattcttttagctcttacttataccagatgctgttgtgactgttgaaactggtttaactgcttatatgcacagattagatttgatttaagttgggtctggaaagtagaaag

SEQ ID NO: 6367 - DNA, 120 bp, synthetic construct
  source 1..120: mol_type = other DNA
tatatgtgtgcggtgtgtgtgtttgtgtttgtgtgtgtgtctgtgtggtacatgtaccccttagggcagggatctgctgtggtctgaaagtttgtgtctctccaaaatccatacgttgaa

SEQ ID NO: 6368 - DNA, 120 bp, synthetic construct
  source 1..120: mol_type = other DNA
cctcttgtttaggcttcatagagccaagttatgggtgctggctccaggcagcccctaaaagtgggtgagctttctgctggccttgcctcctcagatcccattaagaaagccagagatcat

SEQ ID NO: 6369 - DNA, 120 bp, synthetic construct
  source 1..120: mol_type = other DNA
aatctagaatggagtcaccagaagatgacttcagaggtgggattcttatgtcagaccaaacatactccggtaatatttagatactaacaaagtaaagatttccggccaggcacagtggct

SEQ ID NO: 6370 - DNA, 120 bp, synthetic construct
  source 1..120: mol_type = other DNA
ttttcttaggctacttcaagatgaacttccttaatctccatagtgtaaatgattcctgccaggtattgggtccttaggcaaatgctttgtaacatattcacaaaacaacctaacagcctt

SEQ ID NO: 6371 - DNA, 120 bp, synthetic construct
  source 1..120: mol_type = other DNA
aggagccacaaataaaagtgaattatccaatatagagtaagtccttatcatcaataggttcttggaaactgtgactttaagagaaacaatacataacgaaacaaattttttttcttatta

SEQ ID NO: 6372 - DNA, 120 bp, synthetic construct
  source 1..120: mol_type = other DNA
ttagtctgcatttaaattttcccagttgtcttaaatgtgtgtgtgtgtgtgtctgtgtgttttttcttttgatacagggtctcagttgcccaagccgaagtgcagtggctcgatcatggc

SEQ ID NO: 6373 - DNA, 120 bp, synthetic construct
  source 1..120: mol_type = other DNA
agtgctggctttatttagttccatacttttcaataggcaccagcctttctaaggctcttttcacatcctgtttcccctccttaggttttgaaagcaggaggagaaattaactggtgggaa

SEQ ID NO: 6374 - DNA, 120 bp, synthetic construct
  source 1..120: mol_type = other DNA
tatctatgtgtcagaacacacttcccacataacacatacgcccatgatcgttcacacttggtcaagtccactctgtaaaccaggaaatttccttcaaaaaatcaggaaattccctctcag

SEQ ID NO: 6375 - DNA, 120 bp, synthetic construct
  source 1..120: mol_type = other DNA
actcaccattggttttcagccccacttcacagagacaagacacttggagagaaagataaccatcccacagcaaagctgccctaccttaagttgacatgatcttaaatctcctaaaaatgt

SEQ ID NO: 6376 - DNA, 120 bp, synthetic construct
  source 1..120: mol_type = other DNA
ttggtcttgtttaacctaaatttctggaagataagcagggttagtggctagattggtaggaggaagatggagaggatgctaagtgaggggaggagtagtatggactttgttctaggactg

SEQ ID NO: 6377 - DNA, 120 bp, synthetic construct
  source 1..120: mol_type = other DNA
attaattttaacgagagggaagagttctagaattttagaagttgaaggaatgtagagatctgagattttacattggttgttggggaggttgtcctggcaggttgggtatctggggcagag

SEQ ID NO: 6378 - DNA, 120 bp, synthetic construct
  source 1..120: mol_type = other DNA
acttagcactctatgggtagagcaagaaatagtattcctaattgttccctcccataccttgaaatattattgttattcacttactcataaactgtagtcatgaagtagtcatgaagtaca

SEQ ID NO: 6379 - DNA, 120 bp, synthetic construct
  source 1..120: mol_type = other DNA
ataatttttaaatgtttaaaaataaagcaaggaaagcagctaccaaaaggagccatacgtgcttttctaagcatggtgacgagcatgcaccaaactgaatcctggctccaggattgccgt

SEQ ID NO: 6380 - DNA, 120 bp, synthetic construct
  source 1..120: mol_type = other DNA
ttctcccttctccctcttcatggtcacggccaaggcccacctcctgccctctggctcatctccaatgcctgtcctgcatacatacactcacctgacgatatcatttctaggtctgccaca

SEQ ID NO: 6381 - DNA, 120 bp, synthetic construct
  source 1..120: mol_type = other DNA
agtactgagtaaataacatttggcccaagaccagtgagtcatgctgaaactgccaaaagtaagcaaagtgagtgtgcccctcagaagtgtcctcatccagtccattgaaaaagaaaaact

SEQ ID NO: 6382 - DNA, 120 bp, synthetic construct
  source 1..120: mol_type = other DNA
tgtttattttataaggcttttttgggtgaggaaaaaggtaaaagtagaaatgaaatgggttaccttctaccttttccagcttggccagggtcagtcctattgcattgggacgatgagggc

SEQ ID NO: 6383 - DNA, 120 bp, synthetic construct
  source 1..120: mol_type = other DNA
ccaaacaaatgcaccgtctctgtagataagtacttgggaagccaagtaatgattggaagattgcttagtggtatggaatttgggagctaattggataatcttcaatagacctgccacagg

SEQ ID NO: 6384 - DNA, 120 bp, synthetic construct
  source 1..120: mol_type = other DNA
ttgggacagctaatgggatcaatattctaaaccatatactttgggtggatattggcttttaggataaagtctgtacttctcaaggtcacatttaaggtcctcccaggacctggtccaagg

SEQ ID NO: 6385 - DNA, 120 bp, synthetic construct
  source 1..120: mol_type = other DNA
ctggggcttctggtcccaactctgtgacctaaggcaagtcactccccttcttgccaatgatctcttctataaactgacagctttagtttaggcctggcctgacttttcttttaaaaaata

SEQ ID NO: 6386 - DNA, 120 bp, synthetic construct
  source 1..120: mol_type = other DNA
agatgtaaacacagctctaagtctattgctgcttctgtttgtgccacactgcttttgctttgtatgcccagaaatccagaaatactattttcctgaagcattaggggttgagtctcactc

SEQ ID NO: 6387 - DNA, 120 bp, synthetic construct
  source 1..120: mol_type = other DNA
tgttggcataatgacaatgtaattattaggataagaagaccacagaccacaaaggccggaagctggtcaagtgaactcattacatcagtgcacacaattttaataccattggacagacaa

SEQ ID NO: 6388 - DNA, 120 bp, synthetic construct
  source 1..120: mol_type = other DNA
attaaccagttaatgaatattattgctctcaccctccaacttggagaaccccccacccccgaggttttagtagtgcctttaccacttaaaaaggaagaagcagaaaggtggatatagcaa

SEQ ID NO: 6389 - DNA, 120 bp, synthetic construct
  source 1..120: mol_type = other DNA
gagcccatggcttattttcatcacttttcaatctaatttcctgagcttaccctcctgacatgatggtttagctgcttgcactatgaacaagtgtcatggtagcttttcccaaaggtgatt

SEQ ID NO: 6390 - DNA, 120 bp, synthetic construct
  source 1..120: mol_type = other DNA
agcaaagccttgatgattttcctatggtttcttgaattggagaacattcaggaagggaaagaatataccattccccccaccctgccaatttccactaattgtcgtgtactgtgtgtctga

SEQ ID NO: 6391 - DNA, 120 bp, synthetic construct
  source 1..120: mol_type = other DNA
ttactttcaagcatgtatcaatgaatatgtatcataatccccaggaaaaagaaaaataaaaaaggaaaagaccaaagaaagaagagagagcataaagaaaagtggacagaaaagagggaa

SEQ ID NO: 6392 - DNA, 120 bp, synthetic construct
  source 1..120: mol_type = other DNA
accttgtcacatagttttgttgtaagtacagttgacccttgaacaacatgaatttgaactgtgtgaatccacttatgtgcagattttcttctgcctctgccacccctgagatagcaagac

SEQ ID NO: 6393 - DNA, 120 bp, synthetic construct
  source 1..120: mol_type = other DNA
attatgtgttaaatgattaccttgtgcatggtccatggcaaaacttcagctgatttttctgcctcttttggaacctgtcagcataaacagagtaaaccacattccacacacatgtagggc

SEQ ID NO: 6394 - DNA, 120 bp, synthetic construct
  source 1..120: mol_type = other DNA
gagaaaacactcatttaagattgttccagagttgacatttttttcagatggttatgtgggaaaggcaaaggactgggttgcataacaacagctcattctcaggtttccctccacctgctt

SEQ ID NO: 6395 - DNA, 120 bp, synthetic construct
  source 1..120: mol_type = other DNA
gccaatatcctacaaaccactagatggagcgcagatgtacagtggagggtgggcacagtgggaaaagactacacagaaggtaaaacattggggatctacatagtaattccaaataaaata

SEQ ID NO: 6396 - DNA, 120 bp, synthetic construct
  source 1..120: mol_type = other DNA
tagccccagggaatggcatttgcaaagacctggtggcctgaaatacttcagggcgcattctggggccggcgattgcagtgcgagctctagggtgttgctcgcagtaagatgagtactcta

SEQ ID NO: 6397 - DNA, 120 bp, synthetic construct
  source 1..120: mol_type = other DNA
ccccccaccctctctctcagccttcttttctcctttctgtctttcatctgttgtctccatcatctgagcagatgacataccaagaccccattcccaggcctggtaggtagaggctatctc

SEQ ID NO: 6398 - DNA, 120 bp, synthetic construct
  source 1..120: mol_type = other DNA
gaacaagtctggtcccatcttctgttagctttgtgacttttcaaattattttaactctccgaaccttagttttctcctctgtaaaatgagactattctgcctgccctcccatggctgttg

SEQ ID NO: 6399 - DNA, 120 bp, synthetic construct
  source 1..120: mol_type = other DNA
ttattttgcaagttcaatgctttgttcgagatcacaaacaagaactcagatctgactccaaggcttatgttttcttttctatatgactgctttttccctttaatcctttctcaccagtgg

SEQ ID NO: 6400 - DNA, 120 bp, synthetic construct
  source 1..120: mol_type = other DNA
tgggatcagcagaatgggccaagcttaggaattccaagaaggcagactcaagatagagggctgccaaagctcacagatgtggaatgaaaccagtttcaaaacctgattcttcgctcagtt

SEQ ID NO: 6401 - DNA, 120 bp, synthetic construct
  source 1..120: mol_type = other DNA
caataggggcagtgttctttaaatatgcactggacatataaatgaatctagtttattacctaccatacttgaagaaagattttagtaagcactgatgatcatggagctaactgctatagc

SEQ ID NO: 6402 - DNA, 120 bp, synthetic construct
  source 1..120: mol_type = other DNA
agctcaaaatggacaggaactgcaaaaaccataagctcaatgagctggtttcttattgttctaaaggtaatgggacaggtgctcatctccataacctaggagattggttttaagaccctt

SEQ ID NO: 6403 - DNA, 120 bp, synthetic construct
  source 1..120: mol_type = other DNA
gtgctcttctaacctaaaatttgatatttgggggatgaaatttgtgagttctcatgtaatagagttgactgtaggaattaatctcaaactggtattatttaaaacagtacctccttatct

SEQ ID NO: 6404 - DNA, 120 bp, synthetic construct
  source 1..120: mol_type = other DNA
tcatttactggatgtttacattttaggaaggaaaatagttttgtttatttaaacaactgaatacttataaactgttgttcctggaagttatttattccataaaaaatttgttcttttgtc

SEQ ID NO: 6405 - DNA, 120 bp, synthetic construct
  source 1..120: mol_type = other DNA
ctccccaccccccaccccccaaaaaaataggattgtcccgaaggttgatatacctatgggtggtgtgtgtatgcatgcatgtatatatacacacatatacgtaacatacaaatatgtata

SEQ ID NO: 6406 - DNA, 120 bp, synthetic construct
  source 1..120: mol_type = other DNA
aagacattatttattccttgtgcttctcccagtatatctaacacaattcttctgaaacaaaataaatatcctgacagattgctgagtcatggctcatgccatgctttaatgctgagcttt

SEQ ID NO: 6407 - DNA, 120 bp, synthetic construct
  source 1..120: mol_type = other DNA
aaacggatgataggattaatataaaacctaatattgtaaaatttctggaataaaacgttggagaaaatctttgtgaccttggattatgcaatgatttcttagagatgacaccagcaaaat

SEQ ID NO: 6408 - DNA, 120 bp, synthetic construct
  source 1..120: mol_type = other DNA
tctggacaaacctcttgaaggctgtagaccttggacagctcttagaaccaccgggatagtgaatgttctagaatgggaaagacgtggtgggtagtgaagtgagaatcccaattgtaaact

SEQ ID NO: 6409 - DNA, 120 bp, synthetic construct
  source 1..120: mol_type = other DNA
acaaagcctccatttctgatctccttccaaactccgacactcggtgactgccacagacgcctccccatcattgtctctgcagatccctcctaatactgatatcctaaagccaaatcatta

SEQ ID NO: 6410 - DNA, 120 bp, synthetic construct
  source 1..120: mol_type = other DNA
aaaaagagctagggaacatcctaactttaataaaggtacaggaaatcagacattctcataccctgatagtaagaaaacgaatggatatactctctttggatagtaatcctgtgaaaagcc

SEQ ID NO: 6411 - DNA, 120 bp, synthetic construct
  source 1..120: mol_type = other DNA
tacaagggcagggatctttgttgagtggcacatggtagacactcaataaatacttattgaatagatgggttaagtgaaagtggcagggatcaactagagtgtcctgtgcttagggtcttt

SEQ ID NO: 6412 - DNA, 120 bp, synthetic construct
  source 1..120: mol_type = other DNA
gagtacatagtggcttttcagttatcatgacttttcccatcttggagtcgtgtcccaaaccttgacctcatggctaaggagaacaagtgtggttctgtgccattttccttttcttagaaa

SEQ ID NO: 6413 - DNA, 120 bp, synthetic construct
  source 1..120: mol_type = other DNA
gctttcctgtaagtagcaccagttcttgaaattctctacatggggcttttgatgggggtggggggcgggtgcggtgctgataataaccacttttaccaagttcctgtccttctgtggaaa

SEQ ID NO: 6414 - DNA, 120 bp, synthetic construct
  source 1..120: mol_type = other DNA
tctactccaggcctccccaccccaattagcctccaccccaagccaacaggggccttggtgacacatccacagccatgagtcccactaacctggagctgatggaccagctcagtggcttgc

SEQ ID NO: 6415 - DNA, 120 bp, synthetic construct
  source 1..120: mol_type = other DNA
gagagcgagagtgaaagagataacagaggtattatctcacagggtagttctgattattaaattagtcaatatatatataaaaggtttagcacctggaacctaggtaagagataccaaaaa

SEQ ID NO: 6416 - DNA, 120 bp, synthetic construct
  source 1..120: mol_type = other DNA
atgattgcaaagaagggaatcaggaagagacatagtctttgcattggcacaaaacgcagatttttggggtcccatatccaggacaaatctatttccaagctaagcatgttgtgctgcttt

SEQ ID NO: 6417 - DNA, 120 bp, synthetic construct
  source 1..120: mol_type = other DNA
caaagtggccagttgttttcacttaatttaaggcattggagattcagtcttttctatttgtgacagttctcagctgtggacagaggcaatggaagtgtctctaactacttgggagactga

SEQ ID NO: 6418 - DNA, 120 bp, synthetic construct
  source 1..120: mol_type = other DNA
aactgtcctcttatgctatacaatatgcacatctgataagcagacaagattgaaaagtccctttctaataaatctctcatgagctcctccagctctttgcaggtcattcttgagggccta

SEQ ID NO: 6419 - DNA, 120 bp, synthetic construct
  source 1..120: mol_type = other DNA
ccatcaccaccaccaacattccaaccatcaccataatcagaattataaccactcccaccactacaatcacagccaccactacaaccccaggtactgccaaaccacatttattgtgtgctg

SEQ ID NO: 6420 - DNA, 120 bp, synthetic construct
  source 1..120: mol_type = other DNA
gcgtgtgtgtgtgtgtgtgtgtgtgttttgcgtgttggggtactggttagggtggcagtgacttaaagcttaaatatcttgattaaaaaaaagaagcttggctgtctggtcatatgatgc

SEQ ID NO: 6421 - DNA, 120 bp, synthetic construct
  source 1..120: mol_type = other DNA
taacatttgagaaggcaaacaaatgggggtagtgacaataaaccagcagttcaaacacagaagagcctatgatggacaaggggaatattcaaagcattccagagcagtgagcatatcatg

SEQ ID NO: 6422 - DNA, 120 bp, synthetic construct
  source 1..120: mol_type = other DNA
tcatttcttgttagctcgtgactccttactatgagagctgtcatgcaaaggaaaaggccctgttatggggccctgttttcttataacaagatattataacagtggggatgactcaacaag

SEQ ID NO: 6423 - DNA, 120 bp, synthetic construct
  source 1..120: mol_type = other DNA
ttgaagagatagctgagctggagtgaccactggggctggagtctagggtgccagcatttgttcgtagatttgtccatctcttcttaaatgggggtctttcagattcctgcttaaaacggc

SEQ ID NO: 6424 - DNA, 120 bp, synthetic construct
  source 1..120: mol_type = other DNA
aaaaaagacttaccaatattaagtccagtaccatgctatacaggtttgtatcctaggagcgataggctataccgtatagcctggatgtgtaggagcctataccatctaggcttgtgtaag

SEQ ID NO: 6425 - DNA, 120 bp, synthetic construct
  source 1..120: mol_type = other DNA
accttgtgaataggcatattacatagagattttcaagcatttttagatattggttatttatacatttttggctaccataaaatctctacagtgaacatatttgcaccaccaagatgtttg

SEQ ID NO: 6426 - DNA, 120 bp, synthetic construct
  source 1..120: mol_type = other DNA
ttttaaaccggttatttccctgactggttgagttttaagaacataacagaatggtcttgttccctcctacactaggatctcttgctggctcatgagtctggcaggtgttcagaaaccatt

SEQ ID NO: 6427 - DNA, 120 bp, synthetic construct
  source 1..120: mol_type = other DNA
ttctgactctgcactggtttccccagctctggcagctggtcaacagggtcacctggctggaatgatccccacccccaacttctgcccacaaaagcaggagtgtgggtagggtgaaggagc

SEQ ID NO: 6428 - DNA, 120 bp, synthetic construct
  source 1..120: mol_type = other DNA
tactcctacggtcacaccctaaactctaccactaccaataattgaaatccccttagtaattgcaaatttcaagcatctcagtctccaaccatgatccaccttctctctttccattcaacc

SEQ ID NO: 6429 - DNA, 120 bp, synthetic construct
  source 1..120: mol_type = other DNA
tgcagctaggactccctgagtctcagtttcctcatctgtcaaatggatacactgtctgccttccagggttgttttgtgagcacacaggctggcactatccctgaaggatctggcccagca

SEQ ID NO: 6430 - DNA, 120 bp, synthetic construct
  source 1..120: mol_type = other DNA
ttttcgttaatcccctctgcctccacaacactccccactccccactcctccctctctctggcaggcatgcccctcgcagactgtgactataatgccagccaccaagacaataccttaatc

SEQ ID NO: 6431 - DNA, 120 bp, synthetic construct
  source 1..120: mol_type = other DNA
ttttggaggaaaagatgaataaggagctattagtctaacttctgctaccaagactgaagcagacgccttgattttcaaggtgagtccaactaacaatccttgatgcacccataagcctga

SEQ ID NO: 6432 - DNA, 120 bp, synthetic construct
  source 1..120: mol_type = other DNA
aaatgagtgagctggaagagtcaccccataagtttacagatgagagcaatgaggccctgagggaggcagtgaagtttccaaatcaccctgcaggttggtggttttaaaaaaaaaaaaaaa

SEQ ID NO: 6433 - DNA, 120 bp, synthetic construct
  source 1..120: mol_type = other DNA
agaaaggtaagaagaaagaaagaaaagaaacaaggaaaggaaagaagaaggaaaagaaaaaggaaaggaaaggggaaaaaggaaaggaaaggagaggagagggagaaggggagggggagg

SEQ ID NO: 6434 - DNA, 120 bp, synthetic construct
  source 1..120: mol_type = other DNA
ggaggccataaagtcctgtcctggagggacataaaggggaatccaggcctcccctggctgcatagctattcacatataaatctagaatctaaggggttcagaattttttttttttttttt

SEQ ID NO: 6435 - DNA, 120 bp, synthetic construct
  source 1..120: mol_type = other DNA
cggctaaaggctttggtgcattgcagcgttttctcccagcagctgtgtgaaagatgcattttctaagctaaggagaattttctcaagagtggcatactcatgccaaatattattgctctg

SEQ ID NO: 6436 - DNA, 120 bp, synthetic construct
  source 1..120: mol_type = other DNA
tgggtgaatgggtggatggttgggtggatggatgaatggagaaatgaatggatgattggttgaatggagggatagttgggtaggtagatgaatggatggttggatagttggatggttggg

SEQ ID NO: 6437 - DNA, 120 bp, synthetic construct
  source 1..120: mol_type = other DNA
ttatgcctgtgaagtaatattcaggctcctttgtgccttcagtaactccttcactgccaagatggtcaatgaaaatttcagccactaagacaaatcactctagccaagtatcagacagga

SEQ ID NO: 6438 - DNA, 120 bp, synthetic construct
  source 1..120: mol_type = other DNA
tgttatacctggaaccactgtttccagcaggctaacactaaaacactgaggcatgtgcaaggaaataaaagggtgaaaaaagcatgaaatggttgaacccttttgaagtcacactcttcc

SEQ ID NO: 6439 - DNA, 120 bp, synthetic construct
  source 1..120: mol_type = other DNA
aggaaaagtttctgggagttccttccccaagacgatgagctgcttcctgcgagtgacctggctctgttcgtaatctcagatgatacctagctagtttttattgctctttaaaaaaatata

SEQ ID NO: 6440 - DNA, 120 bp, synthetic construct
  source 1..120: mol_type = other DNA
tgacgcaaatgtcagattttgtcctgacgttaataatgcactctaaccaagtgagctaactaggtacagaatatacaattttatatgtattttgaggggaatattctattctcagctgaa

SEQ ID NO: 6441 - DNA, 120 bp, synthetic construct
  source 1..120: mol_type = other DNA
tcccaggatagagtgggtgaacatttcaccattgtgttgctttagacataaatttcctggttattcttccaggcaaagacggtcaacagatattgcacagaacagccagttggataaagt

SEQ ID NO: 6442 - DNA, 120 bp, synthetic construct
  source 1..120: mol_type = other DNA
gatcacctcattctgtggccaccgcagacacccaggaccagacccgctcactgccctgcacctacacagatcattgcgtctgacggctcctactccacacacttgaactccaccccgcgg

SEQ ID NO: 6443 - DNA, 120 bp, synthetic construct
  source 1..120: mol_type = other DNA
catatggtatgcctgtataatttgggggggttgtatgcatatgcatatatttgggggtgcaggtctcgtttccttagtaaatacagtagaggctacttaggtttgtggagcatggtgtgc

SEQ ID NO: 6444 - DNA, 120 bp, synthetic construct
  source 1..120: mol_type = other DNA
ccccatgtcgtcctctacctgtgttgagtggggttcagtgggaggcagatccacctttgatccacaagcatgtaaagacacatgtcattactgaggttccaaaggtgctggttggaaagg

SEQ ID NO: 6445 - DNA, 120 bp, synthetic construct
  source 1..120: mol_type = other DNA
cctgggtggggatagagacagggggagtcctgggtggggatagagacagggggagctccgtggggcagactcaccacaggacactgaggcttgtgcccgccaacaggcagaaccccagac

SEQ ID NO: 6446 - DNA, 120 bp, synthetic construct
  source 1..120: mol_type = other DNA
atggcagttctctgaaaagatcaagagaattgacaaagctttagctacattgaccagagagagagagaacacaaataactaaaatcaggactaaaagaggagacagcaattccaatctta

SEQ ID NO: 6447 - DNA, 120 bp, synthetic construct
  source 1..120: mol_type = other DNA
tcaggctctggcatcccacagaccatggatgacatagtggccaggcctcgctggtagatcaggcactgacatcccatctctgagtctcaatttcccatctgtgaaatggagataatagca

SEQ ID NO: 6448 - DNA, 120 bp, synthetic construct
  source 1..120: mol_type = other DNA
ttgacacccacttcgcctcccaggagttcttctcggctaacgccatctctgaccagctgctgggcgcaggctctgacttgaaggacttcaccctcaatgagactgtgaacagcatctttg

SEQ ID NO: 6449 - DNA, 120 bp, synthetic construct
  source 1..120: mol_type = other DNA
gagaacccccatctgtagaattaccatctgctatggacggaatcacatccccacataaattcgtatgtcaaagccctgaccctgacgtgactctatttggagatgggatctttaggttaa

SEQ ID NO: 6450 - DNA, 120 bp, synthetic construct
  source 1..120: mol_type = other DNA
tactcctccccactcctccccacagctctggcctcccccagcccgaggggagccctctaaaccctccagctcaggctgctccgtgaagctcagttcctgccgcttccgctcagcacaaag

SEQ ID NO: 6451 - DNA, 120 bp, synthetic construct
  source 1..120: mol_type = other DNA
ttgcttgtatttcttatcagggtctttgtgctgccttttgtggtgcatgacacccacgcagaactcaaactttcatttccaaattattctccttcttccttcctccttctccttctcctt

SEQ ID NO: 6452 - DNA, 120 bp, synthetic construct
  source 1..120: mol_type = other DNA
tgtgtgtatccttccagggaaaggtgacctggtcatctcacattgctctgagagcctggagtgttttgctacttttgttttttaaatactgagatatgattcacccttttctggtgtgta

SEQ ID NO: 6453 - DNA, 120 bp, synthetic construct
  source 1..120: mol_type = other DNA
ctgagagcattgtagggggtctaggggcaacatggcagggttcagtggcaccatagggggtccgagggcattgtggggggtcaagggagaagcatgggaggtctgaggtcattatagggg

SEQ ID NO: 6454 - DNA, 120 bp, synthetic construct
  source 1..120: mol_type = other DNA
accacacataccacacagatacacgatacacataccacacaccacagagatacgcaccacacacacaatacacaccacatataccacaccacacatcacacagatacacaccatacacca

SEQ ID NO: 6455 - DNA, 120 bp, synthetic construct
  source 1..120: mol_type = other DNA
tcccccttctcccccttctctcccttctcccccacgtgggaaaaacacaatggaacgaaacccagagctggtgatgaagctggtgacgaagccccacgggtctcctgcaaaccaacaagc

SEQ ID NO: 6456 - DNA, 120 bp, synthetic construct
  source 1..120: mol_type = other DNA
aggggctctctgtgggcctgtgtttctgggacctgcctggcaacagtctgagggctgcacgtggcccaggggctctgagtagccgccccatgaggagcccttcccagacagaacctgagt

SEQ ID NO: 6457 - DNA, 120 bp, synthetic construct
  source 1..120: mol_type = other DNA
gaactcattctggggtggagggtaggggacagggcagggttggcctcagaggctggagacagtgtaggtccaaccaggaatgagacagagaggcagcaaccagaggcttgagttgagctg

SEQ ID NO: 6458 - DNA, 120 bp, synthetic construct
  source 1..120: mol_type = other DNA
gcaggtaggctggggaccgggagcagggacggaaaagctgtgggtctcctggctgaagctgcactgcggccacccccagccaccccatcacagccgcccgtctcccctctgctctcccag

SEQ ID NO: 6459 - DNA, 120 bp, synthetic construct
  source 1..120: mol_type = other DNA
agtgcttgggccgtgctattgggcagcgacaagttttgcgtcaggaaacgccagagctcctgcgggtttctggccaccgagtccagagagaaggaagacactggacaggcaggaaggcga

SEQ ID NO: 6460 - DNA, 120 bp, synthetic construct
  source 1..120: mol_type = other DNA
ccggctctgtcgcctcgcaggtgaacaacagcaacaagaaggagtggaatgggatgatgggcgagctgctcagcgggcaggcagacatgatcgtggcgccgctaaccataaacaacgagc

SEQ ID NO: 6461 - DNA, 120 bp, synthetic construct
  source 1..120: mol_type = other DNA
tactccttgtctgcctccctcagcgcctctgttccctgcctggccctcggcccccgctccctgcctggcccccggcccctgcccttctgcccctgtcgcttcactgtggcctcaacgctg

SEQ ID NO: 6462 - DNA, 120 bp, synthetic construct
  source 1..120: mol_type = other DNA
tagctggggtgttgcactttgaaaacatcccactctgcttaggtggagaagaggctgtagaagcctgtgggtgcctgtgcagggagagtcagctctgtgctgaggcgaacccagggtccc

SEQ ID NO: 6463 - DNA, 120 bp, synthetic construct
  source 1..120: mol_type = other DNA
gcccttctgagccatctcttttgccttcttggtccaatttcatccctgacccaactcgactgcagctctaggagaaggttctttcctgactggcttcctgagcacggtgccagcttccga

SEQ ID NO: 6464 - DNA, 120 bp, synthetic construct
  source 1..120: mol_type = other DNA
atcctcccaactgtccaccacccacagcaggaaacctcttcaccaactgtccaccgcccacaccagcagacatccctccaactgtgcaccccctgaccagcagacatccctcccaactgt

SEQ ID NO: 6465 - DNA, 120 bp, synthetic construct
  source 1..120: mol_type = other DNA
aggtttgagtcctccaagtttgttcttctttttccagattgttttggctattctgggtctcttaagtttccatatgaattttaggtcatcctgttagtttctgcacagaagccagctggg

SEQ ID NO: 6466 - DNA, 120 bp, synthetic construct
  source 1..120: mol_type = other DNA
ctcgacatgtttctgcctgcacagccttctccctaagaggccacacactcacgtggtgcctttgagaagcacttaccagaatcagggttaacagaactggaagacgtagttgtgactggg

SEQ ID NO: 6467 - DNA, 120 bp, synthetic construct
  source 1..120: mol_type = other DNA
gtggccgctgcacttcgccccagtcctaggattggctgggctccctccgcagaaccccccaaccccacgtggcccctgtgccttccctccagtcctaggattggccaggctccctccaca

SEQ ID NO: 6468 - DNA, 120 bp, synthetic construct
  source 1..120: mol_type = other DNA
tgtttggtgtgtgtatgtgtgttttgtgtgtgtggtgtatacgtgtgtggtgtgtgtgtgggtgtgaagtatgtgtgtagtgtgtgtggtgtgtgtgtggtgtgtgcatgtttgtggtgg

SEQ ID NO: 6469 - DNA, 120 bp, synthetic construct
  source 1..120: mol_type = other DNA
gcctgagggatgcccaggggagagaggggaggtcaggggagaggtgaggtcggcctgagggacctctgggaaaggacattccaggcaacgagtgccaagaccctgaggcaaggctgtgct

SEQ ID NO: 6470 - DNA, 120 bp, synthetic construct
  source 1..120: mol_type = other DNA
ctggatgaactgagggctgtgcatcccagggctgaactgacatggtaccctgccatcccagataaatagagcattggctcagctgagacacccagccccataggccaaatagctctattg

SEQ ID NO: 6471 - DNA, 120 bp, synthetic construct
  source 1..120: mol_type = other DNA
gtgtgagactggggtgggggatatgtgaacagggatggggggtgtgtgagactggggtgggggacgtgtgaacagcagtgggagttaggtgagactgagatggatttgggtgagacccca

SEQ ID NO: 6472 - DNA, 120 bp, synthetic construct
  source 1..120: mol_type = other DNA
ccgtggggatgaaacagccacatgcagatgtggacaggaaacgcccggtctttaatggaagggtgacgtcacctatacaccagacaggagacactgaccccgccaatccgttacggagat

SEQ ID NO: 6473 - DNA, 120 bp, synthetic construct
  source 1..120: mol_type = other DNA
gtagacaggaggatggtatagacagaggagaggtgatggtgtagatgggtggattgtgtagacagggtggtggtatagatagggcagtggggatggtctagacaggaggatggtgtagat

SEQ ID NO: 6474 - DNA, 120 bp, synthetic construct
  source 1..120: mol_type = other DNA
gggatggagcatcagatctatccagccgtgcaggatatagcgtctcatgtgtccagacctgcaggctggagtgcagtgtgtgatcacagcgtgatccatttttattctacttgtttttcg

SEQ ID NO: 6475 - DNA, 120 bp, synthetic construct
  source 1..120: mol_type = other DNA
aacaactaagttcccagtcatgactggatgggagtttggacacaccttattatacccctcctgctttggcagtttaaacacaaccaaccagcaaaaaggttaaaatcaacatcgtaagac

SEQ ID NO: 6476 - DNA, 120 bp, synthetic construct
  source 1..120: mol_type = other DNA
tatatatatatatatattttggctcctgattctcttccgtcttcccatgtggctgcattttaaaaggcttccctaagatcgttaggattaaatcaaccctccccaggcatctttaccgag

SEQ ID NO: 6477 - DNA, 120 bp, synthetic construct
  source 1..120: mol_type = other DNA
tgctgtgttacaggattcagacgcaaaagacttgcataagagacggacgcgtggttgcaaggtgtcatactgatatgcagcattaactttactgacatggagtgaagtgcaatattataa

SEQ ID NO: 6478 - DNA, 120 bp, synthetic construct
  source 1..120: mol_type = other DNA
ccccaaaaagaaatcctataccctctggctcttactcactgctattgtctgaaggtttatatcaccccaaaatatataggtttcaaccctaaacctcagtatgctgtcaggaggtgagag

SEQ ID NO: 6479 - DNA, 120 bp, synthetic construct
  source 1..120: mol_type = other DNA
agccactgcgctcagcctagcctcgtgttttgaccgtgttggcttcacagtgacaaatgagccagcctcctggagggggttttgtggccttaagatgtgccctgtgggtgtgggcaggcg

SEQ ID NO: 6480 - DNA, 120 bp, synthetic construct
  source 1..120: mol_type = other DNA
aaaataaaataaaaaacaaggaaaaacaaaagagtatgaggcttcaagcccactggaccaagacaccagggtgatctgcgcataggacacaggaaatcgtacttgctaggagctcagtgg

SEQ ID NO: 6481 - DNA, 120 bp, synthetic construct
  source 1..120: mol_type = other DNA
aacttgtgttcctctgccactgtttcctgcagaaatgggtgaatacagtaaatggtacggacgttcctcaaaaaaattaaaaatagaactactcgatgatccagcaagcatgcttctagg

SEQ ID NO: 6482 - DNA, 120 bp, synthetic construct
  source 1..120: mol_type = other DNA
gcagcagcagcagcatgaccatcatcaccatcattatcatttctatcatcaccatcaccatcatcaccatcatcagcagcatcatcaccatcaccaacatcattatcatttctattacca

SEQ ID NO: 6483 - DNA, 120 bp, synthetic construct
  source 1..120: mol_type = other DNA
caatctggttaaaacttctcgggaataaacataattaatcgttggcgaacacattcacataaagtgctgtgattccaacttcagcacagacatgatctctcaaggattctatgccctaaa

SEQ ID NO: 6484 - DNA, 120 bp, synthetic construct
  source 1..120: mol_type = other DNA
agagaaagaaagaagggaagggagggaaggaagggagagaagaagagacaaggatgggagggaaggaaggaaggaaagaaggaagaaaggaaggatttgttggctgaagaagagagggag

SEQ ID NO: 6485 - DNA, 120 bp, synthetic construct
  source 1..120: mol_type = other DNA
ttaatatgctgtaaatcattatgatgattactaaattatcaatacaaaagaagataatagcaagacggccatattcctaatagaggttgacattttagcagccctacatttccactgtat

SEQ ID NO: 6486 - DNA, 120 bp, synthetic construct
  source 1..120: mol_type = other DNA
tgtagacagagtgagctgatgttagggagatctcttcaagggtgagcagtgacatttatgtggatcctgggcctatatcacctcgctggctgtaaagcctttatactatctaggaaatat

SEQ ID NO: 6487 - DNA, 120 bp, synthetic construct
  source 1..120: mol_type = other DNA
taaataataaataaaagaagaaaaaactttaaaaaaattcaaaataaaaataaagtggcaggaaacttgaaaaggaggaacaatggttgtcctttagaaaaccacagcttcggacaagtt

SEQ ID NO: 6488 - DNA, 120 bp, synthetic construct
  source 1..120: mol_type = other DNA
agtgttcgagatcatccttgggaacacagcagaacccatctctacaaaaagttaataataataataataataacaagccgtgcctcatggtgcacacctgtagtcccagctacttcagga

SEQ ID NO: 6489 - DNA, 120 bp, synthetic construct
  source 1..120: mol_type = other DNA
catagaaactagggttcaaggaatgatgttaatttgctccgtaggacccagcaagtaaataacaagactgggaactcaaaccaaggatgtccagtttaagagaccttaggaacgacattg

SEQ ID NO: 6490 - DNA, 120 bp, synthetic construct
  source 1..120: mol_type = other DNA
ctaaaagacccagcacatacccacattccttccatcttatcactgacatctcgactcattttctcccagctaaatgccctgtttttctgctttgcaccgttattggttgggcaagagtgt

SEQ ID NO: 6491 - DNA, 120 bp, synthetic construct
  source 1..120: mol_type = other DNA
actgggtaataagtagaagccagaaaagttttgaagtgtatgctagacacagcctacgttgccatgaatagacctttgaaggtgattctagtgaggggagggctcagaaaaaaaaagaga

SEQ ID NO: 6492 - DNA, 120 bp, synthetic construct
  source 1..120: mol_type = other DNA
tcagtggatctgcggttgaaaatcaaagattatgagacccaaatagacgctatgtagaaaagactcaaaacctgagtcaacagaaaggcctgaagtaaacacatgggaactatacacaat

SEQ ID NO: 6493 - DNA, 120 bp, synthetic construct
  source 1..120: mol_type = other DNA
tgttccttgtctttgaattaaaattgtgttatacaatgtggtcactgaccttactcaacagaaccctggctgtatccaaatataaatgcctccttaaggattaagacttgcctcagcaag

SEQ ID NO: 6494 - DNA, 120 bp, synthetic construct
  source 1..120: mol_type = other DNA
ctttccacagggtacagtatagaaagtgtgtgtgcaggaggacgaacgtgatactggagatatctggccaacatcacctcatccatgggatcaaggttagtatcaactgcaatgtcatgg

SEQ ID NO: 6495 - DNA, 120 bp, synthetic construct
  source 1..120: mol_type = other DNA
atgatgagacctagaaaaacgtgacttcttaaaaatatatacaggcaggaggtaggaatagtgatttacagcagtgggaatggaggatctcactagggtgaagtgttccagaactgatgt

SEQ ID NO: 6496 - DNA, 120 bp, synthetic construct
  source 1..120: mol_type = other DNA
gtaaaagataagtatgtgaagcacatttaataacactgaacctaataatgataactcaaactcattttgatttcctacctacaaaccacacatttgaagtattagaaaactttgtgagct

SEQ ID NO: 6497 - DNA, 120 bp, synthetic construct
  source 1..120: mol_type = other DNA
acacaatgataaaaatgagagctagtgtcttcctgtagcaactgtataaaacatcgccaggtgcgcattcccgacacgttctgattgactctcttcattttgcattttacagaaaagagg

SEQ ID NO: 6498 - DNA, 120 bp, synthetic construct
  source 1..120: mol_type = other DNA
ttcaaaacatttccactttactactactacgtcccctaagtcgaaaagaagacttagatgaattctgcatctcttcattggtgcccaagtaacaccatctagaaatacaagtaacacttt

SEQ ID NO: 6499 - DNA, 120 bp, synthetic construct
  source 1..120: mol_type = other DNA
ttttaaaccactaaaacttccttctcatttaaggataagcctgtccaagcagggatgactgggccaagaaccttacattcgacacaggctcatcttttattccctgatgagggaagtaaa

SEQ ID NO: 6500 - DNA, 120 bp, synthetic construct
  source 1..120: mol_type = other DNA
tcccatggcccacacaaacaaaagcgccccacctttgttccactaccacatttcccatcaggacaagtttctaccgcactccctgttttcataatttaagttgtgttctcttaaattttt

SEQ ID NO: 6501 - DNA, 120 bp, synthetic construct
  source 1..120: mol_type = other DNA
gccccttcctccatctttaaagccagcactgcttgttcgagtctttttcacattgcatttcccctttcacattgaaagcactcttctgatgaaccacttctgttaaaaccactcttatga

SEQ ID NO: 6502 - DNA, 120 bp, synthetic construct
  source 1..120: mol_type = other DNA
cacatttattcaacgttcttttctttcaaacagcatttgtgtgtagccaacacacatgcatatggagtgctgcgaagtctctgtgcattatctggaaacctgctttctccagaaaagctg

SEQ ID NO: 6503 - DNA, 120 bp, synthetic construct
  source 1..120: mol_type = other DNA
tagtaagctgcctaggcagctcagaagcacattaaagtttgagagggtaatttggggacagtaaagtgcagtcggaggaggatggttttgtggccctttggactggtcacttaatgactg

SEQ ID NO: 6504 - DNA, 120 bp, synthetic construct
  source 1..120: mol_type = other DNA
gggctaaccaaacagcctcatggccacggaagggggaatgacaaaaaataaattaaacacccttaatattgacggagttgtcaaaccagaggggaaagtggcagaaaatgtaaaaaaaaa

SEQ ID NO: 6505 - DNA, 120 bp, synthetic construct
  source 1..120: mol_type = other DNA
atttaagttctacatgtctagagataaaactctctttatacggggatgtgaggagaggaactaggaggagactttatcatgtgctgatttatgctctgccggtaatgagccatgcagccc

SEQ ID NO: 6506 - DNA, 120 bp, synthetic construct
  source 1..120: mol_type = other DNA
attagatatggccaaattcctttgctgaggggttgcaccattttgccttcctaccactaacatatgagtgttctcgtttcctgtgactttgccaacaggatgtgttgataagcatttgca

SEQ ID NO: 6507 - DNA, 120 bp, synthetic construct
  source 1..120: mol_type = other DNA
tggaaactcattccttcccttaaataatcctaaggggaatgactgtggccacttgtctttatattatacttgtccccgtgggtcacgattatttgtttgctgggttttgttgggaggtga

SEQ ID NO: 6508 - DNA, 120 bp, synthetic construct
  source 1..120: mol_type = other DNA
cttctagatgttaagggccataatggttgcaaatattgtgataacttttgagaggatcccttttgagggtgcgagatgactacccagaggatctgaaggttttcattttgctgacactga

SEQ ID NO: 6509 - DNA, 120 bp, synthetic construct
  source 1..120: mol_type = other DNA
ttttaaaaatgttaaaactacacttggctcgtgggtcatacaaaaataggtagtgggccagatttggaccacagtctgtagtttgtcaacccctgacctaaagttcaactgtcattttgc

SEQ ID NO: 6510 - DNA, 120 bp, synthetic construct
  source 1..120: mol_type = other DNA
tcccttaagttcgcacaattctaaaatggcaacgccaggacacaagttgaaatcagactctaaacctgtctcagatctgctgaatcttataaatggtggctcatgatgtaatcccagtac

SEQ ID NO: 6511 - DNA, 120 bp, synthetic construct
  source 1..120: mol_type = other DNA
aaattaatagccttcgcaatttcttcagaatttgctctagaggcacagctcatacatgcattgcctttgctatgattaactttggtggtacttttctcctgtgctgccatgcactgttct

SEQ ID NO: 6512 - DNA, 120 bp, synthetic construct
  source 1..120: mol_type = other DNA
caagaaaaagcacagtagtaaaataatatttaaactaatcatgtgataaaatgtcagcatttattcatgacatttggctctgtttgtattggatcaccccagcagggcagtggctgtggg

SEQ ID NO: 6513 - DNA, 120 bp, synthetic construct
  source 1..120: mol_type = other DNA
ggacaggagtaccatccatgatagaataaactgaaaggtaaacacaataatacatagttctctatgtagaaggatcccctgagagttcatcagtctccacatattttccccacaaaccat

SEQ ID NO: 6514 - DNA, 120 bp, synthetic construct
  source 1..120: mol_type = other DNA
agcaagcaaggcaagagattgaaaaactagatgtactacttagtcttttgaggtccgtgaattacttgtacagtacctgcctgaagagttctctttgaaacagacatggtctcaggcatc

SEQ ID NO: 6515 - DNA, 120 bp, synthetic construct
  source 1..120: mol_type = other DNA
acccccccccaaaactgcacatgaattagatgttaatagtctatccaggaagataattgaattctgaaatagaaaatctatttaaaacaaacaaaagccgggcgcggtggctcaagcctg

SEQ ID NO: 6516 - DNA, 120 bp, synthetic construct
  source 1..120: mol_type = other DNA
caccctatgcagctcctagtgcaggaccttgcagtgacgagcatttaggaaaggaacaaagagtgaatattcattatgagaacacaggccaaatgtaaccagtgatcctttcctattaat

SEQ ID NO: 6517 - DNA, 120 bp, synthetic construct
  source 1..120: mol_type = other DNA
ttctctgggtctttggaaatattaggagggaaagtctgtcatctagaaactttctttatcctacccaatagtaactgacgattcttttttttttttagtttttatttttttattttattc

SEQ ID NO: 6518 - DNA, 120 bp, synthetic construct
  source 1..120: mol_type = other DNA
aacccccctagagaatttctaagaaattatgtagaacaaatgtccccaaactatatcctgtgggccgaacctggcctgtttttcatgaataaagttttattggcacagggctgcatccat

SEQ ID NO: 6519 - DNA, 120 bp, synthetic construct
  source 1..120: mol_type = other DNA
tatgtttcttgtacacaatgcccttccttttcaatgcattcacctgtgctctagacaaagccactttcagagtactccctcttttcactaaaatgagattggcctggaccaggttgtctt

SEQ ID NO: 6520 - DNA, 120 bp, synthetic construct
  source 1..120: mol_type = other DNA
tgcactgggctcctcatattaaaaacacttgccagagtgaaaagaaagataacagcattgctaagtggaagactcctctttgaatcatcttgaccgttgttccaagggagtattgtttgt

SEQ ID NO: 6521 - DNA, 120 bp, synthetic construct
  source 1..120: mol_type = other DNA
gcggagactgctgaactatagaaatttttcagtgatgattcctgaggagagtaggataagagctttggtttggtacaggcttctcgaaggtttgcctatctttgtttgacttacaggaaa

SEQ ID NO: 6522 - DNA, 120 bp, synthetic construct
  source 1..120: mol_type = other DNA
ttaaaaaaagaaaaaagacttgggtacccttccaagattttagttcatgcacattcagacagatggctacacctgagagaattcactatatactagctgggcctcaggtggagatgctgg

SEQ ID NO: 6523 - DNA, 120 bp, synthetic construct
  source 1..120: mol_type = other DNA
taaaaaaaaaaaaaaaaaaaaaaaaaaaaaacaagatcctgtggagaagaggtgccattcacactaggcctcaaggtctgggaggaaactgagagggcggggcttcctgcacagtggcac

SEQ ID NO: 6524 - DNA, 120 bp, synthetic construct
  source 1..120: mol_type = other DNA
caaatagcaagcatggaagaaacaaggttaggcaggctgcgaacctcaagataggtatattaagaaaacgtctagggatccgttccaagatggccaaataggaacacctccggtctgcag

SEQ ID NO: 6525 - DNA, 120 bp, synthetic construct
  source 1..120: mol_type = other DNA
ctgagaactgcaagttctgttttctctaattcttttgaagattcttcccctagcctcagttactcttctcacatgcatgcacttatcagtactttgctgagtgctccagaggaatcctct

SEQ ID NO: 6526 - DNA, 120 bp, synthetic construct
  source 1..120: mol_type = other DNA
tcatactttagaaaatgaacgtgtgttttgaaggccttcttaaagcattggtttataccactgaacactgtttctctgtgcagaaacacctctactcatgctgtctccttctgcaccatc

SEQ ID NO: 6527 - DNA, 120 bp, synthetic construct
  source 1..120: mol_type = other DNA
tgatgcactcaatgccaggttccatgtgtagtacccgatgtcaaggcttctcccagatcccctcagatcccttttaaccatttctgtgcctccacttcaaagttaatggccataaccaat

SEQ ID NO: 6528 - DNA, 120 bp, synthetic construct
  source 1..120: mol_type = other DNA
agaggaagaaaatgaatggccaagaaattataaaaatgaaaaaaacattttcaaaaaagaccaaatagaacttctagaaaagaacaattctgtaacataaactcgaagactggattttgt

SEQ ID NO: 6529 - DNA, 120 bp, synthetic construct
  source 1..120: mol_type = other DNA
ttaagatagggaatgtggattccacctctcagtgctcctgccttggatcaattaggtaggatactacccagagatacagacatgatggaccaagtaacttctccaaactttgattctctc

SEQ ID NO: 6530 - DNA, 120 bp, synthetic construct
  source 1..120: mol_type = other DNA
gtgaagttggtgattggcctgttaggagccatcttgtgacactgcccctaaatctttccttgtttttcttaagataattcctctccaagttattatgtgagaacccaacaaggccacctt

SEQ ID NO: 6531 - DNA, 120 bp, synthetic construct
  source 1..120: mol_type = other DNA
cactttatgtacacatacctctcaatgcagccattttgttcgggtcgagggattggctgtctttcaaatggatatccactgagctgctaatcaggatttccttggagaacaaaatacgaa

SEQ ID NO: 6532 - DNA, 120 bp, synthetic construct
  source 1..120: mol_type = other DNA
ggcagatgaaggggaagccaaaggtgacaactaccagagtgacatatctgagctttttttcatgatttattgcatgaattcattgaaatgctgagttctattccataataggtgtgtgtg

SEQ ID NO: 6533 - DNA, 120 bp, synthetic construct
  source 1..120: mol_type = other DNA
caaaacttttctgagaatatgtgaaatagcgtcttagaaagtataaactttccccaaatgaggaggagtcaccttattagagtgcccagtgagttataggctacttcttccacctacccc

SEQ ID NO: 6534 - DNA, 120 bp, synthetic construct
  source 1..120: mol_type = other DNA
aggagccacccatgagacgtctgccttccaatggggctgtggccagcctgccctcgcaagctcgtggggggttcatgtagtctaaatagggagaaaagaccttcaaaaatcctgtctgca

SEQ ID NO: 6535 - DNA, 120 bp, synthetic construct
  source 1..120: mol_type = other DNA
ttcatcactcatatccaaccaaacctagatcattctaccactcctttgaaaattcaagcagtatgtttctgtcttcagaatgtatgtattctgtgcaaagtccccattcctggccagcca

SEQ ID NO: 6536 - DNA, 120 bp, synthetic construct
  source 1..120: mol_type = other DNA
acatggcagacttccatagtccagtagggaatgacacaatccaactaatgcttttaagaagatactctagctgccatgtggatattggattctaggaggccactacaatcatccaagaaa

SEQ ID NO: 6537 - DNA, 120 bp, synthetic construct
  source 1..120: mol_type = other DNA
aatcaacgttacaaaggacaaagaaaggcaatagaagtgttccagactaaaagagactaagagacatgacaactagatgcaacaactctaaacctgccggtgcggtggctcacgcctgta

SEQ ID NO: 6538 - DNA, 120 bp, synthetic construct
  source 1..120: mol_type = other DNA
gtctgtcattttgtaaatggcaggacaacaaatgacatccacgtcgtagtgattttcagaatgtgagaccagaagacagcgactactcacctccaggcacctgctccataaatatcttaa

SEQ ID NO: 6539 - DNA, 120 bp, synthetic construct
  source 1..120: mol_type = other DNA
cttagtcatgacagtgtactatagttctgtaagatgttactattggggagaaactgagtaaagggtacacagatttctattacttcttacgactgcatgtgaatctacaatgacttcaaa

SEQ ID NO: 6540 - DNA, 120 bp, synthetic construct
  source 1..120: mol_type = other DNA
agacagctgtgttagggggaagcagtgatctctgattctgggtgcatatgtgtgcgcacacgtgtgtgtgtcattcttaatgtttttctgtattgtctctatgagtgcagagaaatatac

SEQ ID NO: 6541 - DNA, 120 bp, synthetic construct
  source 1..120: mol_type = other DNA
taggacgacagctgtgaaccactgtgcccagcccaactgtagaaattcttatcctggtgtctatgaaaaatgtctgtcaataaacatccctcaagcctttgatgacagtaataattccct

SEQ ID NO: 6542 - DNA, 120 bp, synthetic construct
  source 1..120: mol_type = other DNA
tgtttgtttcccctttacaaatgggagggcacaatcaaaattcacattccagttttttccaggatctttattgatgaacaacagagtcaaatcctgctctcaccctcaccatcctcctag

SEQ ID NO: 6543 - DNA, 120 bp, synthetic construct
  source 1..120: mol_type = other DNA
agtgggatgtgatttatcaggttacagtattttttcaccttatatttcatagcaaatcctacaaaaactgatggtcacaaataaagatgcaacacaagcagggaagaataatcactgaat

SEQ ID NO: 6544 - DNA, 120 bp, synthetic construct
  source 1..120: mol_type = other DNA
acaggacactaggaagtgaaaaaatagccctgaaagacagccaaaaatgtagcaaagggaaacctttgcctgtgcttggaaattttcctggtgtatacaccctatttaattccaccatgc

SEQ ID NO: 6545 - DNA, 120 bp, synthetic construct
  source 1..120: mol_type = other DNA
aggtatttcttctgattcctatccacttgtaaaatttggagtctagagggaaccaagggaaagcagtgattacaactgacatcttccagtttgattggtgaaaggagaaacctcacttcc

SEQ ID NO: 6546 - DNA, 120 bp, synthetic construct
  source 1..120: mol_type = other DNA
ctgttctaccatcttgctccacctcctccaacattttctttatctacttatacatcagtggacacttgggttgcttccacctctcgcctattgtgaataatgcttttatgaacataggtg

SEQ ID NO: 6547 - DNA, 120 bp, synthetic construct
  source 1..120: mol_type = other DNA
acactgaactttctactaaacaatctctcctatttccagtgttctcactagtttcatactactagccactcagactttcttatgccgtgccgtaggtacatcttggcctaatatttggtc

SEQ ID NO: 6548 - DNA, 120 bp, synthetic construct
  source 1..120: mol_type = other DNA
tcacttaaaaatatatgtacctgatggatgtgtcatgtttacagtggccaggttgtggcctgtaaacagcaagcagttgacgggaagactagctctgttgctactaagcagcttttactt

SEQ ID NO: 6549 - DNA, 120 bp, synthetic construct
  source 1..120: mol_type = other DNA
tactgagcgtgtgtgtgtgtgtgtgtgtgtgtgtgtgtgtaggataaaattgtaatggccttaaagttgttacctggcatttttggtttcttaaaataggcatccccctactccctttac

SEQ ID NO: 6550 - DNA, 120 bp, synthetic construct
  source 1..120: mol_type = other DNA
tatacatcgagagatttagtgccccgtttctagggaatggatattcatccctttactcaacaagatggctatgaccctgtctccatgaagcttacagttaagaatcatccagcatagcta

SEQ ID NO: 6551 - DNA, 120 bp, synthetic construct
  source 1..120: mol_type = other DNA
ccttaggattattcacttagcattctataaatatttattaacagctcccatgtaccaggccctctggtagatagtaagaatttggtagctccctgagtagataacatctgagccctcccc

SEQ ID NO: 6552 - DNA, 120 bp, synthetic construct
  source 1..120: mol_type = other DNA
atataatcctacattcatgtaaaaccaaaagtttcccatgttgcagccaaaggttagatggatttcttctcttctgaatctggcagaacatctgcagggagtgaattttggagggaggga

SEQ ID NO: 6553 - DNA, 120 bp, synthetic construct
  source 1..120: mol_type = other DNA
ctttcagttccttactctttcccacctattcctctcccttcttagatccttcttgtgtttatgcacagtatttgtttggcaagtgccttgggaactagcaaaaccatgaggacattttcc

SEQ ID NO: 6554 - DNA, 120 bp, synthetic construct
  source 1..120: mol_type = other DNA
gatttttctagtgattcacagttttagctctctgctccagatgtgttatttggttggctagcctttaatatatcttgaaatgtctggaggccaactccagaaagctctcgtgaaggtggg

SEQ ID NO: 6555 - DNA, 120 bp, synthetic construct
  source 1..120: mol_type = other DNA
cattatgccctttgaatcttgcctttattcagacttcaaaatatttaagcacttctaaactcctgtattacatttttaataccaatctttctctggaaactgagaatgccttctgaaacc

SEQ ID NO: 6556 - DNA, 120 bp, synthetic construct
  source 1..120: mol_type = other DNA
agtgcaagtagttaataagagttaggtattagcaatatattatagtttcataatttttcttctaaaaaccaattgccaaaggatgtattcctttagttgaaatactatagctcgattgtg

SEQ ID NO: 6557 - DNA, 120 bp, synthetic construct
  source 1..120: mol_type = other DNA
gtttgtcccatgtggcttcaccacctaaggcagctgcaaggctaaataattgagactgatagtttttgccatattagggatagaactttcctcattgagcaaattctgagtcaggtgaaa

SEQ ID NO: 6558 - DNA, 120 bp, synthetic construct
  source 1..120: mol_type = other DNA
aattggagttgtcataatcaattatgtagcattgtttcaatgatgttaacattgctctttttcactggataaattgttatgtggcatgtcatcattctaatattcagtttacatgacact

SEQ ID NO: 6559 - DNA, 120 bp, synthetic construct
  source 1..120: mol_type = other DNA
attatttctcatttgtgtggaacatgggggtgttaacattgtcttgacttatttgccccgtatggttgttaggttccagggagcttcagctgagcttaagtgttcctgtctgaaatatct

SEQ ID NO: 6560 - DNA, 120 bp, synthetic construct
  source 1..120: mol_type = other DNA
agagagccatgcatgggttaatgatattaaaatgtcacaaacgaataattataccaattgtgtacacaggagctttttgagaaaaaagtagcggattttatgttctgttgaaaactgtaa

SEQ ID NO: 6561 - DNA, 120 bp, synthetic construct
  source 1..120: mol_type = other DNA
attcttaaatcctaggattaagaagtgacatgttgcaaatttagagtaccttgctcttcaccagttgtatagcaaaagagttttagtcagtttagaagtaccatgggtccaccgcgtggt

SEQ ID NO: 6562 - DNA, 120 bp, synthetic construct
  source 1..120: mol_type = other DNA
gcctcccaaagtactaggattacgggcatgagccaacatgcccagccctattctttaatttttaagtagctttggccttcactagcattactacagtcctatatgtaaaagtatactgct

SEQ ID NO: 6563 - DNA, 120 bp, synthetic construct
  source 1..120: mol_type = other DNA
tttttggatcccagaaggagagatgtagagttgttctgggtatatgacttgcctcaaatcattaactgttaaatggtaggaaccgaggcttcttatcccaaatcttgtgctccctttgct

SEQ ID NO: 6564 - DNA, 120 bp, synthetic construct
  source 1..120: mol_type = other DNA
cttccaaaccaaagggaaggacaggatgtgtcatcaaatatgttttgtcaccttgtattatacaaaatgttattttctaaagagtcagagaaaatctgtgaaacttattgtgcggccccc

SEQ ID NO: 6565 - DNA, 120 bp, synthetic construct
  source 1..120: mol_type = other DNA
gtaatcagttgacccggggaatgctgtctaaccagccaaaagtctcctgatatggcattttaacatttgcagagaaacagaatctccagaatctctaaaatgcaatccacagatgatgtt

SEQ ID NO: 6566 - DNA, 120 bp, synthetic construct
  source 1..120: mol_type = other DNA
ttccttgactccctttcacccaccacatcaagcttgtccaacctgtggcccaggatggctttgaatgaggcccaaatgaattcgtaaactttcctaaaacatttttttttttttttgcga

SEQ ID NO: 6567 - DNA, 120 bp, synthetic construct
  source 1..120: mol_type = other DNA
tgataaaattaagttcactacacactcattctttttagaagcttttcacctcccttttaactgtgtgcatttaatttgtgtaataatcactgtatgtccccttcaatgtccttttgtatc

SEQ ID NO: 6568 - DNA, 120 bp, synthetic construct
  source 1..120: mol_type = other DNA
aaactattgaactcatggagacagaataaaaggatggttaccagaggctacaaagggtagtgtggaggtaggggataggtggggattgttagcggctacaaaaaatagttagaaagaatg

SEQ ID NO: 6569 - DNA, 120 bp, synthetic construct
  source 1..120: mol_type = other DNA
aagatgggaaatggtaaacatactagaaagagcgcagattttcaagtcagaaagagacatttacaaattccaagctctgttctttgcttgtttgtaaacgacgcagtctcgctctgtcgc

SEQ ID NO: 6570 - DNA, 120 bp, synthetic construct
  source 1..120: mol_type = other DNA
aaaacaacaaaacaaaacaaaaagaaagtctcatgttggagatgactggggttggaggaaaaagttgggacatacggttttggaggtgctgcactgaccctggaacacataattctggaa

SEQ ID NO: 6571 - DNA, 120 bp, synthetic construct
  source 1..120: mol_type = other DNA
gactgtgaaaatgaggaagaggaaggtataggacaaaatctgaatgaacattggaaatggcagaagatttgtggaaggagagtcttatgttaatagccaatgctggctaaaacggaatgg

SEQ ID NO: 6572 - DNA, 120 bp, synthetic construct
  source 1..120: mol_type = other DNA
tacatatgggcatctactctttccctagggtgccccaaataaaaagggctcatttcttatctgcaatctgtaggatgaaatctttgaacttattttcctgtatgttgtggtaggttttcc

SEQ ID NO: 6573 - DNA, 120 bp, synthetic construct
  source 1..120: mol_type = other DNA
ttactggccatctacaatatatcaggctttctggtaagtactgtgggttatagagataacaataagagagtcctctgccctcatgaagcttttaatcttgctgggggaaaagcatatgta

SEQ ID NO: 6574 - DNA, 120 bp, synthetic construct
  source 1..120: mol_type = other DNA
aacacaggactggctttggagttatttaggggaagagtgcctttggtctttagagaaatcttcctggacaattcttgtaacaaataaaacatcaaggtgtaattatataaaatcactatt

SEQ ID NO: 6575 - DNA, 120 bp, synthetic construct
  source 1..120: mol_type = other DNA
cacaaaatatgtttcagtccctaccaaatttcctaaagccatagttcgtctgtccacatcaacccactcccttcttttattatccctgctttagctaccttgtcactcaaataaactgtg

SEQ ID NO: 6576 - DNA, 120 bp, synthetic construct
  source 1..120: mol_type = other DNA
attccatctcctaatcatattaacataagtatttatcatcttcatgtacaaatgaaggtagaaacatcaacatgcccaaggtaacataactaggaagtaacaaacttgctgccctctaac

SEQ ID NO: 6577 - DNA, 120 bp, synthetic construct
  source 1..120: mol_type = other DNA
aataccttcaatcctgtgggctctaccacaaataaagtctgtgactatggctaaatcatttgacctatctgggaattgcagttttctgataagcagagagagaagtgtgaattacacaag

SEQ ID NO: 6578 - DNA, 120 bp, synthetic construct
  source 1..120: mol_type = other DNA
gtgatatattttttcacaggggaatgagaggttcgatttgtttactccccagaaagactcactcttgggtgcctcaaagctaaagcaaacctctaaattctctccctacagcaatgtcta

SEQ ID NO: 6579 - DNA, 120 bp, synthetic construct
  source 1..120: mol_type = other DNA
gttaccatacagaacctaagcacaaatggtcaactgagttcacccaatacaatgcggggcaagtagtactacattagaaaactatgggcatttgccaggagtctcttagtatacccatat

SEQ ID NO: 6580 - DNA, 120 bp, synthetic construct
  source 1..120: mol_type = other DNA
attaatcctattgattcagcaactgatattagccccaatttacaggtggggaaacaaaggcttacttgggtcaaaacgcaaacaagggaaggtgacaaagtgggaactcaggtagtttgg

SEQ ID NO: 6581 - DNA, 120 bp, synthetic construct
  source 1..120: mol_type = other DNA
ctcatagtactgctttcactgcttcccataggttttggttacattgcgtttcctttttcattcgtttcaagaaattctatagtttccttcttaacttcttctttgacccactgataattc

SEQ ID NO: 6582 - DNA, 120 bp, synthetic construct
  source 1..120: mol_type = other DNA
gggggcgggggaagacccaggcaggcccatgtgatacatttcttcaggattctaacaattttccactcagaaagtagtccctcaggaaattattaactgtaaaataagatagaggataaa

SEQ ID NO: 6583 - DNA, 120 bp, synthetic construct
  source 1..120: mol_type = other DNA
aaaaaccctgagtcctgactagctctcctgcaggagagtgttactgagttaagcaatcaggagaaatgaaactctatcaaccgatggtcacctattaacaaataagatggcatacttctg

SEQ ID NO: 6584 - DNA, 120 bp, synthetic construct
  source 1..120: mol_type = other DNA
accctcattgcaagaagccagacacaaaagaacatgtattatattgatataaaatatccaaaaaggcaaatacatatggacagaaatagattgacaattgcctagggctggggtgggagt

SEQ ID NO: 6585 - DNA, 120 bp, synthetic construct
  source 1..120: mol_type = other DNA
atcctccaaggaactttaaagaatagaacccctgattcaggtaacaagatctgaatgtttgggatgcatcagtgagtagaagcaattcacgcactttcagaagtccttaacttttgggcc

SEQ ID NO: 6586 - DNA, 120 bp, synthetic construct
  source 1..120: mol_type = other DNA
tggttttaggtctaacgtttaactattgtccttagataggcacttcctctgatagctgactagatactctgttgtcctcagaggtcaactgtctttatatgctgtggtgtgtatgaagcc

SEQ ID NO: 6587 - DNA, 120 bp, synthetic construct
  source 1..120: mol_type = other DNA
agaattgtgcacacagagtgagctctgaatcatgtgagacaaaacaaatatgtacatctctctggtagtgaggcgtttggagtgttccaaactcattcttttccctcttttggctactag

SEQ ID NO: 6588 - DNA, 120 bp, synthetic construct
  source 1..120: mol_type = other DNA
ccggccggtagtgcttttaagactgtttagagtgtcctctaaaatgtagagaggataggactgacagaagatgcttggatttgatgaccacaaggttttcttttgtttgtttttggtgtg

SEQ ID NO: 6589 - DNA, 120 bp, synthetic construct
  source 1..120: mol_type = other DNA
aattccctcagttatcgctctaatttagatcctccccacattactgggcacatctttgccacctaataaatagttgaatgaatgaatcaccatatattgggattagtgcaatatactttg

SEQ ID NO: 6590 - DNA, 120 bp, synthetic construct
  source 1..120: mol_type = other DNA
cattgccaagactgcctgacacatttttagatgcccagctttgtgtgtgtttgcaaatatcactcaattttagtggtgtcccatttatcaatattttcctttacggtggtagttttggtg

SEQ ID NO: 6591 - DNA, 120 bp, synthetic construct
  source 1..120: mol_type = other DNA
ccagggagtcaagagttctgagtatggcaaagtaaaagatccctgaatgcaaaaagaaagctttaaagttatagagttgagtttaaagagcaagccatcagaatacattgaccctagtac

SEQ ID NO: 6592 - DNA, 120 bp, synthetic construct
  source 1..120: mol_type = other DNA
aaaaataaaaaaagtgtgatatttcagaggtgagactctgggaacagcacagggtctttctagaagactagggtaaaataatggagtgaggtgctaagaatcctcatctagctctgctac

SEQ ID NO: 6593 - DNA, 120 bp, synthetic construct
  source 1..120: mol_type = other DNA
gcctggaaatcctcatgtacctaatctcttttggctgaaaccctgagggctgttgtgggaggaaggtacaatgccactctgaccaccagcgctggtcttgagtttggctagtcaaactca

SEQ ID NO: 6594 - DNA, 120 bp, synthetic construct
  source 1..120: mol_type = other DNA
caaggttaaaatgccccgaacagcgctgagcagatgtgagcgagctggcagacgcgcaaatgaggcctgcctcggagcacgataacaagtgactaatacattgcatatcgttgaaagaaa

SEQ ID NO: 6595 - DNA, 120 bp, synthetic construct
  source 1..120: mol_type = other DNA
cttgtacacttaaaatgggtaggaaaaagaacatgtttatcaaaaaaaaaaaaaggaaagaaacaaagaggtcttcatgggcgtgaaatcctttaacgtttgcctcagctctgagctccc

SEQ ID NO: 6596 - DNA, 120 bp, synthetic construct
  source 1..120: mol_type = other DNA
aacactcttagcagtagattgtaataaaagttatgtgaatatggtatctctctgtctctaaatatcttattgtactatacttgcccatttttggtcctcagttgacctcaggccaactaa

SEQ ID NO: 6597 - DNA, 120 bp, synthetic construct
  source 1..120: mol_type = other DNA
ctccagatagcacaacgatagaaaaattaagagctatttgtttagaccatgccaaacttggagaaagcagccttagtccatctcttgactcacttttctttggtccttcagcctcacaag

SEQ ID NO: 6598 - DNA, 120 bp, synthetic construct
  source 1..120: mol_type = other DNA
aaggagctgttgcccttttcaacttagtcactgcaaccatttagattttgaaaaattcaatggctatatggcttttcatcatcttaaaagtattaaatgttaactgttatgaatgaattc

SEQ ID NO: 6599 - DNA, 120 bp, synthetic construct
  source 1..120: mol_type = other DNA
gatagtggtttgagggggagggggttgtgattggggaggagcacaaagggcttttgaaggcacttcaaaaaaacactgcatctcaaacataataaagtcaatatgaattgtcagttgtaa

SEQ ID NO: 6600 - DNA, 120 bp, synthetic construct
  source 1..120: mol_type = other DNA
atctacagttacttcctccattgaaatcttgaacccatcaaagtcatctatggggagggatgggaatcaacttcttccagactcctgctaatgtcggtatttagacctcaaatgttcttg

SEQ ID NO: 6601 - DNA, 120 bp, synthetic construct
  source 1..120: mol_type = other DNA
gtgacaaggccaagcacagacctttccccttttgcttcagtcagctgcccaggccacaaacctctggcttcctgttctttgtttcatgattgattagctatgtttagaactgtttgttgt

SEQ ID NO: 6602 - DNA, 120 bp, synthetic construct
  source 1..120: mol_type = other DNA
catgggacgctactaagatcatgtgggttttgcacatgaaactttgtctcccttactggacagatgtatgacttgtgtccaaagccatctacatgtcagaaaccagtaacaacttaacat

SEQ ID NO: 6603 - DNA, 120 bp, synthetic construct
  source 1..120: mol_type = other DNA
tttcatagaaaatgaaaatatgaagtgttgttttgagtgactgtgttttcagttgacacacatggcatggtgccacagtcttcgttttgtttcctgaactttgtattactcagagtggga

SEQ ID NO: 6604 - DNA, 120 bp, synthetic construct
  source 1..120: mol_type = other DNA
acaagttccagacgtcccgcccctgctttcccgggcagaggcatggtatgagcgtgggggactgttccagtaaaaagaaagtttgtttttacagtggatggatgatagtgaggcaagtgt

SEQ ID NO: 6605 - DNA, 120 bp, synthetic construct
  source 1..120: mol_type = other DNA
gggagggaaagaggcatgagtaaggcttccggccagggagctggccatgttctatttccagattgtggtggtaattaggttggtatttgcttcaaatgattagttaaggtgaatatttgt

SEQ ID NO: 6606 - DNA, 120 bp, synthetic construct
  source 1..120: mol_type = other DNA
tagaagggtctttttcagaagcttacttctccatactggaagtagaactcttaccattgattcttgtacattgaccttgtattccgagactttgctacattttgcttattaattctagtg

SEQ ID NO: 6607 - DNA, 120 bp, synthetic construct
  source 1..120: mol_type = other DNA
cagaacgcccccattcaataaaattacacagtcacgtccctgcctccccagcaagggtctgtacatctttcagggtaagcctagccccagggaaactactaacaacactagccaaccccc

SEQ ID NO: 6608 - DNA, 120 bp, synthetic construct
  source 1..120: mol_type = other DNA
catatatccatttactcattgttcccatgaaagagccttgtatgcaaacctccaaatgccgaaggagccaagaaacaaggcagacaaaaattgttagtaaagggttctttactgggggga

SEQ ID NO: 6609 - DNA, 120 bp, synthetic construct
  source 1..120: mol_type = other DNA
tccctcaacagcagaatcctacagaccgcacataggatacctttattctgcctcaatttgttagtgaccaagtctccaaagttcaggggaaaacctttcttgaactatatcagtatgtac

SEQ ID NO: 6610 - DNA, 120 bp, synthetic construct
  source 1..120: mol_type = other DNA
tctcctggatagtttcttagatgggagggctactccaactacatttgcttcttggccactggacttaattgagtgggaaaacaaaatagaagcaaaatgaaggcacaagttgctagatag

SEQ ID NO: 6611 - DNA, 120 bp, synthetic construct
  source 1..120: mol_type = other DNA
agcagcttcccaccgattctgactctgagcagagaatacgcaccttgtaatctttatcttctacattcagggtggacacatcgacaaagcatatctgcatcaaattagaagggtgaattt

SEQ ID NO: 6612 - DNA, 120 bp, synthetic construct
  source 1..120: mol_type = other DNA
cagtaatacccacaagagtctggactactgtgctatatacttgggctttgcaatagtggccaggtaatttcattcaggaaattgcctttcttagtaattgtaatttgcatcacggtgggc

SEQ ID NO: 6613 - DNA, 120 bp, synthetic construct
  source 1..120: mol_type = other DNA
atattttggacttagatttaacgctggaatgtgctatggcttttgaagaggttgagatgacagtgaatgtattttgcacattggaaggacatgaatttgggggggactagagggtggact

SEQ ID NO: 6614 - DNA, 120 bp, synthetic construct
  source 1..120: mol_type = other DNA
gaagcttgagaaagagattttgtgtgtgtgtggtttttttttccttattgtgggggatggagagggtagtcatcaggaataatacgcaatgtctgcagtaaggtgttggtgcattttcct

SEQ ID NO: 6615 - DNA, 120 bp, synthetic construct
  source 1..120: mol_type = other DNA
tctggttgccaagtgttgggccccgtgttaggcactttcacgtatgtatttccattaatcttcacaacaaccattattgtcagtttgcagatgagactcctgaggcttaaaaaggataaa

SEQ ID NO: 6616 - DNA, 120 bp, synthetic construct
  source 1..120: mol_type = other DNA
tagtgttttgatttgacctgttccttcataatcccacagctctttccccaaagagctgataaggcaagaactaggcatttatttagtttcccctcactgttttaccccaatgggtagtca

SEQ ID NO: 6617 - DNA, 120 bp, synthetic construct
  source 1..120: mol_type = other DNA
ccaaaaaatcattttagttctaggtgatggatagatggttgtaacagcagaagatgaagagtacacagagataggagacagtgggtggaaaactgaaaaggacacttcacatcgaggtgg

SEQ ID NO: 6618 - DNA, 120 bp, synthetic construct
  source 1..120: mol_type = other DNA
acctctatagggagctcctttgcagccttcaatctttgagaaagcaccttgctagaaagcaccatggcagaaggaacagaggctttgcaggcagaatgactcaagttcaaaattgagctc

SEQ ID NO: 6619 - DNA, 120 bp, synthetic construct
  source 1..120: mol_type = other DNA
gcttccaaaatctttcctggttttccaattcccctcccagaggcatagacatagcaagacaaaaccttcagaaagacgcaattggtatgatgaaaagaacatgattgcctagtatgacag

SEQ ID NO: 6620 - DNA, 120 bp, synthetic construct
  source 1..120: mol_type = other DNA
gaacaagaaccagtgtgacaccatggttatctacaataatgtagcattagaatacaatgaagaaaacagccaccaacttctgaaagagaagtctgacaccttaaaaattacccacagatg

SEQ ID NO: 6621 - DNA, 120 bp, synthetic construct
  source 1..120: mol_type = other DNA
cgtaaatagtggttcaaaattgcgcaggttttcccacaggaaggaaaagagacaaatacacatgtgggactcaagaagaacattaagtctctaactggactaaaagtattgtgaaagaaa

SEQ ID NO: 6622 - DNA, 120 bp, synthetic construct
  source 1..120: mol_type = other DNA
cccgcaatatatttgccaaagggaacgaacctgaaatttatcaagtctctggatccagctgccaatttgcaggaaatagagaagtatcacctgggaacttatcagaaatgcaaaatctgg

SEQ ID NO: 6623 - DNA, 120 bp, synthetic construct
  source 1..120: mol_type = other DNA
ggatggttacctcctgtaaattttaaatcctagtaaacttttcaccacgtttctacttcaattcccatcacccagccgaagtaaaataatggggatagttgtgcttgtattaaagggttg

SEQ ID NO: 6624 - DNA, 120 bp, synthetic construct
  source 1..120: mol_type = other DNA
aactggatcaagatggcaaattaaatatttgttctagccttccttatcaatccaaatttacagacacaacaggaaaatatacatagacacatgcatatatgactgacagaggaaaaagta

SEQ ID NO: 6625 - DNA, 120 bp, synthetic construct
  source 1..120: mol_type = other DNA
aaaattttgtccactctcaactgttagaagcaaattaacttgtgagggcctactgactgttaagctgatggctgaaggtgatgaaagcttgtcaaaaggcacacacacacacaaacgcaa

SEQ ID NO: 6626 - DNA, 120 bp, synthetic construct
  source 1..120: mol_type = other DNA
accgactggtgaaggcactcaccctgcttcggtcaagccgccccccgctagggcgcttactcctaacagactcttggccgccgctgcctccctccattcatccctggcccattcatctct

SEQ ID NO: 6627 - DNA, 120 bp, synthetic construct
  source 1..120: mol_type = other DNA
ttctgggcccaccctagcagcctggtactttggacaaccaaacagatgaacgaacggagcacagcagtgctatgaaagttactgtaagcctgaaataaactgtatttttcttaaaaaaaa

SEQ ID NO: 6628 - DNA, 120 bp, synthetic construct
  source 1..120: mol_type = other DNA
ctgcctgaaaaataaggtaagaactagaaatcatttctgatgaatcaaattttcttctccaatgacaacatattgattttacactgtagtgcaacactagggtgatgctatgctgtgtac

SEQ ID NO: 6629 - DNA, 120 bp, synthetic construct
  source 1..120: mol_type = other DNA
atctcattgctcactgattctttgtgtacttttggagtttttctcccttcacttttttcttcttcattctctttactttttctccacttctgctccaggagcagactggaaggcagggtc

SEQ ID NO: 6630 - DNA, 120 bp, synthetic construct
  source 1..120: mol_type = other DNA
tagacacaaatatcttcaacaaaatactagcaaagttgaatctaacaacatgtcaaatagaccacatactatgattaagtgggtgttataccagggatgtaaaaatggttcgacataggc

SEQ ID NO: 6631 - DNA, 120 bp, synthetic construct
  source 1..120: mol_type = other DNA
gcattaatggctgcccactgatattctgaagtctggctctgtcatttgcttccctgagccatcctggcttgctcaatcatttccccccatccttggatttactatttattataaaagtaa

SEQ ID NO: 6632 - DNA, 120 bp, synthetic construct
  source 1..120: mol_type = other DNA
gtgctgggattacaggcattagccaccacgctcagcctaaatctggtttttatatcttaaggaaatgcagaatttctggcactacagttgtcaataagtacatgtaaactaccttcgctt

SEQ ID NO: 6633 - DNA, 120 bp, synthetic construct
  source 1..120: mol_type = other DNA
gacttttgcaactcaataagaaaaagaggccccaaaagaaaaatatatgaagcataagaacaggcaagttgcataagaggcaatcccagaagcatataaccatgaagagaagctcaaaac

SEQ ID NO: 6634 - DNA, 120 bp, synthetic construct
  source 1..120: mol_type = other DNA
ctaattgttttgaggtgccacaaaccatgcccatataagatgacaaactaaatcaataaatgtgtgtgttctgattactccatggactggccattaacccccttcccctcccatttcctg

SEQ ID NO: 6635 - DNA, 120 bp, synthetic construct
  source 1..120: mol_type = other DNA
aaaaacaagacaagactagcagtgcccaccatacatatatcttttacctcaaacttagacaagggctaggcagtgagtgaggtggtaattatcaagggattttcctagttgtcaagagct

SEQ ID NO: 6636 - DNA, 120 bp, synthetic construct
  source 1..120: mol_type = other DNA
gaagctattaaccaggtgtagtaagaagcttactcctgagattctagagcctagaatttggggaacattcttcaaaagctggacttattttaatagacaggaggagggacgaagggaatg

SEQ ID NO: 6637 - DNA, 120 bp, synthetic construct
  source 1..120: mol_type = other DNA
taatcgagtgtcttgctaagtcaatgtgcctctgtctctttttaccagttctgtctttgtgtctctgtgccttcatgtattttttcccctgagtttgcacgtctctgtctatgtggatat

SEQ ID NO: 6638 - DNA, 120 bp, synthetic construct
  source 1..120: mol_type = other DNA
tttaagaactaaatgatgtgtaataaagctactggtactcagtaagttttgtatccttttcctagagtgagtcttggtcataggcatgcgtatacttgcagcgtccctgggtaggccgaa

SEQ ID NO: 6639 - DNA, 120 bp, synthetic construct
  source 1..120: mol_type = other DNA
caaggattgtttggttttaataaaatgtaaattctatttcaaaagagagagaaagtgaaagagagagaaacagagagacagagaggtcaaaggctgagatttatggagattggatgctcc

SEQ ID NO: 6640 - DNA, 120 bp, synthetic construct
  source 1..120: mol_type = other DNA
gtgtatgcataccacgttttctttacctattgatagatactcgagctgattacaaatattggctattgtgaatgatgctgcaatgaacacaggagtgcagacatcccttcaacaaccaat

SEQ ID NO: 6641 - DNA, 120 bp, synthetic construct
  source 1..120: mol_type = other DNA
tgccagagcggaagccaatagggcagagcatggatcaagtagagctcaaaggcacatgtgttgcctggtaaggcaggttcctggttttttttttattattaaaaataacccctcacattt

SEQ ID NO: 6642 - DNA, 120 bp, synthetic construct
  source 1..120: mol_type = other DNA
aacttcagagctggaagagatcacctgtgtcaatcacgagcaaaattaggtacatagagctgattccctgggctaagatcatgtaacaagttcatctctgacttccattaagtgctgtta

SEQ ID NO: 6643 - DNA, 120 bp, synthetic construct
  source 1..120: mol_type = other DNA
tcttaccagtgtctttcacacagcagaaattttgaagtccaatttatcaagtttgttctattatagattgtgcttttggtgtcatatctaagaaatctctcccaaacccaaggttacaga

SEQ ID NO: 6644 - DNA, 120 bp, synthetic construct
  source 1..120: mol_type = other DNA
tcaccctcccctttccagttcccaaccctgtccccatggcttttaacatagagatttcatatgaggtaggctcatcaatgtttactgaattattaaattacctgtcactcctacaagttc

SEQ ID NO: 6645 - DNA, 120 bp, synthetic construct
  source 1..120: mol_type = other DNA
tatcttcttcaaggattaacccatctacttttgatcctaactctggaaggtactagagaaagtctccaaaggccagtgttttaggccctaataatctaggacaggcctctgattagtcct

SEQ ID NO: 6646 - DNA, 120 bp, synthetic construct
  source 1..120: mol_type = other DNA
tactgtatgcaacagggaaggctatgtttccaaagagaagtaaagccttcccctttgcatatggtaaagctcaagtaattgttgatacaaggacaaataaatgcatggaggaatgcaggg

SEQ ID NO: 6647 - DNA, 120 bp, synthetic construct
  source 1..120: mol_type = other DNA
aaaacttaaagtataataataaaaatttaaaaaatgatacaagatatgaaagatcaacctaaataagaattagcggtggggcgtcgtgactcacatctgcaatctcagcactttgggagg

SEQ ID NO: 6648 - DNA, 120 bp, synthetic construct
  source 1..120: mol_type = other DNA
aaagaacaagagtttctgcctggtaatccagagaattctttcagatgttatccaaggtcatcaaggagtaccctttatgggtctacaagaaacacagcattattaggcttggggtccaag

SEQ ID NO: 6649 - DNA, 120 bp, synthetic construct
  source 1..120: mol_type = other DNA
cgtgaagagttactgcaaaaataagaggtagcatatgtgagtgcctgatagagacctaatcaatgatttttgtaattattattttccctagacccaattctcaactagggtgttgcccct

SEQ ID NO: 6650 - DNA, 120 bp, synthetic construct
  source 1..120: mol_type = other DNA
agttcacctaaagcacagcttttctctagagctttcctagcagaagtcataatgctgtagggaaccaacagttgttttgtgttccagaggagaaagatgttccagcttcatatgttccca

SEQ ID NO: 6651 - DNA, 120 bp, synthetic construct
  source 1..120: mol_type = other DNA
tcccaaagtgcagaaggtgctgtcaggtgctggctaccaagcccttgctgcatgtggaaccaaaataaacccctgttgatatggaaacgggttgaattattttaagaaaaaaaaattgct

SEQ ID NO: 6652 - DNA, 120 bp, synthetic construct
  source 1..120: mol_type = other DNA
cacataagcaagtgcctgaaatatgggcactccatgctgttccaggaaagaacagtgtagaactcttgcttctattccattgatctatatctatacttatgcaagtaccacactgtcttg

SEQ ID NO: 6653 - DNA, 120 bp, synthetic construct
  source 1..120: mol_type = other DNA
ctatgtttaacttttgaggaacgaccaaactgtttttcacggtagttgcaccattttactttctcgccagcagtgtataagggcttcaatttctccacgtcctcaccagcacttgttatt

SEQ ID NO: 6654 - DNA, 120 bp, synthetic construct
  source 1..120: mol_type = other DNA
aagttcactggtctatcactttttaaaagtgcagagggactagcactgcaaaaggtctgaggcaggaaaaaacttccctggtctgagaagctgaaaggcagccagtatggctgaaacaca

SEQ ID NO: 6655 - DNA, 120 bp, synthetic construct
  source 1..120: mol_type = other DNA
ttggtggggccatcaaggtggactgactcgccccaagactggtagggcaaccttcaactcattatatgctgctctatacaatcaagttgaactctttacatataaaacatcctttaaaag

SEQ ID NO: 6656 - DNA, 120 bp, synthetic construct
  source 1..120: mol_type = other DNA
accaatccaccaacctagaattctgcacctagtgaaactgtcctttacaagtgagggaaaaacatacactctctacaaaagcaaaaattgaggaaatttgttgctagtacatggatcttg

SEQ ID NO: 6657 - DNA, 120 bp, synthetic construct
  source 1..120: mol_type = other DNA
ggaagagggaacagggagtgactgcttaatgcttatgaggtttctttatgggataacaaaaacattttggaactacatagaggtgatggctgcacaacattgtgagtgctaaatggcact

SEQ ID NO: 6658 - DNA, 120 bp, synthetic construct
  source 1..120: mol_type = other DNA
ttacaggtgtgagccactgtgcccagccttgtgtagctgttaaaaggatcatatggtgagttaaaatctgcctttttcctatgctacccattgttcattgaagcacagaaattctgaccc

SEQ ID NO: 6659 - DNA, 120 bp, synthetic construct
  source 1..120: mol_type = other DNA
gcatcagcacattctctcatctagcacactctttcttggggtaagtttctcttttaaaaagatttgattttggcgtttgggggtgggggatagcataacaaactacagtggaaacactga

SEQ ID NO: 6660 - DNA, 120 bp, synthetic construct
  source 1..120: mol_type = other DNA
atgatttccaaaggtccttcccagtctgaaattctacaagatagttaaagcaaaatgaggaatctgttgctctcctaccattcttatctgcaggcaatcagcataattccatgcctagcc

SEQ ID NO: 6661 - DNA, 120 bp, synthetic construct
  source 1..120: mol_type = other DNA
tctaagggataattttttaatatgaagagtcaagacccaagcaccactagtgctggtgaaacactgggtaatatgtagtagaaaataaaaagtagctcatgagatattggtactcctttc

SEQ ID NO: 6662 - DNA, 120 bp, synthetic construct
  source 1..120: mol_type = other DNA
gtgcagaagctttttaacttgatttgatatcatctgtcaacttttgctatggtttcctatgcttgtgggttattactcaaagagatctttgcctagtccaatgtcctggagagtttcccc

SEQ ID NO: 6663 - DNA, 120 bp, synthetic construct
  source 1..120: mol_type = other DNA
taatgcagtatactaagcagcatcttgtctccatgttctggagttatggacttgctttttctttcttaaaaatagtttcaactggccaggttcagtggctcacacctgtagccccagcac

SEQ ID NO: 6664 - DNA, 120 bp, synthetic construct
  source 1..120: mol_type = other DNA
aaacctgtgggggtagggtgggactctgtggtatatttttaggcatttcacattacagcactatgtacagcactgccttgtactcaataaatgcttcatgaattgaaccaattcctacca

SEQ ID NO: 6665 - DNA, 120 bp, synthetic construct
  source 1..120: mol_type = other DNA
ccggccgagtgatctttttaaaaacatagcatcattcactcctctactcaaaattgtccagtagcttctcatctcacttaaagccaaaatctttaccatggccctgtgtgacctagcttt

SEQ ID NO: 6666 - DNA, 120 bp, synthetic construct
  source 1..120: mol_type = other DNA
agggccatatgctacacaggcttcctaatactgcttagcaatccttctactggttcctaagtggtttactattgtgttccctggaagaggtattacaaacgttttattcttctcaagcct

SEQ ID NO: 6667 - DNA, 120 bp, synthetic construct
  source 1..120: mol_type = other DNA
ctgagaacacattaagctttcaactcaggctgatccctgacacagagaacgccctgtaatgctttaaaacaaactcccatcaaatcctggggaaaaaggagaatctgatttccagagtta

SEQ ID NO: 6668 - DNA, 120 bp, synthetic construct
  source 1..120: mol_type = other DNA
ggaaaactaacatcactcatcacccaccccctggcagctgaaatgatttgtcttccaagcttggatgaccaggagctataggcatattgcagggaaattaatttagtttctatattctga

SEQ ID NO: 6669 - DNA, 120 bp, synthetic construct
  source 1..120: mol_type = other DNA
gtgacctctaaagagagtagtaactgctccagtgtttaattggtatacgtacatttgatatagccacattcttaaatttgcagttcttttgcgttgttccttgtcatgctagaggactga

SEQ ID NO: 6670 - DNA, 120 bp, synthetic construct
  source 1..120: mol_type = other DNA
caattagatcctctgccttattgcaaggacagagggctttctgtatgtcgagttttttgccctcatttaccagaaaaatcagatcatacgtgggcttggagaatgagtgcaaggttttat

SEQ ID NO: 6671 - DNA, 120 bp, synthetic construct
  source 1..120: mol_type = other DNA
tatacattcctatcagttcatgtagaactttctaacattcctatgcttccgattcaattgcaaccaagcagatcatattgcttttttaaaaaatgtgtttatcttacatgaggtacatgg

SEQ ID NO: 6672 - DNA, 120 bp, synthetic construct
  source 1..120: mol_type = other DNA
tgagaggaaaacagaagatgaggttggctccaaagttattttattctcagcatttcattgctagtaccaatatggaaagtttggctgctggcatgtatatgcaagcatgcatcccactgc

SEQ ID NO: 6673 - DNA, 120 bp, synthetic construct
  source 1..120: mol_type = other DNA
ctataatctctggactctattaccaaagtttgttatggaagtaaatgaaggcatgagacactttgaattcctggtatacggagacactataaaaggctcacgggacgttgcagaccatta

SEQ ID NO: 6674 - DNA, 120 bp, synthetic construct
  source 1..120: mol_type = other DNA
atcttttttaaataattcaaatactgaattaagtctatagttaacaagatatcacttacattttctaagacactctcttggatttagctgtgtggcactattaaccaaaaataaattcta

SEQ ID NO: 6675 - DNA, 120 bp, synthetic construct
  source 1..120: mol_type = other DNA
tattttctcttaatggaaaatgcaaatgagttaaactattaatgattttcatcctataattgctacctactgtcatttgtgtggacaatttcaataggcatgttcactttttagatagag

SEQ ID NO: 6676 - DNA, 120 bp, synthetic construct
  source 1..120: mol_type = other DNA
tgcacatatgtaacatcaggacaatcagaacaacatttttaatattggtaatctattattcattaaacaaaaatttggcacatattgacaaaattcttgctttctgttattattgtaaag

SEQ ID NO: 6677 - DNA, 120 bp, synthetic construct
  source 1..120: mol_type = other DNA
aggattacaggattgagccactgtgcccggccacaaggtagttattcttatttcaaactagtttgaggcatggtgctctatgcttaaatgtctttggagaagttcttgtaccagcaataa

SEQ ID NO: 6678 - DNA, 120 bp, synthetic construct
  source 1..120: mol_type = other DNA
gcatctgctcaccttctggggagtcctcaggaactttaccatcacggtggaaggcctaaggggagcaggcacatcacatggccagagcaggagcaagagagaagtgccacacttttaaat

SEQ ID NO: 6679 - DNA, 120 bp, synthetic construct
  source 1..120: mol_type = other DNA
ggctcttacaagaatcagactcatgaccttggcctcattagcactatgagctaaccaagtctgacatatagaaattacacaagcgacaactcataagagaaaccagaactgtaagatggc

SEQ ID NO: 6680 - DNA, 120 bp, synthetic construct
  source 1..120: mol_type = other DNA
aagtgttgggattacaggcgtgaggacctctagcaataatccccaacaggaagatcagttaacaaacaaattcattccagtgtgaggtattcccaaagcagtactttctttgtattccca

SEQ ID NO: 6681 - DNA, 120 bp, synthetic construct
  source 1..120: mol_type = other DNA
tgctggtgtgagccatcgcacccggtgctcatatcatattgttaatgtggcttttgtaatattcaactaattggtgatgtacagacctgccttctttgtgctgtgaattcctttacagta

SEQ ID NO: 6682 - DNA, 120 bp, synthetic construct
  source 1..120: mol_type = other DNA
ccctcacaacactggttttcacctccattgccccaacctgctattctacacattagttgtgggtaagaaaaactggggggaaaaatcaggaaaatataggtgtctaagcattgtttcaag

SEQ ID NO: 6683 - DNA, 120 bp, synthetic construct
  source 1..120: mol_type = other DNA
ccaaaaactcaaacactacttacttgtcaagacattttattctggtacttagtaatgatttcccatcttaatgtaacttttattcatgatgaggtcctgattatctagcctccttatgag

SEQ ID NO: 6684 - DNA, 120 bp, synthetic construct
  source 1..120: mol_type = other DNA
cccgaagtatgaagtctcccatactggctatttacatataacttaattcataagacttttaagaaatctctttttgccttctccttattctccagactggcattgtgaagatgagagcca

SEQ ID NO: 6685 - DNA, 120 bp, synthetic construct
  source 1..120: mol_type = other DNA
caggcatgagccaccgtgcccggccatcaagcatgattttggttattgaagtagaaagtagcaattaagcattgtgtagtaatgcactgtttcatttctcctgtgtcactatatgactgt

SEQ ID NO: 6686 - DNA, 120 bp, synthetic construct
  source 1..120: mol_type = other DNA
tgctgggactaccacccactgtgcccagtttccaagttcctctttcagggtgacaacataaaaatttagttctgtagtccggtagaagataactcttatcacagcaagaggaaagtgcat

SEQ ID NO: 6687 - DNA, 120 bp, synthetic construct
  source 1..120: mol_type = other DNA
cagagtgcttcttacaagtaagatttcacttgcttcttccactctccaccactctttactaaaatttatttagatatccattgaaaaccttttcttgcccggctgcggtggctcacacct

SEQ ID NO: 6688 - DNA, 120 bp, synthetic construct
  source 1..120: mol_type = other DNA
agtccaacaatgcatttctaaacatgaaaaacccaagaggttaatcatattgttttccttcccatagctgatgagaatctgggattatctcctgattccccagcccactgtacccaactg

SEQ ID NO: 6689 - DNA, 120 bp, synthetic construct
  source 1..120: mol_type = other DNA
cagtgtaaagtgcagcagggagtgctagtaagataaggatgcaaaaaatagtcttccattattcttatggtgtgacagaggaaacaattcctttgacttacacaatcttccttctttccc

SEQ ID NO: 6690 - DNA, 120 bp, synthetic construct
  source 1..120: mol_type = other DNA
ccccctccccccaccgcacaacagtccccagagtgtgatgctcgtgtttctgttcacatgctttacatttgctataataggaaggttcaatcaaagctttgttttcaattatgaaaatgt

SEQ ID NO: 6691 - DNA, 120 bp, synthetic construct
  source 1..120: mol_type = other DNA
aagggcttctatggtcaaataaattgggaaatgattcatgctatgattccctctaggaaatgtgttgtgcatgttaggataccaaaagctttgagcagtttaacagtaaaggaatctgtt

SEQ ID NO: 6692 - DNA, 120 bp, synthetic construct
  source 1..120: mol_type = other DNA
attctgtaatgacccatgagaaaggcactattataattccccttgtataggtggggaacctgaagcacagagaggttatcttaattgttcaaagtcgtacagccaagtcaatggcagatc

SEQ ID NO: 6693 - DNA, 120 bp, synthetic construct
  source 1..120: mol_type = other DNA
atcccggagctctttacaactgtacaagcctagaagtaagatgatttacttaaagactaaaagtgacaaaaatgagttcattcaatagatcctgtatccccaaacttcttcttattagca

SEQ ID NO: 6694 - DNA, 120 bp, synthetic construct
  source 1..120: mol_type = other DNA
atctcggctcactgcaagctccgcctcccgggttcacgccataaaatagattctcttatatgcctcttttataaatgaggtaactgaagcatagagtgagtagagaactcaggatttaaa

SEQ ID NO: 6695 - DNA, 120 bp, synthetic construct
  source 1..120: mol_type = other DNA
agcaataatcctgtatagacataagggacattcctagagaaaggttgacagtctggctttcaagagtgacagactgtcaatggtcagcaatttgattttgacagtgccccagaattgatc

SEQ ID NO: 6696 - DNA, 120 bp, synthetic construct
  source 1..120: mol_type = other DNA
taggagcctttaccttagttttcacaggtggtgtatactggcagaatattttagtgttgtcttttgggctgcgatccagtaggtggcgcttaagagtgttagccagcagatagcttcttg

SEQ ID NO: 6697 - DNA, 120 bp, synthetic construct
  source 1..120: mol_type = other DNA
acttaaaaatgatgtttcctctctccatgccagaaacaagagatttttttttcttcggtctttaccttgaaacttgtggggttcctggaagcaatcaaaacctctaagactgtgggcccc

SEQ ID NO: 6698 - DNA, 120 bp, synthetic construct
  source 1..120: mol_type = other DNA
cctggctgcaccttagaatcacctggacagcttgtaaaaaatactgacataggggcctgaccctcagaggttttatgactgcttacacaatagtaagcaaaatatatatgtgtctgtgtg

SEQ ID NO: 6699 - DNA, 120 bp, synthetic construct
  source 1..120: mol_type = other DNA
acaattccaatctttcaactagattttttgctgtcttactggcagatgctggctaatatctgttagagtttgtacacctggggataatcaacgtccctacacctaaggggaagtcaggat

SEQ ID NO: 6700 - DNA, 120 bp, synthetic construct
  source 1..120: mol_type = other DNA
agccactgtacctggccattagctgaattttcaaccctctcttcactgctggcttttcagccaatacagatgttcaaatctttcccattctaagaaactttctcgcaatcccatacaact

SEQ ID NO: 6701 - DNA, 120 bp, synthetic construct
  source 1..120: mol_type = other DNA
cattcagcttgtgctcagtttccctataagggtaagaaaagtttccatcaggtagccacttgtttttatactgaaagactaatctgctccaaaatgctcccaagtagaaatgacaggact

SEQ ID NO: 6702 - DNA, 120 bp, synthetic construct
  source 1..120: mol_type = other DNA
tatcacctaattgcaatacctgaggtctttgaagacctgattctgttttcattgtttctggcttcatcgtgttctttgtaattttggattatgagttcatgttcaacctgactttatcct

SEQ ID NO: 6703 - DNA, 120 bp, synthetic construct
  source 1..120: mol_type = other DNA
ggaagattttgtgtcataaatcagtgcttctcaagctgtaatgtgcattagaatcacctgaggttcttgttaaaatgcagattatgatgcagtaggtcttgagtgggggcctgagagtca

SEQ ID NO: 6704 - DNA, 120 bp, synthetic construct
  source 1..120: mol_type = other DNA
aggttggtcatatgccaagtcaatctctgacatctcaaagcatatactatcagcaccaacactcagaatttaaaaacctgtgatatggcatgatattctgccatctggaaatgaatcacc

SEQ ID NO: 6705 - DNA, 120 bp, synthetic construct
  source 1..120: mol_type = other DNA
caataccttctcaaaggtaatgggcatagcacaactcagagttgacttctatcagaactgaggcctgggaatatcagagtccccaggttttttagcgtcataaggcaaagtcttttcttt

SEQ ID NO: 6706 - DNA, 120 bp, synthetic construct
  source 1..120: mol_type = other DNA
taccagagcaagtactgtgtgaacatgtggaagtccatgccctaatagagttgcaattttttattcttcttctatagtggtggcttggtttgtgtacctatttttctgcatttgtattgg

SEQ ID NO: 6707 - DNA, 120 bp, synthetic construct
  source 1..120: mol_type = other DNA
ggaaaaagacagaaaatatcaggttaatcgtgttgcttccattttggagacttcagaaaatagccccagttaagtgtgcagctacatggcatgccaagggacaagatgtctgtaagtttc

SEQ ID NO: 6708 - DNA, 120 bp, synthetic construct
  source 1..120: mol_type = other DNA
cctttgatccaaaatgcttcccttgatactttctgtatctagcagaaaaccgtagacaagaggcactagacaaaggagtgtcacaaggccagagtgattattaaccaattatttttaaat

SEQ ID NO: 6709 - DNA, 120 bp, synthetic construct
  source 1..120: mol_type = other DNA
tgcacctcttttgttaaatttcttcctagacatttgatttttttgcatactatggtgaattaaattatttttatattttctttttggatacttcattgccaatgtacagaaacacaactg

SEQ ID NO: 6710 - DNA, 120 bp, synthetic construct
  source 1..120: mol_type = other DNA
gggatttctagatgccttgctgttggtggtgtgagccagatcagacacataaatgtgagcagctaaatttttgtcatgtttaattctgccttccatctgaatacgctagctatagacaca

SEQ ID NO: 6711 - DNA, 120 bp, synthetic construct
  source 1..120: mol_type = other DNA
ccccacgcatgattttatttagtcttcacaacaccctgcacagtgggtgctgttatctccattctgcaggtgaggaaactgagagttacagaagttaagtattttgactaatatcactca

SEQ ID NO: 6712 - DNA, 120 bp, synthetic construct
  source 1..120: mol_type = other DNA
gttatgctgaaattcacttgtgctttctgaccactgctcattcctaagttttcagaagcaaatccttgattagtgagtctgagctgggaatttggaatacagacctgtcttgatggcagg

SEQ ID NO: 6713 - DNA, 120 bp, synthetic construct
  source 1..120: mol_type = other DNA
ggaggtaaaacaacaaccaacatttgttttctcacatagtttctgtgggtaaaagattcaggagtggcttagctgggtggttctagctcagggtctctaatgaggctgtagtcaaaatat

SEQ ID NO: 6714 - DNA, 120 bp, synthetic construct
  source 1..120: mol_type = other DNA
caacacccaaccccaccctgctacccttcccaaactctggtaaccatccttctactctctatctctgcagattcaattgttttgatttttatatccaacaaataggtaagaacgtgagat

SEQ ID NO: 6715 - DNA, 120 bp, synthetic construct
  source 1..120: mol_type = other DNA
tgtctagacaagttgtccattaaggctataaaaagtttaagtcttttaaaattcagggaattatgtaccacaagcccttttaaaaaataaaatagtggaggtcaggtgtggtggctcatg

SEQ ID NO: 6716 - DNA, 120 bp, synthetic construct
  source 1..120: mol_type = other DNA
gagattggaacaccttttcagctgaaaagtaaggaagtgaacatagaataatggaaacattaaaaaaaaaaaaaacccacaggagccagcttaacagagcccccactgaccaaatgtggg

SEQ ID NO: 6717 - DNA, 120 bp, synthetic construct
  source 1..120: mol_type = other DNA
aaggtcaactaattctcctcggtaaagttaggaaaggcatcactcaagaatgtggcatttgagcttagtcttgtggatgaagaggcaataactgttagcattcattgagtgtctatactg

SEQ ID NO: 6718 - DNA, 120 bp, synthetic construct
  source 1..120: mol_type = other DNA
ggatgggtggttgactgatcctccctttgttttttatggtcaaactgcagtctggagacagaggaaagtgggaaagttgaaaacgagacctgatttggcagaagaaagagttagaaaaaa

SEQ ID NO: 6719 - DNA, 120 bp, synthetic construct
  source 1..120: mol_type = other DNA
ctctcctctcccctaccctccccagtctctggtaaccactattttaccctacttctatgagattaacgtttttagattccaaatatgagtgagaacatgcagtatttctctttcattgcc

SEQ ID NO: 6720 - DNA, 120 bp, synthetic construct
  source 1..120: mol_type = other DNA
tatagtagtgtacaataatatcctaggcattcacattctcttctcactgactgacacccataacaactttcagtcctgcaagctccattcatgataaatgccctatgcaggtgtaccatt

SEQ ID NO: 6721 - DNA, 120 bp, synthetic construct
  source 1..120: mol_type = other DNA
ctctaaaatcccttgcttaagatatttctgctagttagtgggagagctaagagtagaacttaattttcttgacatctagttccccatttctccctcccatccccaaacttgaacatgaat

SEQ ID NO: 6722 - DNA, 120 bp, synthetic construct
  source 1..120: mol_type = other DNA
aaccatagcactcctattcagctacccccttattcgattctgaacatgtatagctcacataattcacccaatatttatttataactatgaggaagtcaggaaaaagaagaggtggacaga

SEQ ID NO: 6723 - DNA, 120 bp, synthetic construct
  source 1..120: mol_type = other DNA
ataaaatataaaaaaaaaatagtacagggccaggcctgatgcccagtgtttattttccaagactgtccctccctggaagactgccacaaattaaactcttctcaaggctcaagtcgggat

SEQ ID NO: 6724 - DNA, 120 bp, synthetic construct
  source 1..120: mol_type = other DNA
tctttattttcttttatttgactaattaatttatttgagacatggggtgtcaaactcctggtctcaagcaatcctcttgcctcagcacccccgcctcaagtagctgggattagaggtgcc

SEQ ID NO: 6725 - DNA, 120 bp, synthetic construct
  source 1..120: mol_type = other DNA
tagttctcccatgactcactccatgtcatgcttctaaggaagcatgtcggttgataatcaaacttttagaaatcaatgctgacattatttttagagacagcgccttgctctgttgcccag

SEQ ID NO: 6726 - DNA, 120 bp, synthetic construct
  source 1..120: mol_type = other DNA
ataaaaacaacaactttagaacgttcaggacaaagccttcaaagccttcaatgccctgaagcaggttttagaatggctgtcctctcaaattgctttttcaagtgtactgacccgcacttt

SEQ ID NO: 6727 - DNA, 120 bp, synthetic construct
  source 1..120: mol_type = other DNA
agttttgggaacatccacttacctctttaaattctgcttttaacacacagtgtcctagggttgactgccactgaagtttcctgccactatgtttgcctaggtaaaatgtcttgaaaatct

SEQ ID NO: 6728 - DNA, 120 bp, synthetic construct
  source 1..120: mol_type = other DNA
aagaaagaaagaaaaaaaggacagactatcatggattctttttcttcttcactttaagaactgattaaaagacgtacgaaggaaacagatggctccaattctgattgtgtccatttgcct

SEQ ID NO: 6729 - DNA, 120 bp, synthetic construct
  source 1..120: mol_type = other DNA
gcttcagctcatgagtctgtttcttattttttgttttctaatggagtttgacttgcaaatctgcaatttggcagcatttatttctgtttggggcttttggtatagcttggctcaagtccc

SEQ ID NO: 6730 - DNA, 120 bp, synthetic construct
  source 1..120: mol_type = other DNA
agtgcccatgacctttcaaagtgggatttatttgcttgtaattacaaactcttgaaaactggaatcgaaaatggagacatgcctgagcaggtttttatttatttgctagttacacattta

SEQ ID NO: 6731 - DNA, 120 bp, synthetic construct
  source 1..120: mol_type = other DNA
ggttgtactaaataatgatgacctctgctggatttctgtttacatccagaaaacaatgttaaggatgtatttattcccctaccctgaagaaagtgtaggatagaattgtttttagcattc

SEQ ID NO: 6732 - DNA, 120 bp, synthetic construct
  source 1..120: mol_type = other DNA
gtgtgtgtgtgtgtgtgtgtgtgtgtgtatcttttgctttgtggaggagggagaatgctcgctgaaaggagatcttagatgtgaaatataagatttgccaagtactcttaaggaagagta

SEQ ID NO: 6733 - DNA, 120 bp, synthetic construct
  source 1..120: mol_type = other DNA
caatatagcttcacatacagcttgggaaacactgtgagcattgagggctcacttcagaaatgtccctcactgctgtggcctctgctatgtttttaatgacaaacttcttaatagccttat

SEQ ID NO: 6734 - DNA, 120 bp, synthetic construct
  source 1..120: mol_type = other DNA
agagagagagagagagagagagagagagagagagagatctttttcctctctgtttttcagattggataatatctacagatcaatcttcaagtcagctgattgtctcttttgccatattcg

SEQ ID NO: 6735 - DNA, 120 bp, synthetic construct
  source 1..120: mol_type = other DNA
ttaatggaacactgaatgcaatatgtttgacccatttgtgggtacaaactctccagattatctactgtgaagaaggactctaggttgtcatctagattccctatcagcccagggaaagtg

SEQ ID NO: 6736 - DNA, 120 bp, synthetic construct
  source 1..120: mol_type = other DNA
tatcccttgatatcctcagggttggttccaggactgcttcaaacaccaaaatctgagcattctcaagtcacttatctaaaatgacatagtatttgcatgtatcctacacacatcctctgg

SEQ ID NO: 6737 - DNA, 120 bp, synthetic construct
  source 1..120: mol_type = other DNA
tttctttttcttttcttctttttctttctgtttctcctagctggctgagcacagaaacttgaaagagaaagaatccccacgcatgttcagctgttttgaactctgagagtactggcatgg

SEQ ID NO: 6738 - DNA, 120 bp, synthetic construct
  source 1..120: mol_type = other DNA
gctcaaaaacagcctacagaacattgaaacgacctgccaacttagtctacaatctagttgcactagaaatatccctccaacaaaccacatcaatcaactaaaaaaaacaatggttagaag

SEQ ID NO: 6739 - DNA, 120 bp, synthetic construct
  source 1..120: mol_type = other DNA
tttccacactcattagaatgcccatttttctgaatcctgattaacagtgactattttaaaaaatatttgccaaagggcttctcattattactttgctttgcctttttttttttttttttt

SEQ ID NO: 6740 - DNA, 120 bp, synthetic construct
  source 1..120: mol_type = other DNA
acttagctggattcctaactggttgaagaattgtactcaaagagtggtgatgaatggattgacaacaatttgaagggaggtctctaatagttgctacagggctctctacttgaccatgtc

SEQ ID NO: 6741 - DNA, 120 bp, synthetic construct
  source 1..120: mol_type = other DNA
atttcaggccagacggactgctggagcaaaggcacaaagtgcacagaatgcaaaagtaaattcaaggaaaagttaatgttcctgtaaggcttgaatgtacagatggtccttgacatatga

SEQ ID NO: 6742 - DNA, 120 bp, synthetic construct
  source 1..120: mol_type = other DNA
cctcggcctcccaaaataccaggattacaggcgtgttgtgcagccctcaccaccactgatttccagaacaaataaggattccttattttcagatctagaaattgagtagttgtaatttta

SEQ ID NO: 6743 - DNA, 120 bp, synthetic construct
  source 1..120: mol_type = other DNA
tgcaggttattggcaactcaggaataaggcccaggaatcggcatttaacaagaaactcaggcgatcctaatgcacactgaaatttgagaaccatcacactagattgtaaaatatagggag

SEQ ID NO: 6744 - DNA, 120 bp, synthetic construct
  source 1..120: mol_type = other DNA
caagagttcactttgagggaatttgctcaggaatcaaatgcaacacgatttaaaaaaaggaaatcaaagtttagtcaatttctactcagtaattaatggtcatgctgacccataaatcac

SEQ ID NO: 6745 - DNA, 120 bp, synthetic construct
  source 1..120: mol_type = other DNA
aaggactgattgataaagaatggattttaaacgtatggtaaacgtgctaagcattcctgtttaaggtcgatggatcttgaaggccaaagaccttatgcacttaaatagatgtatggcaac

SEQ ID NO: 6746 - DNA, 120 bp, synthetic construct
  source 1..120: mol_type = other DNA
tgtttaatctatattatactatattatgcacttagggtagttttattttaactacctttggcatatcaaagacatattgacaacgcatttccataatatcgaagctgggagtttttgcct

SEQ ID NO: 6747 - DNA, 120 bp, synthetic construct
  source 1..120: mol_type = other DNA
gtagaaatttccccccagactaagcaggctgctgtccttgatactatgcctctagagaggaaaagtggccttaacctttaggaaattacaacctacttaataccctatcttttaagtgct

SEQ ID NO: 6748 - DNA, 120 bp, synthetic construct
  source 1..120: mol_type = other DNA
caatcactactccgtgactaagaatggggaaatagtagttggaatcctgtaaaggtaaaaattttaaaagccaccacagattgctcttaaaggattctgaggcaatgcaattcaatgcaa

SEQ ID NO: 6749 - DNA, 120 bp, synthetic construct
  source 1..120: mol_type = other DNA
gaccttccttctcatttgactatttttcatcttactgcatactcccagttagggccaccactctaattcctatgctttggggtagttagacagcagtagtggggaaaataaattatgcag

SEQ ID NO: 6750 - DNA, 120 bp, synthetic construct
  source 1..120: mol_type = other DNA
tttaacattaacccttctgttgtatcacactagaaaagagttttgtcagttgggcatcctctaggctagctgagctttggccacctctgttagttttgaatcgattggacctgtgaagtt

SEQ ID NO: 6751 - DNA, 120 bp, synthetic construct
  source 1..120: mol_type = other DNA
actgaaagggggatgaaaaggagagtgaaataggaaagtcctagggagccaaatatcagggaaaaatcaagctgtaatttcaaaaatgctatagttcctctagacatttaacagtttaca

SEQ ID NO: 6752 - DNA, 120 bp, synthetic construct
  source 1..120: mol_type = other DNA
gaaaacgtgtttgtatatagggtgaatttcttttggggaatgtggcatctcagatcatttgccaatgaaaggaaagctgtgtcacaaagtcacttacataggtgtctgagagaggaaaaa

SEQ ID NO: 6753 - DNA, 120 bp, synthetic construct
  source 1..120: mol_type = other DNA
tcattgtagcactagtgtctgacagagaacacaatagaattggctatgttattctcccacttgtttaacaaatattgcactgacctaccacacttggtactgctacccacagacaagacg

SEQ ID NO: 6754 - DNA, 120 bp, synthetic construct
  source 1..120: mol_type = other DNA
accagctcagtgcaagaagaggaaaaggcttggttcctacactcaaatcatcaattcctacaacctttcaaagttctcattctgatccactcctgattaagtggataaatcaaatgcctt

SEQ ID NO: 6755 - DNA, 120 bp, synthetic construct
  source 1..120: mol_type = other DNA
ctgaaagtagagaggatcacagacccatctgtccttccttacagaaatgattctcttagggaaagcacgagaaagctatgcaatagggggaggtatgccaaagattttgatcacttcatt

SEQ ID NO: 6756 - DNA, 120 bp, synthetic construct
  source 1..120: mol_type = other DNA
agagtctaagtctggtatttaaggactaactcacattgtccttttgtgactcagaagtcattcattggcttttgctaacatgtcttgtaggtactctgtccttcacacacccacacacac

SEQ ID NO: 6757 - DNA, 120 bp, synthetic construct
  source 1..120: mol_type = other DNA
atctccaaagcctgggaagtatcatgatgaatgagaagagatcattactgccaaatttctgagggaggtgaagatcaatagctaatatcactaccaaacacagaaatagtatttacgtgg

SEQ ID NO: 6758 - DNA, 120 bp, synthetic construct
  source 1..120: mol_type = other DNA
ttggcccatgaacatgtctatcaattcctgtttcatttgctaatactacagactaagttttgagtccagaatgacaagctccccctcttacataatccttcgcattttttccagtataat

SEQ ID NO: 6759 - DNA, 120 bp, synthetic construct
  source 1..120: mol_type = other DNA
ccgggatgatggcatcaaccattgtgcctggccatattctgttttttgactcgtgtgctgtttacacatgtacattcactttgtgagcattcattgagctctatacttatagtttacccc

SEQ ID NO: 6760 - DNA, 120 bp, synthetic construct
  source 1..120: mol_type = other DNA
ttctcggttgacagtacttttattttagcactagaaaaatgctgtgtaactgccttctgttcttttggtttctaatgagaaatctactttaattctaattgttcttcctctgtaagtgag

SEQ ID NO: 6761 - DNA, 120 bp, synthetic construct
  source 1..120: mol_type = other DNA
aaaaacaaccctgtggctgtcttggttatattgttcctttaatattttgaatgtccacgagaaagcacagaggaaccttatactaagtatggagtgtgtgggggtggggtatacaggtgt

SEQ ID NO: 6762 - DNA, 120 bp, synthetic construct
  source 1..120: mol_type = other DNA
ggagagttggcaggcagttcattggaattcacagaataaccttttaagtcggaaaactaaactccatgcaagaaatcagagtagtaataggtgcttgatgtcactgtcaccccttgtaca

SEQ ID NO: 6763 - DNA, 120 bp, synthetic construct
  source 1..120: mol_type = other DNA
tgcatttcattttcaccattttctctcgggttttggctttcagcaattcttgcgtaaacccctttgctctctactggctgagcaaaagcttccagaagcattttaaagctcagttgttct

SEQ ID NO: 6764 - DNA, 120 bp, synthetic construct
  source 1..120: mol_type = other DNA
aaactcaaaagctgtcctagaccagacttggacaactacatgttattttatgcactagtaacaggttatcatccatcgtgtagacaatctcacctttccattcatgtctctggctgcatc

SEQ ID NO: 6765 - DNA, 120 bp, synthetic construct
  source 1..120: mol_type = other DNA
aagatctccaaagatcttttgtgactacaacttcttttgtaaataatgatatatggtatttccatcgtcagttaccgagtatagccactgggtatcactactttgtgttaaagtgccttc

SEQ ID NO: 6766 - DNA, 120 bp, synthetic construct
  source 1..120: mol_type = other DNA
gctaatgcttatataattggagcctctcggatcctgccgttatgctctagggcatatagtttgcagtgtatgtttttgtttatttccaggaccttttaccgagatccattcactgtcaat

SEQ ID NO: 6767 - DNA, 120 bp, synthetic construct
  source 1..120: mol_type = other DNA
tttaattgagcagctactacatgcaaggagctgtgagaaatgaacatgaggccaagatattgaccttgccctcaaggaatttacagtcttgtcagagagataatccatacccacaaacac

SEQ ID NO: 6768 - DNA, 120 bp, synthetic construct
  source 1..120: mol_type = other DNA
tgcttcaattccttgtctgtgaaaagggtgtgaggctaatccctgcctgtttagtttctggtacaaaaagaccaaccaattacttactacacactaggcaggagagatacaaaggtgaat

SEQ ID NO: 6769 - DNA, 120 bp, synthetic construct
  source 1..120: mol_type = other DNA
cagtgagattatgggtgatttccctctctgcatattcttctttcttattttcttttaagaagacacatgctgtcttaaaaatatgaaagtaaggccgggcgcggtggctcacgcctgtaa

SEQ ID NO: 6770 - DNA, 120 bp, synthetic construct
  source 1..120: mol_type = other DNA
gagcactggtattttcagtaggaaggctgtcagtgatagtaattaccctggggtactctcagtgtggactcaataatggatgctactaagcacttgacacaattgggatatagagatata

SEQ ID NO: 6771 - DNA, 120 bp, synthetic construct
  source 1..120: mol_type = other DNA
ctctttcttcccctcttgttgcaatatcatttgttgactagtttgctgatttgaagtactgtccttatctcacactaaattcctctgcatgtttgattttatttctaagaggttctcgtt

SEQ ID NO: 6772 - DNA, 120 bp, synthetic construct
  source 1..120: mol_type = other DNA
accttctccaaggctcccagttctgagcctttggactcttattaggcaggggctacaatggtgtttttaattgatctctagcatggtgcaaggaccatatttgttctgagaatgaataaa

SEQ ID NO: 6773 - DNA, 120 bp, synthetic construct
  source 1..120: mol_type = other DNA
tcactctcatagtcccctcacccccacactggcagcattcaaactaggccattactacccctatctttgcactcttaaaatggttctgttttctcttccttccctctcgtatctattcta

SEQ ID NO: 6774 - DNA, 120 bp, synthetic construct
  source 1..120: mol_type = other DNA
gggctgactctcccagactttcaaaaagactcaaagctcaatagttcacagctccagcaattcctatctgaccatttgtgattgttggaggtcctgtcctaaaaagatgacaaaaatgtg

SEQ ID NO: 6775 - DNA, 120 bp, synthetic construct
  source 1..120: mol_type = other DNA
tgtttttattatatagtccccagaagaaacttctaatgggaaagtgggaacctctgttggaatacgcacgtgtgtacatacatgtgtgtacacacgagttgtggacatgcctaaaggaga

SEQ ID NO: 6776 - DNA, 120 bp, synthetic construct
  source 1..120: mol_type = other DNA
tgatttagaaattaaagctgggtctaatttgggcctcttaaattagatgggcaggtagcctagaccagtgcactcaaaatgtagcccgccaaatcagtgcctgtctgtgaacttttatta

SEQ ID NO: 6777 - DNA, 120 bp, synthetic construct
  source 1..120: mol_type = other DNA
ccggattcttcttatggatgcactcaccacattgcaacttaaagctcctgcccacttcgtgtactgtcaacagtgccatggctcaccacagatatgtttatcccttctgtccatttcgca

SEQ ID NO: 6778 - DNA, 120 bp, synthetic construct
  source 1..120: mol_type = other DNA
tgcctcacctgcgcctcctccctcacctgcagcttttgctactgcttgaccctggggctgtgcaggaaaactgggcatatcctgaaactcaataacaggtacttggggcaggaagatcac

SEQ ID NO: 6779 - DNA, 120 bp, synthetic construct
  source 1..120: mol_type = other DNA
gagcagaacagagtcacgcgatgtttgtgttgacatctctcactcctccaccccaacaagcacctgggccaaatgcccacaccctcgccctttgcagaaaatgatgaaagacaacaacct

SEQ ID NO: 6780 - DNA, 120 bp, synthetic construct
  source 1..120: mol_type = other DNA
taaccacagcagccagggagaccttcccccaacacagccaaactctgtcatttcccctaagaacacctgagatgctcgactccctcctctgctcccagagtcccagagaccatgactgtc

SEQ ID NO: 6781 - DNA, 120 bp, synthetic construct
  source 1..120: mol_type = other DNA
ccgcgcctggcctggtctatagttttgttgtagtatttgcttttggtatcaaaagtgtaatgctggcttcataggatgagtttcaaagtgttccaccttaaattttttggagaggtcggg

SEQ ID NO: 6782 - DNA, 120 bp, synthetic construct
  source 1..120: mol_type = other DNA
aaaagccttgaacggaaccatttcctttgcaaaggaaacagcaagatccaagtctgcagcgaaagttctttctcaggtgaaattataactagtcagaagcagagtcagtgatcatgcaca

SEQ ID NO: 6783 - DNA, 120 bp, synthetic construct
  source 1..120: mol_type = other DNA
ataaaaaagctgccaaaaaaagcagcaacttaaaccgggaacgcatggaagaaagaagagcttattttgacttgcagacacgttatccaggtgcctcaagggaagtaggaagttttgcca

SEQ ID NO: 6784 - DNA, 120 bp, synthetic construct
  source 1..120: mol_type = other DNA
ccagcatacagaataaacctctgtgatcattaaagataaaaacccaacagaaaaataggtgaaggatatcaataaggaaagtcaccagaagtgacgggcaaacgtatgaactgcccccag

SEQ ID NO: 6785 - DNA, 120 bp, synthetic construct
  source 1..120: mol_type = other DNA
ccctttctgtactgctctgcagtgccacctttgtaataaatccagtatccatatgtgtatgggcctgtttctgaactctccatcctattctaatggatttttttggtctattcttgcact

SEQ ID NO: 6786 - DNA, 120 bp, synthetic construct
  source 1..120: mol_type = other DNA
ttccaaacagtaaacaggatgaagacgtaggagattagaagtatgaagaaagtacccacacagataaacccactgttaacagtgaccatgaactgcaatctgtaggtgtcggtacaggct

SEQ ID NO: 6787 - DNA, 120 bp, synthetic construct
  source 1..120: mol_type = other DNA
catgtattgtacatataacaaacaatcatatgtggtatacaatatatatcaaatgagtattaagataaacattcaaagagttttaaagaaaaaagtgttatagatattggagggcagaag

SEQ ID NO: 6788 - DNA, 120 bp, synthetic construct
  source 1..120: mol_type = other DNA
gattatcactgcagtaagaggtgcctgggacagacttagttgaggtaggctgtggattgagagaatatagagactggggtatgtgaaatcggaaagcccacaactgtagcagactagagt

SEQ ID NO: 6789 - DNA, 120 bp, synthetic construct
  source 1..120: mol_type = other DNA
atgctgaggccagcagtcctctcctgacacccccgcgtcgattaggatcatggaagggatgagtctcgctgccgattaatcccataaagtacttactcccacccagctgccttcctatgt

SEQ ID NO: 6790 - DNA, 120 bp, synthetic construct
  source 1..120: mol_type = other DNA
aggtgggcgggggaggcggctgcgttacaggtgggcgggggaggcggctgcgttacaggtgggcagggggggcggctgcgttacaggtgggcgggggaggcggctgcgttacaggtgggc

SEQ ID NO: 6791 - DNA, 120 bp, synthetic construct
  source 1..120: mol_type = other DNA
tgccctgtacgtggcagggggcaacgacggcaccagctgcctcaactcggtagagagatacagtccaaaggctggagcctgggaaagcgtggcgcccatgaatatccgcaggtccgcagt

SEQ ID NO: 6792 - DNA, 120 bp, synthetic construct
  source 1..120: mol_type = other DNA
ttcactgatttcatcatcagtgccttccccattcacacactcacggttggcacctccacggggcttcccagggaagccgggaaggagctgtgcattgaggggtgaaagcccgtgcagaga

SEQ ID NO: 6793 - DNA, 120 bp, synthetic construct
  source 1..120: mol_type = other DNA
ggtgcccaaccagagtgtgcctgtgtccacacgggaacatatgggtgggaggtgaggagaacgtgccttcccagtgtatgggtgggggttgagggacaaaattaatgttgcacaaagata

SEQ ID NO: 6794 - DNA, 120 bp, synthetic construct
  source 1..120: mol_type = other DNA
gtgcatggtgctgtgagatcagcgcgtgtgtgtgtgcagtgcatggtgctgtgagatcagcgtgtgtgtgtgtgcagtgcatggtgctgtgtgagatcagcatgtgtgtgtgtgcagtgc

SEQ ID NO: 6795 - DNA, 120 bp, synthetic construct
  source 1..120: mol_type = other DNA
gcagtgcatggtgctgtgagtgtatcagcatgtctgtgtgtgtgcagtgcatggtgctgagtgtgagatcagcatgtgtgtgtatgtgtgtgcggtgcatggtgctgtgagtgtgagatc

SEQ ID NO: 6796 - DNA, 120 bp, synthetic construct
  source 1..120: mol_type = other DNA
gcagggattacatgtgtgagccactgcgcctggccccagcctggaaatattttctaatttcccatttgagttcttctttgacccatggtttattcaatagtgggttaatttccaaacatt

SEQ ID NO: 6797 - DNA, 120 bp, synthetic construct
  source 1..120: mol_type = other DNA
tttggtctattgttctaagaattggagagagagaggttaaaatctctgactatgattgtggattgtctgctgatgtttttggtctattgttctaagaattggagagagagagaggttaaa

SEQ ID NO: 6798 - DNA, 120 bp, synthetic construct
  source 1..120: mol_type = other DNA
agccaccatgtctcggcagcaccgtccaccacagccaccatgtctcggcaccattcaccacagccaccatgtctcggcaccgtccaccacagccaccatgtctcggcaccgttcaccaca

SEQ ID NO: 6799 - DNA, 120 bp, synthetic construct
  source 1..120: mol_type = other DNA
tccatatcatcccggcacgaatgatgtttggggcagagctgcccggcctccccgggtggtgcccatttgttttcctcagagttggcgatcgccttgcttttcacatgtgcttgtgttccc

SEQ ID NO: 6800 - DNA, 120 bp, synthetic construct
  source 1..120: mol_type = other DNA
aggtcagctgcaagctcacagctgctgcatcttttccctgacagctcactcctgtgagagtcttccaggcttcccggagggacggatgtctcctcaccttttcccacctccacacctttt

SEQ ID NO: 6801 - DNA, 120 bp, synthetic construct
  source 1..120: mol_type = other DNA
cctgtgggcagagatttctggggacgggtcttcatgggagagtccagggtagggaccttctgagaagatctgtggggtcctcacggctgaaggggggtctcagcggatgaaggtttttgt

SEQ ID NO: 6802 - DNA, 120 bp, synthetic construct
  source 1..120: mol_type = other DNA
acgagtcccgcgggcagcctcgccgtagggtcaggggacagctcggcttcagtgacagccaccatgtgaagagtctttgttcctttcagatcctccacttggcaggcagggccaacagca

SEQ ID NO: 6803 - DNA, 120 bp, synthetic construct
  source 1..120: mol_type = other DNA
agacccagcgactctccagcaccgtttgcttccccgacccaactgcacccaaaggccagcaaaacgcacctcaaacacaccactctccaccacacacccctccaagttctgccaaatgcc

SEQ ID NO: 6804 - DNA, 120 bp, synthetic construct
  source 1..120: mol_type = other DNA
cgacattcaaggtctgagcttggcttctcattccagacagttccggaccttccaccaccccacctacggcagctgctacacggtcgatggcgtctggacagctcagcgccccggcatcac

SEQ ID NO: 6805 - DNA, 120 bp, synthetic construct
  source 1..120: mol_type = other DNA
ctccgtcccgtgtctctgccccgtcccccgtgtctctgctccgtcccgtgtccctgctccgtcccgtgtccctgctccgtcccgtgtccctgctccgtcccgtgtccctgctccgtcccg

SEQ ID NO: 6806 - DNA, 120 bp, synthetic construct
  source 1..120: mol_type = other DNA
ccagggatcattgccccaggtagcgtggcaggtgacacccggctgtctcttccagggagtctgcattcaagctctccactgggacctccaggtggccttccgccaagtcagctgtgagtc

SEQ ID NO: 6807 - DNA, 120 bp, synthetic construct
  source 1..120: mol_type = other DNA
cactcccacacgcgcgtgtatacgtgcacaccctcacatgggcagatggtacctgcacacacatgcacatccacactgcacaagccagcatgccagtgcacaccagcacacacccagctt

SEQ ID NO: 6808 - DNA, 120 bp, synthetic construct
  source 1..120: mol_type = other DNA
ggccacacctcgctatagcaactgtcagggctctcgcggtaggcggaggcgatgctggcctgcacagcctggacccaggcttgccgcagcttctcggagtcagcctgcagcatgcagctc

SEQ ID NO: 6809 - DNA, 120 bp, synthetic construct
  source 1..120: mol_type = other DNA
aggccgcgctcaccatgtggtagttcaccacctcctgtaggctgtcagcgaacctctgcagacattcctggaggagcagatgggaacccgtgctgagatggcaaatccgggcccaggtca

SEQ ID NO: 6810 - DNA, 120 bp, synthetic construct
  source 1..120: mol_type = other DNA
ctgctgggagccacctagggaagcaggtcgcctgtttctatagtgacggtaataaaccaagtcaattttctatagtgacggtgataaaccaagtcaattttctatagtgacggtgataaa

SEQ ID NO: 6811 - DNA, 120 bp, synthetic construct
  source 1..120: mol_type = other DNA
ctcctgtaaccgcgtggctgtgggattcggggctgggaattcgggttcctgtggggccagcacacggccctgtgcttctccctcaggcggagagagggtgggggcagccccgtgcgtctc

SEQ ID NO: 6812 - DNA, 120 bp, synthetic construct
  source 1..120: mol_type = other DNA
tccagaaactcgccctgcactcaggcatggactacgccatcatgacaggcggggacgtggcccccatggggcgggaaggcgtgaccgccatgcacaagctctttgactgggccaatacca

SEQ ID NO: 6813 - DNA, 120 bp, synthetic construct
  source 1..120: mol_type = other DNA
cgaacttctgagctaaagagatgctcttgccttgaccttctgaagttctgggattacagtcatgagcccccacgcccagtcagggtttgttttttttttttgagacagtctcactctgtc

SEQ ID NO: 6814 - DNA, 120 bp, synthetic construct
  source 1..120: mol_type = other DNA
aagggaggtggtctcatcgtgtgaggctctgctgggtctcccttggagggtgtgtgtgccctggggtgggagatggagacaagtttgctcccacgggaagttggacaccagcaggtcctg

SEQ ID NO: 6815 - DNA, 120 bp, synthetic construct
  source 1..120: mol_type = other DNA
gagcaaccctcatcctgagtccatggggagaccacacctcacggagcctggccgcggacccctcccacccctgcctttgcggccccgcacatttaggaaatactccccgtaataaagtcc

SEQ ID NO: 6816 - DNA, 120 bp, synthetic construct
  source 1..120: mol_type = other DNA
tagagtgagactgtacctctaaataaccaaaaccttgattacagccatggggtgggggtgggggtcaggggcgtctgactatggctggggaactcatttggtttttctcctctcttattt

SEQ ID NO: 6817 - DNA, 120 bp, synthetic construct
  source 1..120: mol_type = other DNA
ctatggcgtcactgccctcgcggccaatccaagggctgcgcgcgtgtcccttacgcatttccgtcgccgggaggaaggggtgtgtgtttcgcctgcgcagtggtcctggccaccggctcg

SEQ ID NO: 6818 - DNA, 120 bp, synthetic construct
  source 1..120: mol_type = other DNA
tctggaacgtagaaggtgctgaattcattgaaagaatacagtggttctcaactcttgtttaagccggggttctttctatttatttatatattgagacacagtatcgccctgtcgccgagg

SEQ ID NO: 6819 - DNA, 120 bp, synthetic construct
  source 1..120: mol_type = other DNA
gactttcttgctgcaggcttatttggagggttcctttgtgtcctagttcctgggggttttcacccgctaacttcacttagagattgaaacttctcccacttccagaagctgaatcgtagt

SEQ ID NO: 6820 - DNA, 120 bp, synthetic construct
  source 1..120: mol_type = other DNA
aactgtcaatgagccattttcaggggagggagtggcctcagcttaatccagccaaaggtcccctcgggaggaaacaggcagagctcctcaccgtgacacccacgttcctgtcactgctct

SEQ ID NO: 6821 - DNA, 120 bp, synthetic construct
  source 1..120: mol_type = other DNA
cagtgccagccctgagcaagtgccagctggtgagtgctgtgctctgcaggagtatgaggccgccgtggagcagctcaagagcgagcagatccgggcgcaggctgaggagaggaggaagac

SEQ ID NO: 6822 - DNA, 120 bp, synthetic construct
  source 1..120: mol_type = other DNA
aggcacacatacccctgcacacaggcctgcacatacacccccacacaggggcatgctcacacagcccgcacacacacaggtatgcagacacacccaaacacacatgggtcctcaggcaca

SEQ ID NO: 6823 - DNA, 120 bp, synthetic construct
  source 1..120: mol_type = other DNA
ggtgacatctgttccctggtccttagggaccgtcaccttcagtcctgagctcgcaggcggggttcacatgttgcctgttgtgggcattgtagctttaacgtttaattggcggaagacaga

SEQ ID NO: 6824 - DNA, 120 bp, synthetic construct
  source 1..120: mol_type = other DNA
ccgccataggctgactccttggtgggggcactgcccctctgtcctggcaaggccgtgccgccatgtcagggcctcaccctcaacctgctctcgctgcgtggtacggatcttcgtgtcctt

SEQ ID NO: 6825 - DNA, 120 bp, synthetic construct
  source 1..120: mol_type = other DNA
ttgccagcccctgaggtgcctgctctccacaggtcactgggtaggtggttaagaaaataaaagccaataaggaaccggaaaatgcccctaatcccagcaatagcctcctggtctcccggc

SEQ ID NO: 6826 - DNA, 120 bp, synthetic construct
  source 1..120: mol_type = other DNA
aacacgcctgcaggtgggcgtgggcactggttgccttttctagaaccatttgaaagttagctgaagacagcatggcacactcccttcaataggtcccacagtgaccccgcgcagggcaca

SEQ ID NO: 6827 - DNA, 120 bp, synthetic construct
  source 1..120: mol_type = other DNA
tcctggggtcaaaggtgacataagaggcagaggctggagctttctggagaatttactgatcacagagcggtgtgcttcacatcagcctcgcgccacatccgagttggggtctgaatgctg

SEQ ID NO: 6828 - DNA, 120 bp, synthetic construct
  source 1..120: mol_type = other DNA
ctatggcgtcactgtcctcggggccaatccaagggctgcgcgcgtgtcccttacgcgcttctatcgccgggaggaaggggtgtgtgtggcgcctgcgcagtggcggtgaccaccggctcg

SEQ ID NO: 6829 - DNA, 120 bp, synthetic construct
  source 1..120: mol_type = other DNA
gaggacagcggatgttggtgactgactttcttgctgcaggcttatttggagggttcctttgtgtcctagttcctgggggttttcacccgctaacttcacttagagattgaaacttctccc

SEQ ID NO: 6830 - DNA, 120 bp, synthetic construct
  source 1..120: mol_type = other DNA
tgcagacgtgtgcacacatgtacatggagacacaggcacctacccacacggacacacactcctcgcacacacactcccagcacacacagacaggtgcacccacttctgcacacacgggca

SEQ ID NO: 6831 - DNA, 120 bp, synthetic construct
  source 1..120: mol_type = other DNA
aaacgggcacactcacccccctgcacactcgggcacagtcatcccccgcacacatgggcacagtcacaggttttaaaggcttttctctttttctgcggcttcttctcagcaacttctcaa

SEQ ID NO: 6832 - DNA, 120 bp, synthetic construct
  source 1..120: mol_type = other DNA
gtccctaccaaggtctgtgtgtgtctgtggcatggacctgtccgtggccttagcctattggcggcgtgggcctgtctgtggcgtgggcctgtccgtggccttagcctgtcagcagtgtgg

SEQ ID NO: 6833 - DNA, 120 bp, synthetic construct
  source 1..120: mol_type = other DNA
tggcacccaggagcttttgggtcctgagatgcgactgcttggaccgtgctggggatagataggctgcccctgaggtgggaggcttcccgaggagccgagtctgcacccaggcattcccgc

SEQ ID NO: 6834 - DNA, 120 bp, synthetic construct
  source 1..120: mol_type = other DNA
tacaaggctttgctcctggtgcctaaggctggaaccttctctctgcaggagaagataagcgaggacctcagggccacactgaacgccttcctgtaccgcacgggccagcacagcaacaag

SEQ ID NO: 6835 - DNA, 120 bp, synthetic construct
  source 1..120: mol_type = other DNA
gtcctgctcctggcacgtgtgggcgacttctcgacatggactccgggtcccgaatccctgctcccagcacagcaggggtcaggcagcaggagagagtggtgttcccggcactgcctatca

SEQ ID NO: 6836 - DNA, 120 bp, synthetic construct
  source 1..120: mol_type = other DNA
gaagctgccctgggtcggcggtcagtgaggctccgccttgggctttctattattagaaagtcattgagcaacagcagtgctgaggacgcaggcagggctgtgggcactgcaggggctgct

SEQ ID NO: 6837 - DNA, 120 bp, synthetic construct
  source 1..120: mol_type = other DNA
tgtccacattgaccacgtgcacaggctggcaggtctcctgttctctggaattcagatctgattgggacaaggtgacacagacgtcagaggctccaaaaccagggaacaggcagtcaatgt

SEQ ID NO: 6838 - DNA, 120 bp, synthetic construct
  source 1..120: mol_type = other DNA
aaagccacatctgaacatcatagcttgtttaaggctttactttaaactgaaaggactgactgatgtggacttggggaagatttcatcagaacattttggccatcgaccaacgtcctggct

SEQ ID NO: 6839 - DNA, 120 bp, synthetic construct
  source 1..120: mol_type = other DNA
tttgagggtccggatgtgcgtcccgaggtcggagggttggacgcccctgtgtccagttgttgggaggggtgggaggcctcgccctgctgttcagccccttcccctccactgggccgcgtt

SEQ ID NO: 6840 - DNA, 120 bp, synthetic construct
  source 1..120: mol_type = other DNA
atcccggcagccctgaactccctttcccatccccctgcgcctctggagcgggagctggagctgcattcctgggggccgagctcaccgcctgggcccagaacattcttatctttccgtggc

SEQ ID NO: 6841 - DNA, 120 bp, synthetic construct
  source 1..120: mol_type = other DNA
acctacacctgcgtggtgcgccgccagcagcgcgtgctgaccacctactcctggcgagtccgtgtgcggggctgagcccggctgataaagcactttctctctgatggctcctcgctcatt

SEQ ID NO: 6842 - DNA, 120 bp, synthetic construct
  source 1..120: mol_type = other DNA
aaatgatttaattctacaaatttacaaaccaaaatacaaaaacaaaacatggagcacaaagtaagacgaggagttccgagtctcatcgcagctccagccgcagtagccacgcctgtggtc

SEQ ID NO: 6843 - DNA, 120 bp, synthetic construct
  source 1..120: mol_type = other DNA
aaagacagaggtgcttcaacagccacaccaagtggcccacagtgttggcacctgtgtcccgtcagagaagacaagccaccaggagggctctcagtggccctggtccccatctcaacccag

SEQ ID NO: 6844 - DNA, 120 bp, synthetic construct
  source 1..120: mol_type = other DNA
catagttcatcacgatgtagatcttgtccatgttgctgcccaccacaatctcctgcagggcacggctctgtgggtgctgggcacctccaggcccccacccacccctgcacccgggtgcag

SEQ ID NO: 6845 - DNA, 120 bp, synthetic construct
  source 1..120: mol_type = other DNA
actccggcctgggtgacagagacagacccagtctccaaaaaaaaagccatcccaagagtctctttgtcaaactggatgtgtcccctgcttgtaccaggatgacactgaggacgggcccta

SEQ ID NO: 6846 - DNA, 120 bp, synthetic construct
  source 1..120: mol_type = other DNA
gtcagggcgctgctctgcggcgttccctcacccacttcttcctctgcttcttcactctccccggaatctcggtcgaaccgtgactctggaactggaaaagttgaacctaattacgaagct

SEQ ID NO: 6847 - DNA, 120 bp, synthetic construct
  source 1..120: mol_type = other DNA
cgactccagtggctggctttcactttgtcgctgtagtcctctctcatcgttcggtgatgtgcagacactggcgcgcagggcagagagggagatggcactagcagcactgccttcctcaaa

SEQ ID NO: 6848 - DNA, 120 bp, synthetic construct
  source 1..120: mol_type = other DNA
agacacagcccagcacaaccaaaacaacaagtgcacacccttgagtggggaccaggaagaatcacatcatgagaatcaaatgtccatttttttgactaagaaaaacacaagagaaacaaa

SEQ ID NO: 6849 - DNA, 120 bp, synthetic construct
  source 1..120: mol_type = other DNA
tcacatgtcatataattacacgtacagttggatttactttccttgctttgttgtgtcttttttattcttccctttttgattttaaattacatatgtttagcataccattttaatttattt

SEQ ID NO: 6850 - DNA, 120 bp, synthetic construct
  source 1..120: mol_type = other DNA
ccattcgacgtgctttggtacagcagatgttgtaccacgggtttctgaggctctgtgcatttttcttgtttttttctctctgttcttcagaatggataatttctactgctccatccacaa

SEQ ID NO: 6851 - DNA, 120 bp, synthetic construct
  source 1..120: mol_type = other DNA
ctgcgacatttggaagtacaaaagaacttcaccgaagaagcgttgttctaatggaaaaatgagggcaaagaaattaaatctcctttaagaaaaccacttacttaaaaaatatggcttaca

SEQ ID NO: 6852 - DNA, 120 bp, synthetic construct
  source 1..120: mol_type = other DNA
gaacagccactgcgctgcagcatgggcgacaaaaaagagtgatgggttctgaaaaatgaccgcttgaaatcaagtctcgtttctgtcattcttgtatggtcttgggtaacgtaattcacc

SEQ ID NO: 6853 - DNA, 120 bp, synthetic construct
  source 1..120: mol_type = other DNA
gacccctagtggcgggtgggtggagcgcgctccatttacctgctggttacctcgtgaggcgcctcaggtctgtgtgtcttgtaaaggccgatctcggaatttaactctgaaccttactca

SEQ ID NO: 6854 - DNA, 120 bp, synthetic construct
  source 1..120: mol_type = other DNA
catgtcaaaccctaacaaaatcgaccccagagcccacgaggagggggtggcctcgcacttgcgcttgataggagctgccacaaaggcctttcccaaccagaactttgggttcagccactt

SEQ ID NO: 6855 - DNA, 120 bp, synthetic construct
  source 1..120: mol_type = other DNA
accccttagtaccatgttggtcaaaggcaagagagagaattctatttccatctggaatgtcattcttgtttacttcttccaacagtgaaatacttccaggccttcgaaaggccatccttt

SEQ ID NO: 6856 - DNA, 120 bp, synthetic construct
  source 1..120: mol_type = other DNA
gcatggagaggagactgagggagagggaggggacagcacgactgagcaagggcacagtgctggctgcctcatgggctccaggctccttctgccaggatgaggaagaggccccagagcagc

SEQ ID NO: 6857 - DNA, 120 bp, synthetic construct
  source 1..120: mol_type = other DNA
cacagagctgggatcataggcgtgagccaccacacccagatgaaatatttttaagtaaattacaggtatcatgacatctcacccctgagtacttcagcctgctctctaaagaacaagaac

SEQ ID NO: 6858 - DNA, 120 bp, synthetic construct
  source 1..120: mol_type = other DNA
tgcagcttcattcaatctgcccagttacagaagtggaaagaagctgaaggatcctccccgtttctagagctgcaccgcacggcacaggaagcagtggccacaggtgtctgttcaagttca

SEQ ID NO: 6859 - DNA, 120 bp, synthetic construct
  source 1..120: mol_type = other DNA
tttttgtttgtttgtttttattattttttgcactaattaattttcaccatgcagatgcaaatggacaacaagcacatgaaagaggctgaacgtcaccatcatcaggaaaatgcaacagaa

SEQ ID NO: 6860 - DNA, 120 bp, synthetic construct
  source 1..120: mol_type = other DNA
tgacatgtcgctggaaatcgcctgtgagtcattaagaggtgggagaggcaggagcctgggttgcagctgaggtcaggggctggggcccaggacaggcctgtggtggcgggtgctggagag

SEQ ID NO: 6861 - DNA, 120 bp, synthetic construct
  source 1..120: mol_type = other DNA
ggtgcttttataaagtctgcactgaaaactcaccagccagcagagtccccgctctagtaacgagagggactttacatttaaagaaaaagagacactcaaccaaaaccaggagattcttta

SEQ ID NO: 6862 - DNA, 120 bp, synthetic construct
  source 1..120: mol_type = other DNA
aatccatgatcatcagagtgacagaatgagaagccaccatctggccaccatcacgatcatcatcacaatcacgacgagtcaccaagagactaaaactactgagtaaaagcttagaaacgg

SEQ ID NO: 6863 - DNA, 120 bp, synthetic construct
  source 1..120: mol_type = other DNA
ctgaacctcatctcagaagtgacatccttcccttctgctgtctgggcacagctccccgggtggagcccgaggactagaaggaaaagaaaacttggatttaaaatgggataaagccatagg

SEQ ID NO: 6864 - DNA, 120 bp, synthetic construct
  source 1..120: mol_type = other DNA
cgtgaaaacgcttaaagccagctgggaaaaccccaccagcgttttccgcgcacagcgccagccataggaaaggacccccaggagcgaatccgggcagggaaaccccggacgcccgcacac

SEQ ID NO: 6865 - DNA, 120 bp, synthetic construct
  source 1..120: mol_type = other DNA
tttactgcccaggtttgggttccaggaataagaaatccactgaataggcttaacttagaagacacaaaggcgcctcctggcggaagtggccacgctccgcccagcctgagggaaagctgc

SEQ ID NO: 6866 - DNA, 120 bp, synthetic construct
  source 1..120: mol_type = other DNA
ttgaaccttggagttgaaggttgcagtgaggcgagatagcgccgctgctctccgacctgggcgacagtgggagacttcatctcataaataaataaataaataaatattacttttacgttt

SEQ ID NO: 6867 - DNA, 120 bp, synthetic construct
  source 1..120: mol_type = other DNA
ggtgcccagggtgcaggctggcactggcccggcagggaccgtggatgccgccgtttcaggctcgaaaaggtttccatgccccagagcctgagcccggcagcccccgaggatgtcttgggg

SEQ ID NO: 6868 - DNA, 120 bp, synthetic construct
  source 1..120: mol_type = other DNA
ctagatcattcccatctcacgctgctttagaggtcagttcacaccttctgtgttcagatgagcggctggaattctgaacactgccgtcttccagccctaacgctgggcgctggtccctct

SEQ ID NO: 6869 - DNA, 120 bp, synthetic construct
  source 1..120: mol_type = other DNA
tttccttccagtccattttccgcggcagtttttggtcctggggaccgtcaccgatgcctcccacgcacgctttcttccctgaagggagacgtcgctgcgctgggcctctcggcggtcccc

SEQ ID NO: 6870 - DNA, 120 bp, synthetic construct
  source 1..120: mol_type = other DNA
gatgcactcacaacacggccgggcgctcatgcacctgaacgccacgctgcgcggctggaaggcgttgtcccaggacgagctgtgggggctgcaccggctctacggtgagtccctttgtcg

SEQ ID NO: 6871 - DNA, 120 bp, synthetic construct
  source 1..120: mol_type = other DNA
gctgataaagcactttctctctgatggctcctcgctcattcttgggagggcagcgggcagccagtctgggcaggtggacaccccagcccctggtccaccgagagctgggcgtcctcgggg

SEQ ID NO: 6872 - DNA, 120 bp, synthetic construct
  source 1..120: mol_type = other DNA
ccacaatttcatctgtgaagaaaatacagacggcactgagaggcattctcaaagtcacggtaccaacagtggactcgttcagtgaggaccgcaggcagtgcccaaagcgccagcatttca

SEQ ID NO: 6873 - DNA, 120 bp, synthetic construct
  source 1..120: mol_type = other DNA
agcaaaaggcttctggtcacacatctacactgactcccgtagccgctcccccatccaagccctgcacagatgccggtaacaaggccttggtgcctacataacccgcccacgcaggggtca

SEQ ID NO: 6874 - DNA, 120 bp, synthetic construct
  source 1..120: mol_type = other DNA
atcaggcctgtgcaactactgaggtgctctggagtctactgaaggtttgcaacttcagggggaatcttggagagtaaactgtgattcattaatcaacgtcaccgcttcgcacattagtgg

SEQ ID NO: 6875 - DNA, 120 bp, synthetic construct
  source 1..120: mol_type = other DNA
gggtatctgaagaattcctcaaaacccccacattggatgaaaaccgtaaatataaacattagagaggctcagtgaactccaggtagaatgaagtcaagaggcccacaggaaaacccatta

SEQ ID NO: 6876 - DNA, 120 bp, synthetic construct
  source 1..120: mol_type = other DNA
aggattcaagttaccgtctggtgtcatttctattcaacttgaaggtcttcctttagtatttcctttaaggcaggtttcgccaacaatgaatcccaccagtctctgcttctcagggaatgt

SEQ ID NO: 6877 - DNA, 120 bp, synthetic construct
  source 1..120: mol_type = other DNA
agagtattctctctatagcccttctgaatggtctgtgacacacgcatgctttcagctggagtttgctctgtctggttttcggtctgtgacacacgcatgcttttagctagtttgctctct

SEQ ID NO: 6878 - DNA, 120 bp, synthetic construct
  source 1..120: mol_type = other DNA
cgcatgctttcagctagggtattctctctatagcccttctgaatggtctgtgacacacgcatgctttcaggtggagtttgctctctctggttttcggtctgtgacacacgcatgctttca

SEQ ID NO: 6879 - DNA, 120 bp, synthetic construct
  source 1..120: mol_type = other DNA
gagaaaaattagtccagttttgctaatgacttaacattcaacgtattttattctccatgtatgctcaatctagacacagctttagtgtgttaaatctgcctttaatgtcaactgaatatt

SEQ ID NO: 6880 - DNA, 120 bp, synthetic construct
  source 1..120: mol_type = other DNA
tccctgagcctgagaagaaacagcaaccggcgctcgccagaagtatcctcacttcctgtgttgacgcctaatgatgatataatagccgacctctggcccagaactcaagacgacaggggc

SEQ ID NO: 6881 - DNA, 120 bp, synthetic construct
  source 1..120: mol_type = other DNA
aatgctttagacatctgaatctcaggaaacaaacaatggaagataaacatccgcatttactgggcctgaaatgggaaaatgaaagatgtggcaagaaactgacaagggcccaagaagggc

SEQ ID NO: 6882 - DNA, 120 bp, synthetic construct
  source 1..120: mol_type = other DNA
ggcccaaaggagctgaagtttcccaaggggcgttgaggacagcagggaagtgtggggtgtgaactgaggccccagagaagggtctgtgccaaggccccatgggtggggaggaagaaggaa

SEQ ID NO: 6883 - DNA, 120 bp, synthetic construct
  source 1..120: mol_type = other DNA
ctaccaccccccaaccagacttccagctccaggcagggtcgcagcctcctgggctcccagcaggacaggcctcacccagaccccgcaggagccatgggacttgggctgggtctttgggcc

SEQ ID NO: 6884 - DNA, 120 bp, synthetic construct
  source 1..120: mol_type = other DNA
gtgaccctgcccgacccctctatgttggttccacggcgtcagaagaaagctgttattaacccagcttattttctacaagtcttgtttattgaaaggatctgaaaagcgtaataaggcttt

SEQ ID NO: 6885 - DNA, 120 bp, synthetic construct
  source 1..120: mol_type = other DNA
aaagtatgtacatcagcacttcagaaagtttaaaagagtctctaaaaagtatatacaggatttaaactaccttcctgggagcagaagctacgtgaggaatgtgtgggtcgctggcgatgc

SEQ ID NO: 6886 - DNA, 120 bp, synthetic construct
  source 1..120: mol_type = other DNA
agagccagagccgcaccttttcaaagagcaccacctggagcttgtcggagaagtagaggctttcgtggtcggggctgaaggtgacagtgaagtcttgtgtcttcccggggtccatgacgc

SEQ ID NO: 6887 - DNA, 120 bp, synthetic construct
  source 1..120: mol_type = other DNA
cgtggcggtttattgagctgtgtgccaacatcccttcttccagcctctcatcagcctttgctaggccggggctcggcttccctgcctagggtgcgtggacagctctggggtgtcacctgt

SEQ ID NO: 6888 - DNA, 120 bp, synthetic construct
  source 1..120: mol_type = other DNA
ttccgcatctccaggacgtgggggacagagactttgaacagcttgtcgcggttctgtgctcgaagaacggagaatgacagtccatgcaggtccttcctctggggggccatattctttcgg

SEQ ID NO: 6889 - DNA, 120 bp, synthetic construct
  source 1..120: mol_type = other DNA
gcctggcagtgccttccagagagaagggagggtcttggtgagcaagctttttaacctcagatacagctcgacacgtgcattgcttgggaaaggtctaccctgtgctcccggcacgtggcc

SEQ ID NO: 6890 - DNA, 120 bp, synthetic construct
  source 1..120: mol_type = other DNA
cgagtggctttcgctaagttgaatgaaatccattttgaatcactgcattcattgaaatcccatgtgagccaactgtcccttacatgcccttcctcacttaggccttcggcagccctcagg

SEQ ID NO: 6891 - DNA, 120 bp, synthetic construct
  source 1..120: mol_type = other DNA
tgtacgtgggtgttaggttgtaggtacacaggtgtgtacgtgggtgttaggttgtaggtacacgtgtgtacgtgggtgttaggttgtaggtacacacgtgtgtatgtgtgttgctgtggg

SEQ ID NO: 6892 - DNA, 120 bp, synthetic construct
  source 1..120: mol_type = other DNA
ctaagaaagttgggaccttttttttttcagcactacacacacacacacacacacgaactgcagggggctctggagccatggagttagaaaagctctctgagaggtcaggtgtagtggctc

SEQ ID NO: 6893 - DNA, 120 bp, synthetic construct
  source 1..120: mol_type = other DNA
ggttaattgattttggggtccctagggctgaagtagatggggaccccactcaagtccagtttatctgaagagccagtgtggtcagtcgcagaggtgatgatgaaggttggaggctggaca

SEQ ID NO: 6894 - DNA, 120 bp, synthetic construct
  source 1..120: mol_type = other DNA
cagaacacgtgtgtcgtgctgagctgggcgtgggaaggcgtcatgtgacgaggctgcacagaacacgtgtgtcgtgctgagctgggcgtgggaaggcatcatgtgacaaggctgcacaga

SEQ ID NO: 6895 - DNA, 120 bp, synthetic construct
  source 1..120: mol_type = other DNA
cctcttaccgcgtggggaggacgggtgaacgagagactgtatctaagccaccggcacagatcgcagtgggcgccctcttaccgcgtggggaggacgggtgaacgagagactgtatctaag

SEQ ID NO: 6896 - DNA, 120 bp, synthetic construct
  source 1..120: mol_type = other DNA
cgtgctatttcgtttctgtgctctctccgttgggctctaccgctggaagcccccgttccagagggaggaggccttgcagagaccctgcaacaatcccactgagtggaagctgaagctgca

SEQ ID NO: 6897 - DNA, 120 bp, synthetic construct
  source 1..120: mol_type = other DNA
gacacgcaggacacccagccacggacagacacggtgacacacaggacacccagccacggacagacacggggacacacaggacacccagccacggacagacacggggacacgcaggacacc

SEQ ID NO: 6898 - DNA, 120 bp, synthetic construct
  source 1..120: mol_type = other DNA
tcagctgggtgaggagtagagaggcagctgagtgggtatttatttaaagggaagacaaagacgtagactgtacggctctctgaaacttcagcaacttttccgagacacgttgtaccatcc

SEQ ID NO: 6899 - DNA, 120 bp, synthetic construct
  source 1..120: mol_type = other DNA
tgtctgggttggcatcatcccaggagtaagagctgtgtcttctcccctccctgttgaaaggaatcttgatcctaatgtgaactcaaggattttctaaaaactgggtttattatcatcctt

SEQ ID NO: 6900 - DNA, 120 bp, synthetic construct
  source 1..120: mol_type = other DNA
acagcacctgccagcccactttgggtgaccctcctgtttgtcctgtcctagcgcagccacatcccttgggagcctgcttgtctctagaaccttctgcctgatgcacaacctcagagccct

SEQ ID NO: 6901 - DNA, 120 bp, synthetic construct
  source 1..120: mol_type = other DNA
gcctataaaaagccctgccctgggttccctgctccatgccagttctctccctgcccccgccggcatgacacggacactggtgcccgagtgatgcctgtgggtgatgcagacactgactgt

SEQ ID NO: 6902 - DNA, 120 bp, synthetic construct
  source 1..120: mol_type = other DNA
ccaaggcatccaaacatcaaaaggcagaactgagcggcttggtacttgaaaagtttttattaggaaaaatgccaaactgacagaagtagagagaattacatagtgaggcctcgtgcacac

SEQ ID NO: 6903 - DNA, 120 bp, synthetic construct
  source 1..120: mol_type = other DNA
cttccgtggctgtgtgggctcctgtgcggaggccgcccctctccctggccaagcaacactgaggcgggattgcgtcctccctctcctgaggcaggtcctgctccagacctgcttttttcc

SEQ ID NO: 6904 - DNA, 120 bp, synthetic construct
  source 1..120: mol_type = other DNA
gggcagtggggtggactccagaaatgtccagtagcagaattgccagacctggccattggctggggtgttgagggagacgtctccagggatgtccagtgtctcccagtctgggcaagcgga

SEQ ID NO: 6905 - DNA, 120 bp, synthetic construct
  source 1..120: mol_type = other DNA
tcacggcggtggttagggtcacggtggtggttagggtcacggcggtggttagggtcacggtggtggttagggtcgtggtagttaggttcatggtggtggttagggtcgtggtggttaggg

SEQ ID NO: 6906 - DNA, 120 bp, synthetic construct
  source 1..120: mol_type = other DNA
ggttgtggtggttagggtcacggtggtggttagggtcacggtggtagttagggtcacggtggtggttagggtcacggcggtggttagggtcacggtggtagttagggtcatggtggtggt

SEQ ID NO: 6907 - DNA, 120 bp, synthetic construct
  source 1..120: mol_type = other DNA
gtcacggcggtggttagggtcacggcggcggttagggtcacggcggtggttagggtcacggtggtggttagggtcacagggtagaacccttgtggtgggatttgtgccctttataggatg

SEQ ID NO: 6908 - DNA, 120 bp, synthetic construct
  source 1..120: mol_type = other DNA
gtggcgcatctctctggcaacaccttctcttctgacgcacttgtctggtctcggatgcctccaacgcggtttttacttattttccagctttcgtcgattgttcgtgggaggagggttaga

SEQ ID NO: 6909 - DNA, 120 bp, synthetic construct
  source 1..120: mol_type = other DNA
gcctggccaatcttggttaatttgtaaagatacctggtggctgtgaatttggtcttaactaggaccgtagtgttgcagagtaagatgttaaatggtgacctagagaaagccaaacacatt

SEQ ID NO: 6910 - DNA, 120 bp, synthetic construct
  source 1..120: mol_type = other DNA
gtggctctgtcatggctgggctgatgtaggtagcatgtgcagaggatgtggagtcggctcctttttcctgtgacgaagttgaaagcgatgatgcatgtgtgttttcttacccgatgccca

SEQ ID NO: 6911 - DNA, 120 bp, synthetic construct
  source 1..120: mol_type = other DNA
tctatctatccatctattgttcactgacctctccttccatctatctgttgtccactgacctctccatctatccatctatcttgtccactgacgtctccatctatccacacatctgttgtc

SEQ ID NO: 6912 - DNA, 120 bp, synthetic construct
  source 1..120: mol_type = other DNA
ttgtccactgacctctccgtctatccatccatctattgtccactaacctctccatctatccatccatctattgtccactgacctctccatctatccatccattgtgcactgacctctcca

SEQ ID NO: 6913 - DNA, 120 bp, synthetic construct
  source 1..120: mol_type = other DNA
ttactggatataaacggccactacagttcttatatgttgatcctgcagcctgtaaccttcctaacttgctcatgagtcctagtggcttttattgtagttgccattgggttttctgtgtag

SEQ ID NO: 6914 - DNA, 120 bp, synthetic construct
  source 1..120: mol_type = other DNA
ttgctcctgatctggatttggcaccgtcgagtgtgatggtgcatgttgggttttcgccagtgccctttatgagtccgaggaagtccccagaatacggttcctagtttgatcaggaaggat

SEQ ID NO: 6915 - DNA, 120 bp, synthetic construct
  source 1..120: mol_type = other DNA
cttcagagagagagatgcccgagaagacaggcggtggcggagatcttcagagagaggacgcccgagaagacaggcggtggcggagatcttcagagagaggacgcccgagaagacaggcgg

SEQ ID NO: 6916 - DNA, 120 bp, synthetic construct
  source 1..120: mol_type = other DNA
agaggacaggcggtggcggagatcttcagagagaggacgcccgagaagacaggcggtggcggagatcttcagagagaggatgcccgagaagacaggcggtggcggagatcttcagagaga

SEQ ID NO: 6917 - DNA, 120 bp, synthetic construct
  source 1..120: mol_type = other DNA
ctactagtgacattcgcaagggtgggtctggttctcagcctccgacctgtcaccccggtgtgggcccagtgacctcagtgagctcctcctgtgccctaagctgagccactgtgtacactg

SEQ ID NO: 6918 - DNA, 120 bp, synthetic construct
  source 1..120: mol_type = other DNA
cacagtcatgtgcacgcacacacagccatgtgtacgcagacatgcacacaaacgcacaggttcactttctatgatgcaaacccccagtccacacccctgagtgccagcccacgggttcct

SEQ ID NO: 6919 - DNA, 120 bp, synthetic construct
  source 1..120: mol_type = other DNA
gttggcttccgtgtgggtagtgttaactgctgtgtggggtgagtatatggaggtggctgtgggttgaaggtgaaaagcatatggcttcaggcaggtgcgtcagttctgcattttcatggg

SEQ ID NO: 6920 - DNA, 120 bp, synthetic construct
  source 1..120: mol_type = other DNA
tgagtgggggaactggagcccaagtgcgggaggctgcgtgtgatgtgtgaatcattcctggacggattaagctttgttttgaaggaggaaaaaacccaatcaggaaactattttttcttc

SEQ ID NO: 6921 - DNA, 120 bp, synthetic construct
  source 1..120: mol_type = other DNA
gcttccaggatgccgcctgtgatcaaaggttgaataaatatcaggaaatggaaggggctctatgtacctgaaccagatttcagggaaaagtgaaaagattcttgaagaaggccttttcaa

SEQ ID NO: 6922 - DNA, 120 bp, synthetic construct
  source 1..120: mol_type = other DNA
cccagtgctggccgggcccggagagtctcactaacatgcaccatgccgccgactcacctcagtaaataaatcgttttctaaaacgacagatgatgcaagaggatgaagatctattttaag

SEQ ID NO: 6923 - DNA, 120 bp, synthetic construct
  source 1..120: mol_type = other DNA
atagttgatgaagaagagctgctcatgggtgagatccaggccgggcagctgctggtccttgccaccctctgccatccacttgaggtaggcctgcaggcaccagacaggagctgagctcag

SEQ ID NO: 6924 - DNA, 120 bp, synthetic construct
  source 1..120: mol_type = other DNA
gagtagttgccgtactggtagatcatgcactctgactgctcccggaagtgctgggtggagaagttactccaccaatccatcatgttgccattcttgtcgaagttccggcctgggcagggg

SEQ ID NO: 6925 - DNA, 120 bp, synthetic construct
  source 1..120: mol_type = other DNA
tgaaaccctccagcagcactcaccaccccaaggtgagcatttgacagcctggaacagcacccttcatgttcaggtgagcatctgatggttttgttttattttgagatggagtctctctct

SEQ ID NO: 6926 - DNA, 120 bp, synthetic construct
  source 1..120: mol_type = other DNA
tggcactctacatccccaggtgagcatctgacagcctggaacagcacctcacacccacaggtgagtgtgtgacagcctggaacagcattctccaaccccaggtgagcttgtgacaatctg

SEQ ID NO: 6927 - DNA, 120 bp, synthetic construct
  source 1..120: mol_type = other DNA
aaacaccctccaccaccaggtgatcatcggacagcctggaacggtaccaccaattaggtgagcctctgatggactcaaacaacaactcacgattttgggtgagcagctgagaaactaagt

SEQ ID NO: 6928 - DNA, 120 bp, synthetic construct
  source 1..120: mol_type = other DNA
agcatctgacagcctggaacagcaaccacacccccaggcaagcatctgacagcctggaacagaaccctgcacccgcgagtgaggatcagacagcctggagcagcacccacactccaggtg

SEQ ID NO: 6929 - DNA, 120 bp, synthetic construct
  source 1..120: mol_type = other DNA
tcccgcacccccaggtgagaatctgacagcctggaagagcaccccatatccccgggtgagcatctgacagcctggaacagcacccactcccccaggtgagcacctgacagactggaacag

SEQ ID NO: 6930 - DNA, 120 bp, synthetic construct
  source 1..120: mol_type = other DNA
cacccacaaccccaggtgagaatctgacagcctggaagagcaccccacatcaccgggtgagcatctgacagcctggaacagcaaccataccctcaggtaagcatctgacagactggaaca

SEQ ID NO: 6931 - DNA, 120 bp, synthetic construct
  source 1..120: mol_type = other DNA
agaatctgatgttctggagcatcacacacaaccacaggtgagcatcggagagtctggagcagcacccacaacccaaggtgagcatctgacaacctggagcagcacccacaccccgaggtg

SEQ ID NO: 6932 - DNA, 120 bp, synthetic construct
  source 1..120: mol_type = other DNA
aaccccaggcgtgcatccgacagcctggagcaggacccacacccccaggtgaacatccgacatcgtggagtagcaccccacacccacaggtgagcatctgacagcctggaacagtaccca

SEQ ID NO: 6933 - DNA, 120 bp, synthetic construct
  source 1..120: mol_type = other DNA
cagcatcctcaccccaggtgagcatcggacatcctggagcatcacatactcccccaggtgagcatccgacagcctggagcagcgccgacccccccagggtgagcatctgacagcctggag

SEQ ID NO: 6934 - DNA, 120 bp, synthetic construct
  source 1..120: mol_type = other DNA
atttgacagcctggagcagtgcccacacacccagctgagcatctgacagcgtggagcagcaccgacacccccaggcgaacatctgaacgcacggagcagcacccacaccttcaggcgagc

SEQ ID NO: 6935 - DNA, 120 bp, synthetic construct
  source 1..120: mol_type = other DNA
tccaggtgaacatctgatagcctggaacagaaccccaggcctcccagtaagcatctgaaagcaaggaacagcactctcacccccaggggagcatctgacaacctagaacagcaccctcac

SEQ ID NO: 6936 - DNA, 120 bp, synthetic construct
  source 1..120: mol_type = other DNA
taaaacagcaccccacaaccccaggtgatcatttgccagccaggaacggcaacccacatccccaggtaagtgtctgacagcctagagcggcacctgcacacttaggtaagaatctgaaag

SEQ ID NO: 6937 - DNA, 120 bp, synthetic construct
  source 1..120: mol_type = other DNA
cctggaaacccccccactgcttccaggtgaacatctgatagcctggaacagaaccccagttctccaagtaaggatctgaaagcacggaacagcactctcacccccaggggagcatctgac

SEQ ID NO: 6938 - DNA, 120 bp, synthetic construct
  source 1..120: mol_type = other DNA
ccgcatggaatggcatcctcacctccaggtgagcatccgacagcctggaacataattctccaaccccaggtgaggatctgacaacctggaacagaaccccactcttccaggtgagaatct

SEQ ID NO: 6939 - DNA, 120 bp, synthetic construct
  source 1..120: mol_type = other DNA
tcatcctcacctccaggtgagcatccgacagcctggaacagaattctcaaaccccaggtgaggatctgacaacctggaacagaaccccactcttccaagtgagaatctgacagcataaaa

SEQ ID NO: 6940 - DNA, 120 bp, synthetic construct
  source 1..120: mol_type = other DNA
gaaaaccatgcccaccacaaggtgagcatatgacagcccggaacaacaccctccacccccaggtgagcatctgacagcctggaacagaaccccacaacttcaaataagaatttgataagt

SEQ ID NO: 6941 - DNA, 120 bp, synthetic construct
  source 1..120: mol_type = other DNA
gttcagttgctcatcatgaactcagaaaacgttcctgaccctccttctctgtgcctgtctctccaccattaaatctacccacaatctcgtcacttctaactctcagacatgtggtttctc

SEQ ID NO: 6942 - DNA, 120 bp, synthetic construct
  source 1..120: mol_type = other DNA
ctctcagcctccaagcctcccagccccccagcctcccagcctctcagccttcaagcctcccagcccaccagcctcccagcctctcagcctccaagcctcccagcctctcagcctccaagc

SEQ ID NO: 6943 - DNA, 120 bp, synthetic construct
  source 1..120: mol_type = other DNA
atttccatcccgtctgtgtgcttgagcaaaggacatgaaagcaaacgagtatgggagttattacggggtctcaaagccaaatttccccccaaatatcacctgagtggcccatggagagaa

SEQ ID NO: 6944 - DNA, 120 bp, synthetic construct
  source 1..120: mol_type = other DNA
caagtattcatgcaaatcattatctaaagagagaatgtatttctgttaggatgtcaagatcagcttggtgtgaactttccttctcctcacgtggcatctctgagttgtgggcttcctgtg

SEQ ID NO: 6945 - DNA, 120 bp, synthetic construct
  source 1..120: mol_type = other DNA
actcctgtggggaggaggacaggcaaggaggcctcgaagagggaagaccagagaaggaggggaaggggagagcggagggaaagaggtgggataaggaagagaaggaggaggaaggggaag

SEQ ID NO: 6946 - DNA, 120 bp, synthetic construct
  source 1..120: mol_type = other DNA
acaactgggcatggggataatcatataaaccgttcacaaatccaaccagaagcaattcataaaaatgatctgcttaaaaccattgtgctgccttgccatccgttgtcaaaggtgtgaggg

SEQ ID NO: 6947 - DNA, 120 bp, synthetic construct
  source 1..120: mol_type = other DNA
cgtgtgtgttcagtgtggggtgtgtgtgcacacgtgtgcattcacttctaagttggggcgtgaggaggcatcatcagtgctggataattctggacttagaaggaaaagaaagccttgagg

SEQ ID NO: 6948 - DNA, 120 bp, synthetic construct
  source 1..120: mol_type = other DNA
gataaagtaaaataaaataaaaagataaaataaaaatggaggttttcagtctctagtccaaacacagacacagtgccacccactgcggactcccctttccctggcatctctggtgcacac

SEQ ID NO: 6949 - DNA, 120 bp, synthetic construct
  source 1..120: mol_type = other DNA
gtcgcaggcccacgaaggtcgtcattacggatttattaaccccctttccctggctttgtgagaggcctggtctggaaaatgaccaggctcccaggaagtgaatcatttaggattgacagc

SEQ ID NO: 6950 - DNA, 120 bp, synthetic construct
  source 1..120: mol_type = other DNA
tgttgagtaagagcggtcaagcagtgccagttggtaaaacccacgcggcgttagcttcctggggaggtcctaaccgggtaccccagcctgagtggctgaaacaacagatacttctcctcc

SEQ ID NO: 6951 - DNA, 120 bp, synthetic construct
  source 1..120: mol_type = other DNA
ggacagtgacttacctgggctcagggacagggatgcacttggccttaggggcatggactcacctgggctcagggacagggttgcacttggcctcaggggcatggactcacctgggctcag

SEQ ID NO: 6952 - DNA, 120 bp, synthetic construct
  source 1..120: mol_type = other DNA
cattaactgccaggaaatcatggatttccaagcctggctttttccatagccttttgcttagcagagaaaatcaaatggatgcaagcaaataatgagaaacagctcccgaagagctttgct

SEQ ID NO: 6953 - DNA, 120 bp, synthetic construct
  source 1..120: mol_type = other DNA
gtacacaaagcccagcagttgccctttacgtgagaggaatttctgaaaacgaccccgttaaaagccattccggaaatccgtcatccgcagaactcaaagctgctcccagttttctgggaa

SEQ ID NO: 6954 - DNA, 120 bp, synthetic construct
  source 1..120: mol_type = other DNA
tcccgccccacccctgcctcccagcgcctctgtggcatcgcccccactcctgccatcctcccgccccacccctgcctcccagtgcctctgtggcatcgcccccgttcccatgcagccatc

SEQ ID NO: 6955 - DNA, 120 bp, synthetic construct
  source 1..120: mol_type = other DNA
cacacgcagccttacacacgcagtcttacacactcggtcttacacacgcagtcttacacacgatcttacacgcggtcttacaaatgcggtcttacacgcggtcttacacacgcagtctta

SEQ ID NO: 6956 - DNA, 120 bp, synthetic construct
  source 1..120: mol_type = other DNA
gtcttacacatggtcttacacatgcttacacacacagtcttacacatgccttacacatgcagtcacatgcttacacatgcagtcacatgcttacacacactgtcttacacatgcttacac

SEQ ID NO: 6957 - DNA, 120 bp, synthetic construct
  source 1..120: mol_type = other DNA
cctccacgattctcctgcatggatccccacactagccatccaggtagtatcacccccaccaggccacgtcggaaaataaggcaccacactcttttttttaatttaatttaatttaattat

SEQ ID NO: 6958 - DNA, 120 bp, synthetic construct
  source 1..120: mol_type = other DNA
tggtggtgactatacaagttgtggtgtgtaaagcaaacttaaaatagcacctggcacatgcttgagactcagagtgagatcaagatttgtgtgatgatgctggtgatgaggttgataatg

SEQ ID NO: 6959 - DNA, 120 bp, synthetic construct
  source 1..120: mol_type = other DNA
ctcactcggggaaacagaggcacacagagtggaggggccgcccagctcagatgcaagaggatggaaagcatgggactcaaagctgggtctgcccacccttcctgggtgctgggactcaaa

SEQ ID NO: 6960 - DNA, 120 bp, synthetic construct
  source 1..120: mol_type = other DNA
ggattgcatttaccggggctggagctgcccctgccatgcgggcatcgaggattgcatttaccggggctggagccgccccctgccacgtgggcatccaggattgcatttaccgggactgca

SEQ ID NO: 6961 - DNA, 120 bp, synthetic construct
  source 1..120: mol_type = other DNA
ctgtctggatgtgaagggtctgacctacaggatccgtaaatggacttcctggaattttgtcctcggaccagcactaccaccaaaacgcacacagcatttctctcctctccctcaagacac

SEQ ID NO: 6962 - DNA, 120 bp, synthetic construct
  source 1..120: mol_type = other DNA
ctgtggccgtgatgtttccaatcccagtcgtggtggctctgccctggttgaagatgatgtgctgtggccgtgatgtttccgatcccagtcatggttttccagcctcaggagcacatctcc

SEQ ID NO: 6963 - DNA, 120 bp, synthetic construct
  source 1..120: mol_type = other DNA
aagacaagtgtttgtgtcgagagacatcttcattactcttggccgtattcttaggaatggcattaccaggtcatccaatggctttgtttaactttttgaggaactgtcagactgttctcc

SEQ ID NO: 6964 - DNA, 120 bp, synthetic construct
  source 1..120: mol_type = other DNA
acccctcccagcacacccctcccaaaacacccctcccaacacacccctcccagcacacctctcccagcacacccctcccaacacactcatcccaacacagtcctcccagcacacccctcc

SEQ ID NO: 6965 - DNA, 120 bp, synthetic construct
  source 1..120: mol_type = other DNA
ctcctccctttaggggccaccaggtgtaactcccaccctgtgactattaaattggtcaggggttggggacccggcctccggggacaaggagaaatggctgggaaatgagagtgacaaggg

SEQ ID NO: 6966 - DNA, 120 bp, synthetic construct
  source 1..120: mol_type = other DNA
ttaatataaatagatatcgtgatgaaagaacacgatcatcttaggggaaaagctcccagctggagtcgaaggagatcaggcagccgacgatttctggtgagcaagaagcttgctgaaatc

SEQ ID NO: 6967 - DNA, 120 bp, synthetic construct
  source 1..120: mol_type = other DNA
tcccagtagtaggattttcacttttctcaagcagggaatagtccctctgcatagggctcctgcccggggtgacctcctatccatgtccacctccagccatctccaaagggtagttgagta

SEQ ID NO: 6968 - DNA, 120 bp, synthetic construct
  source 1..120: mol_type = other DNA
gttatgtgtgagtgggtaggggtgtgtgtgagtggctgtgttttcggtcaggtgtgtgtgagtgggtgtgtgtgcgtgggcagggatgtctgtgtatctgcgtggtcagggatgtatgtg

SEQ ID NO: 6969 - DNA, 120 bp, synthetic construct
  source 1..120: mol_type = other DNA
ggactttctgtcccatgtctgttgtccatccagacgctctgcctcaagacccagggccactccgaaaggtacaaggctgccagccgtgcactgaaggccatcagcaaggtaagatggggc

SEQ ID NO: 6970 - DNA, 120 bp, synthetic construct
  source 1..120: mol_type = other DNA
aaactgaggcccagaggttcccagattatccatcccaagcctttcacagtgctgacagggaaactgaggcctagagccagtggagctctcacacagttgatgagcccgtggcacggctgg

SEQ ID NO: 6971 - DNA, 120 bp, synthetic construct
  source 1..120: mol_type = other DNA
ctggtgccccatccagggggtgtccttcagggtggagcaagaagtgggtgacaggccaccagccaccctcactcagggccacggacaaccaagtaagggtgcggggtcccagctggggga

SEQ ID NO: 6972 - DNA, 120 bp, synthetic construct
  source 1..120: mol_type = other DNA
tgcccctttcctctgtccagccccgactgagggcagccagctggtcacccagtccagaggcaggagtcagtcccacctggtgctatgcgtccttgaccccctggggacctgctcaccccg

SEQ ID NO: 6973 - DNA, 120 bp, synthetic construct
  source 1..120: mol_type = other DNA
gctcgagcagttcacgccaaacgtccccaccgggcactctgcaggagaaagcacgaggggccttagccgcaccacgtggagtggactgaccagagcctttcccccaggggctcctggtga

SEQ ID NO: 6974 - DNA, 120 bp, synthetic construct
  source 1..120: mol_type = other DNA
cttcctgcatatgctgggtcatttcctggtatgctggccctgctgggtgtgctgggtccttcctgggtgtgctaggtccttcctgcatatgctggttccttcctggcgtgctgggttctc

SEQ ID NO: 6975 - DNA, 120 bp, synthetic construct
  source 1..120: mol_type = other DNA
taggttctcccaggtatgctgggttctctcaggtatgctgggtccttcctgtgtgtgatgggttctcctgagtatgctgggtcctcctgggtgtgctgggtccttcctgggtgtgctggg

SEQ ID NO: 6976 - DNA, 120 bp, synthetic construct
  source 1..120: mol_type = other DNA
acccatggacttgctcccaaggggtggaaaaatactacgaggctctaaaacaaagatgcgcaaagctgcgctccaaaccgagagcaggtgttcctggtagacacccccatgccgtcagca

SEQ ID NO: 6977 - DNA, 120 bp, synthetic construct
  source 1..120: mol_type = other DNA
ccatgtctgtagcctctttaatgccccccactttctcacattggactgaaccacaagcaaacgcctctcccagtggctggagctcatttccagaatcgggttaactgtggaaaggggact

SEQ ID NO: 6978 - DNA, 120 bp, synthetic construct
  source 1..120: mol_type = other DNA
gtgacatatgtcctgtgtgtgggtgtgtggacgcatgtcctgtgtgtgggtgtgcggacgcatgtcctgtgtgtgggaatgagtgacacatgtcctatgtgtgtgagtgaggacacacgt

SEQ ID NO: 6979 - DNA, 120 bp, synthetic construct
  source 1..120: mol_type = other DNA
catatgattgagcatggtgtgtgagcatatgtctgcacataagcatgcatgtggcgtgtggccttgtgcacgctcgagtgagcatgtatgggcatgatcgtgaataggtgctcacagatg

SEQ ID NO: 6980 - DNA, 120 bp, synthetic construct
  source 1..120: mol_type = other DNA
ggccagaccaggagatgctttttgtctttgtttgtcttttgtctttcctcccgttgaccctttctcctatctctttttctcccggtgttcaatgtgactttgtttgttgtgaaatgttta

SEQ ID NO: 6981 - DNA, 120 bp, synthetic construct
  source 1..120: mol_type = other DNA
gagtggccaggagggggcaggaggggacaggagggggcaggagggggcagaaggggacaggagggggcaggagggggcaggagtggccaggagggggcagaaggggacaggagggggcag

SEQ ID NO: 6982 - DNA, 120 bp, synthetic construct
  source 1..120: mol_type = other DNA
agtaggagccccacacacaggtgcaatggccactgccccctacacctaggaggacaaagctgagctggggagacagaggagacctggaggaagcagttaggggagcagcaggaggacctg

SEQ ID NO: 6983 - DNA, 120 bp, synthetic construct
  source 1..120: mol_type = other DNA
ggctcgtaagtctcagttcctccttgtctgggcctcttccaactcgagctgcccccaacaggccgccaaccacccgctccatgccccctaaagtgaaagacccttggagagggctggtcg

SEQ ID NO: 6984 - DNA, 120 bp, synthetic construct
  source 1..120: mol_type = other DNA
ggggctcttctgggttctgggtcctgggacctgcctgagtccctgggaaaagggcacaaggggattgagacggtctcctcccacaatggcccaggtgtctcctcccacaatggcccaggt

SEQ ID NO: 6985 - DNA, 120 bp, synthetic construct
  source 1..120: mol_type = other DNA
gagtattcatgacctcatcttactgcaggaacgtattttgagagagaaagtggtatttggcccaaagggttttaaacccaaagtgagcgaatagagttgtattggagttggtggctttgt

SEQ ID NO: 6986 - DNA, 120 bp, synthetic construct
  source 1..120: mol_type = other DNA
cctcagcccctcctcccgcaatcccagccctgcagcctcagccccctcctcccacaatcccacccatgcagcctcagcccctcctcccgcaatcccagccatgcagcctcagccccctcc

SEQ ID NO: 6987 - DNA, 120 bp, synthetic construct
  source 1..120: mol_type = other DNA
taatcctgtggtggctctggccaaacaaggccacgttctgagtctgcggctcccacggactggggttgatcaatgcccaaccccgaggtggacacagagacattacccacttctgcctgt

SEQ ID NO: 6988 - DNA, 120 bp, synthetic construct
  source 1..120: mol_type = other DNA
agacttgttacacaggacacgaatagcatgaaccatgaaaaagactggcaaggtgggcaatgctaacattaaaaatgcgtctcttcctcaagacacttcagacagcgaagactgcatgct

SEQ ID NO: 6989 - DNA, 120 bp, synthetic construct
  source 1..120: mol_type = other DNA
ctgtggtccattcaagcagtggacactataaagcaagaaatccaacatgacgccacatggttccgtttctacaaagctcaaagagcaaggaggacccatttgtggtgtcagaaatcagac

SEQ ID NO: 6990 - DNA, 120 bp, synthetic construct
  source 1..120: mol_type = other DNA
ttcggagtgagatttttttttaaagtatgtaaaacactatggtcatagttgagcttttaccctgtccatactcagcctctacaccttgccccgagggaaaacacttgtgaaaggtgtgtg

SEQ ID NO: 6991 - DNA, 120 bp, synthetic construct
  source 1..120: mol_type = other DNA
gctgtcgtgtgcagtgtacctgttcattgcatgctgtgcttagattcggcatattcatttcagcaggtgcagaacacttcactttttgaataggctctaattttaacatctttccatact

SEQ ID NO: 6992 - DNA, 120 bp, synthetic construct
  source 1..120: mol_type = other DNA
gcaggggtctttgctttattcaccaattagtgcctggcacacagtaggtgctcaagaaatatttgtgaaattgacttcgacaaaattttaccaagcacctcatcatgagcaaagctctgt

SEQ ID NO: 6993 - DNA, 120 bp, synthetic construct
  source 1..120: mol_type = other DNA
agagcccgggtctagacacacacacgggtgggagggtgctaggatcagggcccgggtctagacacacacacgggtgggcgggtgctaggatcagagcccgggtctagacacacacacggg

SEQ ID NO: 6994 - DNA, 120 bp, synthetic construct
  source 1..120: mol_type = other DNA
ttttttttttttttttttaatgagtactcctccccctccaagaatgtgcattgtgcttagtgacctgcttccaaagattctggaaaggagcaggactgccttcccagtgacagcactggg

SEQ ID NO: 6995 - DNA, 120 bp, synthetic construct
  source 1..120: mol_type = other DNA
cctcagccttaaaaccaaaggaaattacagcatatgatacaatgtggctgaaccttgaggacattctgctaagcgaaataaaccggccacaaaaggacaaactctgtcagattctactca

SEQ ID NO: 6996 - DNA, 120 bp, synthetic construct
  source 1..120: mol_type = other DNA
atattgtctgaagaggtattaattgggacaactgataaaaaggctatatttgtttcaagatacacacaaccacagagacatgcatactcacacacacgcacccacacacacgcatgcact

SEQ ID NO: 6997 - DNA, 120 bp, synthetic construct
  source 1..120: mol_type = other DNA
acatgcatacacatccacccacatgcacacacacacacacacacatgcacacccacatgcatgcatgcatccatacatgtacacagatgcacaaatacaaacatggatgcacatacacac

SEQ ID NO: 6998 - DNA, 120 bp, synthetic construct
  source 1..120: mol_type = other DNA
tgtccctgcttcagtctttgtaagctctttcaaaactgaagctccaaaagcaactatggcaaaggcactggcacgttggccgcctcctactgtctgcgcacgagcacaaatgcagaattc

SEQ ID NO: 6999 - DNA, 120 bp, synthetic construct
  source 1..120: mol_type = other DNA
accgtttcctcttactatatttctacttagggcacatgggaaaataaaccaggtaagctgaatttacacttgcatgctcactcaagaagggaacaagcggcaaaggcactgcatttcatc

SEQ ID NO: 7000 - DNA, 120 bp, synthetic construct
  source 1..120: mol_type = other DNA
aaacccccgtcctactctacaaccaagatcactgcccaagctcccagccgagcccatcctacgccgcaaccaagatcactgcccaagctcccagccgaacccatcctactccacaaccaa

SEQ ID NO: 7001 - DNA, 120 bp, synthetic construct
  source 1..120: mol_type = other DNA
ctctgtagcttggcctacctttaatttatctgttgccaagtctctggctaggaaaggaattcccaataacagcattgctcctatggaaaaacacaccccactctacaacaatccatttta

SEQ ID NO: 7002 - DNA, 120 bp, synthetic construct
  source 1..120: mol_type = other DNA
ttttaagaatgaggagcaggaatcatgcaccccaggctcaagctctttaatccaaaactctgtctcccatcttgtggtccccttggccccagcttgacacaagacactaggaacaaaacc

SEQ ID NO: 7003 - DNA, 120 bp, synthetic construct
  source 1..120: mol_type = other DNA
catctggttgtagttgacaatccctcccggtccagggccccggaagttgggcccaaagttgttgctgtacatctgggaggagccgaaagcgccctggaggcaaggactcagcttcacagg

SEQ ID NO: 7004 - DNA, 120 bp, synthetic construct
  source 1..120: mol_type = other DNA
ataatgaagggatgatggagagataaagggatgtagggatgatgaagggatgatggatagataaagggatatagggatgaagcgatgatggagggatgaagggatgatggaaaaatgaag

SEQ ID NO: 7005 - DNA, 120 bp, synthetic construct
  source 1..120: mol_type = other DNA
ggggtggaaggatggagggagaatggaaggatgatggagggatgaagcaatgatggagatgatgaagggatgacggagagatggaaggatgaagggatggaggtatgatgaagggataat

SEQ ID NO: 7006 - DNA, 120 bp, synthetic construct
  source 1..120: mol_type = other DNA
agtcatcattgggcttctatggactttgggggctgaattagttttacatgatgaggcatggacccaggagctggcggtggaggatgtggtcccagagtcaaaaagcaaagtgcacaggaa

SEQ ID NO: 7007 - DNA, 120 bp, synthetic construct
  source 1..120: mol_type = other DNA
catatgagacaaggtaatttaggcagctcttaagcttggcttccttgatttagtttcctgtctgtacaggcagaaaatggcccatttatatggagataagggcgtttacaaccagagcac

SEQ ID NO: 7008 - DNA, 120 bp, synthetic construct
  source 1..120: mol_type = other DNA
agaccacatctggaagcactattcctacagctccctctgctggagacgaaagtgacagtttgttgcaaagacctgtagaaacattacttacacgttcatttctgtacacatttagttaat

SEQ ID NO: 7009 - DNA, 120 bp, synthetic construct
  source 1..120: mol_type = other DNA
atcattacaattcaaggtgttttcccaagcctcaaaaatggcaaaggtaaggcaaatacacccagccaaggctctgagttatcagccacgtaccatcgacatcggcagtaacaattagaa

SEQ ID NO: 7010 - DNA, 120 bp, synthetic construct
  source 1..120: mol_type = other DNA
tggcgaccacagctaaagagagaagcacaggctggacaatgtggcaccaaaaaaaaaaaaaaaagaaagaaaagaaaagaaaaacacccccatccgacccgtacacaggtagaaaagtac

SEQ ID NO: 7011 - DNA, 120 bp, synthetic construct
  source 1..120: mol_type = other DNA
cgctgaagcatcaggatggacgtgaagctgttcttcagaacagaagaacctggagaacgatgttttcaaacaccaagatcctagaaggcgagtactagaaggaatttaactgcagcctgt

SEQ ID NO: 7012 - DNA, 120 bp, synthetic construct
  source 1..120: mol_type = other DNA
tgcacagccccaggaccaagtcactcccttatccataccttccagggcctttcccatctacagaataaagactcaatctcctagtaaggcatctggagctctcagggattgggaactttt

SEQ ID NO: 7013 - DNA, 120 bp, synthetic construct
  source 1..120: mol_type = other DNA
aagggaggggaagggtgggcagctcagtggaagctgcagctgcagcctctttaagagcggagtggcctctgattctgcacagaaaacattgagcacagggagcgggaaggcttgggccac

SEQ ID NO: 7014 - DNA, 120 bp, synthetic construct
  source 1..120: mol_type = other DNA
ctgggcagctttagacctgtatgtaatctctagctagaagccaagaagcattccctccaaatcaaaaatcccacttcatgacaaaaacctagcaatgtgtcaaagccataagaaaagcac

SEQ ID NO: 7015 - DNA, 120 bp, synthetic construct
  source 1..120: mol_type = other DNA
tgcctggcacatagtaaatgctcaataaagaattgctgtgcgaatgaattaatgattcaggatcccaggaatgggaaggaatgaggagtgggatactgaagaaagaaagataggccagtc

SEQ ID NO: 7016 - DNA, 120 bp, synthetic construct
  source 1..120: mol_type = other DNA
taagaccattcagtcataactggaagctgccttatagttaaaggactttacatattaatgaagaaagggaacatacaaatcattatgtcctttttgccatagattgctgtcccctcccat

SEQ ID NO: 7017 - DNA, 120 bp, synthetic construct
  source 1..120: mol_type = other DNA
ttaagagaccaagaacttgcaattattaacctaggtgacagttggcccagagtgtggcaatggagctggagagaagtgacagattcaagagattggtaagaaaaggaatctgtaggactt

SEQ ID NO: 7018 - DNA, 120 bp, synthetic construct
  source 1..120: mol_type = other DNA
aataatatttttttaatctaaaagaactttacatttatgcttgactgaagcacaggccacatttgtcctgggagccaatgagcagacagagtttgggtaatctatgcaaaggcccctcag

SEQ ID NO: 7019 - DNA, 120 bp, synthetic construct
  source 1..120: mol_type = other DNA
gcgacagagtgagactctgtttaaaaaaaaagacaaaaaaaacagagagaggattccactgccgtctccatcatcatcaccaccgtcaccattatcaccatcataaccatcacttatcac

SEQ ID NO: 7020 - DNA, 120 bp, synthetic construct
  source 1..120: mol_type = other DNA
aaatcccttaaattggtcatctcctttaatctcagggggcagatattctgcctgttttacagatgagaaaacagaagtctcggtaagtaacagaactaggacttgaagccaggacttgga

SEQ ID NO: 7021 - DNA, 120 bp, synthetic construct
  source 1..120: mol_type = other DNA
ttactcacctactgattcaaagcctaatctcatccagagacactcccacagacatacctggaaataatgtttggctgagtgtctgggaatcctgtgatccagtcaagctgacacctaaaa

SEQ ID NO: 7022 - DNA, 120 bp, synthetic construct
  source 1..120: mol_type = other DNA
caggcactggggtgttcattgagcagcaaggaagccgtgaccgggagagtgtggggacttggtgcctgcatgtggctcccctagacactgacccgaggcacagatttaggtgtaaatggc

SEQ ID NO: 7023 - DNA, 120 bp, synthetic construct
  source 1..120: mol_type = other DNA
atagatggttgatggatggatggatagattaatgcatacataggtggatgaatgggtgggtgatagatgaatgggtgggtggatagaggcttggatagatgaatgggtggattgatgatt

SEQ ID NO: 7024 - DNA, 120 bp, synthetic construct
  source 1..120: mol_type = other DNA
aagagattttttataagaaattggctcctgtgattatggaggccaaataatcccaaaatctgcagtcagcaaggtggagacccaggagagctgatggtggtgttccagtgtgagtccaaa

SEQ ID NO: 7025 - DNA, 120 bp, synthetic construct
  source 1..120: mol_type = other DNA
gaaaaatctaagaaccaggagagctgatgatgttgttccagtctgaatctgaaagcctgagacccaggagagctgatgatgttgttccagtctgaatctgaaagcctgagacccaggaga

SEQ ID NO: 7026 - DNA, 120 bp, synthetic construct
  source 1..120: mol_type = other DNA
tccacagatggcagtgatgggaagcgagggacggcagtgatatggaatggcaccggcttccagggaactggggttttgatggaggaagcaggagaaatactttggaattggtaacaggga

SEQ ID NO: 7027 - DNA, 120 bp, synthetic construct
  source 1..120: mol_type = other DNA
ccctgacattcccaggagatccctaattaaagctacagatacggtttaaaaatatactcaccagatgttagtttaaaatgacctataactggcagcagagatggaagaggctgacggtgt

SEQ ID NO: 7028 - DNA, 120 bp, synthetic construct
  source 1..120: mol_type = other DNA
gaatttattgagcactcactctgagccagactctgtgccaagggttttatcataatgccctaaggtcatgcaaggatggcaaagataagctgctttctaaagaaagtggttaggaaaatg

SEQ ID NO: 7029 - DNA, 120 bp, synthetic construct
  source 1..120: mol_type = other DNA
tgtgtgagcatgtatgagagtgagtgtgggtgtgggtgtatatgcataggaatgttgtgttgcatgtgtgcatgttaatctacctgtatatgcatgtatatgcatgtgcatgtgtgtgta

SEQ ID NO: 7030 - DNA, 120 bp, synthetic construct
  source 1..120: mol_type = other DNA
tgtgtgtgcatgtgtgtccatgagtgtgtagagaggatggtgtgagcctggcgtgagtgcgtatgtatatgagtgtgtgtgtgcatgagtgagtgtgagcctggtgtgagtgcatgtgta

SEQ ID NO: 7031 - DNA, 120 bp, synthetic construct
  source 1..120: mol_type = other DNA
tgtagagaggatggtgtgagcctgttgtgtgtgtgtgtgcatgagtgagtgtgtgtgagcctctggtgtttggcatctagttctctctgcaggtctggagaccttcttgagcaaagctca

SEQ ID NO: 7032 - DNA, 120 bp, synthetic construct
  source 1..120: mol_type = other DNA
cgttttgagagagaaataagaattaacaattgcaaacaataaaagttgacagttatgctgggcaacaggcattaaccaggtcactggtcatgccctgtatgggtactgaggaagcacagt

SEQ ID NO: 7033 - DNA, 120 bp, synthetic construct
  source 1..120: mol_type = other DNA
gtggagggcaccccttatgggtggaggtgcccgtggagggtgcccccttaggggtggaggcacccatgcagggtccctcttaggggtggaggtgcccatggagggtccctcttaggggtg

SEQ ID NO: 7034 - DNA, 120 bp, synthetic construct
  source 1..120: mol_type = other DNA
tgcgagctggtcctgtgcacctgccaaacagaccttccaagcagacactgccaggcgttatacatgactgtggaaatggggcggtgcctgaacccacccaggaaggaagggcagcccact

SEQ ID NO: 7035 - DNA, 120 bp, synthetic construct
  source 1..120: mol_type = other DNA
aatatattaaaaataaagtggtagaggagagaggcattctggaaagcccctgatgtcagaaccccttgaactgtacacacacacacccctatacatacacacacctatacacacatacac

SEQ ID NO: 7036 - DNA, 120 bp, synthetic construct
  source 1..120: mol_type = other DNA
acacacccttaaacaaacacacccacctatacacacacacgtatgcacacaaatacacccacctatacacacacacctatccacatacacaacctatacacacatacctatacacaaaca

SEQ ID NO: 7037 - DNA, 120 bp, synthetic construct
  source 1..120: mol_type = other DNA
ttcactaagccagctcacttctgaccacaatagtgtctttgtgtattcatagaaggtgacctgcctctaaatttcaatggggaattgtgaatgggccatgttatgaaactgtccgaactt

SEQ ID NO: 7038 - DNA, 120 bp, synthetic construct
  source 1..120: mol_type = other DNA
tgttactcatatctgtcttttacccaatgattctaccccccaggaaggccctttcctccacctttttacctaactcaaggacaagaactgtgtcttttatctctcttatctcagtgtctt

SEQ ID NO: 7039 - DNA, 120 bp, synthetic construct
  source 1..120: mol_type = other DNA
ccaatcattttcaccattggtgtcttccaaagagaagaaagacaatctctgagtgggtggggtggtggaagagttttggatacaaatctggagtgaggaatttcagagtgattcataaat

SEQ ID NO: 7040 - DNA, 120 bp, synthetic construct
  source 1..120: mol_type = other DNA
tgaacaagttctgggcctgagtccacctatgagtgagtgagttcaggacatctgttaggtatcaggtggcttaaaatcctggctgggagcgacagtgacaactcttttttttttttttga

SEQ ID NO: 7041 - DNA, 120 bp, synthetic construct
  source 1..120: mol_type = other DNA
ttacatttactgttaggaaaaatggctacatttatttcttatgggccagtgaaaacgcaatccacatgccgatgtttggaagtggctgctctgaaggtgagtatcatggaatggtggctt

SEQ ID NO: 7042 - DNA, 120 bp, synthetic construct
  source 1..120: mol_type = other DNA
ggggaaaagctgcaactttgggtgcagaagtagtgtgaggaaaggaaagaggataaaaatatgacttgaaaggacttcacaaatagaaaaaagacggataaagggaacgtactcaaatgg

SEQ ID NO: 7043 - DNA, 120 bp, synthetic construct
  source 1..120: mol_type = other DNA
agtccgcaaaatgggatgtatggacacaaaagacatttttttcctatgttctctttccaacaatccatcagcctgagaaggcacacgctcctgtgaggggatgcagcctctcttcttcta

SEQ ID NO: 7044 - DNA, 120 bp, synthetic construct
  source 1..120: mol_type = other DNA
atgattccacttgtaataaatgtacagaaaagacagatccatagggacagagagcagattacttgttgcctagggttgcaagggtaaatacagagtaactgctatggttatggggctgct

SEQ ID NO: 7045 - DNA, 120 bp, synthetic construct
  source 1..120: mol_type = other DNA
cacactatacacacacacaacacacacactacatacacactacacacactacacactacatacacaatacacacactacacacacactacacacacgcccctcatgtaacaaacaataca

SEQ ID NO: 7046 - DNA, 120 bp, synthetic construct
  source 1..120: mol_type = other DNA
atagctgttctactgcttgattttgttacagacaaagagagaggggtgggggtgaggggaagggaagaaaatgttgattaaaaaattctcttctgggcacgacggctcatgcctataaat

SEQ ID NO: 7047 - DNA, 120 bp, synthetic construct
  source 1..120: mol_type = other DNA
aaaaatgatcagagagactatggaggagagatcagagcgactaaatgatcaggctatagagtctctgagcatagagcattcaattcaccctccattctttcactgcctccctgaattcaa

SEQ ID NO: 7048 - DNA, 120 bp, synthetic construct
  source 1..120: mol_type = other DNA
agcagaagtgattcgtagttggataagcttttggaaggctacttccatgctctttggctaacttcaagtatgtaatttcggaaggtttatttcacagcccattcctctcagagcaggcaa

SEQ ID NO: 7049 - DNA, 120 bp, synthetic construct
  source 1..120: mol_type = other DNA
cttgggaaggacactcagtgactcccactttgagccaatcttgttaactcctagcggtcccattggcttgatgtcaaggagcatggggaccagaggaaggaaaggcacctagttctgcct

SEQ ID NO: 7050 - DNA, 120 bp, synthetic construct
  source 1..120: mol_type = other DNA
tctaaaattaggtcaaatgctaatgtttttatgaacatgtttctatgactcttgatacagatgtagctagtgttctgtgggcctgtcaggtgtgccagctacttggtctggcctcacagt

SEQ ID NO: 7051 - DNA, 120 bp, synthetic construct
  source 1..120: mol_type = other DNA
tcccccaaaccaatgaggtctgtgacattaatgaggtctgtgacatcttatccttttacaaatgatgaaatggaggcacagaaagggtaagtaatttgcctaaggccacacagccaataa

SEQ ID NO: 7052 - DNA, 120 bp, synthetic construct
  source 1..120: mol_type = other DNA
aagcaacagaagagggagggagggaggaagcaacacagggagaaagtaaaggagaaagggaaagagggagggagggagggaggaaaagggggaaggagggaagaagggatggaaggagtg

SEQ ID NO: 7053 - DNA, 120 bp, synthetic construct
  source 1..120: mol_type = other DNA
caagctttggcctctcggccatgtttggggacaactatgtgggcagagacctctcttcctcaaccaactctgtgagtcacctcttggtgactgtctacgatggtagaagcagtcctgtac

SEQ ID NO: 7054 - DNA, 120 bp, synthetic construct
  source 1..120: mol_type = other DNA
atacctgcctccatttccagaggaagtcacatgcacaagccggctagaagaggcacaggcagagaggcatggatggggaccccggcttaaatctggcttgctcacatcaaaagattcatg

SEQ ID NO: 7055 - DNA, 120 bp, synthetic construct
  source 1..120: mol_type = other DNA
atataaaaaatccagccgcctcaggggacacccaactatctagcatattgctgttaaaatgtctgcaaaatttaatacacttggcataccacctaatcagtccttggaaactcgggcact

SEQ ID NO: 7056 - DNA, 120 bp, synthetic construct
  source 1..120: mol_type = other DNA
tttccagatgagcctacggaataggccacctgaccttctagccccagcagagcaatcaaagcccagtatgacctggatatttttggcaggtcaccatttgctttgcttgacaaagaagat

SEQ ID NO: 7057 - DNA, 120 bp, synthetic construct
  source 1..120: mol_type = other DNA
cgaaactctgactcaaaaaaaaagatttccagtgtgcctacaagtaacctgagcacttgttaaaatacagattcagtaggtctaaggcggggcctgagattcagcagttctaccaagttc

SEQ ID NO: 7058 - DNA, 120 bp, synthetic construct
  source 1..120: mol_type = other DNA
ttgaatcactgttgggaatatgttacctagttgtttgtgagatttctgtatacttctactcgagtgaggatagatggagataaggttgtctcgcactgaggcaaagagaagctcaggaag

SEQ ID NO: 7059 - DNA, 120 bp, synthetic construct
  source 1..120: mol_type = other DNA
atgggtgtatggatagatggctggctggatagaaagataagtaaggtagaagaatgggtggatggacagatgaatggctggaaggatggatgaaagaatgaatggatgaatggatggatg

SEQ ID NO: 7060 - DNA, 120 bp, synthetic construct
  source 1..120: mol_type = other DNA
gtgggtgcatagatggacagctggaaggatgggtggatgggtggatagatagaaggatgtgtagatagacaaatgggtggatggacagatgaatagaaggatgagtagacagaagaataa

SEQ ID NO: 7061 - DNA, 120 bp, synthetic construct
  source 1..120: mol_type = other DNA
ggatgggtggatgaatagaagaatgggtgggtagaaggataggtgaatgaatagatggatagctggaaggatgaatggactgatgatagaagaatggatagttagaaggatgagtgaatg

SEQ ID NO: 7062 - DNA, 120 bp, synthetic construct
  source 1..120: mol_type = other DNA
cttcagtcacagctttctacactcctgattccatacgcttgaagtctgaaactgttatcaaccaatgagacacatgaaagcagctctagtagcttcagtacagtcatcaagtccaaacaa

SEQ ID NO: 7063 - DNA, 120 bp, synthetic construct
  source 1..120: mol_type = other DNA
gaatcctgcctctgtcacttgctaccctatgtgactttgggcaaatcacttaacctctgacagatctgtagggtggaataaaaatagtaccagtttcatagggatacggtgaggattaaa

SEQ ID NO: 7064 - DNA, 120 bp, synthetic construct
  source 1..120: mol_type = other DNA
caggggaggggggttggggactactcatcctccaagactccaaattgagaaggagatacaagttttccaaacttctaaacttttcttgacacacatattttcacttttcagaaaatcttg

SEQ ID NO: 7065 - DNA, 120 bp, synthetic construct
  source 1..120: mol_type = other DNA
cctcaaccagtgagtcttaagctgctaaatccaatggtcaattcttagtcctcatcttatttgacttatctgcagcatttcatccaactgatacttccacctccttgacgccctttcttc

SEQ ID NO: 7066 - DNA, 120 bp, synthetic construct
  source 1..120: mol_type = other DNA
cccaaggtcatctgactttgccagggcagttagaaaccaaatgagaagacgcctgggtgagtgcttccagctcacaggagcagatctgctggtgctgtcattacctttatttaattaggg

SEQ ID NO: 7067 - DNA, 120 bp, synthetic construct
  source 1..120: mol_type = other DNA
ttcatgggaacagcctcaggatggctgtgaggattaaaactttgaaggtgtagttctctcatttctaatttaaaaaacccaaaggaagggctaacacacaacgcttgaggcaaaacagga

SEQ ID NO: 7068 - DNA, 120 bp, synthetic construct
  source 1..120: mol_type = other DNA
ggaagaatccagaaatgtatgaccttcctctgttgagaactaatagatatgttgggttcatccttccacacccattacctgagcgttgagagatatgggaatctgtagtcgtctttttac

SEQ ID NO: 7069 - DNA, 120 bp, synthetic construct
  source 1..120: mol_type = other DNA
gtggtggggatgaatatcctcgcttccttttttttattgtgtgtggcagaccctttgctctagacattttgcacctaattatttctctgactcttggaggtagatgttgtcttatagcca

SEQ ID NO: 7070 - DNA, 120 bp, synthetic construct
  source 1..120: mol_type = other DNA
tatgtgtgactcctccatctagcaatttaactttaaaagcttagctagttactccatacagtgtagtgctaatcgtggaatttcagggagtggcaagagggcaggagagattttctggtt

SEQ ID NO: 7071 - DNA, 120 bp, synthetic construct
  source 1..120: mol_type = other DNA
tgcttatatatatctgatactccagagggtatctgtgctaagatagtttcaaaggaggaagaatgggagcttacagtgaggaaaagcccctataccactggtctgcatccacccatccat

SEQ ID NO: 7072 - DNA, 120 bp, synthetic construct
  source 1..120: mol_type = other DNA
catccatccacccacccacccactcatccatttacccacccatccacccactcattcattcattgattcacccaatatgttttgtgtatttgcattctatcagaccctagagattcaacc

SEQ ID NO: 7073 - DNA, 120 bp, synthetic construct
  source 1..120: mol_type = other DNA
cttccatttcttctttgaaaagtaggaggggttggaattgtcaccctggaggttcatggttgctagattattgattctgttgctggattcaggagacctgttagctggctagttcacagc

SEQ ID NO: 7074 - DNA, 120 bp, synthetic construct
  source 1..120: mol_type = other DNA
ttcatgatttttttttccccttatgttcattttctccccaaatgtggaaatggggttgtttcgctggggttacaaactttttctttctgttagtcgtaaggtatggtggtggggcggggt

SEQ ID NO: 7075 - DNA, 120 bp, synthetic construct
  source 1..120: mol_type = other DNA
cactcctgtcaggaacttccaagggttttaggaattctgtgccaggaaccagggaaaaagaccaaatatatttcatgtatgccacagcttgtcataactagaatgatcctgtgtattcca

SEQ ID NO: 7076 - DNA, 120 bp, synthetic construct
  source 1..120: mol_type = other DNA
ctacccaactccatccactcatccactcacctaccccattccattaatctgtccactcacctatcccactccatccatccatccatgcattcatccacacacctaccctactccatccat

SEQ ID NO: 7077 - DNA, 120 bp, synthetic construct
  source 1..120: mol_type = other DNA
cactatgttagctcaagctagaaaggggcaaagttgagatttgaactccagtctgaatccagagctcacaccctaaacctctgcgttctacagtcaaagagcttcacagatatttttaat

SEQ ID NO: 7078 - DNA, 120 bp, synthetic construct
  source 1..120: mol_type = other DNA
tttgaagctgggtaggaggtggtcttttttaagcagttcaggtgcagagtttcactgcaggaacacttggacaacatagctcttctttgagtaaaacaaccctgcacctccttctgctaa

SEQ ID NO: 7079 - DNA, 120 bp, synthetic construct
  source 1..120: mol_type = other DNA
gtaccagtagaagcagatgattgtctttgccctgagagtgacacattttccctggatttgtcttctagagattttccttgcagatctatcaggatgagcatccaggccccacccagacta

SEQ ID NO: 7080 - DNA, 120 bp, synthetic construct
  source 1..120: mol_type = other DNA
tcataggggtgagtggagggtggtggggaatggcttcaaggtaatggatggagaccattttgcccaagtccaggatcattctcatggccggatggtcaacacttcggatgatgtgtgatg

SEQ ID NO: 7081 - DNA, 120 bp, synthetic construct
  source 1..120: mol_type = other DNA
catagaaggaggcaggtgaggtattcatccagagtcctgttcttgagccaaagttctacaaacacagtcaagggctgccgtcctctcatccttggacagtcctgcactggttttttgttc

SEQ ID NO: 7082 - DNA, 120 bp, synthetic construct
  source 1..120: mol_type = other DNA
ccttctttctttcttgtcttctttccctgcctcccttctctcattctctctctctttctctctctccctctctcactctctttctgacagggtcttgctgtcacccagcctggagtgtag

SEQ ID NO: 7083 - DNA, 120 bp, synthetic construct
  source 1..120: mol_type = other DNA
atatttcagagttaaaacagttttcaaagacagagatgacagtccctaagaaaacacagtagaaatcttcatatatccaaagatcacctaggtggcgtaattctttttggtgttgaggga

SEQ ID NO: 7084 - DNA, 120 bp, synthetic construct
  source 1..120: mol_type = other DNA
tgctcccttcaagaattttgaaatgacatcaaccaaagcacaatcaacttttttgaaataaagacagaactgcatttagaggaaaaaattcaaagcttcaaattgttcatatgagaaaaa

SEQ ID NO: 7085 - DNA, 120 bp, synthetic construct
  source 1..120: mol_type = other DNA
ctcatctttcttcatggagctactgctctgctcctcttctgacttagcatttttcacctctacctcttgtttgctctgttccttttcaattttttccaggttttccaggagagaatccac

SEQ ID NO: 7086 - DNA, 120 bp, synthetic construct
  source 1..120: mol_type = other DNA
taaagacaaaattgcatttagaaaaaaaatcaaagcttcaaagtgttcatatgaaaaaaagaaaaaaagacaggatatagttctgtgccgtcgtaggctgcactgtcaccgttctagacc

SEQ ID NO: 7087 - DNA, 120 bp, synthetic construct
  source 1..120: mol_type = other DNA
gttagagggctgtcagatccactactcccaactcagtgccatcctgcctggcctgagctgctgctcccagctcaccaccttctactttggcagcaattgcatgtctattgacgccctgaa

SEQ ID NO: 7088 - DNA, 120 bp, synthetic construct
  source 1..120: mol_type = other DNA
ttaggctggagtgcagtggtgcaatctgggctcattgcaatcctttccttcagggctcaagtgattcttgtgcctcaaccactcaattagctgggacggcaggcacgtttcaccaagact

SEQ ID NO: 7089 - DNA, 120 bp, synthetic construct
  source 1..120: mol_type = other DNA
aaagctcttctttatctcactcaccctccacttgtctgcatatttcactcttcctggtcacaggacaaaaacttgagacccgcctaatggtggggtaaaagagcaataacacaaataaag

SEQ ID NO: 7090 - DNA, 120 bp, synthetic construct
  source 1..120: mol_type = other DNA
taaatccacatgcaacatcatattgaatgaagaaacgttgaaagtattcctgctaggaactacaagcagacaaaaatgctcactttatccacttgcaatcaacataggactgaaaatgtt

SEQ ID NO: 7091 - DNA, 120 bp, synthetic construct
  source 1..120: mol_type = other DNA
cagtcagtgaactattataaagctgtaaaaagacatgaaaaattcctaaatgcacgttattgtacaagtgaaagaaggcaatctgaaaagactcatcctgttagacattccagaaaaagc

SEQ ID NO: 7092 - DNA, 120 bp, synthetic construct
  source 1..120: mol_type = other DNA
agagggcaccagacagattctgctcagttttcctttatttctgattgtttctttacaaccatccatgcaagagtaactccctcatgtattctcaagcctgaattccactctagacattca

SEQ ID NO: 7093 - DNA, 120 bp, synthetic construct
  source 1..120: mol_type = other DNA
atgtattgaatggtctttgggattttatataacctaaggtagcagattacatgctcgttctggtggaggagaggtgctactgagggcgtgagtggtctcagtgcttaggttaaggcttct

SEQ ID NO: 7094 - DNA, 120 bp, synthetic construct
  source 1..120: mol_type = other DNA
aataatctcgcatctattgccacttctttgcttacttcataataaacttttttttttacagagtcttcttttctgttaagtacaccatatatgttgttgccacacaagatgaataacctg

SEQ ID NO: 7095 - DNA, 120 bp, synthetic construct
  source 1..120: mol_type = other DNA
acaatagtgaaactctaccctaaaaaaaaaaaaaggcagaaaagtaaagaaaaacaaagaagaaatgtcctctattgtgaacaacctctgggacaaaagcattctgtccaatagagacct

SEQ ID NO: 7096 - DNA, 120 bp, synthetic construct
  source 1..120: mol_type = other DNA
ggcataggttgcagttagctgagattataccactacaatccagcctgggaaattggctagattcaaaaaagagagagagagagagagaactacattggattagacttcttaagctccatc

SEQ ID NO: 7097 - DNA, 120 bp, synthetic construct
  source 1..120: mol_type = other DNA
aattgtttctcccatgtcagcaacccatacagttgggaagacagatgcatgctaccatgcccggctaattaaaaaatatgtatattttgtagaggccaagcaccagtggctcatggctgt

SEQ ID NO: 7098 - DNA, 120 bp, synthetic construct
  source 1..120: mol_type = other DNA
gcagttttgacatcctgatgacttcatacctcttactgccaccaaactgcaccaactttccagcctcttgctatccatgatcctctgaaaactctcagtacttcttggggagatgaattt

SEQ ID NO: 7099 - DNA, 120 bp, synthetic construct
  source 1..120: mol_type = other DNA
gattggcttacattctgtccctgagtaaagaatctgatcttgagttcatgagtgcctcaaactctgcaattattgatgaagcttcacccacttacagtgagaaggacactgatttgattc

SEQ ID NO: 7100 - DNA, 120 bp, synthetic construct
  source 1..120: mol_type = other DNA
gtttcccgtgagtccagcaagaaggcatgggatctgtggaaaggaggcctctgggaaaaaccccacctttgaggataatgttaaaagctgaacttgagaccctgagaatcctatgtcctt

SEQ ID NO: 7101 - DNA, 120 bp, synthetic construct
  source 1..120: mol_type = other DNA
cagcttccttgcattttattcatcttccctggtagcacccggaattgcaggaagcaatccctggtgctcagtgaaggtctttgaatgaatcaaggggagaggagtcagggggaggcagag

SEQ ID NO: 7102 - DNA, 120 bp, synthetic construct
  source 1..120: mol_type = other DNA
agaaagagaggaagcccctactttagcacacgatgtgcatgaatctgacctggaatcagacccggttgaggaccagagaagggcaacagggccagaacagagattttgactcttagaaat

SEQ ID NO: 7103 - DNA, 120 bp, synthetic construct
  source 1..120: mol_type = other DNA
tctgatctgcagccagccagtcagggatggtgacacacagcccaaagtggcacagagaatttcctgtctgttttttcaatttaacagatgtaggttttgatttttcctctaaatatagta

SEQ ID NO: 7104 - DNA, 120 bp, synthetic construct
  source 1..120: mol_type = other DNA
agatgaggtgatcatatttggcctgagagtgatgccttttctctggatttgtcctctagagttttcccttgcagattcatcaagatgagcatcagggccccacccagactcctggagctg

SEQ ID NO: 7105 - DNA, 120 bp, synthetic construct
  source 1..120: mol_type = other DNA
aggtgctgactatcctcagatgagcagagcagccctgggttatggagagcatcatctctcaccctgaagtcatccccacctctctcctctaactccttcttgttctctcccaggtgtctc

SEQ ID NO: 7106 - DNA, 120 bp, synthetic construct
  source 1..120: mol_type = other DNA
tgtctgtgactgatgaggttcagctcctggaaatcaaaccatcaaaatggaatttgatcatttagatcaatccccctcctgttaccttcttgctattctctgtgcctatttagtggcaca

SEQ ID NO: 7107 - DNA, 120 bp, synthetic construct
  source 1..120: mol_type = other DNA
gggattacagacgtgagccaccacaccgggccaattgctggactctcatgtcacacatggatatggtatcacaaaggcaattttttccataatccaatgtatttatattattggtagtga

SEQ ID NO: 7108 - DNA, 120 bp, synthetic construct
  source 1..120: mol_type = other DNA
ataatataatccttgcaacattaaattacaccatctgatctgatctaccagcagatggcacccgagacctatggattggacattttactcttcttaggaatgaatccagtccagaaatgc

SEQ ID NO: 7109 - DNA, 120 bp, synthetic construct
  source 1..120: mol_type = other DNA
tcccaacatactgggattataggtgtgagcctccacccctgcctcattattgaaaatttcagtgagaagctctgaaagctatgtgacactgttatgcattactcacaagatagatgtttc

SEQ ID NO: 7110 - DNA, 120 bp, synthetic construct
  source 1..120: mol_type = other DNA
aaatctttggccacatcaaaatataaaaatgctttctactttaaaaagctttataaaaacagaggagtcgtccctaggaaatcagaataaaaatctcaacgtattgaatggtcttcggga

SEQ ID NO: 7111 - DNA, 120 bp, synthetic construct
  source 1..120: mol_type = other DNA
ggaattttagggaaagaaaactactgtccatgatgctctaatggtggatacatgtcattatccctttgttaaaatccatagaatgtacaaaaccagcaatgatccctcatgtgaactatg

SEQ ID NO: 7112 - DNA, 120 bp, synthetic construct
  source 1..120: mol_type = other DNA
ctcccgcggggcaggatacacctccacgcataagtttttgagtatgattgtgtggctcagcaggttctccagggtggccatggagatgggatttccacagaagctgaaggcattgagctc

SEQ ID NO: 7113 - DNA, 120 bp, synthetic construct
  source 1..120: mol_type = other DNA
gattactcaaggttctaaaacaatgggaatgggagtgtcacaagcctacatgcccacattttcagttcctacaaataagtttgttgggaacattcatgggacatccctagaacaggttct

SEQ ID NO: 7114 - DNA, 120 bp, synthetic construct
  source 1..120: mol_type = other DNA
tggctttcttaaagaataactgatcgaattagatattaatccatcaaaatgaaagatttagggatagggtgaaagtccaggactcattcaccgattcccttcacaaacatggacttccac

SEQ ID NO: 7115 - DNA, 120 bp, synthetic construct
  source 1..120: mol_type = other DNA
ttgcctacatttttggcataagatctaacaacaaaaagtatgagcccaggtttgtgtaatggaatatcttaaacatcaataggaggagtcaatagttctgatgccacacacacacacgta

SEQ ID NO: 7116 - DNA, 120 bp, synthetic construct
  source 1..120: mol_type = other DNA
gtaccagatgacttaaacttaaggatatctgaggaaaagccttccctagaagcacacatcatcacctggtagacagcttttccaagacaatggaacaagactccatttgatcttcttcca

SEQ ID NO: 7117 - DNA, 120 bp, synthetic construct
  source 1..120: mol_type = other DNA
ttattgggtgcatcaatactcaggacatatttggagaggaacctactcattcttctatggagatgacatgcaaggattactttataaaagacatagaaatattttttcttcccaccccaa

SEQ ID NO: 7118 - DNA, 120 bp, synthetic construct
  source 1..120: mol_type = other DNA
gccctcagtggcacctctcctccaccagaacgagcatataatctgctaccttaggttatataaaatccccaagaccattcgataaattgagatttttattctgattttgtagggatgact

SEQ ID NO: 7119 - DNA, 120 bp, synthetic construct
  source 1..120: mol_type = other DNA
agagattcaacccttccctctctcacactcaggactttgaaggacacatattagtaaaactccatgtttatggagtgaatcactgaatgagtcctggactttcaccctatccctaattct

SEQ ID NO: 7120 - DNA, 120 bp, synthetic construct
  source 1..120: mol_type = other DNA
actgagtagaattggagtaaactgagggctgtttcaccattgccaaagcagtgactttggccctgggagaagatgagattgcatgggcttgtcctgagagtgatgccttttctctgggtt

SEQ ID NO: 7121 - DNA, 120 bp, synthetic construct
  source 1..120: mol_type = other DNA
acagggacaagaagcagggaggggaggagctgctatccaggatgtggagtttaagttcagaaatgagttctgaaattctcagtctcacctctattttcccacaggaggtggaaacttcaa

SEQ ID NO: 7122 - DNA, 120 bp, synthetic construct
  source 1..120: mol_type = other DNA
gggctgagctgatgaagagagttagggacttaaggcaccccaagaggatcttgttcggtactgactactgccctgactgtggcaacaggtcattttatgacctggaggcagatcaatact

SEQ ID NO: 7123 - DNA, 120 bp, synthetic construct
  source 1..120: mol_type = other DNA
gagcttttattgacctttctcactacaacccccttcttgactaccaacttccaattcgaaaacgacatccaactggatcgtgaacttccacccagttaaccctgattgagttttcaattt

SEQ ID NO: 7124 - DNA, 120 bp, synthetic construct
  source 1..120: mol_type = other DNA
cagatgtgagccactgcacctggccaattgctgtactttcatgatacacatggagtatccacagtatcacaagggctattttttccataatccaacttatttgtattattggtagtgagc

SEQ ID NO: 7125 - DNA, 120 bp, synthetic construct
  source 1..120: mol_type = other DNA
agcaaggtttggtgctgcccagagtctccagctaatacacaatatggacatacccttccagggcagcgagaagagagtgggtccttgtgcagtgcagctgacatccaccaactaaggctt

SEQ ID NO: 7126 - DNA, 120 bp, synthetic construct
  source 1..120: mol_type = other DNA
ctgagatgtcacaactgcactctagcctggacgatcatagtgaaaatccatctcagaaaaaaaaaaagttatcttgtttgtttttacttttatttcttcatttctgacaggggtcttggg

SEQ ID NO: 7127 - DNA, 120 bp, synthetic construct
  source 1..120: mol_type = other DNA
cccaccagcccacctggcccacctcacctgggacgaaccccgtgggtaagcagtgcatcaagcccattgagcacagcttggaaggtctccagacaaggcatctttatcagaggcctcaga

SEQ ID NO: 7128 - DNA, 120 bp, synthetic construct
  source 1..120: mol_type = other DNA
ttccacgtagctgggattacaggcatgcacccccacactcatgtctccatttgggtggaagaggatgtgattgctttaaaattaaggtcaaagatccttttttgttaagatgttgctttt

SEQ ID NO: 7129 - DNA, 120 bp, synthetic construct
  source 1..120: mol_type = other DNA
tgaacagaagatcttagaaagtgtttggtttgagtggtgaaagtacctaacaacataaaatataggtttgataattttgtgttaatacaaaacaaaaccaagtctcagtcaatggaagaa

SEQ ID NO: 7130 - DNA, 120 bp, synthetic construct
  source 1..120: mol_type = other DNA
caaaaattgcagggtaagacttaagaaaacttctaggagcatcaagggaagtgaaaatggaactaggtgcagggcaatatgaattaatgaatgtgggaaggacaaggatggggagaacag

SEQ ID NO: 7131 - DNA, 120 bp, synthetic construct
  source 1..120: mol_type = other DNA
atgattttggaacagtaggttgcggcaaccatgaggaaccaggtcagagagcaagaagacctcctgatgaatgctgaatgtgttccaagcttggtttatttttgtttctctccctccctt

SEQ ID NO: 7132 - DNA, 120 bp, synthetic construct
  source 1..120: mol_type = other DNA
acctacagtcagtcagtctgggatggtgacagtgcagcctaagatggcagagagctatatcctgtccttttttatatatatatatgaacaatttgaagctttgaatgttttcctctaaat

SEQ ID NO: 7133 - DNA, 120 bp, synthetic construct
  source 1..120: mol_type = other DNA
cactgaaattttcaataacgaggctggggcagaggctcacacctataatcccagtatgttgggaggccaagaggggtagattgcttgagactaggagttcaagaccagcttggacaacat

SEQ ID NO: 7134 - DNA, 120 bp, synthetic construct
  source 1..120: mol_type = other DNA
aacaccagtgcaggactgtccaaggatgagaggacagcagcccttgactgtgttcgtagaactttggctcaagaacaggactctggatgaatacctcacctacctccttctatgggtcaa

SEQ ID NO: 7135 - DNA, 120 bp, synthetic construct
  source 1..120: mol_type = other DNA
gtaaaaacaaacaagataactttttttttttctgagatgaattttcactttgatcatccagggtaaagtgcacttgtgacatctcagctcgcagcaacttctgcctcccaggttcaagcg

SEQ ID NO: 7136 - DNA, 120 bp, synthetic construct
  source 1..120: mol_type = other DNA
agatttgctcaaattagggctgagctgatgaacagagtgagggacttaaggcaccccaagaggatctttttctgtattgacaactgccctgactgtggcaacaggtcattttatgacctg

SEQ ID NO: 7137 - DNA, 120 bp, synthetic construct
  source 1..120: mol_type = other DNA
tcaagggcctgtgggtgatgagtgaccttccctgtgctgaggaattctgcataatgggcacccaagtgaaggatcctgctgagtactcaggggctggtgttgctgtcagggatgttagcc

SEQ ID NO: 7138 - DNA, 120 bp, synthetic construct
  source 1..120: mol_type = other DNA
catggagagtagttttctttccctaaaattcctctgtcctcttcccattcatcccattgtgctcccaaccccttgcatccactgggctttctactgtctccttagaaaaatgcaaaagct

SEQ ID NO: 7139 - DNA, 120 bp, synthetic construct
  source 1..120: mol_type = other DNA
ctaagataagcaatattgaaatgattgcagctcatccatcccagattctgactaactgaccccctgttccacaagccatgactccagctttgattggacaagagattgattccagtaact

SEQ ID NO: 7140 - DNA, 120 bp, synthetic construct
  source 1..120: mol_type = other DNA
atactcatagcccatttcatgacctgttgagtgtgtatacttggccaacccactcagcataaattcctgcctcatcacttcctccctggaaataccagtgaaggatcttttctgaaagct

SEQ ID NO: 7141 - DNA, 120 bp, synthetic construct
  source 1..120: mol_type = other DNA
tagacgcccgggactactggagagtggagggtggaaggggagtgggtatcaacaaactaccaaaactggctggacatggtggctcacacctctaatcccagcactgaggcagtgcaccat

SEQ ID NO: 7142 - DNA, 120 bp, synthetic construct
  source 1..120: mol_type = other DNA
ctaagagaaattggatatctttactggacacaatcactttaattcagtaaaccccactagtcaccatgaggacaggtcagtgccctggttttcccgttttttgataaggagagaagggag

SEQ ID NO: 7143 - DNA, 120 bp, synthetic construct
  source 1..120: mol_type = other DNA
gacgtgccacagcaagggcaggacaccggaccaaagaagatccttttgggctcccttacttccctcagtatacgcatcagctcagcctgaagtggggtgaggagctccaaaatgacacga

SEQ ID NO: 7144 - DNA, 120 bp, synthetic construct
  source 1..120: mol_type = other DNA
gtgcctattccctcacctccatcccagaagcacgcatttcccatgtcacttacctttcctggagttcaaaacaaccttttacagacagggaatcagagagaggatcattcatgttcacta

SEQ ID NO: 7145 - DNA, 120 bp, synthetic construct
  source 1..120: mol_type = other DNA
gaagaagctcagatcttcatccatgaatttttccttgaggcaaacatccatgaacaccttcaagggctgcttctctcctgtccttggacagtcctccactgtctgtctcttactcatggc

SEQ ID NO: 7146 - DNA, 120 bp, synthetic construct
  source 1..120: mol_type = other DNA
aagagtgtctcccaacctccaaggaacgggcaagatcactcctactccatgaattttcattaatttctccacccaactctattagctctgggaagtgttaccaagaatcttcaaagctca

SEQ ID NO: 7147 - DNA, 120 bp, synthetic construct
  source 1..120: mol_type = other DNA
gatcattttgattagttctcactcattttttgcttcctttcagtcatctgtttcttccttaatttctcccatgcctgttcactgggttcattcacaaaggatgcacacttggggcctgga

SEQ ID NO: 7148 - DNA, 120 bp, synthetic construct
  source 1..120: mol_type = other DNA
atgaggattaaaaccaaaagcgcatcagtgcaatgttagatagattcctcttacacccactcgataacccccaacatgttcagcaagtcttggttcactcccaggttcccattaaaaacc

SEQ ID NO: 7149 - DNA, 120 bp, synthetic construct
  source 1..120: mol_type = other DNA
gaaattttcaataatgaggcaggggtggaggctcacacctataatcccagtatgttgggaggccaacaggggtagattgcttgagactaggagttcaagaccagcttggacaacatagcg

SEQ ID NO: 7150 - DNA, 120 bp, synthetic construct
  source 1..120: mol_type = other DNA
gccaccctggagaacctgctgagccacacaatcatactcaaaaacttatgcgtggagctgtatcctgccccccgggagagttatgatgctgatggtactctctgctggagcagatttcct

SEQ ID NO: 7151 - DNA, 120 bp, synthetic construct
  source 1..120: mol_type = other DNA
gaaagtccagcatggtaaaaggtacatagaggtacatttgggtgagcttcctttgtttttcattctttttcccttctctggacagaattctcaatgcaaaacattccaaaaacacagagc

SEQ ID NO: 7152 - DNA, 120 bp, synthetic construct
  source 1..120: mol_type = other DNA
tttaaaaattaaaaaaacctaattacaaaagagataatgcagactcgtaaaacatcacagtgtctttgagggcagagagggcagacacaatcttgactcctactggaaggtgaagcatca

SEQ ID NO: 7153 - DNA, 120 bp, synthetic construct
  source 1..120: mol_type = other DNA
tctcgattgcgccatgggaaggcctcgggtaagtcttcctgaattcagatgtccagctcttaggtggaagatctcagagactttaattcttcccagctggttctctccaaacagtttctg

SEQ ID NO: 7154 - DNA, 120 bp, synthetic construct
  source 1..120: mol_type = other DNA
tttgggggaatcacgattaagtggtggtggtgtgtagaagttgagtcccattgcctgccgtgggtttctgctgcctccctattatcaggaatagaaggtgagattgaagggtgaagaatg

SEQ ID NO: 7155 - DNA, 120 bp, synthetic construct
  source 1..120: mol_type = other DNA
attgttaagccatgttaagcaattacggaggacaccagatagtttccactcagtttccctttatttctgactgttactttacaaccatctgtgcaggggtaaccctctcatgtgtctctc

SEQ ID NO: 7156 - DNA, 120 bp, synthetic construct
  source 1..120: mol_type = other DNA
tagacagattctggaaatagtccagcttgaggaactgagaggtgaatcgggcaatgaactgccccttgttgtctgggggaatgcaggcagatgcacggatgttgaagagaacaagtttgc

SEQ ID NO: 7157 - DNA, 120 bp, synthetic construct
  source 1..120: mol_type = other DNA
caaaagagacagtgcagactcttcaaacacaacattgtctttgagggcagaggaggcagatacagtcttggcctctactacaagggaaagcgtgtttactcccaaaaatgatgggctcgc

SEQ ID NO: 7158 - DNA, 120 bp, synthetic construct
  source 1..120: mol_type = other DNA
gtctctgttgattgagcatgcacaaggcacagcagggactggtaccattcatccaagatctcagctctccctcacgaggaatctaaggcatgttgctatattcctcatttttaaagtggt

SEQ ID NO: 7159 - DNA, 120 bp, synthetic construct
  source 1..120: mol_type = other DNA
agagcgatcataataacccatggggataatcacaggtgtcccaaatcctttaatcactttttgttggaatatgaagaggtctctcactgctgaatataaatatacagggaagtgaaaaac

SEQ ID NO: 7160 - DNA, 120 bp, synthetic construct
  source 1..120: mol_type = other DNA
ctgagcagaagctatagatgcaaatgggtggcctatgactattgttgatttcattacttgtaacttatctccatgcataggaaacattagtgtaaccgggtctaatctaggtagtgtccc

SEQ ID NO: 7161 - DNA, 120 bp, synthetic construct
  source 1..120: mol_type = other DNA
ctctgggatccctgatgaagacacctcatctggagaccttgcaagctgtcctgaggggacttgatacactggtggcccagaaggttcgccccaggtgaggtgactcaggtggctttcggg

SEQ ID NO: 7162 - DNA, 120 bp, synthetic construct
  source 1..120: mol_type = other DNA
aggtgtgagagtggtaccaatcacacaggcaagggtgaaaggactgagcctaaaatggagtggcccctgaatgatctgagtcttcatcaggcagcaccttgcatgcagaccatcatctga

SEQ ID NO: 7163 - DNA, 120 bp, synthetic construct
  source 1..120: mol_type = other DNA
ttgcctgccacccttgaaacaggccattggaatgaaaattgtccacctatgcaccaggtctctattggacagaatgcttttgtcccagaggttgttcacattagaggacatttctttttt

SEQ ID NO: 7164 - DNA, 120 bp, synthetic construct
  source 1..120: mol_type = other DNA
gaaggacacatattagtaaaactccatgtttgtgaagggaatcagtgaatgagtcctggactttcaccctatcccgaaatctttcattttgatggattaatatctaattcgatcagttat

SEQ ID NO: 7165 - DNA, 120 bp, synthetic construct
  source 1..120: mol_type = other DNA
tgatgcactgcttacccaaggggttcgtcccaggtgaggtggcccaggtgggctggtggggagggcccaggtgtccaactgaaggaacagctgggtcatgtgaagtgaggaggcccaagg

SEQ ID NO: 7166 - DNA, 120 bp, synthetic construct
  source 1..120: mol_type = other DNA
taagatgcagcccaagaaaatcaaggcatttaaatgaaatttggttattgtaatcactttcctcccattcttttattggagacagagtttcactcttgttgcccagcttggagtttagag

SEQ ID NO: 7167 - DNA, 120 bp, synthetic construct
  source 1..120: mol_type = other DNA
gattgagtctctgggcacctggagacgacctaagcactatggcaatagtcagtctaaaaatcacacaggatatcacaattcactctctggttttcttgggggaaaaatccagtaactttg

SEQ ID NO: 7168 - DNA, 120 bp, synthetic construct
  source 1..120: mol_type = other DNA
catctctattaaaaatacaaaaatcagccagtcttggtggaacgtgcctgcagtcccagctatttgagtggttgaggcacaagaatcacttgagccctgaaggaaaggattacaatgagc

SEQ ID NO: 7169 - DNA, 120 bp, synthetic construct
  source 1..120: mol_type = other DNA
gtctccaggcttaacttgctcagcccactggtgtggcacaacaggtccttcagggcacccatagacatacaatttctgccaaagtagaaggtggtgagctgggagcagtggctcaggcca

SEQ ID NO: 7170 - DNA, 120 bp, synthetic construct
  source 1..120: mol_type = other DNA
ttgctttcattctcatcccataaatcagctgctcctgtcctcagtgctccctgttctctttgtcttttctcaatccctgttcccttttgattcccttttgattctgacttttgattcccc

SEQ ID NO: 7171 - DNA, 120 bp, synthetic construct
  source 1..120: mol_type = other DNA
gggaacactaaagggactccctaaaatcgatgccattattttttattttgaaaattttctaccagaaatggaccaggtgctgtggctcatgtctgtaatcccaacactgctggacaccaa

SEQ ID NO: 7172 - DNA, 120 bp, synthetic construct
  source 1..120: mol_type = other DNA
ggaacatttcccagcaaccattggccccagtcattttccaggacccttcatccaaatcttaatctcacccactcccttcctactctaatttgataattcatgtttcctccttcttagagt

SEQ ID NO: 7173 - DNA, 120 bp, synthetic construct
  source 1..120: mol_type = other DNA
cccagccttagagctgataaggatgcacctggaatgcactaagtatttttttgtccaagccaggtctcttcttagccttaggtgaggcttttttcagctgggtgctatggaagaacccca

SEQ ID NO: 7174 - DNA, 120 bp, synthetic construct
  source 1..120: mol_type = other DNA
caacatagggaaaccctgtctcaaatttttaaataaaagctgtaaaattgtaaaataaggaaaaagaaaaataaaagatatctatgtcctagattttagtttccaagtgcctggagaaaa

SEQ ID NO: 7175 - DNA, 120 bp, synthetic construct
  source 1..120: mol_type = other DNA
aagagatgcccaaagaactgacctgagcaaggtctagggacatcagctagggctacctgctttcagaggctccctgacatggccacatctgcaaaccacctgtcactttgtaccactctc

SEQ ID NO: 7176 - DNA, 120 bp, synthetic construct
  source 1..120: mol_type = other DNA
tgaggagaggactcattcttagggattttcattaagactttctttttgacctctcccttgccacactctagtgtgagttttttgtgtgtgtttgttttgaagcttattaagctttcattt

SEQ ID NO: 7177 - DNA, 120 bp, synthetic construct
  source 1..120: mol_type = other DNA
gttctgataagtagagccagttatgtggatctaataatatattctagagtaggattcttattttctggtttcaatatcatctctcttgtagttacagaaatacgtgggtgtcagaaatgt

SEQ ID NO: 7178 - DNA, 120 bp, synthetic construct
  source 1..120: mol_type = other DNA
catctgcctccacccttgtcacctagggttcactatcttccttgtagtaaccagagtgattctcttgaatacaagtcagattatatatttccgttagatctttctggtagctccctgttt

SEQ ID NO: 7179 - DNA, 120 bp, synthetic construct
  source 1..120: mol_type = other DNA
aatttcgtgtagggatgattcctgacacaaggaatcatcacatctattacatgtcgaggaatactcactttcactctgtttgcagcttgctttacttaccctgttgggtacacagggatt

SEQ ID NO: 7180 - DNA, 120 bp, synthetic construct
  source 1..120: mol_type = other DNA
gtggggacaaatacctacactatatcatgtggctatgccacagtttatctattcattctcctattgatggacacttggattgtttccagtttgggctactcggagtaaagctactatgga

SEQ ID NO: 7181 - DNA, 120 bp, synthetic construct
  source 1..120: mol_type = other DNA
catcacaaacgtgggcatcacacaggcatggcatcgcatagcatggcatcacatacgcacagcattgcatacacaggcatcacatacgcacggtatcacatacacaggcattgcatacac

SEQ ID NO: 7182 - DNA, 120 bp, synthetic construct
  source 1..120: mol_type = other DNA
tatatatatatatatatatatatcctgggaggaattgcatcttgccactagccttgtaagtgagtttggtttggaagtagattgtccctaggttgagcctcaagttggcagcagctccac

SEQ ID NO: 7183 - DNA, 120 bp, synthetic construct
  source 1..120: mol_type = other DNA
tgtacctcaatgctctgactttagaatcctgaacctataggatttctcagtatttgtgagatgtgtctgtttcggtgagtcaaggtaaaacctaacagctttcatctcaggtgtgcctga

SEQ ID NO: 7184 - DNA, 120 bp, synthetic construct
  source 1..120: mol_type = other DNA
gccgcacctggcgttcatcagcacgtgggctcctcgtgaccaagggtattgctcatgtgaacatccgaatgactgtctttatttttcaaattacatgtgctgtgttaattttagaataaa

SEQ ID NO: 7185 - DNA, 120 bp, synthetic construct
  source 1..120: mol_type = other DNA
ttttgttttttttaatctcccaggtttacagtatagagccggtaaatgctgcaagctgacatgctcttggtgttcgtggcgagcacttaaaacccaatttagttgtgaggggatgtatgg

SEQ ID NO: 7186 - DNA, 120 bp, synthetic construct
  source 1..120: mol_type = other DNA
cagagtgggccagagggtgggctgggcgccatctaccctccagtgtttcctaacaatcccccatccaggcacaaaacctctttaagctgttgaaccttcagtccctcttcgtgacatcgc

SEQ ID NO: 7187 - DNA, 120 bp, synthetic construct
  source 1..120: mol_type = other DNA
gttgctggtctgggactggagctccttacctgcgctggcccagagtgagtttcccgtggtcacgtgggcactgcaggctcgggcccctgggctcctcctcatgctccatttcttggcagg

SEQ ID NO: 7188 - DNA, 120 bp, synthetic construct
  source 1..120: mol_type = other DNA
gggtccagatatgcctgggctgcccaccaggcgaggtcatggtgagagcaggtgctggaccagcacagcccccacctcagttatagaacacctcgtcctcctcccagagggagccgctgt

SEQ ID NO: 7189 - DNA, 120 bp, synthetic construct
  source 1..120: mol_type = other DNA
agatgaagaaactcgggctgagaaaaggaaggggcttggccgaggtcacactgcatttggtgatggacaggcatctagcgtcacctccactctgccccctccccccggaccccctgggct

SEQ ID NO: 7190 - DNA, 120 bp, synthetic construct
  source 1..120: mol_type = other DNA
actccctttctgaccaagttcagacccttccatccaaggagagccacccaaggaccactcatgagcccccagctttctccatgatccattaaacacattctgagagagcatctctgtggc

SEQ ID NO: 7191 - DNA, 120 bp, synthetic construct
  source 1..120: mol_type = other DNA
ccttctcccctgtgtacaccccttgctcttcctttccctctctctccctctttttcctcttccttgttcccacctccttctgggaggatggagggggctgacctgtgttgagcaagaagg

SEQ ID NO: 7192 - DNA, 120 bp, synthetic construct
  source 1..120: mol_type = other DNA
ctgtgccccaattctcctatcagcctctacccctaaaaatacccaggagtgtggggctgaccccacaggttctgtcccctggagctggcccagtccatgtcccccattcctgctcttcct

SEQ ID NO: 7193 - DNA, 120 bp, synthetic construct
  source 1..120: mol_type = other DNA
ggagtgggctagagggtgggctgggcaccttctaccctccagtgtttcctaacatcccccatccaggcacacaacctctttgagctgttgaaccttcattccctctttgtgacgtcgcgg

SEQ ID NO: 7194 - DNA, 120 bp, synthetic construct
  source 1..120: mol_type = other DNA
caaggttgctggtctgggactggagctccttacctgcgctggcccagagtgagtttcccgtggtcacgtgggcactgcaggctcgggcccctgggctcctcctcatgctccatttcttgg

SEQ ID NO: 7195 - DNA, 120 bp, synthetic construct
  source 1..120: mol_type = other DNA
cagatatgcctgggctgcccaccaggcgaggtcatggtgagagcaggtgctggaccagcacagcccccacctcagttatagaacacctcgtcctcctcccagagggagccgctgtccatg

SEQ ID NO: 7196 - DNA, 120 bp, synthetic construct
  source 1..120: mol_type = other DNA
agatgaagaaacttaggctgagaaaaggaaggggcttggccgaggtcacactgcctttggtgatgggcagccatccagaatcagctccactctgcccacccccgccccctggaccctctg

SEQ ID NO: 7197 - DNA, 120 bp, synthetic construct
  source 1..120: mol_type = other DNA
ccctcactccctttctgaccaagttcagacccttccatccaaggagagccacccaaggaccactcatgagcccccagctttctccatgatccattaaacacattctgagagagcatctct

SEQ ID NO: 7198 - DNA, 120 bp, synthetic construct
  source 1..120: mol_type = other DNA
acaacccacatccttacccgaaggaacttgtccagggccccattctccatgtactcagtgatgatcatcatgggcttgtctgtaggggggtgggcacaggtgagaggtaagtgggcccag

SEQ ID NO: 7199 - DNA, 120 bp, synthetic construct
  source 1..120: mol_type = other DNA
ctcgctgcttctctgtgtagccggctttcagcgtcttgatggccaccggcacctccttcttccccgaggatgtcttcagcatgcccttgtacacctccccaaactctcctgtgggcagac

SEQ ID NO: 7200 - DNA, 120 bp, synthetic construct
  source 1..120: mol_type = other DNA
atttcaattcagtcatctgaagtacttgtttgtgaaataccttaaactcctttctcatttctagtctctgctcttgctggccatcccctcttgcagaaataccgtactcctacttgccag

SEQ ID NO: 7201 - DNA, 120 bp, synthetic construct
  source 1..120: mol_type = other DNA
gctgagccaccgcacccgacctagatgaatctcaaatagtcatgtggagtgaacgaagccagacagaaagaatgtacactgtacaatttcatttgtgtaaaattccacgaaatacaaaca

SEQ ID NO: 7202 - DNA, 120 bp, synthetic construct
  source 1..120: mol_type = other DNA
aggacaagtgtgatagttacttgcacgtgtcactgtgactgagcaccagggtgccgggacattcggccaaatgtgattctggttgtgttccagagagtgtttcacatatgattaacatcg

SEQ ID NO: 7203 - DNA, 120 bp, synthetic construct
  source 1..120: mol_type = other DNA
ggcagaaagtttccagcgtagagatatgaatataataatagacacaggcagggatgattaataaatgataaaatgtttacaggatgatcattggaatacaggacatttctaattttgaaa

SEQ ID NO: 7204 - DNA, 120 bp, synthetic construct
  source 1..120: mol_type = other DNA
ccctcctgtgttaaagatggatcagctaaaacaattcaacactgaagatacaaagaatgaggttaggttcattgaaaccagggtaacacctttggatgagctaaacacaaagatgacact

SEQ ID NO: 7205 - DNA, 120 bp, synthetic construct
  source 1..120: mol_type = other DNA
aaataggtttaatcacactgagggatgtcagcggcagccttgtctacttatttgaagatgatgtttccctggtttcactcttgtcatctccagtcttgatctcctttaagtcaacttatc

SEQ ID NO: 7206 - DNA, 120 bp, synthetic construct
  source 1..120: mol_type = other DNA
ccattctccaagcacagtcagcccaatgtgcacagagacatgaacatctatgtgtggttcagcattgtactgaaaactgtcatgttttatctttcacaaaatgccctggcatggtttcct

SEQ ID NO: 7207 - DNA, 120 bp, synthetic construct
  source 1..120: mol_type = other DNA
aaggctctaagaaacaactgcaacccataaatttttattatccttcttctctgcttgataaatacttgtgtgttgcgagcctgccatggcaattcctgcccttcccctggcccagcttag

SEQ ID NO: 7208 - DNA, 120 bp, synthetic construct
  source 1..120: mol_type = other DNA
cagacccttgcaagagacaatttgtttgcctttgcagatggagagagagaaactctggaaagataaatcactcactcaccgacagttactaagaacattgtcaaaaagacagcctgggaa

SEQ ID NO: 7209 - DNA, 120 bp, synthetic construct
  source 1..120: mol_type = other DNA
tttcttgtacagttgggaaggcccctaggactatgggactgacggtttcccttttactgggaatttcaaagacaagtatgcgaaagattttaaaaatctttgatttttaaatcatatctt

SEQ ID NO: 7210 - DNA, 120 bp, synthetic construct
  source 1..120: mol_type = other DNA
gtgtctgcaaccttgctttaacagtatgggagatcacctctatcacctggaattcccctggaactctggaatatacaagagaagtatgagacttgggtcttcccttggctgtgtttaatt

SEQ ID NO: 7211 - DNA, 120 bp, synthetic construct
  source 1..120: mol_type = other DNA
taccttctctatatattgatgtacttgttctgggcacttcctctatatggaataacaaagtgtggtattttctatctgcttcttagaatattgttctcaagtttcatcctttctagcctg

SEQ ID NO: 7212 - DNA, 120 bp, synthetic construct
  source 1..120: mol_type = other DNA
acaaagatttgtacctaggtttccttcaagacatcgtcttttgaatgagaactttcctgggttttagaggagggtggacattgtttattgatgcctcctgtccattaccgatgtttctct

SEQ ID NO: 7213 - DNA, 120 bp, synthetic construct
  source 1..120: mol_type = other DNA
tgtttgttatctgtctgttgtatgctaacagtttttcactgaggtaaaatttgcgtagagtatactgcaaaaaaacctaaaggcacagcttaataaattttaatataattataattgtaa

SEQ ID NO: 7214 - DNA, 120 bp, synthetic construct
  source 1..120: mol_type = other DNA
ggctaaactgtagagcatcttttcctatgctaattgaccattcatgtatcttcttttcttaagtacctattcaagtcttttgagaaattgtttcattgtgctgtttatcttattaaactt

SEQ ID NO: 7215 - DNA, 120 bp, synthetic construct
  source 1..120: mol_type = other DNA
caatcctatgccatttaatataatgttacctctgagtttttttcaaatctacccttaatagggttgaaagtgttgccttctcttcttatcatgctgagagttttctggggtttgttttta

SEQ ID NO: 7216 - DNA, 120 bp, synthetic construct
  source 1..120: mol_type = other DNA
ctcaatttcatagcagccacccctctgttaaatctgttagtcttttccttgtgcaggtagagtccactccttgataagtatgcacatggaaccccacatagactttgagagctgcacctt

SEQ ID NO: 7217 - DNA, 120 bp, synthetic construct
  source 1..120: mol_type = other DNA
gcctgtgaggccctgagaagaagacccagagaatccaggcctgaacttctgatctgtggacactgcaagaaaataaatcattcttattttacgccgctaatgcttgcagtaatttagtat

SEQ ID NO: 7218 - DNA, 120 bp, synthetic construct
  source 1..120: mol_type = other DNA
ttcatggccaccgcagggccctcagtttagcattcttcagagccagcatccaacaagccacagaagctctgagtatttccctttcttcagtcacccacataaatggcttcagggccttct

SEQ ID NO: 7219 - DNA, 120 bp, synthetic construct
  source 1..120: mol_type = other DNA
gatggaaatgagtggacagtggatctgtgggaagaaggaggggatgttatgggaaaacaaaaggagaatactagctaagaacgctaggtgacattaatattccgaagtctgtgctcatat

SEQ ID NO: 7220 - DNA, 120 bp, synthetic construct
  source 1..120: mol_type = other DNA
ctaatgcaataaaggatgcccataaaattcttatctaaagaatgtttcgaaaattgttgtacaaggacatcatcatttaaagtgatatgaagaaaccttctcagctaagcatatgggcta

SEQ ID NO: 7221 - DNA, 120 bp, synthetic construct
  source 1..120: mol_type = other DNA
agacgtccaccacaaggtcctggggaaccaagaattccactgtggcccataaattctaagtctacaggattctggaatgggagatgggaaaggccttcaaaagtggccacttttaaccca

SEQ ID NO: 7222 - DNA, 120 bp, synthetic construct
  source 1..120: mol_type = other DNA
accaggagggccagcagcggcaggcccagcttgtgcagcggctgcagggcaaggtcaggaccacccactcctgctcctgtcctcccacctgttcactttgccccgccccaacccctgggg

SEQ ID NO: 7223 - DNA, 120 bp, synthetic construct
  source 1..120: mol_type = other DNA
gtagtattttaaaaatttagttagaagaataataatatccttactaatttcactaagtgccagataccattttaagcaattcagttctctcatttaactccatgataactctgtgacata

SEQ ID NO: 7224 - DNA, 120 bp, synthetic construct
  source 1..120: mol_type = other DNA
gttcggggcaggaaagtgacatgggccacccacccaccctttgtcccacagccatagacaactagagcagctggaagggaagcgctcagtcctggccaaggagctggtggaggtgaggga

SEQ ID NO: 7225 - DNA, 120 bp, synthetic construct
  source 1..120: mol_type = other DNA
ggctggaggctgagaaggaagagctgagtgaggagattgctgccctgcagcaggagcgcgacgagggcctcctcctagcagagagtgagaagcagcaggttcgtgagccctggcatggcc

SEQ ID NO: 7226 - DNA, 120 bp, synthetic construct
  source 1..120: mol_type = other DNA
ggcatggccctgtcctggagaagcttccaggctgtgggaaaggaggtttagcccttcttttgggagcccccatctgagggaggtggctcagccctgccctgatgaatccttttggcgtga

SEQ ID NO: 7227 - DNA, 120 bp, synthetic construct
  source 1..120: mol_type = other DNA
tgcttaacctcttagagcctcagtttgctcatctgtaaaatgggaacctaaccgcatagggtggctctggggaagttcacataggaggtgctcaatcagtgtccgaaggagaaattaaca

SEQ ID NO: 7228 - DNA, 120 bp, synthetic construct
  source 1..120: mol_type = other DNA
aggagcctctcaggacagtccgcgttgggggcacttggctggcccctctgtgctctccaccgaaaaagtgacttgatcttttgtaaaaacttgtttttaattttgtataaaataaaggtg

SEQ ID NO: 7229 - DNA, 120 bp, synthetic construct
  source 1..120: mol_type = other DNA
ctggcacgggagcccggacagaacctggcacgggagcccggacagaacctggcactggagcccaggagtggaggaggtccctggcccaggctcaaccacagaactgagctcaacttaagg

SEQ ID NO: 7230 - DNA, 120 bp, synthetic construct
  source 1..120: mol_type = other DNA
caaagcacttttttttttctcacccagatggaaaaagaaagcgtggtttggttccaagtgtttcaggcttctgtctctgggtctcagctgcctgctgtgttccccaccacagcccctcgc

SEQ ID NO: 7231 - DNA, 120 bp, synthetic construct
  source 1..120: mol_type = other DNA
atggggagattccagcctctaggtcctggcagagacccccaagcaggatttctcgactctgtagctctacttctgttttaggctggataagcctttgttgtagatgctgtacagtgcctc

SEQ ID NO: 7232 - DNA, 120 bp, synthetic construct
  source 1..120: mol_type = other DNA
atgggaggtgggaagagaggcagtcagggaggtgatgggaggtggtaggagagactgtggtcagagaggtgatgggaggcagtaggagaggcaatcagggaggtgatgagaggtggtagg

SEQ ID NO: 7233 - DNA, 120 bp, synthetic construct
  source 1..120: mol_type = other DNA
acattctgtcaaacaagacattgagagaacataattcatttgtggaggtaggagcctgggtgcctacaccccagcagacctgacgccctgtccccggctcagccactttcccagtgatta

SEQ ID NO: 7234 - DNA, 120 bp, synthetic construct
  source 1..120: mol_type = other DNA
gacaacctactgattaaaaacgactcacatccccagtatggggcaccatctactgacctggaaagatgtctgtgatgttatgttagataaaagccaaaagcagaaagtgcttaccttaag

SEQ ID NO: 7235 - DNA, 120 bp, synthetic construct
  source 1..120: mol_type = other DNA
caatgaagatggccactcgccggggaactagttcacagtcgtactctatccgctgtgcccgggcgatgaacttcccatctgagttgtgtcctgtagagaccacagagccggccatcagca

SEQ ID NO: 7236 - DNA, 120 bp, synthetic construct
  source 1..120: mol_type = other DNA
actgattatggagttttgggggacacatctactgagctgtgacagtcaacccccctctggggtcaggagcaccataaccatgccccacctgcatctgttcttgcttctttctgtcgtgtc

SEQ ID NO: 7237 - DNA, 120 bp, synthetic construct
  source 1..120: mol_type = other DNA
gtgcagcccattgtaattatttttgcagttgccatttgtcttgttaatatcattcccattcctatgacagttgctattagggaccctgccctctgtgcctgggagcctgtcagaggcagt

SEQ ID NO: 7238 - DNA, 120 bp, synthetic construct
  source 1..120: mol_type = other DNA
ggaagcatcacaggccagtgggtctcgtgacttcttcctggaaggcctgtgggtcaaggaccggctcccatcaggggtgggggctggttttccaagtcctagcactgctcagtgacgagg

SEQ ID NO: 7239 - DNA, 120 bp, synthetic construct
  source 1..120: mol_type = other DNA
aatctgctctgcatctgatgcctcctgccggtacctctgcactggcctctcataccggctctcatgctttttgtccctaagcaggacagagaagaaacttctctgggctcctgaacacca

SEQ ID NO: 7240 - DNA, 120 bp, synthetic construct
  source 1..120: mol_type = other DNA
ggtacaggtttgtgtgcaagtgtggggataggtttgtgtgcaggtgttggtgcaggcatgggtgcaggtgtgggtgcacatgtggtacaggtgtgttcaagtgtaggtgcaggcctgtgt

SEQ ID NO: 7241 - DNA, 120 bp, synthetic construct
  source 1..120: mol_type = other DNA
gtgggtacaggtgtatgttcatgtgtaggtgcaggcatgggtgcaggtgtgggtgcaggtgtggggtggtggagggccaggtgagttgtctggattccaccattcaatatcatgcaggcg

SEQ ID NO: 7242 - DNA, 120 bp, synthetic construct
  source 1..120: mol_type = other DNA
taactgggcatcctgtagttttatttgctgaatttggcaacccttactgtctatccctttacagaaaatgcttgccagccactgctctaagtgaataggaagttcctggggagttttaaa

SEQ ID NO: 7243 - DNA, 120 bp, synthetic construct
  source 1..120: mol_type = other DNA
acctcttcaccgaagtggtcttctgaacagccacgaccagacaagctcctgagggcaaacccagctccccttctaatcctccagagctgctgcattatcctcactgcataagctccaggg

SEQ ID NO: 7244 - DNA, 120 bp, synthetic construct
  source 1..120: mol_type = other DNA
attcttctccttacctcctttgctgtccttccctttcctgtctttccctccctccatccatctttcctttttatccttttctctcctttctttcaatcggatattgataaattgccctct

SEQ ID NO: 7245 - DNA, 120 bp, synthetic construct
  source 1..120: mol_type = other DNA
gagctggttatgatgatcattcctgtgcttgctactgtattccctgcacctcaaactggctgggcacttgctaaggagtcagacatttatcgaatggattggttggatggatggatggat

SEQ ID NO: 7246 - DNA, 120 bp, synthetic construct
  source 1..120: mol_type = other DNA
gaaatgactccacaaaagcacaaagcagctgagatcaggggcctcggccaccatcttagcagaacaagcactctctgaggctggtggccaggagggagaggtggcagcaccaccccagcc

SEQ ID NO: 7247 - DNA, 120 bp, synthetic construct
  source 1..120: mol_type = other DNA
ccaaatacttccatccctaagaatttactgaggcagttctaaattaaagaaaatgtgagtaacaaaagatgttacagaagagccttgggcagcctgagaaacgatgggcctagcggaagt

SEQ ID NO: 7248 - DNA, 120 bp, synthetic construct
  source 1..120: mol_type = other DNA
ggctgaggatcccacactcacagtatttacatgtctatgttctgacaatcagtcacgtgatgggagggcccttcgttggaaccatggcaaccagttcttgtctgttacgtcgagaaatgc

SEQ ID NO: 7249 - DNA, 120 bp, synthetic construct
  source 1..120: mol_type = other DNA
tctgacataattgtcgacagatttgtagacttaccttactttgataaatgtttacaagttagaacaaacgtttctgattgtcagaacctgcacatataaaccactcagaattcctgtttg

SEQ ID NO: 7250 - DNA, 120 bp, synthetic construct
  source 1..120: mol_type = other DNA
agcacagtatgcctccgcttcaagcacctttcacacctgcagtcttccacctgcatccgggtgattttgacagatctgtttcccccactagactctgatttccttgaaggaaatgtgtct

SEQ ID NO: 7251 - DNA, 120 bp, synthetic construct
  source 1..120: mol_type = other DNA
ttattcattcattcattcatctgacatatgtttattgtggacttcctatgtgccaggcactgtacagggccctgggatgagtgctgaggataaggagataaataagaaatggagtttgcc

SEQ ID NO: 7252 - DNA, 120 bp, synthetic construct
  source 1..120: mol_type = other DNA
acgctgtgtctctcacgccagctttgcctcttttccagtttggcaccaactggcccgtgtacatgaccaagccggatggtacgtatattgtcatgacggtccaggagctgctgccctcct

SEQ ID NO: 7253 - DNA, 120 bp, synthetic construct
  source 1..120: mol_type = other DNA
tactcctgggggggtgggagggaccagagggcaggcagcattttatcatcattttgaaacccagctttcagtattcctttttggttattcaaacaatacagaacctataagtaagccaag

SEQ ID NO: 7254 - DNA, 120 bp, synthetic construct
  source 1..120: mol_type = other DNA
gtaaggtctacatagatgagactgcagatatccctccgcccatttcaactacaaaagctccacttcattttatttactgggtttttgtgtaaaattttaattgaagaaagggatacatga

SEQ ID NO: 7255 - DNA, 120 bp, synthetic construct
  source 1..120: mol_type = other DNA
ctctgcataggattcataattacctggactcccccacctaagaactaaactcttacagacacatttaatttcaactacattaaaatatgaataaaaacaaaaatacaaaaaggtaatgct

SEQ ID NO: 7256 - DNA, 120 bp, synthetic construct
  source 1..120: mol_type = other DNA
taagtcatggaaatcaagttgaaaaagacacgattcctatgcacagggatttacaatttacctaacaacagtaaaaatgacatagaaagtggtgtaagggctctccctctccctccccct

SEQ ID NO: 7257 - DNA, 120 bp, synthetic construct
  source 1..120: mol_type = other DNA
tagatggtgagcttgcagtcagccataaaaagcagaggagatcatgtgtaggcaaaacaaggaatattttaaacagaagcacaaagacctgaaaaactagggcacgtctgctgaaccata

SEQ ID NO: 7258 - DNA, 120 bp, synthetic construct
  source 1..120: mol_type = other DNA
gaaaccactttactcagacccctagtggaagtgtctaccaatcaatcctagccagctcttccctctcatacactaatgcagacttaacactgatggttttgcaaactttcatgaattatg

SEQ ID NO: 7259 - DNA, 120 bp, synthetic construct
  source 1..120: mol_type = other DNA
ttttttttaagtgcacagcaaaacaacttgaaggatcacgttaaaatgggtggtgtgagtcttttgttaacaacatcacggatgtttttcctgtcatacttttcattttggggggggggg

SEQ ID NO: 7260 - DNA, 120 bp, synthetic construct
  source 1..120: mol_type = other DNA
tagagtaactaacccaggaaggaaatggtatgaaccatcacaatactgataggtattgcctgtcatatagctctgcctcttcatcctttcccttgcacctcaaatctgctcattctgatt

SEQ ID NO: 7261 - DNA, 120 bp, synthetic construct
  source 1..120: mol_type = other DNA
tccttagaacacagcatacactacacttgcttcaggcccaaatctttgttcatattgatcacccactcatcataatccacccacctctgcctatctaaaccctgactatagtcttaaact

SEQ ID NO: 7262 - DNA, 120 bp, synthetic construct
  source 1..120: mol_type = other DNA
aagtgatggagaatatcgaattctcatatattactattgggaatctaaaatgatgtagctactgaagttagtaaacagtgtgtgagttcctcaaaaagttaaacataaaaaaagttaaac

SEQ ID NO: 7263 - DNA, 120 bp, synthetic construct
  source 1..120: mol_type = other DNA
tgtccggaatgtgcctaacgtcctgacctccatgcccttttcagggagccttgggaggagcccgaatcactgatggaatcggacagtgcatggagatggttcagcaggacgagggtaagt

SEQ ID NO: 7264 - DNA, 120 bp, synthetic construct
  source 1..120: mol_type = other DNA
actgtgattgcttttattggcagtgctgaaaactcacccctgtgtgacctcaagtaagccacgtaactctgtgaacctgcagttttatcatttttaaaataaagaaacatgacagatttt

SEQ ID NO: 7265 - DNA, 120 bp, synthetic construct
  source 1..120: mol_type = other DNA
aaagatggtgccccagtgagaaaaaagaaatcaacgtaacaatgggaatcagcaagaagaatactgagacaggaaagacaacattttttacaaatgagttattcattcactttctagtgg

SEQ ID NO: 7266 - DNA, 120 bp, synthetic construct
  source 1..120: mol_type = other DNA
actggatagatggtattcgactcctttcagttatccagaactgcctgattcatgccagccctacggaagttgcttttactcattggaggaagaacacgttggcttttctcttgacgtgga

SEQ ID NO: 7267 - DNA, 120 bp, synthetic construct
  source 1..120: mol_type = other DNA
ctaatgtaccataggttgaccatacctcagaagttgtacccttatggcgactgcatggaattttaagcacacttgatggaaaactattgagctcactcttctcatgatcactgtttgctg

SEQ ID NO: 7268 - DNA, 120 bp, synthetic construct
  source 1..120: mol_type = other DNA
gaggattgtatttcagaaccactgactgctcttgacagttgttaacccactaggctcctttgagtagagaagccatagtccttcagcctccaattgatatcaatacttaggaagaccaca

SEQ ID NO: 7269 - DNA, 120 bp, synthetic construct
  source 1..120: mol_type = other DNA
tgtgtgttgttgaaaaaaaaacattctctgcctgagttttaatttttgtccaaagttattttaatctatacaattaaaaacttttgcctatcactctggactgttggattgttttttaca

SEQ ID NO: 7270 - DNA, 120 bp, synthetic construct
  source 1..120: mol_type = other DNA
tccaggactggcacctctggtcctctgcatggtgaagccccttcctttcaattccccagtagccagtgctctaatccaccaggtctcaggcatgatctgtgtttctccacatgctctttc

SEQ ID NO: 7271 - DNA, 120 bp, synthetic construct
  source 1..120: mol_type = other DNA
agtgaaattcatagatcttaggtgtacatttcaatgacttgcactaaatatatactcttctaccatcatctctatatgttgatacaggacatttccattgccccaaaagtttctccttcc

SEQ ID NO: 7272 - DNA, 120 bp, synthetic construct
  source 1..120: mol_type = other DNA
gaatgccaggtcttgaatctgggatcctcccctccctgccactgcaagccccaagtgagttgcactgcagggctggctacaagataccgtgcaaagatcagaagagacttggaccctaga

SEQ ID NO: 7273 - DNA, 120 bp, synthetic construct
  source 1..120: mol_type = other DNA
aaaaaaaatgtaggaatcatctgaaattccaaattctaccactcacagttaagtgttgttagatgttagatgtgggatattgccttttaatttccactctgcgccgctacccccagcccc

SEQ ID NO: 7274 - DNA, 120 bp, synthetic construct
  source 1..120: mol_type = other DNA
ttaggctccccttggctgtggcagtttctcaggatttccttgtttttaatgatcttgacagttgtgagtactgctcagggattttgtaggatgccccactattgggatttatttgatact

SEQ ID NO: 7275 - DNA, 120 bp, synthetic construct
  source 1..120: mol_type = other DNA
atagctgtcaaaaagggtgatgctaattctattttctccctaagtacctgtgatagcaaaggaaaggtatacactcaggtatttgggggcagagcattaaaaatgtgtattgtcagccgg

SEQ ID NO: 7276 - DNA, 120 bp, synthetic construct
  source 1..120: mol_type = other DNA
tctcgcccttccagccgcgttgtcaatggtgaggatgcggtcccctacagctggccctggcaggtaagagcaatagcagctgccctcattcccaccgtgggctctggaccctaagctcta

SEQ ID NO: 7277 - DNA, 120 bp, synthetic construct
  source 1..120: mol_type = other DNA
acagaaggtagagaatgttggggtccccagggaggtcatagtgctggtgtggggaggctttggagaatcagaatgtgacccccatggaaaagtgatagggccaccacgggcagctgccca

SEQ ID NO: 7278 - DNA, 120 bp, synthetic construct
  source 1..120: mol_type = other DNA
caaaaggtgaccatgaagttgggcctcccgggtggttgtgaaggccaaggagacaatcttatgcccttcaagtgtacaaaaaattctttttttttttttttgagatgcagtctcgctctg

SEQ ID NO: 7279 - DNA, 120 bp, synthetic construct
  source 1..120: mol_type = other DNA
gaggtgacaggtgagaaacatcggatcctggggagggcctgaaaggatcctagaagctcagtggggaagggcccttggggacattccagaaaggcttggggatgttttctgatacagtgt

SEQ ID NO: 7280 - DNA, 120 bp, synthetic construct
  source 1..120: mol_type = other DNA
tggtagagtgggaaggacaatgtgtgatctgcttccactgatgggctgggggctttggttattcattcattcaacaaacacttattccttgttttaaaggagggctcagaggggtaagga

SEQ ID NO: 7281 - DNA, 120 bp, synthetic construct
  source 1..120: mol_type = other DNA
attccagaaaggcttggggatgttttctgatacagtgtgaccccaggaacttgatggcttctgggtggtgcttggaactacagctgaacttccttatttcaacaagtatttataaagtat

SEQ ID NO: 7282 - DNA, 120 bp, synthetic construct
  source 1..120: mol_type = other DNA
cctcatatttctctttgaacaccatgaaagggaagattgtcccagcaaggacacacacaaatgactttgatattaatggcccatttgtagcctccctttatactttcagctacaactgaa

SEQ ID NO: 7283 - DNA, 120 bp, synthetic construct
  source 1..120: mol_type = other DNA
gtgctttcccactgtttctcatttctatagagaacagattggtaaacacttaaaaggagtgtaggttcaaggcagctttctgtagtgtgtaggcattacagaccattggataggtgtgga

SEQ ID NO: 7284 - DNA, 120 bp, synthetic construct
  source 1..120: mol_type = other DNA
atagttctaagcactttgcgagtattaactcattgaatcctggccactacactatgacgtaggaactactgttatcctggttttatagatgaggagagacagtgaggcaaagcaacttgc

SEQ ID NO: 7285 - DNA, 120 bp, synthetic construct
  source 1..120: mol_type = other DNA
tgtgcatgagtctatgcctgtgtgcatatgtatgcatgtgtgcatgagtgtatgcatgtgtgtatgtgtgcgtgcatgtgtgcgtgctttagtatatgtatgcatgtctgcatgagtgta

SEQ ID NO: 7286 - DNA, 120 bp, synthetic construct
  source 1..120: mol_type = other DNA
cttcaggagggttggaatctccccgaattgtacccagactccacatctgtctctaaagtttgcctaaaacccagctgttttcaaacacattccatggggatttggacctctctagaggtg

SEQ ID NO: 7287 - DNA, 120 bp, synthetic construct
  source 1..120: mol_type = other DNA
aagggatgaggaaaggaaggaagggaagaggaaaagaagggaggaaggaagaagggaagggaggagaaaggagaaggaagtgggggaagagaaggaagaggaagagttagaaaacgacta

SEQ ID NO: 7288 - DNA, 120 bp, synthetic construct
  source 1..120: mol_type = other DNA
taaatgtatgaagacagaaagtccatatcccgccataaataaaacaccagcatctcttgacaccacagaagttaactgtaactataaatacaacagaggcaggacagggtgaccatgtcc

SEQ ID NO: 7289 - DNA, 120 bp, synthetic construct
  source 1..120: mol_type = other DNA
tgctgtccctgaatctgtttatgctcactttgactatttttaaaaacaaagaccgaaaaaacatttttagatggatgcaggggaggggatgccccaaatcaaatgggcacactgaggtct

SEQ ID NO: 7290 - DNA, 120 bp, synthetic construct
  source 1..120: mol_type = other DNA
catctataaaatggtgatgatgttttagacctcacaagactgttgcgaggttttcctgcaaagtgtctaacacaatgcctggcatagattgggctcccagtcaagagtagctataatcat

SEQ ID NO: 7291 - DNA, 120 bp, synthetic construct
  source 1..120: mol_type = other DNA
agaaaaaaaaaaagtgtttagagatagtggttaggaggccacagtgccacaagccaaccttagagatctggaatttctgtggtggtgctaggcacattccatacacatcttcaccaatcc

SEQ ID NO: 7292 - DNA, 120 bp, synthetic construct
  source 1..120: mol_type = other DNA
ttatctagcaagtagttactcagcttccgttcaaacacttctaatgacaagaatgacagtcacttcctcccaagacaactcactccatctttggacagctctaaggtaagataccctact

SEQ ID NO: 7293 - DNA, 120 bp, synthetic construct
  source 1..120: mol_type = other DNA
atgtacatacacacactacataacacagacacacacttccacatgccacacatacacaaaccacacatgccacacatatgctaatcacacaccacacacatacttcacatgacatcatac

SEQ ID NO: 7294 - DNA, 120 bp, synthetic construct
  source 1..120: mol_type = other DNA
ctgttgacatgacaatcccacagaaagagacagtgcttctccttttagtttctgttaaactgtttcctctgccagcagtatctttcctttcatggtgaactctcattctttaggttccag

SEQ ID NO: 7295 - DNA, 120 bp, synthetic construct
  source 1..120: mol_type = other DNA
acaaaaacaaaaaactcaaaggtgctcttaccgaaatgatttcagattcttctgtaacatcagacaatgccatgtcacgacgatagccccaggaaaacttgtcaatgctggtgcacatct

SEQ ID NO: 7296 - DNA, 120 bp, synthetic construct
  source 1..120: mol_type = other DNA
aaaagcccaaatcttacctctttttataactactttgatagcaaaacccacctcctccaagaagcattctctggtctccctttattgagtcttactgcacagaccactgtctaccttgta

SEQ ID NO: 7297 - DNA, 120 bp, synthetic construct
  source 1..120: mol_type = other DNA
caggatgtctggatgtctgactgggcagcgccgttggcaaactcctctagggtcatggttggaattcggatcagatagagggctcgccccaaaacatgcctcttgtttcgtggggtgact

SEQ ID NO: 7298 - DNA, 120 bp, synthetic construct
  source 1..120: mol_type = other DNA
atagcgtcatttttagagttgaagaaactgaggttcagaaaggtgatgtaacttgccccaggttgcctgagtaattgatgagggagacttgggtttccatgtgattccatgtgattgata

SEQ ID NO: 7299 - DNA, 120 bp, synthetic construct
  source 1..120: mol_type = other DNA
gtgagccgccatcaccaagtgttcttcccaaaccaccaagccactgggtccctgtttcctttaatccttcagataaggaaataatgacatttcaacttaaaaccttacttaaagtacagg

SEQ ID NO: 7300 - DNA, 120 bp, synthetic construct
  source 1..120: mol_type = other DNA
gttttataactaaaaaggtttaagctgctaaaactatttttaagagatgtgaaatgcagtatgggactatctttttttcctcctctaagcccaaagattaactagagtccctccaacctt

SEQ ID NO: 7301 - DNA, 120 bp, synthetic construct
  source 1..120: mol_type = other DNA
ctgtgcctggcttcagggtgcaaaatttaagagggctcagctctcaccctcaggtcaggcaagagctattttgatctggcactgggacagaactggactgaatgacagtggacctccctt

SEQ ID NO: 7302 - DNA, 120 bp, synthetic construct
  source 1..120: mol_type = other DNA
ctcatctttccatgtgacaaagatggccattcaacacctggggattgtctttgccattcttttcttgggtcctctccaccaatcaccaggttccatctgttttatttccctaatgtttct

SEQ ID NO: 7303 - DNA, 120 bp, synthetic construct
  source 1..120: mol_type = other DNA
tcacatgtgtatgtttgggtacataagcacatgtgtgagcactgtgtatgtgcatgtatgcatatgtgtgtgcacaggtgcatatgtgtgcatattatggtatttttctctcccccacaa

SEQ ID NO: 7304 - DNA, 120 bp, synthetic construct
  source 1..120: mol_type = other DNA
ctgccacttctcttctgcctccatctggagaaagttttaaaggctcatgggattagattgggcccatctggattatccaggataacctcactatttgaagatctatgtctcagtctattt

SEQ ID NO: 7305 - DNA, 120 bp, synthetic construct
  source 1..120: mol_type = other DNA
actctttccccccagaaaaaaaaaaaaaaaaaaaaaaaaaaaaagccctgttgcccttgctcccttggccctcagctccaactgcctagttaccggccgcaggaccatctgcaattccca

SEQ ID NO: 7306 - DNA, 120 bp, synthetic construct
  source 1..120: mol_type = other DNA
ccccaagctagatccatgcttctttctcactgaaactgcctgggtttttatgggtttgttttatgtgaaaagtcggcgaatctctggcgagacacccgcttgtaaaaagggaaaggaaaa

SEQ ID NO: 7307 - DNA, 120 bp, synthetic construct
  source 1..120: mol_type = other DNA
tgcagcagtccctgcgtaccctccctaactccatcactgcagctctgcttctctccacttaaatatttgggtttctcgtaaacatctgtctgagtaaaactttttttaaaaaggtgtgaa

SEQ ID NO: 7308 - DNA, 120 bp, synthetic construct
  source 1..120: mol_type = other DNA
taatctcaatcatacacataggttacccatacacatatccaagggaaagcaacacagcaaggtcttaacaactggtgtgtctacatgatggcattgttagtttttgctgggagggggatg

SEQ ID NO: 7309 - DNA, 120 bp, synthetic construct
  source 1..120: mol_type = other DNA
ataattggcattaatggattcatgagggtggagtccttatgacctaaactcctcccattaggccccagctttcaatactgttgaattagggattaagtttccaatgcaggcttttttggg

SEQ ID NO: 7310 - DNA, 120 bp, synthetic construct
  source 1..120: mol_type = other DNA
attgtaaaataagagcaattatctgtggcccggtgtctgttcttgctaagtgaagagttgtttgtaggtttctctcctggatgactttatggcttattttccatagtggagagggctgag

SEQ ID NO: 7311 - DNA, 120 bp, synthetic construct
  source 1..120: mol_type = other DNA
cctcttgtcaagcagtcagtccctgctgcttccttactggggcaggatcaggacgcacagggatttggagtgccttggaaccaaccaccacccacgccgtttgccagctggtaaacatgc

SEQ ID NO: 7312 - DNA, 120 bp, synthetic construct
  source 1..120: mol_type = other DNA
gatctaggctacagttaagtggtcaaacacccaggtcctgaagttaggctgcctgggtttaaatcccagctctactgcttactagccctgtgaccttgagcaagtcacttagtttttctg

SEQ ID NO: 7313 - DNA, 120 bp, synthetic construct
  source 1..120: mol_type = other DNA
cctgtgaggaggtgaccagaggtagagcaacttcaccctaaggctggatcaggatcccctccaggtttttactagagccaaacccacatctcctttctcttctgccacccccccttaaaa

SEQ ID NO: 7314 - DNA, 120 bp, synthetic construct
  source 1..120: mol_type = other DNA
acactggaagcagctctcattctcctcttctatttttttacccactatgacgcttccttagaggatcaaaaggggctcgtggcatcctatcaaggtgagagttcattggaaaagtggtca

SEQ ID NO: 7315 - DNA, 120 bp, synthetic construct
  source 1..120: mol_type = other DNA
ccagaaccagaaggtatggctgaaggggagggtaggatgatggttattttatattcagctaaaaatattcccagactgtgatgagacaactgtaaataagacagatgtccacaatggtgt

SEQ ID NO: 7316 - DNA, 120 bp, synthetic construct
  source 1..120: mol_type = other DNA
aatcataatggtgtcaatctccaggcagggtccattgctacagttgacgatagtggatgaaaattcactcctcagagtcttcttgataatttgaaattgtcttgattgacttgtcagatc

SEQ ID NO: 7317 - DNA, 120 bp, synthetic construct
  source 1..120: mol_type = other DNA
ttcctggagctagactgattcaaatcttgcctctgtatcttagagaccttgggcagattagtcaacctctttctgcctctgtttctacttctgtcagaggatgatagtacttgtttcatt

SEQ ID NO: 7318 - DNA, 120 bp, synthetic construct
  source 1..120: mol_type = other DNA
atttactcatgatcatgattctgtggtgcaacaactgggctgggttcagctgggcagttcttctgttagtttcacccagggtcattcatgcatctgcagtttggggtgggatggcctcag

SEQ ID NO: 7319 - DNA, 120 bp, synthetic construct
  source 1..120: mol_type = other DNA
ccgttacgctatatatgctgtatagaaaggcaggatggcataatggttaaacctaggtaggtagggtttgaatcctcctgctaccatttactagctctgtgacttggactagttatagca

SEQ ID NO: 7320 - DNA, 120 bp, synthetic construct
  source 1..120: mol_type = other DNA
gcatatagcattgctacaaaatggcagatgcactttaacaatcgtgtttaataaaaggttggatttgcatatctgaagtggggcatgcagtctccaactgaacacaagcctcactgctcc

SEQ ID NO: 7321 - DNA, 120 bp, synthetic construct
  source 1..120: mol_type = other DNA
tgtggttgtgagaacgaaacaagatagtctatgtaaagtgattaaaacagcgtaggcacatggtaaacgcttaggaaatgtaggctgttataaagctcagagatgttaagtaactagatc

SEQ ID NO: 7322 - DNA, 120 bp, synthetic construct
  source 1..120: mol_type = other DNA
tggctggatcacttctgggtcatagagggaatggaccccgaaaggacaggttccagaagatctgggatattgccccctctctgtctagcaccagtgctgtgcaatatttaggacatcctt

SEQ ID NO: 7323 - DNA, 120 bp, synthetic construct
  source 1..120: mol_type = other DNA
tgcccagatgatggtaaacgtcatcctaggcatcttagggacctctcaaggccattccagcctccccttctaagaccctgctaaacctctgggcactgctgttaaacatttctctatgag

SEQ ID NO: 7324 - DNA, 120 bp, synthetic construct
  source 1..120: mol_type = other DNA
cccctgactgcttggatccccctaggggtgacccctgctgaaactggctccttcctgaccggttcccgtcagggctgtgctgatgggtggtgcccaggcctgcccctggggacggggtac

SEQ ID NO: 7325 - DNA, 120 bp, synthetic construct
  source 1..120: mol_type = other DNA
atcactgtcttagcacctcctcagcacaaactggcccttgaggaatgaaataccgccgccggcacacacgctcctgagttaagcctttgtcaatgaaatgaacacccacttaaaaggaat

SEQ ID NO: 7326 - DNA, 120 bp, synthetic construct
  source 1..120: mol_type = other DNA
taagtccagtcagcatcaccctctccttccaatgaaccccactagccttgtgatatcacagatattcttagttgacaggctcatggtgtagcctgtctagatcataagtacatttttttt

SEQ ID NO: 7327 - DNA, 120 bp, synthetic construct
  source 1..120: mol_type = other DNA
tttaggcaacctgaggatggtcatcagtaatatcttcaacgtgagtcatggtgctgggaggagggacctgggagaaaagggccaaaagctccatttggtggggtttccagggttttgaaa

SEQ ID NO: 7328 - DNA, 120 bp, synthetic construct
  source 1..120: mol_type = other DNA
atggttatataaaagtaattaattctcagagcctcaccagcagtgggtccagcaagtttgtacagccagcatcttctttcagtcagtgcgtgtcagtaactgcatatgtcctctcattgg

SEQ ID NO: 7329 - DNA, 120 bp, synthetic construct
  source 1..120: mol_type = other DNA
actgtattttaatagcagaattgacaggatttgctgatagactgcacgtggggtgggagagggtcaagatgacttcaaggttctcatctggcacaactcagcggctgctggtgccattta

SEQ ID NO: 7330 - DNA, 120 bp, synthetic construct
  source 1..120: mol_type = other DNA
gaggaaaaatctgatgatacagaagagagatgaactgcaagagtcaagcctttgagttggaaagcaggagtgggattttgagcactgatacctttaggccgatgcagggacagttcatct

SEQ ID NO: 7331 - DNA, 120 bp, synthetic construct
  source 1..120: mol_type = other DNA
ataatcagtaacaacttgtccaaggccccagtgaccatgaagagtgagggctgcagccagggaatagtccgtcgcagagcaaggattcaaataagcagccggaagcagacccgggagcaa

SEQ ID NO: 7332 - DNA, 120 bp, synthetic construct
  source 1..120: mol_type = other DNA
ccccttcgttgacctctctgtgcctcagtttccctatctatagaatggggataagaataaggctacttcctagggctgttgtgaggattgaacaagtgaccgaacacttgttcaattttg

SEQ ID NO: 7333 - DNA, 120 bp, synthetic construct
  source 1..120: mol_type = other DNA
tcctcatgattagattgtgggtatgcatttttggtaggaattctccaagagccgtgtgtgcccttcttagtatatcatatcagaagacatgctatcaatttgccccattactgggtgtgt

SEQ ID NO: 7334 - DNA, 120 bp, synthetic construct
  source 1..120: mol_type = other DNA
agaagaggagtaaatttcagaggcagaacactccctgtgagcccgaacctcttcctgctttgttgcagtcttcataacgattgctttaaaagactgcattgatataacatcatctctctt

SEQ ID NO: 7335 - DNA, 120 bp, synthetic construct
  source 1..120: mol_type = other DNA
gcacttgggtctaacaggactagcacacatatttatgcccctccccaccccagggccagcgtgggttgggagagggcatgccgggtggtggagctgtgcctgcctctacagtggagctct

SEQ ID NO: 7336 - DNA, 120 bp, synthetic construct
  source 1..120: mol_type = other DNA
taagagctttatatgtggaaactcatttaatccttacaataaccttatgaagaaggtacatccaaaaccccattcttctaggccaggtgcagtggctcacacctgtaatcccaatatttt

SEQ ID NO: 7337 - DNA, 120 bp, synthetic construct
  source 1..120: mol_type = other DNA
tattcttactctatagacatgcttcctcctctttcaccccacattgtggggtgtagtcttttgcttcaagaaagcagcctggtggatggaatctcttggccccaatcccaaattctctgg

SEQ ID NO: 7338 - DNA, 120 bp, synthetic construct
  source 1..120: mol_type = other DNA
accagggcaaatctgattttcatctttgcaaggggaacaaatttcttttatctcctctggctttgaaaccctgaaatgaaaggaggaagggcagaaaaaagaacacatagcaagttatca

SEQ ID NO: 7339 - DNA, 120 bp, synthetic construct
  source 1..120: mol_type = other DNA
tggcccctagacagtggacagcaatggtcagtttgacacaccagagccctagccattacttcctggatgttgtgtgaatattttctggacatggcttatataaaatgaaaaagtgaattg

SEQ ID NO: 7340 - DNA, 120 bp, synthetic construct
  source 1..120: mol_type = other DNA
ctcaaaatctagagttttgcatgtgctctcccaagtactggcagaaaattcaagattgttagtaacactgtgtggctaaattctgcttgtgggctgcctagattcccaattctgtgattc

SEQ ID NO: 7341 - DNA, 120 bp, synthetic construct
  source 1..120: mol_type = other DNA
ttgattacgtcagggagaaaagaaagtccccacttggcctgagaatctctgcacccttctagctcttgttaaccactcttttgaatagcagagaaaacctcagactgccatatctgggag

SEQ ID NO: 7342 - DNA, 120 bp, synthetic construct
  source 1..120: mol_type = other DNA
agactgttatcatggtgatggatttctgcttcattcatttctttttccagacagcatcatatagaatgagttgtggggtggcagtcagcaggtttgggtttatcctctattctgccactt

SEQ ID NO: 7343 - DNA, 120 bp, synthetic construct
  source 1..120: mol_type = other DNA
ggagctacaagggtggggccaccgccaagaccccagaatggtagagctatcatagtgcaatgccagcttgggagaactgcaggcatgagactccaacctgtgcgaagtgcaacatgggca

SEQ ID NO: 7344 - DNA, 120 bp, synthetic construct
  source 1..120: mol_type = other DNA
tggggattacaggtgtgagccaccacacccggccttaatttatttttctagtctgcaggtaattctttttaattctctccactctcctatgatcttatgaggtagggactgtcattattt

SEQ ID NO: 7345 - DNA, 120 bp, synthetic construct
  source 1..120: mol_type = other DNA
ccagggtcttgcagctagtaagtgacagagctgggacttgagcttgggttttctgactcctggtctggttcattatccatgaggtgctgggaactaaaataagccacaatcttggaatct

SEQ ID NO: 7346 - DNA, 120 bp, synthetic construct
  source 1..120: mol_type = other DNA
cttttaagcagagaccccaatgaagaggagggagatatgcgatgcatttagttaggggaagaacattccatgaaaataggatagcaagtgcaaaggccctgagacagcagcatgctttgt

SEQ ID NO: 7347 - DNA, 120 bp, synthetic construct
  source 1..120: mol_type = other DNA
tgggtaaggagcccttaacgtcttgcaaatgaaggagccgaatggaatccctccggctttcttagctaagagagagtcaatcaagttaatacaagttagggtatcacaaaagtatataat

SEQ ID NO: 7348 - DNA, 120 bp, synthetic construct
  source 1..120: mol_type = other DNA
ctattctataccaagtactatgctaatcaaccaaggacagcacaaacaggagaaatctccagctcagtcacttgagttgcaataaatatttgctggataggtcaggtgcagtggctcaca

SEQ ID NO: 7349 - DNA, 120 bp, synthetic construct
  source 1..120: mol_type = other DNA
cccaaaatgacagaactaatgcatagaaaagaagaaatgtgatgtcttttggctccaaagacaccccacatatgcgttggttacagttactagagaaaagttattccacccccaccccac

SEQ ID NO: 7350 - DNA, 120 bp, synthetic construct
  source 1..120: mol_type = other DNA
actcttgtcacagtggtatcacccctacttctgatttcaaataaatgttctagagacacagtaagggcccaacaaacgcttgttcaacaacacaaggagagccagcttttaaagtaggaa

SEQ ID NO: 7351 - DNA, 120 bp, synthetic construct
  source 1..120: mol_type = other DNA
cactgtgttgttagggtttaaaggagataatgtatgtgaaatgttagcaaacaagtgttagctaccctgatttccggtttcagagttctgtggtcccagtttatgccacatgcagtgacg

SEQ ID NO: 7352 - DNA, 120 bp, synthetic construct
  source 1..120: mol_type = other DNA
gttcgcgcaggcactggagtcagagaaaatggagttgaatcctttctctgccactctttgaggagaatctcaccatttattatgcactgtagaatacaacaataaaatacagccatgtac

SEQ ID NO: 7353 - DNA, 120 bp, synthetic construct
  source 1..120: mol_type = other DNA
taaaatgtgctacaattagccttcggaatatttgctgggtgatttaaatgtgtgggtctcatttccatgctagccatggtcatctgacagtctctacactgtgaatattgcctggtgatc

SEQ ID NO: 7354 - DNA, 120 bp, synthetic construct
  source 1..120: mol_type = other DNA
cttggatatataggttttatttcatctaacgttttacatggattgttgataaatggccatctggcttttatttgaatgcctccaaagacagaggactcactactgccatatgaagtagct

SEQ ID NO: 7355 - DNA, 120 bp, synthetic construct
  source 1..120: mol_type = other DNA
tgcctcccagaacactggccctcaccgaggctaggggagtctgttggcaggctgctgatgtgttttcctagtttacttttttttttcttttttttaatatatatattttttgagacagag

SEQ ID NO: 7356 - DNA, 120 bp, synthetic construct
  source 1..120: mol_type = other DNA
tctggtgaggaccactgtaaactgcaggaggataggagattagcatatctggctccttgagacccataactatattttatttagaattatctctctggtacttcacatcgtgtcacaaat

SEQ ID NO: 7357 - DNA, 120 bp, synthetic construct
  source 1..120: mol_type = other DNA
cacctagcacaaaatcagaaactgtaggcttgcaatatgatagctcttatgctcacacattcccttgtggttggctaaatccctagtaataaactttcacattcatgtggcggtttgcat

SEQ ID NO: 7358 - DNA, 120 bp, synthetic construct
  source 1..120: mol_type = other DNA
gagctgtttgaactttatgtccctttgctaagtgacctcagactcctgtactacaatttttttgtgcctgcttgttatcatttatcaagagctgtgttcaggactcagcctggatactca

SEQ ID NO: 7359 - DNA, 120 bp, synthetic construct
  source 1..120: mol_type = other DNA
aggaggacctggaagccaatcctagaaatgacaaagcagaggtggtcacttgggcatcaggcagcagaggtcatcagggacaaaaaggactgtcggtgtcagtagtgccattgccaggaa

SEQ ID NO: 7360 - DNA, 120 bp, synthetic construct
  source 1..120: mol_type = other DNA
gtagagcttggctttcagacccatctcccctgcccatccctaccccttgaacatacttccaggatctctctccttcaaggcaaccccaggggttcaattcaaacattaagctattacggg

SEQ ID NO: 7361 - DNA, 120 bp, synthetic construct
  source 1..120: mol_type = other DNA
tattatctcagttcactttctgttgctataacagaataccacagaatgggtaatttataaaataattatatatagctcatggttctggaggctgggaagtctaagagcatgctgctggca

SEQ ID NO: 7362 - DNA, 120 bp, synthetic construct
  source 1..120: mol_type = other DNA
gtcttaacttgttccagcaccaactcaaaattccaaagtccatggtctcatctaaatcagatgtgggtgagacttaaggtacaattcattctatgggagattccctctggctgtaagcct

SEQ ID NO: 7363 - DNA, 120 bp, synthetic construct
  source 1..120: mol_type = other DNA
agtaatgggaggggcagtcttgaagatctctgaaatggctttggagtttttctcccttgtcctgatgaacagcctctggctttgttctatgtgtactaattttctttcttcctttttttt

SEQ ID NO: 7364 - DNA, 120 bp, synthetic construct
  source 1..120: mol_type = other DNA
taatgctccattcttgacaatacaggctttttctagcctgctcctcaaaactcttccaacctattcccatcacccagttccaaagccacttccacattttcaggaatctgttacagtaaa

SEQ ID NO: 7365 - DNA, 120 bp, synthetic construct
  source 1..120: mol_type = other DNA
caaactaggaaggcctgtccacaaagcttggccagatgcttcccagatttcagcatttgaggacaacattcatgaatttagccatactggcattccagagatgctattaaaaattttttt

SEQ ID NO: 7366 - DNA, 120 bp, synthetic construct
  source 1..120: mol_type = other DNA
caagaggataactgcttcttggtcctcaactcactcaccctgatgagagttgacttgcagggatgtgctggagccagttcccataggctcagtgggctgattgttctcatctcttcccaa

SEQ ID NO: 7367 - DNA, 120 bp, synthetic construct
  source 1..120: mol_type = other DNA
ggcagataacttctcttaaatctcatttcttagagtctgagaatacctcagtaggcggttgtgagaattcaaggagataatgcatataatggtttctagcacaatgcccaacacttttaa

SEQ ID NO: 7368 - DNA, 120 bp, synthetic construct
  source 1..120: mol_type = other DNA
taagctttcatacacactgtgccttctgcctggaatacattccccatgtctctgcctggctaatactacttctctgtcaacacttggctgtcaaccgtttcctctgctccaggaagcatt

SEQ ID NO: 7369 - DNA, 120 bp, synthetic construct
  source 1..120: mol_type = other DNA
ggctataatgaagtattctggaacgatcaggatttgctgagtattggagaaagatccatccacttagaagaagaattaaacaatcagaagtggacacgacctggaccatcagcccagcac

SEQ ID NO: 7370 - DNA, 120 bp, synthetic construct
  source 1..120: mol_type = other DNA
tcactactgcctcttaggctcagggcacagttaccctgattgtgcagcatttagggaatgagctgggaagtccaggtgctcagcatcctaggcacccatcacactcattagtggtgtgtc

SEQ ID NO: 7371 - DNA, 120 bp, synthetic construct
  source 1..120: mol_type = other DNA
ctggtatatagtaaataccaaataaatatctgtgaagtgaacaaatgatggtaaaaagccctcagtcatacataaagaggaaagtctatgcagtttcctgataagaactgaaaagcgggc

SEQ ID NO: 7372 - DNA, 120 bp, synthetic construct
  source 1..120: mol_type = other DNA
cacctaagaaagctctggtgacattttcttcctgggaatcagggagttctcattaatccttatattaagcagagagaaaaggcagaaaatggaagtgtgtaaaccggaatccaggagtcc

SEQ ID NO: 7373 - DNA, 120 bp, synthetic construct
  source 1..120: mol_type = other DNA
agatgaccataccacactttccctctccgcaaaccccatccctccttcccaccctcacatgaggctgatgacggtgcctcttgtttctctgagaaaatacaaggaattagtaaggcattt

SEQ ID NO: 7374 - DNA, 120 bp, synthetic construct
  source 1..120: mol_type = other DNA
atgatatatcagcttttgccttttaatttctcaatctcttaaagagaatccagctttagtatgattagcatatgatcaaacttccatatttgccttgggaataatggactaagggaaata

SEQ ID NO: 7375 - DNA, 120 bp, synthetic construct
  source 1..120: mol_type = other DNA
gagtgatctccttgggtctcatggctttaaacaccatctgtattgtaacaactcccaaatttatatccctagccctaacctttccactaagcttcagacttgtacatctccattcagtgt

SEQ ID NO: 7376 - DNA, 120 bp, synthetic construct
  source 1..120: mol_type = other DNA
ccagtgcactttcttctaagccaggctggaactgtgggttctcgcttgggttctgccactatcttgctatgtgatcttgggcagtcccttcccctctccaggcatcagccttctcaccta

SEQ ID NO: 7377 - DNA, 120 bp, synthetic construct
  source 1..120: mol_type = other DNA
gacaggctacatacaccatgagcctgtcaactaagaatatctgtgatatcacaaggctagtggggttcattggaaggagagggtgatgctgactggacttatcagggaggacttcctgga

SEQ ID NO: 7378 - DNA, 120 bp, synthetic construct
  source 1..120: mol_type = other DNA
ttccttttaagtgggtgttcatttcattgacaaaggcttaactcaggagcgtgtgtgccggcggcggtatttcattcctcaagggccagtttgtgctgaggaggtgctaagacagtgatg

SEQ ID NO: 7379 - DNA, 120 bp, synthetic construct
  source 1..120: mol_type = other DNA
gttttccataaacttatactgattatgtaactttacaaaatcataatcgacaataacaggaaagaaaggatgcaggaggaatgtaggcctggattccttgtgatacacagagtagggctg

SEQ ID NO: 7380 - DNA, 120 bp, synthetic construct
  source 1..120: mol_type = other DNA
cttgttgttgggaaccacataatcttcacagcaaacctccctccctttgccgcctgctgcgagggacctggtgagctggctggcagaaaacatcagggccacctgggtagccctcacctt

SEQ ID NO: 7381 - DNA, 120 bp, synthetic construct
  source 1..120: mol_type = other DNA
gagccacctgagaggtttctgggacatccgaaggaaataatgtttagtacagtgcctagcacatggagaacactcaataaatagtggctgttcatcaacatcatcatgacaatcacagca

SEQ ID NO: 7382 - DNA, 120 bp, synthetic construct
  source 1..120: mol_type = other DNA
tcttaggcaagtccattaccctctttaggcctcagtttccctgtctgtaacacataggagttggacttgatactctctaaggcttttacagctctggaatattccaaagaagttagtgga

SEQ ID NO: 7383 - DNA, 120 bp, synthetic construct
  source 1..120: mol_type = other DNA
tctacactgtccctgagagaggaattgtgcctcagccaacaagatgaaattagggcagcagtttccatgagctgttgacagagctcatgcaccccaaactggtcaggaaataacatttga

SEQ ID NO: 7384 - DNA, 120 bp, synthetic construct
  source 1..120: mol_type = other DNA
tgttcagagcctggctcttcctctgtgtcccagcttcctgagctgtaaaattgagatgaaacaatgccagctgctcagaggattgccatgagcattgagctcgctggctcatgcaagtca

SEQ ID NO: 7385 - DNA, 120 bp, synthetic construct
  source 1..120: mol_type = other DNA
taagccactaagtttggggtggctgttatgcagcaataggtaattgatactctctgcttcccctaagcatatcataggccccttaactccaagcccagaatgaacatatcattgttcatt

SEQ ID NO: 7386 - DNA, 120 bp, synthetic construct
  source 1..120: mol_type = other DNA
cctgagaatctgcatttctactaaatttccaggagatgctgaggcagcaggtctggggaccacactttgagaaacatggatctaggctattctatctctaaaggtactttgtgaagtttt

SEQ ID NO: 7387 - DNA, 120 bp, synthetic construct
  source 1..120: mol_type = other DNA
gtctccctatgtttcctaggctggtcttgaacttcttggtttaagcaatcctccccacttggcctccctaagtgctcagccagggtgttttttttttttttaattaactattacagaact

SEQ ID NO: 7388 - DNA, 120 bp, synthetic construct
  source 1..120: mol_type = other DNA
ttattataacatacaaaatatattaatgtagtaatacttaaagtgtaacatataaccatggtacatgctcaaaaaatggtgtgtacaccatcagaaggttgaagccctcgggtcaatact

SEQ ID NO: 7389 - DNA, 120 bp, synthetic construct
  source 1..120: mol_type = other DNA
accttaaatggtataagggcttccctccctaagtcctacttgtcactgccatggcccccaggatgacttctctttgcttccagttaactagccgttcatatcaacctaggaacaagcaag

SEQ ID NO: 7390 - DNA, 120 bp, synthetic construct
  source 1..120: mol_type = other DNA
agaattatgaagaccatttggtagagggaatttgaggaacaccaaagaggatgcctctcactgtgctgaaaaatcaaggcaggcttcacagaagagggcatgcccaggctgcttctaaag

SEQ ID NO: 7391 - DNA, 120 bp, synthetic construct
  source 1..120: mol_type = other DNA
ctttttaaaaccttactacatgacagagagggcacccagtgagctcttaacaacaatgtattgaatgagaatgaatgaaagcaaagaatggagctgagccctggggaggatacagatagg

SEQ ID NO: 7392 - DNA, 120 bp, synthetic construct
  source 1..120: mol_type = other DNA
ggttctgaacatatgcaggaaaagcaagaggaaaacgcttttatcaaaactgacacagaggatagactgtttagtgaaaaagcaagttatataacagcatgtacaatatattcccactct

SEQ ID NO: 7393 - DNA, 120 bp, synthetic construct
  source 1..120: mol_type = other DNA
ggcaatgccaacccctagacctgacaggcatgtttaccagctggcaaacagcgtgggtggtggttggttccaaggcactccaaatccctgtgcgtcctgatcctgccccagtaaggaagc

SEQ ID NO: 7394 - DNA, 120 bp, synthetic construct
  source 1..120: mol_type = other DNA
acctaaggagtatgctgcttcttgtggtcactaatgcgtactctgccttgacctacagtgtcccaggtattactctgttttggagaactacttactatcaaatgactaatagacaacatt

SEQ ID NO: 7395 - DNA, 120 bp, synthetic construct
  source 1..120: mol_type = other DNA
agagcagcctctcaagcttcaatgtgcgtttgaatcacctggggctcttgttaaactgctgctacagattcagcaggtgggagagtggaactgaggtactctgtttctgacgtgccccct

SEQ ID NO: 7396 - DNA, 120 bp, synthetic construct
  source 1..120: mol_type = other DNA
ccagacacacacacattacacactcccccatacacacacacccacactcccctcacatccacactcccctcacacacacacattacacactacatacactcctactctcccctcacacac

SEQ ID NO: 7397 - DNA, 120 bp, synthetic construct
  source 1..120: mol_type = other DNA
catacatccacactcccctcacacatacacacattacacacactcccctcacacacatccacactcccctcacacacatcacatacatccacactcccctcacacacacgcattacacac

SEQ ID NO: 7398 - DNA, 120 bp, synthetic construct
  source 1..120: mol_type = other DNA
catacacctacatacaccacacacattcattcaccacacatacacactcaccccacaccccatacatacatacacacacacacacacacaagctgtaaagcagtgggactttcacatgtg

SEQ ID NO: 7399 - DNA, 120 bp, synthetic construct
  source 1..120: mol_type = other DNA
tgaaataggcgtcatttgtcccttagcctttcaaaatgaatccttctatactgggaaggttatagacttgccagatctctgagcaggaaaagatccaagaaatcaaatccagccacactg

SEQ ID NO: 7400 - DNA, 120 bp, synthetic construct
  source 1..120: mol_type = other DNA
gagagctcccagcacgagggtgagagttggtggttgctttagagcctcctgcccaggttgataccagccagtgtttctgtcccccaggtgggatggccccgtaagaacatggtgagggaa

SEQ ID NO: 7401 - DNA, 120 bp, synthetic construct
  source 1..120: mol_type = other DNA
gtcattctcagaagaaatactgagtctcagtacctgaaacctgaactttggcctgggagcaaagtgatgctgtaggtggaatgtgaacacagatagttttgaaatctacgcattgcatta

SEQ ID NO: 7402 - DNA, 120 bp, synthetic construct
  source 1..120: mol_type = other DNA
gtaacctggtttatccaagtctcttggaacagggtacgttctgctttgaggtactccatgtacagtctaatgatgatctttcactgatttatagtcagcttccaaaacacacagtgctag

SEQ ID NO: 7403 - DNA, 120 bp, synthetic construct
  source 1..120: mol_type = other DNA
gggttgggggggagtcatttaactctttaaacctaatctgagaatggcccatctggaggaatgactcaggaagaatagcaatgataatagcacacatctgcatagaatttactaaacagc

SEQ ID NO: 7404 - DNA, 120 bp, synthetic construct
  source 1..120: mol_type = other DNA
catcatggaaatgggaagtccctcctgtctagctgtgctgggagcaggcaggagccaaccaggaaacctccaccacaaactgcatcacacatatacccccagcccctccacacacacaca

SEQ ID NO: 7405 - DNA, 120 bp, synthetic construct
  source 1..120: mol_type = other DNA
tcctaaggagatcagcttcagttacctcttcagaagcaccttctctgaccatcctgtctaaagtagacagacgttatgcttgttttaacaattatatcctctgtaactctaattgccacc

SEQ ID NO: 7406 - DNA, 120 bp, synthetic construct
  source 1..120: mol_type = other DNA
tccgaacagcaggaggtgtccaatttaggaatccaggtatccaggcaggaggcagagtcaggcccaaaatccaggtgtccgggcagaaggaggcatctgactcagggatccagtcttcca

SEQ ID NO: 7407 - DNA, 120 bp, synthetic construct
  source 1..120: mol_type = other DNA
gggcgaccatgccagaggaaggaaaacagcaagaaagagactcaggaagagagagagacaaggagaaagaaaaagacaaaagagagagacaggcaggatgatgcagagacaaagacacac

SEQ ID NO: 7408 - DNA, 120 bp, synthetic construct
  source 1..120: mol_type = other DNA
accctcctcctctctgtcccctccagtctagctgaagatcctgcatgctgctgcttgctgccactgctgcttgcagggaagcagcaagattgtgaattcaggatctgtaatcctaacgca

SEQ ID NO: 7409 - DNA, 120 bp, synthetic construct
  source 1..120: mol_type = other DNA
gagtcagggatagcccttaacccttcaggacactcagcaaaaactgctttctgcacctgattctcgtgggggaagagtggacacaaggatcatttctcaccatagttcagatgaggaaag

SEQ ID NO: 7410 - DNA, 120 bp, synthetic construct
  source 1..120: mol_type = other DNA
ccactcattgttgcatatgggaattaagagatgtttctgaagagtttaaacagaaaaatgtttatactaaacattaagtgaggaaaaacatcaaacatcatacaatgtgatccagttatg

SEQ ID NO: 7411 - DNA, 120 bp, synthetic construct
  source 1..120: mol_type = other DNA
ttcagttgtcctgtttcttcattctccttcagactggaacagttcctctgcctttgtcttgacattgacattttgaagcatctggaccagtacttatgtagaatatccctcagtcccagc

SEQ ID NO: 7412 - DNA, 120 bp, synthetic construct
  source 1..120: mol_type = other DNA
ggagagagagggagaatgagggaagaagagataggaagagagagaaacagtataccttttatctctttgacaggcatgtatttccttggaatgggcaggaatccctcagaatcggtggcc

SEQ ID NO: 7413 - DNA, 120 bp, synthetic construct
  source 1..120: mol_type = other DNA
tcaccaacactgcctcagtaatgcacccctgactccctattgaagcagtgtgctgacatccttgtaaaaacaaatttaattttcttccttttttgggacagatggaaagaaattgacgtc

SEQ ID NO: 7414 - DNA, 120 bp, synthetic construct
  source 1..120: mol_type = other DNA
ttaagagtcaggattaaggacagacatattttcgtagctcagagccccagcagtgtgtgtgtgtgagagagagtgtgtgattgtgagtgtgcgtgtgtgtgagtgggtgtgggggtaaga

SEQ ID NO: 7415 - DNA, 120 bp, synthetic construct
  source 1..120: mol_type = other DNA
tccctgtctctgtctctacacgtgtgcacaggacaagggtatttgcacaggtccatgttcctccatttgtaagcatgcatctgagcctcccaaggtagagagcatctcccaacttcctta

SEQ ID NO: 7416 - DNA, 120 bp, synthetic construct
  source 1..120: mol_type = other DNA
cagtaactatctgtgcacagcactatcacgtttaccaatacaaccctgctgagaatacgacctgctgtacaacaggtgtttagcactgaatgaatgaatgaatagacatgtcttaagctc

SEQ ID NO: 7417 - DNA, 120 bp, synthetic construct
  source 1..120: mol_type = other DNA
aaaaaatgtagcttaagattctcataccagtgtggctattgataagggagggttggcaaatgtgtaaggacaatggtgactccacataaaagaaaaacagaacacagcatgggacagagg

SEQ ID NO: 7418 - DNA, 120 bp, synthetic construct
  source 1..120: mol_type = other DNA
aagcactgaataaatgaactccagacctgctctatctccaacattcctttctcccttcaccagcatcgtggcacatacctttgaaacttatcactttaaaaactttggacttcttcagcc

SEQ ID NO: 7419 - DNA, 120 bp, synthetic construct
  source 1..120: mol_type = other DNA
tgcacagttcatgcttgccatgcacaaaaaggcagccataagcaacaatgcaaaaccataaaagaaaactgaaaattgacagaattacagggttcactacatgtaccatggagaaacatc

SEQ ID NO: 7420 - DNA, 120 bp, synthetic construct
  source 1..120: mol_type = other DNA
gcaggaagagaggaggggtggagggagacataacacaacatgtaccctacttgacttttttcctttagaaaccagcctcacatcaatgaactcaaagcttacagtccttactatattctt

SEQ ID NO: 7421 - DNA, 120 bp, synthetic construct
  source 1..120: mol_type = other DNA
ggggggctataggagggaaaagttacaggagtgtattcctcacttgacgtgggaatggtactgacaagtaaaacaaatgatctatgtttaccaagcatgtttgtgaggactaaaactagt

SEQ ID NO: 7422 - DNA, 120 bp, synthetic construct
  source 1..120: mol_type = other DNA
ttggcttcagtctgttcattcacaaaagggagttgatcatccctgccaactctgtccaaaggggtatgaggaacaaaaggggccagtggcctgcataatttcacgctcctgactctgata

SEQ ID NO: 7423 - DNA, 120 bp, synthetic construct
  source 1..120: mol_type = other DNA
acagcaaggggtgatttctcaatttgctggggtggcggggctggaatccagctctccttttcacttttgtttggaaacgtgagttggtttttcaaaaatttttatgtctcaaactatcaa

SEQ ID NO: 7424 - DNA, 120 bp, synthetic construct
  source 1..120: mol_type = other DNA
agtaaagtaagaggaatccaggttggaatcattgaagaacttcccaaacagcagttggtgtgtgaccctgcaggatttgtcttcagttatagtttaatttcagtgagagctggtgtgtgt

SEQ ID NO: 7425 - DNA, 120 bp, synthetic construct
  source 1..120: mol_type = other DNA
gtgatgtcttcagttatagtttaatttcagtgagagctggtatgtgtgtgtgtgtgtgagacagagagagagaaagagagagaatcttggaaaggttcaaggtacctgacctccaaggac

SEQ ID NO: 7426 - DNA, 120 bp, synthetic construct
  source 1..120: mol_type = other DNA
aaccacaagtacaaaggcattaagtaagaaaatagcatggggtgtttgggaaaggcaagaatagttcagaacacaggctgtgtgtgtgggggtgtgtgggggtgcctgtgtgtgggtgtt

SEQ ID NO: 7427 - DNA, 120 bp, synthetic construct
  source 1..120: mol_type = other DNA
aggcacacatttatcactttatctatggagttctgcttgatttcatcagacaaaaaatttccactgctaaaacaggcaaataaacaaaaaaaaagttatggccaacagagtcactggagg

SEQ ID NO: 7428 - DNA, 120 bp, synthetic construct
  source 1..120: mol_type = other DNA
aagccaggaatcaacttctctctagctacgaaagtccgagatggcatcttcttccgaaaaaaggctatttcatctaccttgaaaatccattgttgagtgtagccaccttcatcaatgatc

SEQ ID NO: 7429 - DNA, 120 bp, synthetic construct
  source 1..120: mol_type = other DNA
ccttacatctctttcaaatgtggagatggttttttgatcttacagtgtgtggaaccggagtcagtaatcaaagctccctgttccaagctatagacagacaggacaacaatttgatttcct

SEQ ID NO: 7430 - DNA, 120 bp, synthetic construct
  source 1..120: mol_type = other DNA
acaaaagattttttttgtctttgttttacttttttttttttcctcatgggatggtgatgggtatatggcgtagatggtgggtgaagggcctcatctgccctgttcccttccaagcctctg

SEQ ID NO: 7431 - DNA, 120 bp, synthetic construct
  source 1..120: mol_type = other DNA
cacttctgagcttcagtttctgtgtctctacacagatgtgtgcaaaatgatcagttacctcactgtccccaggatcatcccccactttttcttaccaaccagatacaaaaaagccttcta

SEQ ID NO: 7432 - DNA, 120 bp, synthetic construct
  source 1..120: mol_type = other DNA
gtataataataataaaattaaaaaaaaaagagcgtggctcctccccgacttctcttgctcattctcttgccatgtgacatgctcgctcccccttctctatccaccatgagtagaagctta

SEQ ID NO: 7433 - DNA, 120 bp, synthetic construct
  source 1..120: mol_type = other DNA
aaacaatgtaatgccaggaagaagtaccgaatgtcagctagaaaccggtgcagagggaaaagagtcaggcagagctgatggatccagtttgaaaaaacaaaatgccattcaaccgtattt

SEQ ID NO: 7434 - DNA, 120 bp, synthetic construct
  source 1..120: mol_type = other DNA
tactaaaaaaattaaaaaaaaaaaaaaagaaatcaaggaagcagagatagaaaacataggcagctctttggagaattgtctggcaaagggagcagagaagtgaggtggtatttgatgaag

SEQ ID NO: 7435 - DNA, 120 bp, synthetic construct
  source 1..120: mol_type = other DNA
taatgcaattcggatgaaaagcccaatgacccgttttaagtttggtaaaatgatacctaagtttaactggaaaaatagattgtcggggggaggagccaagatggccgaataggaacagct

SEQ ID NO: 7436 - DNA, 120 bp, synthetic construct
  source 1..120: mol_type = other DNA
gaaaaaaaaagaaaaatagattgtcacaatgcattgtttagagaagatagtaaatttagcagtctcatttcacaagatactaaacagcatcataaatgacacttatgaaaatagtgtggg

SEQ ID NO: 7437 - DNA, 120 bp, synthetic construct
  source 1..120: mol_type = other DNA
tgtgtcgcaggttgtgggagcctgcagagatgggccaccagtggtttggtttaatcccctttttaatatctttgttgcaacgttatttccaattcagctcccaagtcacattaaaaaaaa

SEQ ID NO: 7438 - DNA, 120 bp, synthetic construct
  source 1..120: mol_type = other DNA
tatgtacgtagtgctagcaaccctggaggcaccaacgaaggcccaagacccctacctttgtgctcttttttgctccccctgagaatgggggcaaagaggagaatgggactgaataaggct

SEQ ID NO: 7439 - DNA, 120 bp, synthetic construct
  source 1..120: mol_type = other DNA
ctgtgatatttatgacacagtatttattgtgcccaaagctggaattcttactccggttctgcctgataagtcagaggaacatcgtacatggcaagtcataaaatgctgaacaccacagga

SEQ ID NO: 7440 - DNA, 120 bp, synthetic construct
  source 1..120: mol_type = other DNA
tcttgttgggaacaggtttgaaggttgaagtgactcattgtggaacaatgagacggaaataccgtgtttgtaatgtaacaaggaggcctgccagtcatcaaacgtaagaaaagtttgtca

SEQ ID NO: 7441 - DNA, 120 bp, synthetic construct
  source 1..120: mol_type = other DNA
ccatttgtaggtctgtaatattgtggcagggcaacgatgtatcaagaagctaacagacaatcagacttccactatgatcaaggcaacagcaagatctgcaccagatagacaagaggaaat

SEQ ID NO: 7442 - DNA, 120 bp, synthetic construct
  source 1..120: mol_type = other DNA
ttaatcacactagcccttagtttcctcatctctggaattgggacaatatttatgtatgtatgtggtgtgtatgtatgggataggatctctctcactctttcaggctggagtgcagtggtg

SEQ ID NO: 7443 - DNA, 120 bp, synthetic construct
  source 1..120: mol_type = other DNA
cagaggggctccttgtgagcttgtgaggaactttctacttaagaatgaccaagtggccttgtgggaaggaagagggttgccatttgttaatggtgtttataaattgctattggattagta

SEQ ID NO: 7444 - DNA, 120 bp, synthetic construct
  source 1..120: mol_type = other DNA
tttggtaaatttctctcatttagggaccctgaacacttgtttggcagcggttatgtttttcagcttcttacctactagtgtagtgagatcagttccacccaattccaggggtattgatac

SEQ ID NO: 7445 - DNA, 120 bp, synthetic construct
  source 1..120: mol_type = other DNA
aagcgatactcctgtctcagcttccatagtacgagggaccatagacacaaaccactgtgcccaggagagaaacttcttaatgactacttagaaaagtaatccatgtgtccaatatgagtt

SEQ ID NO: 7446 - DNA, 120 bp, synthetic construct
  source 1..120: mol_type = other DNA
atgtctaaaaacaagttgatggaagagcctccactgggaatgacattttggactacttcatgtcctgtaattgggggagagtttaaggttgtactttggagtttactttagatgtgtttg

SEQ ID NO: 7447 - DNA, 120 bp, synthetic construct
  source 1..120: mol_type = other DNA
caaacagcctccagaataaggctgggctgagtcctgaaccctcatcagattggctgattgggggcctgtgctcttatcaatagagagagagggacatgtgtttactgcagggaactttcc

SEQ ID NO: 7448 - DNA, 120 bp, synthetic construct
  source 1..120: mol_type = other DNA
gtgagtctgtgtcccatgagtctgtgtgccccgtgactctgtgccctgagtctgtgtgccctgtgagtctgtgcccctgagtctgtgtgccctgtgagtctgtgccccgtgagcctgtgt

SEQ ID NO: 7449 - DNA, 120 bp, synthetic construct
  source 1..120: mol_type = other DNA
catgagcgtctatgacctgtgagtctgtgagtctgtgccccatgactctgtgccccatgaacctgtgtgtcctgtgagcctgtgtgccctgtgagcctgtgtgtcccatgactctgtgtc

SEQ ID NO: 7450 - DNA, 120 bp, synthetic construct
  source 1..120: mol_type = other DNA
agtctgtgcccccgagcctctgtgacccatgagcctgtgtgccctgtgagcctgtgacccatgagtctgtgtgccctgtgactctgtgacccgtgagcctgtgacccatgagcctgtgta

SEQ ID NO: 7451 - DNA, 120 bp, synthetic construct
  source 1..120: mol_type = other DNA
acttgagtttgcagttctaagaacaatccagttggaggcatctgcaggaaaccaaaagtcaagaccagagacaagaaaagttggggtttgggaattattcacatgaaggcagaaacctaa

SEQ ID NO: 7452 - DNA, 120 bp, synthetic construct
  source 1..120: mol_type = other DNA
gtttcttaaaaagttaaacagtcttaccatatgttctacccatgacactcctagatatttactgatctgaaagtatgctgggtgcaccatggcttgtgcctatagtcccagctattcggg

SEQ ID NO: 7453 - DNA, 120 bp, synthetic construct
  source 1..120: mol_type = other DNA
aggctaaaagccctggtttatactcagcacagagctcttctcaaaggagaaacaatcagtattgccgactaattcatttctcttaaaaatgcaataattagctgggcacggtggatcacg

SEQ ID NO: 7454 - DNA, 120 bp, synthetic construct
  source 1..120: mol_type = other DNA
ttcacccacccactcacccgcctcccagagtcagacattcagtccatagatataactcttttattaatttcccttgaagactgatgatttttttctactttttgccacgtctcataattg

SEQ ID NO: 7455 - DNA, 120 bp, synthetic construct
  source 1..120: mol_type = other DNA
cacaggtgctccttccagtctctaacatttcctcatctctcccgctcacgtttatcttctgccccactcctgaatttctgaggaaatattacctattagattggtaacaatgaaaaagac

SEQ ID NO: 7456 - DNA, 120 bp, synthetic construct
  source 1..120: mol_type = other DNA
cctacttttctcagtctgcagtgccgttaggagaaataggttctgcttgagtgccagggaatttaggagatggcagattttggttcactttcctccaacttcacccagtaattattattt

SEQ ID NO: 7457 - DNA, 120 bp, synthetic construct
  source 1..120: mol_type = other DNA
gaggtaatgcatatgttaaatagcttagcttagccatcccactcctcaaaagaaacgaaagataattattcttccttctgggcttctcgaggacagtacttctagtattaatataccact

SEQ ID NO: 7458 - DNA, 120 bp, synthetic construct
  source 1..120: mol_type = other DNA
tttagtgccctttccacatgaggacatcctagttgcttcaatagtctccttagaggaggaggatgtcacagctgctgcagtatcagccccagagagggctactgtcccagctgttacagt

SEQ ID NO: 7459 - DNA, 120 bp, synthetic construct
  source 1..120: mol_type = other DNA
aatctgcctcctttgcagctgtggtggccaccctggaggaacccacttccccggcagcttcagtgcccacccctgcagctatggtggccaccctagaggaattcacttccccggcagctt

SEQ ID NO: 7460 - DNA, 120 bp, synthetic construct
  source 1..120: mol_type = other DNA
ctaactgcactagtagaactgtctcagagtagctttaactggtaattactgaggctgggtggggcggggtgggtggggggtggatagacacgtaccaggatgctctcagtgtttggaggc

SEQ ID NO: 7461 - DNA, 120 bp, synthetic construct
  source 1..120: mol_type = other DNA
tctttaccagggacctctttcattttcccattcattcattcagcaaatagttctgtagcacctaccacggaccaggcagagttctagttgctggggatataacaatgagagaagtaaagt

SEQ ID NO: 7462 - DNA, 120 bp, synthetic construct
  source 1..120: mol_type = other DNA
agtggcctttcctggaagagcagtgtcctgaggttgccttatccgaggctggaggaggaggctgagggctctctgattgtttattttcccagagccacggtgaggtggttcagaaagtaa

SEQ ID NO: 7463 - DNA, 120 bp, synthetic construct
  source 1..120: mol_type = other DNA
ttttgctgcatgcccagcaccctcaggtgctgtgggacaagacaagttcatttttcctccgccctggcctgggatgagcggccacctcctcctgcccacacacgtctggccccatccccc

SEQ ID NO: 7464 - DNA, 120 bp, synthetic construct
  source 1..120: mol_type = other DNA
tcttccagcttgttccagaaaggaaacgtgggtctcctgccctctgctgtttcctggtgcttgctttccctgccctgccctcagacccctctgctctggccctctgccttggctggccgg

SEQ ID NO: 7465 - DNA, 120 bp, synthetic construct
  source 1..120: mol_type = other DNA
acaatcctgacttcaagtccctgccctgccatcctggctgtggggacttggacaggtcactgagactcagtttccccatgtgtacacctctgtgggctgaggcaatgagatgaggctcag

SEQ ID NO: 7466 - DNA, 120 bp, synthetic construct
  source 1..120: mol_type = other DNA
ttagcgtcatttattttatttactagcagtggaggacgacaggatctgattcaggttttaaaagagaaccctctgagatgcccccctctcggggtggagcagagctccccaccccttccg

SEQ ID NO: 7467 - DNA, 120 bp, synthetic construct
  source 1..120: mol_type = other DNA
gaatgatgtgtggttggagccagtggatttttttcaatagatttttctttttggggaaaagatagatgaagggcaggtttgaggtgggtggccaagggttctcttttggctggaatatta

SEQ ID NO: 7468 - DNA, 120 bp, synthetic construct
  source 1..120: mol_type = other DNA
cgggttgtcacaggattaaaggagggtgcttggcacagagtgatgcccagtgaaggtgttcatgagcgtcggtgtcacccagcggcgcctgctcattggacacttggtgtctttaatgag

SEQ ID NO: 7469 - DNA, 120 bp, synthetic construct
  source 1..120: mol_type = other DNA
aaacgtggtcttcaggagaagcgcccgcaatttcaacgtgcccatgtgcaaagctgcagacgtcacggcggtggaggtgggggcttccccccagaagacatccacgttcctaacatttat

SEQ ID NO: 7470 - DNA, 120 bp, synthetic construct
  source 1..120: mol_type = other DNA
ctttaattaaaaacaacaggaaaacagatcagttcctcactgtgtttctcgagcactgcaaggcgcaggtctgcagtggtgaggaatggatgtccgctttgctctgtgatgtttacacag

SEQ ID NO: 7471 - DNA, 120 bp, synthetic construct
  source 1..120: mol_type = other DNA
aacgtttttatccgttatctggtatttcttctggggcctttgttgttaaattttgtttccctgaagcctcccctcctcctcccacatctctcctcctgggacctatgagatgttaagctt

SEQ ID NO: 7472 - DNA, 120 bp, synthetic construct
  source 1..120: mol_type = other DNA
ttgactgcttggccttccctgcagccagctggagccagggagtcctgcctaagaatgggtgggtaagaagcagagctgatggagaagggaggctctgggctctggaaggagagggctggg

SEQ ID NO: 7473 - DNA, 120 bp, synthetic construct
  source 1..120: mol_type = other DNA
atttgtttgtggcggatgatgtcacgggtcaaaggttggtctctggattcactggttgttcagtcaagtggccaagggacaccagggctgaggcacagctgcttaagggctgacctttga

SEQ ID NO: 7474 - DNA, 120 bp, synthetic construct
  source 1..120: mol_type = other DNA
aagaaaagcaacgagctgccgcaggccaaccgactcccagggatctttggtgagggtcgggcaggctggggccgaggccctgtgggcttctggctgagagaggcagggcgagaaccaagt

SEQ ID NO: 7475 - DNA, 120 bp, synthetic construct
  source 1..120: mol_type = other DNA
tgacaatcaccacctgtagatcagaagtgaatctgcagggaggacatagaatcatggtgacttcaattttcttatgtatttttttcttctgtgttttccaagttttctaaagtgagaata

SEQ ID NO: 7476 - DNA, 120 bp, synthetic construct
  source 1..120: mol_type = other DNA
tattctcactttagaaaacttggaaaacacagaagaaaaaaatacataagaaaattgaagtcaccatgattctatgtcctccctgcagattcacttctgatctacaggtggtgattgtca

SEQ ID NO: 7477 - DNA, 120 bp, synthetic construct
  source 1..120: mol_type = other DNA
gtgcatcagggccaagatggtgtcaggaaaggtggctggagagtggccgtcagcttgaaccgacctgagcctgagggctctgggccaccacttggttctcgccctgcctctctcagccag

SEQ ID NO: 7478 - DNA, 120 bp, synthetic construct
  source 1..120: mol_type = other DNA
agccgcttccagactgaggatgccgctgaaaacatgataactaaccctggagatgccaagcctcaccaataaaactgtgtatcatcctgtacttgtttggatttcaataacctttctatt

SEQ ID NO: 7479 - DNA, 120 bp, synthetic construct
  source 1..120: mol_type = other DNA
acttgactgaacaaccagtgaatccagagaccaacctttgacccgtgacatcatccgccacaaacaaatgcactggcaggagaggctccctccctctcacgagcatggacaagagctgct

SEQ ID NO: 7480 - DNA, 120 bp, synthetic construct
  source 1..120: mol_type = other DNA
tgtgggcaggccccttccagaaaggtggagttggaggcccagagggtcacttgtccgcttctagatacctcagccttttccacactgctcctgggaaactgacgcccagggcaaatcagg

SEQ ID NO: 7481 - DNA, 120 bp, synthetic construct
  source 1..120: mol_type = other DNA
cgtcaaacacggccttctcggtgatgatgcggtccacgcaccgcttcccggtcagcggcatggtgcatttctccatgatcttgggggtgttgtcctttgtgcagtgctgcatggtgacca

SEQ ID NO: 7482 - DNA, 120 bp, synthetic construct
  source 1..120: mol_type = other DNA
tttcaccagggcgaagtctgcccggatggcgcgctccaaaaggaagtggtcgccgttgaactccctcacctctcggggctggctcatgagcgccaggtggccgtccggggtgtagcggat

SEQ ID NO: 7483 - DNA, 120 bp, synthetic construct
  source 1..120: mol_type = other DNA
ttccccagctcattaaagacaccaagtgtccaatgagcaggcgccgctgggtgacaccgacgctcatgaacaccttcactgggcatcactctgtgccaagcaccctcctttaatcctgtg

SEQ ID NO: 7484 - DNA, 120 bp, synthetic construct
  source 1..120: mol_type = other DNA
atattccagccaaaagagaacccttggccacccacctcaaacctgcccttcatctatcttttccccaaaaagaaaaatctattgaaaaaaatccactggctccaaccacacatcattcag

SEQ ID NO: 7485 - DNA, 120 bp, synthetic construct
  source 1..120: mol_type = other DNA
ggagctctgctccaccccgagaggggggcatctcagagggttctcttttaaaacctgaatcagatcctgtcgtcctccactgctagtaaataaaataaatgacgctaagaaccccagcac

SEQ ID NO: 7486 - DNA, 120 bp, synthetic construct
  source 1..120: mol_type = other DNA
gagcctcatctcattgcctcagcccacagaggtgtacacatggggaaactgagtctcagtgacctgtccaagtccccacagccaggatggcagggcagggacttgaagtcaggattgtca

SEQ ID NO: 7487 - DNA, 120 bp, synthetic construct
  source 1..120: mol_type = other DNA
agctgggctgaggcatgagtgcgaatctgccatggtgtcagggagacgggccctgcaggggccggccagccaaggcagagggccagagcagaggggtctgagggcagggcagggaaagca

SEQ ID NO: 7488 - DNA, 120 bp, synthetic construct
  source 1..120: mol_type = other DNA
ccgctcatcccagcccagggcggagaaggaaagaacgtgccttgtcccacagcacccaagggtgtcttttgaagtcttactttttggtcagaaataatactttgaattaagtttttctaa

SEQ ID NO: 7489 - DNA, 120 bp, synthetic construct
  source 1..120: mol_type = other DNA
ctgggaaaataaacaatcatgaatcaccaacctgtgctgatggaaaccctcagcctcctcctccagccttggataaagcaaacttcggaagcaaccccacgcttccaggaaaggccctgt

SEQ ID NO: 7490 - DNA, 120 bp, synthetic construct
  source 1..120: mol_type = other DNA
gggcacttcagacccaaaagaaggcttgggccccacagcctctgcaggccaagggagggcgggactcatgacctgttggttctgcgtcctgaaggggcttctcccacccagaaatctcag

SEQ ID NO: 7491 - DNA, 120 bp, synthetic construct
  source 1..120: mol_type = other DNA
tttcccgatggggcgttgctgtctagcacacccgacaattacctttagggctcatgtatgtattatgtgtctctagactagaaagtcatctccctgagggcagggactttacttctctca

SEQ ID NO: 7492 - DNA, 120 bp, synthetic construct
  source 1..120: mol_type = other DNA
ccctgggtcccacaggctgccatcaagagttgggccctacgggcaccagacctggctattcaggagtcagatgaagctgataggagaggtggagccggcaggagcaggtgtgggagcctg

SEQ ID NO: 7493 - DNA, 120 bp, synthetic construct
  source 1..120: mol_type = other DNA
gctgcctgactaattgctaattgaaaggactgttctggcataagatggtgtttttacaagatgatttctagaatccctctaatcctgagagccagtgagtcgatagaaggtagctttgtc

SEQ ID NO: 7494 - DNA, 120 bp, synthetic construct
  source 1..120: mol_type = other DNA
aggaatagcattgatggagagagaaaatgagaggcctagtattgaggaagagtagtcacctaataggacaatagtttggagatgccaagatgggtataatcagtccccttaccttgaggt

SEQ ID NO: 7495 - DNA, 120 bp, synthetic construct
  source 1..120: mol_type = other DNA
gcaaaagaaaatgtcttccatactcatagaatatttctggaaggataaacaagaaattggaaacttgttgtttctcagggtgggaaaccagagcactggggtcagggtaggagggagaaa

SEQ ID NO: 7496 - DNA, 120 bp, synthetic construct
  source 1..120: mol_type = other DNA
aagaatgataaagagtaactggatataagagtaacagctagattgcccactcatcagtggtctgatcaaatcatctcacttctgcatgattttccccttcttgctaatggatggccaggc

SEQ ID NO: 7497 - DNA, 120 bp, synthetic construct
  source 1..120: mol_type = other DNA
aatcttttcatagccttatgaagaccatcaggctgtaaagagatttatacaatgacctggcagacagactcatggtgggtttccaaggaaaattggagatgcttagggaacaacagtacc

SEQ ID NO: 7498 - DNA, 120 bp, synthetic construct
  source 1..120: mol_type = other DNA
ggaatcagggtgtggaagtgacattctcctggctccccactgctgcttctagaccatcctcctatgaaagctcatgttcttcagaggccaaacatgtacccaaccattggctcttccttc

SEQ ID NO: 7499 - DNA, 120 bp, synthetic construct
  source 1..120: mol_type = other DNA
aacaaagccctaccttccaggtgattctggaacgcaacacttctgattgagaattcctgcctcaagtccttagttgtttgcaaacctggctgatgatcagagtcacctagaagctctgac

SEQ ID NO: 7500 - DNA, 120 bp, synthetic construct
  source 1..120: mol_type = other DNA
tccagctcaggattcaacctgccatgtgccattacgtacattctttcatttaatttcccagcaaccctgtgaagctggtagggttactttccccattttgcaggtgaggaaacaaagaat

SEQ ID NO: 7501 - DNA, 120 bp, synthetic construct
  source 1..120: mol_type = other DNA
cacacatgctcacacccacacactcaccctcacacgctcaccctcacacacactcaccctcacacgctcaccctcatactaaaacatgctcacaccccacactcaccctcacactcaccc

SEQ ID NO: 7502 - DNA, 120 bp, synthetic construct
  source 1..120: mol_type = other DNA
acctcacacacacacaccctcacatgctcaccctcacacaccctcacatacaccctcacaccctcacacttcacacccctgcactcacacacacatcccaccttcacactcaccttcaca

SEQ ID NO: 7503 - DNA, 120 bp, synthetic construct
  source 1..120: mol_type = other DNA
taccctcaccttcatactccacacccctacactcacacttgccctcacactccacatccccaccctcaccttcacacacccctgccctcacaccttcacactccaccctcacaccctcac

SEQ ID NO: 7504 - DNA, 120 bp, synthetic construct
  source 1..120: mol_type = other DNA
acatgcttacacccatacactcacaccctcaccctcacacatgctcacacccccactcacacttaccttcacactcacacatgctcacaccccccactgacacaccctcaccatcacaca

SEQ ID NO: 7505 - DNA, 120 bp, synthetic construct
  source 1..120: mol_type = other DNA
tgctgtccaccagtacaggtggaccctgtttttttgtcacctcagatttggccaactgatgccgccaaggagtctaaaactgccccttctccaccatggctgccctgaccagccagtttt

SEQ ID NO: 7506 - DNA, 120 bp, synthetic construct
  source 1..120: mol_type = other DNA
caggggagatggaggacaggagagatggaagacaggggcgatagaggacaggagagatggaggacaggggagatggaggacaggagagatggaagacaggggagacggaggacaggagag

SEQ ID NO: 7507 - DNA, 120 bp, synthetic construct
  source 1..120: mol_type = other DNA
aaaagccttaaagagaaatataaagtctctaagagaggatattccctggccatgggaatggcctggaggaggagagaatgaatccaggcccaggctcatgttctagaacagcgatttgag

SEQ ID NO: 7508 - DNA, 120 bp, synthetic construct
  source 1..120: mol_type = other DNA
gcaggaaaagaagggcaccaatcccccctctttgaattgattaaacaccctctggctctcatggttgaagatgttgctagtgagagaactattctctagggcatggaataactggacagg

SEQ ID NO: 7509 - DNA, 120 bp, synthetic construct
  source 1..120: mol_type = other DNA
ccaccaataccactaccaccaataccaccatcgctacaatcaccaccaccaccacctctaccaccattgctaccatcaccaccaccaacaccactaccaccagcatcaccaccactacca

SEQ ID NO: 7510 - DNA, 120 bp, synthetic construct
  source 1..120: mol_type = other DNA
tacaatctaccattttgcaatttaataataacctagtctagtcagaaaggtaatgcctccttttcagttcaaaacaggatcacacagctaacgttgtaagtggtccggaccccagccctg

SEQ ID NO: 7511 - DNA, 120 bp, synthetic construct
  source 1..120: mol_type = other DNA
aactacagccaacgtgactcaccctttaaaagtaaaagagaaaaggcttctattcatgtttaacatttctccctctaaatgaaatttctggaggccccaactctgcccccacacctttac

SEQ ID NO: 7512 - DNA, 120 bp, synthetic construct
  source 1..120: mol_type = other DNA
aaccccatcaaaaagtgggtgaaggacatgaacagacacttcttgctgcacttttaaaacctgcttccaaactcaccttctccatgaattccctaactcttgaagtcaaaaatcgatctt

SEQ ID NO: 7513 - DNA, 120 bp, synthetic construct
  source 1..120: mol_type = other DNA
aatagaacctaaagtgactgaggtgttaggccttgtagagaataagggcatcatcagatgtgagccaaggaaatgattcagatcacacctgacagaataaggaggataaattagctccag

SEQ ID NO: 7514 - DNA, 120 bp, synthetic construct
  source 1..120: mol_type = other DNA
cagaggaacaaaggcctatagaatttgttgcctgcaaacctacactacaagaactgtcagatgataccgttaggctgaagagaaaggataccagatggagagtttttagcatgaagagtt

SEQ ID NO: 7515 - DNA, 120 bp, synthetic construct
  source 1..120: mol_type = other DNA
tcagggacagatacccaccaagacatataaaatgagtctgacctggaaatgaggttgtgttactgtttgtctcttaggagcaggatgattcagcattccttcccttacatttagagctaa

SEQ ID NO: 7516 - DNA, 120 bp, synthetic construct
  source 1..120: mol_type = other DNA
ctactcctagatttctgagccacctgttgcagctaccagaacacttccaccaaatttgttgggcctgcttggtggaagggagtacagccatcactcagagatgtttgtgtcatctccacc

SEQ ID NO: 7517 - DNA, 120 bp, synthetic construct
  source 1..120: mol_type = other DNA
actaccaaacctcagctaagaagaaatagctctaaatctatgtaaagaggcggaatttttagttaaaaaccttcccatgggctggacatcgtggctcatgcctgtaatcccagcactttg

SEQ ID NO: 7518 - DNA, 120 bp, synthetic construct
  source 1..120: mol_type = other DNA
gagtgctcagagtatgggcagaggaaaggccaggaatccatcatttctgagcactgggggaaagaaaatcccaaaatttagtatctttatcttggtgattaaaagactcaagcctgtaat

SEQ ID NO: 7519 - DNA, 120 bp, synthetic construct
  source 1..120: mol_type = other DNA
tacccctactatattcctcttcctcctgtccttcttatctctctttatgagcacactgtgcatcctgcacagaagcacagccctctagaatcagcctttctaaagaaagcattctcatag

SEQ ID NO: 7520 - DNA, 120 bp, synthetic construct
  source 1..120: mol_type = other DNA
ggttcatttttggatggagtttatttgtgaatgaagaaagtgacaaccatttaagccatatcaaccaaagcagtcctggcaatgaggaggggtggagtgagatatgtcctggctagaaaa

SEQ ID NO: 7521 - DNA, 120 bp, synthetic construct
  source 1..120: mol_type = other DNA
gagaaaccaaatcacagagtcctgtaggcctggtaaggggtttgggttttattccaagtgggatgaagagccactgaaggattttaagcagtaaacaatgacaatttgacttacattttt

SEQ ID NO: 7522 - DNA, 120 bp, synthetic construct
  source 1..120: mol_type = other DNA
aggtggagggatgttgtggggaaatgcaacataccttttaggcagatagtctaggacaacaccgtcctgtagaaatctaaagcaagccacatgtgtaatattaaattttctgatagccac

SEQ ID NO: 7523 - DNA, 120 bp, synthetic construct
  source 1..120: mol_type = other DNA
ccagaaacatggcggtgtctgaagtggtccttatgaagtgggttatggtcacaaggtaagccaccgtgcctggctcttccatcctactttacacaaatgtcattaaaagctcatttggag

SEQ ID NO: 7524 - DNA, 120 bp, synthetic construct
  source 1..120: mol_type = other DNA
agaccggttaggaggctttgtagcggtccagggaaaagatggtggcgcaggtgaggtgatggcggtggatctgagaactgtcagggatgctgactggtcagacttggtaatgggttatga

SEQ ID NO: 7525 - DNA, 120 bp, synthetic construct
  source 1..120: mol_type = other DNA
actagagggcaatactgaaggggttaaacaggtttttgctcctcaagaatttgtttgcctgggcccaggattggagggcttcacaccaataccctgtgtatacaagaatcagatttataa

SEQ ID NO: 7526 - DNA, 120 bp, synthetic construct
  source 1..120: mol_type = other DNA
agaaccctggtagagaactcaggagaaggaggctaggaatacagccaggcaatgtgctacatgaacctttgagactgagacatgagcccatgggtgaggactgttggacctgtgttaatg

SEQ ID NO: 7527 - DNA, 120 bp, synthetic construct
  source 1..120: mol_type = other DNA
agggggtgtgtgggggagatgattggggtgtgagagaggatggggactaacaaagaggatggtatatgagggagaggctggggtgtgagggacaggagggggtgtattgagaggggtgtg

SEQ ID NO: 7528 - DNA, 120 bp, synthetic construct
  source 1..120: mol_type = other DNA
ttgccatatcttaaccattgctcctctacccccagataaaaatgctcaagaatggggactccctcagctcctcttcctcactgtcttctgtaagctcttggtcactgcctcataattatt

SEQ ID NO: 7529 - DNA, 120 bp, synthetic construct
  source 1..120: mol_type = other DNA
ctgttccccttcccaccactcttcctctccgtcctcctgttccccttcctgtcacttttcctccccctccttctgctcctattcctgccactgtttctccccctcctcctgcttctcttc

SEQ ID NO: 7530 - DNA, 120 bp, synthetic construct
  source 1..120: mol_type = other DNA
cctcctcctgttcctcttcccgccactcttcctccccatcctcctgtttcctttcccgccacttttcttccacctcctcctgttcctcttcccaccactcttccccctcctcctcctgct

SEQ ID NO: 7531 - DNA, 120 bp, synthetic construct
  source 1..120: mol_type = other DNA
gtcagtacaaactcgatctggttgccccagttgccccgtttgaggttctggtccctcttggtggcctcgctgggcacagcaccattctgtggggacaggagagaagctaccatcagcaag

SEQ ID NO: 7532 - DNA, 120 bp, synthetic construct
  source 1..120: mol_type = other DNA
tggcagctctgtgtcttctgttttgggagttgtccttgaatcaaatgggaacttgaaaagcataggaatcctgggtatggcaatgatgagaactgatgggacatcatatatcccccataa

SEQ ID NO: 7533 - DNA, 120 bp, synthetic construct
  source 1..120: mol_type = other DNA
tctggttactagtggaggtcgtgatctgccccctgtagagggcctggttaccagtggaggtcgtcacctgctccccacagagggtctggttactagtgggggtcgtcatctgctctccac

SEQ ID NO: 7534 - DNA, 120 bp, synthetic construct
  source 1..120: mol_type = other DNA
agggtctggttatcaatggaagtcatcatttgccctccatagaggtctagactggttgtcatttggcccccagagagggtctcatcgctaccggaagtcactgtatgaccatcagtgagg

SEQ ID NO: 7535 - DNA, 120 bp, synthetic construct
  source 1..120: mol_type = other DNA
tggaggaaaggcatgtgtcttgctcaggatcacaagatgaatcagaggcttggttagacaaagaccatttttcaaaccaattcaaatattgccttaagatacactagctgggggtgaaga

SEQ ID NO: 7536 - DNA, 120 bp, synthetic construct
  source 1..120: mol_type = other DNA
gcatcgttaggaagtgggaaccatgcctttaattcttatgacatatgggactgcctggtttgttttggtttcagtggagtttagtagggtgatggtctgactaattaaagtcagaccttc

SEQ ID NO: 7537 - DNA, 120 bp, synthetic construct
  source 1..120: mol_type = other DNA
gtttctggattaatagggctcttcaaccccacacctgtaagcagaggccacagagcattgtgtgtctccacaagtggcaacagaggcggtttaaacatcccagccggccaggtgcggtgg

SEQ ID NO: 7538 - DNA, 120 bp, synthetic construct
  source 1..120: mol_type = other DNA
gattttattctcagaacccactgtgatttccctggggctgatgaggttcaggacttaaaggcctcaatccggcttctcaaaaacaagtctcgatgctcccaaagaacatctcatgcccgt

SEQ ID NO: 7539 - DNA, 120 bp, synthetic construct
  source 1..120: mol_type = other DNA
tctcctctaagggtttgaaggggtatggaaaaaagtggagaacatttggcacccaggtgatgataacggcagtagctgtggaagaaataaggcacagtttataaatacctagtgtatatc

SEQ ID NO: 7540 - DNA, 120 bp, synthetic construct
  source 1..120: mol_type = other DNA
cagatacggagcttatagttggggagagagacctgaagcaaataatcacatgtacacatttttgtgtggaaaggaagaagagtcaaagaaggcttctctgagaaagtgacatttaagctg

SEQ ID NO: 7541 - DNA, 120 bp, synthetic construct
  source 1..120: mol_type = other DNA
tcagggaagtagggagcagagcaaagcttggatctgttcttaagattaaaagcaggcagctagcagttttaggaattttattcctgctgttttaggtttgttttggtgaggaatggggtt

SEQ ID NO: 7542 - DNA, 120 bp, synthetic construct
  source 1..120: mol_type = other DNA
gcaattccccagacttttctccctagagaatataggagattttaatcagcacctgagctatcgatacggttgtcagttttttcatcctgaggaatgcttcatgagcaatctcttttctcc

SEQ ID NO: 7543 - DNA, 120 bp, synthetic construct
  source 1..120: mol_type = other DNA
tatggcatataaagcaattgtttaaaaactatccatactccaaatgtattctaaaatgtttgctaaagagaaaggaaaaagatgagtcctttaaaaatgttagactcaggcttggaaagg

SEQ ID NO: 7544 - DNA, 120 bp, synthetic construct
  source 1..120: mol_type = other DNA
aaataagcactttactaacaacaggattctcagggaatgggggctttcagaggtgtcactgggctgcactgttgaggctgtgtgcatcagtggagatgtgagaccgaaagaaattatcca

SEQ ID NO: 7545 - DNA, 120 bp, synthetic construct
  source 1..120: mol_type = other DNA
aaaaaaaaaaaagaactgatggctccacaattcatatcccacaaaactcagtacaggcatttcacacacctgtgacactggagagtcctcatcatttttttcctttccctctaccctgca

SEQ ID NO: 7546 - DNA, 120 bp, synthetic construct
  source 1..120: mol_type = other DNA
ttggcatctgcttaatttcaaatctttaggtattgtgtaagccctagaattcccttcaccatttgtgaaggtgggttcctgactttggggctaatatcccagggcgaaaacaagtataag

SEQ ID NO: 7547 - DNA, 120 bp, synthetic construct
  source 1..120: mol_type = other DNA
agtttaaaacttgtcagaaatgagaatcaaaatccttatgctttacaacaagacatgaaagtccattcttgccacttcaacattgtactggaggttctagctagggtaatgaggggaaaa

SEQ ID NO: 7548 - DNA, 120 bp, synthetic construct
  source 1..120: mol_type = other DNA
tttctcgtattcctcaatgcaatgtagcctccttgagagcagtggctgtatatgttgagtttgttcttgtttctgcctggcatggtgtctgatccatacttacatactaagaagtctgta

SEQ ID NO: 7549 - DNA, 120 bp, synthetic construct
  source 1..120: mol_type = other DNA
actgcccacccacagaacacaaaagttgtatcttaatcattcaatacattttaaaaaaagaaaaaaaaagagtaatcattcaataaatgtctgttactgaaccaaaaaatgaaaacactc

SEQ ID NO: 7550 - DNA, 120 bp, synthetic construct
  source 1..120: mol_type = other DNA
tggcaggcaatttgctcagagaactgaaaaattccaatgcagttcagtggatcaatttgtcctttcagaaattcacagcaaagatgaacaacttcagtcaactgtagcatgtctgctgca

SEQ ID NO: 7551 - DNA, 120 bp, synthetic construct
  source 1..120: mol_type = other DNA
taaacattgcatacacgtggacaccaagaagacatggatacacattcgggcctacttgagagtggagggtaggaggagggtaaagattgaaaaactacctatcaggtattatactgatta

SEQ ID NO: 7552 - DNA, 120 bp, synthetic construct
  source 1..120: mol_type = other DNA
ggcactaaataaaaaagcatgcattagccttctattcattagttgtgttattctgtctccttcctgctcccggcccctctctccctagttctttgaggacaccgatcgactcgaactcat

SEQ ID NO: 7553 - DNA, 120 bp, synthetic construct
  source 1..120: mol_type = other DNA
gaaatggggagtggagaaatggaagtggtggcctggggttgtattggaaatgggggtgtagaagaatgaaaaattggtgcaagagatagtcaggggttctggatggggcgaaaggacgct

SEQ ID NO: 7554 - DNA, 120 bp, synthetic construct
  source 1..120: mol_type = other DNA
ttaaattcagtttctagcagtggatattcagtctagcttcacaagtgtcctgagtcttctgtaaatggcaagggctctaccaggactcttagaggaatgagacaccaaataggtatgcat

SEQ ID NO: 7555 - DNA, 120 bp, synthetic construct
  source 1..120: mol_type = other DNA
aggcaaattcatacaggaagttgaacagaatttaccaggagctgaaagtgaagggagaatgagggagttattgcttaatggttatagagtttctatatggaagatgaatacagctgcaca

SEQ ID NO: 7556 - DNA, 120 bp, synthetic construct
  source 1..120: mol_type = other DNA
ctgcaactgtgtgtgtttgtgtgtaagctgtggttgtttgattatatatagcctgtgtctgtttcagtgaggagctgagatacctgcatatgtcttccttttatcaaatggacctgccat

SEQ ID NO: 7557 - DNA, 120 bp, synthetic construct
  source 1..120: mol_type = other DNA
ggagagagtaggagagtggttactagaggaacgaatagccaaagtttggttaagggatacaaaagtacagctagatgggagaaatatgttctagtgttctacggcactatggagtactat

SEQ ID NO: 7558 - DNA, 120 bp, synthetic construct
  source 1..120: mol_type = other DNA
tggagattccaatttgtcagattggaactaggagtttacatttataaacctgtccaagtgttagtgttttgatctgcagccagcttggggaatccaggtagagatgccagagacttttct

SEQ ID NO: 7559 - DNA, 120 bp, synthetic construct
  source 1..120: mol_type = other DNA
gtacaaagtatgtttttgatttttttagaacaaaagggagacccagagatgtgcagaattctgatgcacacatggatttctcaccctccacacgtccctgtggagagtttaggtgagagg

SEQ ID NO: 7560 - DNA, 120 bp, synthetic construct
  source 1..120: mol_type = other DNA
agccagtgttggtaaactgacgcctaattctcacacacttttaatacaacattcaacagatcctctcacaatagcatggattaagtattgaattttgagattcagttaggacatatggtt

SEQ ID NO: 7561 - DNA, 120 bp, synthetic construct
  source 1..120: mol_type = other DNA
cactactgggagacccaggaggccttcttgaaggaggtagcttggtgctgggccttgacagatagatatgcgtgagaagataattccaggtagcaagcatagtgtgatcagagacctaaa

SEQ ID NO: 7562 - DNA, 120 bp, synthetic construct
  source 1..120: mol_type = other DNA
tcttcaactcacaaccttagctccttcccagagaagccaagaatttctctccctctcttgctttttttctcttactgttttgttttcttttcctttggtttgtattccctgctggtgcct

SEQ ID NO: 7563 - DNA, 120 bp, synthetic construct
  source 1..120: mol_type = other DNA
attttttgaagaactgtgatagcattttccacagtggctgcaccatttcacatacccaccagcaatgcacaagggttccaatttcttcacgttctcaccaacatttgttattttctgggg

SEQ ID NO: 7564 - DNA, 120 bp, synthetic construct
  source 1..120: mol_type = other DNA
cactgcctgtgcttttggcatcatatccaaaaaattattgccaactcctatgtcatgaagttttccttatgttttcttctaagagttttaagttgtagctctcacattcagttctttgat

SEQ ID NO: 7565 - DNA, 120 bp, synthetic construct
  source 1..120: mol_type = other DNA
gccagtgggcctgaatggatttagactgtttattactcatggcataataggtatcatgagcttcacattaacatcggccccactatctccctaagtcctataggggcaatggagaggaac

SEQ ID NO: 7566 - DNA, 120 bp, synthetic construct
  source 1..120: mol_type = other DNA
tgcatttccctaatgactgaatatcatcttattgtttgcccattgatgctgaatatcatcttatttgtttgctggcccattgtttatctttggagatgtctattcaagtcctttgcccgt

SEQ ID NO: 7567 - DNA, 120 bp, synthetic construct
  source 1..120: mol_type = other DNA
tgcccacaggtatttagttttcccagcaccatttcttgaagagaccattctccccattgaatggtatttgcatccttgttgaaaatgaattgacaacagatgtatgggtttatttttgga

SEQ ID NO: 7568 - DNA, 120 bp, synthetic construct
  source 1..120: mol_type = other DNA
aacaagtcccctcaccaaagcagtaaaaaaccaagaagttctgaagacctgtgcactagtcaaccagcttgcaaattcagtccaagatgaggtcaatataatcccctttcctatgcaaaa

SEQ ID NO: 7569 - DNA, 120 bp, synthetic construct
  source 1..120: mol_type = other DNA
acattgggtaagttgttttcattttcatttgcctcaaaatattttctaatgtcttttatgatttattccttgtccctttggttgtttaagaatgtcttgttggccgggcatggtggctca

SEQ ID NO: 7570 - DNA, 120 bp, synthetic construct
  source 1..120: mol_type = other DNA
tttttactccattctgccagtctctgccttttaattgaagtttaatccatttacatttaaaataattactgataaggaaggacttatttctaacatttcactgtttgttttttatatgtc

SEQ ID NO: 7571 - DNA, 120 bp, synthetic construct
  source 1..120: mol_type = other DNA
ggtctttgagcatattgaagacagttgatttaaagttgtctagtaagtccaacgtctatgcttcctcaataacattttcttttcatttctttttcctgtgcataggccatacttccttgt

SEQ ID NO: 7572 - DNA, 120 bp, synthetic construct
  source 1..120: mol_type = other DNA
taagtgtgcacctggttgctgtaaacaattaactgtcttccagaaatctgctaaagttgactataacagtttttgccagataatttttgtttttgctttgggaagggatggccctggaca

SEQ ID NO: 7573 - DNA, 120 bp, synthetic construct
  source 1..120: mol_type = other DNA
tctcaaacaaatccaacaagggtaaaatctacaatttatctcaaagtcatgttcctgtgtctagctgtacatgtctatgtgaaaaggaactggagctttaaaatgttgtcagagttcccc

SEQ ID NO: 7574 - DNA, 120 bp, synthetic construct
  source 1..120: mol_type = other DNA
ttaccacaacctacactcgcttttgcttcagaaacctgagctcaatcttgccttgtctttcatagcttctcctcttattctacctgtttgggactggtcctttatttctggtgtaactag

SEQ ID NO: 7575 - DNA, 120 bp, synthetic construct
  source 1..120: mol_type = other DNA
ctcgggcaattctcacccaccctaaatttgaactcttatcaagaggctgatgaatctgaccatcaaataggataggatggacctttttttgagttcattgtataaacaaattttctgatt

SEQ ID NO: 7576 - DNA, 120 bp, synthetic construct
  source 1..120: mol_type = other DNA
tgcgacaactcaaagactaagtttctaagatcccaggcatggagtaaagcaattctatacacaggatctcaatcctagtcacaaagacttcttaatgatacaggggctcagagacatggg

SEQ ID NO: 7577 - DNA, 120 bp, synthetic construct
  source 1..120: mol_type = other DNA
ctcaatggatctgggaaaaaacttgtcaagtactaaatatttttagggatcttttcctagaatcaaaaacctctgtttatttatgctctctacagatgtttttgaattcttatttatttt

SEQ ID NO: 7578 - DNA, 120 bp, synthetic construct
  source 1..120: mol_type = other DNA
tcatttcttatggagcagcttcagatgtgaagaaaagtaaaagtgaaaggaagtacatttctgtaggaagacagagcaggacatctgagcaagtactgaacatgagtgggtactgcctac

SEQ ID NO: 7579 - DNA, 120 bp, synthetic construct
  source 1..120: mol_type = other DNA
agagcatttaaaccacttatatttaatgtaatcactagaatatttggatttcaacatgccgtgtaactatttgttttctatttaaccgatttttatcccttcttttattaattgctggat

SEQ ID NO: 7580 - DNA, 120 bp, synthetic construct
  source 1..120: mol_type = other DNA
caagaaagaattgtcgtccaatgccccttcacagcagttaggtttgcttagagaataagttcaggcttaggccatttttataacttgcaatatgattgggagaaatatgatattggatgc

SEQ ID NO: 7581 - DNA, 120 bp, synthetic construct
  source 1..120: mol_type = other DNA
gctgagggggttgaaagaagaacagtgtagggccttttccagcttgacttagggaaggagaaagagctgagagttttcaccaataccaaatttcctgggttaaataaaggtgtttctatt

SEQ ID NO: 7582 - DNA, 120 bp, synthetic construct
  source 1..120: mol_type = other DNA
gctgtgggaagaggggaggcctggagttaaaggggagaaaggagactggctctaatgttcagaaggaggtccgctttccttcctttaatttccagaatcacccagggctcccgtgctgta

SEQ ID NO: 7583 - DNA, 120 bp, synthetic construct
  source 1..120: mol_type = other DNA
ataaggggaatcctcagatggtttccctggaggttacttctctaatttgggggaactattcttttttgggcctgcctgatatgattgttaaaagagttgggttgatcttacgatgtttgc

SEQ ID NO: 7584 - DNA, 120 bp, synthetic construct
  source 1..120: mol_type = other DNA
gtgcaaaatgtccaaaagaaagcatgtcatctacctccttcccctaaacctattcctcctcctggattgctacattaatgaatggcaccactgtctgtgagtaattttaagtgagaaaga

SEQ ID NO: 7585 - DNA, 120 bp, synthetic construct
  source 1..120: mol_type = other DNA
atcagatcagttgcaggcagtcattaatctgcttttcataagtttttttccagggaatcttcactgacattgagttagagtcattgaggtgttttcagattttctacatggccaaaaaaa

SEQ ID NO: 7586 - DNA, 120 bp, synthetic construct
  source 1..120: mol_type = other DNA
atggaaaagaattgaagtccctgttttctctacaacacagtgcccatactagccccttaagctatctttggcactgaaactttctgccctaaagttggtgtcctactagtccctcagaac

SEQ ID NO: 7587 - DNA, 120 bp, synthetic construct
  source 1..120: mol_type = other DNA
tctgcccaggccttgctggtgttcaggatggaattgtttcaggaaccacctggaccagatgccctacaccaccatgtgcattaaggaggcactgaggctctacccaccggtgccaggcat

SEQ ID NO: 7588 - DNA, 120 bp, synthetic construct
  source 1..120: mol_type = other DNA
ccccatggcacgacttgtgttgaaatccaaaaatggaatccacctgcgtctcaggaggctccctaacccttgtgaagacaaggaccagctttgagggcctccacctgccatcctgtcttc

SEQ ID NO: 7589 - DNA, 120 bp, synthetic construct
  source 1..120: mol_type = other DNA
cccattctatccccttctccctgccccttcctgcacttgtgacagtaatagcttccagaataaacacttgactcccagaaggggattgtcctgaccacatctgggcttatgcatccgaga

SEQ ID NO: 7590 - DNA, 120 bp, synthetic construct
  source 1..120: mol_type = other DNA
gccatcgaagagtaccttccatctgttcccaccaggactccatctgccttgtttccgacggtcaggatcatgtgtgcaggctccctggggatgggattcatcagtggggctcctcagtgg

SEQ ID NO: 7591 - DNA, 120 bp, synthetic construct
  source 1..120: mol_type = other DNA
cagccagaatatttccacctgtgccagaacaagacagaagaccccaggagattcttcctggggacaggtctcaagcagacccaatcccccatacagagaatttcttagatgaaaacagcc

SEQ ID NO: 7592 - DNA, 120 bp, synthetic construct
  source 1..120: mol_type = other DNA
caggaaagataggggtggagagaaagaggcagggcaagagggagggagagagagaaatgggggtcaatggctgggaattacctcctgtccccgaccaaccagtccagggaatcgcaaaca

SEQ ID NO: 7593 - DNA, 120 bp, synthetic construct
  source 1..120: mol_type = other DNA
tagtggtttggagtacagctttggtatcatgtggctataagtttaaatcctaccctgctaccttttggaaaagttacttaaccactatgagcttcaatatcacctaaaactaaggttgtt

SEQ ID NO: 7594 - DNA, 120 bp, synthetic construct
  source 1..120: mol_type = other DNA
ccaattaatctggctgaagctaatgcagctcacagggcacctgaaattgttactttagtatgttgatttccaactcaggctgccagaagtacatatttgagtcctagctacagaatcttc

SEQ ID NO: 7595 - DNA, 120 bp, synthetic construct
  source 1..120: mol_type = other DNA
gcccttgcttctcttagcatcattttgacacacagtaagtcctcattgaggagtaactgctaataatgtctgtgtgcaaggactgtgccaagcattttgtatcttagttaatacggtacc

SEQ ID NO: 7596 - DNA, 120 bp, synthetic construct
  source 1..120: mol_type = other DNA
attgctataaaagaatacctgaggccggataatttataaataaaaggggtttacttggctcatggttctgcaagcattacaagaagcatggcaccagcatctacttctggtgagggccgc

SEQ ID NO: 7597 - DNA, 120 bp, synthetic construct
  source 1..120: mol_type = other DNA
atttggtggggacaagcatccaaaccatatcaggaaggtattcttactaccttcatcttataggtgaggaaactgaggtttagagaggttaaataaagtgtccaaggtcaaaggctagac

SEQ ID NO: 7598 - DNA, 120 bp, synthetic construct
  source 1..120: mol_type = other DNA
aaaggagaggagaagacaggtatgcagtgacatgtcaaaagaagcattccttatctgtgcatatgaactggttttgctaccatttcctcaatcagtgaggtttgtgctctatctactggt

SEQ ID NO: 7599 - DNA, 120 bp, synthetic construct
  source 1..120: mol_type = other DNA
atagtctatactagtggctctcagttatgaatccttagatagatggcaaaagagatgcataagaatcacccagaaacttggtaaaaatagaaaattccagtctccatactcagcaatttc

SEQ ID NO: 7600 - DNA, 120 bp, synthetic construct
  source 1..120: mol_type = other DNA
attcattgatctctctttcccttgctccagcgtttttgaggactctccatggactactctgattttcaagactgagagaggatatatgctggaatattcctaacaagcggcactttgttt

SEQ ID NO: 7601 - DNA, 120 bp, synthetic construct
  source 1..120: mol_type = other DNA
tgccagtttctgcacattgaatcatgcactagcagagtctattttaagagtcataatttttttctttaaatattaaaaaaatctgtggcaattaatttcttccatactgttccatcatga

SEQ ID NO: 7602 - DNA, 120 bp, synthetic construct
  source 1..120: mol_type = other DNA
ctgcacttggcaggactggaggggcacagacttgagtgtggcatacttacatttaagctggttcagtaacttatgagtaagccatttaacatcagaacatccatttcttcaattctatat

SEQ ID NO: 7603 - DNA, 120 bp, synthetic construct
  source 1..120: mol_type = other DNA
aaaagaaaaaaaaaagctacataaaaaaaaaggaactcccccaccccctccaagtataagggagggctactgtacaatggtgtgaaaagcaggcagattacagggaagcctgtgactccc

SEQ ID NO: 7604 - DNA, 120 bp, synthetic construct
  source 1..120: mol_type = other DNA
aggcaatgcaaagacagaagtggagagagatttgaaaatgctaagttgctggctctgaagatgaaggaaggggacatgagccaaagaatgtaaggctaatgtagctggaaatgaaaagaa

SEQ ID NO: 7605 - DNA, 120 bp, synthetic construct
  source 1..120: mol_type = other DNA
caattacaagcattgacaaggatacagagaaacctgaacttttatacactgctggtaagaatgtaaagaatgtactaatgactgtttttgttttttttgttgttgttgttgttttttcat

SEQ ID NO: 7606 - DNA, 120 bp, synthetic construct
  source 1..120: mol_type = other DNA
aaatgctaagtggagctttcaacagtctcaaagtgctgcagaaagacagtttggagttcaaggcctaccaagttggaaaattgtggtaaatacccaatactgtttgagatgccaagggac

SEQ ID NO: 7607 - DNA, 120 bp, synthetic construct
  source 1..120: mol_type = other DNA
ttttggctacatgtcttgggataacactgctgcatctttcttcgacatcagcacatacccattttaaaatacagctccccttcagtatgatattggctgtgggtttgtcatagatagctc

SEQ ID NO: 7608 - DNA, 120 bp, synthetic construct
  source 1..120: mol_type = other DNA
tttttaaaaaaattgaagctccttagcttggcattttctccccaatgcgttttataatctgccttcttcttgggagaagaagactatgaaatgcagtggggagaaaataccaagtcagaa

SEQ ID NO: 7609 - DNA, 120 bp, synthetic construct
  source 1..120: mol_type = other DNA
aaactcctaaatgttagaggtggcatgtggattggaggtggttggatcatgagagcagtttctcataaatggtttagcaccatctccttgatgttgttctcatgatagtgagtgaattcc

SEQ ID NO: 7610 - DNA, 120 bp, synthetic construct
  source 1..120: mol_type = other DNA
ttggttggtggagattagggaggctagtggagagtcctatacaacttctaaatgtcccaccagacattcaggtatgcaaaaatcctattcataaatatgtgagcttagtacctacctctg

SEQ ID NO: 7611 - DNA, 120 bp, synthetic construct
  source 1..120: mol_type = other DNA
agttgagaatgatgacttaggataactggaggaagaaatttctaaggaacaaagcattcaagatgttgcctggctgcttctagtaccctacgctcgtatgtgtgagcaaagaaatgacct

SEQ ID NO: 7612 - DNA, 120 bp, synthetic construct
  source 1..120: mol_type = other DNA
ttgccccattagctagtatagcaatccatatgtcgtttgtacgtgcacggcatcctttctcctccccatgcctttttatatgaggtacttaaagtagttgaattcacagacacagaaagc

SEQ ID NO: 7613 - DNA, 120 bp, synthetic construct
  source 1..120: mol_type = other DNA
gaaaaatcagtttagtcttatatctactaaagataccaaatctttaattaaaaaccttctcacaaaaaaattccagacaccgtctgggaagtgaggagcgcctctgcccagccgccccgt

SEQ ID NO: 7614 - DNA, 120 bp, synthetic construct
  source 1..120: mol_type = other DNA
ggaccagccagggttaagacctcagactaaacaccagaatctaaggtgaaataaaaaggtaagtcacacactgggagaaaatgttcgcaatacatttatctgatgaacctcagaggcatt

SEQ ID NO: 7615 - DNA, 120 bp, synthetic construct
  source 1..120: mol_type = other DNA
tcgtattccacatcctatctaaaagaggttttctcagcctccgcgctactgacattttgggctggataattctttgttggtgggggtggcaggggagctgttctgtgcattgtaggatgt

SEQ ID NO: 7616 - DNA, 120 bp, synthetic construct
  source 1..120: mol_type = other DNA
ctgacaaggtgtgtgctttggtgacctcgttctggcagctggtagggaggctgacggggccagagcacttgtctggtttttctagaaaaattctagcataggcctccaaggtaacatgat

SEQ ID NO: 7617 - DNA, 120 bp, synthetic construct
  source 1..120: mol_type = other DNA
gtgacaatgaaagaagaaaagtagagaatagtaatgtgggagcactgagctgggtagtggtacttgtaaatgtcagacagagtggcctgaataagcttcactgagaaggtgatatctgaa

SEQ ID NO: 7618 - DNA, 120 bp, synthetic construct
  source 1..120: mol_type = other DNA
gaatgtctttaatcagttttggaaaattctcagccggacagtgcttccgtgccatgctctcttttgtcttcttctggggttccaatcacatgtgtgttacattttctcatacgctgtatt

SEQ ID NO: 7619 - DNA, 120 bp, synthetic construct
  source 1..120: mol_type = other DNA
ctttttggtacacgttgtgtgtgtgaatggtcagctgagaaactgaggctctagagaatatggccaaacagaaatgtggtctgtactccatttatggctgacgaaattttcctctcttta

SEQ ID NO: 7620 - DNA, 120 bp, synthetic construct
  source 1..120: mol_type = other DNA
accaccctatctatacactccaagttctcccacgattcctccacttgcagccgccagaccctactctattccagagcctcctctccactcctgaccagaatgtaggcccctgtgtccatt

SEQ ID NO: 7621 - DNA, 120 bp, synthetic construct
  source 1..120: mol_type = other DNA
ggcagttgcagtccctgagcaaggagggtgttagttttaggaaggggctgttatcatctttgttttaaagttaaactataaactaaattcctcttatagttaacttggcctgtgcccagg

SEQ ID NO: 7622 - DNA, 120 bp, synthetic construct
  source 1..120: mol_type = other DNA
gaaaactcaggcctgtctcatctcaagccctggcttgtcctgtctactactgtctggatctctcttaacaacctgatccactcagatcatctgaaaaatactcactgaccctctagtgtc

SEQ ID NO: 7623 - DNA, 120 bp, synthetic construct
  source 1..120: mol_type = other DNA
tggtctgaacgttggtatcccctgaaaatccatgttggaacttaatcctcaatgtgatagcattaagaggtgaggcctttaggaggtgattaagccataacagtacagctctctttaatg

SEQ ID NO: 7624 - DNA, 120 bp, synthetic construct
  source 1..120: mol_type = other DNA
ttacttacctactacatacccgggccgcttacttacctactacatacccgggccgcttacttacctactacatacccgggccgcttacttacctactacatacccgggccgcttacttac

SEQ ID NO: 7625 - DNA, 120 bp, synthetic construct
  source 1..120: mol_type = other DNA
cacaaaggataaatgcttgaggtaatggacaccccatttcccctggtgtgattactacacattacatgcctgtatcaaaatagctcatgtaacccatatatacacctactatgtacgtac

SEQ ID NO: 7626 - DNA, 120 bp, synthetic construct
  source 1..120: mol_type = other DNA
tgtactgcaggtatgtgtttgtgtatgcaggtgtactgtaggtatgtgtgtgtatgcaggtgtactgtaagtatgtgtgtgtgtgtgcaggtgtactgcagatgtttgtgtgcaggtgta

SEQ ID NO: 7627 - DNA, 120 bp, synthetic construct
  source 1..120: mol_type = other DNA
atgtgaatgagtgtgattgaggggcatgtgaatgagactgaggggtgtgtgaatgagtgtgaatgagactgaggggtgtgaatgagtgtgactgaggggcatgtatatgtgtgaccgagg

SEQ ID NO: 7628 - DNA, 120 bp, synthetic construct
  source 1..120: mol_type = other DNA
gaatacggacccaggaaggcagaaaccaagaggaagaaaaaacacaggtaaaaagtgaggcagagagaaaccaaggtaagatgcagagggaaaaaagagaaagtcagaaatagagacagt

SEQ ID NO: 7629 - DNA, 120 bp, synthetic construct
  source 1..120: mol_type = other DNA
agtggaaagatttttgtccttatacttagaacatttggatacccctgctgtcagggatgggaagtaacacagaggttttaagcgagaagttctacggacttgaggtctgggatttttgct

SEQ ID NO: 7630 - DNA, 120 bp, synthetic construct
  source 1..120: mol_type = other DNA
tgaaggaagagggtcttgaagattgagaacagaaggcaaggaaagggatggagagattggggtcctaggagagggaagcccctagagtgggaagaagggaagaatagatggtgaaggaga

SEQ ID NO: 7631 - DNA, 120 bp, synthetic construct
  source 1..120: mol_type = other DNA
tttagttctggcctcccctgctctcctgacagtgtcctcttgaaggagatattcttcaccttccttggctttcctgcagcattcgatagaaacatgcatgacttatgtatttttctctgg

SEQ ID NO: 7632 - DNA, 120 bp, synthetic construct
  source 1..120: mol_type = other DNA
cccccaaaaaacccccctgaaaacaaataaaaaaatcccaacaatggtaaaaccccaaacaaaaaacaacaaaaaagtgtcatgtacagaaaaggtcctttggggaaagggcaaggggtg

SEQ ID NO: 7633 - DNA, 120 bp, synthetic construct
  source 1..120: mol_type = other DNA
cagaaatccagctacctctcactttttatttttggggtgggtaaggatcgtatgttgaattccttctagctggctggtatgctattcttagctgggaaagaaacataattgtgatggggt

SEQ ID NO: 7634 - DNA, 120 bp, synthetic construct
  source 1..120: mol_type = other DNA
ctcaagcgctcttacctgcgggactgggcataatgggtgttcctggaggaccgccaccaccagggggtccctaaagatgagacaaaactgacatcagacacccacggtggtaacgaacat

SEQ ID NO: 7635 - DNA, 120 bp, synthetic construct
  source 1..120: mol_type = other DNA
tgagccattgcacctggccaagacaaccctcccgaaaataatttggcaaaggattcaagggttttagcaggagggtccttattttctgacccagtaattgcacttctgggaatttattct

SEQ ID NO: 7636 - DNA, 120 bp, synthetic construct
  source 1..120: mol_type = other DNA
ctactataagaaaataccttcgcgtgggtactttataaataatagaaatgtattgctcacagttccagagctggggaagtctgagatcaaggcactcgcaaatttggtgtctggtgaggg

SEQ ID NO: 7637 - DNA, 120 bp, synthetic construct
  source 1..120: mol_type = other DNA
cctcgtgaactttcagcctccagaacattgagactaagtttctgttgtttaaagccacctagtttgtggtactttgttactgcgtctagaaaactaacaggtctggaaatcattcactcc

SEQ ID NO: 7638 - DNA, 120 bp, synthetic construct
  source 1..120: mol_type = other DNA
agggtctgtggtcatggggcagcggggcagatgcatcccactcacttccccaccatagatacagctcagatggaggcaccaatgtgcctggaagagcaaggccaaggccttggaagtgag

SEQ ID NO: 7639 - DNA, 120 bp, synthetic construct
  source 1..120: mol_type = other DNA
tgaggggaggtgtaaaggtgggaaacccagtgagcagaattcacagcaccacactcccctaaaacaagtagatggctccatttttgttttattatttgcacttccacgtaagacttcatt

SEQ ID NO: 7640 - DNA, 120 bp, synthetic construct
  source 1..120: mol_type = other DNA
agaaagcaggagtcaccccctaccaagggagccagcacagcagtttgttggcctggacctctctgtgctggatactctgttatcctcccagcccctcatataggccatgctctttcacat

SEQ ID NO: 7641 - DNA, 120 bp, synthetic construct
  source 1..120: mol_type = other DNA
tcttcctgcccttaccccacctgaccttatttgatcactctccttttaccctttgtgcatgctgttttggtgagatttggaagtttgggtaggaaagagggactcaggaagctcagcatg

SEQ ID NO: 7642 - DNA, 120 bp, synthetic construct
  source 1..120: mol_type = other DNA
gatatgatggtgataatgagagtgcagtggggatagtgagggtgagaatggtgatggtgatgatgatgatgatgatgttagtgatggtgctgataagaatgatgatggtaaagatggtga

SEQ ID NO: 7643 - DNA, 120 bp, synthetic construct
  source 1..120: mol_type = other DNA
caacatcggaattccactttgctgaattagagatatttatctcaatcctcacaacatccctgggggaaggatttgatttcactatttcctatattagaaaatagaaggcccaggccgggc

SEQ ID NO: 7644 - DNA, 120 bp, synthetic construct
  source 1..120: mol_type = other DNA
tgtgcaagaatgtcagtggctagcctacttggcagagctggtgcagggatcataatagaccagcaatggaaagtaggatgcgctgttgacaaagattctgtccttgaccaagctctactt

SEQ ID NO: 7645 - DNA, 120 bp, synthetic construct
  source 1..120: mol_type = other DNA
ctcaagctctcactatttcccctcccactctctcattctcccttgaaacagcccagtcacctctgcacaaatcggaatgtagttcagctcttttctctactgtcaattgttactgaataa

SEQ ID NO: 7646 - DNA, 120 bp, synthetic construct
  source 1..120: mol_type = other DNA
tgcaaaaggtcaggatgacacactggacctgggttctggtggggtttcaggcagaggcaggtggctgctcgtcacctccgtctttgcatcacagaggtatgtccaaggttaaaaatctgg

SEQ ID NO: 7647 - DNA, 120 bp, synthetic construct
  source 1..120: mol_type = other DNA
ttccagagaagttgtatattccagagaggttattcacgttttaatgtatacagactttcagagtattgtgttacttatgtttattaaaataaaaatgtacttgcttttagtcaggaaggc

SEQ ID NO: 7648 - DNA, 120 bp, synthetic construct
  source 1..120: mol_type = other DNA
gcagctttttgtcactgtcattgtggttaattgatgatccctgggtatagcactaatatgaaatataagggaagtaaaaaagtttcactatttccaggtgtttctagaaaataaggaggt

SEQ ID NO: 7649 - DNA, 120 bp, synthetic construct
  source 1..120: mol_type = other DNA
aatggatcagagaagagctagcacctaggtctgtaagatcaaactgtcttctgattgtattaatgttaaatgtcaatccaaagtaggggattggtcaggtgagaaagggaaaagtctgga

SEQ ID NO: 7650 - DNA, 120 bp, synthetic construct
  source 1..120: mol_type = other DNA
aaaacacatgtagggagaaattaagaatttaatattgaacatactgggtttgagataatgtatctgtgaaataaagaagaggagatagcagacagtccttttaagataaatgattaaaag

SEQ ID NO: 7651 - DNA, 120 bp, synthetic construct
  source 1..120: mol_type = other DNA
acttggtctcactattttggccaggctgatttcgaactcctggccttatgtgatcctgcaaaagtgatatgattataggtgtgaaccactgtgcccggccatccaaaatcaattcttttt

SEQ ID NO: 7652 - DNA, 120 bp, synthetic construct
  source 1..120: mol_type = other DNA
ctcctcatgtcacacagtgaggatgacctgctctgctctctggtgctatgttacgatgatctcccgttaggctaaattattctacttcttagtgctttttcccctagctttttttttttt

SEQ ID NO: 7653 - DNA, 120 bp, synthetic construct
  source 1..120: mol_type = other DNA
caagactgtcctttcaaagcccagtgaatgctgttggtgcttttttcaaaaatcagttggctgtagataggtggattaaagtctgtgttctctgttcttttccattggtctgtgtgtctg

SEQ ID NO: 7654 - DNA, 120 bp, synthetic construct
  source 1..120: mol_type = other DNA
aatccagaataagaattggtaaatataggtgagggagactttaagaaaatatagattcccatgccctaccctgctgaggatgcctggaatcttgttctaagtgtggaaaatgtcacctgg

SEQ ID NO: 7655 - DNA, 120 bp, synthetic construct
  source 1..120: mol_type = other DNA
aatgtgacagtttcttcccggttgttctatagattcagtgtacttcagttcagcattctagcagatttgtgtgtaagaggatggaaattggtagacatcctaaaacttagatggaaagga

SEQ ID NO: 7656 - DNA, 120 bp, synthetic construct
  source 1..120: mol_type = other DNA
catgttaaaggtcagccagtgatccttctcagctttcagaggcctccggcattcctgggcccaccacccctgccaccatcttttttttttttttttttttttatactttaagttttaggg

SEQ ID NO: 7657 - DNA, 120 bp, synthetic construct
  source 1..120: mol_type = other DNA
caggttaattttgttagatttagaaaagtttcagcctgggcagcatagtgggactccattcaacaaaaaataaaaacttaacctgtcatggtggcgcatgcctatagtcctagctctggg

SEQ ID NO: 7658 - DNA, 120 bp, synthetic construct
  source 1..120: mol_type = other DNA
taactagggagatttaagtatatactttaaagttaggaaattattagaaaacaaaaatcaatatgatttcacaagcctttgatgggagaagtggtaaatgtataaagggagaaaagttac

SEQ ID NO: 7659 - DNA, 120 bp, synthetic construct
  source 1..120: mol_type = other DNA
gctagctgcatgaccttgagcaagttacttgtcctctctgtgcctcagtttcctcttctgtataaaggggataatgacacctataggctattgtaaggattaaatggactagaaagtgta

SEQ ID NO: 7660 - DNA, 120 bp, synthetic construct
  source 1..120: mol_type = other DNA
actgtgacatggaaaatatttaaaggagaaggctgtttagctaatttgtctgcaagtgaactgcctagtggaactatcctaaattaactgtaaggccacccaccgagccaccctcataaa

SEQ ID NO: 7661 - DNA, 120 bp, synthetic construct
  source 1..120: mol_type = other DNA
ctactcctgcatgcttatgattctgattatctgggtttgggtcatttgctcacttttaaaataacccttatgtttaaaagacaatggagtgcctcattggtgtgacccggcttccctgtc

SEQ ID NO: 7662 - DNA, 120 bp, synthetic construct
  source 1..120: mol_type = other DNA
gtgaaactcttggatttgaatggtcatcaacacgaagcttaaacaataaggcaagcatagggtcaagattggagtcctggcataggcatgggcaaggacttcatgtctaaaacaccaaaa

SEQ ID NO: 7663 - DNA, 120 bp, synthetic construct
  source 1..120: mol_type = other DNA
taaacattgtgagtggcagctgacattctgtctcatcccaaagcttctatttagcatcagctagtttttctatgggagaaagtagtagtgtgggcagatagtttctgacttgtcagggag

SEQ ID NO: 7664 - DNA, 120 bp, synthetic construct
  source 1..120: mol_type = other DNA
ctcatcccaacaaataactctaaatggtcagaccataaaaccaaacttcatttattcctactatcagcgaggaattacaagtacacatcagaaccaaacttggtctcatatcagaaacaa

SEQ ID NO: 7665 - DNA, 120 bp, synthetic construct
  source 1..120: mol_type = other DNA
gagagtacatgaaaataaatatcttcttaaaggaaaacagtggggaaggtggcacaaattaaggaaattcacatcagagggagaaccctgttggagaaacagtgagggggaaacccattg

SEQ ID NO: 7666 - DNA, 120 bp, synthetic construct
  source 1..120: mol_type = other DNA
gggtctcctccacctcaggtcggcaattactaaatatttgatcataagagttggggaggatgaggggaaaccaagtagttcattaaatgcctagtgagactttaagtaaacacaaccatt

SEQ ID NO: 7667 - DNA, 120 bp, synthetic construct
  source 1..120: mol_type = other DNA
ctttcttgttctttgcaatggtacaatgaccacttactttatactcaaagcaagacacacagagataaagcagatctaatagccggtttagctgcaagactgagagatctgtaaaccact

SEQ ID NO: 7668 - DNA, 120 bp, synthetic construct
  source 1..120: mol_type = other DNA
gtctcaccgcagatctagccattgtggcataatgcactgatcctcccaaacccccaggacctagagttgtatatgaaatagcacataattaaagaaaattagtcaggaaaggatctgaaa

SEQ ID NO: 7669 - DNA, 120 bp, synthetic construct
  source 1..120: mol_type = other DNA
gattgccatctatgacccagaaattgcaagggtggctataccctagagaaactcatgcatatgtatacctgaaaatttgtataggagtgttcatggaaacgtttgtaatagtaaaaaact

SEQ ID NO: 7670 - DNA, 120 bp, synthetic construct
  source 1..120: mol_type = other DNA
gtcatcccagactcctcagtccgcctcaccttgcatgtccaatcaccaatcactaccatatccacctcctgtctgtccaataagtgcacatttcttcattcacattatcttaattttata

SEQ ID NO: 7671 - DNA, 120 bp, synthetic construct
  source 1..120: mol_type = other DNA
aataccaatcaggatttgaacccatgtcggggtctgagagtagagcccatgctcttaaacacttgctattttgccccttcaggaaaaaaaaagtgctagaacgctggaaagaaagaaaaa

SEQ ID NO: 7672 - DNA, 120 bp, synthetic construct
  source 1..120: mol_type = other DNA
tgaaacacttctaagctatcttctcttatgcctctttgttctgctttatgaatttccataagaatggggagcactgttataaatcctatatttttttcctcctaatccaaccaatgactt

SEQ ID NO: 7673 - DNA, 120 bp, synthetic construct
  source 1..120: mol_type = other DNA
tctaaatttgtatagtgtaggaccaaacactgaatctacagtgactccatcaaggtactgaagctacaggaattattctagaagcagatgccttgcttcgtctctggtatctctcctagc

SEQ ID NO: 7674 - DNA, 120 bp, synthetic construct
  source 1..120: mol_type = other DNA
aactgatccacaaatgtgaaatgttgtttattgattgattcactgattgattgagatgaggtctcacccggtcgcttaggctggagagtagtgacattatcacagctcactgcaccctca

SEQ ID NO: 7675 - DNA, 120 bp, synthetic construct
  source 1..120: mol_type = other DNA
ctcatagcaactaaccatgaaagacctggctctgcctttaccgagcttaaagtttgacagtgaagactggcactgagtgcaagaattttccattgaaacaagtatttaacaagagagcag

SEQ ID NO: 7676 - DNA, 120 bp, synthetic construct
  source 1..120: mol_type = other DNA
aagaaggaaacacttcccagcacgttacagggtcagcattacctcaataacaaaaccaaagacagtatacgaaaactacaaatcaagaactggaaataccatttggcccagccatcccat

SEQ ID NO: 7677 - DNA, 120 bp, synthetic construct
  source 1..120: mol_type = other DNA
ttgcttgaagaataacggcacttgtataacttgagaaaaatacggggaaggatggcctttattctgatagcatggagttgggtccccctattgttttcttaaaacaagccgttgaccagc

SEQ ID NO: 7678 - DNA, 120 bp, synthetic construct
  source 1..120: mol_type = other DNA
catttaagattgttgcatcctcttgattaattggcccatttatcattacaaaatggtgatctttatccctggtaatatcttttgatctggatttttttgatattaaagtagccaccagct

SEQ ID NO: 7679 - DNA, 120 bp, synthetic construct
  source 1..120: mol_type = other DNA
ggtgagacttaataatgcctgtctccttcattgccatactttttacagagctgcttattaatcttgccatattccaagatcaagggtatggtcctgtttacagtccttagcctggcgttc

SEQ ID NO: 7680 - DNA, 120 bp, synthetic construct
  source 1..120: mol_type = other DNA
agagctgagaatcaaaccaagacacagctactgagggggtgaatcaatgagaactaaacaaaactttaccccacagaggtgaaaaacaggaaagaaaacaatactgccctcaaacatcac

SEQ ID NO: 7681 - DNA, 120 bp, synthetic construct
  source 1..120: mol_type = other DNA
aggtgggcaggctcctttaggtagatgacagatagcatatcaaataaaagccaaaacaaaattcctctctgctgctcagccagagtcacagaaagctgagaagatacccaaattagatct

SEQ ID NO: 7682 - DNA, 120 bp, synthetic construct
  source 1..120: mol_type = other DNA
ttctcttagattgccaggagttgggtcttaccctctgttgtaagaaatattagcttttctctgtgtatgtatgggtatgcacatgtatgtatgagtatacacacacacacagggactggc

SEQ ID NO: 7683 - DNA, 120 bp, synthetic construct
  source 1..120: mol_type = other DNA
agggggagaaaaaaggtggcatcatgacaagcataccagaattgcaaaagctatgaccttatttatgtacacccagtggaggtgttgatacctttgaaaggggctgttttagcacttagt

SEQ ID NO: 7684 - DNA, 120 bp, synthetic construct
  source 1..120: mol_type = other DNA
ttttttctttttttttttggacatctgttttcactcttaggcttttaaacaatagttattgcttttatccctctcagattctaataactgagagcgatggggctatattgaatctctgta

SEQ ID NO: 7685 - DNA, 120 bp, synthetic construct
  source 1..120: mol_type = other DNA
aagcctattttaacactttagtggtgttgaaacacattacttactttctgaagatgtcccagtgaatcctctgtcaattcactgccatatgtaatctatatgataaggaatgcatcttcc

SEQ ID NO: 7686 - DNA, 120 bp, synthetic construct
  source 1..120: mol_type = other DNA
ttttctattgccacacatgaccgttccttcacctttaagcaaagagagtggttcagatggtttctaagatgccaacctgacctcgcattctgtcattctacccagctcttaattcaattt

SEQ ID NO: 7687 - DNA, 120 bp, synthetic construct
  source 1..120: mol_type = other DNA
taactgaggagaccaggtgagttaaaaacaagccaaatcatttgttgaactgaattactatagtcactagtaagtttcatcaaagcaatccagtgatatgttgtatctgtgacacatctt

SEQ ID NO: 7688 - DNA, 120 bp, synthetic construct
  source 1..120: mol_type = other DNA
ttaaattacatctctcagaataataggcagctctgaaaggggttgtagagaccatctaacagtctgatttgtagatgaggaacctgaggtctagagtgttgaaaacccaagtcccacagc

SEQ ID NO: 7689 - DNA, 120 bp, synthetic construct
  source 1..120: mol_type = other DNA
agagctggcatattaaccatattgagtcttctgacccataagcacagtacatctctcattttagttaggtcttaataatttccgtcaacagcatttcatagttttcaatgtgcagatcct

SEQ ID NO: 7690 - DNA, 120 bp, synthetic construct
  source 1..120: mol_type = other DNA
gaaaagttaaggcacagactgggtgaaaatatttgcaaaaacacacatctgataaaggacttataaccaaattacacaaagaaatctttaagattcaacaggggccgggcgcggtggctc

SEQ ID NO: 7691 - DNA, 120 bp, synthetic construct
  source 1..120: mol_type = other DNA
gctgccaaacaccactagaggtccagctgtcattttccaaatggataattttcttccactgtgcatgacagaaatatatttcttggtcatgtaatgatactgagctattccaggtgggct

SEQ ID NO: 7692 - DNA, 120 bp, synthetic construct
  source 1..120: mol_type = other DNA
tatctaagctgtgtgtctaaagaaaagaaagcagatatttttgtggatagctaatagtatctgcagtacaatcattgtgcagcttttttttttaaacctctttcctacagcagattcctt

SEQ ID NO: 7693 - DNA, 120 bp, synthetic construct
  source 1..120: mol_type = other DNA
gaggtagagatttttaaaacaattctgattattttccttatctatagtttgttcaaacacattctttgaaagatttttttcggcttaggattgacttggtgatgcgggctcttttttggt

SEQ ID NO: 7694 - DNA, 120 bp, synthetic construct
  source 1..120: mol_type = other DNA
ttttttttgttttaatagtcgttcaactgggtaagattatatcacattgtggtttcgatgtacatttcccatttttccctccctccctccttccctccctctctccctcctttcctttcc

SEQ ID NO: 7695 - DNA, 120 bp, synthetic construct
  source 1..120: mol_type = other DNA
gcaaagtgtcaatggaaccttcagaattactgaattggaaaattactgccagagttctcaggtcagcatagtatttatccccaatcccacatcagggatgacaacttatgaagcacagtg

SEQ ID NO: 7696 - DNA, 120 bp, synthetic construct
  source 1..120: mol_type = other DNA
aatctttttatactgaatcatatgctccattactttctaggaaatgggaaatcattgcccactgtattgcacaaaaacataccaactacctacaaatgaaattaagatcgagaggcatta

SEQ ID NO: 7697 - DNA, 120 bp, synthetic construct
  source 1..120: mol_type = other DNA
tgctttacacaaatctgagggattcttcttatgtacttctttttgtagtagttggccttgcccatgtgagtgtttgcatctagagacgttgtgttattcctcttgtagcttggacctaac

SEQ ID NO: 7698 - DNA, 120 bp, synthetic construct
  source 1..120: mol_type = other DNA
gcacatctctgtagagaaaacatcagttgccccactgtgaagattctgaaggcagtttggtccctcctcccccaatttattttctagatgaagaacatgctatctcatttagtgagaaag

SEQ ID NO: 7699 - DNA, 120 bp, synthetic construct
  source 1..120: mol_type = other DNA
ttgttctttcaactgtggcaagcattattagtgaggcctagttcaaatttatattctgtagctaccatactcacagcctctaggatggccattaattgccctaagctcagtcttcttgcc

SEQ ID NO: 7700 - DNA, 120 bp, synthetic construct
  source 1..120: mol_type = other DNA
cacatggatcagtgcctctaaacacatcctacccaaaagttgatgcaatcacttctctcccagctccattagcagaggttgaagtcctagtaagaattactcatatgtggagatattaag

SEQ ID NO: 7701 - DNA, 120 bp, synthetic construct
  source 1..120: mol_type = other DNA
aatctttgcgaaccatgaccaggtctcattatgccacatgggaaaaaaggaagttggttgctaagtgcttttacaaccccgttattaagggccctggggtaattttgtaaagattcacct

SEQ ID NO: 7702 - DNA, 120 bp, synthetic construct
  source 1..120: mol_type = other DNA
aatatgttcagattatttttcttcaaatgaaggaagttgtactttaataaaaatcaggacatctcaaacttgactgtatttctcaatcaaatgctggttctgaattgatgctaaaaagaa

SEQ ID NO: 7703 - DNA, 120 bp, synthetic construct
  source 1..120: mol_type = other DNA
gcatgtgtcagtgtgtgaggatgtgaggatgttggtgaaggagacctttgctttgttatggcttgtcactccttttcccatgacttagtttctcttgaaagtaccatttcctcaaaaata

SEQ ID NO: 7704 - DNA, 120 bp, synthetic construct
  source 1..120: mol_type = other DNA
aatgcaataaaagtaaaaaatgttgcttgattacgaatagccccagggttggattaggcccctttacaaaagggggcttttagcaatcctctccctcaaacttcctttctcttctccttc

SEQ ID NO: 7705 - DNA, 120 bp, synthetic construct
  source 1..120: mol_type = other DNA
gtatatgacgctgagttctagttttccctgtgatcaccagcatagatgaagtcatctcaatgagctagcaggtgtgaaaggaaaataaactctcaagaccccaaactcactatgccaaaa

SEQ ID NO: 7706 - DNA, 120 bp, synthetic construct
  source 1..120: mol_type = other DNA
tatatatatatagttatatatatagttatatatatatatagttccctgcagcaagtaaaactgggctccccttccaactggcgctggttctgaggcccccagaatgcgaacatgacaccc

SEQ ID NO: 7707 - DNA, 120 bp, synthetic construct
  source 1..120: mol_type = other DNA
aataaaagcagtttgccaatttctattaaaaaaaaagacttttattttgtatttgtaagatcattaggatcaacatttttacatgtttgtttattaatggtgtgtcacctcgaaaaacaa

SEQ ID NO: 7708 - DNA, 120 bp, synthetic construct
  source 1..120: mol_type = other DNA
agtcttgaaggccctttcatccttacgatttaatactgacaagctcttcagcttctattcaggacaaacaccaccaaagtgtatggatacaatggattcaagtagccacactcatggaca

SEQ ID NO: 7709 - DNA, 120 bp, synthetic construct
  source 1..120: mol_type = other DNA
ccctagcaaagacgaccaaatgcatttacaaccgtgcaagtatctcagccttgtaacagagctccgggtttgcgccgggcacagttccccgactcttctgttgttcctaataaagtcgat

SEQ ID NO: 7710 - DNA, 120 bp, synthetic construct
  source 1..120: mol_type = other DNA
actgtgctaatggacacaaccacacttagtaaagtttaacttgtactgacttcacagcatgtcagatgtggtgaaatgatgcatggcattcctcatttcgacaacatttcagtctgccag

SEQ ID NO: 7711 - DNA, 120 bp, synthetic construct
  source 1..120: mol_type = other DNA
cctatagtgatggcctcattttaattcctgatatttatacctccactatttttttttctgaatcagtcttaggatctttatcaattttgtcagtctttccgaagaaccaagtttgggttt

SEQ ID NO: 7712 - DNA, 120 bp, synthetic construct
  source 1..120: mol_type = other DNA
aatctatggtatgttttgagaactggcagatgcccctgaggaaaaggctagactcagctttctgggtatttattgccctggatcttgaccccatatttctttactgccttgttaactctc

SEQ ID NO: 7713 - DNA, 120 bp, synthetic construct
  source 1..120: mol_type = other DNA
gccatgagttatcacagtataccagttaggatgggtattatcaagaagactagagataactagatattggaaagagagtagagaaaaggtaaactgctgagaatgtaaattggtacagcc

SEQ ID NO: 7714 - DNA, 120 bp, synthetic construct
  source 1..120: mol_type = other DNA
gagtcagttataagaagcaaaacgtgcttttttgtaagccagaaagaaagaagagcccagcccagaggagactaacaaactgagtgagaagtagtctatatgtggtttagagttcgggaa

SEQ ID NO: 7715 - DNA, 120 bp, synthetic construct
  source 1..120: mol_type = other DNA
caatccgtgtaaagtgagaaatcagtagaggctgtcttcattctgaaattatgtaagggcattttattgagatcttgccctacatcctagtgtgaagaatcatataaattcttttttttt

SEQ ID NO: 7716 - DNA, 120 bp, synthetic construct
  source 1..120: mol_type = other DNA
tacaatttgataagctttgacgtagctaagaagccttgaaactatcaccactgcaatgaagacagcgaaaatgtctgttacctctcccccagtccttctccccatcactccctcatcacc

SEQ ID NO: 7717 - DNA, 120 bp, synthetic construct
  source 1..120: mol_type = other DNA
attgagactaaatatgattcccccacccctttcattctgctctacaccacctatgcacagccttggcctaagagccactttattagtcaacatatcaagaattcacaactgtagtgtctt

SEQ ID NO: 7718 - DNA, 120 bp, synthetic construct
  source 1..120: mol_type = other DNA
caaagttttggaattacgggcgcgagccgcctcacctggccagagattatttactaagaatagtatttaaggtgctagaatgaatacgtagcacttgatcaacttgcagacatattctgc

SEQ ID NO: 7719 - DNA, 120 bp, synthetic construct
  source 1..120: mol_type = other DNA
cttcaaactaggtgctaatggactataagcacatcttcttatcattcatgattttaagtggaacgttctggtgttcagatgacagccagtagtaaccctgaggctggtaagttggggtta

SEQ ID NO: 7720 - DNA, 120 bp, synthetic construct
  source 1..120: mol_type = other DNA
agttatcatagcaattctgcttttaatgcactcaggacaaacttctagctctgcatatatgtcatttcaatgacacatcctgtctcctacccgactagaatgtgagcagccctgtgatct

SEQ ID NO: 7721 - DNA, 120 bp, synthetic construct
  source 1..120: mol_type = other DNA
tcaaagtcctattaggtatatgttttcatcctgattttataggagaaactgagattcacggaagttaggtagcctccttaagatcacacagcagaggaggagccaagatggccgaatagg

SEQ ID NO: 7722 - DNA, 120 bp, synthetic construct
  source 1..120: mol_type = other DNA
gggtccctaaaaatatgggtgagaaggtgggatgagaaactggcttaatttttaagtttgtaggagttggagtcagacgaactctgaccatacttattagctctctcagcttcagattct

SEQ ID NO: 7723 - DNA, 120 bp, synthetic construct
  source 1..120: mol_type = other DNA
ctgtggagtgggaatgaagcatagtaagagtcagttgtaagaaagaattggtttgtgttgcagcaaatttaaacaagagatgtggcacacacatgcacacgtatgctcattgcggcatta

SEQ ID NO: 7724 - DNA, 120 bp, synthetic construct
  source 1..120: mol_type = other DNA
gctgaaagagagttaggaaccatagaggaaaattatgacatagttattacctcaaggaccatagttctacctgaaactctgaagatgacatgaagatagcatacaggtcccttccacaac

SEQ ID NO: 7725 - DNA, 120 bp, synthetic construct
  source 1..120: mol_type = other DNA
gttaatcctcatgctctcactttatattgaagaaattggcatacacaaagtttaatgacttgaccaagtctgcatggtcgtaagtgacccaggttgaatttaaagccagggtgcccagct

SEQ ID NO: 7726 - DNA, 120 bp, synthetic construct
  source 1..120: mol_type = other DNA
atgtgaggagaagtgatgtgtgctctttccaggattggctcacataaacctcccaggagtgatcctccttgctgtttccttagaaattggaaatcacatattgaagatggcataaatgaa

SEQ ID NO: 7727 - DNA, 120 bp, synthetic construct
  source 1..120: mol_type = other DNA
catcaaacttccaccgttgtttgatatgctatcatgttggctaattttagaagctttgttaaataaatagaaaaataaaagccctgatttttttgctcaacaagaagttatgttacagat

SEQ ID NO: 7728 - DNA, 120 bp, synthetic construct
  source 1..120: mol_type = other DNA
gttcaagaatcaggggaaccacattgaaacaggaataggggctctttgaagcactcttctaaagtgagtagcaattcataatgacaatatttccatttattcagcagttactaggcaaaa

SEQ ID NO: 7729 - DNA, 120 bp, synthetic construct
  source 1..120: mol_type = other DNA
ccattgtctctctagacctcaataatactgcttcatatagttcaacagattaaatatttcctactggataaagtacctggggaatataatggtagtcctggccaggcgtaggggctcatg

SEQ ID NO: 7730 - DNA, 120 bp, synthetic construct
  source 1..120: mol_type = other DNA
agacagcatctcactgttttatatatatataaaatgatcgtcctgttaactaatgaggcatatcttccaaaatgctaataagatcctgtcttcataaattgcaaaactggacatttcaga

SEQ ID NO: 7731 - DNA, 120 bp, synthetic construct
  source 1..120: mol_type = other DNA
gatgggaaaaaaaactgaaaattaagctttgtgaatttttcttacttttttcatgcagaactatacttaacgcctctctgaaatctgtgaagtttaatgtaatcaagtgatggtattaat

SEQ ID NO: 7732 - DNA, 120 bp, synthetic construct
  source 1..120: mol_type = other DNA
cctcatgataggaattagtgcctctataaaagagaccctggagagttagcttctttcacgatgtgaagataatagtgcaaatacagccatttacgaacaaggaaacagaccctcgcaaga

SEQ ID NO: 7733 - DNA, 120 bp, synthetic construct
  source 1..120: mol_type = other DNA
tctggttctctctggttctttctcttctatgtctctcttcccttgtgattaccttgtgcccacctgaataatccaggagaattcacggaccatcccaaggtcaagttttttcatttttat

SEQ ID NO: 7734 - DNA, 120 bp, synthetic construct
  source 1..120: mol_type = other DNA
ttccatgtcatggcaaacaaagaaaatgatattatttgtttattactgaaaacaaaccaagtaacttgtggctggaagggacctgccaaaaaggtgcagaggattacggctgccctaggc

SEQ ID NO: 7735 - DNA, 120 bp, synthetic construct
  source 1..120: mol_type = other DNA
gcctaatacattggcaaaccaaatgcatgactctgacaccgataatactaagaagggctgaaatgaattgttagaatgagagacagtcactttgtttagaagggagtgctccatgagcag

SEQ ID NO: 7736 - DNA, 120 bp, synthetic construct
  source 1..120: mol_type = other DNA
ttatttagctttaaacatatatttaccctttccatagctatttattccattctgtgtgtctgttattctctctggagtcatgttgttcctgcttgaagaatttcctttaacatgttcttg

SEQ ID NO: 7737 - DNA, 120 bp, synthetic construct
  source 1..120: mol_type = other DNA
cagaaaaggcacttgataaaatcaaacatcccttcatgataaaaatcctcaacaaatgaggcattgaagaaacttacttcaaaatagtaagagccatctatgacaaactattacccaaca

SEQ ID NO: 7738 - DNA, 120 bp, synthetic construct
  source 1..120: mol_type = other DNA
tcctctgctgtctcagggcctgcctggtgaaaagctattctctgtactctgtgttgatgctttaatcttagagctgaggagtgaatatttatgaagaatttactttaggtagggcttttg

SEQ ID NO: 7739 - DNA, 120 bp, synthetic construct
  source 1..120: mol_type = other DNA
acttgtacttctcttactagagaataatcttgaagttgactaatcctgtagtcatgtacttatttgctccacaagtcataattcatctttaatatatttatcaggcctacatgcgaatcc

SEQ ID NO: 7740 - DNA, 120 bp, synthetic construct
  source 1..120: mol_type = other DNA
ctggaggcatcatggtacccaacttcaaactgcactacaagactacataaccaaaacatcatggtactgggaaaaaaaaaaaagacacatagaccaatggaagagaacaaagaactcaga

SEQ ID NO: 7741 - DNA, 120 bp, synthetic construct
  source 1..120: mol_type = other DNA
atcttccctcttttttaagatatttagtagatagaggattttaattgttcagttacttttttccctgcaccttcagggggaaaatgctattccatgttttactttctttgttgctgttaa

SEQ ID NO: 7742 - DNA, 120 bp, synthetic construct
  source 1..120: mol_type = other DNA
tgtcaccttgctcttatctctttctagatttttttccttctccaaggttgttttactgctccctatgagcattcctaatctcattcttacacttgatggaaagattcactgtcttctcgg

SEQ ID NO: 7743 - DNA, 120 bp, synthetic construct
  source 1..120: mol_type = other DNA
agcttatggttcccgtgtttcacctgatgcctgcctggggagcacactgtcagtgcagaggcttcataatgcatcgctaatagtgttttcaaaacaatatctgttttttaagctcaaaat

SEQ ID NO: 7744 - DNA, 120 bp, synthetic construct
  source 1..120: mol_type = other DNA
aagagtatggaatgaaagtctgaaaaacttttgttcaagttcagtttctgcctctggctagctctgtgagtttctgcaagtcattcgaactttctgagcctgactttgcatccccaaaac

SEQ ID NO: 7745 - DNA, 120 bp, synthetic construct
  source 1..120: mol_type = other DNA
ccagtttcaaagtcgcttccacatttgcaggtatctttacagcagtaccccactctaatggtacctatttaccgtattagttcattttcatatggctatgaagaaacacctgagactggg

SEQ ID NO: 7746 - DNA, 120 bp, synthetic construct
  source 1..120: mol_type = other DNA
cttccctggtcactgagtctcctctagaaactcagtataaacatccaacgatgtgttaacagggtgttttgtaattttcttttgaagattattctaggtggtgggcgtcacagggtcaat

SEQ ID NO: 7747 - DNA, 120 bp, synthetic construct
  source 1..120: mol_type = other DNA
tggacgagcagtggggagattcgctgtctaaacaactaaggagagtttttaaaaccacttaccagaatctagagtgggaattaaaatctgcgtgggcttcttcagattccacagaaatga

SEQ ID NO: 7748 - DNA, 120 bp, synthetic construct
  source 1..120: mol_type = other DNA
cattgtaggtttctcttcttcctcttcattaaatactgttctccaagcttctgtccttggcccatggcttcaactagttctgctacttttccatgtactggcaggtcttctaaatctttc

SEQ ID NO: 7749 - DNA, 120 bp, synthetic construct
  source 1..120: mol_type = other DNA
tatccagctaacaactacacaattgagactacaaagtatccagctaacaacatcacaacaggatcaaaacctcacatatcgtccatgtgcagtggctcatgcctgtaattccagcacttt

SEQ ID NO: 7750 - DNA, 120 bp, synthetic construct
  source 1..120: mol_type = other DNA
ctgggcaatcatctagttgaacaattcaaattggtaccataatctggatctccttttccagaaatacattgcaactttatttctcttctaatcaatctcattatgatggaagagaaagag

SEQ ID NO: 7751 - DNA, 120 bp, synthetic construct
  source 1..120: mol_type = other DNA
aaagtgcaaggagattctattcatccttgttaaagtgtagttcattgaccaatagcatatatgggagcttgttcaaaatatatcctcataaaatgagttagggaggattccctctttttc

SEQ ID NO: 7752 - DNA, 120 bp, synthetic construct
  source 1..120: mol_type = other DNA
cctgccttgacctcccaaagtgttgggattacaggtatatgccatgttttctatgtcttaatggtttgtaatttatcttaacacacaataaagtagagcagcagggcatagggcagagtg

SEQ ID NO: 7753 - DNA, 120 bp, synthetic construct
  source 1..120: mol_type = other DNA
attaattggaaacagcttgtatggaaataaaatattacaggcagaggtgactagaaaacatagccccacccagaaaactgtagacgtcttagtgagaggtttgcatctccactggacatg

SEQ ID NO: 7754 - DNA, 120 bp, synthetic construct
  source 1..120: mol_type = other DNA
ctcacagctctcagtgccaggagtttgtgtgccaagaaaacagaaacctgtctagaaaataaactgttttctcttgcacatgtcctctaggaagacaagaagaggttgaacctgtaaatt

SEQ ID NO: 7755 - DNA, 120 bp, synthetic construct
  source 1..120: mol_type = other DNA
ttgtaaaaaaaaaagttcacatgaatcttgcatcttgctccataatttatctgttttaatgtaaaaataatgttcttcaatcttttatcatggagccaaactgacaattcaggaagatat

SEQ ID NO: 7756 - DNA, 120 bp, synthetic construct
  source 1..120: mol_type = other DNA
ctacattcagctcttaaaaactgcacttgctgttagaagacagaacatacactcaggaaaaacttcaggctgatactgctaagattttaacacatttataaaacttcccatcaataccta

SEQ ID NO: 7757 - DNA, 120 bp, synthetic construct
  source 1..120: mol_type = other DNA
tcaattttggggtggcagagggtccagcaaggtctgtgctgaggaaatgacataaggcatcaagaacaagcaggagtgaaccaggtggagaaggcttttcaggcagagggaacagcatat

SEQ ID NO: 7758 - DNA, 120 bp, synthetic construct
  source 1..120: mol_type = other DNA
aactgagaccatatggcctatgacctacaaatgctttaaatatttactatctagctctttccctaagcagcctgaggtaatctgtgaaaatggttcgctactcacttgacccggagaacc

SEQ ID NO: 7759 - DNA, 120 bp, synthetic construct
  source 1..120: mol_type = other DNA
gcattaagttcctatttcctttcatcatcaccacttaaatttttataagaaatagtatctcattgttttaatgtccatttcccttctaaaatcacctttaggtgatcactaacatgagtc

SEQ ID NO: 7760 - DNA, 120 bp, synthetic construct
  source 1..120: mol_type = other DNA
tattcctagaaactcatcactctacctatgctaccgctgcagcactatcactcctgctaccctttgtattttgaagttaacatccaaggttcttgtagctgaaaactttttcattattat

SEQ ID NO: 7761 - DNA, 120 bp, synthetic construct
  source 1..120: mol_type = other DNA
ttcacttattcatcctacatatttgctactttgtatcctttgacctatagctacccatttcctgtcctctccctgccactgcccaaccctgatcctagtaactgctattttattctctct

SEQ ID NO: 7762 - DNA, 120 bp, synthetic construct
  source 1..120: mol_type = other DNA
gtgaggtagacatagtacttcttgaggagacaggttttatctttgtgttatacaactctgctgtaaaataattcttcctgaagccaagtgtggtggcacatgcttgtagtcccagctact

SEQ ID NO: 7763 - DNA, 120 bp, synthetic construct
  source 1..120: mol_type = other DNA
tgctgcctataaacatccagacagaccttcttaggcagcagaactggtcccattcctctcaaagcagtttgacactaccctacccacatcaacccaaagcttgacattaagtcaaaagag

SEQ ID NO: 7764 - DNA, 120 bp, synthetic construct
  source 1..120: mol_type = other DNA
ttacactaactgtaatatagggatcgatgcactgcccagcatctttcaaaccaattttcgcaattctgatagtgagtaatgtcattcctggttccgatggcaaccttggtaataaagtac

SEQ ID NO: 7765 - DNA, 120 bp, synthetic construct
  source 1..120: mol_type = other DNA
cctatacctgaaatgccaaattccctctgtacttaaataaatcttacccatcattgagctcagctcacattattccttgctgaaatttatctagtctgcttcagcccacactaagttccc

SEQ ID NO: 7766 - DNA, 120 bp, synthetic construct
  source 1..120: mol_type = other DNA
gggagagggagagggagagggagaggagggagagggagagggcagcacattttctagaatataatgggtactcattaaatggtaactgctgctatcttatattttaaaaatgaggtttag

SEQ ID NO: 7767 - DNA, 120 bp, synthetic construct
  source 1..120: mol_type = other DNA
tcagacagtaacaaaagttggaggtaagacaaggacccagatattgtcagccaaaatcctccccaggtatttataacagaatggaaatctcaagtaagaatatggatattctgggccggg

SEQ ID NO: 7768 - DNA, 120 bp, synthetic construct
  source 1..120: mol_type = other DNA
atccactttgctttattctttccactattcatgttagtttccgtaattcagttcatttattcatgcctgcctcccttcctctctccttcccgttttttctctccttccttccttccttct

SEQ ID NO: 7769 - DNA, 120 bp, synthetic construct
  source 1..120: mol_type = other DNA
ttttgtatcccatgtatttaataaagtttatttttaagagtttttatgttgttaaacagccgagagaagcaaaagcatgactgtagagatagattaaaatgtcccaccatgaagatgaag

SEQ ID NO: 7770 - DNA, 120 bp, synthetic construct
  source 1..120: mol_type = other DNA
aaaccaaaggtatcttcccaactgtatagtaggctcaagggtaaatgttgaaatatctctattggagaacagaagttaaatatattaccacatttttggatgctcttgctctggactttt

SEQ ID NO: 7771 - DNA, 120 bp, synthetic construct
  source 1..120: mol_type = other DNA
atctgcccaccatggtcacccaaaatgctgagattacaggcatgcgtcatcacccctggccatgatacgcttgtaatagaagtaaaaacaattaagttttaaaaacacatggggaataca

SEQ ID NO: 7772 - DNA, 120 bp, synthetic construct
  source 1..120: mol_type = other DNA
gctgtaacttgaggagaaaagaatttttacaagagggataggaaaagataaggtcttaaaaacaaggaactaaaaattaagactgaagttttgtaaccttaggagccaggattttgatgc

SEQ ID NO: 7773 - DNA, 120 bp, synthetic construct
  source 1..120: mol_type = other DNA
taagttgtgtttttaaaaaaatgtctgttagtctttccaggttcacaatttgccacaaacattaaaaaaaaaagtttacgatattgattcttcctacccatgagcatggaatgttcttcc

SEQ ID NO: 7774 - DNA, 120 bp, synthetic construct
  source 1..120: mol_type = other DNA
ttaccttcaatctcaacacccagaaaaaaataaaaacaaataaaaaaacacaacatttccaggacatctttcagcttttctttcaaaattgccatcatacagtacacattgttttggaac

SEQ ID NO: 7775 - DNA, 120 bp, synthetic construct
  source 1..120: mol_type = other DNA
catctcaacatgatggacgagcactgatgatggcatcttctattaaaggcatggttgttcactattgattcttagattaaatgattttcccccatttatcaacttggtatccattaacag

SEQ ID NO: 7776 - DNA, 120 bp, synthetic construct
  source 1..120: mol_type = other DNA
tggaataatagccttccagaattctctcttaggcaagttaaaaaatgaaataaaaccatgtctttagaactaaaggacagagggaggagccaagatggccgaataggaacagctccggtc

SEQ ID NO: 7777 - DNA, 120 bp, synthetic construct
  source 1..120: mol_type = other DNA
aaaaagaactaaaggacagtatgagaaagatgtcttactaagtagagaatataataaaagcacataaattatagaaaaaagaaccaaatagaaattctgaagttaaaaagtacaatagct

SEQ ID NO: 7778 - DNA, 120 bp, synthetic construct
  source 1..120: mol_type = other DNA
ggggaggggaatgagagtggggataaaaagaagtcagcctaagagtaggtccatgcaaaaactgaaggatgacaatatgccataaattcattaatatgattatcccaacaactgtgtacc

SEQ ID NO: 7779 - DNA, 120 bp, synthetic construct
  source 1..120: mol_type = other DNA
tgtcgtcaccttagttctcctaagaaggaatgctgacctaccacatttcccttttcaagtgtgtaaatagaaactagcaacaacccagaagcgtgtcagatgagagttatgcaggaataa

SEQ ID NO: 7780 - DNA, 120 bp, synthetic construct
  source 1..120: mol_type = other DNA
aaattcatagaatttagcaatcaccaggttgatggtaacctgtaggaacaatttcagtagcttttgtgtgtttggatatgtttgccaaagggttaagaatgtgtgtagggggaggaggag

SEQ ID NO: 7781 - DNA, 120 bp, synthetic construct
  source 1..120: mol_type = other DNA
acatggaagcccctcaacccccgacaatttctccaccacagaagttttatggaatttggcagccatgcatgtatgctataagaatttatttcattatgttttcccctcaggccattgtat

SEQ ID NO: 7782 - DNA, 120 bp, synthetic construct
  source 1..120: mol_type = other DNA
cttatgctattcccttttagagtgaaactcctaagttgtttctgttagctaggagacctcctctccttttgttctctcttggacctactctacacagacttttttgtccctaccactatc

SEQ ID NO: 7783 - DNA, 120 bp, synthetic construct
  source 1..120: mol_type = other DNA
gctatggcatgtcccctgaactccagatccaaatcctatttttaaatctccacttggatgttaaatagtgatctcagttgaatatgtccaagaaagagctcttggaaattctcgtccaga

SEQ ID NO: 7784 - DNA, 120 bp, synthetic construct
  source 1..120: mol_type = other DNA
tgaatatcttgcagctgctgttccatggttctcaggtagtctttctaaatctgaagtcagctaaatatttttctccttacaagtgactccgtagttatcaacattcttcaagagttgttc

SEQ ID NO: 7785 - DNA, 120 bp, synthetic construct
  source 1..120: mol_type = other DNA
gtaactactatcaaagagggtgtgaccaagtgttacgaatgtcatcctaagccaacccagagaacctctcctgactgtacaatttgtaacacaccttcagaacctatacattgcatcttt

SEQ ID NO: 7786 - DNA, 120 bp, synthetic construct
  source 1..120: mol_type = other DNA
aactgttttccataatggttgtctcattttatattcccaccagcagttcatgagaattccagttactccacattcttgacaagtctcggtatgaccggtcttcagttttagccattctta

SEQ ID NO: 7787 - DNA, 120 bp, synthetic construct
  source 1..120: mol_type = other DNA
atctgatgatgataaattctcttagttttcatttgtctggcaaagtctttatctctgctttatttctaaaggatagctgtgctgggtacagtattcttggttgacagcccaccccccccc

SEQ ID NO: 7788 - DNA, 120 bp, synthetic construct
  source 1..120: mol_type = other DNA
tgaggccatctaatctcttaactcactcctcaccttcaatctccttttctttttctgtgagagtctggtctgtctggagaattgcatcagtcatagactccttggatttcaagtatgtct

SEQ ID NO: 7789 - DNA, 120 bp, synthetic construct
  source 1..120: mol_type = other DNA
aacttaatagttaattgactgcactctctttgatgagcacctaggacatatctggtataacagcctgtttgcatatgttattgaataaaagcatgaatgttatgcaaacaaaaaagcaca

SEQ ID NO: 7790 - DNA, 120 bp, synthetic construct
  source 1..120: mol_type = other DNA
tcagtaagatgtaaagtgaggagtagaacgtgggtttcctaacacctagttgggtattcatttgatcaggtcatgctgccttgtagtgttgatccttccctatatctcagtaatggttac

SEQ ID NO: 7791 - DNA, 120 bp, synthetic construct
  source 1..120: mol_type = other DNA
tcagggatatgtggatggatggatggattgatctatttatttcacataggcacccagtaagtgtgtctgctatcactaaggccaaggattgctattactgtcttataaccacctcccaaa

SEQ ID NO: 7792 - DNA, 120 bp, synthetic construct
  source 1..120: mol_type = other DNA
gacaccagtcatattggattaggatgcagtcatattggattagggtccaccttaacttgattatatctgtaaactctattccagataagatcacattcacgaccgaggagccaagatggc

SEQ ID NO: 7793 - DNA, 120 bp, synthetic construct
  source 1..120: mol_type = other DNA
ctgcctcatgctatagtccaggagatataagatagttcagagcagacagtgggaatactgtaatagttcaatcctaaatagagcagccactcaaaaaaacacccttggagttctttggga

SEQ ID NO: 7794 - DNA, 120 bp, synthetic construct
  source 1..120: mol_type = other DNA
agtaatggagatgacttatccattcaggggctgaagatcaagtttaattagcaatggccagtgatttcatcagtcttgtctatgaaatagaacctccagctcacgttccctattagtggg

SEQ ID NO: 7795 - DNA, 120 bp, synthetic construct
  source 1..120: mol_type = other DNA
aatgtaagtaaagtgtttcccttaggtctctgagtcattctagcaaattattaaacctaagatggggtcatgggaagcctcaaatttgtagttggccagacagaaatgtgggtagcctgg

SEQ ID NO: 7796 - DNA, 120 bp, synthetic construct
  source 1..120: mol_type = other DNA
aagtaatatggtggcttttggactgtaacagaaaaatctacagaacaaccagatggcactgtccgataggctgttggaaatatgggtgtgaaaaaacagggagctgctgatattgaagca

SEQ ID NO: 7797 - DNA, 120 bp, synthetic construct
  source 1..120: mol_type = other DNA
tttcttccgactaggaatttatagacttttcctgctaagacctcaatttgtgtttttgtgaaagacaggaagactgagatgttgaaataatttaaaacagccaaggttggccgggcgcgg

SEQ ID NO: 7798 - DNA, 120 bp, synthetic construct
  source 1..120: mol_type = other DNA
tttaaactcctcagctcacaagacttctccattgccctgatatttatcttacggacaccagctgatgtctggaatgaaggggcaagaaatgattgttccatagtaacgtgtggttttatg

SEQ ID NO: 7799 - DNA, 120 bp, synthetic construct
  source 1..120: mol_type = other DNA
cttccctctttcagaactgcccatcagaatattcccttccttgtcctgccttaattataactttccatgtattccttccttctcatttcacacaatcccaaagtgcatgctcagataggt

SEQ ID NO: 7800 - DNA, 120 bp, synthetic construct
  source 1..120: mol_type = other DNA
caggccccgaaatagcttgttgtggaaacacttggggataaatacgcccaacgaggctgaaaataccttgacacccaatccgagaggtttgctcatttcccttcggatttaggtaatggt

SEQ ID NO: 7801 - DNA, 120 bp, synthetic construct
  source 1..120: mol_type = other DNA
attacatactcattttccttctctccacatgtgagatataaatgaattctcctgggattttgctgacttacacagcctggaaatgggatagatagtcaaggttagaagccaagccctggc

SEQ ID NO: 7802 - DNA, 120 bp, synthetic construct
  source 1..120: mol_type = other DNA
atctgtgttctgttctctttagatttatctattctagatatttcctataaatggagtcatacaatatgtgatcttttgggtctggcttttttcacttagcttaaggttttggaagtttat

SEQ ID NO: 7803 - DNA, 120 bp, synthetic construct
  source 1..120: mol_type = other DNA
cttacctgcataagcaacaatccaactataaaagcacttccttgacagtaaccaacctcacgatctactaaagagtaagcctaaaaagtaaaaaaaagttgttcaaaatacatggtaagt

SEQ ID NO: 7804 - DNA, 120 bp, synthetic construct
  source 1..120: mol_type = other DNA
tagtgctatagaacactagaacttattctgcctatctagcggtaattttgtatctgttaaccaacctctccttattctcctctcctctgtacccttcccagcctctaatagccacaattc

SEQ ID NO: 7805 - DNA, 120 bp, synthetic construct
  source 1..120: mol_type = other DNA
gaaacagctgagtcacactgtgccctgacttctaagttaacaaaactctgagatcagggtacaaacaaatgggcgttgttttaagccactaaatttgtggtaattcgttacaggagcact

SEQ ID NO: 7806 - DNA, 120 bp, synthetic construct
  source 1..120: mol_type = other DNA
gtagtctcattcctaggatcccaaagttcagtcagaggacccaaatgaaagacatgaaaaaaattgaaatgaaaagtttatttaacaaggattgatttattaaaaatttatcactttaag

SEQ ID NO: 7807 - DNA, 120 bp, synthetic construct
  source 1..120: mol_type = other DNA
aggagtactgtgtcaagggggaaaaaaaaaagttttctcatcttttctgttgacactgtggctggcagtatctactttaaaatggaagtgagaaaacatcctggaagggggcacccggat

SEQ ID NO: 7808 - DNA, 120 bp, synthetic construct
  source 1..120: mol_type = other DNA
ccctgagatgtgttgggcgcagacgtgtatagtttggtatcacattcaaaatctacattcccttcactgttcatgtcttcactgacacttataactgtggactcttcttcatcatcacta

SEQ ID NO: 7809 - DNA, 120 bp, synthetic construct
  source 1..120: mol_type = other DNA
gacaggaaagtgttactctaggaggcagcattaactgcattagttctagcccatgatgatattagtttccccccctcttctagcttcttagcagtgactctgttatatcttttgtatcga

SEQ ID NO: 7810 - DNA, 120 bp, synthetic construct
  source 1..120: mol_type = other DNA
aaagcagacagtccactcagtcttccgaaaactggtaagataacacacttgaggttcatgtgtttatggaaagggttttttttgtttgtttgttttgcctatggccgacacacatacaca

SEQ ID NO: 7811 - DNA, 120 bp, synthetic construct
  source 1..120: mol_type = other DNA
gcccctttattgccactgtccaaggataaaaaggacgtgagacttcgttgaagaatgcctcttgtccctttctcctacttaccctcacttctgtctttatgcagaaataaaatataccaa

SEQ ID NO: 7812 - DNA, 120 bp, synthetic construct
  source 1..120: mol_type = other DNA
acgcaggtgctcagtttgaggagccatggcctcctacctagtgtaaactatgtccaaatctgtccaaagagaagattccaggtcactaagtaacaaaatttctaccaaaagatttcttgt

SEQ ID NO: 7813 - DNA, 120 bp, synthetic construct
  source 1..120: mol_type = other DNA
acaggatttcatttttatgttccagcttccagctttatctaaaatatttcttgtaatagattttactgtagaattgtttcctaaggcatctgtctcaacagcctttcccttatctgtgca

SEQ ID NO: 7814 - DNA, 120 bp, synthetic construct
  source 1..120: mol_type = other DNA
aaacctacatatcaatcacctggggatctttttaaaatgcagattgtgattccatagctgtggagttgggcctgagattctgcatttttcaacaacctctggtgatgatgctgatgttgc

SEQ ID NO: 7815 - DNA, 120 bp, synthetic construct
  source 1..120: mol_type = other DNA
gtaccgacattcccatacctgtaatatgtgtataagctctcctttacttttgacacttttattcacccttaatggtacatggagctaaaagtgatatattttccagatgtggcttgattt

SEQ ID NO: 7816 - DNA, 120 bp, synthetic construct
  source 1..120: mol_type = other DNA
agtggtctaactccatcctgcacacatatcttgaattggctgatttggaagcaggcagacttccttctggatctcattcaatttagaaacaacagcagattagcgattaaatcggccaaa

SEQ ID NO: 7817 - DNA, 120 bp, synthetic construct
  source 1..120: mol_type = other DNA
aatatccttgatgaacactgatgctaaattcttcaacaaaatactggcaaaccaaattcagaagtgcatcaagaagttaattcaccatgaccaagtaggctttatccctggggtgcaagg

SEQ ID NO: 7818 - DNA, 120 bp, synthetic construct
  source 1..120: mol_type = other DNA
cagctcaccacaacctttgcctcctaggctcaggcaattctcccatctcattaaatttttgtttatcctctatgtcttcatatattttagtgagacttttggagagtccacccgagtgtc

SEQ ID NO: 7819 - DNA, 120 bp, synthetic construct
  source 1..120: mol_type = other DNA
cttggccttaacaaacatctactgaattagatgctctaattccaagaatctgtgtatttgaaaagctcctcaggtgactattatcatactaaagacttcagtgacctctgctgtattata

SEQ ID NO: 7820 - DNA, 120 bp, synthetic construct
  source 1..120: mol_type = other DNA
gggtatgcagcataatttggaagatcttaatatatgcagaaacaggtcatgtacacattttcctgataccaccagtaggtgttcaaaattgtggaccagctgagccaaaatgaaccccag

SEQ ID NO: 7821 - DNA, 120 bp, synthetic construct
  source 1..120: mol_type = other DNA
agcagctctaaagagcagctcctgttttcttgttgttactttaggaatgggtgtctattgttttaaggattaaaaactctgcaatacgaatacatctgctcttatttctcagcatctctt

SEQ ID NO: 7822 - DNA, 120 bp, synthetic construct
  source 1..120: mol_type = other DNA
ttctaccacaactgcttttgtagcagcaacatgtacatttagttgttcccttccactactggtaataaatactgtggctttttaaacgttgcatctaaaatatagagaattgaaaacaat

SEQ ID NO: 7823 - DNA, 120 bp, synthetic construct
  source 1..120: mol_type = other DNA
acttttactagtttattacaaagagtattttaaaggatacaaacacaacagtcagatgaagagacacatagggcaaggtctgaaagggcccccagagcagaagcttctgtccctgtggag

SEQ ID NO: 7824 - DNA, 120 bp, synthetic construct
  source 1..120: mol_type = other DNA
atgagttacttaaaaaatactgctgtcaaattaggtgttggtcaaaccactgaaatgactgcaggacaaacataaaaatctggaaaattgcattgtatgattctcgaaggtcttgtacca

SEQ ID NO: 7825 - DNA, 120 bp, synthetic construct
  source 1..120: mol_type = other DNA
ttttcactgatatgattaattggttccaggtcgccaagtccagtgattcttctcagtgatcatcttgcttcagagcctgaaatagggtgaggtgagtgaggcagacaaagaacaaaattt

SEQ ID NO: 7826 - DNA, 120 bp, synthetic construct
  source 1..120: mol_type = other DNA
ggatctctagtacatggcaggcatactgctggatatttccatagaatatcttattagatcacaaaagaacccttgaaggtggatattatcatcctcaataaagccaagaggtggcagagg

SEQ ID NO: 7827 - DNA, 120 bp, synthetic construct
  source 1..120: mol_type = other DNA
ctaacacctattttcttcatcttaggttttgatggattcaagcctccctggcagctgttggagtatctcacaaaactacgttctgtgtaacttggtgcctttgtagttcctcctttaatc

SEQ ID NO: 7828 - DNA, 120 bp, synthetic construct
  source 1..120: mol_type = other DNA
ttaaattggtagggaactaaggaagccttcaagagaaaatgacatttggagcagaccttgaaggatgagttcacgtgtagtagttaggggctcccctggtactaagatattaagtacacc

SEQ ID NO: 7829 - DNA, 120 bp, synthetic construct
  source 1..120: mol_type = other DNA
cataggactacagcatcatacacaatagtttctttcactgtcctaaaaatcttcttaatctccatatgcatccctctctcaccttctccccagcaatcactggtctttttagtgcctcca

SEQ ID NO: 7830 - DNA, 120 bp, synthetic construct
  source 1..120: mol_type = other DNA
tcgttgaaaggactatcccttctccattatattgcctttgctcttttgtcaaagataagttggctatatttacgtgtgtctatttctgggctctctattctgttccagtgatctattgtc

SEQ ID NO: 7831 - DNA, 120 bp, synthetic construct
  source 1..120: mol_type = other DNA
cactttatggtgaaaactgaatgccttcctccaatatcaagaaaagaatgttcactgcattagtcaaggagtcaaaagttctccagagacacagaaagaataggatgtatgtgggggggg

SEQ ID NO: 7832 - DNA, 120 bp, synthetic construct
  source 1..120: mol_type = other DNA
agagagagagagagagagagagagaaagttatccagattggaaagggaaaaattatttctatttccatgtaaaatgatcttgtatatacaaaccctaactaatccactaaaatactatga

SEQ ID NO: 7833 - DNA, 120 bp, synthetic construct
  source 1..120: mol_type = other DNA
cgtagacatctggctggactctccttctttcttatcccaatgcactattcttggaaatcatatgccttcccttggctacaacaagtatcaaaatactaacaagtctcaaatgcgcacatc

SEQ ID NO: 7834 - DNA, 120 bp, synthetic construct
  source 1..120: mol_type = other DNA
aaaaaaaaaagaaagaaagaaaaacggatggtcccatagccaagctatgccaggccaatggactaacagagaagctaccatgaaatattctgggccagggaaaagactgaaatactcagt

SEQ ID NO: 7835 - DNA, 120 bp, synthetic construct
  source 1..120: mol_type = other DNA
tctcagtagtataattggctccaggatatcagtgaacacccacatgactgatatttgaggccaaaaacaccttctgtcttgatatggaggattatgagcaaatgaagtccagaaggtaaa

SEQ ID NO: 7836 - DNA, 120 bp, synthetic construct
  source 1..120: mol_type = other DNA
gaatgtaacaaaggaggctaccaaattccagcacactttacaattaagcaatcagtcaacaccatttgctatcattaagattaagcagatccaatctaaaaatcaccctccatcaagatc

SEQ ID NO: 7837 - DNA, 120 bp, synthetic construct
  source 1..120: mol_type = other DNA
tacagggttttaaattaccctgggggagtttttctgagggccttttgtcaatctgaacatatcagcagtcaatccaatgaggaagcactggaacctccttagagagcagcttaaataatt

SEQ ID NO: 7838 - DNA, 120 bp, synthetic construct
  source 1..120: mol_type = other DNA
gttgtaagttcctcttaggtaggactctgatctttttgcatcaacccgctgtttttatgggcttttgaagccagacttagtttgttctgtgagaagacatttgaccttggattaggtacc

SEQ ID NO: 7839 - DNA, 120 bp, synthetic construct
  source 1..120: mol_type = other DNA
tcttaatttctttttcttgtgcacttaggtaagggaggcctcaggttcctgagtcagacagaaactggaatatcactagctaagctgctcaagtgtatctcaaagccaaagccacaactt

SEQ ID NO: 7840 - DNA, 120 bp, synthetic construct
  source 1..120: mol_type = other DNA
acttgccccacaccacaaatttagcacctgaatgtaactgtgatccaactaatactgacttctttaacactactcttttttcaagcctggtccccctctaagggaaatatcctcagcata

SEQ ID NO: 7841 - DNA, 120 bp, synthetic construct
  source 1..120: mol_type = other DNA
tgggatgaatcatatggcattacattacccacggctttatcttcagagagaaacaacaacaaacaccagtgcatttcaaaattccctaaggtgtcattggccaagcagaccaggagcttt

SEQ ID NO: 7842 - DNA, 120 bp, synthetic construct
  source 1..120: mol_type = other DNA
aatttatagtctatatgaccctcttgaatgttgttctctaaaggctggacttcagaattcctctacagacatgaccccagtcttccaagtgagaattcacaaatatgctccaggcagtca

SEQ ID NO: 7843 - DNA, 120 bp, synthetic construct
  source 1..120: mol_type = other DNA
atccacaattacttttgcaccaacctaatagatggccaccaacatcagaacagccatctgcagcccagctgggactcagttatgcatgggtaaaattataaccatgactttagagatata

SEQ ID NO: 7844 - DNA, 120 bp, synthetic construct
  source 1..120: mol_type = other DNA
atattttcagaaaaaataaaaacttaagtctttgatgtaaacatgagtgagaaagttaagtgcttttttgaaggaaattgatgcttggagcagagtttggcacatattttcctgcaaaag

SEQ ID NO: 7845 - DNA, 120 bp, synthetic construct
  source 1..120: mol_type = other DNA
ttctctattctgttccattgacctatgtgtctccttccttcaatgccacactctcttgattactggacctatatagtgagccttaatattggaagagtgattccttccactttctccttg

SEQ ID NO: 7846 - DNA, 120 bp, synthetic construct
  source 1..120: mol_type = other DNA
gcagctaggtaatttttaaatcatgatatcaagtttaagggaaaagatctcatattgcagtgttttaagagaacataatgttcttccatctcagaagagggagtagtttttcaggtagtc

SEQ ID NO: 7847 - DNA, 120 bp, synthetic construct
  source 1..120: mol_type = other DNA
ttatgtccgtcttcccatctggcttacaaaattcttgaggaagcatctgcctcgtagctctttatctttctatttcctactacagggacaatgtatatggaaagataaatgtgtgtaggt

SEQ ID NO: 7848 - DNA, 120 bp, synthetic construct
  source 1..120: mol_type = other DNA
gcattgctgcattaccttgaaatatttaagcaacttagaagtagacttctgctgaccagtgccgtcttagaaagtttctttgtaactttctagtcctaggagaggagtcaacgtgttggg

SEQ ID NO: 7849 - DNA, 120 bp, synthetic construct
  source 1..120: mol_type = other DNA
gagggagggaggaaggaaaattagtggtgcctttatttgtaccctgagttgctaaagcacccatataagttaaaaaaaaaaaaaaaagtgctgggatcgtgggtgtgaccaaatacctct

SEQ ID NO: 7850 - DNA, 120 bp, synthetic construct
  source 1..120: mol_type = other DNA
catatacatatagaaaaggaaacatttgaattataccagcaagagattactgatattttgctttagtgtatataatgtaataacacttgtcatagacagttcttgcttgtcatcatagac

SEQ ID NO: 7851 - DNA, 120 bp, synthetic construct
  source 1..120: mol_type = other DNA
aaaaagggggttaaaactttttataataaggactgattcattctgaaaaaaatattttcaacactttttgtgagcatgttgcatgattttggagtaatgagtagatggccaacaaggtcc

SEQ ID NO: 7852 - DNA, 120 bp, synthetic construct
  source 1..120: mol_type = other DNA
tgctatggaaaaaggacaagtagagcaataagatcaggagtgctaagtggggagaggtcaggctgtagttagggttatatttgaacaacaatttgaaggatgcgaagggagttagctaat

SEQ ID NO: 7853 - DNA, 120 bp, synthetic construct
  source 1..120: mol_type = other DNA
tggagatatcgagaactacaatgatgctactcaggtaatttttttacgagagtgatctgaataaaagagtaatatatgccttttcttgtagacatgtagctaattgaatttcatttaaaa

SEQ ID NO: 7854 - DNA, 120 bp, synthetic construct
  source 1..120: mol_type = other DNA
aggaatttcagtcgatactaaatgttttattagtgtgagctcttattattatcattgatgtagaagactaaaaattaggtaagtattttcacaggacaacaggtatctttgacattatgc

SEQ ID NO: 7855 - DNA, 120 bp, synthetic construct
  source 1..120: mol_type = other DNA
gtgtctgtcacaaggcaatatgtctaggaacgctaaacataccctaggagttttcatctaagtacgagatgaatatactggatttgactgatgtttgcatataatcttttaaagccaggt

SEQ ID NO: 7856 - DNA, 120 bp, synthetic construct
  source 1..120: mol_type = other DNA
acgagtaatgtcaagctaccgttggccaagacagtttcaaaatggaaacgtaagttttggagttgttcaatatatccttttctgaagaaaaaggaagcaatcttattctaacttaacatg

SEQ ID NO: 7857 - DNA, 120 bp, synthetic construct
  source 1..120: mol_type = other DNA
tttccactttgccaggactgctgcatgctaaaaactcttagttttgttcacttttcaccatatgacatgattctaaggtcaacactgaaaaacttcctaagattcctctggattttttaa

SEQ ID NO: 7858 - DNA, 120 bp, synthetic construct
  source 1..120: mol_type = other DNA
gtttggtgtaaaggagaaggaagaggtaaatacatgcatagtaaaatttggctttttcccccctacttaaggatgttaatgattgggttgggccaccaaataataatggagtaattaaag

SEQ ID NO: 7859 - DNA, 120 bp, synthetic construct
  source 1..120: mol_type = other DNA
tagctcagaagaccttggtgtaaacagttgaattgtccctgtccaagaccaactgacactcatacttagctcactctagtataaattatatttcactgatgaaaagtaaataaatacatc

SEQ ID NO: 7860 - DNA, 120 bp, synthetic construct
  source 1..120: mol_type = other DNA
ctctaattagtaattagaggttcaaaaaagttgatagtgtgaaacacaattccaggttacacagaagttatttattttggcaaaaggatgtctcagaaattttaaaactaggcaacaacc

SEQ ID NO: 7861 - DNA, 120 bp, synthetic construct
  source 1..120: mol_type = other DNA
ggcctaatcaacttgtatagctgtaagacaaaagcagattttgagtgggatctatcagcctctaaattctgggattccatcaggaaaacagaggtttctcccaaaatggaatccactgtg

SEQ ID NO: 7862 - DNA, 120 bp, synthetic construct
  source 1..120: mol_type = other DNA
ggagattctacagtagataaagttgggtgagacactttaatagagggagtgttttaaccctattcctgcctcctctagttatggacctggaaaagcagtgcattcccagaaaattttatc

SEQ ID NO: 7863 - DNA, 120 bp, synthetic construct
  source 1..120: mol_type = other DNA
aaacagacaataacaaatgctggtgaggaggtggagaaaagggaaccatcatacactttttgtggttatgtaaattagtacagctgctatggaaaacaatttggaggttcatcaaaaaac

SEQ ID NO: 7864 - DNA, 120 bp, synthetic construct
  source 1..120: mol_type = other DNA
aatgtaaactttcaaagatggcaggagatatagatctctctttctttagtggatttaaatatgcaatttgttatcaacattgcactgacaatttttaacacaggccatattctggaaatg

SEQ ID NO: 7865 - DNA, 120 bp, synthetic construct
  source 1..120: mol_type = other DNA
tgttggagttaggtctaatctattgtatccctacacatcccacttagaaaagctaacaaatttcctttggacttcagtcagttcgattgtatttgtcattcaaaagccaaatcatttatc

SEQ ID NO: 7866 - DNA, 120 bp, synthetic construct
  source 1..120: mol_type = other DNA
ttgtcctctctctgtctgaaaaaattctttttcctctttagaataagttggcaccagatcaagcatttgaaggagtagcagggctgtgactgatgtctggtaaggagtagatgctgcttt

SEQ ID NO: 7867 - DNA, 120 bp, synthetic construct
  source 1..120: mol_type = other DNA
tcctaaatgttctcttatttgcctcctggttttaggttctggtaagctgcagatgacctgctttcttgctgaccatagactgcactccccttttcaaatagtgaatcctaggtagtgtac

SEQ ID NO: 7868 - DNA, 120 bp, synthetic construct
  source 1..120: mol_type = other DNA
ttgagcctgttccccttaattctagcagcccctcagctagattgaacaaaatcctttcatcttggtttgaggtctttggctctgcatcactctgattttctttgagttggggacatttat

SEQ ID NO: 7869 - DNA, 120 bp, synthetic construct
  source 1..120: mol_type = other DNA
atgtctgacctcatctgtcctagtatatcgctgctctctcagggcatttgaattcccgtcttgggccgttaagcgggctgccagggaagtggattttcccgcagtttcacttttgttctt

SEQ ID NO: 7870 - DNA, 120 bp, synthetic construct
  source 1..120: mol_type = other DNA
atagctaccttatttgtcttccaagcttagtagagagtacaggctttctcctggtgacccactgaaatttcccaaatagtaaccttttcagtctcatctgagttgtgtctccccaaaatg

SEQ ID NO: 7871 - DNA, 120 bp, synthetic construct
  source 1..120: mol_type = other DNA
caggcgaaaagtgaggttttattaatcaatcataacattcttacctcaacaggtcagagattgtcgtctgtctggtcttctcgatcttgcactggggaaggattatgtgcgttctaagat

SEQ ID NO: 7872 - DNA, 120 bp, synthetic construct
  source 1..120: mol_type = other DNA
actttcaggctgtacaaaatggcagttggatttatgcttgctcatccttatggatttacacgagtaatgtcaagctaccgttggccaagatattttgaaaatggaaaagtaagttttgga

SEQ ID NO: 7873 - DNA, 120 bp, synthetic construct
  source 1..120: mol_type = other DNA
atatatgctaaaatttggcttttcctcctgtaattaaggatgttaatgattgggttgggccaccaaatgataatggagtaactaaagaagttactattaatccagacactacttgtggca

SEQ ID NO: 7874 - DNA, 120 bp, synthetic construct
  source 1..120: mol_type = other DNA
gatttttgtatcctttggctgtagtataaatgattcccgaaactgtagctgagaagacctccttgcaaacagttgaattgtctctgtccaaggccaactgacactcatacttagctcact

SEQ ID NO: 7875 - DNA, 120 bp, synthetic construct
  source 1..120: mol_type = other DNA
ctctctcagcctttataaaaaggctgagggattttcatctgggttttgatctatcatggatagcttagagtagttaacaggtttggctctggtcccctgtaagacttctaccgtatacat

SEQ ID NO: 7876 - DNA, 120 bp, synthetic construct
  source 1..120: mol_type = other DNA
ctttccctacctcactatgttgtaaaagttaagaagctatgattcataacagcatttttacagaagagctgagtctttttgggcagtgcctctaaggtaaaggtgtaatcacagcctcaa

SEQ ID NO: 7877 - DNA, 120 bp, synthetic construct
  source 1..120: mol_type = other DNA
taattacattttcaatatctataggttttgtacttttaaggtgataataaccaaattttcaattgttttcatagaactaagaatagtatcagatttttcaacaaagaaacacagaggcgc

SEQ ID NO: 7878 - DNA, 120 bp, synthetic construct
  source 1..120: mol_type = other DNA
ccacttgcttcccatccacccttctcagcctctagtaaccatctttctactctttatgaccatgagttccactgtttgtatttctagctcccacaaataaatgagaacatgtgatgtttg

SEQ ID NO: 7879 - DNA, 120 bp, synthetic construct
  source 1..120: mol_type = other DNA
aattcaagcgggaaactgcctaggacaaaccttcctcccattctactcaaagtcactcctctgctcactgagatagatacatatctgattttattcctttggaaaggctaagcagaaact

SEQ ID NO: 7880 - DNA, 120 bp, synthetic construct
  source 1..120: mol_type = other DNA
taaactggtcagtaacaaactttgctgcatgtctccgacttgttttatgtccttaagcataacctgtaaccatgtggtagtaccacttttcagccgttgcctttttacaatggtgaccca

SEQ ID NO: 7881 - DNA, 120 bp, synthetic construct
  source 1..120: mol_type = other DNA
ttagaaccctaagcagtgaagtctcattaagaagaaaacccatatgcctccctagtaggtgtaaacagctttctaggaccaaaagtaaccttacagaaaacctaccaatttccttttcag

SEQ ID NO: 7882 - DNA, 120 bp, synthetic construct
  source 1..120: mol_type = other DNA
tctcattcttacctttcttggaatactctctataaatttctatcctttagtacatacaatttccttcctcttatagtatactttccctatttaactcagctgaactggatcatttgtttc

SEQ ID NO: 7883 - DNA, 120 bp, synthetic construct
  source 1..120: mol_type = other DNA
tgatatggaaaactttctgctcaaaaggagcaagaaagaagagacagaaatcattttcctatctgttatttttaaaggaaactagaattcacttaccccaacattgttgcatctagtcac

SEQ ID NO: 7884 - DNA, 120 bp, synthetic construct
  source 1..120: mol_type = other DNA
aactcttaaaagatcgagaattgcatactaaaaaactttacataaattaaaaggatgaatacatttaccggtataaatgcgaaccgcttccaactcaaggcaagtaacagcccacggtgc

SEQ ID NO: 7885 - DNA, 120 bp, synthetic construct
  source 1..120: mol_type = other DNA
cctattgcatgtacactcctttcgatctggagagtcctgaaaatcagccgttgattaatacggccttagttattcagagtgcagaagatatccagagaaaattgcaaaaacaggctaggt

SEQ ID NO: 7886 - DNA, 120 bp, synthetic construct
  source 1..120: mol_type = other DNA
tagaagtttagcctacgacctagccaattggacaaaagccgtatcctgttcccagggaagcctttaaaggaatagagactcatcttatatgcttaaaagcctctggaattctagttcctt

SEQ ID NO: 7887 - DNA, 120 bp, synthetic construct
  source 1..120: mol_type = other DNA
tatcagacagccctgttaaacataactgtgtagaggtgttggactatgtctattctagcagaccagatctttgagaccagccataggcattggtagattaggagttctacatggacagaa

SEQ ID NO: 7888 - DNA, 120 bp, synthetic construct
  source 1..120: mol_type = other DNA
tagcttagagtagttaacaggtttggctctggtcctctgtacaccttctaccatatacatctgaaagtgatttctttttcactcatctatgggcttcgtagggttccatttagagttttc

SEQ ID NO: 7889 - DNA, 120 bp, synthetic construct
  source 1..120: mol_type = other DNA
ggtaacaaaaagttgttagtaagaatatgagaagattgggtcaatggtactgtcaacactgatcacttgcgtttgctgcccagcagtggccctagatgttttgctgaagaactgtactcc

SEQ ID NO: 7890 - DNA, 120 bp, synthetic construct
  source 1..120: mol_type = other DNA
aaggatggaaaattttagagaaaagtttaaaattaatacagtggaactgcagtgggtcgaatggtggcccttcaaaaagatatgcccacccaggacctgtgaacctgtgaatgtgacttt

SEQ ID NO: 7891 - DNA, 120 bp, synthetic construct
  source 1..120: mol_type = other DNA
cagcctaggctctgttctggcttctacttcttcctgcaaggtcaaacttatggctccaatgacaaaagtagcctttgtcaatctttgaagaattgctacactatttgtcaccacactgaa

SEQ ID NO: 7892 - DNA, 120 bp, synthetic construct
  source 1..120: mol_type = other DNA
gcagtgtcaacaattcaagtctctcaaaaataatgagtgagagccagtcattccaattaccaaggaaacaggcaatggagatggtttataaacagcatttggacatggactgtctcgcat

SEQ ID NO: 7893 - DNA, 120 bp, synthetic construct
  source 1..120: mol_type = other DNA
catgtttagcagagtcagctaactgttccatggtccctacacagtacatttgtaagattatataacattaaaactggtaaaagaataagaaatttggagacatctaaattttctcttatt

SEQ ID NO: 7894 - DNA, 120 bp, synthetic construct
  source 1..120: mol_type = other DNA
aaataacatgattgtaaaagaagtgctagagcgtaatagtaaagagattggactcttggccggaattcctatgtccgaataacagctctgctaagttactagctgtgtgtctttgggcag

SEQ ID NO: 7895 - DNA, 120 bp, synthetic construct
  source 1..120: mol_type = other DNA
cgaatcctatagacttcagctcttcacaatgtccaaaaaaagaaccacctgggattccaaagtttcttctttaaagtatgcagaagcactgacaaagtgattgttctttttatgaggaag

SEQ ID NO: 7896 - DNA, 120 bp, synthetic construct
  source 1..120: mol_type = other DNA
attttgaacaattttaaagtgcaaatttcatttgtcattctgtcatctctatgcgtatactcccctccccaatctatattctcaaaagtctaggacggagctggacaggcccttgtcccc

SEQ ID NO: 7897 - DNA, 120 bp, synthetic construct
  source 1..120: mol_type = other DNA
aatagaatcttaaaaactgctgtagaacaaatttatccatgaagagcaaaacaacagtaacaacaaaaagagagctactcctttgggccttgcctgtcctcccagccacaagcattcagc

SEQ ID NO: 7898 - DNA, 120 bp, synthetic construct
  source 1..120: mol_type = other DNA
taaattgaagctcagaaaagtcaagcaacttgtccaaggctcgtgaagcgactaacagagtgaactctgatttgactcttaacccaatattaaggagtatagaaattaatatgtgagtca

SEQ ID NO: 7899 - DNA, 120 bp, synthetic construct
  source 1..120: mol_type = other DNA
tctgaccaaacaaggacacagatccttagcaaccatgaggtgctgagattatttggacaatatagtacctataaaaagtaaaagcctacaacttttacacttccctatggcagaatactt

SEQ ID NO: 7900 - DNA, 120 bp, synthetic construct
  source 1..120: mol_type = other DNA
attgcaacatttgaatgtagttttgaaatatactcaaaacatgctatcaacttcctcgaagttaggaaaattaacagctattataaaaaatcaaactgtcagtgactgtgcctttgagtc

SEQ ID NO: 7901 - DNA, 120 bp, synthetic construct
  source 1..120: mol_type = other DNA
ggcagggaatgatcttttttacaaagaatgccagcaaaagcaagtataaggtaagattttgagatagacaattttcaatgtacaaacttaaatataataactgacacagacggggtgatt

SEQ ID NO: 7902 - DNA, 120 bp, synthetic construct
  source 1..120: mol_type = other DNA
ggacccctgcagtattgtgtttggacttaaacttgctttgctgttttagttgtttttatcaagtggaaaagctgctttttgtgacattctttcatcctgccatcctttgcgtccttccag

SEQ ID NO: 7903 - DNA, 120 bp, synthetic construct
  source 1..120: mol_type = other DNA
ctgtaaccatggcccaacttattttccctaatgccctgaagttgattccacatccggttccaccttaaggcatttctagaaatattctcaatatctagaccaagaaaactctgaagtaca

SEQ ID NO: 7904 - DNA, 120 bp, synthetic construct
  source 1..120: mol_type = other DNA
ttttctttcctttccccgtttatctcatgactggctttgttcccagtggttccatggattttagccttctctctgacaatttcagttaaatctctgtcttatcaattgggctgcaccgaa

SEQ ID NO: 7905 - DNA, 120 bp, synthetic construct
  source 1..120: mol_type = other DNA
attacctctgcgctctcagcatgcgggccagcgaatctgaatgccagtctccacttgctgaacgggagtcttcttctgatggtcttcagtatcaggacaagggaggcacgaatccggcca

SEQ ID NO: 7906 - DNA, 120 bp, synthetic construct
  source 1..120: mol_type = other DNA
tgagcaagagggagtgtgtctgagccagtggggtgagtcttggctgggggtgtgagaatccacagagaagcaaaagagagttcagtgctaagaaatcagtctaaataagttatcatggca

SEQ ID NO: 7907 - DNA, 120 bp, synthetic construct
  source 1..120: mol_type = other DNA
tcatctgtcctgattttgtgcaaacagttatgcaaatttttcacaccagttgaaggcaaataccccagctgctttctagaaggaaaactgcaatattcagctttcaatcatcaaatactc

SEQ ID NO: 7908 - DNA, 120 bp, synthetic construct
  source 1..120: mol_type = other DNA
gtagggtaagaaggactaaagattaatccaaggagtttcagagccctagctggatttcacgtgaggcatgagggagtgatcgcagaaaacaaatgggtcaacccattaaacagttaaata

SEQ ID NO: 7909 - DNA, 120 bp, synthetic construct
  source 1..120: mol_type = other DNA
catggagcaaatctccctgatctgacaggtcatcatcacagtcccttctgtcttgagtcacagcaaactgttaaccatatcctgtttactaacagatcctggggatctactttaatgctt

SEQ ID NO: 7910 - DNA, 120 bp, synthetic construct
  source 1..120: mol_type = other DNA
catcctgagcggagcaaactttctgttcatccaatgccaagaaagagacttcacgatgccggtaagagttggacttgtcatggtgtctagaatgagacaaaacacatttctctggcaagt

SEQ ID NO: 7911 - DNA, 120 bp, synthetic construct
  source 1..120: mol_type = other DNA
gcactggcgctttcccctcctcctcctcatggtcattttgattttctgtaaacaaattcagaagagcaggtcacagtaaggaaatcacacaagagcaaataagtgtccagtcatagcaca

SEQ ID NO: 7912 - DNA, 120 bp, synthetic construct
  source 1..120: mol_type = other DNA
tatgctaatattggggccaggaagacaaagtccatgccatgggcctaggaggagaggaatgttctctgaccctcacataactgtgtttaatattctatcatagtttctctctttctttct

SEQ ID NO: 7913 - DNA, 120 bp, synthetic construct
  source 1..120: mol_type = other DNA
cttgacagcacacacagagaaccaaaaacagctgccacatggtgtgtctaagctgggttgtagttaacatactgtggccatggctatacaggcatttgagccattgtagacttcagagat

SEQ ID NO: 7914 - DNA, 120 bp, synthetic construct
  source 1..120: mol_type = other DNA
ccaccaaatgccaccacatcaagtgccttctccaacaccacacagcaaggggctttatctcattgtgaaatatagtcataagtgttcccacatttgaatgcaagagacaatttgtttgct

SEQ ID NO: 7915 - DNA, 120 bp, synthetic construct
  source 1..120: mol_type = other DNA
ccacctcacaccagactgccaatgtggaaaagttgctaaatactttgtgcctctgttttccatgtttaacaaaatgaggttaaaacatccacttctattttcctagaagtatgggaagga

SEQ ID NO: 7916 - DNA, 120 bp, synthetic construct
  source 1..120: mol_type = other DNA
aaaaagattttctaccctgtctcagtattcttgctgcatcccattgttatgttgatttcttttctcttactggggcagcatcttggcttttcattacacttaagaccagtttcacatccc

SEQ ID NO: 7917 - DNA, 120 bp, synthetic construct
  source 1..120: mol_type = other DNA
ttctctggtgtctcaaagacctgacattctgtgtcagaatgaaaatctgtctagtttcttcactttaaaaatgataaaactgcaggttcacaaagttactggtttacttgaggtcacaca

SEQ ID NO: 7918 - DNA, 120 bp, synthetic construct
  source 1..120: mol_type = other DNA
ttgagattaaattctcatgtagatagaaaaatgcttattacttataagagcaaattagttattgagtttctgaagtcgaagcacaaacttttgtttttaatctttgtctgaccccatcag

SEQ ID NO: 7919 - DNA, 120 bp, synthetic construct
  source 1..120: mol_type = other DNA
tcccctcccccaatcccctttccacattttccaattcagttgtttcggtgctttccaagtaggtgtttctctcccctgtacctcatttctgcaaaacaaacaaacaaacacacattaaaa

SEQ ID NO: 7920 - DNA, 120 bp, synthetic construct
  source 1..120: mol_type = other DNA
gtaatatcttaacaaaattgaatcttccaatccatgaatgtaatatatatttctctatttagtcttctttaatttctctcaccaatagctttcaggggctttgtacctgcttcattatat

SEQ ID NO: 7921 - DNA, 120 bp, synthetic construct
  source 1..120: mol_type = other DNA
aggctgtaaatttatctattctctggtgtctcagagacctgacattctgtgtcagaaagaaaagttataaaaaggcaaaagtcttaatgagaatcattggtactcaatagaatagtgaat

SEQ ID NO: 7922 - DNA, 120 bp, synthetic construct
  source 1..120: mol_type = other DNA
gatggaagctgagaaagtgaggaggtggtttgggggagcacactcccctactcatccctctcatctcaaactcaccttctactgcacaggaacactgaggatcaccaaccacccgtgacc

SEQ ID NO: 7923 - DNA, 120 bp, synthetic construct
  source 1..120: mol_type = other DNA
gtcccagtgaaagggaagtgctgcttcctggggcacaggctcttattcctgaagaggaagaaagatggcacatgagacattgtagaggtagcagtgtagtgtgcagagcagggaccctgg

SEQ ID NO: 7924 - DNA, 120 bp, synthetic construct
  source 1..120: mol_type = other DNA
cctaaccgatgagcaaagcagagtggttcctgtccccatgaggtccagaaaacccttcctctgagcaatcgccccttgagatagcagcttcacaggatgtgtaaaaagaaaatccaattt

SEQ ID NO: 7925 - DNA, 120 bp, synthetic construct
  source 1..120: mol_type = other DNA
acaggcaggagaggtgacgtcacctgcatttacatgatgtctgtctgtgtggcgtgggtcactgggtggctttactgagagcagggacatcagggatgggtgttctgggatgacttaaca

SEQ ID NO: 7926 - DNA, 120 bp, synthetic construct
  source 1..120: mol_type = other DNA
ccaagtacatagtttaagctgctgaacacagggttgtttgcccggaatcacacactcctttgggaaatttacctttccttgctgcatccccaactccattgcctctttgtgtagaaatca

SEQ ID NO: 7927 - DNA, 120 bp, synthetic construct
  source 1..120: mol_type = other DNA
tcgctttctccaatctttattgaaaggccttagtgggtggattctaattcctgggttgtcaatagcaagtcatgtggccttagttccatcttacccctgtggcatcactactcctctgtt

SEQ ID NO: 7928 - DNA, 120 bp, synthetic construct
  source 1..120: mol_type = other DNA
gaaaacgtttagcctgagtttcataggaggtaaccctcagataactgcagaatgtagaacattgaacaggacaactgacatgtctccttcaaacagtccatgtcaccaccaagaaaacaa

SEQ ID NO: 7929 - DNA, 120 bp, synthetic construct
  source 1..120: mol_type = other DNA
cagatcacagttcaaaagacagctctcaccttgggggcatattccccaagtcagtgtgaacatgtcttgtcccaagaggacactttatacgcatggatgttcacaaatttattctaaact

SEQ ID NO: 7930 - DNA, 120 bp, synthetic construct
  source 1..120: mol_type = other DNA
caatatgatttgctataatatgaattaagatatggtaatatctaatagtctccactgctaggattctgagtaacacaaaaaataggttttataaaaagcccatgcacttcaattggtggg

SEQ ID NO: 7931 - DNA, 120 bp, synthetic construct
  source 1..120: mol_type = other DNA
gtgggaatttacgattcaaatgcagtgactaaacttcaaaaccattcagagaaaataacctgccttacctaagcccctgcataaacagtcaaataatttaaacacttagtaactcctcta

SEQ ID NO: 7932 - DNA, 120 bp, synthetic construct
  source 1..120: mol_type = other DNA
ttacaggtgtgagtcaccacacccagccagcttttgttttaatgtctcactgtttacggccagccaaagctttctagatacctgaaaaaagccgagataaaaggtagagactaaaatcaa

SEQ ID NO: 7933 - DNA, 120 bp, synthetic construct
  source 1..120: mol_type = other DNA
gtatgagggccaacctccaagacaggttctgaaacaaacaagaagggagagagaagcagtcccatcttttccccagaaacactcacaactattctacttttccttttttacacagtttat

SEQ ID NO: 7934 - DNA, 120 bp, synthetic construct
  source 1..120: mol_type = other DNA
ttgccagttttgcacacatgtgtgtgtgtagttctgtgcaatcttaccatgtgtaaatttgtataaccactgccatgctcaagatacagaactgtttcatcaccacaaagatccttcttg

SEQ ID NO: 7935 - DNA, 120 bp, synthetic construct
  source 1..120: mol_type = other DNA
gcggtggatcttactccttccagccagtgaggatccagcaacctgctccgtgcctcccgcgcctgttggttggaagtgacgaccttgaagatcggccggttggaagtgacgaccttgaag

SEQ ID NO: 7936 - DNA, 120 bp, synthetic construct
  source 1..120: mol_type = other DNA
agaatgctggggcgggatgctgggccccctgtttaattgggttgggtgtccctcagagcttccctaaaccctggaagccttagccgtgtggggtccagagccctcagcgggattctttgt

SEQ ID NO: 7937 - DNA, 120 bp, synthetic construct
  source 1..120: mol_type = other DNA
ttccactttcatccaggttttactgagacattgggtgagtgtgttcagagcccctttgttctgctggaggtcccttctgtgtctctatacccagacaagccaagagcctccctgtggaaa

SEQ ID NO: 7938 - DNA, 120 bp, synthetic construct
  source 1..120: mol_type = other DNA
tcccatgcaggccctttgaagcctcagctacccactatccttcgtgaacatcccctcccatcattacccttccctgcactaaagccagcctgaccttccttcctgttagtggttgtgtct

SEQ ID NO: 7939 - DNA, 120 bp, synthetic construct
  source 1..120: mol_type = other DNA
ttgaattttataacattccagtaaggtaacagaattatctcgcccattttagagataaggaaactaagaatgagagggtcagtcctttgctcagggtcccagagctagtggaggctgtgc

SEQ ID NO: 7940 - DNA, 120 bp, synthetic construct
  source 1..120: mol_type = other DNA
gagtgaggcacagtgggagatgtatagatgactgccccatcctggaaatgagtgcagtgagagggctgcaggcagagcagcctgtgaggtgtgtgtggcaccacctgggtaccaggcccg

SEQ ID NO: 7941 - DNA, 120 bp, synthetic construct
  source 1..120: mol_type = other DNA
gcaggagcaggggcggagacagagggcctaaatacactcataccccacatcaccactttcttccttgaattccagattaaggatgttgttaagtaataatgagtcaataatgtgaattaa

SEQ ID NO: 7942 - DNA, 120 bp, synthetic construct
  source 1..120: mol_type = other DNA
gactgtgtagacttttgtgggtcctggctgaatgtggggcaaggtgcttctccaataccatgagttgtacaatttcaagtggaaatacttaaactttattctatgaaaacatcaccccct

SEQ ID NO: 7943 - DNA, 120 bp, synthetic construct
  source 1..120: mol_type = other DNA
aatgacaaagtggccatcaatcagaaaggactctaaccttggacttgaatctagttctcctgaccctaagcccaccacattgcaaactgcttttccaagggtgtaaagtgttaaagaaaa

SEQ ID NO: 7944 - DNA, 120 bp, synthetic construct
  source 1..120: mol_type = other DNA
aaaaaccaggaaaggagatgtcatcaacttcactaccggtctcctgtcaataggaagatactaaaatgaaaattgggcccccccgcctggccagccgccccgtccgggaggtgaggggcg

SEQ ID NO: 7945 - DNA, 120 bp, synthetic construct
  source 1..120: mol_type = other DNA
tgagaggcatgcttttacagagacttggccttgctcagtccattcttcccaatctcagatcccaggaaacttctaatttatctctccaggccttgagagtcagggttcacaagaaagaga

SEQ ID NO: 7946 - DNA, 120 bp, synthetic construct
  source 1..120: mol_type = other DNA
agtgatcctttaatggctctacagagagattttgaaacactgaaggagaaaaatgatggcgaaaagcagccagtctgcacaaatccactctctattcttaaggttgtgatgaagcagtgc

SEQ ID NO: 7947 - DNA, 120 bp, synthetic construct
  source 1..120: mol_type = other DNA
aaggtcttggtcaagaagtaactttaagaagccttctttattgcctttaggatttggacatcctcacctcagtcctttggcttccttgacctggttctttcagttttcatgtcactcagt

SEQ ID NO: 7948 - DNA, 120 bp, synthetic construct
  source 1..120: mol_type = other DNA
cctgggaagattcttgatgtccatatacgctggtttcctcctgtctgcctggaattagtttgcctccagaaaatatcaggcctataaaaacatagtccatggaatactatgcagccataa

SEQ ID NO: 7949 - DNA, 120 bp, synthetic construct
  source 1..120: mol_type = other DNA
ttctgcttatttatgtaggtaaagcaggtacaacggttgaatgaattctggagtttccactgttgagttttcactttgacaggtctttattagacagtggaacttggagggctccttagt

SEQ ID NO: 7950 - DNA, 120 bp, synthetic construct
  source 1..120: mol_type = other DNA
aacatcctctgcccatcaggctttgggttattagatggatttctggactggtaacgttctcagccccacctgtaccttagactgttgcttggagagcttttacaaaataccattgttgag

SEQ ID NO: 7951 - DNA, 120 bp, synthetic construct
  source 1..120: mol_type = other DNA
tcagttactcttatcagtccaaaagcttatagaattaatgctcctcctccttttccttttccccttcctcctcgtcttcctccttctccttctttcttcttcctttcctcttcttcttct

SEQ ID NO: 7952 - DNA, 120 bp, synthetic construct
  source 1..120: mol_type = other DNA
gtgactgggaatgacatgaatagaaacttctggaaaatggaatggtaaggtctagagaagtggtaaatatttcatcactggaaatgagcaagcagaggttaggttattctttgacattga

SEQ ID NO: 7953 - DNA, 120 bp, synthetic construct
  source 1..120: mol_type = other DNA
cacttaggcaaccctaacattaagcaagaggatctttgtggagaatttactgttaatattgtttgcatatttacccaaacagcttgatataagggtttgtttttttgttgttgttgttct

SEQ ID NO: 7954 - DNA, 120 bp, synthetic construct
  source 1..120: mol_type = other DNA
ctcagagcatcagagcatccgtctcatcggatggacctcaattatcttttcatagaaatgatgtcattgttatacacatgcagtttctgtggcattggaatgagcgtgacaccataaaaa

SEQ ID NO: 7955 - DNA, 120 bp, synthetic construct
  source 1..120: mol_type = other DNA
atacccaactgatgaccgtcaactggtaatgattctacaaccaaaatagtcttactaatgtcaaatcaggaaagcaaaaccaacttttagagggatttattaagctgccttgtcagtgtc

SEQ ID NO: 7956 - DNA, 120 bp, synthetic construct
  source 1..120: mol_type = other DNA
tgttcctattcggccatctcggctcccacctgtttagtttttttgtttgtttgttcgtttgtttgagaccaaatctcactcttgtcatccaggctggagtgcgatggcagaatctcggct

SEQ ID NO: 7957 - DNA, 120 bp, synthetic construct
  source 1..120: mol_type = other DNA
agatatatataaatctatatatatatcaggggtggaggaggatttctggctataggggctataggaacttgacaggattcttgctgaatgcaggctgaggtgatcaggtaatcacctgga

SEQ ID NO: 7958 - DNA, 120 bp, synthetic construct
  source 1..120: mol_type = other DNA
aagctgaatttgggtataacaggtaaagacaagggcaagtaaaggcccagaggcaggatttgcaataatcaccagagaaaggactagtttgggttgagttaaaagtctacagttgaggta

SEQ ID NO: 7959 - DNA, 120 bp, synthetic construct
  source 1..120: mol_type = other DNA
ctcctgtctcagcctcccaaagcactaggattataagcgtgaaccacgcctggcaatgccccatctcttaacgcttagtttacagaccacagcacacaatgtagcacttgcccccatatt

SEQ ID NO: 7960 - DNA, 120 bp, synthetic construct
  source 1..120: mol_type = other DNA
tttgaacacatttggtatgtttcaatccagtgcagcatctgtccttattgataactcacattttcccacctttggctagcaggagcctctttaagctgtgtggcaagtccttttgactta

SEQ ID NO: 7961 - DNA, 120 bp, synthetic construct
  source 1..120: mol_type = other DNA
catcagcctttacccagtgaccaattaaaccagcacctgtggggataagacccaggaatcggtattttttaaaactccttatgtggttctaatatgtggccaaagttgagaactactaca

SEQ ID NO: 7962 - DNA, 120 bp, synthetic construct
  source 1..120: mol_type = other DNA
aagaagaagaagaagaagaagaagaagaagagttcataaagtgcacatgagtcttgtcaatgatgatgctgggcacattgcaaagcctgaagaggctacagtcactctccgctaaagttt

SEQ ID NO: 7963 - DNA, 120 bp, synthetic construct
  source 1..120: mol_type = other DNA
gtggcacaaccgatcaggaattctaggagttctcggtgagatcaatggtttttttctggcgtttatgtaatgcttctcaactcaaggggctcctttattacttttgaatgtttttgccca

SEQ ID NO: 7964 - DNA, 120 bp, synthetic construct
  source 1..120: mol_type = other DNA
tattactcagggcctgagattcagattgactggtactttttttttttacttaatctaacacttgtatggccctggctctgtgccaggcactgttgcaagggctctataaataggtactca

SEQ ID NO: 7965 - DNA, 120 bp, synthetic construct
  source 1..120: mol_type = other DNA
gcaaatgacgcattagacgaagaccagcaattccacccacagaggagataccagcgggccaagtgtgagtcagaagggactggtgaggacttgcgcaccagtgagcctacagggaggggc

SEQ ID NO: 7966 - DNA, 120 bp, synthetic construct
  source 1..120: mol_type = other DNA
cttaggaaggtgatttgagatctcacccaccccatcatcattaacctcggctctgcattcccctacccaagcctttcccgctactaaaaatgaaaaaaaaaaaacaaaaaaacaattcta

SEQ ID NO: 7967 - DNA, 120 bp, synthetic construct
  source 1..120: mol_type = other DNA
ttaagctcccaagctctggaaactagatttgcattcgcttgccagtcgacttttcagattggattcctataatacttgaaacaaccggctcccttttcattcctttccaacccaattcac

SEQ ID NO: 7968 - DNA, 120 bp, synthetic construct
  source 1..120: mol_type = other DNA
ggacttggccgtgtgagtgaatgggctttgagaggccataaatgcagacgtgaaagaaaagagtgaggcttggttaacccccaacagtgaattggcaggaggaagaaagaatccagcaag

SEQ ID NO: 7969 - DNA, 120 bp, synthetic construct
  source 1..120: mol_type = other DNA
agtcctggctcatttattgaaagggctactgtttggtggtgtctgttgcttgagcaagcctggaaacccacatagttagaatgtggggctacaagaagaaatgctattttattatagcag

SEQ ID NO: 7970 - DNA, 120 bp, synthetic construct
  source 1..120: mol_type = other DNA
gggtctcagagctgcccaaaggcctatccttctgagaggtttctcctctcttccaactgatgtcatacgtctcatcttccttgtcattcagatcatcaaccacaaacatccttgccttat

SEQ ID NO: 7971 - DNA, 120 bp, synthetic construct
  source 1..120: mol_type = other DNA
tttgtgatttataaatattaattaaaacactctgtggtaaagcactgtccctaatttgcatatatgggaatttgatcatgccaagatgtgcttttgttacttattcaacagctgaccctt

SEQ ID NO: 7972 - DNA, 120 bp, synthetic construct
  source 1..120: mol_type = other DNA
agagacccaatcactggttcaagaaagcttcattctcctccagtcttccccagtgcaaaagaaaacatctgagacccatcagatactagcatttgtgaggcaataacgagtttaaccaga

SEQ ID NO: 7973 - DNA, 120 bp, synthetic construct
  source 1..120: mol_type = other DNA
gactgaaggtgagcacggaggcagtttcaaggaaggagctggccacgcttagagttgtggagttttccgccccagccttagacctccaaggacaagaaggggactgcagattgatccaat

SEQ ID NO: 7974 - DNA, 120 bp, synthetic construct
  source 1..120: mol_type = other DNA
atcaatatataactaatgtagacacctgcagtccctaagattgaatgcaaaattgtgttacatacacatgagtgtgttcttctgggaaaagagtccataaacttcaaaagattctcaaag

SEQ ID NO: 7975 - DNA, 120 bp, synthetic construct
  source 1..120: mol_type = other DNA
ccatcaattcccatgtgataaatgcactgtcacaatccagcagcaaacctaaagtttggatcgaattcctaagtcttcgccttcactgacttcccacagcatgggcagtagctgtgagat

SEQ ID NO: 7976 - DNA, 120 bp, synthetic construct
  source 1..120: mol_type = other DNA
tgtgccatcctcttggatgatagctggataatcgcaataagcagagccccaataactagctccagtgtgtgggcagaagtggagaggatggagaaaggatacaaaaagacactgtgggat

SEQ ID NO: 7977 - DNA, 120 bp, synthetic construct
  source 1..120: mol_type = other DNA
ggtgatccaggtgagagctgctgaggaccccaaccaaatcagatcactggacctccactgggagtgaaagggggtggtctggccagagagatagtaaagagatgtagttaacaggcaaga

SEQ ID NO: 7978 - DNA, 120 bp, synthetic construct
  source 1..120: mol_type = other DNA
ccgtgaaacatctattcaaccactcctcattttctacctaaattctactgtgcctttgcaaagcccagctcaagtcctttttcctttcaggcctgtcctccctactcctaagcaaaccac

SEQ ID NO: 7979 - DNA, 120 bp, synthetic construct
  source 1..120: mol_type = other DNA
aacagcagccattgcaagtttatcagaagatggacaattacagatttttcatttctgaataaggaaccatttacacagacacatgtataacaaatgcctgtgcacatccaggacttgtca

SEQ ID NO: 7980 - DNA, 120 bp, synthetic construct
  source 1..120: mol_type = other DNA
ggagttgaggtgttcggttagagaagaaacaggatgcacgggagatcacacacagagtaagaggtgcctctcaaatgcctttcccacgtgtctaactctgctttgtttaaagcacagtca

SEQ ID NO: 7981 - DNA, 120 bp, synthetic construct
  source 1..120: mol_type = other DNA
atgtccgagaatctagtgaaagaagctgtcccttctgcatttccttttacaatgaaaaacatctttcccagaatctcccagcagacttctcatacctcagtggccaaaaccatgtcacac

SEQ ID NO: 7982 - DNA, 120 bp, synthetic construct
  source 1..120: mol_type = other DNA
cttagctttccagcatactcttcccaggttctttgggctactgacaagcactccagacccaaatacacatgctcccacctgaggctgggaaatgtaccaagaactgcatagaaaatatac

SEQ ID NO: 7983 - DNA, 120 bp, synthetic construct
  source 1..120: mol_type = other DNA
aggcctttccagattgaccactcaggagttactctggcctccccttcactcctcctgctaaactgaaaacaaggacagacttgcctggcctctctcccccagtagacacctaccctcagt

SEQ ID NO: 7984 - DNA, 120 bp, synthetic construct
  source 1..120: mol_type = other DNA
ctgagctgcttcatctgctaactgccagttctctaacactgaaatgtggtaggtaactggacatatttgaaggacatctttatgtaagtgatatatggagtcaggagatagccaccttca

SEQ ID NO: 7985 - DNA, 120 bp, synthetic construct
  source 1..120: mol_type = other DNA
atcagtcagatactttgaggtgttgctaaggcggtatttagggagggatttggccttaaatgctaataaggaaaaagccaacaaaaactaacaaaaaacaactcaaaatcacaagatagg

SEQ ID NO: 7986 - DNA, 120 bp, synthetic construct
  source 1..120: mol_type = other DNA
gttttaagttgatcttttttgtgaatggtatgaggtgagagtcaaggttcatgttctccctcacatggacatctagctggagacctaacaccctctgctgaaaagactattttttccccc

SEQ ID NO: 7987 - DNA, 120 bp, synthetic construct
  source 1..120: mol_type = other DNA
gtgtgggtttccagcatctccccacaacccactgtttgctcgatgactccagggatggtctttgtgacaaagttttattaatccattgcaaaatgagaaaaataccagcaattctatgta

SEQ ID NO: 7988 - DNA, 120 bp, synthetic construct
  source 1..120: mol_type = other DNA
atttttaaagtacatttggtcagtctgaaacagcttatgatggaacaaaaaactgaactcaccttcaggactttgctatgggtggggggagggggatagtagtggggaatagagaaagag

SEQ ID NO: 7989 - DNA, 120 bp, synthetic construct
  source 1..120: mol_type = other DNA
aggtcacttaccagtgagatgacttatctgcaaagggagatgaggacgtaactgtaaacatctggatacctcctatttgcacagtactgtgcttagtaactctatatgcagcaactcatt

SEQ ID NO: 7990 - DNA, 120 bp, synthetic construct
  source 1..120: mol_type = other DNA
cggatatggctgtgtctgaggttggtcagtcaacaggtcctgaaatgcggttgaattcctttagaacgtatactgtttaaagcaccaagtttccaacatttggagatttcttgtctaaga

SEQ ID NO: 7991 - DNA, 120 bp, synthetic construct
  source 1..120: mol_type = other DNA
ggagtagttcctgatccttattttcatttagactaggggagggaggattaggtgtgctctgaaaagagcttgaagttcctgtcacccagataccattcatggcacaacaactactcaaat

SEQ ID NO: 7992 - DNA, 120 bp, synthetic construct
  source 1..120: mol_type = other DNA
aaagaagagaaaggaattgaaaaaagtaaggtgctgagcctcgactctcatcctttccagtcatctctcaactgtgaagtctgtgggaaaaagtctgatcacattactggtccagttaag

SEQ ID NO: 7993 - DNA, 120 bp, synthetic construct
  source 1..120: mol_type = other DNA
gttcaaaattttatggagaattatattgtctatgcctgtgtttctcactagactgtcagtgccatgaagaaatggggggtagctgtttacctcatcactgaatccccagcatgaaacaca

SEQ ID NO: 7994 - DNA, 120 bp, synthetic construct
  source 1..120: mol_type = other DNA
ctgattgactattgttgaggtactttttccctgtcaataggtagataggtaggtaagaagggaggtaggtaagacagttatttcatagctaaaagcatggcttctggggccaaactgtct

SEQ ID NO: 7995 - DNA, 120 bp, synthetic construct
  source 1..120: mol_type = other DNA
accaaaaaattatacaagaatgttcataacagaattattgataatactcaaaaagtagaagcaactcaaatgtcaatcaactgatgatggataaataaaatgataaaatgtggtaaatcc

SEQ ID NO: 7996 - DNA, 120 bp, synthetic construct
  source 1..120: mol_type = other DNA
atagagatacagaattctctttggaaagatctaccaaattcctgtaagaaacagtctacccaaagtaggggaaaggctatatgaaaagttacaaggcacttcttaaaaatatatcttagg

SEQ ID NO: 7997 - DNA, 120 bp, synthetic construct
  source 1..120: mol_type = other DNA
aaagagatgtgggaaagaaagaaaaaaaagaaagtacattgaggacagtccaatctaactgtgaactcataagggacagccagtaaattcaaaacagcctactgttttttgattacttgt

SEQ ID NO: 7998 - DNA, 120 bp, synthetic construct
  source 1..120: mol_type = other DNA
agaaaacaaaaagtagaccagggttagtaattaagggggtgggggacagttacaattttaaatagggtggttagagtaaccctcaattagaagtgccaagacgtgaaatgcagtggaagc

SEQ ID NO: 7999 - DNA, 120 bp, synthetic construct
  source 1..120: mol_type = other DNA
tgagctaataagcatggaagtacctggcacagttcctgagtcaccaaaaaaatgttagttttctcttcatcaaatctccccattcccacccctcatgctaatctcccctcccacatacac

SEQ ID NO: 8000 - DNA, 120 bp, synthetic construct
  source 1..120: mol_type = other DNA
tctccaaaataaaacacacaatcccattatatgtgaaccatatccacaataccagaatctaagattcccactctgaaagagtaactagaacaacttctttttgaggcaattctgcttact

SEQ ID NO: 8001 - DNA, 120 bp, synthetic construct
  source 1..120: mol_type = other DNA
acaaaagggacaataaacaattttctagccactcatcatcataaaccctgacatgctaaattatcccctgctcagtttatggaccacagtgggcccataaaactcctccctcactagcaa

SEQ ID NO: 8002 - DNA, 120 bp, synthetic construct
  source 1..120: mol_type = other DNA
taagtgggtatatgcccccctactttgcctcctaatagcaaaacaactcaaaactgacaatcaggaagaaattattcttataacaccaaatattttcagtgacttacatcatcaatacca

SEQ ID NO: 8003 - DNA, 120 bp, synthetic construct
  source 1..120: mol_type = other DNA
aacagcccaatccaggcggaactacaaatggtcccacctggatgaatgaaggtttgggcctctccatcaggaaaaaaaaaaacataacctgctgaggtgtttgctgaaggcaaaaggaat

SEQ ID NO: 8004 - DNA, 120 bp, synthetic construct
  source 1..120: mol_type = other DNA
gtgcttaaagcaggagaaaaaatgaagaatgttcctccttttctcatctaatttaataaacacttttgaataaagctcagacccacctagaaaaacccacaatctattcaggtgagatat

SEQ ID NO: 8005 - DNA, 120 bp, synthetic construct
  source 1..120: mol_type = other DNA
aacagtgctccagggagcacaaacatttaatggataagaacaaggtaatgaagaagcaaaaggaacagggttcagaaaaccagaaaagccagtgccctgaatgtctagggagggagattt

SEQ ID NO: 8006 - DNA, 120 bp, synthetic construct
  source 1..120: mol_type = other DNA
cgccattcaggcagggtcgagacacaaagcatggatgagatgttgagtactggcagtcctctcctgtaaaccctgaggcacatcggcacgtggctttccccagcatggcctgggccacac

SEQ ID NO: 8007 - DNA, 120 bp, synthetic construct
  source 1..120: mol_type = other DNA
gaggcactgaggaacctttttacatgccaccccttgattcataagatgtacaaccatttcaaactgtgtgtattatttatgacaattttctctgaacaatatcaaaaaggcatggtaagt

SEQ ID NO: 8008 - DNA, 120 bp, synthetic construct
  source 1..120: mol_type = other DNA
gaacacagccatgctcattcatttatagattgtctatggctgattttccactacaacaacagagtcaagtagctgtaatgagaccacaaagcctgcaaaaataattactctctggcactt

SEQ ID NO: 8009 - DNA, 120 bp, synthetic construct
  source 1..120: mol_type = other DNA
ctgtattaataaagtttgatttctatttaaaatgttttagagggctggacatcagcttagttctttacttttaccttagaagatatacaagtctcttttaacccacactttcatgaggtc

SEQ ID NO: 8010 - DNA, 120 bp, synthetic construct
  source 1..120: mol_type = other DNA
agaaccttcagattcaagaaatttaatttctatccaattaagtaatcatttctaaaatatttctaaaagatgatcaccagcctctgcttgaatacaagcatgtagcatggtgccggataa

SEQ ID NO: 8011 - DNA, 120 bp, synthetic construct
  source 1..120: mol_type = other DNA
taactttgaaaagaacaaactttgtctctctacaatttccaggttatctctaccctctagaacaaaaaagaacaagccttctgcttctcttacacgtagcccttcaagaatctgaagaca

SEQ ID NO: 8012 - DNA, 120 bp, synthetic construct
  source 1..120: mol_type = other DNA
ttcaacactaggctatcctgcctccccatcactggatgactccagttcatcaaaaacctctttaaaaagtgaggctcaaaatggaaaaaggcttaacacatgttcttaccagtgcagcac

SEQ ID NO: 8013 - DNA, 120 bp, synthetic construct
  source 1..120: mol_type = other DNA
cccctatattaaaatctttttaatttccagtgagaaacatcatgcttcccttctggtatatctccaacttaggttcctttcttccacccttttttcaaaaatctgctgtaaacctgtcct

SEQ ID NO: 8014 - DNA, 120 bp, synthetic construct
  source 1..120: mol_type = other DNA
actctgttagtcttggtggaaagtaaggttctctgcttgaaaacaagggcttaaatagctgtcttcttgagatggctaaagttgaatttggttagagagtgaaaacatggctaaacaccc

SEQ ID NO: 8015 - DNA, 120 bp, synthetic construct
  source 1..120: mol_type = other DNA
atacaggacagaaaaatttgttctttcacgtttcctaagtgaatagccactcgtctacagaaaagcttaaaacagtgtagcagcttgtgtcagctccaagatgactgaagtctgagcagg

SEQ ID NO: 8016 - DNA, 120 bp, synthetic construct
  source 1..120: mol_type = other DNA
aaaacatgcatgaggacttctagttaacttcctggtaaagaggggaaaaaaagagaagaagctctgtcatactacttcttgccattcccactctactctcaacccccccttctctcaaaa

SEQ ID NO: 8017 - DNA, 120 bp, synthetic construct
  source 1..120: mol_type = other DNA
catggcaaacacattctagacatatgagtttacaaaaaacacccttcgatgtaatggacaaaactgaatgagttagctcagttgttcccaaggtatgggctgtggagttattgcaaggga

SEQ ID NO: 8018 - DNA, 120 bp, synthetic construct
  source 1..120: mol_type = other DNA
taacccccactcacccctatatcagtcaaattgggccaactccatgcaaagtagattattttttaatcaccttccctcccacctaccaaatatgaagttaaccaacacacacagagaggc

SEQ ID NO: 8019 - DNA, 120 bp, synthetic construct
  source 1..120: mol_type = other DNA
aaaagaatcttgtgtttaaaagggatagaaaggtctaaccatcttctatcccaaacaactggccaacatgagagcctgttttcttgagcatagaatggtggtaggtatttcagcctctat

SEQ ID NO: 8020 - DNA, 120 bp, synthetic construct
  source 1..120: mol_type = other DNA
tgtactatataatcagaggaaacaagcagtaaaggacctgagctaatttggggtaaccaaagacttggctaacagatgcttccttactctggatccctcatatgaatcagatctggccag

SEQ ID NO: 8021 - DNA, 120 bp, synthetic construct
  source 1..120: mol_type = other DNA
acatctctgtatgcttcatctccccagcaagacttcagaagactgccaccatgtcttatgcaggagaaactgcattcactgtcagacagtctctgggtacgtatacttgtgaataaggaa

SEQ ID NO: 8022 - DNA, 120 bp, synthetic construct
  source 1..120: mol_type = other DNA
cccccattcctttgctatcattcataagggcagatgtagacaaaattaaagaatttaattaagcctctccatatcctgaaagagaaatatttctcattttgcttagtcacaaaaaaaggg

SEQ ID NO: 8023 - DNA, 120 bp, synthetic construct
  source 1..120: mol_type = other DNA
aaatctgtctggacttgctcctgttccattagtaaaaagaaaggagaagtttcaaattagttctctctactgaagcacactttaatagacaatatcctctatccccaccttcactgccct

SEQ ID NO: 8024 - DNA, 120 bp, synthetic construct
  source 1..120: mol_type = other DNA
agcaccacaacagaaccattgcgaatgcatcctccataaaaagctaagttctaagggattatgagtgtctctactctctacttactatacagacatttaccaagaagacaaagaaggcaa

SEQ ID NO: 8025 - DNA, 120 bp, synthetic construct
  source 1..120: mol_type = other DNA
aagataagattcagaaacccaagagaaagtaagagctggacggctgaaaagactgagcagaaggctcctggggctgggaggacaagttctgccttagaggggcttaatgaacacctcagg

SEQ ID NO: 8026 - DNA, 120 bp, synthetic construct
  source 1..120: mol_type = other DNA
tataaacaatcattatattttagctgaatcagtagcattatgctgtctaaacagatagtcagattccttctattttaaaacactttctaccagttcccatcccaccactcaccactcacc

SEQ ID NO: 8027 - DNA, 120 bp, synthetic construct
  source 1..120: mol_type = other DNA
ttgcaggaaacctagaaaagctattatgaaattatctcacagccttcctcaaacaaacaaaacgtcttggctagagtagatggttggagaaaaaggaaaaaaaaatgctcttaagccaag

SEQ ID NO: 8028 - DNA, 120 bp, synthetic construct
  source 1..120: mol_type = other DNA
cttattagccaattatctggcatccacatccttccatcctcacccccaaccaaaatctgtaccaggaaagctcaagaaccagtaacattccacagaagcattaaaaatagaggagtagaa

SEQ ID NO: 8029 - DNA, 120 bp, synthetic construct
  source 1..120: mol_type = other DNA
ccatctgaggccctcccaaaaacagacttttcagagaaaagaacaaaaacaacagcaatagtagacattttcattgatttcagccaagaatggaagaagtctactcgaaatctgccaatc

SEQ ID NO: 8030 - DNA, 120 bp, synthetic construct
  source 1..120: mol_type = other DNA
aaattcaggaagagggtcatcttgttgtccatatcccacttccctgtaaggctcaaatgctccctcttcccacactgataagcccaatgcaacaactataattaaaacagttaatgtcag

SEQ ID NO: 8031 - DNA, 120 bp, synthetic construct
  source 1..120: mol_type = other DNA
ctgcattcctaacaaattcccaggtgatgttgataccacaggtctgaggaaccacacactgactatgactatatgaacgcttgagtgtccacttttaaaaatactcaaaagctatataat

SEQ ID NO: 8032 - DNA, 120 bp, synthetic construct
  source 1..120: mol_type = other DNA
aatttaggacagtaataagcgataagttccattggaaacaaaacccagtaatgtataaaaagcaatcatgaaggctgggggtgcaggagtgtacctcagatagtgtctaggaaaggcctc

SEQ ID NO: 8033 - DNA, 120 bp, synthetic construct
  source 1..120: mol_type = other DNA
gtgcttccactgatttctgccttcctcattactatctaaattctacccattccttcaaggcccagttcacctcttgcctcacccagaaagcttcccctggagggttctggtcctcacagg

SEQ ID NO: 8034 - DNA, 120 bp, synthetic construct
  source 1..120: mol_type = other DNA
acccaaatgactctaagataaatacaaacaaaataaaaattgccaatatatacccttggcataccctcttaataccaatcttggaatcactccaaaaagaacttttaagaaatacaatat

SEQ ID NO: 8035 - DNA, 120 bp, synthetic construct
  source 1..120: mol_type = other DNA
aaaataggagaattgagggcagacaaggagacatcagggatttgcaataattctcatagcgccctgcaatttcaaacaaaactttctctaaattttgtattccattttttgggatcaagc

SEQ ID NO: 8036 - DNA, 120 bp, synthetic construct
  source 1..120: mol_type = other DNA
ctctccactcttagcctcctataaatcttaagccatgtgtattatggtaaaaactagctgaaataggttgaatggaagccaaaataatttacatctaaatgaaaaacagaaaacagagta

SEQ ID NO: 8037 - DNA, 120 bp, synthetic construct
  source 1..120: mol_type = other DNA
tacatgcatccttcctcatagcctttttaaaacatccttgggtggtagcaatgaaggctactcacaaggatggggacagaggtcatcagggataccataatcaatgtactgtgcaaaaat

SEQ ID NO: 8038 - DNA, 120 bp, synthetic construct
  source 1..120: mol_type = other DNA
ttccaccagaagacagattctggagctaggcaacacctaagtgaggtctgctccacctagcttcagcccagctataataccatggtaagtgcttgaaaaatgtcagccaagctaaactgt

SEQ ID NO: 8039 - DNA, 120 bp, synthetic construct
  source 1..120: mol_type = other DNA
gtctacaaagcattctatggcttgtgtgaacacctcagccaaacaaatcagaaagtcagctcacaaccctctatttctcactcctgagaaggctgctcataaacagtgatctcatttgat

SEQ ID NO: 8040 - DNA, 120 bp, synthetic construct
  source 1..120: mol_type = other DNA
gtacccataattcaattgattagaaataaatccctccaagaacacatctgcagttaagttagtgaaaactgaactactgaacagagaagcatggcctgctgctcagagaagacgggtcat

SEQ ID NO: 8041 - DNA, 120 bp, synthetic construct
  source 1..120: mol_type = other DNA
atgtccttgagtagtaggtctggtttgactatgcagccagagctttatccttcttcagagtctctccacaaatgatgatcagtgtaacaaaagaatctttcactgcatttgctcagtgaa

SEQ ID NO: 8042 - DNA, 120 bp, synthetic construct
  source 1..120: mol_type = other DNA
gggcactggaagaaattttaaaacatctccatatttatgggctaaaaaacatataagctttacttagagttaacatatgcatacatggtttaatagccagacatttatataatgtataaa

SEQ ID NO: 8043 - DNA, 120 bp, synthetic construct
  source 1..120: mol_type = other DNA
agcaggaacaaaatgaggaaccggggagagtacagagaagtgttaactcacactggtaggatgccccttctcactcaaaacagctgagttcatatcccaggcatggccgctgtatcaaaa

SEQ ID NO: 8044 - DNA, 120 bp, synthetic construct
  source 1..120: mol_type = other DNA
actaacctttccaaagtacatcttttaaattaagactaatacaccagggttttttctaaggattagatgagataatgtatgtaaagcacttagccacactgtgtctgacataaaatacac

SEQ ID NO: 8045 - DNA, 120 bp, synthetic construct
  source 1..120: mol_type = other DNA
tctaagcacattccctgggctcacactatccataccagaacttctggaatgcaggcttacggtgttttttcaaactctacattagttctcaaaaaatgaacaaggtcccacagccaatct

SEQ ID NO: 8046 - DNA, 120 bp, synthetic construct
  source 1..120: mol_type = other DNA
ataaagcagcatgaagccacagaaggcttcaaatgacaaagaaatgaattagaaaaatcacccacagtacactggcccttcctggttttggcaaggatttcagccagaaagacatggtat

SEQ ID NO: 8047 - DNA, 120 bp, synthetic construct
  source 1..120: mol_type = other DNA
aaatgtccagttggattgctgtgagagtcaaaatgatccacttggcattttgttgatattgaggtgtcaaacctttaactagttggccactccttccagtaagcttctgtacactggaca

SEQ ID NO: 8048 - DNA, 120 bp, synthetic construct
  source 1..120: mol_type = other DNA
agggacattataaaattatgcggtatcatgaaataagaactgctctggaaatcagaacctgggttctagctctggcttttccatatactaaccatatggtctaaaggaattcccttaagc

SEQ ID NO: 8049 - DNA, 120 bp, synthetic construct
  source 1..120: mol_type = other DNA
gaggaattaccatgaaagtaatgaactttaaagttcaggggcccctacactcgggtgcctattctgtgcccagaaccacgcaagcacaattaaatatgttgctttcaatctttacaaaca

SEQ ID NO: 8050 - DNA, 120 bp, synthetic construct
  source 1..120: mol_type = other DNA
taattccattcttcttcccagttacaaaaagatttaaaagaactacaactcttcaaaatggaagtttgcaatttagatcattctcctattatgcaaatgttcattcagaattaaaatatt

SEQ ID NO: 8051 - DNA, 120 bp, synthetic construct
  source 1..120: mol_type = other DNA
gttcacaggcaaattattttcactgctgtcattgaaattttaaatatagccacacctctcccatcccaacaccctttctactcctctactgttgttgactggcactaacccttttcagac

SEQ ID NO: 8052 - DNA, 120 bp, synthetic construct
  source 1..120: mol_type = other DNA
tacctgagtttaaaaatactttattgctaaaaaatactgacacagggacatatagtgagtatatgctattggaaaaaatggtgctgatacatttgctcgacatagggttgccacaaactt

SEQ ID NO: 8053 - DNA, 120 bp, synthetic construct
  source 1..120: mol_type = other DNA
gcttgtcctggtaatggaaatcaactgatagaaggttaaaagccatcaatgtatcggtcagctaatgtccatccacttcttacttattcagaagatacaaaagagttctaactggctgac

SEQ ID NO: 8054 - DNA, 120 bp, synthetic construct
  source 1..120: mol_type = other DNA
cccagtaaattccaatgatacttaagaaagcattcatatggcctgaaattactctgaaccaaacacttgagacctgcagggcttcagcatagagcagttcagctggagcaacgaatgtca

SEQ ID NO: 8055 - DNA, 120 bp, synthetic construct
  source 1..120: mol_type = other DNA
gaggcatattaagattaagtaatatttaccacttatcaaatggtaaagatttttaaaaataaaacctagtgttgacaatagtatattatgtgtgtgtgcatatatatatatgtagatctg

SEQ ID NO: 8056 - DNA, 120 bp, synthetic construct
  source 1..120: mol_type = other DNA
agattagtgagtaaacagtattcaattattcttatttgaatgttggttaggtataccaatagaacaacctctccctgctaggtacccgttaaaatagattattgaaaatatttgaagctt

SEQ ID NO: 8057 - DNA, 120 bp, synthetic construct
  source 1..120: mol_type = other DNA
ccacctgaggcagcaactctgggtgtgtccacaccacacttcagtcactgcctggctgtgacgagaagttccttcagccactgccactgagaactgcatcttccaaggaagatatctcca

SEQ ID NO: 8058 - DNA, 120 bp, synthetic construct
  source 1..120: mol_type = other DNA
actaccagtgatgcagtttgtcccgtctcaagcctatgagcatatcctttcagatctgaagccacttccttcttcctatcaaggacagtattatcaagtgtctttgtgagaggagcaatc

SEQ ID NO: 8059 - DNA, 120 bp, synthetic construct
  source 1..120: mol_type = other DNA
tttatggagagctgggtgtcagctcagtaaagtctacagacaagcatctctttgggtccctatcacctgcacaggtctcaggactctgagacaaatttctgagtagatgtcaatgaggac

SEQ ID NO: 8060 - DNA, 120 bp, synthetic construct
  source 1..120: mol_type = other DNA
cccaaaatgatgaaattacaataaggtgtggctattctggacaaaataacagaaattgctggcctagtaatacagtaatacaggaagcagtggaagcaaacttgagtgagaggcaggggg

SEQ ID NO: 8061 - DNA, 120 bp, synthetic construct
  source 1..120: mol_type = other DNA
taggcattcgaactgagacatcaagaaaggaagcatgtaactatggactgtgaacacaatataaagaaaatgatgtaaaatttcttatatccttattcaaatcacgccttgcagtttttt

SEQ ID NO: 8062 - DNA, 120 bp, synthetic construct
  source 1..120: mol_type = other DNA
tctcctcctcctctccaccacaccaaaaaaaaaggaataataagaaagtgaaaggaaaaatagttttaggttaaatttcatcaccatctgaaagaaaattactccgattttgtttaagca

SEQ ID NO: 8063 - DNA, 120 bp, synthetic construct
  source 1..120: mol_type = other DNA
ctgcttcatcactacaaagcctcctggtccacttctgaaattcttagtgacctagacgtgtacgaaatttgaactttccaagaagtatctagttggtgctgaacaacccagtactatttt

SEQ ID NO: 8064 - DNA, 120 bp, synthetic construct
  source 1..120: mol_type = other DNA
cggactttcggtggggttggagtgtcaaaactcaggcgcgccgcaaaaccccgtccccatccaaaccaagcccacacacccggcccatgtgccgccccctggcaaaggcgaggctggctg

SEQ ID NO: 8065 - DNA, 120 bp, synthetic construct
  source 1..120: mol_type = other DNA
caacgaagcagcctcgtgtgtccttccgcctcagccgcctcctcccaccgcaagccccgccccactgtcgccgcggcctcggccccgccgccttgggcacccaggggtttcccgcaggaa

SEQ ID NO: 8066 - DNA, 120 bp, synthetic construct
  source 1..120: mol_type = other DNA
tactacacattatctgtggatgcatatatatagatatagatattaagagactataaccagaatagtagttacttccagggcaggagagtagggggtgtgatcaaacctgggtacaagtgg

SEQ ID NO: 8067 - DNA, 120 bp, synthetic construct
  source 1..120: mol_type = other DNA
tttcacacaggactctttgtatttctgtgttctcaactaagttttgaggtcctcatgggcaaagaccacagcctattaatccccagtgtctatcacataatagatgttgaactagaatgt

SEQ ID NO: 8068 - DNA, 120 bp, synthetic construct
  source 1..120: mol_type = other DNA
atatgaaaacttactgcatacattctggtaaggacaagagaagtaaagagtaaatatgaatggaagtaagggaaaaatatgactgaagacattttttaaagataagttttaatgatagaa

SEQ ID NO: 8069 - DNA, 120 bp, synthetic construct
  source 1..120: mol_type = other DNA
gcacatccaagatgatatttagtgtggggacctctgtgtagagggacaccagcttcttgtcacttccatgttagcacagaacaagctgacccactgtaactaggaaacataaacaagtga

SEQ ID NO: 8070 - DNA, 120 bp, synthetic construct
  source 1..120: mol_type = other DNA
tgtctaaaaaacttacctaaagttctgctagagtgctgagctgggccttgaagtcgtctcccgactcagagttcaatgctcttttcacccacttccctactgcatgcaatgtaagtaatt

SEQ ID NO: 8071 - DNA, 120 bp, synthetic construct
  source 1..120: mol_type = other DNA
tttttttcccttctccaatgtgtttactatatgttgatataattgtactggttctctcttttgttgcgacttttcaatgtgcctttcttttcccatttcattactagacctacaccgttt

SEQ ID NO: 8072 - DNA, 120 bp, synthetic construct
  source 1..120: mol_type = other DNA
gggtcgagtggtaattgtttcaggttctttgagaaatcaccaaagtgctttgcacaacggctgaactaatttacattcccattagcagtatataagtgttccattttctctgcaaccacg

SEQ ID NO: 8073 - DNA, 120 bp, synthetic construct
  source 1..120: mol_type = other DNA
gtgttgtaattctttttgtagagatctttcacctcccttgttatctatatttctaggtatttttgtgtgtgtatggctattgtgaatgagattgcattcttgattttgaccctcagattg

SEQ ID NO: 8074 - DNA, 120 bp, synthetic construct
  source 1..120: mol_type = other DNA
ttgccggagttcttgtgctggttctcacctgtgtggtctgatgttgcttcaacctttgaagttgctgtttcttggataggtttttctgcttttgtcttctttgatgcccttggtggtctg

SEQ ID NO: 8075 - DNA, 120 bp, synthetic construct
  source 1..120: mol_type = other DNA
cactcagttgattctgaagctctaatttacagatgcaaaattgtaccagtacattaactcatatgtcaaaacaacatctagagaaacaaaaaatgaaagtaaaatggaaaaagataaaag

SEQ ID NO: 8076 - DNA, 120 bp, synthetic construct
  source 1..120: mol_type = other DNA
ccttaattgtatggccatcagcaccctagccctttgtcatgaaagctaccaataaggtggaaatttaaaatatgagatattttattatacatgttttattaaaccctatatgtgcagaaa

SEQ ID NO: 8077 - DNA, 120 bp, synthetic construct
  source 1..120: mol_type = other DNA
cagactctggagccaaactgcctaggttcaaatcttagctctattactttctaactctgtgactttgggcaaatgacttaactctctcatgcctcaaagcagaatcctttgtaaggttta

SEQ ID NO: 8078 - DNA, 120 bp, synthetic construct
  source 1..120: mol_type = other DNA
tcattgctgaccattaggttgcagcatgcaactctcaacaatgagctgcccctctccactcctatagaagctccaaatactatggtaccactatgtaggttttcagcctttcaaaggctt

SEQ ID NO: 8079 - DNA, 120 bp, synthetic construct
  source 1..120: mol_type = other DNA
taattcacttaccctaaagcaattgtgcaataagcaaattataaaaggaaaacaacaaaggttaactttctacaggggccaatagacaagatctgtggagcacagcaattaaccttcaca

SEQ ID NO: 8080 - DNA, 120 bp, synthetic construct
  source 1..120: mol_type = other DNA
tgaggctatatagtaaggtggttagaagtgcaggttctggcctcagactctttggttcagatatcacctgtacaagttatgtgacattggtcaagtcatgtaacctatttaaaacctagt

SEQ ID NO: 8081 - DNA, 120 bp, synthetic construct
  source 1..120: mol_type = other DNA
gggcatctttttacagagcctacaagaatatacacttcactggacagggattttaaattattgtgtttgctgctatatcctgaatgcccagaacagggcctggtatatagttagtgctca

SEQ ID NO: 8082 - DNA, 120 bp, synthetic construct
  source 1..120: mol_type = other DNA
aggtagaatctaatagcataaaaggcactgcaaaataagctatccttgtctatggaatgagaaccatttcttcataagactcattgcttttagatacctgagagtgcttctcctcgttgt

SEQ ID NO: 8083 - DNA, 120 bp, synthetic construct
  source 1..120: mol_type = other DNA
ggacattatataaagcagcacttggagagtatatagttatgaaacactagagtgtttttccaaagcaagatgacccatttatctagcaaacttgaaacacttcaaaaattctaagccagt

SEQ ID NO: 8084 - DNA, 120 bp, synthetic construct
  source 1..120: mol_type = other DNA
aataaaggaatagggtcgggacacagtgggcaccttctttccatgctgttcatcaaattctgagtgcaaatcttctaggtaggcaaaagccaacttcttagggaaggcagcttcacataa

SEQ ID NO: 8085 - DNA, 120 bp, synthetic construct
  source 1..120: mol_type = other DNA
tcagagttgtgactccatccaccctttgattctatatggtaaactagcatacacatatttaaactctttccagccacaaaggaaaacactgtaactggaaatttctgtggatagaaatgt

SEQ ID NO: 8086 - DNA, 120 bp, synthetic construct
  source 1..120: mol_type = other DNA
cagaactaccatacaatctagcaatcccactgctgggtatttctccaaaggaaaaaaactcattatgttaaaaacttatctgtacccccatgtttacggcagcaccattcataatatcta

SEQ ID NO: 8087 - DNA, 120 bp, synthetic construct
  source 1..120: mol_type = other DNA
agctgtcttattccttgcttgggcacctgagttaactggtctctttgcttttagtctacaccatcttctataccatcagttttattcccagagactacagatgaccatattaccctgctt

SEQ ID NO: 8088 - DNA, 120 bp, synthetic construct
  source 1..120: mol_type = other DNA
caattgcctagggttttatttttgttttgatgtactttttacttgtcttttataggtagagaatttttgttttgttttttaaaagtaaacatagcagcttcctccctggcctaagttatc

SEQ ID NO: 8089 - DNA, 120 bp, synthetic construct
  source 1..120: mol_type = other DNA
cactctgaatgaggtccttcatttacaggtaagtaagattcattttaacggaggaaagacaacctactttcagagtacagaggaagacctaacccctacttcttcaagatgatcgcatta

SEQ ID NO: 8090 - DNA, 120 bp, synthetic construct
  source 1..120: mol_type = other DNA
gtgaggaaacagccagaaggtgacatctatgaaccaggaataggccctcaatagtcaccaaatctgctggtgcttgatcttcaccttgcagaactagaaaaatcaatttctgtcatttat

SEQ ID NO: 8091 - DNA, 120 bp, synthetic construct
  source 1..120: mol_type = other DNA
atttaaaattctttaataaaaaaaagaaatatttttattatttcttggctcaagtgccaagaaataatatcaacatagatcggtgattttcaaccttggcttcacaatagaatcatttgg

SEQ ID NO: 8092 - DNA, 120 bp, synthetic construct
  source 1..120: mol_type = other DNA
aatccaataatgcagtggatcagaataactggaaaaactgtgaaacaaatttgaggttatccaacagcaaatgtaggatttggatctatatattacaaaagatagaaggtagtaactaga

SEQ ID NO: 8093 - DNA, 120 bp, synthetic construct
  source 1..120: mol_type = other DNA
acaaggcagtaaagtacagtggttaggcactaaagtacagtggttattaagtttttgtctgagtcgacaaaaacttaataaaaaccactgggtctcaattggggtgattttgcccccatg

SEQ ID NO: 8094 - DNA, 120 bp, synthetic construct
  source 1..120: mol_type = other DNA
ttcccctgcactatctactttgttcaaatcatattcctaggttcatttgaacaattacactccttctgcaggatggtcctagagtattcctgaaaaacatttcacattagcaaatcgggg

SEQ ID NO: 8095 - DNA, 120 bp, synthetic construct
  source 1..120: mol_type = other DNA
ggcgtattggagaaggtgggaactggggataatcctgaaagaatgtgatgtactgaaatttaacaggtgcttttatgtggcaatattacctcacccactttcaaaagatgtcagcaagct

SEQ ID NO: 8096 - DNA, 120 bp, synthetic construct
  source 1..120: mol_type = other DNA
gacattgttggttttagaggtatatgaatgataaaacttagtattacatattgttgaacgttttcccaaagtggttgtaccatttagcagggatattctggttaccccacaaccttgctg

SEQ ID NO: 8097 - DNA, 120 bp, synthetic construct
  source 1..120: mol_type = other DNA
ctcccagcctcctcctcctctgatttgtgggtgccactggggcagctgctgagtctcagtggttcctagtcatcaccaagttctgcccacctagatggtttgcacctgtccttaccagaa

SEQ ID NO: 8098 - DNA, 120 bp, synthetic construct
  source 1..120: mol_type = other DNA
ggccatgcggtctgtggttctctgtgagcatctcttctattctcttgcacgttccctcagcctgtcagtctctgtgtactcttcaacccataactgagcgaggctgtaccagccccaatg

SEQ ID NO: 8099 - DNA, 120 bp, synthetic construct
  source 1..120: mol_type = other DNA
gtgatctgtatgtgtgtttccagaccaacctgaggggcgggctgctatttctcatggctcagtaacgagacacagatgaactggggaggaagagagttttgacttctgcaactggttaca

SEQ ID NO: 8100 - DNA, 120 bp, synthetic construct
  source 1..120: mol_type = other DNA
aagctgaggagctcaggtgaggggaacccgtagggggaggcaggcgggtaggtgtgtagatctctgaagtacagcagctcggcggggagaagtaagaatgaagctgggccaggggaaggg

SEQ ID NO: 8101 - DNA, 120 bp, synthetic construct
  source 1..120: mol_type = other DNA
tagctgagacaagttgacttaaaggagatcaagactggagatgacaagagtgaaaccagggaaacatcatcttcaaataagtaaacaaggctgccagtgacatccctcagtcctgattaa

SEQ ID NO: 8102 - DNA, 120 bp, synthetic construct
  source 1..120: mol_type = other DNA
gtctcacgccatgcccgtgccaacctggactgactgtcacgatattgaactcaaggcaggtgtggcaaactcacaccaaactatgcagcacatgcccaggagttgtctgtcagctcagct

SEQ ID NO: 8103 - DNA, 120 bp, synthetic construct
  source 1..120: mol_type = other DNA
tgtaatctcttccacattgtaggctatgtttaccatacgtagcagaatgtgtttacatttcttggttctagtcatttgtattcttcgtgagtgtgagagtgtgtgtgtgcgtgtgtgtgt

SEQ ID NO: 8104 - DNA, 120 bp, synthetic construct
  source 1..120: mol_type = other DNA
tcacctggggacctggcgtaggcgtggaggagtctcccactgacttggccctgggtcaatgcccaaacatgcacaaggacgggactctcggcctcaatgctttaggggcccccagtcttc

SEQ ID NO: 8105 - DNA, 120 bp, synthetic construct
  source 1..120: mol_type = other DNA
tggagtttacaaacatgaataaggggtaagaaatgactcttgtcacatggcttacagtccagctgtgtgggccaccacagttcatatctttcaggatggggactggatgaggggaaagtg

SEQ ID NO: 8106 - DNA, 120 bp, synthetic construct
  source 1..120: mol_type = other DNA
attcagcatttatgtaaaacatatattattgagcacttatgtgatagaaaccgaggcaaaacagaaaataaaacagagttttattttgagagtttttttacagcttatcggctctgagag

SEQ ID NO: 8107 - DNA, 120 bp, synthetic construct
  source 1..120: mol_type = other DNA
agcaatcttcctttccatcaatctcaactctgttcaaaaactttcaatagttttatgtgacctaagaggtagctgcctccccaccctttcagcttgccattcaaggctgcataatttggt

SEQ ID NO: 8108 - DNA, 120 bp, synthetic construct
  source 1..120: mol_type = other DNA
tctattcctttttaatggactttggcgccttggcccactttccttctttgacagcactggtcctactccagagcattcctctagctagcaaagcagtgtgtggatgtgtgggtgtaggtg

SEQ ID NO: 8109 - DNA, 120 bp, synthetic construct
  source 1..120: mol_type = other DNA
cccctcacacgcctcctcggcaggagggaggccggcagcaagtctcagaaactcctttttcgtagtgccagggtgcagggaggtgggcagttttgcccttcaggttccgcgtttcttggg

SEQ ID NO: 8110 - DNA, 120 bp, synthetic construct
  source 1..120: mol_type = other DNA
gaacggaaagcagccccttctttttctgagcctaatctgaataaagatttttaccttcaccaaaaaactagtacatgaactacatctgttttcaaagaaaaggttaggaagatgatgagc

SEQ ID NO: 8111 - DNA, 120 bp, synthetic construct
  source 1..120: mol_type = other DNA
aaaaactgcaaggcgtgatttgaataaggatataagaaattttacatcattttctttatattgtgttcacagtccatagttacatgcttcctttcttgatgtctcagttcgaatgcctaa

SEQ ID NO: 8112 - DNA, 120 bp, synthetic construct
  source 1..120: mol_type = other DNA
gtgcatctggagtgtcatctgggaatttgtgtgttcaagaaatagccaggtgattcttacattaggaaagttttagaatcactgcagagtgaatctgggaaatcaaagtgtttgtttttg

SEQ ID NO: 8113 - DNA, 120 bp, synthetic construct
  source 1..120: mol_type = other DNA
gccaagatggactcattgttgcataaagacaggttggatctatgggtgttgcagaacctgtttctgggttaagagtagctctctcacccttattatatatgtttattcatatgatgaaag

SEQ ID NO: 8114 - DNA, 120 bp, synthetic construct
  source 1..120: mol_type = other DNA
gatgtttgaagaatctagaaaagcataaataaaatgtccacaatcatgctggcattaattttttggtatacgtctttggtttttttacccttagatttagaaaagctgttgatttatttt

SEQ ID NO: 8115 - DNA, 120 bp, synthetic construct
  source 1..120: mol_type = other DNA
ttgatttccattaccaggacaagcaaatataatttggagggaaaagaggggagtttccattaaggatgaatctttaagccgaaaagggccacagtgatgaactcttcagaggactgctct

SEQ ID NO: 8116 - DNA, 120 bp, synthetic construct
  source 1..120: mol_type = other DNA
gacataatgctgttgcatgcttaatggactagagtatactgtaaacataacttttgtatgcactggggaaccaaaaaatttctgacttgcttcattgtactgtttgctttattgaggtga

SEQ ID NO: 8117 - DNA, 120 bp, synthetic construct
  source 1..120: mol_type = other DNA
ccaacacaagattatggatcacctaaagagtagactaaaagtactattgtctagtaacttcaagtttgtaggttaactcactgtgaatcaaaagcttttaaaaatcttttgcgtggtcat

SEQ ID NO: 8118 - DNA, 120 bp, synthetic construct
  source 1..120: mol_type = other DNA
ctttctttcagttgtccagtgtacagaagcttactggaaggagtggccaactagttaaaggtttgacacctcaatatcaacaaaatgccaagtggatcattttgactctcacagcaatcc

SEQ ID NO: 8119 - DNA, 120 bp, synthetic construct
  source 1..120: mol_type = other DNA
taaataccatgtctttctggctgaaatccttgccaaaaccaggaagggccagtgtactgtgggtgatttttctaattcatttctttgtcatttgaagccttctgtggcttcatgctgctt

SEQ ID NO: 8120 - DNA, 120 bp, synthetic construct
  source 1..120: mol_type = other DNA
ctccctttcattgtctgggttggtataagtaaaaatccttgtttgaagttattaagccttcccacccatatgatgattagtttggttcataagctagagttagggcttggtaaaggctcc

SEQ ID NO: 8121 - DNA, 120 bp, synthetic construct
  source 1..120: mol_type = other DNA
gtcaatgggtgttagtcattagggcatgtgtatgagtggtagttctgagatacagcattggcagcccctcttgtccctggttttgtttttgataagcaagtcctggttttgttttaataa

SEQ ID NO: 8122 - DNA, 120 bp, synthetic construct
  source 1..120: mol_type = other DNA
gagctgaatgcattagtctcatctccaagatccaggtattgaaatttaacccatgcataaattgaatttttttctgaagtctttaataagagaaaaataaaaggaaaaactacacagtat

SEQ ID NO: 8123 - DNA, 120 bp, synthetic construct
  source 1..120: mol_type = other DNA
gggagaaggatatgaaaaaaatcatgtgagatagacgacagaggcttatttgaagaagctacaaagcaacaagtaatgccagtttaaaacgattacatgttaatgcaacaagtaaaacac

SEQ ID NO: 8124 - DNA, 120 bp, synthetic construct
  source 1..120: mol_type = other DNA
tggggcaacatgttacaagtagtgcttctggaaggttagatgcggttagaataaaatcattgccattttggggagctgggaaaatggatgtcttcagtctagtctaaaaagggatgactt

SEQ ID NO: 8125 - DNA, 120 bp, synthetic construct
  source 1..120: mol_type = other DNA
catttagttcgctctcagcttggtacaggtagggaaattgagcccccatgaagttgtgctttgcttgcagttaggggtacagacaggatttcaggtctcctgagtccctccactgcacca

SEQ ID NO: 8126 - DNA, 120 bp, synthetic construct
  source 1..120: mol_type = other DNA
ggagatactaaaacacagagaaataagagcatcattcaagaccacaaatgtggttattgttggaagatagttttgggatgggcttctgtgctagaagccagaacataaaaaactgattaa

SEQ ID NO: 8127 - DNA, 120 bp, synthetic construct
  source 1..120: mol_type = other DNA
tgagtggtgagtggtgggatgggaactggtagaaagtgttttaaaatagaaggaatctgactatctgtttagacagcataatgctactgattcagctaaaatataatgattgtttataga

SEQ ID NO: 8128 - DNA, 120 bp, synthetic construct
  source 1..120: mol_type = other DNA
taagctagcataaatatgtgggtgtgatagaggttttcattaggcctcctctcaacatacagtagttaggaatgaagtttagtgtctctccgtcctcctgtcatatgtgtgtatgcacac

SEQ ID NO: 8129 - DNA, 120 bp, synthetic construct
  source 1..120: mol_type = other DNA
ttacataagtgtatattgaattatctgtgcacctagagggtgatgggcactgtgagggatattaaaaaagagacacagtacagttcttaccctaggatcccctgcttggagtgggacagt

SEQ ID NO: 8130 - DNA, 120 bp, synthetic construct
  source 1..120: mol_type = other DNA
ttaggtttcttaaaatcagtgtgtatttaatgctttattcagatgagggggtgaaaaacctaacacatgtaaactaagtgaggtggggtttcagagataattcccagcctcacaattcct

SEQ ID NO: 8131 - DNA, 120 bp, synthetic construct
  source 1..120: mol_type = other DNA
ggcaggaaactaagctggcattatggtcacaggaaagaacagactgatttggagcctttcaaactgcagacctttgttactgaccgatgcttaatttggtttctgggttttgttagtttt

SEQ ID NO: 8132 - DNA, 120 bp, synthetic construct
  source 1..120: mol_type = other DNA
tacatgtaaactaatccaggctgctagtgagatgtgagggttggggtctggttttcatctgcttaagtgagaggaaactgtaggggtatccttcaaatggaatgttttctagttccatta

SEQ ID NO: 8133 - DNA, 120 bp, synthetic construct
  source 1..120: mol_type = other DNA
tctgttatttctgactgtcttacctattactcccctttcttcccatgtccataatgctgcttagcttcctggggtgtgaaggataattctgtacctcaggatgactattaggttgatttg

SEQ ID NO: 8134 - DNA, 120 bp, synthetic construct
  source 1..120: mol_type = other DNA
cttttagatcatggtgtctggctcttaaatgtcccccagctctggtgcacatttaacattatgataaggaactgggatgttccagacaactatccctaacttccttttaagagtttcagg

SEQ ID NO: 8135 - DNA, 120 bp, synthetic construct
  source 1..120: mol_type = other DNA
ctgtcttagctccctgagatgtatatgctgtgcctaaatttgtgttatagttttctcctttgatttgacattccttgataggcagagagcacttttctgtgctcatatgtcacatctcgc

SEQ ID NO: 8136 - DNA, 120 bp, synthetic construct
  source 1..120: mol_type = other DNA
tgacttagactaatgacaacaaaaagccagccatgtgaataccaaatttactagttctgtgaggatatttttttctctttctctttctgcctcaaagaatctgctttgcttcccctgcca

SEQ ID NO: 8137 - DNA, 120 bp, synthetic construct
  source 1..120: mol_type = other DNA
gtaaaatgcaaagagttgaggtcttctccacgcaagagctcgctgatgtcaatgaggtattgaggatggggccatctcctatttctgtggccagtactgagttttgttatccttccttta

SEQ ID NO: 8138 - DNA, 120 bp, synthetic construct
  source 1..120: mol_type = other DNA
tttggggtaaccctcccctaacttaaagctagagaattctgaaactgaggaggggatcctctgttaatcagtgagcactttttgatgagctgatagatgatatatgagagactatgtgtg

SEQ ID NO: 8139 - DNA, 120 bp, synthetic construct
  source 1..120: mol_type = other DNA
tggataagaattttggagtctttttcaactctgagtcagtgaatgccacataacttagtgactatatttaaatggttaatttacaattttttccctgcaaaggatactgtagtcactgtg

SEQ ID NO: 8140 - DNA, 120 bp, synthetic construct
  source 1..120: mol_type = other DNA
gccaccatgcctggccgcatgtgtcattttcttgggtgttatactgatcgtatatttgcaggtttgcttttgtgacagacttcttctgggggaaaaaaagtatccttctatctttttact

SEQ ID NO: 8141 - DNA, 120 bp, synthetic construct
  source 1..120: mol_type = other DNA
agtaaccatcaccacagtcaattctagaatatttttatacatcagaagaaaccctttacccattatcaattactctccattcctcctaactccctcccagccctaggcaactactagtct

SEQ ID NO: 8142 - DNA, 120 bp, synthetic construct
  source 1..120: mol_type = other DNA
aagtttgatatcttacacctgtggaaaagccttaagctctgttttaactgagagcaggtggggtgacttcatgactaccattaagaaaatataacctgttgggaaactgtttctgccttg

SEQ ID NO: 8143 - DNA, 120 bp, synthetic construct
  source 1..120: mol_type = other DNA
tgaattacatgaggtatttcctgtcaatctccttgaacattaattggcacagtgtaaacactatctattcttcattctgatgtttctaaattaacactaactaagcttatgctgtttcta

SEQ ID NO: 8144 - DNA, 120 bp, synthetic construct
  source 1..120: mol_type = other DNA
atagtggttttcctgttttcctcacatgtgaatgtcttcagtgcaaaacctgtcagaattcatttcctttgctaaaatgttttaaaataactcttacttcaagtaagtgcattaaaaata

SEQ ID NO: 8145 - DNA, 120 bp, synthetic construct
  source 1..120: mol_type = other DNA
actctgttagaaggaagcttgggtctttcgtgtttactttcaaaagggaaagtttatattgatattgagcaagttaaagcatgaaaatttattatttgatgtttgttgctgtgtttgagg

SEQ ID NO: 8146 - DNA, 120 bp, synthetic construct
  source 1..120: mol_type = other DNA
ttggaggcctttacacaaaagtgttttccctaaagggagaagagaaaagttgaatgcagaagtagaaaaaaaaattcatttgcacttgtagtatttatatctaaatattttatgttacag

SEQ ID NO: 8147 - DNA, 120 bp, synthetic construct
  source 1..120: mol_type = other DNA
aatttgtttacactattccctctgcttaaaactctcatcccagctggcaactcctaactgcttcaaagcctgcctcaagtatcatttcttctcagtagctttctcaattcctatgctctc

SEQ ID NO: 8148 - DNA, 120 bp, synthetic construct
  source 1..120: mol_type = other DNA
gtaagaccataaataaatcatatgagcaggagcttttggagtcagtcttctgtctgagcacctctaaccggttatgctaccttaaacaaattacttaacttctctctgtctcacctgatt

SEQ ID NO: 8149 - DNA, 120 bp, synthetic construct
  source 1..120: mol_type = other DNA
gggtactaggcctttattcaggaatgtaaaattaatggtatctggtatcaagttgtaagaaaaactcccccagattgggaggtaactgagtgatatgtgaaagaatcttcccgtctgaat

SEQ ID NO: 8150 - DNA, 120 bp, synthetic construct
  source 1..120: mol_type = other DNA
aaagggctaggacataaacattctttaaatccttttaagcaagggcttgaattctagaattttacagctcaaaaggctctcaggagtccatttactcaaactctgcctccagctgcatta

SEQ ID NO: 8151 - DNA, 120 bp, synthetic construct
  source 1..120: mol_type = other DNA
gtctatgcattcctttgacactgctggttcaggtgattcaaggacagttgtggcgccattagaaacttgctttgataccaagcatctagaaaatcttgcttgaaatcacaatattagggt

SEQ ID NO: 8152 - DNA, 120 bp, synthetic construct
  source 1..120: mol_type = other DNA
accacatactagttcctcaatacaagtatagcttaaataaaggaatgaaatcaaatagcacataagaagagcttgccaatttaaattattaggattgtcatttataatacaaaccccttc

SEQ ID NO: 8153 - DNA, 120 bp, synthetic construct
  source 1..120: mol_type = other DNA
aggctaagtctctatttttcatcccataaaaatctatttacatctctttcagagagagagagttttgaggaaagaaaactgaatttgatgaacaacggatctgatttaggatgccaattg

SEQ ID NO: 8154 - DNA, 120 bp, synthetic construct
  source 1..120: mol_type = other DNA
aacggctttccctttctgctgtctaaaggagtcctctacacttcagctcccgccccttcatagcaattccctcagccttctccgatcgtctaatttaaagcttctcctcttttaagacat

SEQ ID NO: 8155 - DNA, 120 bp, synthetic construct
  source 1..120: mol_type = other DNA
tcccgtttgggatttgatttgcagcatctttgagcctctacgacaaaaaaccgcgaagcacgcccagccctcccccggcaccccgaaaagcacccactccctcccggggacacagctggg

SEQ ID NO: 8156 - DNA, 120 bp, synthetic construct
  source 1..120: mol_type = other DNA
cggttctctgggtcaggtttccttgaaagacaactgaaatctgacaggtgtttggacatttgtttcagagattgaagaggagtccagacagaaaggcaaccttgggaaggtgtaccattt

SEQ ID NO: 8157 - DNA, 120 bp, synthetic construct
  source 1..120: mol_type = other DNA
ttcaccatataaggaaactgaggcttagagaggatgagaagcccttccaaggtcacacagccaaaccatggcagcttgacttcattcctttattcattaactatttattgagtgcttgct

SEQ ID NO: 8158 - DNA, 120 bp, synthetic construct
  source 1..120: mol_type = other DNA
tgcagggaaaaagcagttgatatgtagatttctggtagtaataaaattagcagttttaacctggtgtcagctccagaattgactttttggggaatctgggaaagttgccttggaagttgt

SEQ ID NO: 8159 - DNA, 120 bp, synthetic construct
  source 1..120: mol_type = other DNA
gacacatagtaagcactacaatgtttataagttgaattgaactgtcttctgagttgagtttggatgtgatagtgccatgatggcacgcttctgcatttctccccgactccagtaagaaac

SEQ ID NO: 8160 - DNA, 120 bp, synthetic construct
  source 1..120: mol_type = other DNA
aagcacagaaaacaaagggacttaagagcatgagctggccatgacaagccatgccataagctttaagaaatatgtcttgtttctgaagagttggctgttgccaactcttctccaaacatt

SEQ ID NO: 8161 - DNA, 120 bp, synthetic construct
  source 1..120: mol_type = other DNA
ttgatgggcctacaggtgaacttgtgactggatcactttaatcaggatgttttaatcaggataactattaaactttggacttccagtaagctcagagacttctagagttagaaaattccc

SEQ ID NO: 8162 - DNA, 120 bp, synthetic construct
  source 1..120: mol_type = other DNA
aacattttggagatcctgtctccaaaaaaaaaagatggaggtagttttttgtaatggcaagattgtacattagaagatagaaaagtaggttttgcatcttactagggaagatacatgtat

SEQ ID NO: 8163 - DNA, 120 bp, synthetic construct
  source 1..120: mol_type = other DNA
agtaggaggaaagaacagaggcagtgtgtcttccctcagtggagttcccacagcccccaccgtgcttaccgctcctgcatcacttcctacaccctaatacaatgatggttttatccaccc

SEQ ID NO: 8164 - DNA, 120 bp, synthetic construct
  source 1..120: mol_type = other DNA
taggcaagtgacaatgccacccccatccgcctttcattaaatctgtcattttcttttcttctaaattgggaatgttgcagagaaactgtgaaatagatgacaccccttttacgtgccaaa

SEQ ID NO: 8165 - DNA, 120 bp, synthetic construct
  source 1..120: mol_type = other DNA
ttggtgtttttccccattctgtgctttggtgaggagatcctgcgttttctttccgtttcctttgccagaaagagctccctgtggcaacatagaaaatatcaactcactgatttccccaga

SEQ ID NO: 8166 - DNA, 120 bp, synthetic construct
  source 1..120: mol_type = other DNA
atccaaatgagaacctatagagtatctattttttaggatttttgccatactggttccttgtgtttgcatgaaaaactgaaaattgactgtggagcttttaggcttgggttggaacaatat

SEQ ID NO: 8167 - DNA, 120 bp, synthetic construct
  source 1..120: mol_type = other DNA
gtcacttggtgactaccgattaattgatttgaatatatcaatgtctggcagttggaccaattactcagcttcccaatctgatggtgtggttgatagaaatgtttcctggtggcattttcc

SEQ ID NO: 8168 - DNA, 120 bp, synthetic construct
  source 1..120: mol_type = other DNA
attgcgtaatctcccagaacctcagtgttcttgttgctaaatgtgcacaaaataactggctatcttatagagacgttgtgaagttagagtgagtgaaggtgacatgcctagtaaggacct

SEQ ID NO: 8169 - DNA, 120 bp, synthetic construct
  source 1..120: mol_type = other DNA
gtagcccattggcttctcgtataggaatagtatagatttggcttattttattccttgcttattataatattattattcataagcataccttttcagttaccctcatgatttactatctgt

SEQ ID NO: 8170 - DNA, 120 bp, synthetic construct
  source 1..120: mol_type = other DNA
tgtttttttttttttttaggagggggttcaaatataaaatatacgggaaagaaatataatgaacctccatgtacccaacacccggattaaacagttatctcaattttgccagacttgttt

SEQ ID NO: 8171 - DNA, 120 bp, synthetic construct
  source 1..120: mol_type = other DNA
aatactctagtaagcaaggttccacctgggctcaggttaacttttctcctttgggccctgtgttctaccagcattccatttaactgaaaccctccctcacctcatcaagatcttatctgg

SEQ ID NO: 8172 - DNA, 120 bp, synthetic construct
  source 1..120: mol_type = other DNA
ataaggcattcatttccattacattttggatccagagaggaggcaaaggtaaactagctgtgtggacagtttgcatcagtcagtcagtcagatcatcccatgaccatggcatattttttc

SEQ ID NO: 8173 - DNA, 120 bp, synthetic construct
  source 1..120: mol_type = other DNA
gggtcccatgttttatgagtttctccttttctaaagaaacagttgagtaatagttttgctactcctctaacctaaattattcctgtcatgaggttagtgacttctgacaggcagaggtaa

SEQ ID NO: 8174 - DNA, 120 bp, synthetic construct
  source 1..120: mol_type = other DNA
aaacctttggaaattttaataatgaaacctacttaagaccctttgcttaagaagtctgaatcactgatcactgcaattactgccatggcagctgtagagcaatttaacaggataatagtg

SEQ ID NO: 8175 - DNA, 120 bp, synthetic construct
  source 1..120: mol_type = other DNA
tcttgaagtgtagaaagcacttttagaaaaagaagcaaggttaggctgagagaacaagacagatgaagttactcctctgagctggaaaagatcttgtgtcaaaggaggaagcctcagaga

SEQ ID NO: 8176 - DNA, 120 bp, synthetic construct
  source 1..120: mol_type = other DNA
taatgtccattgttagtttgtctgcttgtttagtacatctgctgttatctgttaccttctgattgcagccttgcctggaaacagggctggaccaaatgaaccccttaaaacagcaagatt

SEQ ID NO: 8177 - DNA, 120 bp, synthetic construct
  source 1..120: mol_type = other DNA
agtttaatgctttttccatggtgaaactaaaaagctgaaatatttggcataatgtagacaaattgtaccccgcttccttttgggaggatggttggtcatgaggaatgtaaggaagggtgg

SEQ ID NO: 8178 - DNA, 120 bp, synthetic construct
  source 1..120: mol_type = other DNA
aaaatttaggacctgccaaggagagtgggccgtggcaaatatctttggctttgggttgctattctgaggtgctgaactttaggatcgagtatgaacggaaaattgactagccctcataga

SEQ ID NO: 8179 - DNA, 120 bp, synthetic construct
  source 1..120: mol_type = other DNA
cccgcaaagacttattgcaacatggaaacctatgaacataggaaatgaatgatgccaggtcttattcataatagaggaatacaaattaaattgcaagtacagtatgtagtcatttttcac

SEQ ID NO: 8180 - DNA, 120 bp, synthetic construct
  source 1..120: mol_type = other DNA
gctttgttttgaagccctgaagaatgggagaatgctctgcatcactggagaacatttgactgcattcatctcccaacaagagtggttgctgggaggaatgagcagaaggagtggtgtgta

SEQ ID NO: 8181 - DNA, 120 bp, synthetic construct
  source 1..120: mol_type = other DNA
agagacgagatttctccatgttgttcaggccatctatcactctttacggccaatagtcacacccaaaattttggtgactttcacagtctggctattggataaatttggtttcggatcttg

SEQ ID NO: 8182 - DNA, 120 bp, synthetic construct
  source 1..120: mol_type = other DNA
gttttgtttctacatggtagcggttaccacagagagtttcaactgcatatctacaagggagtaacaccttgtagctatggaatgcctttcctctaacagttacaaagccaatttggatat

SEQ ID NO: 8183 - DNA, 120 bp, synthetic construct
  source 1..120: mol_type = other DNA
aactgaaatgaaagtgaaagagctgctgtacttttttctctaccaaagataatagttcctaaaagttttctctaaggttaaaaaaagattatgaaaactgttaggaggctaaagtcacta

SEQ ID NO: 8184 - DNA, 120 bp, synthetic construct
  source 1..120: mol_type = other DNA
tgtgtgtgtgcatgtgtgttggattgccaaagtttgaagccactagttttgttcaattcctatcactttctgtaccttctttatcgaaaagttaaaggatcaaagaacctatgggataga

SEQ ID NO: 8185 - DNA, 120 bp, synthetic construct
  source 1..120: mol_type = other DNA
ttcttaatttggtgaaggtgaaggaattcggggattctttttgttaaccaatcaacattgccagcctagcactaaaagattccactatgacagacaaccacatgaggccgtatctcagca

SEQ ID NO: 8186 - DNA, 120 bp, synthetic construct
  source 1..120: mol_type = other DNA
ttgaaaatataaattagagggagaggcaaaagcgtacacttcatttgcaagagtcatcccagggaagcaggaatggggagaaagggaaggagggagaacataacaagagattgcttataa

SEQ ID NO: 8187 - DNA, 120 bp, synthetic construct
  source 1..120: mol_type = other DNA
aatcatttttgtttgtccttctcactggtaacgaataggtgcttggtccctgcttgttgaactaaacttgaaacaatgtgccagtacttatgctaagctgggtcctgcacaaaatgaagt

SEQ ID NO: 8188 - DNA, 120 bp, synthetic construct
  source 1..120: mol_type = other DNA
aggagctgctggtcttcacatcctgcatctttagtttgtggtacaagttaattctaaattttggaccttgagaattctgtttcttaaacatctcaggcaagacctaggagctaaaattac

SEQ ID NO: 8189 - DNA, 120 bp, synthetic construct
  source 1..120: mol_type = other DNA
acaaggttgagcaacaatcatcactatcttaatttcaaaacagggaggtttaaatttgtcttgaatctctgcatgaaatatcaaccagaggtcaactctgattctcaggaaccttttaaa

SEQ ID NO: 8190 - DNA, 120 bp, synthetic construct
  source 1..120: mol_type = other DNA
gtcttctcttgtttttgttgtagagatccgtgctcagctcacagagcagatgaaatgcctggaccagcagtgtgagcttcgggtgcaactgttgcaggacctccaggacttcttccgaaa

SEQ ID NO: 8191 - DNA, 120 bp, synthetic construct
  source 1..120: mol_type = other DNA
ctatagcagagattttcaaccctggctgcatattagaattccctggagaactttaaaaaaaatacagaaatctgggccccactccagaccaattaaatgagaatctctgggagtgaggcc

SEQ ID NO: 8192 - DNA, 120 bp, synthetic construct
  source 1..120: mol_type = other DNA
aaggtgcacgctttttggcttggtctttaagcccctctacatctggaaagcctcaaacaggtttccaaccttatttcttgtttctgttccactatacccgagccaaacagaacattcact

SEQ ID NO: 8193 - DNA, 120 bp, synthetic construct
  source 1..120: mol_type = other DNA
gcatactgctgaggtaagaggttatgactggggatagctagcagaatcttcggagtaaaagtgattgtgggagagatgaaagtatatgaattcagggaagagaaagaggagaacaaagag

SEQ ID NO: 8194 - DNA, 120 bp, synthetic construct
  source 1..120: mol_type = other DNA
tttccatttccactcatttttgtgttgcaaaagataaccaagtgttaaaatgtgtgcacagcacaagcattgctgtgcagagacaaccatcctgctgaaacagaattggtacctggcagt

SEQ ID NO: 8195 - DNA, 120 bp, synthetic construct
  source 1..120: mol_type = other DNA
tggtttgattaagagcagtggtaaagtattatgcgagggtaggaagcctttctagggaagatgttcttgcattttctttggctccttgaagagcataaatgtattcctatttgttgctga

SEQ ID NO: 8196 - DNA, 120 bp, synthetic construct
  source 1..120: mol_type = other DNA
gatgtggaagaagtggacaaaggtagatgagtttgtattgtggagggccttgactcttgattagggatttggctctatacaatagacactggaaaccactgatggtttaaataggtatga

SEQ ID NO: 8197 - DNA, 120 bp, synthetic construct
  source 1..120: mol_type = other DNA
gtttagaagaacaaaggggaaacttcctttgtatcatctgtgatactcagattacagagtgtataaaggaatttaaatgatatatttatttgtgtatcattgagtatacattttgggaac

SEQ ID NO: 8198 - DNA, 120 bp, synthetic construct
  source 1..120: mol_type = other DNA
aagaaggccatttgggaatcagcaagacagggtgatccagtctttggaagagagaaagaattcagttaaaagttctttgggaagctttgtgactttgtgtgggaaaaaccagagctttga

SEQ ID NO: 8199 - DNA, 120 bp, synthetic construct
  source 1..120: mol_type = other DNA
aggcaaaagctgtgtcatcttattgggagctgactgtgttaagtgggagggtttacaagataagaagaaaagacagtctctgccatacgtgtttttataattgaaatgggggaaatcggg

SEQ ID NO: 8200 - DNA, 120 bp, synthetic construct
  source 1..120: mol_type = other DNA
ttattatatgtgaatcagtaataaacacttgacttcattctcatcgctaatgaccaataggttctctgcaggtttggggtcacaaagaggtgtaggatcctgttctttccctcaggaagc

SEQ ID NO: 8201 - DNA, 120 bp, synthetic construct
  source 1..120: mol_type = other DNA
acagttgtgtctgctaggtttctccaccatgaagttgttctataagctttgtaattaatgtatatattgtggagagatactttgagaccatgtaaatatcagcttacccttcaactctta

SEQ ID NO: 8202 - DNA, 120 bp, synthetic construct
  source 1..120: mol_type = other DNA
tcaagctagggctgttggttgtttttctagatgtttatacccttttaaaatcttccatctaggactagggaccttatgtccttatgtccttttcatatagagaaggtaaggctgggacct

SEQ ID NO: 8203 - DNA, 120 bp, synthetic construct
  source 1..120: mol_type = other DNA
agatacacactggagcagctgatttggcaagattggtggaggctgaacatattaactagtcattaaatgaatcatggtctttctgtcctcaacatttacaggattgctttggctctggca

SEQ ID NO: 8204 - DNA, 120 bp, synthetic construct
  source 1..120: mol_type = other DNA
ttacccttgctatggtgttttagtttaactgagtgaatgagtcagctcaggcctttgatgtgatcacagcctattttggggggctttcagggagcatatttaatacctaagtgcatttct

SEQ ID NO: 8205 - DNA, 120 bp, synthetic construct
  source 1..120: mol_type = other DNA
ccacaagaatcttattttcatacagtccttcccccaaacctgattataggggacaatttaggctattttgagaaggtgggtctaccactgcttgaatcctttctaatcatctgtctaggc

SEQ ID NO: 8206 - DNA, 120 bp, synthetic construct
  source 1..120: mol_type = other DNA
ttggattcctttctgtcaacctcagcacacagttcccagtgtggaatgcaggactgattgttctaccttgtcccttagggaaaggacagtgggagattaaaatctgctctcctgttggta

SEQ ID NO: 8207 - DNA, 120 bp, synthetic construct
  source 1..120: mol_type = other DNA
gaaaaatactcctaggtattttgtctgctttttagggattagtgtttgaggaggtttgcagctgctcagcacattcctaagggatgcagaccctttcctttaaaggcccaagtattatac

SEQ ID NO: 8208 - DNA, 120 bp, synthetic construct
  source 1..120: mol_type = other DNA
ctgatgtgttctgaagtccaagtaagtatggcatgattatttgttaatagttactactatagaattggaaaagccttctaagttgaacttcatggtttacaaatcacaagtgcctggcct

SEQ ID NO: 8209 - DNA, 120 bp, synthetic construct
  source 1..120: mol_type = other DNA
tgtgttcttgattgtatgggacatgagatcatggctcaataaatgaaatcaaaacttccttagatgtgttctgtggaactccagagttttcagtaacattttaatggcatatgtctccaa

SEQ ID NO: 8210 - DNA, 120 bp, synthetic construct
  source 1..120: mol_type = other DNA
tccagatttcactagatctggaattaataccccattttttttctgtaattaccagcctgatcaaataactgatttggaatcttccatctacctaattgcatccgtgaaggtgctttccct

SEQ ID NO: 8211 - DNA, 120 bp, synthetic construct
  source 1..120: mol_type = other DNA
aatattatgtttgtgagatttattcatactgttgtgtatagttgcagatcataggaatttctcttgatctttgtaactttggatcaattaaattgtagttgattagagacatgcccaggg

SEQ ID NO: 8212 - DNA, 120 bp, synthetic construct
  source 1..120: mol_type = other DNA
caaatctgatctatagtgatagagaatagatattgattgccttggggccaggatggggatgaaggattgactgctaagggacacaagggagtttgtagggtttttatagcctacattata

SEQ ID NO: 8213 - DNA, 120 bp, synthetic construct
  source 1..120: mol_type = other DNA
atggtcataaataagaagaggagaagtggtgacccacaatgctggtatagttgaatgtccctggtaagtgctgtggattgaatgaatggaggaaaagaatggttttccaaaggttgtgtc

SEQ ID NO: 8214 - DNA, 120 bp, synthetic construct
  source 1..120: mol_type = other DNA
gtgaatactgcatgcacagcattatgctgctaggtgcttaaaagagcttgaaaatcaaattgaggagtaagatttgcctcccaagggagcttggggtttttggtttatttaggtctctca

SEQ ID NO: 8215 - DNA, 120 bp, synthetic construct
  source 1..120: mol_type = other DNA
ttcctcaatttgagaaaaatttttggcaaatatttttttctgtcccatctctccttcctgttttgctttgttatcaattgcatgtatgttagactacttgattcagtcccacagcttgtt

SEQ ID NO: 8216 - DNA, 120 bp, synthetic construct
  source 1..120: mol_type = other DNA
ttttaacattgacattatctgtgggtctgtttattgattttcctcttgacttttttttacatgcctactaatcttttattgcatattggacatcatagataatatgtcatagaaactcta

SEQ ID NO: 8217 - DNA, 120 bp, synthetic construct
  source 1..120: mol_type = other DNA
ttacttgtgttgttaagcttctgcccgtatcccatatttcctgtaaattggaagttggttctaaaggtccaagtggattcaagtgacttagaatgcataataagtgatgttagtacttca

SEQ ID NO: 8218 - DNA, 120 bp, synthetic construct
  source 1..120: mol_type = other DNA
gagatgagtactggttttatcatccccatttgtagataagagcatgggcaaagggtttaagcaatttactgaagattatacagctggttgatgggagaaatgggattcaagcctaggcag

SEQ ID NO: 8219 - DNA, 120 bp, synthetic construct
  source 1..120: mol_type = other DNA
acccttcagcttagggttttttcaattgttaaagtaatactgagcttcagttaaggctatgaaagaaaagaaaaaattttaaaaagtagtaacgtgtttttttcaagatattgtgggtaa

SEQ ID NO: 8220 - DNA, 120 bp, synthetic construct
  source 1..120: mol_type = other DNA
ggctcagtggagttctttcaccatgctgagtttcactttcctcatctttacactaatgaaattactcataccctcactgttccttctcagaatgctataggcatcagtaaaacctgggaa

SEQ ID NO: 8221 - DNA, 120 bp, synthetic construct
  source 1..120: mol_type = other DNA
ttttaggcagggcaatgaaatcttgaaaaccatgatttccagtggcattggcagcagtactcagtgtggtttagcatggaagaaactatataggagcctgctacaataattcagagggat

SEQ ID NO: 8222 - DNA, 120 bp, synthetic construct
  source 1..120: mol_type = other DNA
agaatctgagagccaatgagaagtaacttgccttagtttacccagttaggtagtagttgagatgtgactgaaactaccaggtcttctaaattctactcactgctctgtccagtacatacc

SEQ ID NO: 8223 - DNA, 120 bp, synthetic construct
  source 1..120: mol_type = other DNA
aaaagaattacccctgtgcttaaggccacacagatttttcaaacattgatatatcagcattggtccttctgatgaaacacaagatgaggttttccctgctgagtgtcaggcagtctgtct

SEQ ID NO: 8224 - DNA, 120 bp, synthetic construct
  source 1..120: mol_type = other DNA
tggtttggactaatctctctaagatttatctctgaaattctgtaattaagtgagggaatttctatgaaagtgcttggcaaaccattgggctattatgatagttctaagtggaaacagtat

SEQ ID NO: 8225 - DNA, 120 bp, synthetic construct
  source 1..120: mol_type = other DNA
ctctaatctctgacagttcctctgtcttgctttgtctttcatggttttaaagagttctggtcagttattttgtagaatgttcctcaattttggtttgtttggtttcctcatgattggatt

SEQ ID NO: 8226 - DNA, 120 bp, synthetic construct
  source 1..120: mol_type = other DNA
caatccttttgcttcatgggagctgctttccttgaagaggcttctgccattttagaaaatattactgagtgtcaaaaagctgagcagagtgtttaatagacttgtagggctagcaggaca

SEQ ID NO: 8227 - DNA, 120 bp, synthetic construct
  source 1..120: mol_type = other DNA
gaaggagagatggggagtgactactaacaggtttgagttttcttttggcatgattaaatattcgggacttagtggtggtggttgtacaaccttgcaaatatactaatagccactgaattg

SEQ ID NO: 8228 - DNA, 120 bp, synthetic construct
  source 1..120: mol_type = other DNA
aactagagtgtatgttgcttgtaagagaacagatacactttaaatataaggataaagaaagatttaaagcaaagtgataggaaaagatagctacaataaaatcaggccaggtagattcct

SEQ ID NO: 8229 - DNA, 120 bp, synthetic construct
  source 1..120: mol_type = other DNA
cacacctgtctcagtgaatgattaaacaactagaccaaaaaagtcagtaaaaatacaacaaacttgacctaaatgacatatatggatactgcgcctgacaactgcgggtagatacacatt

SEQ ID NO: 8230 - DNA, 120 bp, synthetic construct
  source 1..120: mol_type = other DNA
ttagttcttgtcattatgtgaaagcatagtatttaaactttgatctcattgattcagcaactgattattttatggccactgtgcacaaagcaatgggctgggtaccacagaggattcaga

SEQ ID NO: 8231 - DNA, 120 bp, synthetic construct
  source 1..120: mol_type = other DNA
aaataaatgtagtgagttatgaccaatataaaaaaatagaaaaggccaggcacagtcgctcgagaatataatcccagctactctaagaggctgaggtggagggatctttaggccaggagt

SEQ ID NO: 8232 - DNA, 120 bp, synthetic construct
  source 1..120: mol_type = other DNA
aggcaaaagcacctctggtgtccctgttgtggtatctcctagcctacctctctataaaagttttgcaattaagtatatttgtgttttatacatccttgggcttctcatagtttaaggtcc

SEQ ID NO: 8233 - DNA, 120 bp, synthetic construct
  source 1..120: mol_type = other DNA
cacccccaacttggaaagcacatgagtgctgatctaaataactagagaatcggtaacaagtaacctccctattgagaacaggtctgaaacctctttcataattggtgttctttgggaaac

SEQ ID NO: 8234 - DNA, 120 bp, synthetic construct
  source 1..120: mol_type = other DNA
tgaaacagagaacgaatggccttttatcatctgtgaaaggagagacactggcaatttcctgcctctggcctagtgtcagaatttctcctgattgctagaggctgtattgcacattttaag

SEQ ID NO: 8235 - DNA, 120 bp, synthetic construct
  source 1..120: mol_type = other DNA
tctctcttctgtttcccaattaaccttcattcctctttccttgcagagtaaagaagtcggccagcagctccaagatgatttgatgaaggtcctgaacgagctctactcggtaaatcagat

SEQ ID NO: 8236 - DNA, 120 bp, synthetic construct
  source 1..120: mol_type = other DNA
ttacttgcttatttgctgcgttttttcttttcttttcttcctttgtttttttttttaattcacagaacaggcagtgatgacatgcatgacaggcatttgggatcagatgttgctgatcca

SEQ ID NO: 8237 - DNA, 120 bp, synthetic construct
  source 1..120: mol_type = other DNA
ttatttcttctggagattaagataggtttaggactggtctgaataaggcaccatgggattacggtgactaactgtccctctttgcctagtactgaagagtttcctgggacatgaaattgt

SEQ ID NO: 8238 - DNA, 120 bp, synthetic construct
  source 1..120: mol_type = other DNA
aaaaacccagcaaacccccacaggaaggagtgtacatggaggcactgaagccagtgtggattggctgagtatgaagagtcaaggaagctctagaattgagaaaaaagaggctttgggaca

SEQ ID NO: 8239 - DNA, 120 bp, synthetic construct
  source 1..120: mol_type = other DNA
tttaagcttcagcttctaggtacctcagttttctcttgagctggaaggcactaataaagcttctccagtatttacccagaagagagattcagtgtcattcagtcatttgggcaaccactt

SEQ ID NO: 8240 - DNA, 120 bp, synthetic construct
  source 1..120: mol_type = other DNA
gaggaaatgttggctcagttcacatattgctttcctgtgctttggagtggtctttaatctgtgtttgctgaaccaaacacttctggatttttcccttaggggtgtgaggatattgcttca

SEQ ID NO: 8241 - DNA, 120 bp, synthetic construct
  source 1..120: mol_type = other DNA
ccttgaatctcattaaacagaattagaacccaatttaaggcagatgcgcatagggagtagcaacacaattgtagttcttgaatacactgtacttttatcttttagagaacaagcccccct

SEQ ID NO: 8242 - DNA, 120 bp, synthetic construct
  source 1..120: mol_type = other DNA
tcctcaggggaagagctcctcattgttgggagagaggcctgttctcagcataaggaagagaatccattctttcttatgcacaatttctgctatttatctcgcatttggtaaaaattcaga

SEQ ID NO: 8243 - DNA, 120 bp, synthetic construct
  source 1..120: mol_type = other DNA
agggagaagccacgtgctcagtattggggtaaaaatggattatagtagttctcaccctagaggtagtcataggctgtaagacaacatttttcaaaccattggtcagatcccttaagaaag

SEQ ID NO: 8244 - DNA, 120 bp, synthetic construct
  source 1..120: mol_type = other DNA
ttcccctacaggtatatagatagtcaagactctggagaacctcttccgaatctgcctggttggctagaggtgtagaggagccaggggcacattgtgactcagaccctcactcattggcac

SEQ ID NO: 8245 - DNA, 120 bp, synthetic construct
  source 1..120: mol_type = other DNA
acttcactgaacctcagctttcaagcctggaaaattaagattataccaacctcattggggttattatgaggattaaaatgtagaatgtatataaagcacttagcacatggactgacgtat

SEQ ID NO: 8246 - DNA, 120 bp, synthetic construct
  source 1..120: mol_type = other DNA
gtgatcatgatgagaggaaaaggctgtggggagagttaatttgatgcttgcttgtgcaatgaaatggcaatcaggcagatggccttactctatgcatagattcttctttgaggtttcttc

SEQ ID NO: 8247 - DNA, 120 bp, synthetic construct
  source 1..120: mol_type = other DNA
ggtagggaatgctgtgatcttttggcgtttggcagagttctgaataatcttattctcctgaagttagaagactgtgatgaagtgtatagttttgtttgggtattgaataaaaaagaatgg

SEQ ID NO: 8248 - DNA, 120 bp, synthetic construct
  source 1..120: mol_type = other DNA
aatcaaaccatttacagttcatttccattgctgtggcttaggaaatgtcagtgtctgaacagatggagaagtgagatggcagcatgtgcaattagaattgggggaaggggtgtcaccaag

SEQ ID NO: 8249 - DNA, 120 bp, synthetic construct
  source 1..120: mol_type = other DNA
aaaatgtaaaaatgcatacatgcactagtgcatgaatggcagccaggatgagtggaattggagaagcatcacacacacagtgacttttgtgtttgatcttgaagaatgagcgaaccaggc

SEQ ID NO: 8250 - DNA, 120 bp, synthetic construct
  source 1..120: mol_type = other DNA
ttttgcccctccgccgccgcggctttttgcccccaccttgcctcggctttttgaccgccgcggctttttgccccaccaccgacacagctttttgcacactcgtcgccttggctttttgcc

SEQ ID NO: 8251 - DNA, 120 bp, synthetic construct
  source 1..120: mol_type = other DNA
tctcctaagttttatagctagtgagggaaaaatggacagcagtttagagtcagggaggtagaagaaaaccctaaactaagatgagaagcctgattgaagttcagattcttccaactctct

SEQ ID NO: 8252 - DNA, 120 bp, synthetic construct
  source 1..120: mol_type = other DNA
cctacctcccctcactccgtatttgtgttgtggttagttgtcttctagatcatggtttatatatcatggtcacttcctcactaaagttaaacaatatagattattcttaaccagccacat

SEQ ID NO: 8253 - DNA, 120 bp, synthetic construct
  source 1..120: mol_type = other DNA
tgtttacactattccctctgcttaaaactctcatcccagctggcaactcctaactgcttcaaagcctgcctcaagtatcatttcttctcagtagctttctcaattcctatgctctcttgc

SEQ ID NO: 8254 - DNA, 120 bp, synthetic construct
  source 1..120: mol_type = other DNA
ggttacaacacacacacacacacacacacacacccaaaaaaccaaatcgcaaaacaaattattccatactcattccattggttcttttgatggccttctgtcagtgttaatggttggtgt

SEQ ID NO: 8255 - DNA, 120 bp, synthetic construct
  source 1..120: mol_type = other DNA
aattcactatttacagagaaggtcctagggaacaggataacttatttaggtttagctctcataatacaatatccataatggctttagaagaatgtaaataaataacattggtaaacagcg

SEQ ID NO: 8256 - DNA, 120 bp, synthetic construct
  source 1..120: mol_type = other DNA
cgaaactttatatgttaatattcttatgtaaaccatagtgttagcagtaaaaagagtagctattgaagaatgtactgcaaataaaattacctaatattatccatctaggacataaacttt

SEQ ID NO: 8257 - DNA, 120 bp, synthetic construct
  source 1..120: mol_type = other DNA
gtccacaggcagagctttaaactgaactttagggccaggttgcagcagtcactataataaacaaaagaataatcaaaaacttcactgagaaagaatagtcagatttcatattgaagaatg

SEQ ID NO: 8258 - DNA, 120 bp, synthetic construct
  source 1..120: mol_type = other DNA
agggatgtgtagtgtgacattgttgaaacagtagaaataattaactgtttaccttgactgagggagatactggaatctaatctggcaagaatttagcatgtatctgatgctggtagggat

SEQ ID NO: 8259 - DNA, 120 bp, synthetic construct
  source 1..120: mol_type = other DNA
ctttcctggggcctccctatttcctaagatacaacaatattgaaattgggccagttaatatccctacaatgacctctaagtgttcaagtgaaagagagtggcatgtctctcactgtaaat

SEQ ID NO: 8260 - DNA, 120 bp, synthetic construct
  source 1..120: mol_type = other DNA
tacacactgggaaaccaaaaaattgtgtgacttgctttaattgtgatatttgcttgctttattatggtggtctggaattgaacctacaatatctccacttgtgcctgtacaacatacttt

SEQ ID NO: 8261 - DNA, 120 bp, synthetic construct
  source 1..120: mol_type = other DNA
ggtaccattccacctaaaatatgtcttctaattataacttgcttgaaaggcaaacaaatgaaaacaaaagttgtgtttggactaggagtgccagttatttgtaagactatattgcaaaag

SEQ ID NO: 8262 - DNA, 120 bp, synthetic construct
  source 1..120: mol_type = other DNA
gttgcagcccactgaacctttctctatgctttggtgtcaatatccatcttccaaacccagagctatccagaatagtgccacaaattaccattttaaacatgcgatgtccttcagtttaca

SEQ ID NO: 8263 - DNA, 120 bp, synthetic construct
  source 1..120: mol_type = other DNA
atacgatgtacacacacacaaatgtaaaatattaacttagaatttaaaaaaattaaaaagattttaaaataacacatttatctctgcaataaatgagagcctttggctttgctgttagac

SEQ ID NO: 8264 - DNA, 120 bp, synthetic construct
  source 1..120: mol_type = other DNA
tgaaacaccgaaatgataacctccttgttgactcccacagatccaagccataagtgttcccatttagttaaaagctaccgttgcccgccactagcatgacttacttggtaggagggatgt

SEQ ID NO: 8265 - DNA, 120 bp, synthetic construct
  source 1..120: mol_type = other DNA
gttggttttcgctccctcttccgcttttcctgcctctccaacccggtatcagtttgaattgccagcgccgcgcaccgattggaagaactagagttagccccagtccctcattggaaggct

SEQ ID NO: 8266 - DNA, 120 bp, synthetic construct
  source 1..120: mol_type = other DNA
cgcagcgcagccggcacccagccgcctctccctttcctccgcacacgggcagccgcggtccaccgtagggcagtcgtcgttggcatcgcgcgtaatcatcggccggcctcctccagtgtc

SEQ ID NO: 8267 - DNA, 120 bp, synthetic construct
  source 1..120: mol_type = other DNA
actgcgacctcaccgacctcctcccatccccagcctgggattgggtgggatatctgggatctctgagcttgggtgtcaaaaaaatattgggggtggcatttatagtcactatcgtcccta

SEQ ID NO: 8268 - DNA, 120 bp, synthetic construct
  source 1..120: mol_type = other DNA
ccacaccatgttgtgcggaaggacttccactccccgcctgtgtcgttgatgtcagaccccaggccagcctccgggcgctgcagttctcccggctaatgctgaggctgcggctccggctct

SEQ ID NO: 8269 - DNA, 120 bp, synthetic construct
  source 1..120: mol_type = other DNA
gcactatattaaaacatgagatttgcaatggcattggcaccaaaagtccattgccaccttgggtgtaccttgtacctgcctggtctctggtcggcctgcatacaatcagagatcagagaa

SEQ ID NO: 8270 - DNA, 120 bp, synthetic construct
  source 1..120: mol_type = other DNA
caggcctgtttttgtaaacaataggccactggcctccatgtcctgtccagatgcattgcatttgctcttggaatcccccctgcagttttaaccagatatgtctttttttttttttttttt

SEQ ID NO: 8271 - DNA, 120 bp, synthetic construct
  source 1..120: mol_type = other DNA
tataaaatatttagatataactactacaagtgcaaatgaattttttttttctacttctgcattcaacttttctcttctcccttcagggaaaacacttttgtgtaaaggcctccaaaatat

SEQ ID NO: 8272 - DNA, 120 bp, synthetic construct
  source 1..120: mol_type = other DNA
aaagtgagtcagagtaggaaaagccagactcaagcataacagaagggcagagcctgtcaaaccccaaaattaaagggtaaatttcaacacaagtagaagtggttcaaaagctaagggcat

SEQ ID NO: 8273 - DNA, 120 bp, synthetic construct
  source 1..120: mol_type = other DNA
tctttcaggttctatctccattttcccctcaattcctccccattctgctataataaaaaaaaattctcacctccggaagatcccgcctgtgcctccccgccagcctttcaggaggtctgg

SEQ ID NO: 8274 - DNA, 120 bp, synthetic construct
  source 1..120: mol_type = other DNA
cgcttgtttgagcttttaaagtattcatgcattgtcaatcactagataaatggggaagattttatcttcctggagtcctaagccactaatttgtgacttatccatgtcaagggccagacc

SEQ ID NO: 8275 - DNA, 120 bp, synthetic construct
  source 1..120: mol_type = other DNA
aatcacaaaactgagggaaagcatcaggccgttggttggtaacagtggtgaagcaagtctttccaaagggctggtttgttgttaacccttagggaaaaaaaaagcctttttttttttttt

SEQ ID NO: 8276 - DNA, 120 bp, synthetic construct
  source 1..120: mol_type = other DNA
cagagctgaaagcactgtcagtagcgcagactctgataagagtgaggtagattgtggccagcgtgccaggtaaccgtctgcagttgcaataacagaattagaaggtgggggtgtcatgga

SEQ ID NO: 8277 - DNA, 120 bp, synthetic construct
  source 1..120: mol_type = other DNA
aggccattttcagttgctctacattcccacacacttaatattttcagtcttttaaactacaccaggtgtgtagtgatatcctaaaatttggttttctcatgcctaatgttcatttagata

SEQ ID NO: 8278 - DNA, 120 bp, synthetic construct
  source 1..120: mol_type = other DNA
tgatgggcaaagaaggtattcatggcaatttcatcaacaagtaatgttatgaaatggcctcccaccttcagcgttcccagtactgacctcctttgttccttccactccaccgctccccat

SEQ ID NO: 8279 - DNA, 120 bp, synthetic construct
  source 1..120: mol_type = other DNA
ctttcacttgttattggacatttctatcattccgcgtttgggctattatgaagaaactatcatgaacatccatacgtggcaggccaggtctcactaacacaggcctccgtaacaactgtt

SEQ ID NO: 8280 - DNA, 120 bp, synthetic construct
  source 1..120: mol_type = other DNA
acatatgtccagaaaatgatttatacaagaatgttcatagcagttttattcataataggaaaaactggaaacattcaaatatctatcaatacaagaatggatcaataaactgtgatacat

SEQ ID NO: 8281 - DNA, 120 bp, synthetic construct
  source 1..120: mol_type = other DNA
ttcaaatattattatgtgaaaatgtatcatctcaattttaatagtagatttttaaaaattctttttcttgtgctcaccagacaaggtttggtaaaaaataccagtcaccagcacagatga

SEQ ID NO: 8282 - DNA, 120 bp, synthetic construct
  source 1..120: mol_type = other DNA
tattggagacagatgcactactgtaaaactatatgctgtttccacggggtacaaccccttcttcctcctctgaaacacattattcctctggcccactgttgccagagacactgagtcttg

SEQ ID NO: 8283 - DNA, 120 bp, synthetic construct
  source 1..120: mol_type = other DNA
ggggggtaagaggggaagagcaaggagtgggatgcagatctagctactaaggaaaagtcctggagagaacactctcctctcctgaggtaaaatcacttccacctgacgacggcactgcag

SEQ ID NO: 8284 - DNA, 120 bp, synthetic construct
  source 1..120: mol_type = other DNA
agaattcgattctttctgttagggaattatgagtgtgtgggtgtagttaatgcttctttggaatctcatctactggtctatctggtctatctgtacacgtatattctacaggctgtctcg

SEQ ID NO: 8285 - DNA, 120 bp, synthetic construct
  source 1..120: mol_type = other DNA
cataaagttttcctggtaattaagtatacctaagaacaatgaagtataaaagagttactgccttgacaggaagattgtaaaaattgtaaaaaagataaataaataaagagtcaagactgt

SEQ ID NO: 8286 - DNA, 120 bp, synthetic construct
  source 1..120: mol_type = other DNA
ccatccagacggcatccgtgcgccacgcctcggcccgctcctggcgccacaggtcgcccgtcccgcgttcccaaaagcaccgcgttcactcagatgctcacgcagcctcgcgaccctcac

SEQ ID NO: 8287 - DNA, 120 bp, synthetic construct
  source 1..120: mol_type = other DNA
agaaataccaatggctacagatccagcaaaccccaatacaatcttgctctctctaggcaaaggatcagcaaaggggcagtctagcaagacaagacacatatacgatcatcagtttcctca

SEQ ID NO: 8288 - DNA, 120 bp, synthetic construct
  source 1..120: mol_type = other DNA
catcataccaagaactaggaaaatctcatactgaatgaaaatagacagcaaatacacgctggcaatgagatgagagaggtgttgggattgtctgacaaagagtttaaagcaggcaagcct

SEQ ID NO: 8289 - DNA, 120 bp, synthetic construct
  source 1..120: mol_type = other DNA
ctgcttcagtaattagatgcaggtttcttctctcttctttttgagatgtaaagaagacacaatagactcatggaacttaaagaactagacgccagctaacaaaacatgctatccaggctc

SEQ ID NO: 8290 - DNA, 120 bp, synthetic construct
  source 1..120: mol_type = other DNA
cgcacatacgccaattagtagagtggaagagggaaaaattgccaaggaactatgtttaattttgttcctttcgcaaaccagacaccataacagaaaaattttaggaacatgtgcatgttc

SEQ ID NO: 8291 - DNA, 120 bp, synthetic construct
  source 1..120: mol_type = other DNA
atgcatttctttgacaaaataaatgttttctttaaagaactcttgattgatcctggaccattgtagaaactgaagtcctatcaatgcaaaaaaatatgacaacatgagctgcttatcatg

SEQ ID NO: 8292 - DNA, 120 bp, synthetic construct
  source 1..120: mol_type = other DNA
tccccatgcttcttcatttgaccttccctgactccctgatgaattttagtttgaatttttgctatagtccagaagttaatttaaaagatcttaaaatttccacctgcctagatattactt

SEQ ID NO: 8293 - DNA, 120 bp, synthetic construct
  source 1..120: mol_type = other DNA
tggcggcggggtgcaaaaagccgcagcgggcagaaagccgcggcgggggggcaaaaagccgcggcccgcaaaaagcagcggcggcgggggtgcaaaaagccgctgcgggcaaataagtgc

SEQ ID NO: 8294 - DNA, 120 bp, synthetic construct
  source 1..120: mol_type = other DNA
cctctagagagtgttcaacaaactccttagataatgaagcttggggcagcaacacatccctcattatagtcagaaagttctcttaacatgtgagccaggttattgcgtgcatttatgttt

SEQ ID NO: 8295 - DNA, 120 bp, synthetic construct
  source 1..120: mol_type = other DNA
agatttctttaaaaaatattagcaaatcattagtgttcttactggagaaagggcagtgttcaaagaagaattaaacaaatcattccagttgcaggaaaaattcaatttactgcatgcaga

SEQ ID NO: 8296 - DNA, 120 bp, synthetic construct
  source 1..120: mol_type = other DNA
aatgtcctggatggtttgcagggtggcctccattgtcttctttacctgccacgacaagggccaacaggatgcatgaagggtgggttgttaaacagcaggtgatggagaagcttgaagaga

SEQ ID NO: 8297 - DNA, 120 bp, synthetic construct
  source 1..120: mol_type = other DNA
gcaaaagtttcaacagggaaactaagagtgtggctttgagcctcctaaggaagaaactcacctcttcgttttcaatctttagagtggataagcgagactgcagttgttggcatctctgta

SEQ ID NO: 8298 - DNA, 120 bp, synthetic construct
  source 1..120: mol_type = other DNA
taaacacaccctacagggctgtgaggtggttaggaggaagaagactcataaggataaaatgacattatttaattaagcgctatttcataaacatgagaagaattgagagttaaagagaat

SEQ ID NO: 8299 - DNA, 120 bp, synthetic construct
  source 1..120: mol_type = other DNA
gcactatactataaaaagaagtcggaggctagtccttggtcaatgtaatggcatcaacaaaaataacttcttttcacttatcctcaatgccttatgcacacatttggcttcagaaccact

SEQ ID NO: 8300 - DNA, 120 bp, synthetic construct
  source 1..120: mol_type = other DNA
ctttgcatcacatatttttaaaaatgggccagatgtcagggggagctggataccttcctgacaggaccctaatttgcgcataaccttggacaagtgagtctcgtagtcctctggaccttg

SEQ ID NO: 8301 - DNA, 120 bp, synthetic construct
  source 1..120: mol_type = other DNA
tcagggacttcaaagtccctaactaaatagaaaactccaagcaggatggaactatatttcttacttgctttatttctacccaaaactcacaaggcagcggtatctcaatattgactgcct

SEQ ID NO: 8302 - DNA, 120 bp, synthetic construct
  source 1..120: mol_type = other DNA
aaatttcttggaagagaatgagtcatctcaacattgcaggaaaccaaatagaagttgggggaaaaaattactttggacaaagtttttctcttaaatgtttgcatagtaatctttgcctgg

SEQ ID NO: 8303 - DNA, 120 bp, synthetic construct
  source 1..120: mol_type = other DNA
atttagcctgtgtcagcagttttccaaaaaagaatccagttttcaagggcacatatctccccaacaaccactactatcccctccccaccctaaagattgttcagagaccaactgttaaaa

SEQ ID NO: 8304 - DNA, 120 bp, synthetic construct
  source 1..120: mol_type = other DNA
ggactcagctcctaccctctgtgaatgctcactaacaaagctcactttggtccctgaccaaagtctcttgtcagggacaggcatactcgggacaagggtgggagttcaggggagttcagg

SEQ ID NO: 8305 - DNA, 120 bp, synthetic construct
  source 1..120: mol_type = other DNA
cagaaaattcactcttgttggcatacagttccatgtgctttggcaaatgcacagagttgtctaaccatcaccacaattaagacacagaacagttccatcacccaccaaaaacctcttgta

SEQ ID NO: 8306 - DNA, 120 bp, synthetic construct
  source 1..120: mol_type = other DNA
cttaatacccagagaagcaaggagcagagcaaaggttcaaacacccaggggaaaggaaatcgcttcttgatcccttccaaacacaaggaccatgatcaaagaattgcttgctgtagttat

SEQ ID NO: 8307 - DNA, 120 bp, synthetic construct
  source 1..120: mol_type = other DNA
aatttggtccaggagaagcaacaccttgtgaaacatcatttaatgaaacctacaatatgtttaataaagtcagctattcttagaagagcaacccagggccgggtgcagtggcttatgcct

SEQ ID NO: 8308 - DNA, 120 bp, synthetic construct
  source 1..120: mol_type = other DNA
aagcaagacagaggaactgtcagagattagaggatactaagatgacagttcacctcgacatcatgtgtgatcctaaactgaaccctgaaccagaaatttgaattggacattagcaaggca

SEQ ID NO: 8309 - DNA, 120 bp, synthetic construct
  source 1..120: mol_type = other DNA
cattatcttacagattagaaaactaagtcctagacaggttacaaagttaggcggcattcacagtcaaagttaggctgtgagtcagtgtgaaacgtaggataagattctcattcccagatc

SEQ ID NO: 8310 - DNA, 120 bp, synthetic construct
  source 1..120: mol_type = other DNA
cttacttttcatgaatctgttttttttccaagatcctatagacaacaaattgtctgtacgactcattacattgctatctaaattgtaacctgctttgggagtctatggtctgtctttcac

SEQ ID NO: 8311 - DNA, 120 bp, synthetic construct
  source 1..120: mol_type = other DNA
agtcatcctaaaaacaagtgatttccaaaaagacaacgagatttttaattgcttctagatgtacaagaacatagtccaggggagagtcaagacaacagccagctggtcgtggtggctcac

SEQ ID NO: 8312 - DNA, 120 bp, synthetic construct
  source 1..120: mol_type = other DNA
ccctgggccttactaataactacttagcttaccaagaggatgattctgggagctcttgagaccatgaagagggatggtctgaggttcctatggtcttttaaacaattagtgcaaagaatt

SEQ ID NO: 8313 - DNA, 120 bp, synthetic construct
  source 1..120: mol_type = other DNA
aagtctaaataaaagcctggaccacccagagagcagcctcaagggagagcacacagatgctgctgacccagtgtcacagaaaccaaagctaaaacacccccaacagcacgagctgcaaag

SEQ ID NO: 8314 - DNA, 120 bp, synthetic construct
  source 1..120: mol_type = other DNA
ttcaaagccagtggcatagcatcctctctctatgactctgtttccctctgcttctatcacatgaccttcctctcttttatctgtaatctccttcttatgaggacacttgtgattgcattt

SEQ ID NO: 8315 - DNA, 120 bp, synthetic construct
  source 1..120: mol_type = other DNA
tccccaagtaactttcatgcccaggcaaagttgaaagctactggtctatagggaatctgacttggctttttcaatttaacctaaatttttgccatagaaacttaagagtcctaacagcaa

SEQ ID NO: 8316 - DNA, 120 bp, synthetic construct
  source 1..120: mol_type = other DNA
tgccctatttcattcccaacttccagctgcttgccccaaccccaggtaggaaaaacaatccaatgttgatgttcaacatctccataccctttgaaggtttatgtgcaaaagaaaaattag

SEQ ID NO: 8317 - DNA, 120 bp, synthetic construct
  source 1..120: mol_type = other DNA
ttggtttttatcatctcatctataaaatggacacgtgccctattggtatacatctcactcctcaaagatcttcaaagtatggctgtaaaatcctagacgctctcctgacctaaggtgcca

SEQ ID NO: 8318 - DNA, 120 bp, synthetic construct
  source 1..120: mol_type = other DNA
gcagccaaagagattattttattcagatgagtgttattagcctttctggcttattttctctattatgcattttgctgatgctgacagaagcaggcaggctggatagagaggcaaagctgc

SEQ ID NO: 8319 - DNA, 120 bp, synthetic construct
  source 1..120: mol_type = other DNA
tatctcttaagatagatctatggatcccataagaccagacacgggggtctacacaagatttgaatctctgccatccacatttcttgcctagtttctgatatcttattgtccaggctcctt

SEQ ID NO: 8320 - DNA, 120 bp, synthetic construct
  source 1..120: mol_type = other DNA
agacacagaggccccagccttaccttctctatatgaaaaggacataggacataaggtccctagtcctagatggaagattttaaaagggtataaacgtctagaaaaacaaccaacagccat

SEQ ID NO: 8321 - DNA, 120 bp, synthetic construct
  source 1..120: mol_type = other DNA
agtaaggaagtgctcaaagaacgatggggacatatcaataagacacagaagccagcttgaagggactccattggccaaatatagaacaatatgaacattaaaataaagatggtaaaggat

SEQ ID NO: 8322 - DNA, 120 bp, synthetic construct
  source 1..120: mol_type = other DNA
tgctagagtggctcaaaaacattcccagatctggtaaatcgctttttttcatctgatgtacgataagaacctttctaaagtcttcgtcaatttggtgccaaggaagcctaccaaagatgt

SEQ ID NO: 8323 - DNA, 120 bp, synthetic construct
  source 1..120: mol_type = other DNA
tggggtctactctacttatttaaccttattttccactgctcttgaaaatagctgtgttctcatatctctactaaagctcttttcacattatactatttacatagctcttttccctgttaa

SEQ ID NO: 8324 - DNA, 120 bp, synthetic construct
  source 1..120: mol_type = other DNA
cagctatagatgcaaacagatctgcctcaaatgcagcactgcatttgttactgacaagagacctggcactcataggaagcagtatgacaaagccagactgattttcagctcagagaaggc

SEQ ID NO: 8325 - DNA, 120 bp, synthetic construct
  source 1..120: mol_type = other DNA
tctctgtgtaaatcacagtgaccatgactcttaactcctggaacatcgccttttccactttccagctgagggttgattcaggcccctaagacaagtttggacttgcccaccgactcacca

SEQ ID NO: 8326 - DNA, 120 bp, synthetic construct
  source 1..120: mol_type = other DNA
acaaacaaaagggcagaaagaagaaagaggcaatttaaaaacatagaggaactcctcacagttccctcatgtgcttaggcgatcatgcatgtgcacatcatgtgtacacactcaaagact

SEQ ID NO: 8327 - DNA, 120 bp, synthetic construct
  source 1..120: mol_type = other DNA
gctttccttttgactgtagttttctctgatggactttaaacatggccatcttcaaaactgtctgccctgtgcggtagattattccaaagctatgaaagaaagaaacactcctccccttac

SEQ ID NO: 8328 - DNA, 120 bp, synthetic construct
  source 1..120: mol_type = other DNA
aatcttctaataatgactccctcaagctgaatcttccaaataaagcaagatgcaaatactccccctcaaaatgctgacagcctggtgatccaaaggctagcaagaaaatgaccacatgcc

SEQ ID NO: 8329 - DNA, 120 bp, synthetic construct
  source 1..120: mol_type = other DNA
ctagaattgcacttgctgctgccttggaagatgattaaaagcaggacaggcagaaagatgatggcattttcacctcactttcacggagtagggatattggggatggacataggaagtcaa

SEQ ID NO: 8330 - DNA, 120 bp, synthetic construct
  source 1..120: mol_type = other DNA
tcccattcctgcacaaagagactttggggagaacctgtaaaggctcttgattagggatatatcataaagaacctgtgcccacctaaagatcactcttaacagcatttttggacccattta

SEQ ID NO: 8331 - DNA, 120 bp, synthetic construct
  source 1..120: mol_type = other DNA
tttgtggctgcaaagatggagagaaaatgatggcttaaaagaaaggcatatcgttttccttgataattattttcttcactttgcttttctgtattttccaaactgtctatgataagcatg

SEQ ID NO: 8332 - DNA, 120 bp, synthetic construct
  source 1..120: mol_type = other DNA
ggtttcattttgtacatgtatattttaatcaatataaaatttacttccatataaggaggaagacagggatccaatttaattttttcccaaatggctacccagttgtctcaaaaccagtta

SEQ ID NO: 8333 - DNA, 120 bp, synthetic construct
  source 1..120: mol_type = other DNA
gtcatcctactagttttatcctttctgaatccttttgttttaggtatgtctcttctacagagcaatgaattggttttgcttgaaagtcaatctgaaaatattttccttttattaggtgat

SEQ ID NO: 8334 - DNA, 120 bp, synthetic construct
  source 1..120: mol_type = other DNA
agtaagttttgctggaaagatttctagcctctcagctgcctctttaagaatcagaagatatgcctctaggggaaagtttgtcccaatgtcactctcgaatttccttgttctccaagatct

SEQ ID NO: 8335 - DNA, 120 bp, synthetic construct
  source 1..120: mol_type = other DNA
taactggagactctgaagagtcacataacctctttaggtcttagtttcagtcaaatgagtgacctgcactagatgatctctaagcaccttccagctcaaacattcttagattctattaac

SEQ ID NO: 8336 - DNA, 120 bp, synthetic construct
  source 1..120: mol_type = other DNA
cacctcctcagagaggccttcactgcccattcccattagtacccatcccaatgcccaaacactctaactcccatagctctatttatttattttttcaaattacttatcaccatctgaaaa

SEQ ID NO: 8337 - DNA, 120 bp, synthetic construct
  source 1..120: mol_type = other DNA
cctcactactcacctatgagtccagttccagaacccaagtagaggatgggggagcaaagctcctagctttttccctactgtctgcatctctttcacatatcttatcttcttgaagaagtt

SEQ ID NO: 8338 - DNA, 120 bp, synthetic construct
  source 1..120: mol_type = other DNA
atggcatgtctatggctggcaaaattcagggtgactgaagcaaaagtttcaaaaccataaagactacaacgggggtagagcacaaaattctcaagagatgaatctttgtaagagtgaggc

SEQ ID NO: 8339 - DNA, 120 bp, synthetic construct
  source 1..120: mol_type = other DNA
acaaattttttttcccatttagagaaatggagaaattaaatggtttatatacagacccgatccctttcataaagttcgcttggaggtaataccacaatttcaggccctctttgaagaaat

SEQ ID NO: 8340 - DNA, 120 bp, synthetic construct
  source 1..120: mol_type = other DNA
tcctccatctcagtctgagacacacaaagaatgaaactttctacaaaagaggaaggtctgaaggacactagcaactgtcatgagtttccctatgactcgaagcctcttggctctagcata

SEQ ID NO: 8341 - DNA, 120 bp, synthetic construct
  source 1..120: mol_type = other DNA
ctcctgattacagaactacaaagaaaagcagacagggggtggcggggggagactacactttataatcaaaataaatctgaaaatatagactaaagtctgcctctaactgggagtgtggca

SEQ ID NO: 8342 - DNA, 120 bp, synthetic construct
  source 1..120: mol_type = other DNA
ggcaagacaacagtaaaaggttgtagtggtggagcttaaaaatctggaagaattctgcccttcatttctcaaatgtatttaagaacttggttcacttaaactggaaatcacagatcaaat

SEQ ID NO: 8343 - DNA, 120 bp, synthetic construct
  source 1..120: mol_type = other DNA
tacactaactactcatggcctgaagcacagaccaaaaggtgaatgatatcccaaatgccacctcagttttggtcacaggtctggatacaactcattggttgatccaagcatctgatgttc

SEQ ID NO: 8344 - DNA, 120 bp, synthetic construct
  source 1..120: mol_type = other DNA
agtctttcaggttgaagagaaggatccttcactatcctgtatcctgcagccccttccttcttttcaaggaactgcagagattatgtccgccattcctatcaatttgtttattcagtgacc

SEQ ID NO: 8345 - DNA, 120 bp, synthetic construct
  source 1..120: mol_type = other DNA
aaggaatctcagatctatgagaaggacctccaatttctcattctcagcttcaaaacaaattagtcagtttaacattagtcaagacacaggttgctgtgaaataagaatgattctaggtca

SEQ ID NO: 8346 - DNA, 120 bp, synthetic construct
  source 1..120: mol_type = other DNA
agagttaactacacagcaacccttgaaaggaagatacagggaaaaggggctgagggagggtattattctatgaaagagacatgggacagatattgagacagccctcaccactgtgccatc

SEQ ID NO: 8347 - DNA, 120 bp, synthetic construct
  source 1..120: mol_type = other DNA
aatgctcattctctcaccaactgctgcacctcttcctggcttccatatgtctatttctgccattgccaccatcgttctccctgtctcccaaactaaaaacctcaggcattcctgactctt

SEQ ID NO: 8348 - DNA, 120 bp, synthetic construct
  source 1..120: mol_type = other DNA
ttagccaaatcctagtccataaatcaaggtcttattcattctggcccacacctctcccatctcaaaattcctcaagttcttatcaacaccactcattttcagtcatctgctggctgatgt

SEQ ID NO: 8349 - DNA, 120 bp, synthetic construct
  source 1..120: mol_type = other DNA
aggcaaacatatttggctagtgaggtggggagggggttcccatgccctgaaaacaatgctagctcctcactcctactccaaatagtttcaagcataaaaaagtacaagcagttgctttgc

SEQ ID NO: 8350 - DNA, 120 bp, synthetic construct
  source 1..120: mol_type = other DNA
ctccataagtgtgcagcagccatgcaggcatggcaagttctgggggtggaaagaatgtcattcagagaatataatggtttttgtacttcaaagtgtgtctacttaaaagggacaaatcat

SEQ ID NO: 8351 - DNA, 120 bp, synthetic construct
  source 1..120: mol_type = other DNA
agcactttcccttaggatcattctgcctgtgtagaatcctgtagctcaacgcgtaacaaagtactgtattggcccaaaagaaatgttgctccagaataggtacctcagtcaagatgtctt

SEQ ID NO: 8352 - DNA, 120 bp, synthetic construct
  source 1..120: mol_type = other DNA
ggataggtagggtcccagaaagtcccatgagatgagggtcccatttagagtccatttgactcaaacaattctgattgaaaaaacaggacctgggactctggtcaaagacaggccgaacca

SEQ ID NO: 8353 - DNA, 120 bp, synthetic construct
  source 1..120: mol_type = other DNA
tggtcagatgatgtttcatagtaaagatacagaatagagaattgagagttggtaaatctgcttctagtttcagatctgccaccatctagccgtgtgaccttggacaagcctcttcagttc

SEQ ID NO: 8354 - DNA, 120 bp, synthetic construct
  source 1..120: mol_type = other DNA
ccagcccgggtttgttcagtcagggctccagcccggcggccgggaggaagaaaaggaagagggaaggagcctttacctggctctgacgcgacgggtcccaggcccccggctccgcttccc

SEQ ID NO: 8355 - DNA, 120 bp, synthetic construct
  source 1..120: mol_type = other DNA
aattgcagtcatgcgaccacacatctcttaagtttgatccctggttcagtgccctgcccaaccatcctatttcactgaatcaagtccgtggcgtagactttaggtaaattcaggcaaaat

SEQ ID NO: 8356 - DNA, 120 bp, synthetic construct
  source 1..120: mol_type = other DNA
gaacagctggtcagtggagcagtcagaacacacaaaatatttatcgattaagtttgcagtcttaagtgggtgtggtcttaagtgggtgtggttcatagcaccctgaaacaattataacag

SEQ ID NO: 8357 - DNA, 120 bp, synthetic construct
  source 1..120: mol_type = other DNA
gatttgatttttttatctgggactcaactgtggctctcaatctatcatttatggggtcttaatttaaaactttggtatgttaagaaggccattttcatgtaaggacttatctgaactccc

SEQ ID NO: 8358 - DNA, 120 bp, synthetic construct
  source 1..120: mol_type = other DNA
tttctcagtgaagtttttgattattcttttgtttattatagtgactgctgcaacctggccctaaagttcagtttaaagctctgcctgtggactgaaacccactggtaccaaggattgcag

SEQ ID NO: 8359 - DNA, 120 bp, synthetic construct
  source 1..120: mol_type = other DNA
tatctttctccttaagctagtttctcaacctcaaacttagcctctgaggaggcatcttgggtggagcctaatcttaaagacatacattttaaataatcaatggttctgaaaaccaggtcc

SEQ ID NO: 8360 - DNA, 120 bp, synthetic construct
  source 1..120: mol_type = other DNA
gataccaaacagaaatctgaacctacacaaagaaatggagacgactgaaaatcgctatgtacgtacttggatgttggggtttataacatgtccaaaatcaaattccctgacaacactagc

SEQ ID NO: 8361 - DNA, 120 bp, synthetic construct
  source 1..120: mol_type = other DNA
aaaccacagagccccactagatttcagaagtcacataaggaagtggttagaaaagaaaaaggatagatccattaatgaggtaaaaaaaaaatttattgcctatatgttgggatagaacag

SEQ ID NO: 8362 - DNA, 120 bp, synthetic construct
  source 1..120: mol_type = other DNA
atatataggttcagcccacggtgatggcaaatctcagcccaacaaggggcacaaggcccaaagattatggggtctacctgggccatgaactggagctttatcaccttcacagtgtagtac

SEQ ID NO: 8363 - DNA, 120 bp, synthetic construct
  source 1..120: mol_type = other DNA
cattcactctctgacagttactaagaatattgccgaaaagacagcctgggaaccttcattcttagtgctctttcactctaacaagcctgctcccatcgcagcctccttcctgtcctttaa

SEQ ID NO: 8364 - DNA, 120 bp, synthetic construct
  source 1..120: mol_type = other DNA
tagatatcttcttatggaaaatatcttctcaaatttttatattcattgatatactgggctgtttgtcaatttctttgtaataggagttctttatatattttgaatgagtccatttataca

SEQ ID NO: 8365 - DNA, 120 bp, synthetic construct
  source 1..120: mol_type = other DNA
taaacatgatatatatttatttagccttaatttttctcaccaattgcttttaggggcctcgtacctgcttcattgcatgtattgttaagcatgtaatgattctggttattaatctctatt

SEQ ID NO: 8366 - DNA, 120 bp, synthetic construct
  source 1..120: mol_type = other DNA
acaagataagggcccccagcacctagacccatttagattaactgaatttaactgaggttccagaggaaggtcttcaggactcagacttatagattaaaagaagttaatcatttatgtatt

SEQ ID NO: 8367 - DNA, 120 bp, synthetic construct
  source 1..120: mol_type = other DNA
gatgttactttaaatgaaattgtattcttatttcattttccaaatgctcatgcctttctaatttgacataaagtgctacatggcattggggctggtacagcctcgctcaattatgggttg

SEQ ID NO: 8368 - DNA, 120 bp, synthetic construct
  source 1..120: mol_type = other DNA
aatgcccataaaattattatctaaagaatgtttagaaaattgttgaacaagggacatcatcatttaaagtgatacgaagaaaactcagctaagcatatgggctagattagagagaaaaat

SEQ ID NO: 8369 - DNA, 120 bp, synthetic construct
  source 1..120: mol_type = other DNA
gaatgttcatagcagttttattcataataggaaaaactggaaacattcaaatatctatcaatacaagaatggatcaataaactgtgatacattcattccatggaacggctaaaggaacaa

SEQ ID NO: 8370 - DNA, 120 bp, synthetic construct
  source 1..120: mol_type = other DNA
catgagttgttattggttgaaagatgaaacagacaggtaaggaggaaagcatgtggcctctggagtcagagtagactgtctccccgctgacagccagcacagaaaaagggccctcagtcc

SEQ ID NO: 8371 - DNA, 120 bp, synthetic construct
  source 1..120: mol_type = other DNA
cacaattcgataaatcaacttacatcattgagttgtacattaacaatgggggacttttataacaagtaattctttaaacaaacttttgggtttctatttcaacatggaaagagctaggca

SEQ ID NO: 8372 - DNA, 120 bp, synthetic construct
  source 1..120: mol_type = other DNA
gaaccttcgcctgcatctaaacaggatttgctttcagattgcctatgagataaaagagagaaatcatggttaatattgagatttggggcttcggcaacttgaaggatggagctgccgttt

SEQ ID NO: 8373 - DNA, 120 bp, synthetic construct
  source 1..120: mol_type = other DNA
agcaaggatgtggggtaaccagaatatccctgctaaatggtacaatcactttgggaaaacattcaacaatatgtaatactaagttttatcattcatatacctctaaaaccaacaatgcca

SEQ ID NO: 8374 - DNA, 120 bp, synthetic construct
  source 1..120: mol_type = other DNA
ttggagtgcaaacaccaaccccacaatccaacctaccggaaatcctgcggtgaatttgaggcttgtcccgctagtcatgaggtgattcagtgatggctacaaatgctcctcatgtgcatc

SEQ ID NO: 8375 - DNA, 120 bp, synthetic construct
  source 1..120: mol_type = other DNA
gagagcagcagagaccgggaaatccctctctccgctccgcctctctttcaaggcaccagcacttgaccctgcaaatcgctgatttccagggccacttgaaccgcccctgccaggttaaag

SEQ ID NO: 8376 - DNA, 120 bp, synthetic construct
  source 1..120: mol_type = other DNA
gccgtccgcgtccccacccggcatccatccccggaatttcggtccacttttggaagcggtccgccgacctccaggctaagagccggcgccgccagctaaggcggcggttctaggagctcc

SEQ ID NO: 8377 - DNA, 120 bp, synthetic construct
  source 1..120: mol_type = other DNA
ttgtattgcttcatcctaatactcgtctccgtagagcggagcattgtccttttctcttcaaaaacttgtttacaatatttaagaaaataagaaagaaggaaaagccatccataatcctac

SEQ ID NO: 8378 - DNA, 120 bp, synthetic construct
  source 1..120: mol_type = other DNA
aggatgaagttcaaactcctttacatggcttttcaggtcccttattgatgggaccctggctcttctctcttcagctgtggctccaatttattctttagacttcctgaacttcttttagtt

SEQ ID NO: 8379 - DNA, 120 bp, synthetic construct
  source 1..120: mol_type = other DNA
taattagtttttcaacccttcccccttctcccctcccctgcccccaagtagtctccagtttctgtttttgccatctttatgttggtgagtacccaatatttagctcccacttagaagtga

SEQ ID NO: 8380 - DNA, 120 bp, synthetic construct
  source 1..120: mol_type = other DNA
tgttcacaaccattcttacctcctttcctcccatttcagaaaacggggttcccctactccggtttaaagccattctacctacctttgatcttagagtagcgtattttgaagtggttaaaa

SEQ ID NO: 8381 - DNA, 120 bp, synthetic construct
  source 1..120: mol_type = other DNA
cactcttcatcctgtattccaaactagtcatccttgacttctccctgttgattttaccttctaaatagttctcaaatctgttttctcctcttctgtcaccaaatgtcttaattcagggct

SEQ ID NO: 8382 - DNA, 120 bp, synthetic construct
  source 1..120: mol_type = other DNA
atttctatcattgcacatccatattatgttataattatttatgtactgtcttcactatattgtgagctcctagagggtagtaaccatcctattcatctttgtatcctcagcacttagcat

SEQ ID NO: 8383 - DNA, 120 bp, synthetic construct
  source 1..120: mol_type = other DNA
aggggggaaaaaaggcaaatcaaatatagcccagaagttaggagcaaggattatgtcttagtcatatcaggatatgtaccaatagcaaatagttattctgtaggagagaatttaattcat

SEQ ID NO: 8384 - DNA, 120 bp, synthetic construct
  source 1..120: mol_type = other DNA
acctaatagctggtttgataaagattatgagataccaggaaacaaaagatctgaccgttaactctgaagaactcattggagtgaggctgtgaagctgcagtctaggcttcactcctagaa

SEQ ID NO: 8385 - DNA, 120 bp, synthetic construct
  source 1..120: mol_type = other DNA
tgagctgtgatcactggacaagacaatgagaccccatctcttaaaaaaaagagtgagagagagagaatcagagttgataataatggtctcttgatagaacaatgaataacatgtattatg

SEQ ID NO: 8386 - DNA, 120 bp, synthetic construct
  source 1..120: mol_type = other DNA
agaagtagcattgctaaaatctggtttttctttgtgtgctatatagaggattgggtctgagacatatcttcagttatacctgttttttcatgctaatgtttcacccaattatggaacaca

SEQ ID NO: 8387 - DNA, 120 bp, synthetic construct
  source 1..120: mol_type = other DNA
gccatcaggcttggcccaatattttacctgttaccattgttgttcatatttccttatagttcatttcatcatcctgtattttatttatctttgtaagccatttaaccacttaggcctttt

SEQ ID NO: 8388 - DNA, 120 bp, synthetic construct
  source 1..120: mol_type = other DNA
gagctgaggagattggggagaaacagggagtgactgctaatgggtacagggtttctttatggcgtaatgaaaatgttctaaaattgatttaggtgatggttgcacaactcttgagtatac

SEQ ID NO: 8389 - DNA, 120 bp, synthetic construct
  source 1..120: mol_type = other DNA
gcattatcttatatttttaaatagagcaagctctttaacctatatctgtttttcctaacagttttgtctcctctgtctcagtgcataaacaacgactgcttttttcctgtctcttatggc

SEQ ID NO: 8390 - DNA, 120 bp, synthetic construct
  source 1..120: mol_type = other DNA
ccaagaatcggtgtctcccctctaacaaaaaaagtttattttaaaacaagaaatttggcagagccctaatttttaagctaaaaacaatgaacaaaagtacctcagctaacaagtccttcc

SEQ ID NO: 8391 - DNA, 120 bp, synthetic construct
  source 1..120: mol_type = other DNA
cagcctgccaaaagcattcaaactcttaggtggcgtatgagacctttcatgacctggctgctgctctctatacatgttgcattctccagtcctgtgaaattatttcaagtttcttttttt

SEQ ID NO: 8392 - DNA, 120 bp, synthetic construct
  source 1..120: mol_type = other DNA
tagaagtcagagagaagagttagaaaaggcccccagggctgctgacagggcaaatacagtctcacatgcactacaaagacccgactctgacacctttctccagctttctcctgtgtgcat

SEQ ID NO: 8393 - DNA, 120 bp, synthetic construct
  source 1..120: mol_type = other DNA
tggaatgtccttagtgggaaagagtaagagagattacaaaagactgtaaggaatctgtgtgagcaggtggcaaaggtgagatgatcttctgctagtctccttattcatctgactttccat

SEQ ID NO: 8394 - DNA, 120 bp, synthetic construct
  source 1..120: mol_type = other DNA
gctttgcttacccccctggcagaaaaccaaaaacaaatagcaccaagattatcactagcaatatcccagaactcacatataaggatgagacagttcccagggcccagagaagatcagaag

SEQ ID NO: 8395 - DNA, 120 bp, synthetic construct
  source 1..120: mol_type = other DNA
ctgcaatgccaaacttactgagttattcttcagcattgctttctctcatttatcccaaatacatcaaccagcagtatttattttaactgctaagttgattttcagcattctcacgtgata

SEQ ID NO: 8396 - DNA, 120 bp, synthetic construct
  source 1..120: mol_type = other DNA
aacttcagcagttcagctcccctcctagatattaacagaacagtagaagacaatgccaagttaaaagtgtgcttaaacatacatcctaaatgtcactgagctgagatcatgccactgcac

SEQ ID NO: 8397 - DNA, 120 bp, synthetic construct
  source 1..120: mol_type = other DNA
ggtccttatgtattttgtatactaaccccttatcagacatatggcttgcagatattttctcccagtccataggttgtctcttcactctgttaattgttttctttgttgtgcagaagcttt

SEQ ID NO: 8398 - DNA, 120 bp, synthetic construct
  source 1..120: mol_type = other DNA
tgtactagatgctagggatagaatgatgaacaagataatcatttcttaccttcatgaagcttattagtctactctctttattaaagttattattacccataagtaaatggtaacaggttt

SEQ ID NO: 8399 - DNA, 120 bp, synthetic construct
  source 1..120: mol_type = other DNA
ttattcaacaacattgtagaataccaaatgaacatacaaaaatcagttgtagccaggagcagtggtgaatgcgcttgaccagctactcaagaggctaaagcgagaggattgtttgagccc

SEQ ID NO: 8400 - DNA, 120 bp, synthetic construct
  source 1..120: mol_type = other DNA
gaaaagaaatactgacacaaatacacccagctaatttttgacaaagatgcaaaagcagttcagtggaggaaagataacctttcaccaaatggtgctagagcaattaggcgtccataggtt

SEQ ID NO: 8401 - DNA, 120 bp, synthetic construct
  source 1..120: mol_type = other DNA
agctacccttgttataaagaggcaatagtgatgatgatagtaaagaaaagttgaagatgaaggtgatctaattctatagtacctcatatggttgggtggttttttcattcctattcacgc

SEQ ID NO: 8402 - DNA, 120 bp, synthetic construct
  source 1..120: mol_type = other DNA
tgaactacttcccaaattatgtaaccaaatttctgtgtggctctggtgctattaggtcaaaactttggggaactaagcatgagatagcatactcctgtttccttctctgtcccagggaaa

SEQ ID NO: 8403 - DNA, 120 bp, synthetic construct
  source 1..120: mol_type = other DNA
ctagcctatattagaacacagtaaagtattagttcccttttctaacattatattcagataatgtaggagaaagctatgctttattatagttattattctgtaactatttacaatcttgaa

SEQ ID NO: 8404 - DNA, 120 bp, synthetic construct
  source 1..120: mol_type = other DNA
tgaggataactttacaggagtaaccttataggacagaggttaacataggctttggaaacagataaacctgagcctactcaccagctgtgtgactttgagcaagttatcgaacctctcaaa

SEQ ID NO: 8405 - DNA, 120 bp, synthetic construct
  source 1..120: mol_type = other DNA
cttgctatgtactgctatactagatctcacaaatttaatgaattgtatttctcattcaattcaaaatgctttcgagtttccctttgatttcttctttgattcatgggtgatttagaagtg

SEQ ID NO: 8406 - DNA, 120 bp, synthetic construct
  source 1..120: mol_type = other DNA
aacacacaactcagctttgatgctccagtggaaaattagctactaattagtgttctgtgttagagctgaaatgatttctgctgtaagaaatgatctttatctattaatgtggaccttggg

SEQ ID NO: 8407 - DNA, 120 bp, synthetic construct
  source 1..120: mol_type = other DNA
gggcgacagagtgagacccctgtctcaaaaaacaacaaaaagtatgctttgctgttgttgcatttgtgtttccttaagtgttttactgggctgaatttttagcaatgcttttgcttttct

SEQ ID NO: 8408 - DNA, 120 bp, synthetic construct
  source 1..120: mol_type = other DNA
agaggattgctgatcactcttaccaaggtatgttttatcacagtgttaaaaagtactgcttatcatttgtttaattaaatgtggtaccagccgggtgtggtggctcacgcctgtaatccc

SEQ ID NO: 8409 - DNA, 120 bp, synthetic construct
  source 1..120: mol_type = other DNA
acccccagggggaaagtataactttttcagcagtctattttaagtctcttctttatagtcttaatcatatgaattgttctatacaggattgtggcatggaagagacacttttaatcaaat

SEQ ID NO: 8410 - DNA, 120 bp, synthetic construct
  source 1..120: mol_type = other DNA
acacgtaggatttccgttttaaggttcacatggaaaaggttatagctttgccttgagattgactcattaaaatcagagactgtaacacttttgccttacgttcattttatcaagcatagc

SEQ ID NO: 8411 - DNA, 120 bp, synthetic construct
  source 1..120: mol_type = other DNA
tgtgaggctgtactgtgggcctgtgtataagaaaacaaagaatttacaaatggtagagtaatgaaagagggatgatctattctagagttgcatgacttaagtcggggagtagagtcactc

SEQ ID NO: 8412 - DNA, 120 bp, synthetic construct
  source 1..120: mol_type = other DNA
ttttatgggtgggaaaactgaggaacagaacaaataaatccatttccccacagctgacaaatgacagaaccagaattcatatctagatcatccgattcaggctcttttgggggttcccat

SEQ ID NO: 8413 - DNA, 120 bp, synthetic construct
  source 1..120: mol_type = other DNA
actgccaatcagggttgatagtgactgtcaactagagttcagtcaactcacactgtttggaacagatgtttgggaaacaaacaaacgtgagcttatgatgtactggtagctaacctaaag

SEQ ID NO: 8414 - DNA, 120 bp, synthetic construct
  source 1..120: mol_type = other DNA
ccggtacctcatgcagagtacattcttctggcttttcctttcggtaagatggtcttcagagctccttaaacacattagaaaaagtaaaacacaagacacttgtgatagttaattttagat

SEQ ID NO: 8415 - DNA, 120 bp, synthetic construct
  source 1..120: mol_type = other DNA
gagtaggaaatcaagcaatggaaggtgagcacagtgtgggctctacttcaaatcgcactgtttagcagcctgactaaaattagatttttagtcctctggttatcatgtgtcttactaacc

SEQ ID NO: 8416 - DNA, 120 bp, synthetic construct
  source 1..120: mol_type = other DNA
agaggctccactctactggccactaactaatggcaagtggtccatcaaactgctgctttgagccaaccctttagtcattagtctacaggtctgtgctttgttttcaaggatttttttttt

SEQ ID NO: 8417 - DNA, 120 bp, synthetic construct
  source 1..120: mol_type = other DNA
catcaataataagagtggtgaggaaataagaaatttaaagacatataggaattgtctaaaggccaagtaaatctttgtcttttagactaaaaggctgtgctaaagtagtgaataataagc

SEQ ID NO: 8418 - DNA, 120 bp, synthetic construct
  source 1..120: mol_type = other DNA
cccatcagaggtttgcctaaaattatacggtctcaattttcttactgaaaattcactgggatcccaaaattaaaaatcaaacctacaccaaaacaaaaccttaaacacaattagcacaag

SEQ ID NO: 8419 - DNA, 120 bp, synthetic construct
  source 1..120: mol_type = other DNA
gtgttagcacatctagttggtacttcccccgaaaatacaaaaaatttcttctgcagtgagttcaattttcagatttttttcttccttatactgaaaaagtcccacaaatttccccaatat

SEQ ID NO: 8420 - DNA, 120 bp, synthetic construct
  source 1..120: mol_type = other DNA
ctttacactccatgacacagccctctgtggtgtactacccagtcattcatcatcaatgtagcacactaactccattagtcttggcttcacattgtctctcaataagataggtaaggtaag

SEQ ID NO: 8421 - DNA, 120 bp, synthetic construct
  source 1..120: mol_type = other DNA
agaagagaagagttattaaaccttgcaacctagtcccgttgaacacaattatggctctgaagcagaccttcccattgaatgggtgaagaaacctagtgagagctcattaaaagctgatgt

SEQ ID NO: 8422 - DNA, 120 bp, synthetic construct
  source 1..120: mol_type = other DNA
ggtgtgagccacagcatgccccagtgagggatggttcttggtatccaactatcacaagagtcagtaccctctttgtttactttgtttttataaaatttatccatatctgattttaactgg

SEQ ID NO: 8423 - DNA, 120 bp, synthetic construct
  source 1..120: mol_type = other DNA
tatgaaattcccctctctgaatcctaaagcacatatcctcattccctttatgctgttactttttctatgtttgccttgtctttccccaaaagctgtaagatccttaagggcaggagccac

SEQ ID NO: 8424 - DNA, 120 bp, synthetic construct
  source 1..120: mol_type = other DNA
agaagagttctgcaggctctgatgttggctggaaaaaaactagacacctgctcttcccagcactgaaatatggccaaaaaaaaaaacataaacacacagcaaaatcagcaaacaaagcta

SEQ ID NO: 8425 - DNA, 120 bp, synthetic construct
  source 1..120: mol_type = other DNA
aactcgtgaaaaccaatttcacgtcagaggaagcatccccaacattctgtcccggctctttttcttaggtgaagaaagggacagggcggggggcggaacaatgatattaaagacactggc

SEQ ID NO: 8426 - DNA, 120 bp, synthetic construct
  source 1..120: mol_type = other DNA
gcttcagagcccgcgtcggtcacgtgagttggccaggcccagaaacgcggcggcgccaacagctaccctgcggcccgcctcccagcaccaaagaggcgcaggaaggagagacaaacggcc

SEQ ID NO: 8427 - DNA, 120 bp, synthetic construct
  source 1..120: mol_type = other DNA
gatttaacaaacttactgttcagcatcatattcaagcctaaaaggaagataggattttcaagatatatttccaacttctttaacatggcaccatggatgaactgtttctcagcactgtgc

SEQ ID NO: 8428 - DNA, 120 bp, synthetic construct
  source 1..120: mol_type = other DNA
agtgtctgaattacagtatattttctaaattcctagcccctgctggtgaatttgccctcccccgctcctttgacaattgtccccgtgttcgtctccgggccctgagactggccctgctta

SEQ ID NO: 8429 - DNA, 120 bp, synthetic construct
  source 1..120: mol_type = other DNA
gagattaaatataaacacagcaagttccaccccagtcctatttgtccaaggctgcatggtcaaatggaatcttgaagagaacacctggacaacagaggacctgtcagcgacgtctccggt

SEQ ID NO: 8430 - DNA, 120 bp, synthetic construct
  source 1..120: mol_type = other DNA
ccacccacatacatgcaccctacagtcacacatgtattctcattcctaacctgttttagcttgccacaaccccaaaaattgagtggggggagggaagcagcctgcatttgagacctaaaa

SEQ ID NO: 8431 - DNA, 120 bp, synthetic construct
  source 1..120: mol_type = other DNA
agatacacccccgccccatctctcaaaaacggaacacccatcgcagagaaacttggacctcagctcccttatgtagacctcttagataagtatgaggaaggtggatatgggagcactttt

SEQ ID NO: 8432 - DNA, 120 bp, synthetic construct
  source 1..120: mol_type = other DNA
cttcgaatcccagcactttggaaggctgtggcaggagggttgcttgatctcagaagcttgaaattagcctaggcaacatagtgagccctcatctctactgaaaatcagaaaaattacccg

SEQ ID NO: 8433 - DNA, 120 bp, synthetic construct
  source 1..120: mol_type = other DNA
tttggccaaacatgattctggttgtgttccagagagtctttcagatacgattaacattgggatgggcagactaagtgaagcagattgccctccttaataggggtgggcctcatgcaatca

SEQ ID NO: 8434 - DNA, 120 bp, synthetic construct
  source 1..120: mol_type = other DNA
cccccaaggaagacaatatctcctaaaaactccagaaaaatcattttgggcaagcaccttatatctagtaatgcgatccatgtatcgagaccgtgagaaaagattattaaacatgctaaa

SEQ ID NO: 8435 - DNA, 120 bp, synthetic construct
  source 1..120: mol_type = other DNA
gaaggaaggaggactggttaatcccatttgaaagcatccctctctgcagcccgcaccatcttccagtgacactgtaaggatactgctttgagatgtatcaaaggctttaagtcaatgtat

SEQ ID NO: 8436 - DNA, 120 bp, synthetic construct
  source 1..120: mol_type = other DNA
attttatctttgtcctcatcagcgccactcattgtctctcagtatggcctggacttgcccctgcatttaccctcatcctgctgagccatctccatgcactgcgcaattccatcagtgatt

SEQ ID NO: 8437 - DNA, 120 bp, synthetic construct
  source 1..120: mol_type = other DNA
ggcctagtatatactgggcactgtttgtaggtgtttgggttacatcagtaaacaaaaacaaagatactagttttcattctggagagggtaagaggcagtagaatttggaaaagacagaca

SEQ ID NO: 8438 - DNA, 120 bp, synthetic construct
  source 1..120: mol_type = other DNA
ccagttgtagaaaagggcattccaggcaaaagggtgtgtaactgtatggaagcaataataagtacaacattttcaggaaataaggagaatttggtgtgactaggcctagatgcttgtggg

SEQ ID NO: 8439 - DNA, 120 bp, synthetic construct
  source 1..120: mol_type = other DNA
ggctggtgccccaaatatgtgattcaacttattcctcgttttagttttcagggactagaaaactgaatctagtaggctgttccaccattacctcaaagattacacatttaaaccaaactc

SEQ ID NO: 8440 - DNA, 120 bp, synthetic construct
  source 1..120: mol_type = other DNA
tctatggctgattttccactacaacaacagagtcaagtagctgtaatgagaccacaaagcctgcaaaaataattactctctggcactttacagaaaaagtttgccaacttctgagtagag

SEQ ID NO: 8441 - DNA, 120 bp, synthetic construct
  source 1..120: mol_type = other DNA
gtattaataaagtttgatttctatttaaaatgttttagagggctggacatcagcttagttctttacttttaccttagaagatatacaagtctcttttaacccacactttcatgaggtccc

SEQ ID NO: 8442 - DNA, 120 bp, synthetic construct
  source 1..120: mol_type = other DNA
gctccgactcatacccaatggatatgtgtacttttttagaagccacaaaatactactatgtgctatggaatacacactcagctaaaatattcagagccttatttcacatgaactactagt

SEQ ID NO: 8443 - DNA, 120 bp, synthetic construct
  source 1..120: mol_type = other DNA
atgtcatgcactacattgtctccgctggtatggttcttctttatttaagccactgttatgtctttgctgtacctttctcaaactcccatctagatagtttttgtggggaagaccctgtct

SEQ ID NO: 8444 - DNA, 120 bp, synthetic construct
  source 1..120: mol_type = other DNA
gcactgtgggaggccaaggcgagcagattgctagagcagaagttcgagacctgcctaggcaatacgggcaacatggtgagaaccccatctcaaaaaaaaaaaagtgtcatttctgacatt

SEQ ID NO: 8445 - DNA, 120 bp, synthetic construct
  source 1..120: mol_type = other DNA
ctggacagaccatttctgcttttcttgtagaagtatttcagaaaatgttaatcttggttcccacattaggttgcatgcttccaaattaaaagtttcccacaggaaaagaacttcatgagg

SEQ ID NO: 8446 - DNA, 120 bp, synthetic construct
  source 1..120: mol_type = other DNA
tcacttataaaacaaaatgagtgacaaaggtgctttccaaagtccctttgacctcctaagtgtgatgactctataatcttggcctttgaagtcccttggcaataccacccaaggatgtaa

SEQ ID NO: 8447 - DNA, 120 bp, synthetic construct
  source 1..120: mol_type = other DNA
caggcagttaaacgactaaggcactaccatcgtctaggcaagagaatcttaaccaccatcaaatgttttccacacagaataggcagacctagtttattctggaaaattgagggtttggat

SEQ ID NO: 8448 - DNA, 120 bp, synthetic construct
  source 1..120: mol_type = other DNA
tcctttgtctgagtgtccatagttattatctgtgcccctacactgggatattacaaactgttttattttacacatctctgtatgcttcatctccccagcaagacttcagaagactgccac

SEQ ID NO: 8449 - DNA, 120 bp, synthetic construct
  source 1..120: mol_type = other DNA
aatctgtctggacttgctcctgttccattagtaaaaagaaaggagaagtttcaaattagttctctctactgaagcacactttaatagacaatatcctctatccccaccttcactgccctc

SEQ ID NO: 8450 - DNA, 120 bp, synthetic construct
  source 1..120: mol_type = other DNA
accatactaggtcataaggcaaaagaaaaaatcagtactactgatctccttatttaaaattttgataattttcaacttattttgcattaattttgattttttgaacaactacatacaaac

SEQ ID NO: 8451 - DNA, 120 bp, synthetic construct
  source 1..120: mol_type = other DNA
tctactctctacttactatacagacatttaccaagaagacaaagaaggcaatggctctagtttttcttggatggattcaggaaatctggaccaccaacatgactgcctaatcctggcaag

SEQ ID NO: 8452 - DNA, 120 bp, synthetic construct
  source 1..120: mol_type = other DNA
aacattctttagtgggagataaactttaaaatctatcacccacaatgtccagtaagtaatgtaaaactaccatacatgtgtaaagtaaagggaagtcatacccatggtccaaagaaggag

SEQ ID NO: 8453 - DNA, 120 bp, synthetic construct
  source 1..120: mol_type = other DNA
caatccaaacaacctattgttaagctttactgtcatcacagcttaattttcactttagtgaagaaaattatttctgacttgaaaaaaaaatcttgtttataacattaaaaaactaaatcc

SEQ ID NO: 8454 - DNA, 120 bp, synthetic construct
  source 1..120: mol_type = other DNA
aaacccagtaatgtataaaaagcaatcatgaaggctgggggtgcaggagtgtacctcagatagtgtctaggaaaggcctccctgaggaggtatgctttgagctacaatgtaaatgaacaa

SEQ ID NO: 8455 - DNA, 120 bp, synthetic construct
  source 1..120: mol_type = other DNA
acccaaatgactctaagataaatacaaacaaaataaaaattgccaatatatacccttggcataccctcttaataccaatcttggaatcactccaaaaagaacttttaagaaatacaatag

SEQ ID NO: 8456 - DNA, 120 bp, synthetic construct
  source 1..120: mol_type = other DNA
aaacagaagaagtgcggaagcttcaaatcccaagtggtacatttaaataaaaacgaagcggagaaacatgtcttcctccttgaaatttgtcttgattaaaaggaaaaaaaaaaaccaaaa

SEQ ID NO: 8457 - DNA, 120 bp, synthetic construct
  source 1..120: mol_type = other DNA
tttgtacacctgggacctaagaagatgcctggaccacagcaggtactcaatactcaataagatattcaataaactaaatatctataattaagacaaaacctatgaataaacccaaccttc

SEQ ID NO: 8458 - DNA, 120 bp, synthetic construct
  source 1..120: mol_type = other DNA
gacatgggagtgacactcatgttgaacaagagggacttacaaagggagttttaccagtttcaccacttcgggcccagtgggaatgtccttcccatcatcacctcatcacattaacaagat

SEQ ID NO: 8459 - DNA, 120 bp, synthetic construct
  source 1..120: mol_type = other DNA
ttatttttcttacttttagttacatgtactgctcaaatttgggtgatactgcagaaggcccacaccaaatccacaacccttgcatgcagcagtagcattcaacaaggtcctgtaggacac

SEQ ID NO: 8460 - DNA, 120 bp, synthetic construct
  source 1..120: mol_type = other DNA
atgtcattaggataaaagaggccacaaaatgatggcctggattctgggttctatgcctggctctctatcttctagccatctgaccaagggccaatcacttcgcacttccaggcctttcca

SEQ ID NO: 8461 - DNA, 120 bp, synthetic construct
  source 1..120: mol_type = other DNA
ccattcgtggtcatgatctgcagtttaaaaaacaatggactaaagcatgcagtaaagaatgtggctttgcaattagacaggcccaataccactttctttttttttttttttttttttttg

SEQ ID NO: 8462 - DNA, 120 bp, synthetic construct
  source 1..120: mol_type = other DNA
atataccaaagagcagatagaagacctggctttggagtcatgtgactctgcattagatctcatggggtctctgtctcagtctccacaaataaaaacatggccttgtctctataaaagata

SEQ ID NO: 8463 - DNA, 120 bp, synthetic construct
  source 1..120: mol_type = other DNA
tagcagggataatctaagattaggtattggtgtcaaacacacttctcttatctattagtacagatgaccaccagttttcagtaacaaaagatatggtaataagaaaaaacaaatccacag

SEQ ID NO: 8464 - DNA, 120 bp, synthetic construct
  source 1..120: mol_type = other DNA
cttgatcagtattcatgcaaatacttccagttcctccaaagtgacattcatatttatctatattaactacatccaaattctgctatccttcgtgtatacttctcttttattataagcagc

SEQ ID NO: 8465 - DNA, 120 bp, synthetic construct
  source 1..120: mol_type = other DNA
tgtgcctggtactgtccaatgaatctaacatttattaactgatattatcttcataacaactccaaaatatactgctactatctttatttttaaaataataaaattgaggcacaccatgct

SEQ ID NO: 8466 - DNA, 120 bp, synthetic construct
  source 1..120: mol_type = other DNA
taggtttccttccttggttgatcagaaatgtcctcattccccaggtctcttcatgctaaatatggtaatagctggcagacagccagcccagtaaattccaatgatacttaagaaagcatt

SEQ ID NO: 8467 - DNA, 120 bp, synthetic construct
  source 1..120: mol_type = other DNA
gtgcctgcctcagaacaaggcagtttattttagaatgtaaccacagcttcttgtacaacaccttattcatcaagcacaactgtattttaaaggaatgctatttgttaaaaagacaacata

SEQ ID NO: 8468 - DNA, 120 bp, synthetic construct
  source 1..120: mol_type = other DNA
taactgtatttcatattcctaattgtgtgcttatctgtcttgtctccatgatgatgtcagctccttgggagcaggaccatattttctacttggtcaatgattcccacacatctagaagag

SEQ ID NO: 8469 - DNA, 120 bp, synthetic construct
  source 1..120: mol_type = other DNA
cgtgtacgaaatttgaactttccaagaagtatctagttggtgctgaacaacccagtactattttcgggtgataaataaccttgttctctttttaaacatctgcgattgacatgtcgactg

SEQ ID NO: 8470 - DNA, 120 bp, synthetic construct
  source 1..120: mol_type = other DNA
aaactccacagtagttggttctttgccttgcatagagtatgtgctcaataaagacctactttctgaaaggttcacagagttcagccaaacacaggacaagttctagaaggcaagacgtta

SEQ ID NO: 8471 - DNA, 120 bp, synthetic construct
  source 1..120: mol_type = other DNA
cccggccagagtatcttaattttaatgaaatatactttatcaatcttttcctttatggttactgcttattgtgtcctgtttaagaaatcaatgcctggccaggtgcggtggctcatgcct

SEQ ID NO: 8472 - DNA, 120 bp, synthetic construct
  source 1..120: mol_type = other DNA
agtattcattattgttattattttttttgtatgtgttcaatctcattttcaatataagctcctggaaattagagattttgtttcttttattcaccactgtattctcagtacttgacctca

SEQ ID NO: 8473 - DNA, 120 bp, synthetic construct
  source 1..120: mol_type = other DNA
catgaagagctgccagatccaacaggtaaaaatcctgaggcattgccagctcgatggggtcagagagtcctctttctattatgactcagatgtgaagggaagatgccaagggccctaaac

SEQ ID NO: 8474 - DNA, 120 bp, synthetic construct
  source 1..120: mol_type = other DNA
cagcgggccagaggaataatgtgtttcaggaggaagaaggggttgtaccccatggaaacagtatatagttttacagtagtgcgtctctctctaataactagttagcatgttcctgttaat

SEQ ID NO: 8475 - DNA, 120 bp, synthetic construct
  source 1..120: mol_type = other DNA
agatagtacagagagttctcctaggctcccctgtcctccagcacacaatttcccctattagtatattgtattagtgtggtccattcgttacaattgatgaaccactgttgatacatcatt

SEQ ID NO: 8476 - DNA, 120 bp, synthetic construct
  source 1..120: mol_type = other DNA
ttgtatttaagaagccatcattgaacccaggatccccgagattttctcctatgttatctcctaggattcttatggttttgcacttacatttacgtgtaagatttattttataaaggatat

SEQ ID NO: 8477 - DNA, 120 bp, synthetic construct
  source 1..120: mol_type = other DNA
tgagggccctttttctgtgctggctgtcagcagggagacactctactctgactccagaggccacgtgctttcctccttacctgtctgtttcatctttcaaccaataacaacttatggagt

SEQ ID NO: 8478 - DNA, 120 bp, synthetic construct
  source 1..120: mol_type = other DNA
gtaactcaactggccggcttcctggccaagcagcagaacaaatacagtaagatctacaggctcaccatcacgaaagtgatgaacaacgtcctgtcttctctctgagaaactaagtgctct

SEQ ID NO: 8479 - DNA, 120 bp, synthetic construct
  source 1..120: mol_type = other DNA
gaagtggaaaatatctgaacgaacattttgtatttatagaaaatgatgaagatgaggatgaagatgttcaagttgaggaggatgagaaagtgctggaatcatcttcccccaggtgacact

SEQ ID NO: 8480 - DNA, 120 bp, synthetic construct
  source 1..120: mol_type = other DNA
atctttacgaagaatacaaaaaattaggcagtcatggtgctgcgtgcctatagtcccaactgctcaggagacttaggtgggaggatcggctaacacgatcctcccactctcgttcactcc

SEQ ID NO: 8481 - DNA, 120 bp, synthetic construct
  source 1..120: mol_type = other DNA
gtttcattcctgcaggcaggacctataggcacctgaagatttgaatgaaactatagttccatttggaagcccagacataggatgggtcagtgggcatggctctattcctattctcagagc

SEQ ID NO: 8482 - DNA, 120 bp, synthetic construct
  source 1..120: mol_type = other DNA
aaatgtatgtgtgtgtatatatatgcatgaatttgcttctgagattatggaggctgaaattcccaagatggaaggaaagctggatatccaggaaagcatttgtttcccattaggcctctt

SEQ ID NO: 8483 - DNA, 120 bp, synthetic construct
  source 1..120: mol_type = other DNA
attaaagagacatgacaactaaatgtaatggtgtgattgattacctgacaggatactagatttaaaaagatttttttaaagctataaaaaatactattagggcaactggggatattgcca

SEQ ID NO: 8484 - DNA, 120 bp, synthetic construct
  source 1..120: mol_type = other DNA
ttagtctttggggcaagaggagaacaggaatgctgggctgtttactttaggtggagaatccatcttcagacctttggactattttctttcaactgcagtgtatagaaaaaccaaactacg

SEQ ID NO: 8485 - DNA, 120 bp, synthetic construct
  source 1..120: mol_type = other DNA
gcggccgtccgcgtccccacccggcatccatccccggaatttcggtccacttttggaagcggtccgccgacctccaggctaagagccggcgccgccagctaaggcggcggttctaggagc

SEQ ID NO: 8486 - DNA, 120 bp, synthetic construct
  source 1..120: mol_type = other DNA
tagggatgcaaagcttaactgctatatagtgaagagaaatacccaactatgccacaatactaaactagaaaacctcactgaagttatcacctgccactcagggtctatgacatcagggac

SEQ ID NO: 8487 - DNA, 120 bp, synthetic construct
  source 1..120: mol_type = other DNA
cacccagcctcaagtttctagagctgttctatcagcctggacaatccttcaccaaccctgtctacctagaaaatgcctatttatcctttctagattcaactcttgtcaattcctttagga

SEQ ID NO: 8488 - DNA, 120 bp, synthetic construct
  source 1..120: mol_type = other DNA
gccttacactgccttcttagagctttcccaggactgtcccaacaaccagtatggttgtttattgctgtggtgaccacaaaaaaatgggctgggcaggttggctcacccctataatcccag

SEQ ID NO: 8489 - DNA, 120 bp, synthetic construct
  source 1..120: mol_type = other DNA
tgaaactaaagagaaagaactagcaaagaaggaaatattgaatatacaagagagaggagacagatgatggaacaagactctgaaagaggtggaagggattgaatacaatcaaaagtatgg

SEQ ID NO: 8490 - DNA, 120 bp, synthetic construct
  source 1..120: mol_type = other DNA
ctaggtgaagaatggagaagcagaagaccagaggttgcactgacctctaaaacgagtgtagtggaaatagaaagactaggaatggaggccagtagtcagaaaaggaatattggaattttc

SEQ ID NO: 8491 - DNA, 120 bp, synthetic construct
  source 1..120: mol_type = other DNA
ctcttctttctggatttggtgctgtcaactgcccatacacttacatgtcttacttcctcaggtaacagagcgctttgcatcctttcttttttgccccattacttcttgaatacatatgtc

SEQ ID NO: 8492 - DNA, 120 bp, synthetic construct
  source 1..120: mol_type = other DNA
tagcagtttgtgctttttgtaggaatgtgactgacacggatattctagccctggaacggcgactgctgcaaaccatggatatgatcataagcaaaaagaaaaggtaagatatcaacactg

SEQ ID NO: 8493 - DNA, 120 bp, synthetic construct
  source 1..120: mol_type = other DNA
aataatactgcagtgaacataggtgtacagatatctctttgacattttactgatttcagatcttttgggtaaatactaagaagtgggattgctggatcatatggcaattccattttcagt

SEQ ID NO: 8494 - DNA, 120 bp, synthetic construct
  source 1..120: mol_type = other DNA
gttactttatgtctttgtgcctcatttgtaaaatagaggtaataataatgagttaagacttagaaaaacaagttagagcccttagaacaatgacccacatatagctaaggacaactactg

SEQ ID NO: 8495 - DNA, 120 bp, synthetic construct
  source 1..120: mol_type = other DNA
tttcttttattcatataaagaaatgaatatataaaagtgaagtcatgaccgggtactcatgcctgtaaccctaacgctttgagaggctgaggtcatgagttcaagaccagcctggccaac

SEQ ID NO: 8496 - DNA, 120 bp, synthetic construct
  source 1..120: mol_type = other DNA
taaaagcaagtatttgaagttactggaaaatgagcagaggcaggtagaaatttgagaagagcatcaggtaactattgcaagttgatagctttcttgcctggaagtgccccttagccacca

SEQ ID NO: 8497 - DNA, 120 bp, synthetic construct
  source 1..120: mol_type = other DNA
tcagtaggagacaatatcaagcagtccaacattcttgtgattggagttctaaagaaaaggaaaggggcagaaaaagcattgaaagaaataccagcccaaaacataagaaaactacaccta

SEQ ID NO: 8498 - DNA, 120 bp, synthetic construct
  source 1..120: mol_type = other DNA
taagctgtacaggtgcaccctgaaagatccttgtagtgatggaaatgtcccgtattgtgactctatcaatgtcagtatcctggttgtactagagttttgcaagatatttcagttgaggaa

SEQ ID NO: 8499 - DNA, 120 bp, synthetic construct
  source 1..120: mol_type = other DNA
aagccttaatcttacaagtcagaatctccctaggtctgagcctcttcttggttgtttattacatcttcccaaaatggtgagtgatagtagatgtgtagttagaagaaaggcagaaagagc

SEQ ID NO: 8500 - DNA, 120 bp, synthetic construct
  source 1..120: mol_type = other DNA
ttaagtcacacggtggtttgtggcaaagctagaaacataactgtggtctcctcttcatagttctttccactacactattacatttctcaactctgaaaaaccaccataaagcataatggc

SEQ ID NO: 8501 - DNA, 120 bp, synthetic construct
  source 1..120: mol_type = other DNA
catattgtttggtggcttgaaccatgccagtagtagccactattaaggaaggaactgaagggcacttactgatttgggtaatagtgggaaaaatcagagaggagggaggatttagattga

SEQ ID NO: 8502 - DNA, 120 bp, synthetic construct
  source 1..120: mol_type = other DNA
aaatggctttttagatttctctgtggccaagcaagagatacctcacagcttctatatcagccatgaagcattagggataagggatcttcactcttcatgaaattgctcctgtcactagca

SEQ ID NO: 8503 - DNA, 120 bp, synthetic construct
  source 1..120: mol_type = other DNA
ctagtgttacaataaattgatgtcaataatactcagatgacattttaaaatctggattcattcagtgggagataatgaatgaagatagtatgttcagttagcaaagctactaaaaggtat

SEQ ID NO: 8504 - DNA, 120 bp, synthetic construct
  source 1..120: mol_type = other DNA
tggctgcaacctcagtggccactgagcatctgggcagctctgtgcttgggatccaaggccctgttggcctgggctcacaaggggaatctcctgatccacgggttgcacagatctgtggaa

SEQ ID NO: 8505 - DNA, 120 bp, synthetic construct
  source 1..120: mol_type = other DNA
aagaaattccatactcattagtagtcattccccatttccctccaattcccactccctcagcccttagcaaccactaatctattttctgtctctgtagatttccctattctggatgtttca

SEQ ID NO: 8506 - DNA, 120 bp, synthetic construct
  source 1..120: mol_type = other DNA
ctcattcaattcaaaatgctttcgagtttccctttgatttcttctttgattcatgggtgatttagaagtgtgttataaaatatttgaggatcttccaaatattattctctaattaatttc

SEQ ID NO: 8507 - DNA, 120 bp, synthetic construct
  source 1..120: mol_type = other DNA
tttttaaacttccatcttggggattaattgggaatttttcattattccatttgatatcgtttgttgacttattagctataactcctttttctgttattttagtatttgctgttagagcat

SEQ ID NO: 8508 - DNA, 120 bp, synthetic construct
  source 1..120: mol_type = other DNA
ttcaacttgtattccttctagttcaataatcttctcttctgcaatgtttaatccactgccttcttccatttcagactgtaaatcatactttttatttacagaatttgatatttaaaaaat

SEQ ID NO: 8509 - DNA, 120 bp, synthetic construct
  source 1..120: mol_type = other DNA
gacacagagttaggcaaagtgttctttattatcaataaacacaaaccattgaagaaaacattgataaattcgactttataaaaattaaaagtttttgctcaacagtattaagagaacaaa

SEQ ID NO: 8510 - DNA, 120 bp, synthetic construct
  source 1..120: mol_type = other DNA
atctgacagacaactcctgggcatgtgctgcacagtttggtgtgagtttgccacacctgccttgagttcaatgtcgtgacagtcagtccaggttggcatgggcatggcctgagactagga

SEQ ID NO: 8511 - DNA, 120 bp, synthetic construct
  source 1..120: mol_type = other DNA
agcaggccaggtctcactaacacaggcctccctaaaaactgtttcagtagcgactgagtggttcaattaaatattaagaggaaaaaaaaaaaaaaaagaagccagtgcccttatacaaag

SEQ ID NO: 8512 - DNA, 120 bp, synthetic construct
  source 1..120: mol_type = other DNA
cctaaggcatcctgttgaaaaacctttgtctactgtgtccagacattcctggtggtatttcagataagacactcttgggttgctgcactcacaagcactgaaacaattctatgaccatct

SEQ ID NO: 8513 - DNA, 120 bp, synthetic construct
  source 1..120: mol_type = other DNA
ctacctattctatgactcagtaattcctaagcatttatccaagagaaattaaaacatatgtgcagaaaatgatatatacaagaatgtccatagcagttttattcgtaataggaaaaactg

SEQ ID NO: 8514 - DNA, 120 bp, synthetic construct
  source 1..120: mol_type = other DNA
atctaatcacatcactccatacatgacagagctttgtgtggctggttggagaagatgaagtcagagaaggtgggagcttgagaaggactccataagttgttattggttgaaagatgaaac

SEQ ID NO: 8515 - DNA, 120 bp, synthetic construct
  source 1..120: mol_type = other DNA
ggtttggtaacaaataccagtcaccagcacagaagaaccaattcaaggagagccataaacaggactactattatgttcccccgaaaaccatccctagaatgcaatctcttctctatttgt

SEQ ID NO: 8516 - DNA, 120 bp, synthetic construct
  source 1..120: mol_type = other DNA
aatgaaaactggataaaaagatttaggggcaggggtgcggagggaccgacggacgcacgggcgggcggccgggagccatggagcgcggccctggggcccgggggcgcgggccggggtggg

SEQ ID NO: 8517 - DNA, 120 bp, synthetic construct
  source 1..120: mol_type = other DNA
gtgtggccaggcggtcctcccacaccctggcctgtggagccaggctccctgggaacccctggcctgaggatgggaaggggctgagcttgtcacaggggtgtggatgccacctggcgggag

SEQ ID NO: 8518 - DNA, 120 bp, synthetic construct
  source 1..120: mol_type = other DNA
aacctaggcccagagccatgagggggaggccagagcgtgcccagggcctccactggggatgtgtcccgttcgtttgagtggtgacatccaggtggcagctgggggctcctgcctgtagca

SEQ ID NO: 8519 - DNA, 120 bp, synthetic construct
  source 1..120: mol_type = other DNA
acccccgccccaggggcactccgtaggcaggatccctgcagatcctagctaggaaacgccagtgaacggcagcgcagggaacggggcggggccgctggcttcgcccaccgccacggtgtt

SEQ ID NO: 8520 - DNA, 120 bp, synthetic construct
  source 1..120: mol_type = other DNA
aaaactgagaggctgaggaattcctcaaacacagaaacaaacatcaaataataaatattcatgctttcacttgctcaatatcaatataaactttcccttttgaaagtaaacatgaaagac

SEQ ID NO: 8521 - DNA, 120 bp, synthetic construct
  source 1..120: mol_type = other DNA
gccatagagaacttcccatgaagacataggtatagattctattattcctacctgctgatgaagcaggatagttaattggaaaacacttatttcatgataagcagctcatgttttcatatt

SEQ ID NO: 8522 - DNA, 120 bp, synthetic construct
  source 1..120: mol_type = other DNA
ggataccaaacagaaatctgaacctacacaaagaaatggagacgactgaaaatcgctatgtacgtacttggatgttggggtttataacatgtccaaaatcaaattccctgacaacactag

SEQ ID NO: 8523 - DNA, 120 bp, synthetic construct
  source 1..120: mol_type = other DNA
aaaaacaatccaaaagtccagagtgataggcaaaaggttttaattgtatagattaaaattaactttggacaaaaattaaaactcaggcagagaatgtcttctttttgcaacagcagacac

SEQ ID NO: 8524 - DNA, 120 bp, synthetic construct
  source 1..120: mol_type = other DNA
tgtcaagagcagttggtggttctgaaatacaatcctcagccaaggatccctcctgtgttacagatggatcagctaaaacaagccaacactgaagacacaaagaatgaggttaggttcatt

SEQ ID NO: 8525 - DNA, 120 bp, synthetic construct
  source 1..120: mol_type = other DNA
aggatgtggagaaactggaattctcatacactgctggttggaatgtaaaataatgtacccacttcagaacagtctgacagttcctgaaaaggttaaacagcattaccatctgacgcagca

SEQ ID NO: 8526 - DNA, 120 bp, synthetic construct
  source 1..120: mol_type = other DNA
tcaaggaggagatactattctagtttgacagatcctttcctggacacactctcagaattccctaaggttcttatcgtggctaatggataacaatgcagaggctatgggagtgaataatca

SEQ ID NO: 8527 - DNA, 120 bp, synthetic construct
  source 1..120: mol_type = other DNA
gcaacacagcaagactccatttcaaaaaaaaaaaaaaatcaacttcccttctgttttcctagtgaactctccctatcttggcaactctactcaaaagttccaacctctgtaaagtcatcc

SEQ ID NO: 8528 - DNA, 120 bp, synthetic construct
  source 1..120: mol_type = other DNA
tttctttctctttctctgccccctgaaactcttaaaaggaagttagggatagttgtctggaacatcccagttccttatcataatgttaaatgtgcaccagagctgggggacatttaagag

SEQ ID NO: 8529 - DNA, 120 bp, synthetic construct
  source 1..120: mol_type = other DNA
caggtggctgacattacaacggaaaaagggaaaggaggtacaggaatggggaagagttcaaagggatatttaaaaatctgttaatatttaagtaggcatttttaaccaaataaaaagaca

SEQ ID NO: 8530 - DNA, 120 bp, synthetic construct
  source 1..120: mol_type = other DNA
tggggatgagggtgtggggtgagcaaagagaagtatctcagtttagaataggaaaatcagagaagaccttcactgacaatacttgagttgagacctaaataaggtgagagtaatcatgca

SEQ ID NO: 8531 - DNA, 120 bp, synthetic construct
  source 1..120: mol_type = other DNA
cagctctgtctttagcttttttttttttttttttttaaaacgaggatttggccattcaagaaacaacaacaataacaacaaagcaaaatcccaccacatacaagaagaaaaagagaggca

SEQ ID NO: 8532 - DNA, 120 bp, synthetic construct
  source 1..120: mol_type = other DNA
atgactagtaaaacataaagatatattaaatgattcttgaattcttagattttgacagtatacattgtattcaaacaacacactgagaaattgtttcatctcaagctctctcctttatgc

SEQ ID NO: 8533 - DNA, 120 bp, synthetic construct
  source 1..120: mol_type = other DNA
aggattttcctagatcaaaaacaactgtacctatttggataccaaaaatgaaaaagaaatagtgcagaatctttagattgcctaatgggatctggagaaacagctcttagtcccagtcta

SEQ ID NO: 8534 - DNA, 120 bp, synthetic construct
  source 1..120: mol_type = other DNA
tctgtcacaaactgtgacagtcagtgtcagcctttgcctggaagaaaatgagtcactttttcattagtaatcaagttatgtctattttttaagagtgacccagaaattcaaggccatgag

SEQ ID NO: 8535 - DNA, 120 bp, synthetic construct
  source 1..120: mol_type = other DNA
tctaaatcacttacctgtcactgtgaaactagattaatccacatactggtttagtaaaacctcacacaaaccagcatatacacagaagacagcaatcaagatgaagaaaacgtttgaaac

SEQ ID NO: 8536 - DNA, 120 bp, synthetic construct
  source 1..120: mol_type = other DNA
ggccatttctcagaaatgcagtattcaccaaacctggcccatgtacactcatgtaactatatgcagatttagtgttctagaatgatatgaggtactcaggcctacctaatgctactgtct

SEQ ID NO: 8537 - DNA, 120 bp, synthetic construct
  source 1..120: mol_type = other DNA
cagcagacaaagattttaaataactacaataaatgtccttaaaatacatattttgtcaattatacaaatcataacctaacctacccccagaatcctagtgaacttgagttgtccatgatc

SEQ ID NO: 8538 - DNA, 120 bp, synthetic construct
  source 1..120: mol_type = other DNA
ccaaaaggatggcctcaccaaattttttctttctctcaaggagtttgtttccctcaaaacaggaaagacatctgagggacatacccagaactgtatccataagcattccatcctatcaac

SEQ ID NO: 8539 - DNA, 120 bp, synthetic construct
  source 1..120: mol_type = other DNA
tcctaaaacaaaacagggaaaatccaaagaacaacctcagatttccctacatgcatccttcctcatagcctttttaaaacatccttgggtggtagcaatgaaggctactcacaaggatgg

SEQ ID NO: 8540 - DNA, 120 bp, synthetic construct
  source 1..120: mol_type = other DNA
tgacactgacaagataccatctcttctcaataatagagtagcaacacaggagcaaaaggaaattatggagttagagatggaaccagatcataagtatgatataccctatcttgacaagat

SEQ ID NO: 8541 - DNA, 120 bp, synthetic construct
  source 1..120: mol_type = other DNA
atgggcaacttctttttagagccccacttccgaaagaacagctgtctttgctcagctgtaggaaaaccacaggacttggaataactcacttcatgtactgtccttcttatgttaaaatga

SEQ ID NO: 8542 - DNA, 120 bp, synthetic construct
  source 1..120: mol_type = other DNA
aattaggtgtgtgtatcccagaagcacgggaggtgtaagatcatccactggggcactggaagaaattttaaaacatctccatatttatgggctaaaaaacatataataagctttacttag

SEQ ID NO: 8543 - DNA, 120 bp, synthetic construct
  source 1..120: mol_type = other DNA
actactaacctttccaaagtacatcttttaaattaagactaatacaccagggttttttctaaggattagatgagataatgtatgtaaagcacttagccacactgtgtctgacataaaata

SEQ ID NO: 8544 - DNA, 120 bp, synthetic construct
  source 1..120: mol_type = other DNA
ttatctaagcacattccctgggctcacactatccataccagaacttctggaatgcaggcttacggtgttttttcaaactctacattagttctcaaaaaatgaacaaggtcccacagccaa

SEQ ID NO: 8545 - DNA, 120 bp, synthetic construct
  source 1..120: mol_type = other DNA
aggaggaattaccatgaaagtaatgaactttaaagttcaggggcccctacactcgggtgcctattctgtgcccagaaccacgcaagcacaattaaatatgttgctttcaatctttacaaa

SEQ ID NO: 8546 - DNA, 120 bp, synthetic construct
  source 1..120: mol_type = other DNA
acaaacataattccattcttcttcccagttacaaaaagatttaaaagaactacaactcttcaaaatggaagtttgcaatttagatcattctcctattatgcaaatgttcattcagaatta

SEQ ID NO: 8547 - DNA, 120 bp, synthetic construct
  source 1..120: mol_type = other DNA
gaggttcacaggcaaattattttcactgctgtcattgaaattttaaatatagccacacctctcccatcccaacaccctttctactcctctactgttgttgactggcactaacccttttca

SEQ ID NO: 8548 - DNA, 120 bp, synthetic construct
  source 1..120: mol_type = other DNA
tgacacagggacatatagtgagtatatgctattggaaaaaatggtgctgatacatttgctcgacatagggttgccacaaactttcaatttgtaaaaaataaaacaaaatctgtgaagcac

SEQ ID NO: 8549 - DNA, 120 bp, synthetic construct
  source 1..120: mol_type = other DNA
tatgtcagagaagccactacatattacttactttaaatagtaacataatgccaaagacttgcatgaatctcaggatacggtcttttacctaaaattcctcatgaagattagaatgcactt

SEQ ID NO: 8550 - DNA, 120 bp, synthetic construct
  source 1..120: mol_type = other DNA
gaagatctttctaagaattagagctggccaaagatggaataaactgctgtggagagctgtctaccacaagagatgttcaagaagagagaaaatatggtacctcttgactagaatgttgta

SEQ ID NO: 8551 - DNA, 120 bp, synthetic construct
  source 1..120: mol_type = other DNA
tgtgtgcctattagataccaaggcatcatgccaggtacaggggtagggtatgggcattagaataaacacataaatgaaaatacacgattccttcctcatgtacgcattaacaataagcac

SEQ ID NO: 8552 - DNA, 120 bp, synthetic construct
  source 1..120: mol_type = other DNA
agttacttgtcagaatcacctgtaaaccttgaaaaaatatggattctcaaacttaccttatcagaatccctgggtgctgagtccaagatccaccccaacagattttgatgtagccaggac

SEQ ID NO: 8553 - DNA, 120 bp, synthetic construct
  source 1..120: mol_type = other DNA
tttacgcactgagatcctataataaaagaagccctatgtgtcagagtaatcccatttctgacatattatttaatacttaatttttcaaatcactttacaatcatatttattattccctac

SEQ ID NO: 8554 - DNA, 120 bp, synthetic construct
  source 1..120: mol_type = other DNA
agcccaagttatttccactaaagggtctgaagaaatgtagaatctaaaagtgtgggtgggatggggaagatatgatttgattccctttccttggtccaaccgtgttagaaacatccaacc

SEQ ID NO: 8555 - DNA, 120 bp, synthetic construct
  source 1..120: mol_type = other DNA
tgagattcccccaaacatatcttgctgtttctgtccctgtatcttttgttcctttggcttggaatgactcctgtagtccccttccctcctcctcttaatgaacttctaatcataattcat

SEQ ID NO: 8556 - DNA, 120 bp, synthetic construct
  source 1..120: mol_type = other DNA
tgtggggacctctgcgtagagggacaccagtttcttgtcacttccatattagcacagaacaagctggcccactgtaactaggaaacataaacaagtgaatacattcttttaatttaaaat

SEQ ID NO: 8557 - DNA, 120 bp, synthetic construct
  source 1..120: mol_type = other DNA
tgttccctttgtttactttaggcagttctgtcattttttaactgacccttcccagatgagatagtcagttttcagctgggtaaagtcagggccttgcaactgatggggtatttgaatcct

SEQ ID NO: 8558 - DNA, 120 bp, synthetic construct
  source 1..120: mol_type = other DNA
tattattctacctgttccacagatgataaaactgagaggttaggtacacttgccgaagttcacataactaggaagtagtggactcaggattcaaatccagatctctctcatctgcagctc

SEQ ID NO: 8559 - DNA, 120 bp, synthetic construct
  source 1..120: mol_type = other DNA
tctgccatctttacatgccatgatgtcataaaacatgcttctattttggtgatttaggttgttcctgtttgcactattataggtaatattttcattaacattcccactcacactttttgc

SEQ ID NO: 8560 - DNA, 120 bp, synthetic construct
  source 1..120: mol_type = other DNA
agtaacaaagacagtgtgttactgacagaaggataaacatacagatcaatggaacagaattgagaatcacaaataaaccctaacagttacaatcaattgattttcaacgaaagagccaag

SEQ ID NO: 8561 - DNA, 120 bp, synthetic construct
  source 1..120: mol_type = other DNA
tgagggaagtttatgaggaggctggagtcaaaggaaaactaggcagacttctgggcatatttgagcagaaccaagaccgaaagcacagaacatatgtttatgttctaacagtcactgaaa

SEQ ID NO: 8562 - DNA, 120 bp, synthetic construct
  source 1..120: mol_type = other DNA
ggctatttctgtatgatccaataacttattttgtcacagggcttaatttgccatttttggggatttgtcgactcattttgtctgaattttcacaactggtattatgtcactagctacctg

SEQ ID NO: 8563 - DNA, 120 bp, synthetic construct
  source 1..120: mol_type = other DNA
aggcatgagccaccatgcccagccaaagatcatttttttatatagacttcagccctttgtaaatattgtaactggggagtatagagtagaaaaaaagtatagttaaaacatttgttctac

SEQ ID NO: 8564 - DNA, 120 bp, synthetic construct
  source 1..120: mol_type = other DNA
atctcaaccctccaaaatttgcagagtgttgggactgtcatttgtgattttttttttttttttttggtggggtagttgaataaaattgggcagctaaatttttcagttccatgtgcctcc

SEQ ID NO: 8565 - DNA, 120 bp, synthetic construct
  source 1..120: mol_type = other DNA
gatgtggagaaattggaaagctcatacactgctagtgggaaagtaaaatggtgtagccacattggaaaagtttgacagtccctctaaatgctaaaaatagagttaccatatgacccagca

SEQ ID NO: 8566 - DNA, 120 bp, synthetic construct
  source 1..120: mol_type = other DNA
accaagggcaaaacagaaaggaaatgggggagtggaatttgcagatatctttactgccaactgtgtagaactggggctgaggtggttcaaagcaaagctacaaagtaaatattaagagga

SEQ ID NO: 8567 - DNA, 120 bp, synthetic construct
  source 1..120: mol_type = other DNA
tacatgtgcaggtttgttacatgggtatatggcataacactgaggtttggggtgtgaatgatcccctcacctagataatgagcatagtgaccaataggtaagtatttcaagctttgtccc

SEQ ID NO: 8568 - DNA, 120 bp, synthetic construct
  source 1..120: mol_type = other DNA
atataagccactactgtgcatatgattttaattcaattttaatctttatagaaactcttctcctctcctcctcacctcggatgagggtatcaaagcttaggaatgaagtgacttgttaag

SEQ ID NO: 8569 - DNA, 120 bp, synthetic construct
  source 1..120: mol_type = other DNA
caaaatggttaggcaggccattctgaaacaaaactgattggtttcaaatctcagctttgccatcaatcagctttgtgaatgtgggcagtataatttacctccctgtgctccacattagtc

SEQ ID NO: 8570 - DNA, 120 bp, synthetic construct
  source 1..120: mol_type = other DNA
tgttaggataggctagattatgctccagtaataaataatctccaaatctcagtaacttaatacaacaaaaatgaatttcttgctcattctacatgttcaattagggttagcaggaaggct

SEQ ID NO: 8571 - DNA, 120 bp, synthetic construct
  source 1..120: mol_type = other DNA
aaaatataactatccaattatttacaaattaaataagaaaaaaaataaaaggagaatttctagtgcttttgaggctaagataataaaattagaaagtccttttatcccaggaaaatcgcc

SEQ ID NO: 8572 - DNA, 120 bp, synthetic construct
  source 1..120: mol_type = other DNA
gttcttttgacaataagtataatttttaaaacaacaaggaaatttctcttctcaagaatatacccatgtgtgtaagaaagagttggtgtttggattaaaagatgcattttttaaagagtg

SEQ ID NO: 8573 - DNA, 120 bp, synthetic construct
  source 1..120: mol_type = other DNA
ccaatggagaacacagcctgtatcagaaccttagcagagactttgggccttttggggtctcaaatttatcatctctgaaacaagtacaacgaaattaacattgccacatgtgggcactat

SEQ ID NO: 8574 - DNA, 120 bp, synthetic construct
  source 1..120: mol_type = other DNA
gccccagcacactggttgtcgggagccccgcctccgctcgcggttgacagctcagctggtgccgagcaactcgtgccagccagtcgtgtctcagcctggagagtgcgcgcaccgcggccc

SEQ ID NO: 8575 - DNA, 120 bp, synthetic construct
  source 1..120: mol_type = other DNA
actttaaaatgaagccccattcaaggaaagggtaaggataagagaccatgtattgagacaaagacttcgtttctgttttttagtgggtgggagggtagggagactattccagcggtgtct

SEQ ID NO: 8576 - DNA, 120 bp, synthetic construct
  source 1..120: mol_type = other DNA
atactggcattacaaaaagctgatttggtcaccagctttcagatttatttccgtgaacagggcgagagttgtcaaaagaataagctcatggagctgatgaagaacttgatgatgagggga

SEQ ID NO: 8577 - DNA, 120 bp, synthetic construct
  source 1..120: mol_type = other DNA
cacatctgcaaagccctctcttgctatggaaagtggcatatacacaggatctggggattaggaatgtggacattcttataaggccattattttagcctaccacatcgttcaatgctgaaa

SEQ ID NO: 8578 - DNA, 120 bp, synthetic construct
  source 1..120: mol_type = other DNA
agtctggacctgactcccccaacccccattttttcagctacatgctaagactatgtttaaaatacctaaagactgggaaggggttgtttttgtctcagaaaggataagtaacacctcatg

SEQ ID NO: 8579 - DNA, 120 bp, synthetic construct
  source 1..120: mol_type = other DNA
taggggattatgggcaacatcctttatatgctgcttttaaactaagtcaacataggtttttattgcaggaagaagttcacatttgtgtctaccaaatgacaacatgtaaagtttggaatt

SEQ ID NO: 8580 - DNA, 120 bp, synthetic construct
  source 1..120: mol_type = other DNA
ttcagtatgctatcagcacagccatcttttgtagctcatctttcttccagattttccacccttaggatccttaatgctgaaattatacttcttgaccacaggtcaagtcccccacttcct

SEQ ID NO: 8581 - DNA, 120 bp, synthetic construct
  source 1..120: mol_type = other DNA
gaccaaaagcaaaatgcaaaaggtaagtttcagaggtgggtggagagaccatacaccatccctggggtaatgtgactgaatccaaagcaggttattttcatgtcttcttttgaaagagtg

SEQ ID NO: 8582 - DNA, 120 bp, synthetic construct
  source 1..120: mol_type = other DNA
gggaggggttggagaaagatgtaaatattctgaaaaaagtgggttagagatagagaagtataaaatgatggatgactcacttttcacgataggacctatataaaaagtcacactagccac

SEQ ID NO: 8583 - DNA, 120 bp, synthetic construct
  source 1..120: mol_type = other DNA
gtcttgctgtcatgccacacgcccctcactgtttgagaggccacaccgagccgaatcctttccatagttatcttttatcaaggtcattaattaggaagagcaatgtaaattcaataaaaa

SEQ ID NO: 8584 - DNA, 120 bp, synthetic construct
  source 1..120: mol_type = other DNA
aaccaccctgtcccagcccactccccaccaggacaaaattaattgctatcttatttatgttctgaaatctctgttaaatctaatttttctaataattatctctctgaatcatgtgcctgc

SEQ ID NO: 8585 - DNA, 120 bp, synthetic construct
  source 1..120: mol_type = other DNA
tttggataaccctggccataaatgaaactaccattcttagaaaattactggaagaaatcatcacaggacagtttgagaatgtcagaatatcagggggtggcagatggccttcagagaagc

SEQ ID NO: 8586 - DNA, 120 bp, synthetic construct
  source 1..120: mol_type = other DNA
atatgtattgctgtgttgtagcttgctcttgacctataatgtgcaatctgcagagcagagaagattgagtgagatcatgtctggaaggtatcctggatccttggacagtattaaaatggg

SEQ ID NO: 8587 - DNA, 120 bp, synthetic construct
  source 1..120: mol_type = other DNA
cccacagatttttttaagacattgttctggttgatggttttgacatccttctcctattttacctccacagaggggagtgcatacgtagtacattcctctttggcattgtttactctcagg

SEQ ID NO: 8588 - DNA, 120 bp, synthetic construct
  source 1..120: mol_type = other DNA
ctttgcattttatgttctctgcttagaagactctttccctagagacccccatgcctgtccttatggcttcatagagcagccttgtctactgaaaattgcaatcccctctacctcctccta

SEQ ID NO: 8589 - DNA, 120 bp, synthetic construct
  source 1..120: mol_type = other DNA
tggctggctctcatgtacttattgagaataggaactcttctgtggtgtttgcctttgtatccctagcacttgacacggtccctgatacataatagaagcttagtaaatacttgcagagag

SEQ ID NO: 8590 - DNA, 120 bp, synthetic construct
  source 1..120: mol_type = other DNA
ctctcagttttcttacatcatcgccaatgaattagccaagatgttctcctgtgctcttttggtgaaattttcagaacaaaacaagaaaaaggagatccctttggtacattagaatcctgg

SEQ ID NO: 8591 - DNA, 120 bp, synthetic construct
  source 1..120: mol_type = other DNA
ctgtctgtaactccaaccctgccccaacatgaggtcctctgtgtactttgtttgacagaggctttgctttctcattctttaacaatgttacttctcaaaagcaagcatagggttaattac

SEQ ID NO: 8592 - DNA, 120 bp, synthetic construct
  source 1..120: mol_type = other DNA
ggcttaaaacaacaatgatttattatttctcacaattctgttttggcaaactgggcattatcgctgctggtctcacttgggatcactcaactggctgcaactttctgatggcttgactga

SEQ ID NO: 8593 - DNA, 120 bp, synthetic construct
  source 1..120: mol_type = other DNA
ggggtgtggttatggacccttgcctgtacagcagtccctcctttggatgcctcaaactgcatagtactgaaccctatatttactatgtctttttctatacatacatacttaggataaagt

SEQ ID NO: 8594 - DNA, 120 bp, synthetic construct
  source 1..120: mol_type = other DNA
gggtggcagatataaggcccaaagtccttttcttttagagtttagatctaatatgacagattagtccttatttctcgatgctgggaaacactgacagaaaccaagctaagacgcagggaa

SEQ ID NO: 8595 - DNA, 120 bp, synthetic construct
  source 1..120: mol_type = other DNA
caggagagaagtaatactaaaagtactcaatctgtcaaaagtaattataattgttcagtaatgcagttacctctaaaatgtttgctgatgtaggaaattctagagaaaaaaggctctttg

SEQ ID NO: 8596 - DNA, 120 bp, synthetic construct
  source 1..120: mol_type = other DNA
gtgacctaaagatagtgggcatgtcctatgttggggaactcagctggtgaaagtttggtgctaatgaaggtgttggcttatttggaaatggaatcactagttcctcctatttagattgat

SEQ ID NO: 8597 - DNA, 120 bp, synthetic construct
  source 1..120: mol_type = other DNA
acgggagagaaagagtctttttgaaataatatttgacaggatttattaagaagatcacaatagtagctaataacaataaatactatttgagtgctcattatgcaccaggtacttttctag

SEQ ID NO: 8598 - DNA, 120 bp, synthetic construct
  source 1..120: mol_type = other DNA
ctaggaggcagggggtaaatattaaactttcagcaatcacaagtgcagtttgttttcccttttcaatctcatgtttaaaaagggaaacagaaggcttccacacacaggcattccacagac

SEQ ID NO: 8599 - DNA, 120 bp, synthetic construct
  source 1..120: mol_type = other DNA
gaaaagagagcaaccactttcacagagaatgtagcacttgaattagaataattcttttcgtaattttaaattatctcctttctgtctcctcattaaaacttgttttcttctcttctcccg

SEQ ID NO: 8600 - DNA, 120 bp, synthetic construct
  source 1..120: mol_type = other DNA
ttttatctgagctcaagggaactgctgaaagcttttagacagagaggtgacatgatcagattttcctcttagaaagatccttttggcttccttatggcctctgcataggaggagtagtct

SEQ ID NO: 8601 - DNA, 120 bp, synthetic construct
  source 1..120: mol_type = other DNA
aaagtcctggaggcagcatgagcctggtgaattcagaaataggaggctttctgtcatggatggagcaagggagggtcaatcggggttcatgttggctctatcttttcccttatcccccta

SEQ ID NO: 8602 - DNA, 120 bp, synthetic construct
  source 1..120: mol_type = other DNA
tgccttcaaaattgccttcactcctagaaaaaaatggagaaaggattatttaaaatctagagaaaaaggtgagcccataagtcactctctctgaattccagaagctcagcaaataatctg

SEQ ID NO: 8603 - DNA, 120 bp, synthetic construct
  source 1..120: mol_type = other DNA
aggtcatatgtttctgttttatctgagggttatcacaaaactttacctttttgtaaaacttaatctgtgaatattcagtactgagagccacttagagcatacttcgtctgacccttcttt

SEQ ID NO: 8604 - DNA, 120 bp, synthetic construct
  source 1..120: mol_type = other DNA
ttgggtatataactaggaaaggaattgctaggccacatggtaactctttgtttaaccctttgagagccaactttagtttattcatcttgaaaatgaagaaaacaattttttttttttttt

SEQ ID NO: 8605 - DNA, 120 bp, synthetic construct
  source 1..120: mol_type = other DNA
taaatcgtctattgggcatcatccttgagtcattgttactgcttttgtcttagaaatatggcgtcctttacatgcacttactgcttctgtagcacaaggcagccggagctctcagtctga

SEQ ID NO: 8606 - DNA, 120 bp, synthetic construct
  source 1..120: mol_type = other DNA
aaggaaggtaaaggtaagaattatccacagatatcaaattagtacagttaaaattgtggaagtttgattatatttgaaaagaatgtgtccattaagaagattaatcattttttgttagtg

SEQ ID NO: 8607 - DNA, 120 bp, synthetic construct
  source 1..120: mol_type = other DNA
aagagcagccaggcagaagggtcaacaagttcaaaggcctcggaaaagaaagcttctcttgcttcctgtttttgagaaataacaaagagaaacagtgtggctacagcagagaacagaggg

SEQ ID NO: 8608 - DNA, 120 bp, synthetic construct
  source 1..120: mol_type = other DNA
gtagtgagggaggagcatgtttactgggaaagatcaggagttcagttttagatatcacaagtatgtgatgtctaaattcaagcagagatttctactagacagtcagatatcaattggagt

SEQ ID NO: 8609 - DNA, 120 bp, synthetic construct
  source 1..120: mol_type = other DNA
acccactttcaggagctggcaaaaaacacagaaaaggatccagagagatagaagaacaagatatcatggaggaaataagcataaatgtccaacagaaatctaggatgcataagaataccc

SEQ ID NO: 8610 - DNA, 120 bp, synthetic construct
  source 1..120: mol_type = other DNA
aaactcaggctgaaacttattagtgggtcatgaaatccgtcgggtgggtcactggcagaaaaagaaataggaaatatcagaggacatcacacatagtgatggtgacaattactttttgaa

SEQ ID NO: 8611 - DNA, 120 bp, synthetic construct
  source 1..120: mol_type = other DNA
ggggaaggctcatggcaataaaggctattagttgaactgcctcagagctcaaaaagcttggggctgaaaactgcaaaggaactcattagaagtgagctctggattatcaaaggaaattga

SEQ ID NO: 8612 - DNA, 120 bp, synthetic construct
  source 1..120: mol_type = other DNA
gtttcgtccagctctggtcaccttaacaacctgtgaccttggacaagctcatttcacctctctggtgcctgctttctgctttccttctctgtaaagaaagaggactggaataaatcagag

SEQ ID NO: 8613 - DNA, 120 bp, synthetic construct
  source 1..120: mol_type = other DNA
ctgttgttggtattataggcatgagccactttgcctgggaaaatatgcatttttaagcaagatccctgaggtggctctgaagcagatcatctccaggtcatacctctcctagagaaagtg

SEQ ID NO: 8614 - DNA, 120 bp, synthetic construct
  source 1..120: mol_type = other DNA
tgttttaagtccaaattttccagaagttggtccagattcaccttttatcttttacgtggctatgtaatgagtgtgcctcattggagctgccacgtgtcaagaaggatattgccaagtgag

SEQ ID NO: 8615 - DNA, 120 bp, synthetic construct
  source 1..120: mol_type = other DNA
gtattgccatgggtcccatacaggaagtagatatggccctgtctctatctagtcttacgtgttagcagagttgtcaggcagctactgcatcatatgatttgagggatctcaaactactgt

SEQ ID NO: 8616 - DNA, 120 bp, synthetic construct
  source 1..120: mol_type = other DNA
gtgatcccacgagattaggaagattaattagcagcaatgtgcccagcatcacatggtaaatcaggtggttcagaggataatttagagtactgttctgttaccaaacttagtaacagaagt

SEQ ID NO: 8617 - DNA, 120 bp, synthetic construct
  source 1..120: mol_type = other DNA
ttttaaacatataaagcaagcaaaggagaaatcattgcagtacactgactctgaagcaaaataaagtgagaaaatgttgtgagtggtccacagctgagtatggcccactcctagggagac

SEQ ID NO: 8618 - DNA, 120 bp, synthetic construct
  source 1..120: mol_type = other DNA
ttatagggtctagaggaggatgaaatgagtcaattagctgaactcagcataatgcctatcacatagtaagctctcaataaatatttgccattattgtgacaaattgagagacggcaaact

SEQ ID NO: 8619 - DNA, 120 bp, synthetic construct
  source 1..120: mol_type = other DNA
acataagagacagacaagattacattagccaaactatttttaaatggttctctggaagcctagtatgaacatggtccatgtgtgtctgtgtctacgcacactgtgtgtgccaattcccca

SEQ ID NO: 8620 - DNA, 120 bp, synthetic construct
  source 1..120: mol_type = other DNA
aaaggggaataagcactaatcagtcaatggatgatgaagtggaaggacagagtttttgtcacaagcaaaagccttgaggcaagaaaccatagggtgcttgcacagaattagaagtggttt

SEQ ID NO: 8621 - DNA, 120 bp, synthetic construct
  source 1..120: mol_type = other DNA
gttggggctgatcaacatcttgcctggggcagaaggagtgaggaaaaattccactctgttatatgtttggatagctggaaagagacttactttcacctgaaggaagataagtaagaacat

SEQ ID NO: 8622 - DNA, 120 bp, synthetic construct
  source 1..120: mol_type = other DNA
ctaagtaatagtcatgtggctttttgccaagcaactttagaagtgacattgggccacagtgggcagttactatccctgttatttagaaacttggcttgatgaagtggggagtgaatgcaa

SEQ ID NO: 8623 - DNA, 120 bp, synthetic construct
  source 1..120: mol_type = other DNA
taaaagggctggagagaattgctgcagttagaggatggtgatgtcaattaggaatggaattccacctgacgctttctgagttggccttcaactgctagcttccaaatttctacctcccgt

SEQ ID NO: 8624 - DNA, 120 bp, synthetic construct
  source 1..120: mol_type = other DNA
cgttaaaccaaactaaaaaggttagaaaatgaggcttatgtgaaaagggcaatggaattgggatttttactttgggggaaaacagacttacaggtgacctaataatgccttttaggtact

SEQ ID NO: 8625 - DNA, 120 bp, synthetic construct
  source 1..120: mol_type = other DNA
cagaggttggctagaggctgtccagggttccttgaagtcacctagtgttccttgccatgtgagctttccccatatggccacttcaagtcagcaaggagaggctctagagcaaatctgcaa

SEQ ID NO: 8626 - DNA, 120 bp, synthetic construct
  source 1..120: mol_type = other DNA
aatacgtaagtctaaagttcaggaaatagagtagggctagagacataaatttgggagttatcagcaaatagatcattaaatattaaatttaaatatttaaagccatgaaaccataggaga

SEQ ID NO: 8627 - DNA, 120 bp, synthetic construct
  source 1..120: mol_type = other DNA
aggggagaccttctaggtgttgcctttgagaggtagggggaataggacttaattaatacataagtggaaggtttggctttagataggagcatggatagttgatctatggttataagtgga

SEQ ID NO: 8628 - DNA, 120 bp, synthetic construct
  source 1..120: mol_type = other DNA
gagtcattttggtattttgttggttgatggatgccagcaccccacaaaactctccaagatgctatgagaccacaggattaactgtgattcaggtcagactatgtcttaatgcaaagtact

SEQ ID NO: 8629 - DNA, 120 bp, synthetic construct
  source 1..120: mol_type = other DNA
ccaggcctatctgtgaacagagaggctccagccgagtgagagagattggttctgctaaggaatgtcctggggaggggagagaatcgctgagatcatgggtatttatgtgtatgttttctc

SEQ ID NO: 8630 - DNA, 120 bp, synthetic construct
  source 1..120: mol_type = other DNA
actagaacagcgatgcttagagaaagagcaaaccaaggtatggtatatcttgagttagagtaggagttgagttgagtgggagcctaagtttagagactaaagctaggagttatatgatgg

SEQ ID NO: 8631 - DNA, 120 bp, synthetic construct
  source 1..120: mol_type = other DNA
ccccactgtcctttctctggcaacaaaggacatttgtcacatgttggggcgacttatgtttctaatttgggacttaactgcactagtaaaagacagcaaatgtggaatcagtagaaaggt

SEQ ID NO: 8632 - DNA, 120 bp, synthetic construct
  source 1..120: mol_type = other DNA
ggtgcagtacccatttccttcactcactgaccttaacacaactctgattacactgagaactccttgaggtcaaggacaatgatgccaagaaaagcacttaggttttggcaatctttaatc

SEQ ID NO: 8633 - DNA, 120 bp, synthetic construct
  source 1..120: mol_type = other DNA
tagaagaacaggtttagaaagagaaaccatcataggctgagaacagttcaggcaaagccttggtggcctccaaggacacttgtatgattgatttctcaatcagcaaatgcccttgtcttt

SEQ ID NO: 8634 - DNA, 120 bp, synthetic construct
  source 1..120: mol_type = other DNA
aataccatctaatactgggtccatactcaatcttccctttaaaagtccgtgttaagatctggagattttaagtcagtatttctgagctccaatgtagtgcacaggagtaggatgtttagc

SEQ ID NO: 8635 - DNA, 120 bp, synthetic construct
  source 1..120: mol_type = other DNA
gggacggagcatttaaccatgaagctgaagggcacacaatgatgtggcaccaagaagcatagggcatgtttgggaaatccagttaggctagcagataataatggaagataaagctggaga

SEQ ID NO: 8636 - DNA, 120 bp, synthetic construct
  source 1..120: mol_type = other DNA
tgcataatttcatttagtctccctaacatcctttgtagattggtatcattgttatctccttgatagatgaggtgaatgaggctcttagagagggcaggtgacttgtcaagcccccttctc

SEQ ID NO: 8637 - DNA, 120 bp, synthetic construct
  source 1..120: mol_type = other DNA
ggacttttcagggaactttctgttgatcagtttatacctgatagagattccctatgtcacatcatgagactaagaactaggcagaggacatccatatagctccagtcatttgagacctca

SEQ ID NO: 8638 - DNA, 120 bp, synthetic construct
  source 1..120: mol_type = other DNA
cttgcagtgccaggccatggaactgatatagagatcttagacttgttcttcatacaaaattgaaatatgcgtgtttccatttgttaatcttttggtatttgtattgcagaataaaataca

SEQ ID NO: 8639 - DNA, 120 bp, synthetic construct
  source 1..120: mol_type = other DNA
ttgcatgctaacgtttaagctgaaataaagtaatccctcaattaacattttgcagaaacctccttaggttcccctacaaacctgcccctattttagttaatagaatgcattcccactgac

SEQ ID NO: 8640 - DNA, 120 bp, synthetic construct
  source 1..120: mol_type = other DNA
ttttaatatatactctgtcctgcaatggtttagagaacgaatagacttaagcagtgttcatgatccaggggtaatgataaataggttgggaaaattgataagtagctcaggggaaaccct

SEQ ID NO: 8641 - DNA, 120 bp, synthetic construct
  source 1..120: mol_type = other DNA
gaggatttcctttgatcaaacaatcccgagaaggaatctgtttcttataaataaaagcgttagtgtgaaaggataaatgtataaggatgtttattgcatcattagttgtaatggcaaaaa

SEQ ID NO: 8642 - DNA, 120 bp, synthetic construct
  source 1..120: mol_type = other DNA
ccagttcagtcactgcagaaagcagtttggagatttatcaaagaacaaccttaatggttccacttgctaaactgtatgtctggctctgattggctaatgctctgtggttttagggctgat

SEQ ID NO: 8643 - DNA, 120 bp, synthetic construct
  source 1..120: mol_type = other DNA
accaagaaacatgttacatgattttaataagttccctgatagaagagcatggggtgctctggggaaatattggagggtcatccattccacattaaaagagcaagttgtctgctgtggtct

SEQ ID NO: 8644 - DNA, 120 bp, synthetic construct
  source 1..120: mol_type = other DNA
aggaaactttctaaatgtcctctccacttccagtcctgctcctctcattcaatctcaacctaataattcagagtagttctgaaatagataattcaacaacaacaaattggcaaataattt

SEQ ID NO: 8645 - DNA, 120 bp, synthetic construct
  source 1..120: mol_type = other DNA
gaaaagatacagtaaaaatactgtataaaagataacaaacagtacacctgtttagggcactgaccataaatggaacttgcagcactggaacatgctgtgggtgatttagcgagtgagtag

SEQ ID NO: 8646 - DNA, 120 bp, synthetic construct
  source 1..120: mol_type = other DNA
ttcatatttccagtacttggtagagtgcattgagtacacaaaatagttatccaagaaccgtttattgaatggaacagccactaccaccaccaccaaaaaattctaggcccttattccaag

SEQ ID NO: 8647 - DNA, 120 bp, synthetic construct
  source 1..120: mol_type = other DNA
atagcataactatgcagtgacatttcatgacctttgccatattggttagaagttacaggttctacccatcctcaaggggtgaggataacacaaagatgtgatggccagtgggtgagaatt

SEQ ID NO: 8648 - DNA, 120 bp, synthetic construct
  source 1..120: mol_type = other DNA
tggcaaatgataatatttgtaaggtatagaggtaaatggatgaagcttctcacttggaggtggccaatttgggtgcttaggccactatgagggcaggaaaaaattactatcttggccaca

SEQ ID NO: 8649 - DNA, 120 bp, synthetic construct
  source 1..120: mol_type = other DNA
ctactctaaaaggatgcttagaacaagaataagtacagcatccaggggataatattgcatgaccattgggcagaagaaatgcatcaaatcatataaactgtactaaattgatatgctttt

SEQ ID NO: 8650 - DNA, 120 bp, synthetic construct
  source 1..120: mol_type = other DNA
cacccttctgttgggccttaaagactggatacaccaggcagaaaataggaaacggagcaatatatacagtgatgtggaacacagctaaggaattgggagtaatcgatgttaccaaaaata

SEQ ID NO: 8651 - DNA, 120 bp, synthetic construct
  source 1..120: mol_type = other DNA
cacatcccacagataactatctctcaagtgatcccagtatgaaagtctggagtatgagtataatatactcactgtaatatctgagtacaggaagttcacttcagagtcttcattctctca

SEQ ID NO: 8652 - DNA, 120 bp, synthetic construct
  source 1..120: mol_type = other DNA
ccttcttttgctgatgaatgttgaagctggagactcatttacaaatccccgttcaacattactgtctcccagacaaccttcattaataatgtgtctctgaagcaggccttagcagctaaa

SEQ ID NO: 8653 - DNA, 120 bp, synthetic construct
  source 1..120: mol_type = other DNA
caagtgtatgaagtatagaggtggggaagttcagggtagagaagtagtagcaggaatagaatatagggggacagaaaaatagagtggagccagattcagagaactttaagaagcaggtaa

SEQ ID NO: 8654 - DNA, 120 bp, synthetic construct
  source 1..120: mol_type = other DNA
tgactcctcatataaagtattaggaggaaagggaggcactttaaacaaggggaagacaacagtcaggagatcagtctttcctacggtaattttgagatgtctatgacacatccacatgca

SEQ ID NO: 8655 - DNA, 120 bp, synthetic construct
  source 1..120: mol_type = other DNA
atgattgtttctgacttcttaaaggtttccaaagagcacagggaaatcacgcaactgcctgtgtgttaccacaaagcctaactggctttactttgacattcttgcattttctcatctgcc

SEQ ID NO: 8656 - DNA, 120 bp, synthetic construct
  source 1..120: mol_type = other DNA
agaaaataaatgtccataattccactctctagacataaccattactaataacttgtggatcccctttgaacttttgtttatataagttatcttcttatattatatatttatcataggtag

SEQ ID NO: 8657 - DNA, 120 bp, synthetic construct
  source 1..120: mol_type = other DNA
atcagtcagggtgagtccagaaactttgcctttctatagatcaccatagattccaaagcatgttgcttaatttcttccaactttgaagctcacatacctagaggcaggcaaaaatgcagc

SEQ ID NO: 8658 - DNA, 120 bp, synthetic construct
  source 1..120: mol_type = other DNA
aagttagtaaaaatttagcatgattagaactgggaaatgtcctgctctaggggactgcaagtgattgctgaggttgttcctcttgttacgtgtctgaatgcctctcaagccaggaagata

SEQ ID NO: 8659 - DNA, 120 bp, synthetic construct
  source 1..120: mol_type = other DNA
gaggtcttagcagatgaaagcggctggctgtggcccgcgccagtagtgctttctgctccgcactcgccgtgagccaggtgtgcaaccggatttggggcgagggtcgcgctggctacctcg

SEQ ID NO: 8660 - DNA, 120 bp, synthetic construct
  source 1..120: mol_type = other DNA
gttcagaaggccctggaaaccgacccaggagatgccgtggttgtgccgctttgcgggttgctgattctgactatgaagccatttgtaaggtacctcgaaaggtggccagaagtatctcct

SEQ ID NO: 8661 - DNA, 120 bp, synthetic construct
  source 1..120: mol_type = other DNA
ttcctcccaatggttttctgtaaggcagttagttctctagttagttcttcctggagcattaaagccttcatccgcaaaatgcctgtaaatgattagagcataaggtaaaaggtttgggga

SEQ ID NO: 8662 - DNA, 120 bp, synthetic construct
  source 1..120: mol_type = other DNA
taaaattagttgggccaggatggatgggaaataaactcgtccccccagcccgccaccaaatatgaccaatattgtagaacgttacataaagactgagaaaataacagccaaaacaagatc

SEQ ID NO: 8663 - DNA, 120 bp, synthetic construct
  source 1..120: mol_type = other DNA
tcctttagttcagttctgccacaaatatggagaaaaccttttatcttaaagagcaagattgttctgtaaggttattttgattcctttgtttaatcctccacttaccatattttatgcact

SEQ ID NO: 8664 - DNA, 120 bp, synthetic construct
  source 1..120: mol_type = other DNA
atgggctacactatcattgtaggagtgactgttttatgtacttgatacttcacaagaattcattatgttgttggcttagtgggacttgctaagtgctctttcagcagactgttacctgca

SEQ ID NO: 8665 - DNA, 120 bp, synthetic construct
  source 1..120: mol_type = other DNA
atccagtccaccagcaagtcctgttagctatactttcaaaacatatccatatctatccatttatttccccctccctttactaaccaccaggatccaagctactattgtctttcacctgca

SEQ ID NO: 8666 - DNA, 120 bp, synthetic construct
  source 1..120: mol_type = other DNA
ccttgtttgtttatcatgtactccccactccaacccctgcaaaatataagtttcaagagcacagggactttgtcttgcatgatactctatcttcaagacagtgcctagcacatagttagt

SEQ ID NO: 8667 - DNA, 120 bp, synthetic construct
  source 1..120: mol_type = other DNA
ccctttacccagatttaccagttgcaaatattttgtcacatttgctttataaactctcccactgtctgtatttgcacagtattttttaaaaattcttgaaccatttgagaattagttgta

SEQ ID NO: 8668 - DNA, 120 bp, synthetic construct
  source 1..120: mol_type = other DNA
aaggttttcctgaggatgtgactggctctagcctgagtctgtcaacctttgtaggacttgggagatgaatactgtgtactccttgtgctctagggaatatttcatgtaaaagtgtagttc

SEQ ID NO: 8669 - DNA, 120 bp, synthetic construct
  source 1..120: mol_type = other DNA
caaaagcaagatggtacaattcagaacctcaaggaaactctgaaaagcagggaacgtgaggtaacatatttaccaatcaaggacctgtgtggaaacaattggtcccttcaaagtagacaa

SEQ ID NO: 8670 - DNA, 120 bp, synthetic construct
  source 1..120: mol_type = other DNA
ggcagggtcggggagtggtggagggatggaggtagaaataattcttaactttttgttatttagctaaaggaaacatttccccaagatttgtttagttgagaatatgtatttggtagcttt

SEQ ID NO: 8671 - DNA, 120 bp, synthetic construct
  source 1..120: mol_type = other DNA
aatcaaacacttttctgggtgttgggaagacaaaagatttggctactgatctcagtttaatagatgaagacaaactgtacagaaacttccacagagtaattttgatgatagaataaaagt

SEQ ID NO: 8672 - DNA, 120 bp, synthetic construct
  source 1..120: mol_type = other DNA
tgatcaggatagtaaatcttacagagctttaggagtcttcctttccttgcagcgggctatagatgaaaaattctctgctctagaagagaaagaaaaagaactgcgccagcttcgtcttgc

SEQ ID NO: 8673 - DNA, 120 bp, synthetic construct
  source 1..120: mol_type = other DNA
acagttatctactacctgtcaaaacctccagtggctgaaagaagaaatggaaaccaaatttagccgttggcagaaggaacaagagagtatcattcagcagttacagacgtctcttcatga

SEQ ID NO: 8674 - DNA, 120 bp, synthetic construct
  source 1..120: mol_type = other DNA
tcacacctccttcttctatgatagattcttataagccctttgatatttagcagaggcatttctttcctccagaagcttacagtgtcctttctgcattaggatcttagtgcaacactgctc

SEQ ID NO: 8675 - DNA, 120 bp, synthetic construct
  source 1..120: mol_type = other DNA
tgaatagctttttaaagatgtagattgtggagctcaactccagagaaagaaattacgaggtataggtgggacttaagaatttgcatttctaacaagtttccaggtgatagtgatgctgca

SEQ ID NO: 8676 - DNA, 120 bp, synthetic construct
  source 1..120: mol_type = other DNA
tgtgatcatagttcctgcatcttcctaagtcccctgacttttgcaattttttagggttcaatgcagataccttccagagatgatagcacttcattgactgccaaagaggatgtcagcata

SEQ ID NO: 8677 - DNA, 120 bp, synthetic construct
  source 1..120: mol_type = other DNA
caaaggaggcagcagataccacattatgttaatagcaattaaaactagtgctatattttcattttaggagacttggacacagttgcagggctggaaaaagaactgagtaatgccaaagag

SEQ ID NO: 8678 - DNA, 120 bp, synthetic construct
  source 1..120: mol_type = other DNA
agtaagtggtgtcggcccaattattatagacgaagaagctgaaacactgatttctcttttaaaatgggagtggagaatagtcatgtaactaataaatgccagagctatgattcaaactca

SEQ ID NO: 8679 - DNA, 120 bp, synthetic construct
  source 1..120: mol_type = other DNA
ttgtcttaccataaagattgtatggatatgtggtatctacaggaaagatattatagcctagtggctctgagtcagcttccctgagttcacgttctggatttaccacttactagccagccc

SEQ ID NO: 8680 - DNA, 120 bp, synthetic construct
  source 1..120: mol_type = other DNA
taatgatgattagtcctttttgtaaggcacctattccaaagagttcagccaaagagttgtcactccttaccttttcaatgtcctgtgaggcagagagcaaagagtgtcatttcaagcctc

SEQ ID NO: 8681 - DNA, 120 bp, synthetic construct
  source 1..120: mol_type = other DNA
gtctaacatgtaaaacttaatctcgaagaagcaagttaaatgaacagattcttagctcccagagaatctaaaggcggcaggctattttatattttatcaaaaaataagcagacgagtcat

SEQ ID NO: 8682 - DNA, 120 bp, synthetic construct
  source 1..120: mol_type = other DNA
ccccttatctgtattgggtagtgaatgctcatgattcaagcagagcctttcatgcctggatgtctgaactcaacagaaggttctttggtcttggaggaagaagcaaagataaagatcaga

SEQ ID NO: 8683 - DNA, 120 bp, synthetic construct
  source 1..120: mol_type = other DNA
agattcagggcagctctaatctccaggcactcagtggtggggaaagggttaagcatgttggactcatattatggaagagaaagtttttatgtagccaggcagtggggaataattcaggct

SEQ ID NO: 8684 - DNA, 120 bp, synthetic construct
  source 1..120: mol_type = other DNA
cctttggtttgtattgtatctctttcttctgcttccttccccctcctacccacctttgcccctatttattctctgtagctatagcttcagaagcatttttacttgcaagacgatggacac

SEQ ID NO: 8685 - DNA, 120 bp, synthetic construct
  source 1..120: mol_type = other DNA
actttaattatatacatctctgtccctccagacagatccctctgtcctcactctctgatttcattgaggatcttgggtgagagagagggacctgcaggatgaacaaatgtctactctaag

SEQ ID NO: 8686 - DNA, 120 bp, synthetic construct
  source 1..120: mol_type = other DNA
acaagttgcttgctccttatgttttggactcagccacctcaggaagcctcaagtctggccatgatagtaattttccctagattatctcccacaaaattctattctcaagcagatgtaaga

SEQ ID NO: 8687 - DNA, 120 bp, synthetic construct
  source 1..120: mol_type = other DNA
gatcaaaactaatgaaaaggctagatcctgagttacttttcaggcatttacatttaaaacttaaagttacatatgtatacatgtgccatgctgtgctgcacattatgcacatgtacccta

SEQ ID NO: 8688 - DNA, 120 bp, synthetic construct
  source 1..120: mol_type = other DNA
accaaccccagcagctctgtcagtcgttgatccatataagctgttctgggccctgctctcttcaatgtattggtgacctgaatggagatataaagcatataattaattctacaagttatc

SEQ ID NO: 8689 - DNA, 120 bp, synthetic construct
  source 1..120: mol_type = other DNA
aatagttggtgttgtcttccctgtcgctccaccttattctaattctgtaactgtgtctgccgactgtttccccagtgccctgagtcctccctctcagctgtccttgagggagttggagtt

SEQ ID NO: 8690 - DNA, 120 bp, synthetic construct
  source 1..120: mol_type = other DNA
agtgcccactattattgtgcatctgccagtcatacatatgacagtcatggtggaaacctccttgttacatgaccagtattgctgtttttaattgaccaaaacgtataaggaatccctgct

SEQ ID NO: 8691 - DNA, 120 bp, synthetic construct
  source 1..120: mol_type = other DNA
atctagcctcatgtcgttgtttcatagctgaggaaactcaggcctagaaagtttcaagtgacttgctcaaggttgcataatatctgtggctcccaatttctaacgtctaaaccttgcttc

SEQ ID NO: 8692 - DNA, 120 bp, synthetic construct
  source 1..120: mol_type = other DNA
actaaaaattagaacatatgaggctatggggcacaagtaaagaaaactagcctgcatgtcttgagtccaaggtttctagtgatggtgctgccaccaagaagctgtggaagtttgggcaag

SEQ ID NO: 8693 - DNA, 120 bp, synthetic construct
  source 1..120: mol_type = other DNA
caaacaggtaattttaacaggatgtggtaactgctgtaacatagggatgcatcaggttatgaggcagcccagacaagtggtatgtaatgacatcccttatcactgccatttttttgtcac

SEQ ID NO: 8694 - DNA, 120 bp, synthetic construct
  source 1..120: mol_type = other DNA
gatgtagtataaagtggccatatgtggctgctaactaccttattggacagtacaggtctagggtcttgggactctaaattagttcagctccattcaacatttattgaacccctgcggata

SEQ ID NO: 8695 - DNA, 120 bp, synthetic construct
  source 1..120: mol_type = other DNA
cttgaggcagtgtagtgtggcagttaagagacaagatcctggggccagactggttggttcaaatcccagtttgaaaactttcctatgtcccagtttcttcatgtgttaaaatagtaataa

SEQ ID NO: 8696 - DNA, 120 bp, synthetic construct
  source 1..120: mol_type = other DNA
ttcaaaacctcaagagccgggtccggtccctctcagttacaagtgattattcgtctagtctggaaagaccccggaagctgagagctgttggcaccttggaggggtcttcacctcatagtg

SEQ ID NO: 8697 - DNA, 120 bp, synthetic construct
  source 1..120: mol_type = other DNA
ttatgtgccagaattcagcttgggggagttccttagagatgttctcatagaaatctctacagaagcccccataactccataagttagcttccactctttccatacttacactttcctctt

SEQ ID NO: 8698 - DNA, 120 bp, synthetic construct
  source 1..120: mol_type = other DNA
gcagtagttcaagggctacattggttattattggggtcttctactcagaatttccagcgactatccaagggagtaaagtaggatcagacttgggagccacccagcccaccacctggtggc

SEQ ID NO: 8699 - DNA, 120 bp, synthetic construct
  source 1..120: mol_type = other DNA
caatgaaatacgggctcagagtccgttgtagccactagttggggttctttgtgtcatgcttgtgtctcagactacataaatgcttctgaaagtatctgtagtgaaggacacagtggtttt

SEQ ID NO: 8700 - DNA, 120 bp, synthetic construct
  source 1..120: mol_type = other DNA
atagtcagcgagtacacacactatgaagagaagaaagcttctcccagtcactcaggtagcctccactttctgggtggtaccatctttgtctaggctgagtggagaactcaggaaacaggg

SEQ ID NO: 8701 - DNA, 120 bp, synthetic construct
  source 1..120: mol_type = other DNA
tcaggttttgatctgcataccagttctgaccagtagttggctaatcatttaaaaagaaacatttttattggttttctctcattttatcctgggagcaaagaggcaaaatgtttctcccag

SEQ ID NO: 8702 - DNA, 120 bp, synthetic construct
  source 1..120: mol_type = other DNA
gaacagaggattttaaaatcagaatgcctcctcaaagaatgcctgggctgtgttacctggcaatttgagtatatttgcagtattgatctgaaatggtgccagcaccattgggatgtgttt

SEQ ID NO: 8703 - DNA, 120 bp, synthetic construct
  source 1..120: mol_type = other DNA
atagccactccgcagggtgatgtctggtcagggaatgcttttaccttctcaatcttttacccattcttttctctcattttctcttgatgatgtgtctcttttctccttaactttcttttc

SEQ ID NO: 8704 - DNA, 120 bp, synthetic construct
  source 1..120: mol_type = other DNA
caccagctatggcatctgactgtgaatcccatcctctgactcccaaagataattgatctcatgtagttacgtagactgtggacagtcaccttttagaaagtgctttgatgtatttgtagg

SEQ ID NO: 8705 - DNA, 120 bp, synthetic construct
  source 1..120: mol_type = other DNA
ccagtaggaagtgctgctgtttctgacctaaaacttgttattttagcagttctggcaccaacaatgaatgggcaacaaatgtgtcccatgacaaatggcaagagtattttctagcttcca

SEQ ID NO: 8706 - DNA, 120 bp, synthetic construct
  source 1..120: mol_type = other DNA
tagactaaggcaaaatctctggaatccaggaatcagtatatgtttccatactttctcaggtgattccaatatgtacccacatttgagaaccagctacaagtagggctaaaaactggcaag

SEQ ID NO: 8707 - DNA, 120 bp, synthetic construct
  source 1..120: mol_type = other DNA
ccttagtctaattagtataccaaagtgaactgggatctctgacattccacatgtctccttttagtctctattcttagcaatcacacacttccttgcaaattcttcccttctgacacccca

SEQ ID NO: 8708 - DNA, 120 bp, synthetic construct
  source 1..120: mol_type = other DNA
cagtaagacaatcgtaattttcaggaaaagactgagcccaaagcaaaatggtgcagttaatgtccggtgtaagcatccgtctgacttttctggatatttttgctttgtttggcaggggga

SEQ ID NO: 8709 - DNA, 120 bp, synthetic construct
  source 1..120: mol_type = other DNA
agagtcacctgacttctcaccccatacttaatctgcttatatactgctgatgtctgtgcctttgttgtgtgattgataagtggtggaaccaggtctgtaagggtcctcccacctctaccc

SEQ ID NO: 8710 - DNA, 120 bp, synthetic construct
  source 1..120: mol_type = other DNA
gctcacaggtgggcatcatttctcgtgtggctgggaggcagctgaccttggtgttagtctacttgatcagatcaatgtattatcgataacaaagtatttttattcacaaatatttatgaa

SEQ ID NO: 8711 - DNA, 120 bp, synthetic construct
  source 1..120: mol_type = other DNA
gctccttagctctgtctgtcagggtggatgtgcttggggtcatcttccagctgagctctggccccatgataataaatcaatcctgtgttcctctcaccagagcactcccaggaaacagaa

SEQ ID NO: 8712 - DNA, 120 bp, synthetic construct
  source 1..120: mol_type = other DNA
gagtccctccagtcagagctacaaatctacgaggcactttatggcaattccaagaaggggctgaaaggtatgtgttcttctcccctcaccccatgagctttttgcccttgcataggatgc

SEQ ID NO: 8713 - DNA, 120 bp, synthetic construct
  source 1..120: mol_type = other DNA
agccattcatggacatgagggtttggggtttggtagaaacatgttcacacaagtaaggtgtaggacaaaggttgctagaaatgccagctcaaactggaactacagtagtgtaagtgtgat

SEQ ID NO: 8714 - DNA, 120 bp, synthetic construct
  source 1..120: mol_type = other DNA
aaaatctagatgatctgacatgaggatattcataagtctttatttatctacttagaatattcacatagctcattgcggaaatagttatatgtttgataaaggattgtggctcacatgcaa

SEQ ID NO: 8715 - DNA, 120 bp, synthetic construct
  source 1..120: mol_type = other DNA
caatgttaccagactccttctctctcagcttacagcctggatgcctgtcaccaaatccctttgagcagtgacctgagccacctggtggcagaggtacgagctctgagagggcagctggag

SEQ ID NO: 8716 - DNA, 120 bp, synthetic construct
  source 1..120: mol_type = other DNA
gatggtgggtgatttatttcgggtggtcatcattcgctttctctaccccaccccttgcctgccttttcagataggcgtgtttgaccaggtcccccttctcaatatcctctatcaatctca

SEQ ID NO: 8717 - DNA, 120 bp, synthetic construct
  source 1..120: mol_type = other DNA
ttacatttagttacagggcatcatattagataccacacacaaattatacttaagactcggtttataaaaatacacctaataatttttcaaactagaagttacgttctcatggaacacccc

SEQ ID NO: 8718 - DNA, 120 bp, synthetic construct
  source 1..120: mol_type = other DNA
taagaaagattataaaaatatagaagccagaagatctctatggactttgccccacccttgtacattcccaggcttcctttcttgttcccggcctcgtccttttcttgttccctacctctt

SEQ ID NO: 8719 - DNA, 120 bp, synthetic construct
  source 1..120: mol_type = other DNA
ataagcacagtaaggggctacaggcacagtatgagaagtcatcctctgtgctgtgagagctccaatacaaatgtggtcatttatctcaggcaaggaaggtaacaggctcatagaggacat

SEQ ID NO: 8720 - DNA, 120 bp, synthetic construct
  source 1..120: mol_type = other DNA
gcacccatctcccacccctcaggtcccatggttaaatgatcacagaatgccccatgagactgagcctttttagccactgcctggaatcccaacatacaacttaagctggcatcgctggac

SEQ ID NO: 8721 - DNA, 120 bp, synthetic construct
  source 1..120: mol_type = other DNA
ggagcaattgtggctgcagagggaggggaggacagggggtggatagaaggagactccaagctgaatagccagaaagaaataaatgctttagaattctcatgctaagcaagtagggttaat

SEQ ID NO: 8722 - DNA, 120 bp, synthetic construct
  source 1..120: mol_type = other DNA
agaaaaacttgaggtatatgaaatggttaaaaatcagaaactaaaccttttaacatggacatcaaagctttgccataagcaattcagcatattcctagaaatgtttctaatccataacct

SEQ ID NO: 8723 - DNA, 120 bp, synthetic construct
  source 1..120: mol_type = other DNA
acctatctgctgaggagcatctgggcctcattcctccaagtccacgggagggtccagaagagggagtcagagatgtatcctggtggagctgggagaaaggcagaaagcctttctgacggc

SEQ ID NO: 8724 - DNA, 120 bp, synthetic construct
  source 1..120: mol_type = other DNA
tatagtctaatgcttgaactctaactttaaaagattaaggttttccttctttgtcattttgtaagaatccccagtctgaaaatatgaaagaatggttcttaaacttggtgtgcctgagaa

SEQ ID NO: 8725 - DNA, 120 bp, synthetic construct
  source 1..120: mol_type = other DNA
aatgcctgtatcacccctccccacactccaggcagtgcagcctgaagagaggttcctcttgcttgggggaaagaaagggaagtaagctaggggctttacctgggaatgcggagaacaatc

SEQ ID NO: 8726 - DNA, 120 bp, synthetic construct
  source 1..120: mol_type = other DNA
aacgaaataattgcttctatgtgatgaaactctgggagtacacaaggggactgctactttactaaacaaattttcaagtatatataactttgataaggtatccaaataaaataattcctt

SEQ ID NO: 8727 - DNA, 120 bp, synthetic construct
  source 1..120: mol_type = other DNA
cccaagcaacaaagaggcaccttagaaaatagacaagagacaagaggaagagaagctttaagagatatttggtccaaggaagagactcttcagatggaaggtcacgtcagctagaaacat

SEQ ID NO: 8728 - DNA, 120 bp, synthetic construct
  source 1..120: mol_type = other DNA
gttaggtaaagtgttctttattatcaataaacacaaaccattaaagaaaacattgataaattcgactttatgaaaattaaaagtttttgctcaacagtactaagagaacaaatataagct

SEQ ID NO: 8729 - DNA, 120 bp, synthetic construct
  source 1..120: mol_type = other DNA
ccatcatgtcttgcagcacagagaactgacacagggcttcaactactttgcataaattgggttgaattttacatgcagcattcaagtgaagagagttcttgacgcagtgcagacacagat

SEQ ID NO: 8730 - DNA, 120 bp, synthetic construct
  source 1..120: mol_type = other DNA
ctagaaaaaagctgaacaaactgaaagtcaacccttctagggtggatcagagaattgaggtcacagggaaaactgccaccttaaaaatgagaaacacaggctaacacacaaggagtcaca

SEQ ID NO: 8731 - DNA, 120 bp, synthetic construct
  source 1..120: mol_type = other DNA
ctcaatgcctgcagtggtgggttccatggggtagtgacctgagatttactcgttatggggtctctagcccagagcagggcatggtacctaatagtcaccccatgaatgctcagtgaaaga

SEQ ID NO: 8732 - DNA, 120 bp, synthetic construct
  source 1..120: mol_type = other DNA
agaagacacaccccctcgggggcccggagcgaccccgcgcttaggactgcaggcctggtgctgcagcaccgcccccgagtctgacttccaggcccgggcatggggtgcagacgcgcagac

SEQ ID NO: 8733 - DNA, 120 bp, synthetic construct
  source 1..120: mol_type = other DNA
ttgggttgggacttttaggttgttgtttttttttttagggttgtctccctgtattttgttgcagcccataatgcattgcaatcatggtcagctcgggggcttttcaagtattagacttat

SEQ ID NO: 8734 - DNA, 120 bp, synthetic construct
  source 1..120: mol_type = other DNA
caaatgtgtcgtaagtatcaactaccacaacttacctaaagcaaaacaggtcatctgagtagctctgtaactatgaaaataattggattcctaattttaaaatttccagaaagaaaagct

SEQ ID NO: 8735 - DNA, 120 bp, synthetic construct
  source 1..120: mol_type = other DNA
acttctaatacttccatttggttcttatttatgtcttgtatttatttgctgagtctttcaggaattaaggggtagatcaaaagagtttcagattaagaaaagctaagggaatctctgacc

SEQ ID NO: 8736 - DNA, 120 bp, synthetic construct
  source 1..120: mol_type = other DNA
gccctccacctctgctctgctgaggtgctgcgattattagctagcttttaggtagtcaagttgagtgttagtcaagttgactcaaaggataggatttagatattttgatttttagacagg

SEQ ID NO: 8737 - DNA, 120 bp, synthetic construct
  source 1..120: mol_type = other DNA
tgtccatcccatgctggatctgatgtttacaacattctagtcaagaggtaccatattttctctcttcttgaacatctcttgtggtagacagctctccacagcagtttattccatctttgg

SEQ ID NO: 8738 - DNA, 120 bp, synthetic construct
  source 1..120: mol_type = other DNA
gccgttgcaaatggtgcttcctttgaggatttctgcttcattagctcatgaacacatatttggtgtcggcagtttccctcagatgtgttagtgtggagagatataaaggtcactcatttc

SEQ ID NO: 8739 - DNA, 120 bp, synthetic construct
  source 1..120: mol_type = other DNA
acttctctaaatggtaaatgtggtaagtagcaaagacatttttgtttaattctctccttacacatgctttggttcagacgctgtcaagacacattgaagtttgaggacatgtgtatttcg

SEQ ID NO: 8740 - DNA, 120 bp, synthetic construct
  source 1..120: mol_type = other DNA
ccctgcaggtctcaagtgtttggttcagagtaatttcaggccatatgaatgctttcttaagtatcattggaatttactgggctggctgtctgccagctattaccatatttagcatgaaga

SEQ ID NO: 8741 - DNA, 120 bp, synthetic construct
  source 1..120: mol_type = other DNA
tagcagtatattttggagttgttatgaagataatatcagttaataaatgttagattcattggacagtaccaggcacatagttaaagtgcagtaaatagtagttattgttggtattggtgt

SEQ ID NO: 8742 - DNA, 120 bp, synthetic construct
  source 1..120: mol_type = other DNA
tcctgagtggcctgaagtgattttgctgctctttaaagcttccttaaggtttttcaagagcgtacaacataggctgcttctaagtgtatttttatttcctagctcttagcatttctcacc

SEQ ID NO: 8743 - DNA, 120 bp, synthetic construct
  source 1..120: mol_type = other DNA
aatctcagttggcaaggaatagctgtccagaatgctgcatagatctagtgaaaagatttagggaagttgtaactagtttaataaccatctgtggagtgacatagattgacacacccaatt

SEQ ID NO: 8744 - DNA, 120 bp, synthetic construct
  source 1..120: mol_type = other DNA
actgagcaaatgcagtgaaagattcttttgttacactgatcatcatttgtggagagactctgaagaaggataaagctctggctgcatagtcaaaccagacctactactcaaggacatgca

SEQ ID NO: 8745 - DNA, 120 bp, synthetic construct
  source 1..120: mol_type = other DNA
ggtgttgctgcaaatggagaaacctagagttctcttctgtgcttaaagacacaaacatggaaagttttaagttccaatatggtcacttaatatatacaaaattttctgtctttgctgtct

SEQ ID NO: 8746 - DNA, 120 bp, synthetic construct
  source 1..120: mol_type = other DNA
gtggccctgtgaggaccagaaccctccaggggaagctttctgggtgaggcaagaggtgaactgggccttgaaggaatgggtagaatttagatagtaatgaggaaggcagaaatcagtgga

SEQ ID NO: 8747 - DNA, 120 bp, synthetic construct
  source 1..120: mol_type = other DNA
ctgtatgtataaaattgccttctccttttatttcttttgatactctctctgcagtctctattcatgatctactccccatctttttatgggccccttaaagctagagattatgtttattcg

SEQ ID NO: 8748 - DNA, 120 bp, synthetic construct
  source 1..120: mol_type = other DNA
cctattaaaatcctttatcaaatatgatgtttccctaaggggtcttttgtaaaggaagtcttggttactagcatctccatctgtggcccaggcttgagtgcagtagagcaatcatggatc

SEQ ID NO: 8749 - DNA, 120 bp, synthetic construct
  source 1..120: mol_type = other DNA
ccttctatatgccagtcattgtgttaggcactgggagtatgagaattaataattttagtctgttgacagataatcataataagggctaatgagtaacacaggctcagggttataagaaca

SEQ ID NO: 8750 - DNA, 120 bp, synthetic construct
  source 1..120: mol_type = other DNA
atatatgtatgtatatatattccaacccaaagtgtcttggtggcaatcttaatatatatatattggcaatctttatatatatataaaggagagtttgttaagtattaattcacatgatca

SEQ ID NO: 8751 - DNA, 120 bp, synthetic construct
  source 1..120: mol_type = other DNA
cactcctgtatttgtttgcattttaaggattaaagacagaaatagaaatgtaaacaactttattttgaaaatatttcaacactgcaaatatctctgggtctgatattctagtaatctaat

SEQ ID NO: 8752 - DNA, 120 bp, synthetic construct
  source 1..120: mol_type = other DNA
tatccttctatctttttacttttgtccagttccaggtatccctgtttttttcttcactcttccttccttgttcatgggagtttttcttgaggacttcaagcccagcttcggagaatcctg

SEQ ID NO: 8753 - DNA, 120 bp, synthetic construct
  source 1..120: mol_type = other DNA
cttatcccacattacaaagatttactacttctaagtgatttataattttaccacctacctttaggtctctgatccattttgagttaatttttatgtgcaaggagggagtctaacttgatt

SEQ ID NO: 8754 - DNA, 120 bp, synthetic construct
  source 1..120: mol_type = other DNA
ctcggcggggagaaataagaacgaagctgggccaggggaagggcagaaattgccatgacaggctcatgacacacaaatatttatcagtgaacaaggataataataagttctgtgttgcag

SEQ ID NO: 8755 - DNA, 120 bp, synthetic construct
  source 1..120: mol_type = other DNA
gtgatttgttcatatgtgaagtatgaattgcttaatgtgacctgcttctctgaatttatttacagaaaatgaaagtgatgatgaggaagaggaagaaaaagggccagtgtctcccaggta

SEQ ID NO: 8756 - DNA, 120 bp, synthetic construct
  source 1..120: mol_type = other DNA
ttgttgtctaatgtctgttggttaaatcttctatcatccctgtcctgcctggctcatcaggaatctgcaggagtctgaagaggaggaagtcccccaggagtcctgggatgaaggttattc

SEQ ID NO: 8757 - DNA, 120 bp, synthetic construct
  source 1..120: mol_type = other DNA
cacgtgaagatttgaatgaaactacagttccatttggaagcccagacataggatgggtcagtgggcatggctcttttcctattctcaaaccatgccagtggcaacctgtgctcagtctga

SEQ ID NO: 8758 - DNA, 120 bp, synthetic construct
  source 1..120: mol_type = other DNA
tactcttttcaaaaatgatggagaggatcactatgatgatgaatgattccactggtcacattattgagcaatcagtaaatccaggcacatcctcggggtattactgacctattattaaaa

SEQ ID NO: 8759 - DNA, 120 bp, synthetic construct
  source 1..120: mol_type = other DNA
ggggcggcaacgggcagggcctccagtgcaccttctgcgccgtggagccgcgggggctcagctgggcggtggtcgggtcctgaggccggagggcgggagcaggggaggggaaaagcaaaa

SEQ ID NO: 8760 - DNA, 120 bp, synthetic construct
  source 1..120: mol_type = other DNA
aaaaataaaaaaataaaaatgtaactggatagacctaaggttcttgaataagcagaaaataatttaggtaaaaaccaaataataaactaacattctgaaaggtttaggatttggaggccc

SEQ ID NO: 8761 - DNA, 120 bp, synthetic construct
  source 1..120: mol_type = other DNA
cttttgttgcctgatgtccacagtttcaaaaaacattgtttcatgtattttgttcttttgtttaattttgtttaattttgtttcaggtgagaggataaatccagtctctgctactccatc

SEQ ID NO: 8762 - DNA, 120 bp, synthetic construct
  source 1..120: mol_type = other DNA
atattcatgacaacacaagaaggtgaagtcgggaagaggaaatggacaaggtcatcccaaattgaaataacttataaaagataaattataatatctccagaaattaactgtaaacattcc

SEQ ID NO: 8763 - DNA, 120 bp, synthetic construct
  source 1..120: mol_type = other DNA
atgcgcatttcctttgagtaagcactactgattctaggaatgtgtcctaaggaaaaaataagtcaaatgtttaaaggtagtcacaagactattttggtagtaagcagtcttttttactgg

SEQ ID NO: 8764 - DNA, 120 bp, synthetic construct
  source 1..120: mol_type = other DNA
caaattcatgatgtctttcaggaagagagtttgttttcttttttaaccaaaatgggagattgatcctgtctgtgtcccctagaggagcagaggctggtttgtattagggcagctcttgta

SEQ ID NO: 8765 - DNA, 120 bp, synthetic construct
  source 1..120: mol_type = other DNA
ttctaaagttttctgaatgagctctttcctctgagcgaaatgcctgaatgtatatataacagcaggaaagggccagaattgcacaaacactaaagtagtctgctgacactgaagtagtct

SEQ ID NO: 8766 - DNA, 120 bp, synthetic construct
  source 1..120: mol_type = other DNA
gccagtgtcaatgacagtggtgaatacaggtgccagagaggtctctcagggcgaagtgaccccatacagctggaaatccacagaggtaattatgacttggaccaggagggccggaaacca

SEQ ID NO: 8767 - DNA, 120 bp, synthetic construct
  source 1..120: mol_type = other DNA
ttctattcatcaagagatggagactgcaatattcttcagggaaaaatgcttcattcaatatgcaagacaaaataaccaaatgtattatttagttattcagaagtgatgagtttaaacttc

SEQ ID NO: 8768 - DNA, 120 bp, synthetic construct
  source 1..120: mol_type = other DNA
aagttcatttgttcttattactgtatatttcatattttcccattctgctgaggggctcgggttgcttctggttttgaccacttacaaatagtaatgctgtggatatttttgtttacatgt

SEQ ID NO: 8769 - DNA, 120 bp, synthetic construct
  source 1..120: mol_type = other DNA
agtctttcagcatctgctggctgtgggtgggaataagggagggaagagaattaattctatttggaagcattatatcagtatccatgactgtaaaattcatgctatgtatagcatagaaac

SEQ ID NO: 8770 - DNA, 120 bp, synthetic construct
  source 1..120: mol_type = other DNA
agaagcaagtcataggttccacccacactcaaggggattatgcaagggagtgagtcattgggatcattttagaattctgcctaccatgctgtatgaactgtttttgtttcaaccaacttc

SEQ ID NO: 8771 - DNA, 120 bp, synthetic construct
  source 1..120: mol_type = other DNA
agggcataatggtgatccatttcatccatcattattttagttgtaaagaatacagactcactctaggtagataggagagttagaaaataataccatggaatctcatggaagccccataga

SEQ ID NO: 8772 - DNA, 120 bp, synthetic construct
  source 1..120: mol_type = other DNA
ctgctggaagtaaaaagggttaatgccttatggatgcattttctagggccaggtttcccaagggggtaaagggcatgtcttttgtgaaaaggacctggatgctaaacaggcaaccttgtc

SEQ ID NO: 8773 - DNA, 120 bp, synthetic construct
  source 1..120: mol_type = other DNA
gtaagtccactgacagggcccagcaattaagctcttccaaggagcctgtccctgtctatacaccatatagccagttagagctaccgccagttccttcctgctccctgaaatgaccagtgc

SEQ ID NO: 8774 - DNA, 120 bp, synthetic construct
  source 1..120: mol_type = other DNA
tcacgcctctgtgttcaggatacttagttcatggcttttctctttgactttactaaaagagaatgtctccatacgcgttctaggcatacaagggggtaactcatgatgagaaatggatgt

SEQ ID NO: 8775 - DNA, 120 bp, synthetic construct
  source 1..120: mol_type = other DNA
gccgttcgtgtcccattcgcccgagtcaaggggcggccccccaaaatcccaacgtcattgtttcctcggggccggcaggtgtgaaaacccggcggcagaatggaagttcggtagtctgcg

SEQ ID NO: 8776 - DNA, 120 bp, synthetic construct
  source 1..120: mol_type = other DNA
aattcatcctagggccacaagagcttctgtaagagttcaggcccgtttcagaacactcagaggttcctagcctgagaagtaatccccaaagcagaccaaccggtttggggtaaaacagga

SEQ ID NO: 8777 - DNA, 120 bp, synthetic construct
  source 1..120: mol_type = other DNA
gagccatgaaatatgccacattttagaggttgcgtagaagaggtggtagcaaaggatattgataaggagtaccagtgaggtaggagggaaaacagagaataaaacgtctcaagaaagaga

SEQ ID NO: 8778 - DNA, 120 bp, synthetic construct
  source 1..120: mol_type = other DNA
ctttccccaggcctcttaagcattatttacaaatgtctgtatttagccagtttttgtttttctttcgatgcaactacaaggtcaccagctatgcaaggtcacaagttatgttatgctata

SEQ ID NO: 8779 - DNA, 120 bp, synthetic construct
  source 1..120: mol_type = other DNA
tcattttctaccttgaattctagtttattgtgaccaaagattgtaaaatttcaggatatggctgaattaaaatcttggtcctgcacttaagtagctccttgaattgcaatttcttatccc

SEQ ID NO: 8780 - DNA, 120 bp, synthetic construct
  source 1..120: mol_type = other DNA
caagaggattgtctgataaattgcgtttggaaaataagaaaaagcttattcactcaccagcctaatagtcacaccaatctataatcccagcactttgggaagccaaggcaggtggatcac

SEQ ID NO: 8781 - DNA, 120 bp, synthetic construct
  source 1..120: mol_type = other DNA
taagcaatattttaaagtaaatggaaatgttacaacctggatgaggggtgaggaattaataacctctaatcacagaataaaaatggaatgagaattccatctacccaaatcagacaatta

SEQ ID NO: 8782 - DNA, 120 bp, synthetic construct
  source 1..120: mol_type = other DNA
tacacatactccaactcattcaccaatccttgaaaagattatgtaaccaatctcaatgccctgacccaggccaagcccatttctacatgtgcagtgttctctggatctgatatttaaagc

SEQ ID NO: 8783 - DNA, 120 bp, synthetic construct
  source 1..120: mol_type = other DNA
tgctttacatgacagtagaacatttaggctaagctggaggactggggagaacaagtgaagaaggtaagttttggctagataataggtggcctttagtgtcaggatgaggatttggaagtt

SEQ ID NO: 8784 - DNA, 120 bp, synthetic construct
  source 1..120: mol_type = other DNA
gcaaaggtgactcttataattgggaaagtttggaaccaagacagggttcttgtcctggaggaagtattttcctgtggagaaggacctgtaaacagcctatgaagtgctcagctttcacca

SEQ ID NO: 8785 - DNA, 120 bp, synthetic construct
  source 1..120: mol_type = other DNA
actcattacaggactacaggaaactccttagtcctaaacccgaatgcatccgtgaccatggtaacactccctacctgaccaaaagctatcaaacgctctgacaagtgtttacagctgctt

SEQ ID NO: 8786 - DNA, 120 bp, synthetic construct
  source 1..120: mol_type = other DNA
atcgccagatatttactcccgcccgcttaaattactattctggcttggacaccgcctgtagtatgcaatgaggaagatgctgagctttaattaagcttatagttcctaaataaaccagga

SEQ ID NO: 8787 - DNA, 120 bp, synthetic construct
  source 1..120: mol_type = other DNA
cattgataggagagggtctaggcagtcatatttatagacatagtctcctcttgattgggcctgaaaaggaaattttcaaacttgtgatctcattggttaaaattcaatcctctttactgg

SEQ ID NO: 8788 - DNA, 120 bp, synthetic construct
  source 1..120: mol_type = other DNA
gaaacgcttaaaacttactttgatggtgtcattatgaactatcttcctactgaagtcaaagtaaagtaaaagtgatttcaaggggacttcctgaacactaaacacaaagtagaaatctgt

SEQ ID NO: 8789 - DNA, 120 bp, synthetic construct
  source 1..120: mol_type = other DNA
gttgccttaaaagtcatctttaataacagaattcagatcaattgttagttcaatttcacctagtccccacattggacactagagtgacatttctgtgaaaggtctcaatccaccactata

SEQ ID NO: 8790 - DNA, 120 bp, synthetic construct
  source 1..120: mol_type = other DNA
gtaagggattttagctgtttgtttcagctgaaaataattcttaagtcgaaactggcacatttggaggtagcatgtcctgatccccttaaaaagggaactgcacagacaccgtatctctga

SEQ ID NO: 8791 - DNA, 120 bp, synthetic construct
  source 1..120: mol_type = other DNA
gggatctgaattctcccggggactgtggcgtagcggttaaaaaaaaaaaagagtgagagggacctgagcagagtggaggaggagggagaggaaaacagaaaagaaatgacgaaatgtcga

SEQ ID NO: 8792 - DNA, 120 bp, synthetic construct
  source 1..120: mol_type = other DNA
tttggcatgagccacggtgcccggccaattactgagaattcctgcctttttcacaggattattttaaggatcaaatgaaaagttctgtgtgaaagaagaatgaggccatgaagtgataca

SEQ ID NO: 8793 - DNA, 120 bp, synthetic construct
  source 1..120: mol_type = other DNA
attagtaactattaatagagtagcacaaattaattgggtgcttgttctggaccagatactgtgctactactgtgctaggtcctttgtttttttagacatggggtctcactgctgttgccg

SEQ ID NO: 8794 - DNA, 120 bp, synthetic construct
  source 1..120: mol_type = other DNA
cactagcctaaggcagaattaaatgtgaacaaagcacgtttttcacttcataaaagccacagattcagagtggacttactggcaaccaaggtagccacgtagaagctggttattagagga

SEQ ID NO: 8795 - DNA, 120 bp, synthetic construct
  source 1..120: mol_type = other DNA
gcctcaggaaaggcaaaatggcagctttacaaaacgaagttttattccatttccccttctcccctcttaattctcatagatcgctgcagtgaatgcttttaacctgtcaactgtgatgaa

SEQ ID NO: 8796 - DNA, 120 bp, synthetic construct
  source 1..120: mol_type = other DNA
tgcggataggccaattggccgaagtcggcaaagctcaagacggcaccgcagcagggggacccgaccccgttttgttgggagcctaagcggaagtgccttccccgctctaatgccggagga

SEQ ID NO: 8797 - DNA, 120 bp, synthetic construct
  source 1..120: mol_type = other DNA
agattccgcctccgaggcccttactctccgccgccagggcgctttggaaaacaaaacagaaactaagacttaagtcagctcagtgaagccaagacccagctccgccacactagcgagcac

SEQ ID NO: 8798 - DNA, 120 bp, synthetic construct
  source 1..120: mol_type = other DNA
gcgatcgggaaagtcgccgaaaacgccgctgcttcacctttttatagacagaacggcgattgtccacggagcactttgattggctcaagcaaattttgtcccgatagccaataggatagc

SEQ ID NO: 8799 - DNA, 120 bp, synthetic construct
  source 1..120: mol_type = other DNA
tgatgggagaggaatataagataaagctataagatgtagcttggtcgagaactaccttgtagtgacagggtcatgtgcacataatttgccttttccaaagtgagacgatatgctacgggt

SEQ ID NO: 8800 - DNA, 120 bp, synthetic construct
  source 1..120: mol_type = other DNA
cacaatttgatcttacataaacttatcaaaattaacactgcgtttctcaacaggaaacaatctcctgggcacatattcacgggtacgtaaccaggccaaagacagttcaagagcagccct

SEQ ID NO: 8801 - DNA, 120 bp, synthetic construct
  source 1..120: mol_type = other DNA
ttccaaatattactaaatctgtcttctgactttcaattgtatcaccttttctccgtccacccatgaccatgccttaactgaagtcctcgccagctctggtctagtagattacatagtcag

SEQ ID NO: 8802 - DNA, 120 bp, synthetic construct
  source 1..120: mol_type = other DNA
taaatgtgtacagtatggatttatgtcgtctatatattatgcatttatttgtcttcttcgttgtgatggtaagctcctggagggcaagtcttgcatccactgctttgctggcaacccgac

SEQ ID NO: 8803 - DNA, 120 bp, synthetic construct
  source 1..120: mol_type = other DNA
tctgctccatactgggagtagttaccgcaaactgccctatgaaattggttggggttcttactgttagcatgtttattactttatcagggctctctgtaggagagtctatgagaaaatctt

SEQ ID NO: 8804 - DNA, 120 bp, synthetic construct
  source 1..120: mol_type = other DNA
atcttcttcagcactagaagcaaatctaacctcggagatgagaagtggtcaccacacccaaatagacattgtcacaagactcgaatcttccatctattctaagggcccatttatcttttc

SEQ ID NO: 8805 - DNA, 120 bp, synthetic construct
  source 1..120: mol_type = other DNA
ctatgacaatggagtattcattccccagatacagcaccgtgaaagagaggcaggaacactggatagtctaagacctggtctttcttggctggtgtgagacagtggaggcctcactacttg

SEQ ID NO: 8806 - DNA, 120 bp, synthetic construct
  source 1..120: mol_type = other DNA
ttctcttgaaaattctcattatgtccagctggttccggggaaagcctaccatgaaagtggtattgttacttagacttagggtcctttgatcagaattgatgatgtcctcagctaagtcag

SEQ ID NO: 8807 - DNA, 120 bp, synthetic construct
  source 1..120: mol_type = other DNA
attcattcaaaatttaccaagttggtctaccatctaccaggcactgccatggggcctggagatatcccagtcttaccttcaaggcactctgatctgatgagagaaatataaacatgttat

SEQ ID NO: 8808 - DNA, 120 bp, synthetic construct
  source 1..120: mol_type = other DNA
catcctaagtggattaatgcagaaacaaaaaaccaaatactgcatgctcactcttacaagcaggagttaaacactggggacacagggacataaagatgggaacagacactggaaacttca

SEQ ID NO: 8809 - DNA, 120 bp, synthetic construct
  source 1..120: mol_type = other DNA
gcaaatatcttcatttcttaaaacatgcagtttcctggtatcataaaaccctcaaatagttgagccctaacttccaacagagtatttgagacttcaagaaacaataaaagcagctattat

SEQ ID NO: 8810 - DNA, 120 bp, synthetic construct
  source 1..120: mol_type = other DNA
gtgcctttaggacaggatggtttcttactattttttgtatctccagggcctagataatgccagtcacattgtagatgcctagtaagtgcttgttgaatgaatgagtgaagagaagcagat

SEQ ID NO: 8811 - DNA, 120 bp, synthetic construct
  source 1..120: mol_type = other DNA
gaccaccatcatacatgcagtcctttgatgaccaaagtgtcattaggtgacacataacagcaactgtgaagagctgtaaagaaaaagacctattggaaccaacccaaatgtccaacaatg

SEQ ID NO: 8812 - DNA, 120 bp, synthetic construct
  source 1..120: mol_type = other DNA
tgccagctgcaaggcagagccaaacccaatatggccccatcatccctggctcagctgtgctacctggccatgctggaaggggtttgatcttccaggaatttgcttcacagctctttcctg

SEQ ID NO: 8813 - DNA, 120 bp, synthetic construct
  source 1..120: mol_type = other DNA
cccaaagcactgagattacaggcctgaaccactgcacctggcctgcagcattttctccttatctttagttttcagagtttcatttttacatgtctaggtgtttgtttcttatttgtcctg

SEQ ID NO: 8814 - DNA, 120 bp, synthetic construct
  source 1..120: mol_type = other DNA
cagtgatgtgcaatctcttggcttccaagaaaaatctaccaaaactagtttagcaactttcatttcctggcttgggtgggtggagggcagaaaacgaccaataatatttttactgctcca

SEQ ID NO: 8815 - DNA, 120 bp, synthetic construct
  source 1..120: mol_type = other DNA
tctcctcctgctcgcgtcttagttgttgctcgctcctcaaccgctgctggagcctctcttcctcctcctggcgcttcagccgctgctcgcgcctctcctcttgctcccgccttagttgct

SEQ ID NO: 8816 - DNA, 120 bp, synthetic construct
  source 1..120: mol_type = other DNA
tcgcagttgctcttcgtctggaaactcctcagtttcgtgacctttgcaactctgcagctgctcttcctctgcacggcgctcttcccgttcttgccattcttgcctttgccgccacagctc

SEQ ID NO: 8817 - DNA, 120 bp, synthetic construct
  source 1..120: mol_type = other DNA
tattcactgataaaagtagcacctctgctcttggacatattcatagggtgaagtgctactaggaaaactgagaaaatatgagccagaacttcccccatcatggttacttcctcctttgca

SEQ ID NO: 8818 - DNA, 120 bp, synthetic construct
  source 1..120: mol_type = other DNA
ccgtggcctggagactggccagatccagagccctgtcggccatagccagaagactgacttgagccagagccatgctgaccgtggctggaagactgacctgagctagctccatgttggcca

SEQ ID NO: 8819 - DNA, 120 bp, synthetic construct
  source 1..120: mol_type = other DNA
gctagatccgtgtcgttcacccctagatgactgtcctgatctagagccgtgttgtccgtagccagaggagtgacctgagccagacccatgctgactgtaactagaggactgccctgagct

SEQ ID NO: 8820 - DNA, 120 bp, synthetic construct
  source 1..120: mol_type = other DNA
gaaccggacccatgtcggccgcgactaggagactggccagatccagagccctgttggccatagctagaagactgacttgagccagagccatgctgaccgtggctggaagactgacctgtg

SEQ ID NO: 8821 - DNA, 120 bp, synthetic construct
  source 1..120: mol_type = other DNA
tgcttctcctggaccccgctgattcaccctggccggactgtgagtgtctagagctgtcagcctgagtggaagcttcatggtgacgcgaccctgagtgcctggagccgtctcctgactgtt

SEQ ID NO: 8822 - DNA, 120 bp, synthetic construct
  source 1..120: mol_type = other DNA
tagagctgtccgcctgagtggaagcttcatggtgatgcgaccatgagtgcctggagccatctcctgattgttcgtcattacgagtttgtctgctggcacttctggatcctgactgcccac

SEQ ID NO: 8823 - DNA, 120 bp, synthetic construct
  source 1..120: mol_type = other DNA
gtggtgtggctgtgatgggaccctgagtgtccagagctatctaccgaatgctcgtggtggtacccctgccttcctcctctgcttgaccccgggtgtccacgaatggtgtcctgaccgtct

SEQ ID NO: 8824 - DNA, 120 bp, synthetic construct
  source 1..120: mol_type = other DNA
tcgttacgagtttgtctgcttgcacttctggatcctgagtgcccatgggaggcatcagaccttccctgggatgtggtgtggctgtgatgagaccctgagtgtccagatctatctaccaat

SEQ ID NO: 8825 - DNA, 120 bp, synthetic construct
  source 1..120: mol_type = other DNA
ccatgttggccatagctagactgatgtgatctagactcatgttgtccaaaaccagagtattgtcctgagccagtcccatgttgtccaaagccactggactgacctgagcctgatccatgt

SEQ ID NO: 8826 - DNA, 120 bp, synthetic construct
  source 1..120: mol_type = other DNA
attggccaaagccagtggattgacctgagcccaacccatgttgtccaaagccagatgtctctctagacccatattggccatagccagatgattgacttgagccagaaccatgttggccat

SEQ ID NO: 8827 - DNA, 120 bp, synthetic construct
  source 1..120: mol_type = other DNA
ccagtttgtacactatgaactggatttaggtgaatccccagataaaaaagggttgagtctaagagcatgtcacccatcattcaggatagccacagccctgggtcttctataaagtcacaa

SEQ ID NO: 8828 - DNA, 120 bp, synthetic construct
  source 1..120: mol_type = other DNA
aaaacacaaagggatcagcagctaaacaaacagctggaagaagagaagaagctcttagaccagcaactggatcaagagctagtcaagagagatgagcaactgggaatgaagaaagagcaa

SEQ ID NO: 8829 - DNA, 120 bp, synthetic construct
  source 1..120: mol_type = other DNA
acagccttttctgttcttcagctaggagacaccaaaccctcaggaagatttactatagctaagagaaaactgcagcagaaagggcgcggctacctacttcttaaattccgtttgtggacc

SEQ ID NO: 8830 - DNA, 120 bp, synthetic construct
  source 1..120: mol_type = other DNA
gaaaggactgaaaatgaagcataagtcagggaggacttccaaaattcttccctgcacatatatataaccttttcctactgtagggccttcaagagagtgagcctgaagatttcttgaagc

SEQ ID NO: 8831 - DNA, 120 bp, synthetic construct
  source 1..120: mol_type = other DNA
agcttccgtattaccaacaaacacaaggacagtgtatactcccgttgtctgtgccatgaccatagcaggtcaggtttcaagttctatatgagtaaggttaggacagtaactatcattcat

SEQ ID NO: 8832 - DNA, 120 bp, synthetic construct
  source 1..120: mol_type = other DNA
ttgtcgtgtgagtcatcttttccttcttacatctagtgtcccagttactgctctctcgaggctaagagtaaagcctaggaataactcgcatgacagcaagagccacctccacttaggagt

SEQ ID NO: 8833 - DNA, 120 bp, synthetic construct
  source 1..120: mol_type = other DNA
tgggctgcaccttccatgttgagtgccttattctcaacttttcagggattccccaaacctctccatcagaatgaatgttttcatcctttgcttttccactatacttttaaaaactcctcc

SEQ ID NO: 8834 - DNA, 120 bp, synthetic construct
  source 1..120: mol_type = other DNA
tggctgaaccgctctggcatactcactggtggatagcttggaggaacttcctctggtgtttcctcactttggcatggtcaatcttctttagcagctttgtgtgtttatagattaaccatg

SEQ ID NO: 8835 - DNA, 120 bp, synthetic construct
  source 1..120: mol_type = other DNA
cccttctaagtcacttttgtctgttgcctggcctgctgcagtagcctttttagtcctcctagtagttttcttgccacctccaatttactcacaaagatgccaaagtaatatttttagaag

SEQ ID NO: 8836 - DNA, 120 bp, synthetic construct
  source 1..120: mol_type = other DNA
tgcccaggtaacacctgtagccatttttatcaggagatgtttacgaagcagcagcaggtttattctgagtcctctctcctgagggaaaggaccactgatttcctccacctatatttttac

SEQ ID NO: 8837 - DNA, 120 bp, synthetic construct
  source 1..120: mol_type = other DNA
ttcttcttgtgacttaggaaatcaatgcatgaacatttcattttggttttgttttttaatgggagtgggggatagagtggtgctggacttgcacagagcaagggcagtctggcctatcag

SEQ ID NO: 8838 - DNA, 120 bp, synthetic construct
  source 1..120: mol_type = other DNA
tagcctgatcatagcccctgcctcattctccatcgaaaacattcttggatgtgttctaaataagcaaaggaaagtatatttattgataagacaccagacacccagctgccaggcaaaact

SEQ ID NO: 8839 - DNA, 120 bp, synthetic construct
  source 1..120: mol_type = other DNA
tagcctgaggtagaggttatatagggacaacttcatctcatccaaacaaatgaactgcttcctacagtcggggtgctgcctttaacatagtcccaatatttgaatggcacacatggataa

SEQ ID NO: 8840 - DNA, 120 bp, synthetic construct
  source 1..120: mol_type = other DNA
tgagctacctgaaggctctgtgtaaatgagaacgtgcatagtaatgaagggaggggcacaaaagatgaggtacaagagaagtccatcaaggaaggaccacagtggattgtcatatgcaag

SEQ ID NO: 8841 - DNA, 120 bp, synthetic construct
  source 1..120: mol_type = other DNA
ttgaccctgttttgtctgcctggaatgccctctgcacccactacctaccttttccttctatccaactcctatgaatccctctaggtttggctcaaatgccccttcctctgggaagtcttc

SEQ ID NO: 8842 - DNA, 120 bp, synthetic construct
  source 1..120: mol_type = other DNA
aagtattctaaattatttcctaacacaggggcattcagagaaagagattcttacccccattccacaggggagaaactgaggcttagggagatttaaggatcatgctgaagaggttatctg

SEQ ID NO: 8843 - DNA, 120 bp, synthetic construct
  source 1..120: mol_type = other DNA
acaccaagaactacgtggaagtgacccggaagtggtatgcagaggctatgccctttcccctcaacttcttcctgcctggccgcatgcagcggcagtacatggaacggctacagctgctga

SEQ ID NO: 8844 - DNA, 120 bp, synthetic construct
  source 1..120: mol_type = other DNA
agagtgggcagggatccaagaactagttctcctaacacaccttccttccttgaccctcagctgaggtaccaccgcaacgccagacaccagcaggcccagagactgaggaggagccatacc

SEQ ID NO: 8845 - DNA, 120 bp, synthetic construct
  source 1..120: mol_type = other DNA
tatctgctccatcactggcgacgccacaggtaggtgtgaatggagtagccaggtgagattgtctccaggaagcccacagcaggatccttgatggtaagaggcacatccttagaggagcta

SEQ ID NO: 8846 - DNA, 120 bp, synthetic construct
  source 1..120: mol_type = other DNA
ggatgctggatttgaaggtcactggagcaccatggaggtccaggccttaccacctttgcccagtggggcagcagcaagcgttggtcatccagcatgagtaggcggacattgtggtgagta

SEQ ID NO: 8847 - DNA, 120 bp, synthetic construct
  source 1..120: mol_type = other DNA
ggcagtacatggaacggctacagctgctgactggggagcacaggcctgaggacgaggaagagctggagaaggaggtagctctgagaccgggggctattgtatgagatgagccccaaggat

SEQ ID NO: 8848 - DNA, 120 bp, synthetic construct
  source 1..120: mol_type = other DNA
tgggcatggctgaggaggatgaagaggaatgatttgtcctcacgctcccaagactggtttttctactctcatgcattccagaggcccccgtgcctcctcgttgttggtacagccggacac

SEQ ID NO: 8849 - DNA, 120 bp, synthetic construct
  source 1..120: mol_type = other DNA
gtcgttcttctgactggcaaccagccccactctctgggagccctcaggaatgaacttgctgaatgtgggaacagatggtcagagtccctcggggtacctcccatgaaaccctcatctaag

SEQ ID NO: 8850 - DNA, 120 bp, synthetic construct
  source 1..120: mol_type = other DNA
ccgattcctacagaaaaggatgatcaagatatggtagtccgagtcaataggagagtatgggactctgcttatcacttgccagtcctaatagtgtctgagtcagggccaaagggaacttgg

SEQ ID NO: 8851 - DNA, 120 bp, synthetic construct
  source 1..120: mol_type = other DNA
tctggaacttctgttctggctgcagggtcagtagcaggcctgaggacatccacagggaataagggtatcagtacccagcgggaaactccatggtgatcactgacaccatttacctctagg

SEQ ID NO: 8852 - DNA, 120 bp, synthetic construct
  source 1..120: mol_type = other DNA
cttcccaatcttaggaggaaacattcaacatttcaccattaagaatgatattaggccaggtgtggtggcttaccagtatccaaaataaaaaaagttgatctcactataggtcctagactc

SEQ ID NO: 8853 - DNA, 120 bp, synthetic construct
  source 1..120: mol_type = other DNA
acaactcccctcacgttgtacccaggctatttacagagacaccttgattatcctcacgccaaggcatggaccatttattgaacaggcagtcaacaaatatttgttgaatgaatgaaaaag

SEQ ID NO: 8854 - DNA, 120 bp, synthetic construct
  source 1..120: mol_type = other DNA
ctaccattgccgctctttcccaacaagtaactaggggctcccaatccctaaaatacacacacatatcaacctgcaaggaacctcccaacatttattcaagaaataagctaacttataagg

SEQ ID NO: 8855 - DNA, 120 bp, synthetic construct
  source 1..120: mol_type = other DNA
gagaagggaaaggtggaaggctaaagggggcaaactgaggggaggcgggtcccgcaaccgagactgggatcgtctcccctccgcaaagcgaacccaaaatggcggcgggagcggcggcgg

SEQ ID NO: 8856 - DNA, 120 bp, synthetic construct
  source 1..120: mol_type = other DNA
gatacacagagatagataaatacgtgtaaatgatagagatatgatagctaagccagtccacaggttattagtcgtggtccacgtgacttctgaagagatgaaggggcatgggaggcttta

SEQ ID NO: 8857 - DNA, 120 bp, synthetic construct
  source 1..120: mol_type = other DNA
aaccgaaagatggaatctagattctcctaagccaaggtttttcccccaactagtgtatatcccagaaagcttggaagagccaagtgctggagagatggtgacagcaggttgtcaggtgat

SEQ ID NO: 8858 - DNA, 120 bp, synthetic construct
  source 1..120: mol_type = other DNA
ttgggtagagcagaaacatggagaaaggtacatttcctctgcttgtcttcaggttcctcaccactccccaccgctacaactccaaaaccacttatccctacagaggccagcatcagggtc

SEQ ID NO: 8859 - DNA, 120 bp, synthetic construct
  source 1..120: mol_type = other DNA
cttgggtgggagcctgggcctgcgacccgagccacctgtcagcttcccttacctgcattatgatgtaagtctcggtgctcttgttctgactgcggcaggctacagggcctcctcatgctc

SEQ ID NO: 8860 - DNA, 120 bp, synthetic construct
  source 1..120: mol_type = other DNA
aaatcttggctcagtatttacaacagcagcagcctggagtcatgaggtcagtgtaacggttgctcctgcccttcttgccaaccgcaaccctcccttgacttcttacgcacttaatggctg

SEQ ID NO: 8861 - DNA, 120 bp, synthetic construct
  source 1..120: mol_type = other DNA
aggacatctgtaaagtcttcataaaagaccttgaatgatgcctaggatggcagagcccctgggtcctactccatcctccagcctttgtccttgtcctggcctcctgctctccagatctgt

SEQ ID NO: 8862 - DNA, 120 bp, synthetic construct
  source 1..120: mol_type = other DNA
accgtcaaaacaactcccctcagattgcatccaggctatttacagagacaccttgatgatcctcacctcaaggcatggaccattcattgaatggttatatttgttgaatgagtgaaaaag

SEQ ID NO: 8863 - DNA, 120 bp, synthetic construct
  source 1..120: mol_type = other DNA
accattgccgctctttcccaacaagtaactaggggctcccaatccctaaaatacacacacatatcaacctgcaaggaacctcccaacatttattcaagaaataagctaacttataagggg

SEQ ID NO: 8864 - DNA, 120 bp, synthetic construct
  source 1..120: mol_type = other DNA
ggagggctaaaggggcaaactgagaggaggcggatcccgcaaccgacactgggatcgtttcccctcgcaaagcgaacccaaaatggcggcggcagcggcggcagcagagtggccgcggca

SEQ ID NO: 8865 - DNA, 120 bp, synthetic construct
  source 1..120: mol_type = other DNA
gggaagaaatcttggctcagtatttacaacagcagcagcctggagtcatgaggtcagtgtaacggttgctcctgcccttcttgccaaccgcaaccctcccttgacttcttacgcacttaa

SEQ ID NO: 8866 - DNA, 120 bp, synthetic construct
  source 1..120: mol_type = other DNA
aggagcccagtgtcttcatgcagaggagctcaatgtcgcgggactagctacaccaacatatgcactttttacatttagaaacactgtgattagaccacagaacaataaatatgtgccatc

SEQ ID NO: 8867 - DNA, 120 bp, synthetic construct
  source 1..120: mol_type = other DNA
tctttgaggaaacaggactcaggaaggaagcagggggttccacggtaccaggcaatttctcagtttctgatgcatcccagaccagcatcaaagcctctgactcactcactgccttttggc

SEQ ID NO: 8868 - DNA, 120 bp, synthetic construct
  source 1..120: mol_type = other DNA
gtcaactgggaaacacacagagactctgcctggtaacaaagaatactaaaactttctcttcctccttagctgcctataggggaagggtactaatactggatttgattcctaatgattcca

SEQ ID NO: 8869 - DNA, 120 bp, synthetic construct
  source 1..120: mol_type = other DNA
tcgcttaaggccaggagttcaagaacagcaacatactgagactatgtctctacaaaaaaatttaaaaattaggcaggggccgtggtgtacacctgtagcttgagctacttgggaggctga

SEQ ID NO: 8870 - DNA, 120 bp, synthetic construct
  source 1..120: mol_type = other DNA
ccctccatgtctgtttccatggagaagaaccatgactaacactgaacatttctagtccttgcctcttactaaacttcaatctcagatttctatttttgcttgctggccctattgtcacct

SEQ ID NO: 8871 - DNA, 120 bp, synthetic construct
  source 1..120: mol_type = other DNA
aggtttcttaacctagggcctacagaccccctgggatgtcaggcttcagtggctctgtaaaccttctgaaggtgtgtaaatagttttacatattaacataactcgtgtatttttttgggt

SEQ ID NO: 8872 - DNA, 120 bp, synthetic construct
  source 1..120: mol_type = other DNA
atagtagaaagaagagccagtccccccaccaccaaaaacaaaaacaaaaacagagcatgaacacccagatgtctgacgtcccagctccccacaataatggaaaagggatcccagtagcta

SEQ ID NO: 8873 - DNA, 120 bp, synthetic construct
  source 1..120: mol_type = other DNA
ggatagggatagagactttgaactgctcttgctgaagaggctccacgcctggatcccttgcccccactatttaaaattctcttctgagctgggctccctcactcagtccctgtatttgat

SEQ ID NO: 8874 - DNA, 120 bp, synthetic construct
  source 1..120: mol_type = other DNA
ctttttagatgtagagactgtgctactttatggcaccagtctattagatgtaaaatctgcagatggagtgagggatcctatctcctctcttaggaaggccagagatttcagagaccatta

SEQ ID NO: 8875 - DNA, 120 bp, synthetic construct
  source 1..120: mol_type = other DNA
atgtacatgttattcattagtatgtgctccagtgtttgaattcaatatattttgtttcaattccaaagtgtcaatcatgtatattgaaagaaaaataatcaaaaaatacagtcacgtacc

SEQ ID NO: 8876 - DNA, 120 bp, synthetic construct
  source 1..120: mol_type = other DNA
gagatatagatatttctagatacacttttacatttctgtctctccaaacaaataaataatcagcaagagaaggtgcattacttccttcctgtccaaggtagggagggctgggagggggtc

SEQ ID NO: 8877 - DNA, 120 bp, synthetic construct
  source 1..120: mol_type = other DNA
gttggaacatggtggtcaaggagagctttgagctagtgatacagcctctgtggtgtcactttggctaaattaaccttctctatttattaggccacagaacatacctttattctgaaccat

SEQ ID NO: 8878 - DNA, 120 bp, synthetic construct
  source 1..120: mol_type = other DNA
atcatctctttctaaatgcagcttccaattcctgtcctctaaaaagctgccagtgattagcttctcaggctgacatcaccttagactgcctctccttaattcttctactcatgattagaa

SEQ ID NO: 8879 - DNA, 120 bp, synthetic construct
  source 1..120: mol_type = other DNA
tgggaagagcacgtgtgcttcattcgagtgtatctggatatgttccaaggtcaaatcagttatattccggggggggggggggaaatgagtttactgtatgaaacataattgttaaaataa

SEQ ID NO: 8880 - DNA, 120 bp, synthetic construct
  source 1..120: mol_type = other DNA
tgaatatatatacatatatatatatggctgattaatcaggatccatcaaatacatgctaatctcctcaaaccatgacccaacttcctaagggatctcccagaactgactactcacttttt

SEQ ID NO: 8881 - DNA, 120 bp, synthetic construct
  source 1..120: mol_type = other DNA
ccaaactgtccactgacaggagctgcaaaaaaataagagccagagatgagcacagaaccatgattattttgttttaagaagataattcccttttttacccatgcatgtattacttgtccc

SEQ ID NO: 8882 - DNA, 120 bp, synthetic construct
  source 1..120: mol_type = other DNA
tcactaggactgtgactgtgacagagggggagagaatggattaaaaagtatctgtgggttacacagaatttcagggaaatcaatattctggaagtcctccagtccagcatgattcaagta

SEQ ID NO: 8883 - DNA, 120 bp, synthetic construct
  source 1..120: mol_type = other DNA
ggagcctagcaatggatatgtcccttgtcccttgattgtttctgtttccccactgatcacatttttcttatctaacaatcagaagcatttccccaaaacagtgagaggtaatcttgggta

SEQ ID NO: 8884 - DNA, 120 bp, synthetic construct
  source 1..120: mol_type = other DNA
gtcatattatgacatcaccttcacgagtttcaagctcagttgctgaaaactgaaccctttttgctatttaacctggcctgctactgcagagaaatttcttctccaaccaaggcaacttca

SEQ ID NO: 8885 - DNA, 120 bp, synthetic construct
  source 1..120: mol_type = other DNA
ttgcattacagattacattgcaaattgcattgcatatgcagttccttgggtattgacaccttaacagtatcaagtcttctaacccctggacacagatgccttcccatgtacatttgtgcc

SEQ ID NO: 8886 - DNA, 120 bp, synthetic construct
  source 1..120: mol_type = other DNA
agagaaatattttcagtcttttaccattaagagtgttaattgattgttgcatggtgagccatcattgcattccagggataaaccttaaatggtcatgatgcataaataaatttaacgtgc

SEQ ID NO: 8887 - DNA, 120 bp, synthetic construct
  source 1..120: mol_type = other DNA
aaatgctgcaattccacactagagagcagataggaggatggcaaaatgacaattttatagatgcataggacacagagaacaagttctaagccccagggagaaaaagtgctaacgagagct

SEQ ID NO: 8888 - DNA, 120 bp, synthetic construct
  source 1..120: mol_type = other DNA
cccataaggaaaacatatggatggggagtgcaaattaggcactgatcagtgtgattacaagtgaaggctatagtgtaattgtgactggaattatgatatgtcccatgccaggtgtcagag

SEQ ID NO: 8889 - DNA, 120 bp, synthetic construct
  source 1..120: mol_type = other DNA
ctagcatgccttcttttaagaaccatggattatgggtaacaacagtttgcattagttcccttaattgagcctgtgaaactgaggctccgctagccttaagcggctgtttcaatactttta

SEQ ID NO: 8890 - DNA, 120 bp, synthetic construct
  source 1..120: mol_type = other DNA
cttattccagattaccttttcctctgacatgatggggtacttacctgcactcagggttcagaagcctgtatttatggtgaaagggcaggaaacttggaggaaaagcaaaagaattaaatc

SEQ ID NO: 8891 - DNA, 120 bp, synthetic construct
  source 1..120: mol_type = other DNA
ttccctactcagcaataaatgtagattatagataccctttcctaggggaagacaacacaggggtgggaaagtgagtttacacttgtgtgttgtcaacacttacccagcttgccttttgtt

SEQ ID NO: 8892 - DNA, 120 bp, synthetic construct
  source 1..120: mol_type = other DNA
ttaaaagattatatctcaagacaatcttgtcaataaaattacattgctacacatggcagatctgaagagaggggcttctctcctattatgcttcctatattacctccatacaaggtttcc

SEQ ID NO: 8893 - DNA, 120 bp, synthetic construct
  source 1..120: mol_type = other DNA
gggtttcttgtatgctgaagagcacttgagagagactggtttgtgtatctaattgatgagaaaggcctagttaataaatgtccataaatgtagccaactttattgcaagccatgctgccc

SEQ ID NO: 8894 - DNA, 120 bp, synthetic construct
  source 1..120: mol_type = other DNA
attttattttccttttggcttacctttttgtttttccctcaatacaccacgaaaataatactttaaggtagaacaaggtgggaaaaaacagagccaaccataacactatcactgattctt

SEQ ID NO: 8895 - DNA, 120 bp, synthetic construct
  source 1..120: mol_type = other DNA
gtaggttatagataccctttcctaggagaagataacacagaggtgggaaagtgaatttacacttgtgtgttatcaacccttatcccagcttgccttttgttctgccctgatacctctgta

SEQ ID NO: 8896 - DNA, 120 bp, synthetic construct
  source 1..120: mol_type = other DNA
accttaaagtagaacaaggtgggaaaaaacagagccacccataacactatcactgatttttcccctttcatttattataactcaaacaatatgtttaaaaatttaggaaaggaaggtaca

SEQ ID NO: 8897 - DNA, 120 bp, synthetic construct
  source 1..120: mol_type = other DNA
ctgtaatatttcttcattaagtacataatttgtgcctcatttcagggtcccctgatgagagttccccagtgcattttgattctgccacccatctgcagaggtgaaggcttagggaggtta

SEQ ID NO: 8898 - DNA, 120 bp, synthetic construct
  source 1..120: mol_type = other DNA
aagcttccctgcccatccagcctagagagaagctttgaactgtaaatattaattaaaatctgtgatcaacaatagccagagacatgtctatagacctctcctttctagctatccaacgca

SEQ ID NO: 8899 - DNA, 120 bp, synthetic construct
  source 1..120: mol_type = other DNA
agggagcatcatttacaagcaactccagaggcattattttcacataatttttgtgaatggtggccgctggaattaattctgcaagatactagctctgataagtcctagaagagttcctag

SEQ ID NO: 8900 - DNA, 120 bp, synthetic construct
  source 1..120: mol_type = other DNA
taaagcaatataaaaaaaaatctttaagatcaataactatgagaggctaatttttaggtattaaagccaggttggacggcccccataggtttaattacagcattaatggcccttaaatcg

SEQ ID NO: 8901 - DNA, 120 bp, synthetic construct
  source 1..120: mol_type = other DNA
gtgatctccccatagcaaaactcaatggtcaatccagttctcatcttacttggcttacctgcagaattagacatagtcattctctactccctgaaatattttcttcacgtggcttccaca

SEQ ID NO: 8902 - DNA, 120 bp, synthetic construct
  source 1..120: mol_type = other DNA
aaacattaatctagatgtgtggtcctgaggaaaagttgtatctattcattctggaagcttttgtataccgtatggggcctgtggcattctagagaacattcctcctaccatcaccacaca

SEQ ID NO: 8903 - DNA, 120 bp, synthetic construct
  source 1..120: mol_type = other DNA
cacctacacagtgttattgaaagaagagaggtgggggtggaggggaattagtctgtcccagctagagggagataaagagggctagttagttcttggagcagctgcttttgaggagaaaat

SEQ ID NO: 8904 - DNA, 120 bp, synthetic construct
  source 1..120: mol_type = other DNA
ctttcctccattttaaaccagctgttctctactttgtccttggaatgagggacaagtgatcatgacagaacactttgtcattgggactgggaaaggtttggcaagggcattaaatttaac

SEQ ID NO: 8905 - DNA, 120 bp, synthetic construct
  source 1..120: mol_type = other DNA
tttctgtggagctttggcagagctggcagaggatggggttaggggctgtaagactgaggccaatcggacgtgggaggcaggagtctaaggggaaaggaggaggaggcctggaaacccctc

SEQ ID NO: 8906 - DNA, 120 bp, synthetic construct
  source 1..120: mol_type = other DNA
cttttcacactggccaagtcagtttatgacaaaaacatgaggcaattaggtgtgttttggacactaaccagagaaagtccttccttccctcccttcctccctccctccttccctccctct

SEQ ID NO: 8907 - DNA, 120 bp, synthetic construct
  source 1..120: mol_type = other DNA
aagccacccaggccttagaaatagccttatcattgcttaaactgcaaacataagtgaaactcaagttggattgtaactaaaaataggtaatacttaacttggatcatttctggtaaatgt

SEQ ID NO: 8908 - DNA, 120 bp, synthetic construct
  source 1..120: mol_type = other DNA
aggtaaatttcagaagggcaagatattatggctttgtcagaatgtacagagtctgggactcctccatctgaaacacagtgatttctatgttcagataatatgggcccagaacctgtgact

SEQ ID NO: 8909 - DNA, 120 bp, synthetic construct
  source 1..120: mol_type = other DNA
acagctaactttaactagaggctagatccaactaattagttttatattattatacctggcacatggctaaaatttcagaacaaaagccatgaatttctgtttgcatctttctgtatgttt

SEQ ID NO: 8910 - DNA, 120 bp, synthetic construct
  source 1..120: mol_type = other DNA
gattatattttagtagaaaactattgtgcatccattgtcaaattctaggcctgttcattttctttgaagttttattatctccctataaaccagattgactcctgaatttttgttttttag

SEQ ID NO: 8911 - DNA, 120 bp, synthetic construct
  source 1..120: mol_type = other DNA
ggtgattccactttgatttttagtctgttctgtttgggcctagtgcaggagcttagtgcaaaacaatagcctcctaaaatttaaaagactttaaagaacatacatgagtttttcatcaga

SEQ ID NO: 8912 - DNA, 120 bp, synthetic construct
  source 1..120: mol_type = other DNA
ttataaccaaaacattctgtttaccttttcagggctgtattgattggggtgtagactgaactatccggggtctgtttcttttcggtgatgaaagtcttgagaaggtagtaatggataaga

SEQ ID NO: 8913 - DNA, 120 bp, synthetic construct
  source 1..120: mol_type = other DNA
tttgggtggagacagagccaaaccatatcaccctagacagaggctcctcaaatatgtaaagccttgttaaatcctgcttttacattaaaatgcacccaacaatctgactgcttctcagta

SEQ ID NO: 8914 - DNA, 120 bp, synthetic construct
  source 1..120: mol_type = other DNA
ttaaactggaaagtccttagaaacaatgtagtccaatctcttcattttaaaacggaggaagctgtggcccagacaggtgaaatgacttgttcaaggacaaacaggtagtggatgtcactg

SEQ ID NO: 8915 - DNA, 120 bp, synthetic construct
  source 1..120: mol_type = other DNA
ggaaggtgcggaaaggttcgcgaaagttcgcggcggcgggggtcgggtgaggcgcaaaaggataaaaagccggtggaagcggagctgagcagatccgagccgggctggctgcagagaaac

SEQ ID NO: 8916 - DNA, 120 bp, synthetic construct
  source 1..120: mol_type = other DNA
gaggagaggacttcgacaaccggctcgtgaaccacttcatggaagaattccggcggaagcatgggaaggacctgagcgggaacaagcgtgccctgcgcaggctgcgcacagcctgtgagc

SEQ ID NO: 8917 - DNA, 120 bp, synthetic construct
  source 1..120: mol_type = other DNA
atgaggcccagagggacagagtggctgccaaaaactcgctggaggcccatgtcttccatgtgaaaggttctttgcaagaggaaagccttagggacaagattcccgaagaggacaggcgca

SEQ ID NO: 8918 - DNA, 120 bp, synthetic construct
  source 1..120: mol_type = other DNA
taaggaaagacagaggtatttattggggaggagatgtggcttctgctcctgccatcatgctgcagagtgaatgacacctcctagctaccccaaaagaatggactgaaacagagctgcaaa

SEQ ID NO: 8919 - DNA, 120 bp, synthetic construct
  source 1..120: mol_type = other DNA
gtcaggaataaggtgacggtggccacggagtggctgcagaaattgtgaaggagaactcaatgtaaacaccagggaggggaagggcgggactggtattgctcagcctggcaattcgtggtt

SEQ ID NO: 8920 - DNA, 120 bp, synthetic construct
  source 1..120: mol_type = other DNA
aaagagccacaaaaatcagtttcagaggcccaattccatggagctctcttgcagatccacctccttatgcccttcttcccccaaagcttgttccacccataaacattgtatgaatggaac

SEQ ID NO: 8921 - DNA, 120 bp, synthetic construct
  source 1..120: mol_type = other DNA
ctgacaggctttgacattttgcccaagacctacttagagctaggactacaactctgataccattcagtgggaccacacatcatctcatcttagcttttatctctaagaatatcatctctg

SEQ ID NO: 8922 - DNA, 120 bp, synthetic construct
  source 1..120: mol_type = other DNA
acacaaatccctattttcaacactgctcccttaccccttgctccctgtgcaaactcacaaattaagggtacaggttgaatttccctgaaccaagctacagaaagagcctcaacccatatc

SEQ ID NO: 8923 - DNA, 120 bp, synthetic construct
  source 1..120: mol_type = other DNA
tactgccggctgccaattcttggagagtcggcctcctaaataccttgttgattaagcaccttcctctccagcctcaccgccagttacttcctcattgctccctttgggttattgcatcct

SEQ ID NO: 8924 - DNA, 120 bp, synthetic construct
  source 1..120: mol_type = other DNA
gatggctgctgggaggagggggtgtttcttaccaatccaaaccaatctctgttacaatgttggacaaagggaagaagaaagaattttatcattcatattttattaccatggttttgccat

SEQ ID NO: 8925 - DNA, 120 bp, synthetic construct
  source 1..120: mol_type = other DNA
atggttgggacagaaaaagtgtttgtgtagctctgaaacttcaatttctaggaatgcagctactcactggggcttccctgcttgaagatcatgggcttttcccttccactggagaccaag

SEQ ID NO: 8926 - DNA, 120 bp, synthetic construct
  source 1..120: mol_type = other DNA
tctcgtatatcctttacccagatccactcattgtttacatgttaccccatttgctttatttgctctctttccctaaccacttgggagtatttactttcagtttaaagtgtcatgaaatta

SEQ ID NO: 8927 - DNA, 120 bp, synthetic construct
  source 1..120: mol_type = other DNA
cagagtggcaattcgtggtttctaaggtgtcacagggcctcggtgagaccaactttattactgagcatggccttcaagagaggaaattcttatatcgccagagcttattctcacaatcat

SEQ ID NO: 8928 - DNA, 120 bp, synthetic construct
  source 1..120: mol_type = other DNA
ttcctaatgatgataagcattgactaatttccaattttacccagtgttgccagctggggcacagaaacaataccccaatatatggcactttggcctgctgagtgctttgaactaagggag

SEQ ID NO: 8929 - DNA, 120 bp, synthetic construct
  source 1..120: mol_type = other DNA
tctcagtcaaatgtctagtagtggtatttggatcctgagacaattcagggaagtagcatgtgcactgtgtaggacttcctgatcatttttaaatcgtggcacagagaaaaccacacaagt

SEQ ID NO: 8930 - DNA, 120 bp, synthetic construct
  source 1..120: mol_type = other DNA
cctctgcactcccgcctgggcgacagagtgagactctggcaagaaagaaagtaaagtaaagtaaaaagaaagagagactctggcaagtaagaaagaaagaaaaagaaagagaaagaaaga

SEQ ID NO: 8931 - DNA, 120 bp, synthetic construct
  source 1..120: mol_type = other DNA
gtcgaaggtttctgaagaccacagagtgtgataacaaggttttacagtgtcatttccttaagtattaaagtattacagcctgcttcctgagaaggcatttgggaaagagtccccagaaag

SEQ ID NO: 8932 - DNA, 120 bp, synthetic construct
  source 1..120: mol_type = other DNA
ctgggattatgacaatagagaaaattaaatgatggtaggtggcctggagtccccatgctcaatttcaagaagcatccagattccagggcctgggtctccaaatggaagtagaagtactag

SEQ ID NO: 8933 - DNA, 120 bp, synthetic construct
  source 1..120: mol_type = other DNA
ctttcacccaatcttactgaacacccagactcttgatgttctgttgctttccacatcagaacccgctctgagaaaagtctagtaacctatacttgaatgataaatgaatggccagagtgt

SEQ ID NO: 8934 - DNA, 120 bp, synthetic construct
  source 1..120: mol_type = other DNA
ttcaggcctagagaggtgatgtgcttctctaccacctgggcaagactcctgggaaagatctttggtattttttcccatttgccttttactaagtcatcaaagatttaccccattttttcc

SEQ ID NO: 8935 - DNA, 120 bp, synthetic construct
  source 1..120: mol_type = other DNA
catttgtatttgcgtaagcgcagccacccttttcctagttatccaacttaaatcacccccacagtctattaaatgccaacttctctctgccacttaaatttcttctgcatctgtttcctc

SEQ ID NO: 8936 - DNA, 120 bp, synthetic construct
  source 1..120: mol_type = other DNA
ggtggataacgaagatacatattgacatggggaagacggagagaaacagaatgtgtccacttgctatgacaacatgaagccattggtgattttgacaagaaaagttttagtggactgctg

SEQ ID NO: 8937 - DNA, 120 bp, synthetic construct
  source 1..120: mol_type = other DNA
ttgttttctctgtgaaatatgaggaaaggcatcagctaaaaatgagagaggactggaggcagagggtgggatgagaaagcttggggaatgaggaaaagatgagtgtcactactcagagta

SEQ ID NO: 8938 - DNA, 120 bp, synthetic construct
  source 1..120: mol_type = other DNA
atttacaagcaaggaaactgaagcagagaaaagttaagtaatttgtgaaaggtcacttagcagtagcggagtcagcatttaaactcagtatgtgctttcccccactgccacaccacctgg

SEQ ID NO: 8939 - DNA, 120 bp, synthetic construct
  source 1..120: mol_type = other DNA
aagcaaaagagttgttaaataaatcacaggacagccaaatagtaggatatagtgtagccatttaaaatgacaacatgggcggggaacggtggctcacacctgtaatcccagaattttggg

SEQ ID NO: 8940 - DNA, 120 bp, synthetic construct
  source 1..120: mol_type = other DNA
ctgggccaaagtgggcaggtgtcagttcagacactccactgtgggctgatctttgctttctgtcttacagctcctgttgctgggacacctggtaagtactccacccacagcctttccttc

SEQ ID NO: 8941 - DNA, 120 bp, synthetic construct
  source 1..120: mol_type = other DNA
gtgtctaaatgcctttgtttatcggggagaaaagttagtctcgaaagagtatgtatgtatggggtgtctgtgtgtctgtgctggtggggagaggttggtggggagagagagaaagaactg

SEQ ID NO: 8942 - DNA, 120 bp, synthetic construct
  source 1..120: mol_type = other DNA
aattgaaaagcacagaccacaactgaatcctagccctggaaatgactcactatacaacatgatgaattcatttaacccttgagtttccatttcttcacctgctccgtggggcactaacgc

SEQ ID NO: 8943 - DNA, 120 bp, synthetic construct
  source 1..120: mol_type = other DNA
gccaagacctcccgggtcctctgcggttttttgtgtctttcagagtggctggtgctccagacccctcacctggagttccaggagggagaaaccatcgtgctgaggtgccacagctggaag

SEQ ID NO: 8944 - DNA, 120 bp, synthetic construct
  source 1..120: mol_type = other DNA
ggcataagtccagccacagaaaccctgtgcagatgaggctggggatgtagtgagtgctgcagaagtgagtgactcagacacagaagagcttcgggtgacaagcactaggacatagcattg

SEQ ID NO: 8945 - DNA, 120 bp, synthetic construct
  source 1..120: mol_type = other DNA
acagggctgttgccattctggaggaggtggtgtgtgagggcagcgcttagctagggaaggaggaccctccaggcactgggccaaggcagggattgaagccgggtggggctcatatgggtg

SEQ ID NO: 8946 - DNA, 120 bp, synthetic construct
  source 1..120: mol_type = other DNA
tcagttgaagatgaaacaatgttgctgggatgggaaggtggtgagcacaggatagaggcaactggattggcaaaatgttgataatgatggaagctgggtgtttatttttctatccttttg

SEQ ID NO: 8947 - DNA, 120 bp, synthetic construct
  source 1..120: mol_type = other DNA
acatgtctgcttctttccctcaaaagtcattaaacacaccaggaaaccataccaccatgaataagagttagaaaaaataaactacagaatcacactctgaaagactatagatatttgaat

SEQ ID NO: 8948 - DNA, 120 bp, synthetic construct
  source 1..120: mol_type = other DNA
ctttttcttttggtttctttgggtgggaagaagcactcgtgtagaagcattttattgttctgcggagaggaagattcatgtctcctgtgggccaagtgacagataacatattatcttgag

SEQ ID NO: 8949 - DNA, 120 bp, synthetic construct
  source 1..120: mol_type = other DNA
actgctttgctctcattgaataaattaaattctacatgtcggttcccctccggtgaggggtgcctgtattctttgttgagcttacagtgtgctttttaggaagagtttttgccctaagtt

SEQ ID NO: 8950 - DNA, 120 bp, synthetic construct
  source 1..120: mol_type = other DNA
tgaacctgtttttcatactgtgaccaagatgagcttttggaatcagaatctccagccatgttccacttcatccttccaacctaaacgtgtccattggtttctttctctcttagggtaaag

SEQ ID NO: 8951 - DNA, 120 bp, synthetic construct
  source 1..120: mol_type = other DNA
gggtgcaaaaagtcccttgtgcttagtgagtctcagttaatacctacaatggatgatgagtctccagcaagggattaatgacttataaatcattggaggcatggtggctccaagttatat

SEQ ID NO: 8952 - DNA, 120 bp, synthetic construct
  source 1..120: mol_type = other DNA
taatacataactgttactaaaaataaagtagtgaagagttttataaaggaaagtgtccgttttctttcttcaacacctattcctcctagtactgctccatatgcaaatatattgacactc

SEQ ID NO: 8953 - DNA, 120 bp, synthetic construct
  source 1..120: mol_type = other DNA
ccgcactccagcttgggctacagagctaggctgcctcaaaaaaaaaaaagtcaggaaggagacaataaatgtgaaaaaatgaagtatgggcaagaaaaagagcagataaaaaaaatattg

SEQ ID NO: 8954 - DNA, 120 bp, synthetic construct
  source 1..120: mol_type = other DNA
cagagagaagacctttgctttgcattgtagctgcaccagtcactgcctgtgtgatcttgggcaagttccataacctctctgtgctttagtttactcttctgaaaaacagaaatagtagta

SEQ ID NO: 8955 - DNA, 120 bp, synthetic construct
  source 1..120: mol_type = other DNA
tgacttcctttttccccctccctcttcttattcatcaaacatttgttgattgcctatataagccaagcactgtaataggtgctggtcatgacgacacaacagattatcactacaccagag

SEQ ID NO: 8956 - DNA, 120 bp, synthetic construct
  source 1..120: mol_type = other DNA
gatggggaaagtggggtaaggacaaggtccaagacagccaggggatgtctgattccatgtcttcactattgtgaatagtgtgaacagaagagtttcatgatatgactttcatttctttta

SEQ ID NO: 8957 - DNA, 120 bp, synthetic construct
  source 1..120: mol_type = other DNA
cccacaagaaagccatgatgtgggtctaaaccatatgttttgagtaaaggagaatagaagaaggggagtgtccgcaaaatggaaagagatgaagatgttccaaggaagtatgctgaaaca

SEQ ID NO: 8958 - DNA, 120 bp, synthetic construct
  source 1..120: mol_type = other DNA
aaaactatgaaaaccagaatttagactcagtcattatactagagattagaatgaaacgaccccaaacaacccatttcttacctggtctctgagaataagtttatacttttagttttctga

SEQ ID NO: 8959 - DNA, 120 bp, synthetic construct
  source 1..120: mol_type = other DNA
aggatttggtttatggctaagtaaaggctgaggtgaatttgtgccctatgcagatgatggcatggcccatgcttagtgcttggcccacagccaatccaaggcactttccctttccatctg

SEQ ID NO: 8960 - DNA, 120 bp, synthetic construct
  source 1..120: mol_type = other DNA
agaagagcctggaatggctccgggctttgcgtcacgcagctccgcccctcggcctatctcacccgacgccgtctccgagggcagggaacggttggcggactgagattggagggatcagct

SEQ ID NO: 8961 - DNA, 120 bp, synthetic construct
  source 1..120: mol_type = other DNA
accagctcataataattccagggttgctcgtttagtctctcagcctcttctgttgcttgttttacctgtcatttgcacttctgtgaaaaatgtgtggaggatgaagccaatcaaaccatt

SEQ ID NO: 8962 - DNA, 120 bp, synthetic construct
  source 1..120: mol_type = other DNA
caaaatgagaaaaacacaaactaggctgtgtctcaagcaagtgactattggagtgtaggattcctcccttcttaaataattgttgagtcttttctttctatctgggcttctcattggagg

SEQ ID NO: 8963 - DNA, 120 bp, synthetic construct
  source 1..120: mol_type = other DNA
gttttatccatattagagcaatgtatcaattattttattgatgagtggtatgtcattttactgaagccagagcttaatttgatgtctttactaaacatttcctctccgttcctagccaaa

SEQ ID NO: 8964 - DNA, 120 bp, synthetic construct
  source 1..120: mol_type = other DNA
tccattaaaagacagacacacacacacactctcacactctctctgtctctctctccccgcattgattttgacctactaaattgacctcccagcagaacactatattaatacgtttgaagt

SEQ ID NO: 8965 - DNA, 120 bp, synthetic construct
  source 1..120: mol_type = other DNA
aatattgcaggttggactcagcatgttggcccaattgtgcacctccttctgaagtttcttgagatgtttaaaaacttgtcacaactgcttcctgatactctgagaactcccttttagagg

SEQ ID NO: 8966 - DNA, 120 bp, synthetic construct
  source 1..120: mol_type = other DNA
ttaagattggttattttttatactgcaaggttcatgagaatagagactttgtcccactaatttttgcatcctgggtgcctctcacagtgggttctcttaatacatgattcttcaacataa

SEQ ID NO: 8967 - DNA, 120 bp, synthetic construct
  source 1..120: mol_type = other DNA
cttttccgcagcttcgcttttttgcaaatgcattcactttgacaccatataatggaacagaagctctggtatgttactgaagtttttataacttgtatgatgacttagcagatgtgaatt

SEQ ID NO: 8968 - DNA, 120 bp, synthetic construct
  source 1..120: mol_type = other DNA
ctgcccttaaaaatgttattttcaaaatgttcaaaagtttatttaatttttagcctttcaattttgtgaacaaagaggctgttcttgaagtttaggctctgtgttggcttgatgaaagga

SEQ ID NO: 8969 - DNA, 120 bp, synthetic construct
  source 1..120: mol_type = other DNA
aagtaagagagttgagcttaaggcttattaaaagaccccctttttctagttagtcaggagctctaatgtgccctggctacctattaaatggtggcaataaactggaagctcagtgatgac

SEQ ID NO: 8970 - DNA, 120 bp, synthetic construct
  source 1..120: mol_type = other DNA
tgtgagcccaagctgtctgatgctagagttcccaggtagaactctgcatgcattgcctactagtcttctgagggctctggtcttcactattgttagatatatgacatttggaaaaaatga

SEQ ID NO: 8971 - DNA, 120 bp, synthetic construct
  source 1..120: mol_type = other DNA
cttttcattttaaacatagcagtaccaaggcccaattcattgtgtatggaagaatattaaaggcagagggaacagcgtatgtgaattctgtggggtagtggggagtaaggtgtgttcaag

SEQ ID NO: 8972 - DNA, 120 bp, synthetic construct
  source 1..120: mol_type = other DNA
tactattaagaagctgatgccaactaaataggcagaaatttttacaaaagctgccagagtttagaaaccacccagtgtgccatagcttcaggggagcaaaactacccactctaccaagtt

SEQ ID NO: 8973 - DNA, 120 bp, synthetic construct
  source 1..120: mol_type = other DNA
ttgctataattatatataatgctggtaataatgaggctgattatcaatctttccctgcttttcactacctccatcattacagattttaggggaggggggcgggggtggaggaagatggga

SEQ ID NO: 8974 - DNA, 120 bp, synthetic construct
  source 1..120: mol_type = other DNA
ctgtgtgaccttgggcaggtcacttaacctttctggtactgcgtttcttcatctgcaaaatgggagtaatatcatagggatgctgtgaggatctaaatgagttaatactgatgaactaac

SEQ ID NO: 8975 - DNA, 120 bp, synthetic construct
  source 1..120: mol_type = other DNA
tggtgtgtggatatttattcatcagaatctcacctgacaacaagaagtagaaatgtcagagttgacaaaaataaaagatgtctactatgaaacacatttctgtccatgatctgtattcct

SEQ ID NO: 8976 - DNA, 120 bp, synthetic construct
  source 1..120: mol_type = other DNA
ataggttgagccactgtgcctggcaaaagttttaaattttgatgaagtccatcttacttatttttttcttttgttgcctgtgctttcagtattacatgtaagaaatcattgccaaatcca

SEQ ID NO: 8977 - DNA, 120 bp, synthetic construct
  source 1..120: mol_type = other DNA
aactgttttttctgctgtcctggtttacttgggattggacaatgtggagaggcatgaggtcaccagatcgtgatctcagaattaaccaagccctccagaaagcttctcagtggaatcaaa

SEQ ID NO: 8978 - DNA, 120 bp, synthetic construct
  source 1..120: mol_type = other DNA
tcatgaaagggacctgcaaagaataaagtaccttaaaaatagctttggacacaaatgatttcaggtgttggtctcactgtccccctaaggtggaaattgcacaaccttcctgagcatgaa

SEQ ID NO: 8979 - DNA, 120 bp, synthetic construct
  source 1..120: mol_type = other DNA
aggcaccctgggtttgacacctggctctgccacttattaatttgtctttagcaagtaactcagcttcattcaacctccatttcctcatctaaaatcagaaataatagtacctgcctcaca

SEQ ID NO: 8980 - DNA, 120 bp, synthetic construct
  source 1..120: mol_type = other DNA
atcgaagagaacggaccagaatatctcatggaagacctttcccctcaatctatcatcctatgaatttcttcatcttgaaagcaagagctttgtgcttgggcatatgtatatgtcctgcca

SEQ ID NO: 8981 - DNA, 120 bp, synthetic construct
  source 1..120: mol_type = other DNA
gggagattactcggcacttttcagctaaggagactttctagaagcaggtgctgctgcaggccgcaagcaggtgagacattactcgatccaagaagggaaggtctggacagacaaagacca

SEQ ID NO: 8982 - DNA, 120 bp, synthetic construct
  source 1..120: mol_type = other DNA
taaaacctggttaaactgcacaccatttcttccttataagtgttaaaggacgggggctgatggccaaaaaggaattaggagcatcaccagtcataagacatcaagatcatgagacacatg

SEQ ID NO: 8983 - DNA, 120 bp, synthetic construct
  source 1..120: mol_type = other DNA
tgctggcttgcgttatttcatactagtttatttaggagttccattttcactcctcaatagattttatgtatttctcatatgcttcttcactcataagttcatctagttctgaagggttac

SEQ ID NO: 8984 - DNA, 120 bp, synthetic construct
  source 1..120: mol_type = other DNA
caagtattgagttccttagaaacctggactaggagaagcttttatttccctttagtttttcactgtgtgttttgcacagtaaagaatttctttctacagatttattcaaaattcgccagc

SEQ ID NO: 8985 - DNA, 120 bp, synthetic construct
  source 1..120: mol_type = other DNA
tccaccgactctgtttggcggccataaaaatgattacaattaatgtgctgtcctctgccagatttccttctggctcttctcaacacccagttattattactactttatggcaagacttct

SEQ ID NO: 8986 - DNA, 120 bp, synthetic construct
  source 1..120: mol_type = other DNA
cagggtcacagctgtattggtcgattgctgggttcctgttggcttggtctggatcatgttatttctggtgttggatttcctgtccatgctcctgaccacgtctctcacccacgtggcttg

SEQ ID NO: 8987 - DNA, 120 bp, synthetic construct
  source 1..120: mol_type = other DNA
aagactacctactcctgctcacttttggtttccatttggagtggaatatctttttgcactcctataccctaagtttatatgaatctttatgtattaggtgagtctcttgaagacagtata

SEQ ID NO: 8988 - DNA, 120 bp, synthetic construct
  source 1..120: mol_type = other DNA
ttgttggggagggaatggcaacctttggtcacttgtgttttggtgtcatatctaagaaggctttgcctgacccaaggatacagagatatatatatttctatagtttcttctcagagcttt

SEQ ID NO: 8989 - DNA, 120 bp, synthetic construct
  source 1..120: mol_type = other DNA
ggttctcagggtttattgtagttttttatttttatgggttttggtgagggaggtaggtggtaactcactacaccctgctgctagaaatgacattatttaataccaaagtggaagcattaa

SEQ ID NO: 8990 - DNA, 120 bp, synthetic construct
  source 1..120: mol_type = other DNA
cactgtagtatggtcttgttaagcactgggcatcattttctgtgggttcatcaaactctaagatgttccacttataagtataggtttcccctggttgaactgctctgatcatggtgttgt

SEQ ID NO: 8991 - DNA, 120 bp, synthetic construct
  source 1..120: mol_type = other DNA
tatacatgtgtacacacagtaggaaaattagatctgtttatctgagcagtaacctcccctcatcacttggcaggagcattggagagagtgtttcactcacacattaaggtggaaaatgga

SEQ ID NO: 8992 - DNA, 120 bp, synthetic construct
  source 1..120: mol_type = other DNA
tcacctgtgaacaagtgtatctgtatagttagatttccagagtgagatagctgagtcaaagggtatatgcatttagaattttgatacatattgccaagttattcttcagaatccttttac

SEQ ID NO: 8993 - DNA, 120 bp, synthetic construct
  source 1..120: mol_type = other DNA
tttagtttggaactctttaagtggcatccagaaaaggcaagaattttaaaagggggaaaaggaggaggggttagggaaaaaatttggaaagattccctttatttcttcttgagcaggcaa

SEQ ID NO: 8994 - DNA, 120 bp, synthetic construct
  source 1..120: mol_type = other DNA
aattccttcgctttctccatccccaaagagcaagttataaatctaagagcaaaatatctaagtttggttgttaggaactgaggaaagtttgtctgcggtgcaggtggcttgaaagggcaa

SEQ ID NO: 8995 - DNA, 120 bp, synthetic construct
  source 1..120: mol_type = other DNA
ctacctaaaacctttcctgtaaagaaatctcaaattgcctcagaccacaatttggtctgtgacaatttgctgcgaggttatgtgtgtgttcgtgtgtcatgccccagtgatggatgatgt

SEQ ID NO: 8996 - DNA, 120 bp, synthetic construct
  source 1..120: mol_type = other DNA
atgtgtgtgcatgtgttcatgcacttttgactacagcctgaccagataccagggagaactcaactcaaaccagttaatgtgtcccagagagtagagttatctcataagcctagaactttt

SEQ ID NO: 8997 - DNA, 120 bp, synthetic construct
  source 1..120: mol_type = other DNA
atgtaacccaagatgtgacagtacagaaagatcaaagccatggactggaaactaaataaaccctctggctacttcctgcaaggaaaattcactttggcaatgtagaacagagcccagtta

SEQ ID NO: 8998 - DNA, 120 bp, synthetic construct
  source 1..120: mol_type = other DNA
tatcttgcaaaagatccaacaatgattccagaatcctactaggatgaatctactacattggcaagcagagttttcctaagaggtggccttgaaattaaatatgtgtgtatggttctttgt

SEQ ID NO: 8999 - DNA, 120 bp, synthetic construct
  source 1..120: mol_type = other DNA
tgagtatagtctgacatgcattatctctataagacacctgccttgctagataagatatgctgtatattctttcagggatgtctatttcctataaacaagcgtaattagtttatcccctga

SEQ ID NO: 9000 - DNA, 120 bp, synthetic construct
  source 1..120: mol_type = other DNA
gatcctatgaatgttaattccctaagagtaaaattgttatgatgtacagaatctctacccttataacatacagtccatgttacaaaaaaaatcaataaactccttcaagacatttaggac

SEQ ID NO: 9001 - DNA, 120 bp, synthetic construct
  source 1..120: mol_type = other DNA
gggattacaggcgtgagccaccgcgcctggccctaaactggtattttcacaaggcctagtgtagaacatggaagttgttcagtaagtatctgctgattgattctgtttttaatatttaaa

SEQ ID NO: 9002 - DNA, 120 bp, synthetic construct
  source 1..120: mol_type = other DNA
taaaaaaaaaaccctgtatacccaggtctagaaatactcaaaactgtgaagaaaactgttttctgtgtccctgatctctcatttggcaaccattagccccctcgagtctttcccttcctt

SEQ ID NO: 9003 - DNA, 120 bp, synthetic construct
  source 1..120: mol_type = other DNA
ttccaacatatgtcctgcatacaactgaaaatgcactaaacccttctcagaggaggagataaagtccttcagtgatgtttactctcttccttgatgtcctgtaacttaaacactatgatg

SEQ ID NO: 9004 - DNA, 120 bp, synthetic construct
  source 1..120: mol_type = other DNA
tatatattaaaaaaagaagcattagcaacagtatcaatgcctttgacagatggcagaggcagcagcagcagcaagcagcagcttttgacttcaacagaggtaggcaatgccaacacatca

SEQ ID NO: 9005 - DNA, 120 bp, synthetic construct
  source 1..120: mol_type = other DNA
tccagcaaatttctcctcttatttctaccaagcctttgtgaacattgctcttcattttggcctgtacttctccctcagggacgtagaacaatggaatgtcagtcagtctctgtagttaaa

SEQ ID NO: 9006 - DNA, 120 bp, synthetic construct
  source 1..120: mol_type = other DNA
caggatgaagaacgccgaaagaaggaagaacaagtcatacaggtttaaatcttgtttcaacttgttgctagttatctagatttgttgcccaaagtgtatcagcaaatgttcaaggttttt

SEQ ID NO: 9007 - DNA, 120 bp, synthetic construct
  source 1..120: mol_type = other DNA
aaacatagacgaggaggaaataaaactgtctttatttgcagaaagcataattgttctatgttgaaaatccagtaggatatataaaaacactactaaaactaagtgggtttggcaagattg

SEQ ID NO: 9008 - DNA, 120 bp, synthetic construct
  source 1..120: mol_type = other DNA
ttaaggatcaatttgacaaagaaaaaaatacaacatctggacactgaaaactacaaaacactgctgagagaaattaagtacccaaataaataaaaagatatactatgctcatgggtcaga

SEQ ID NO: 9009 - DNA, 120 bp, synthetic construct
  source 1..120: mol_type = other DNA
tgttaccatttcagcctatgagcatgccattaatttgccatctttacaaaattctctcttgacttcacatccctctgtagctgccctctcccttctctcctcttctttacaacaaaactc

SEQ ID NO: 9010 - DNA, 120 bp, synthetic construct
  source 1..120: mol_type = other DNA
gccaggggaagaagtgttttagaaagccgcagtattgctttgctctggagatgtctgagaagcaaaaggtggaaatcaggtatttttattatttaccagttcacatggcaatcagttggt

SEQ ID NO: 9011 - DNA, 120 bp, synthetic construct
  source 1..120: mol_type = other DNA
tttttccattttaactgctcattaatatgtctaccagagataaacttgggaagagagagataaaaatctggttatgatcttcaggtgttgttttgccaccatgtcaacccaccctggatt

SEQ ID NO: 9012 - DNA, 120 bp, synthetic construct
  source 1..120: mol_type = other DNA
actagaacagtccatcaaacacagggagtttatacagtgctcaagagaaaaaggttaaaaagtgctgttgatgagcaacctgctggttcacagatgctctttactattcaaaatataatt

SEQ ID NO: 9013 - DNA, 120 bp, synthetic construct
  source 1..120: mol_type = other DNA
tcttactcataagagggagttgaacaataatatttttattatttaaaatcattgtgtccatgaagctgtaattcccaattaagtattacttcccttctcttaggaaactatcagtgggat

SEQ ID NO: 9014 - DNA, 120 bp, synthetic construct
  source 1..120: mol_type = other DNA
acagagccaagatataatacaggtcatctaattccgtagttcatactgttaatcactattccacatttccctcaaaccaaagtggattgagcattcagggtattctgtctaagtcaggca

SEQ ID NO: 9015 - DNA, 120 bp, synthetic construct
  source 1..120: mol_type = other DNA
tgaaagggtgttattgaaagagtgatgatgcgtaactgcaagaggagatgagagaaggcttcctggaagaggtaattcctgagctgaatcttgaaggattaataggaagtggcagatgaa

SEQ ID NO: 9016 - DNA, 120 bp, synthetic construct
  source 1..120: mol_type = other DNA
ttccactgaattctgtagggtctcactggtaaacagtaagtattgtagtttcactttttccccctgctagctggtgtttaagcctgttatattaatgtgatgtcatgtttggaaagttac

SEQ ID NO: 9017 - DNA, 120 bp, synthetic construct
  source 1..120: mol_type = other DNA
aaggagcaaacacaggtcttctttgtactgctccataaacacccactgggtcggccaaaaaggtggctgaaagttattgcagtgttcttttgctttaaaaaattgaaactgaattgctca

SEQ ID NO: 9018 - DNA, 120 bp, synthetic construct
  source 1..120: mol_type = other DNA
aagtggggtatggatcattatgactggttagagggggtttggagaatgaagttgttgctgtaagcctatgggattcccaggcacagagcttgcttatgtcttaattttaatgagttctat

SEQ ID NO: 9019 - DNA, 120 bp, synthetic construct
  source 1..120: mol_type = other DNA
atcttttggtgttttttggtgtactttttggggattttcctgggaaagttctaggcatatattcagttgatttagagttagatttgggctaagattattagtatacttgaaattctgagc

SEQ ID NO: 9020 - DNA, 120 bp, synthetic construct
  source 1..120: mol_type = other DNA
ttatttcttttgctgtgcagaagctcatgaatttaattagatcccacttgtcctttttttcctttattgtgattgctttgatgtcttcgtcatgaaatctttgcctgttcctatgtccag

SEQ ID NO: 9021 - DNA, 120 bp, synthetic construct
  source 1..120: mol_type = other DNA
ttttcttcttagcctgtttgggctgctgtaacaaactgccatagactggtggtttacatacaacagataattatttttcacagttctcgtggttgggagttcctagatcaaagctccagc

SEQ ID NO: 9022 - DNA, 120 bp, synthetic construct
  source 1..120: mol_type = other DNA
cgctcaacatcactatcagggaaatgcaaatcaaaaccataatgaggtattgccttactgtggttaaaatgtctattatcaaaaacacacaaaaaatgttagtgaggatgtggagaaaga

SEQ ID NO: 9023 - DNA, 120 bp, synthetic construct
  source 1..120: mol_type = other DNA
gttaccctgaagcttgtaaataatatcttataacccactattttaaactgatgacagcttaacactgattgcaacaacaaacatactattaggttggtgcaaaagtaatcgcagtttttg

SEQ ID NO: 9024 - DNA, 120 bp, synthetic construct
  source 1..120: mol_type = other DNA
ggagggggagggggagggggagggggaggggttgtttctatttatatcttattatcttgtctaactcttgaaaagttgtagttatttttaacaggttcatctttctacccaaaatgtgag

SEQ ID NO: 9025 - DNA, 120 bp, synthetic construct
  source 1..120: mol_type = other DNA
attgttagctgttcttcagataagatgtttgactgccctaggtctcgagtatttttgacgggtttcaatgattaatgatacgtttttattaatcacttatgcttagcaactgcagggatt

SEQ ID NO: 9026 - DNA, 120 bp, synthetic construct
  source 1..120: mol_type = other DNA
caaagctacagtgagataccacttcatacccactacgatgtcaatcattacaaagacagataataacaagtgttggcaagaatgtggagacattgaaagcgtagcatagcaactgcaact

SEQ ID NO: 9027 - DNA, 120 bp, synthetic construct
  source 1..120: mol_type = other DNA
tgaatgcatttttcatcatagataaagcaggaagcctgagacagtttcagagtttttcttttctcattctttccagttgctccctaagaaactgcctctcttaggagaacagcccacaga

SEQ ID NO: 9028 - DNA, 120 bp, synthetic construct
  source 1..120: mol_type = other DNA
tagaaaatctagtatgagtaagagaggtgaaaggaacccttgggaagagggaaaggaaaattccaactcgacagctgattagagggcctattgagaaagcagtttagatcagaagtcaga

SEQ ID NO: 9029 - DNA, 120 bp, synthetic construct
  source 1..120: mol_type = other DNA
cagttcctagggaatacagtccaacgatttctctctcttaatgtcctgaaaagtacaaaaagagttatcctgcgggccaataggcacatatttacccctgaaatatttcagcaatggcag

SEQ ID NO: 9030 - DNA, 120 bp, synthetic construct
  source 1..120: mol_type = other DNA
cagtaaatgtgctctgcttggatacagaagattctgtctctgtcagtatagaatagccatcaagttattaattttatcagaaatgcagaatgaagtgtggtgggtatactcacattgttg

SEQ ID NO: 9031 - DNA, 120 bp, synthetic construct
  source 1..120: mol_type = other DNA
aaagcactcacctacatattctaaccaagtaggattaatgtttaattctgcaaatggcacgactttcattaaagtccttgcatgttggtggttttggcctcttcacactcctgtctcttt

SEQ ID NO: 9032 - DNA, 120 bp, synthetic construct
  source 1..120: mol_type = other DNA
gtactttgctacctcattatttagcttcacacagagataatatttaaagaatgtagaagtatttgtcatcaataaatcccatagtatgtcttcctcaaggaaaatgagcaaaggatgact

SEQ ID NO: 9033 - DNA, 120 bp, synthetic construct
  source 1..120: mol_type = other DNA
acgtgctgaattataacccaaacatagtggtacttaaaagcccctgtagctctcatgcttctcctaatagaagcttttggctgaaacaagaaacgtttttgaaagaagcatattgtcatt

SEQ ID NO: 9034 - DNA, 120 bp, synthetic construct
  source 1..120: mol_type = other DNA
cagtccatttattttctaatattctactctgatctcttcccctacctcctctttacgctcaataattcatggatttgcccttttgaggctattttctagatcttgcaggcatgcctaatg

SEQ ID NO: 9035 - DNA, 120 bp, synthetic construct
  source 1..120: mol_type = other DNA
gagttctctgttttgttctactggtctatgtggctacttttataccatgttgtggcatttttaaggattttttttttaagtggggagtttgagaccagcctgggcaacatggcaaaagcc

SEQ ID NO: 9036 - DNA, 120 bp, synthetic construct
  source 1..120: mol_type = other DNA
tggcagtgctgtacatagcagtagcacagtcctatcaaacaaaatttaatgcagaacaccagtatatatacaaggtaaaaatggagctgaggggagtgtgtgtgtgtctaaatgtgcgtg

SEQ ID NO: 9037 - DNA, 120 bp, synthetic construct
  source 1..120: mol_type = other DNA
ttttcgaaagtttctactgctgcctgcctctctgaaggccatgggacttacctatttgtttgtcaaagcaaaaattcccaacattttgtaaacaccactaattactttttataactgtaa

SEQ ID NO: 9038 - DNA, 120 bp, synthetic construct
  source 1..120: mol_type = other DNA
tggcaatcctgaaaagtcagggaggtcaataaatattaagagtatgctctcacaattagcattaaacacatggtaattaacacaatttaatatgtgaaaaatgagaaaatatacaggatg

SEQ ID NO: 9039 - DNA, 120 bp, synthetic construct
  source 1..120: mol_type = other DNA
ctctctttccctttctccatccatcctcagtttaattagttacccagtactttttccacacccaccatttggaggaagtttgtgacagagtgagttgatgagggtacttttgatttcact

SEQ ID NO: 9040 - DNA, 120 bp, synthetic construct
  source 1..120: mol_type = other DNA
ctcattacacttgacagaatgttaggttgaggatttcccttgctctcatcttctttcgaacaatcaacctacccaggaaaatctgagcgcaacttgtggaatctgagaggcagtaattaa

SEQ ID NO: 9041 - DNA, 120 bp, synthetic construct
  source 1..120: mol_type = other DNA
tgcctctaaacttcccaggccttggtctaatatattcttttaaggtgcaaacctttgtaagtccccaggttaggcagagtccagatccctcttggtgattctttctttctttctttcttt

SEQ ID NO: 9042 - DNA, 120 bp, synthetic construct
  source 1..120: mol_type = other DNA
acaatatggctattcagtttcaaagactgtttagattcaacagtgtgtgaggaggataacagaaaacatttaccctaacatcccttttgcagaattccctctccccagcaccttggacag

SEQ ID NO: 9043 - DNA, 120 bp, synthetic construct
  source 1..120: mol_type = other DNA
atgccacacttattctgtgctattcactactccataatgtatatgcttcattgaaattatttctcacagtaattccattaagtcagtactattattatctacactataaatatgaggaaa

SEQ ID NO: 9044 - DNA, 120 bp, synthetic construct
  source 1..120: mol_type = other DNA
gtctaattggtacaggctaacaaacactaaatatgggaacaatatgtccactactcttgcccccacaagattactaaactttccctacctcctttctcctcctcccccacctcaatatta

SEQ ID NO: 9045 - DNA, 120 bp, synthetic construct
  source 1..120: mol_type = other DNA
accttgaggggagggaagggatgagtggcggatggaaagtgtcagatccacagagaagcataaaggttttttgccctaaggggagaaattcaaacacagcagacatttttaaaaaaatag

SEQ ID NO: 9046 - DNA, 120 bp, synthetic construct
  source 1..120: mol_type = other DNA
gaattcttaaccccagagcttatgataaatgataaagatagtcactgttttaagcccccctaaatgttgatgtaattgagaatgaaataggaactcagagctggggtgaggccgtggagg

SEQ ID NO: 9047 - DNA, 120 bp, synthetic construct
  source 1..120: mol_type = other DNA
cttcccctctcttgcaatcacaggacagctgtgagcctggcatcagaatttatttttaaacccaatcatgagctgctggactgctaccccagctgtgactggctttcagatgtagggaca

SEQ ID NO: 9048 - DNA, 120 bp, synthetic construct
  source 1..120: mol_type = other DNA
tccatccaatttgcaaaaatactggccatcatttctacaaatattttctacctctttctctctcctcatcttttggaaatctacaaatgttggcatgcttgatggtgtctccaggtttgt

SEQ ID NO: 9049 - DNA, 120 bp, synthetic construct
  source 1..120: mol_type = other DNA
taagatgatgacctaaatatgtctattatttcttctgctggtatcctgttattcaagacagctctctctcttttttctacatgttattatttagtgacattagctaactcttaactctca

SEQ ID NO: 9050 - DNA, 120 bp, synthetic construct
  source 1..120: mol_type = other DNA
aacacgcctcctcagatcccatatgtgagttactgacttcaactactggacttcaaacatatataaacctaagagcttgacaacactttgagagcttaggctgtgtcaagtttcactctg

SEQ ID NO: 9051 - DNA, 120 bp, synthetic construct
  source 1..120: mol_type = other DNA
ggctatgaaaactaaaacagaatcctcttgcaaagccctaccatgcctaactattcttcctaaggtagtgcagtcatgcatcactcaatgacagggatacagtctgagaaatgtgtcatt

SEQ ID NO: 9052 - DNA, 120 bp, synthetic construct
  source 1..120: mol_type = other DNA
gtacacatatatatgtgaaaaaccaatgtcccagcaccattactgaatatcagtcatttcccctacttgatctgcaatgccaatatcaagtgtcatatattaggtctctttatgtgctct

SEQ ID NO: 9053 - DNA, 120 bp, synthetic construct
  source 1..120: mol_type = other DNA
tgtgatggaattgaggagggggttgctgtgtttttgatctgattcacttgacagattatttgaatccagcccacctttccgcacatgtcaaacagatgggatcattgttaaaagccttga

SEQ ID NO: 9054 - DNA, 120 bp, synthetic construct
  source 1..120: mol_type = other DNA
aggctggagtgcaatggcgagatcttggctcactgcaacctccgggaggaatgctgggttaaataattgcttttcatgtacttggtattttgctatgtgctttacatacaatattttatt

SEQ ID NO: 9055 - DNA, 120 bp, synthetic construct
  source 1..120: mol_type = other DNA
aatgtttttcctttactatctgtttctggaaaaagtgctaatatgtttacatttcaaatatttttttttttttcctgctgggagtcaggccagtaagaggaaagcaaaatggcaggagaa

SEQ ID NO: 9056 - DNA, 120 bp, synthetic construct
  source 1..120: mol_type = other DNA
gaaaggagagtggttgagttgcataaatagagatgtactggagttgagtaaagcaattcctatggcccactatagatctctaaacctagcaaatgcctgatgttcaatagggactccata

SEQ ID NO: 9057 - DNA, 120 bp, synthetic construct
  source 1..120: mol_type = other DNA
gagttcacgcattgtgttattatatggtcctatatgcaaagcaaaaatccttgaactgagaatttaccttttgcattaaaaacatttaccattgtcctgaatggtaatgcctaggttttc

SEQ ID NO: 9058 - DNA, 120 bp, synthetic construct
  source 1..120: mol_type = other DNA
acacagtgctgggactttgggggcagaatttagaaaagtttccatttgtccaaagaccaccccccttttttgagaattgactagttttgcacactctttcccgagttttaaacaataaaa

SEQ ID NO: 9059 - DNA, 120 bp, synthetic construct
  source 1..120: mol_type = other DNA
aaaatttgttggatatttagctggctgaagtttgcctgtctcaaagcctatgtcatgaatggagctccctgtggttgaatctggactgaggatctggattgatacaccttgatctcatca

SEQ ID NO: 9060 - DNA, 120 bp, synthetic construct
  source 1..120: mol_type = other DNA
caagaaagactacagggttaacccagagtggttcaggcaaaaacagaatttcctatctgattgaactgggtcactgagaaatttacagcaacaggaggcaaggtgtcctatgcgttaact

SEQ ID NO: 9061 - DNA, 120 bp, synthetic construct
  source 1..120: mol_type = other DNA
gagttctccgactgttgcattcagcagtttacagttaccaaggatactaaatttgacatagattttgattcatcaaatttttttcattgttcaattcccacctttgagtgagaatatgcg

SEQ ID NO: 9062 - DNA, 120 bp, synthetic construct
  source 1..120: mol_type = other DNA
cacacagaataaagattgcttatacacatcaacgtattatgagcattatctttattttgcttgtatgttctagattttcttaagcaatgtgcatttctttcatactaaaaatatttttaa

SEQ ID NO: 9063 - DNA, 120 bp, synthetic construct
  source 1..120: mol_type = other DNA
tgtttctctgtgaagtaaagcaagcttctgtgcttgttcaatactagttgtaacatcttatttgatttgaagtggtaggcatcacagatacttataaaactaaaaacagcttcctctcac

SEQ ID NO: 9064 - DNA, 120 bp, synthetic construct
  source 1..120: mol_type = other DNA
aagcatggacctaatgaacgggcaggcaagcagtgtcaatattgcagctactgcttctgaggtaagatatttaagaagcttgggtgtaaagtttcttacctggctttctaatttttcaag

SEQ ID NO: 9065 - DNA, 120 bp, synthetic construct
  source 1..120: mol_type = other DNA
tgtttaagaagtcaaatatttgcataagagaacaaaatatagcaaaatcctaactcagttattcgcatctttccaacctcgatcctggagctccactcccacccagatctcttagctgtt

SEQ ID NO: 9066 - DNA, 120 bp, synthetic construct
  source 1..120: mol_type = other DNA
caacaaagataacaagaacacacaatggggaaatggtagtttcttcaataaattgtgtcagaaaaactggatgtccgcatgcaaaagaatgaaactggacccttatctcataccatctgc

SEQ ID NO: 9067 - DNA, 120 bp, synthetic construct
  source 1..120: mol_type = other DNA
cctatctgggtatgtgaagaagcatcttgattgtgagattattgtggactcctgggcataaatatttggtagacatgggaaaggaaaatgaaacatttgtcagatgagtttttatgactc

SEQ ID NO: 9068 - DNA, 120 bp, synthetic construct
  source 1..120: mol_type = other DNA
agaagttatgctgtgaaaaggagaagagaaattggttggtgtctggggagtgaggagatgggtcaaaggagggattttaaaggtgggagtactattaaggttcatttgtataatggtggt

SEQ ID NO: 9069 - DNA, 120 bp, synthetic construct
  source 1..120: mol_type = other DNA
cacacagactctcccacccacttctcagcttggaaaacctcacctgggccgtgattgcctaacgtgacccggtgaccctgcagtctccaggcaaatgttatagcctttgtagtattttgg

SEQ ID NO: 9070 - DNA, 120 bp, synthetic construct
  source 1..120: mol_type = other DNA
ccaaattacacaaacatataagtgacaggaaacaacatgtatcttaattttaaaatcacattaaacagtatttaaaaattggcttcagccaggcacggtggctcaggcctgtaatcccag

SEQ ID NO: 9071 - DNA, 120 bp, synthetic construct
  source 1..120: mol_type = other DNA
ctgatatcatggaaagttaaagtagttatgttgttccttatttaaatgcagaattatggtgaatgggaacagctgtattctataccaagatagccaatttgggatgaccaaatcaacaaa

SEQ ID NO: 9072 - DNA, 120 bp, synthetic construct
  source 1..120: mol_type = other DNA
tatagatgcaaaaagcagtctagcagaatattcagcaaatgataaaaattgttaactctgagagttaagattcttaattcctctgtagtgttcaaatattttatagcaagaatgttatca

SEQ ID NO: 9073 - DNA, 120 bp, synthetic construct
  source 1..120: mol_type = other DNA
ggcactgagtaatattccattgtctggtaccacagtttatccacttgtactgaaggacgtcttgcttgtttcctcataaagttgctataaacgtgtgtgggttttttgtgtggatagcag

SEQ ID NO: 9074 - DNA, 120 bp, synthetic construct
  source 1..120: mol_type = other DNA
tgattactctaggaaatacaacatgcataacaatgcaaggacattagagcactttaactcctttaccctcctcttctaacctgtttttgttgtgtaatgttatttttaacccctcaagaa

SEQ ID NO: 9075 - DNA, 120 bp, synthetic construct
  source 1..120: mol_type = other DNA
ttcagggacttcaattagacataggttagaccttttgaccatttgccacatccctctcttctgtcttgtttgtatttcattccttaaaacaaattaaaaactaaaaacactgtgcttcag

SEQ ID NO: 9076 - DNA, 120 bp, synthetic construct
  source 1..120: mol_type = other DNA
agttcacacctatgttgttcaagggtcaactgtatataaattttcttaaggaaatttatccatgtaactagcacatatcaacaatcaggtcattattagactctcagaagcacgcgtgcc

SEQ ID NO: 9077 - DNA, 120 bp, synthetic construct
  source 1..120: mol_type = other DNA
aaagatctgtccaatgctgacagtggtatgttggagtctccagctactattgtattggggtctctctctctctttacctctaataatatttcctttatgtatctgggtgcttcagtgttg

SEQ ID NO: 9078 - DNA, 120 bp, synthetic construct
  source 1..120: mol_type = other DNA
ccttgcttcctgtcttcctttagtgaaggtagttttctctgttggtatattttaatgtattgctttttatttttgtatatatgttttttgatttgaggttatcatgaggcttgcaagtat

SEQ ID NO: 9079 - DNA, 120 bp, synthetic construct
  source 1..120: mol_type = other DNA
ttgatagtttgactataatatgcttggcggaggacctttgtgggttgaatctgtttgggaattattgagcttctggatctggataaccaaatctcttgcaagtcttggagagttttcagt

SEQ ID NO: 9080 - DNA, 120 bp, synthetic construct
  source 1..120: mol_type = other DNA
tgcacattagagtttgagaagcattgctgtatgtcattattttacaggtgaggtaatggaagctcagagaccttagttgacttgctcagtattccaaagcttgtgagaacaaaacctgga

SEQ ID NO: 9081 - DNA, 120 bp, synthetic construct
  source 1..120: mol_type = other DNA
gtggtgaacgttatgaacagaagttaattaaaaatagaaaaactgcataaagctaaaaatgaattatcttgatcatacattgtaagagtggacccatcagcattccagtgaatacatgcc

SEQ ID NO: 9082 - DNA, 120 bp, synthetic construct
  source 1..120: mol_type = other DNA
aaattcattcatggctactcttaaaataaaatccaaactccttgccattgcctgcaagaacttacaggatctcacctctgtgggcctttccgatattatattgtcatcttccccccacac

SEQ ID NO: 9083 - DNA, 120 bp, synthetic construct
  source 1..120: mol_type = other DNA
tggttcccccatttagccttaggccctatgagttccttttttgtctcaatcattttaagaatgtgaattttctgtaaccacaaagcttggaagaggcagtctatattcaaacccaggtct

SEQ ID NO: 9084 - DNA, 120 bp, synthetic construct
  source 1..120: mol_type = other DNA
gtgtgctaccagggttagccaagagagaataagatgtaattgcttgcctaaagtgataatatctttccaggacatctcctgaataccaatgaaggcagatgatttcagggagagaggcat

SEQ ID NO: 9085 - DNA, 120 bp, synthetic construct
  source 1..120: mol_type = other DNA
ttctgtgtctcttgacctcaaagataagtgtattcctcctgaaagacttccacatttttggtgacaccagtttccacattggtcatggtgaatagcttaagactgactctgaaaggcaca

SEQ ID NO: 9086 - DNA, 120 bp, synthetic construct
  source 1..120: mol_type = other DNA
aaactggactggactcctaaatcctgggtgctagtacctgcaagtattacttgagcaccgtcttccccatgtaaaaatagaacatttcttaaattcaaccacggttgtgaaatccaagct

SEQ ID NO: 9087 - DNA, 120 bp, synthetic construct
  source 1..120: mol_type = other DNA
ggtatcagattaacagacattcattgaagataagtgaaataactttggagatagcagagaagagcaagaagatgttggacgttggcagtaagccgcagcaaggcagttaggaaagtacgt

SEQ ID NO: 9088 - DNA, 120 bp, synthetic construct
  source 1..120: mol_type = other DNA
tcgtcttctaggtgtttacatcccttttccttattaaatgttctgtctcctggcatcaaccccagtcccctagacatggctaagtattcggtaaatatccactgatggattgatttcaca

SEQ ID NO: 9089 - DNA, 120 bp, synthetic construct
  source 1..120: mol_type = other DNA
tgcttaggtgtgtgtgtcctacataggtgtgtgtcctctgcccaggtgtgtgtgccctacacaggtgtgtgtgctctgcacaggtatgtgtacaatgctcaggtgtgtgtgcattttgct

SEQ ID NO: 9090 - DNA, 120 bp, synthetic construct
  source 1..120: mol_type = other DNA
tctgctcactgagtgatcttggaaaaatctctgcatctcttgaggcctcagtttgtcatctgtaaagtgagagcattgtactagatgatctctgaggcctttccctgtactaacatttta

SEQ ID NO: 9091 - DNA, 120 bp, synthetic construct
  source 1..120: mol_type = other DNA
cactgaattgtgaccacaggattccagccttgctgttttcctctactttttctgtatttactctttcacatgaaaatcttttccctccctgtttttctttcttccatggctccctctcca

SEQ ID NO: 9092 - DNA, 120 bp, synthetic construct
  source 1..120: mol_type = other DNA
taatttgtgagctgactgtgcttaagaaaacatttgaagcaatgggaatatgggaacaaagacatggaggtttcaagtgagagtacctagcacatgcaggaaacagcaatgccttggctt

SEQ ID NO: 9093 - DNA, 120 bp, synthetic construct
  source 1..120: mol_type = other DNA
gaagagcctcagttttcaggattagataatttattgaatgataattccagtaactgggactgggaatgtaggaaaaggagcaggttgggaggcctggacacattgaacatgttgagatga

SEQ ID NO: 9094 - DNA, 120 bp, synthetic construct
  source 1..120: mol_type = other DNA
gggggagggtgggttgtgtagggtggtgagggggagttaaggatagttaataggtataaaaaagtagtttgaaagaataaagcctagtatttgatagcacaacagagtggctattatcaa

SEQ ID NO: 9095 - DNA, 120 bp, synthetic construct
  source 1..120: mol_type = other DNA
ttttggttgctggtgcttttttttcttttgaagtcttacacaaaaagtctttgcccagaccaatgtcctggagcatttccctaatgttttcatctaatagttttatagtttcaggtctta

SEQ ID NO: 9096 - DNA, 120 bp, synthetic construct
  source 1..120: mol_type = other DNA
aatttggaagttgtgttactactattattattaccacgacgctcttcactcaccacttgagtgggggttccaactaccttgtcacgtggccttgggtacagagacacagcctaatgcaaa

SEQ ID NO: 9097 - DNA, 120 bp, synthetic construct
  source 1..120: mol_type = other DNA
aggtaccaagattcatgcctgtgcaatgataaggccaatatatcttcattttttaggagctctcagaaaattctctctcagggctgtcccgttacctgacgaattttgtcggaaactcga

SEQ ID NO: 9098 - DNA, 120 bp, synthetic construct
  source 1..120: mol_type = other DNA
ataacctctcgccacctaggtcttctcatcttataaatgtggggataaaaccaacttgacagggctgttttgagaattaaatgggacaaaacaggcaaaagcaccttgtgcaaagtaggt

SEQ ID NO: 9099 - DNA, 120 bp, synthetic construct
  source 1..120: mol_type = other DNA
gtgtatatatacatatattttttgtatgatacatgtatagtgaagacgctgcatctcagtggctcacttgtcagaagttttgttactaatataacagccacagggttgttttctaagcca

SEQ ID NO: 9100 - DNA, 120 bp, synthetic construct
  source 1..120: mol_type = other DNA
gaggccagggatgctgctaaacgtcctagcatgtgaaagtttcttgtattggttcgaaccctaaaagcatgccaacagacaacacaaagcggtgtggagcaacacactgttttaatgagt

SEQ ID NO: 9101 - DNA, 120 bp, synthetic construct
  source 1..120: mol_type = other DNA
gatttttagaatataacttttgtgaacctttgttgaaccatgctcccataggcttagtttccagattgcaattcagaacatttctcttgttctctctctcttcccctccctccctccctc

SEQ ID NO: 9102 - DNA, 120 bp, synthetic construct
  source 1..120: mol_type = other DNA
tgtgatatgatgccaattcctttcaacttttcagtctcgttttttggcctctatgtgtctattttttgtaaaaggtccatgtgtgtcagagaagaaaatatgttctgcagtggtggtact

SEQ ID NO: 9103 - DNA, 120 bp, synthetic construct
  source 1..120: mol_type = other DNA
aagttcagctcaatgattttaaatatgtaaatatacttatgtaaccataacccagatcaaggagaacatttccatcacccccaaagttcccccaccccactttccagtctgcacctccca

SEQ ID NO: 9104 - DNA, 120 bp, synthetic construct
  source 1..120: mol_type = other DNA
tctttaatttctgggttatctgagcccacaatgtgtaccaattttgaataattgctttaagctaaaagacactaggaaagcattttcccattggggtggccaaaggcctgggatcctgtg

SEQ ID NO: 9105 - DNA, 120 bp, synthetic construct
  source 1..120: mol_type = other DNA
tttcaggaatggagggaaaatccttacagcctggaacacttttgaggtttgtcacgaatgtccttgaaagtaatattactatcccctgcttgccaccaaaactgggcatggtcaggggac

SEQ ID NO: 9106 - DNA, 120 bp, synthetic construct
  source 1..120: mol_type = other DNA
tcaagatgaactcccagaatcttcactgttttcaaagataattagccctaagtgttcacttgccctgattaatcccagcagctcttagtcagtgagggattcctgactctttttagtcag

SEQ ID NO: 9107 - DNA, 120 bp, synthetic construct
  source 1..120: mol_type = other DNA
tctttcctttccatctttcaagggtcatcttttgtccctcttagtatataaatcctgcaagtgtccacctgccatgtgtacactttcctagtctgacttcctagtaagtaagtctgcagt

SEQ ID NO: 9108 - DNA, 120 bp, synthetic construct
  source 1..120: mol_type = other DNA
gacgtcaggcacctcagaccatttgcccattttatgacatttgcccatttccatcttgtaggatggaaaaattttaagtgccattttccggctatttggaactactgtcgagtttgtatt

SEQ ID NO: 9109 - DNA, 120 bp, synthetic construct
  source 1..120: mol_type = other DNA
ctaccacccaacacaataaagtcagcacatctcccaagatcacaacagcaaaaccaataaatcccagacccagtcttccacctaattctgatacatctaaagagacgtctttgacagtga

SEQ ID NO: 9110 - DNA, 120 bp, synthetic construct
  source 1..120: mol_type = other DNA
cccaccactcccaaggaacctgcacccaccaccaccaagaagcctgcacccaccactcccaaagagcctgccccaactacccccaaggagactgcacccaccacccccaagaagctcacg

SEQ ID NO: 9111 - DNA, 120 bp, synthetic construct
  source 1..120: mol_type = other DNA
atgtcagtctagccatgaaagacaggctcattttcagaatttttacaaatcagatttcttaatttgcaagacagagggcagatctacatggttcaaccaggtagcaccactctgtgaggc

SEQ ID NO: 9112 - DNA, 120 bp, synthetic construct
  source 1..120: mol_type = other DNA
gaatgtaacttcctgaaaataacctgtaggaatagttactcttattttctatcccaagatgatactaatgatcagagtttcaggtcatgtgtggggaagatacaatgctaacttgcatta

SEQ ID NO: 9113 - DNA, 120 bp, synthetic construct
  source 1..120: mol_type = other DNA
tgcttctcagctattactctaacagacttcattacgtttaaaaaaggctgagttacagtatcttacccattaataacgattgcagcttttgggaaacataacaatttataccatcgcagt

SEQ ID NO: 9114 - DNA, 120 bp, synthetic construct
  source 1..120: mol_type = other DNA
gttttgctttttcaacaaatgggactgggcaggggagttgtagggagccttttaaacaattagtatgtcaggaatgcatagcaaatatcaatttcctatctgttatcctgtatcatcagt

SEQ ID NO: 9115 - DNA, 120 bp, synthetic construct
  source 1..120: mol_type = other DNA
tacatcgggattcctgaacgattatctgcagctaaagtacaagttctcacaccagtataatcctgctccctatgccctatcaccttgggttcttttaacgtggaaaagcaaatccatatt

SEQ ID NO: 9116 - DNA, 120 bp, synthetic construct
  source 1..120: mol_type = other DNA
tctaagtgccaggggaaaaaaacaataaactggcccaaactctctgcaatattataatcatattatgcagtgctgcccactcccccagttttctttaactgaaacatcatcagctatgtt

SEQ ID NO: 9117 - DNA, 120 bp, synthetic construct
  source 1..120: mol_type = other DNA
gtatgtataccatctctatttaaagtaatgattaacattataaaacttaagtacaatgctttcttttgtttctgttttccattctctttctcttttttcctatcctcttgagttacttga

SEQ ID NO: 9118 - DNA, 120 bp, synthetic construct
  source 1..120: mol_type = other DNA
ataatgactcatcctttaagtcaaagatatggggcaactaaaatcaatgctgcaggtctgtacttgtgacatgggactgtttttcatctgtttttaagtataagggaataaaggaaataa

SEQ ID NO: 9119 - DNA, 120 bp, synthetic construct
  source 1..120: mol_type = other DNA
ttgtcattgctgttattaagtaggtgtggaaaagaggagtgctctgtcagccttgttatacttagactagattggatgtagttaagatgacatgactaattttcagtagggatgatcata

SEQ ID NO: 9120 - DNA, 120 bp, synthetic construct
  source 1..120: mol_type = other DNA
aacagaggatactgtggctaaaaaaatcttaaaactactggtgcataatggtacccaagcatttggctcctattgatataaaatcttcagtttcaacactgctcttcaaataaaccatcc

SEQ ID NO: 9121 - DNA, 120 bp, synthetic construct
  source 1..120: mol_type = other DNA
tcctcataaccatgttgtgagaatatgcagaaaaaattaaacatacttgagtgagtacagtagatatatattggagtgtatcctttatgaatgcaaactggctgtagtttcctttaaaat

SEQ ID NO: 9122 - DNA, 120 bp, synthetic construct
  source 1..120: mol_type = other DNA
atatcatactaaatatgtgttcatttttataagaaatagacaaactgttttcctgagcgatcatacattgtaccttcacatactcagtgtatgtgagatccagttgtttcgcaaccttgc

SEQ ID NO: 9123 - DNA, 120 bp, synthetic construct
  source 1..120: mol_type = other DNA
aatcgttacataactacataaatggttacattaacttttaaattcacaaatttaaaagcggtttaagctccgtgacacattggactacgaatgctacgatggatatgaaatcagttatgg

SEQ ID NO: 9124 - DNA, 120 bp, synthetic construct
  source 1..120: mol_type = other DNA
atacaagcaagactttcagtcttcaaaactaaagaagcaaagagcattcaagcacagaattctagggaaaaaggcaaccttatggaaaagattacatatacatatggcatattaaagcaa

SEQ ID NO: 9125 - DNA, 120 bp, synthetic construct
  source 1..120: mol_type = other DNA
tatgcattcccattgacttctgaaccaccatcagtaagtttcatcttagtggaagtccttaggctgtccctttctccaaattttgccattaaatttttgactgactggccactttgttgc

SEQ ID NO: 9126 - DNA, 120 bp, synthetic construct
  source 1..120: mol_type = other DNA
gaactcttggctagaaaaaagaaggggcttcctctttcctcttcaatggcccatttctgaatattccaaactcagagactcagggaccacaacaaggaaattgaacagcttttattttgc

SEQ ID NO: 9127 - DNA, 120 bp, synthetic construct
  source 1..120: mol_type = other DNA
tttgggggagcaggtggtttttggttacatggataagttcttcagtgctaattactgagcttttgatgcacccaggatagactaaatttattttaaacttttcttcgataataaattaac

SEQ ID NO: 9128 - DNA, 120 bp, synthetic construct
  source 1..120: mol_type = other DNA
tgattttcagttccaattgtgtccaagtggatgttgaataacatagtttgcctacctatataaatcaaatgttctcaaagtgtggtcgctaaaccggtagcatcatcatctccttggaga

SEQ ID NO: 9129 - DNA, 120 bp, synthetic construct
  source 1..120: mol_type = other DNA
accacctcaatgcaaaggtagagtattatatttcttttaacattttgggggagtatagcagggttaaaatatgttgatttaaacaaaatgaagtcatttttattaatagatttttcaaat

SEQ ID NO: 9130 - DNA, 120 bp, synthetic construct
  source 1..120: mol_type = other DNA
tggaaagcttactttcatgtagatccatttatactctccacattgtaagtataaatgccagtcgtattttctctgcatgcattgagcaccatattaaactcatttgcttcaaatatcaaa

SEQ ID NO: 9131 - DNA, 120 bp, synthetic construct
  source 1..120: mol_type = other DNA
atataaaaagctttatttagaaagtttccaataagactattgatttttccccacatataaagtattttttttcagattcttcagaaaagtgtgggcctcctccacctattagcaatggtg

SEQ ID NO: 9132 - DNA, 120 bp, synthetic construct
  source 1..120: mol_type = other DNA
taaaacagaagaagaagaaaagaaaaagagaaaaagaaaaaaccaagaatgttcagagtcttcaatttgttaatggatacaatgagtcttcaagaatgacatccatttattgcgcacata

SEQ ID NO: 9133 - DNA, 120 bp, synthetic construct
  source 1..120: mol_type = other DNA
tttcccaacagtatgctctttggccaatttctagagattatttttataattttatccagttttattgctgccttttggtggtgagtgaatataccaagacccagaaatacccattctcaa

SEQ ID NO: 9134 - DNA, 120 bp, synthetic construct
  source 1..120: mol_type = other DNA
ttggaactaccaagcatgtggctcctggtcagtgtaattctaatctcacggatatcctctgttgggggagaaggtaagttcaaaacagacctgaatatttagttcctttttcagatacat

SEQ ID NO: 9135 - DNA, 120 bp, synthetic construct
  source 1..120: mol_type = other DNA
tttccttcttattcaaacattatagagtggacttacacaaacctaggttttatagcctactaggtaactaggccatatggtatagcctgtcgctcctaggctgcaaacctgtacagcatg

SEQ ID NO: 9136 - DNA, 120 bp, synthetic construct
  source 1..120: mol_type = other DNA
acgagtcatataaaacataaaatacgcatcagtgggccccagtcccagatatctatctagatttccacaggaacagtttctgtttagatttgcactattttgcctttctgaccttgaaaa

SEQ ID NO: 9137 - DNA, 120 bp, synthetic construct
  source 1..120: mol_type = other DNA
atctgaaaaacaggaagcatttcgaggtatcagaaaacctccaaggaacttagtcaaggaagtaaggttctggaaaaaatgtattcaggtgagttcaacatctatgtgaggctgggcgtg

SEQ ID NO: 9138 - DNA, 120 bp, synthetic construct
  source 1..120: mol_type = other DNA
aaactatgtagtttcatgttcttgtcaccaaccaacactcatgaaagatctctgtccagaagcagagggcggagtggatggtttaggagtaggatatgtttcctgtttattaactgagtg

SEQ ID NO: 9139 - DNA, 120 bp, synthetic construct
  source 1..120: mol_type = other DNA
attacctcactgtgaggttgtgagaaatgaataatacagtaaaatacttagcaaagtgagctgcacaccatacctacgcaatagcagtagctattgttaataatgtgctcgccctcgccc

SEQ ID NO: 9140 - DNA, 120 bp, synthetic construct
  source 1..120: mol_type = other DNA
ttggtcccactccttttattcaacatcttattatgtcagggaaagtagatcacagcacaaaacagagcaagtgctcaggatctcatagaatttccacttctacatgctacaccactatgt

SEQ ID NO: 9141 - DNA, 120 bp, synthetic construct
  source 1..120: mol_type = other DNA
cttggcaatgacttttagagacaacaccaaagtcatgaaccatgaaaaaattaattgataagctggatttcattaaaactggaaactctaaaaagcagagcgcctctcctcctccaaagg

SEQ ID NO: 9142 - DNA, 120 bp, synthetic construct
  source 1..120: mol_type = other DNA
actgatgcctcaccaacctcagcaaagatatacaaatgacaaataagcatatgaaaagatgttccccatcacatgtcatcagggaaaggcaaattaaaacaatgagataccactacgcac

SEQ ID NO: 9143 - DNA, 120 bp, synthetic construct
  source 1..120: mol_type = other DNA
aggcaggggcttggggctgatagccagaggttagttaatggatccaaaatgacagctagatagataggaggaatggtgttctagtgttctataacactgtagggtgattataattaacaa

SEQ ID NO: 9144 - DNA, 120 bp, synthetic construct
  source 1..120: mol_type = other DNA
tggggaagatcaacccatttctgctagtcgtgagggaaatgtccggaggttaactccttttccctttttctggtcatcacttttaaaaacaaatagtagcaacccaaacccaaattttgc

SEQ ID NO: 9145 - DNA, 120 bp, synthetic construct
  source 1..120: mol_type = other DNA
gggaagggtgggagggatgtgagggatgaaaaactactttttgggtacagtatatactattccggtgacaggtgcattaaaatcctagacttcaccactgtacacacattttaaaacatc

SEQ ID NO: 9146 - DNA, 120 bp, synthetic construct
  source 1..120: mol_type = other DNA
gtggtggagacgtcatagatcatctccaaactctgtttataatagagtgaggaagctgagacccatcaaggttaaatggcttgttcaaggtcacacaaccagttactgtcaaaccttata

SEQ ID NO: 9147 - DNA, 120 bp, synthetic construct
  source 1..120: mol_type = other DNA
ttgggacaacgtgctgtaaagaaaataagtgaaaaggttcttcagtgaactctttttatacaaagagccgtagattccgatatccaggccaaactctccaaaaagccctcctttcctctg

SEQ ID NO: 9148 - DNA, 120 bp, synthetic construct
  source 1..120: mol_type = other DNA
aggaagtataagtcctcctactttgttccctttcacgattgctttggctgtggtgagtcccttgagctttaatatgaattttaggatcagtttgtcagtttctataaagaagctacctgg

SEQ ID NO: 9149 - DNA, 120 bp, synthetic construct
  source 1..120: mol_type = other DNA
cactcctgctcagaagacagtggctctgacgtctccagcatctcccaccccacttcgccgggcagcagcagccccgacatctcctttctgcagcctctctcccctcccaagacccatcgt

SEQ ID NO: 9150 - DNA, 120 bp, synthetic construct
  source 1..120: mol_type = other DNA
tggtcagtgtccctaagggataaggatggtgtaactgtgcctgctgtccccgcttttctgcctggttcatttacccacctgtcctttcttcctgaccctggcaggtgcccacagtttgtg

SEQ ID NO: 9151 - DNA, 120 bp, synthetic construct
  source 1..120: mol_type = other DNA
cttgtggttagtggacagcagccaccctttgacagctacctctgggcatctcaagggcttgcagccccactgctccttctaacattttgtttgtttttgagatggagtctcgctctgtcg

SEQ ID NO: 9152 - DNA, 120 bp, synthetic construct
  source 1..120: mol_type = other DNA
atttctctcactgtgctcttaccgcatcagcaacccccaacttttgggcctactctgccccccatgcgtgaataccctgcttggatgctgtgcttttccggtttgtctctaagccccttt

SEQ ID NO: 9153 - DNA, 120 bp, synthetic construct
  source 1..120: mol_type = other DNA
ccggcctttcctttaaatttctaatcttctctcacaccataaggccttaaaaagacctgaaagctccccagaacctatggtcatgaaaaggggctgaagcacatcagtgcaatgactaat

SEQ ID NO: 9154 - DNA, 120 bp, synthetic construct
  source 1..120: mol_type = other DNA
gacaaaaacaaagagatgtgagagagaagcttattgagatcacaagcagcaggacacagacacagacacgaacacagacacacacacagagacacccacataaagacacagagatacaca

SEQ ID NO: 9155 - DNA, 120 bp, synthetic construct
  source 1..120: mol_type = other DNA
cacacagacacatagacacacatacacacacacacatacacagatgcactcacacagatgcacacatacaaagatgcgcacacagacacatagacacacacatagacacacaagacacag

SEQ ID NO: 9156 - DNA, 120 bp, synthetic construct
  source 1..120: mol_type = other DNA
ttataggaaaaatttgggagctcctgagagaatggattcagggagcaaggcaggttacaggggtggtttaaggggttctggggaaatggggttaattgaggcaggctataggaaagattt

SEQ ID NO: 9157 - DNA, 120 bp, synthetic construct
  source 1..120: mol_type = other DNA
gtcagtgaatgaagcaggttataggaaggatttgggtgctcctaagggaataggttcagggagcaaggcagattttagggatgctttagggagttctggggaaatggggtcaatggatga

SEQ ID NO: 9158 - DNA, 120 bp, synthetic construct
  source 1..120: mol_type = other DNA
taagggaatgggttcagggagtaaggaaggtttcagggatggtttagggggttctgaggaaatggggtcaatggatgaggcaggttataggaaggatttgggggctcctgagggaatagg

SEQ ID NO: 9159 - DNA, 120 bp, synthetic construct
  source 1..120: mol_type = other DNA
gtttcctcatctacaaaatgatctgtaatgtcttccctagatgtaaatcccacaactccttgactctgaagctctgaggttttgagtctgggggcctgggagagctgtggagctactaac

SEQ ID NO: 9160 - DNA, 120 bp, synthetic construct
  source 1..120: mol_type = other DNA
ggagggggcataaggtgacaagcaaatgcaagtggacagagcaacaaatggaatcatgtttcgcagcagttctaaagaatttgagagcccattactgggtatatacccaaaggattataa

SEQ ID NO: 9161 - DNA, 120 bp, synthetic construct
  source 1..120: mol_type = other DNA
aaagaaagtcccatgattggcctcatcctttgggcactctctgtgccttggccaagttctggcatgataccactcacattcctttaaccagttcttcactgcttgtcatttcctatctgg

SEQ ID NO: 9162 - DNA, 120 bp, synthetic construct
  source 1..120: mol_type = other DNA
taggttcataagcaaaagggacaggatggacaggctttcctacttacaagagtagcattcttgcctgttctgggggttgtttttaattgtcttgctggagcacatataccctttccttat

SEQ ID NO: 9163 - DNA, 120 bp, synthetic construct
  source 1..120: mol_type = other DNA
atttcctccatggcctgtccgtggcagagtgctggctgtttcctccatggcctgtctgtggcagtgtgtgtctgtttcctctgtggctcgtctgtggcagaatgtgtctatttcctctgt

SEQ ID NO: 9164 - DNA, 120 bp, synthetic construct
  source 1..120: mol_type = other DNA
gtgaaaataccaggtagtattatgttcactatgtctttgtagggtgtgtgtgtccccatctgtctgtatgtttgtctgattgtgatgctctacttcatcagattcagggttccttgtgga

SEQ ID NO: 9165 - DNA, 120 bp, synthetic construct
  source 1..120: mol_type = other DNA
acctccttcaaacacacacacctccaaacacacacacacctaacacacacctcctccacacacacacacgtacctccaaacaaacacacacctaacacacctccttcaaacacacacaca

SEQ ID NO: 9166 - DNA, 120 bp, synthetic construct
  source 1..120: mol_type = other DNA
aaacagttccagtgtatgcatttcattttttctcccttcctctcagctccagatctggggcaacccagggttgggagtgtttgaggatggaggacactggatcaagtgtccaggaattgt

SEQ ID NO: 9167 - DNA, 120 bp, synthetic construct
  source 1..120: mol_type = other DNA
attggatcacaatctatttttctcagaatcctgtagataaggctccatttccccctgacatgcagtgtgccaggaaattctgaggtcagccttatcattttattctttcaaggagagcat

SEQ ID NO: 9168 - DNA, 120 bp, synthetic construct
  source 1..120: mol_type = other DNA
tgaaattggagctctcatatactgctggtaaaaatgtaagatggggcagccgctgaaaaacagtctggcagttcctcaaacaattaagcatagagttaccatatgatccagcaattctac

SEQ ID NO: 9169 - DNA, 120 bp, synthetic construct
  source 1..120: mol_type = other DNA
tttgcagcattttccaaatttctgagtccatctagtagttttgtttttcaaagaaacccaagactggtattccactggagaaactttggaaattgtcaagctagagaggtaggcaggaac

SEQ ID NO: 9170 - DNA, 120 bp, synthetic construct
  source 1..120: mol_type = other DNA
tacaaggtataaagctccctggattgcaagagaggatacctagtttactctccagctaagcccacaatttatgccttctcaggcaagccatttaacttctcttgttcagtttcttactca

SEQ ID NO: 9171 - DNA, 120 bp, synthetic construct
  source 1..120: mol_type = other DNA
tagtgagtttgtgtgggatgtgtgtgtaatacgtgtatgtgttgtggtctgttgtgtgtagtgaggtgtgtgtggtgtatagtaaggtgtgtatggtgtgtgtctgtgtggtgtgtagta

SEQ ID NO: 9172 - DNA, 120 bp, synthetic construct
  source 1..120: mol_type = other DNA
caggtgcccccgttcaagctgcaggagagtagctggagagaccgcggcctcctccccagcccacttcttccctgcggcccgttgaggagacctagcggtgccccctgctgtccgtccagg

SEQ ID NO: 9173 - DNA, 120 bp, synthetic construct
  source 1..120: mol_type = other DNA
gacaactggtcaggataatagctggtaagtacatccaaataagtatgaatagaattagtcttctggtcaacccctaaaatactgaaactgtgcagcaagatccaacgtattattcttcac

SEQ ID NO: 9174 - DNA, 120 bp, synthetic construct
  source 1..120: mol_type = other DNA
cgcaccattgggcagatatgcagggatctcttcgatttcctttactgccgtagcaaggctattcaatgaatgtcgtggcctacaaaatgcaaacaaagacttcttagcattttatatgat

SEQ ID NO: 9175 - DNA, 120 bp, synthetic construct
  source 1..120: mol_type = other DNA
ccacaccctaactttaaggcctcattagatctgcaaacacacgcctggagattcaacatcagggtcaagaaacgaacagaagtgagactaaaaatcagtttgagcctcaaaaaatactac

SEQ ID NO: 9176 - DNA, 120 bp, synthetic construct
  source 1..120: mol_type = other DNA
taaagtggccaaagatacaagtagggaaagatttcatgacaccaaagaaatagggaaaacagagagagggttaggcctaagtcgatcaaaccccaaattagggagaatgatacgctggaa

SEQ ID NO: 9177 - DNA, 120 bp, synthetic construct
  source 1..120: mol_type = other DNA
cacacaatttttggcaaaatcagtttaaaatagtatcaaacaagaattaagaattttgactggttggaagctgcagtgagtcatgcttttgacagagcacaacggggaacgggaacgggg

SEQ ID NO: 9178 - DNA, 120 bp, synthetic construct
  source 1..120: mol_type = other DNA
tttcagagtgagctcttggaaaccaaggttgtgtaagttggatactgaatttgcttttccatttcagtttactatcaatgtgagcacggacatgcggcatcatcgagtgagactggtgtt

SEQ ID NO: 9179 - DNA, 120 bp, synthetic construct
  source 1..120: mol_type = other DNA
acctataacaccagtaaatgcagagccaagattctgacccaggtctttttgttgtaccataagtttaaaagatgagtctcatttttcttgtggtagatggtggtaaaaaggagtaggcag

SEQ ID NO: 9180 - DNA, 120 bp, synthetic construct
  source 1..120: mol_type = other DNA
caacctggacaaggaaagatagtgtgttctggtttctctctttgttctcccctaacctctctcagcaaagttgaagaggattgacctctccaacaacctcatttcctccatcgataatga

SEQ ID NO: 9181 - DNA, 120 bp, synthetic construct
  source 1..120: mol_type = other DNA
catgcacctccatcaccaccacccactgttttcatccttttaaatttgctatttattgattctttcagttgcaagaaactgattctgacccaagaaaaggccatcccaagaacctccatg

SEQ ID NO: 9182 - DNA, 120 bp, synthetic construct
  source 1..120: mol_type = other DNA
aagggcatctactccctttacattgtgaatcctgcttttttgagaagcgtcccaggtagcttaacaaattaccagcactcctgccagcaagcctggctctccagcacagcagacccaact

SEQ ID NO: 9183 - DNA, 120 bp, synthetic construct
  source 1..120: mol_type = other DNA
ctttgtgtccgtgagactaggtgattcagccaactatttttaaaacggcagttttctaataatcttttttttcttacagtcttgtgctgcctccaacccagtcctcttcagattcctcac

SEQ ID NO: 9184 - DNA, 120 bp, synthetic construct
  source 1..120: mol_type = other DNA
ttaaaaggctttaaagtgcctcaggggtcccctgaaactaattttctatttctgggattccctggattcattatatgagatggtgacatgattagaggaattcttttttagtatgaaaat

SEQ ID NO: 9185 - DNA, 120 bp, synthetic construct
  source 1..120: mol_type = other DNA
aatttcaggtgataataattcttaaccacctgaattgagggctcctgtcctagttgttaggtgtgtgacatgagaaggctttgttttggaactggattttgctgcaggagataagccctt

SEQ ID NO: 9186 - DNA, 120 bp, synthetic construct
  source 1..120: mol_type = other DNA
atgagcaagtgaatatgcggatagaaggctgtatcattgtgagtatccaggcgatttcatctcatagcagttcggtcgtagaaaaagacttaacagaaagtgtctagccagaacagtgta

SEQ ID NO: 9187 - DNA, 120 bp, synthetic construct
  source 1..120: mol_type = other DNA
tttaatccttctcatcactgtccgcttctcaatcgttctttcagtctaagggttttgatgttagtcctcctcttcattctgtcctgcatcactgtggaaaatctccttgctcaggagcat

SEQ ID NO: 9188 - DNA, 120 bp, synthetic construct
  source 1..120: mol_type = other DNA
atttatataaaattctggaaaatgcaaactgatctataatgacagaaagcagatcagcggtatctgggggacagagtggaaagaggggtggattacaacgggacacaagggaacctttgg

SEQ ID NO: 9189 - DNA, 120 bp, synthetic construct
  source 1..120: mol_type = other DNA
ccaatatataaaataaaacaaagcttgccaacaggtgagacccggctacctgatgtcttacaggtgtgccaaaatattgatttttttttttcccccagccctcaggaagccacactggat

SEQ ID NO: 9190 - DNA, 120 bp, synthetic construct
  source 1..120: mol_type = other DNA
ggcaacaccgtgctctttaaacacaggagtttgtgctcccatcgcaaagcagcattaggcaatttaattaaggagctggcagcagacaaactttgtgagttaaaggcattttattaaatc

SEQ ID NO: 9191 - DNA, 120 bp, synthetic construct
  source 1..120: mol_type = other DNA
aactttaaattgcgtttcttctgtagtggcatcagtgtgtgcaagaagtgggtttggaaggattgctcttatttacatctagtcattctgcaatctttgttggcaatgcccacgactgct

SEQ ID NO: 9192 - DNA, 120 bp, synthetic construct
  source 1..120: mol_type = other DNA
aaaacattagcccttcccatcagctgttttctggtagcctcacagatactggttctctctacaagtccattccaggacagtatatttctggacgtaagatgtcaaagactagtttcagaa

SEQ ID NO: 9193 - DNA, 120 bp, synthetic construct
  source 1..120: mol_type = other DNA
gtttcaaagatcaagccacaaaggtttctgatgattctatgtgggcatgacagaaagagagaagtcaaatgtggttcacagatttgcggcctggcagccagaaagaagaaatggtcaata

SEQ ID NO: 9194 - DNA, 120 bp, synthetic construct
  source 1..120: mol_type = other DNA
acccttgtgatgtgatacaataagaaatatacacttggtcttctgttccccctcctggcacagagctcctgaagcccttgtaatttcctgagtaataggtgtgatagaagcatcttttat

SEQ ID NO: 9195 - DNA, 120 bp, synthetic construct
  source 1..120: mol_type = other DNA
acataggagaaataaattttatctctctctgggttttttggaagaattcacataaacttctgtggatacccgaaaaccgaagaagactatggttttatcttgtcacctagcttatccagt

SEQ ID NO: 9196 - DNA, 120 bp, synthetic construct
  source 1..120: mol_type = other DNA
aaataaacttctttatcactttgtaaaagaactgtgtctccattgctatttctaccacccaccccttgcccctgatttgcagctgacctttatgaatgtattttccgaactcagccaggg

SEQ ID NO: 9197 - DNA, 120 bp, synthetic construct
  source 1..120: mol_type = other DNA
ttcctcagatttcctgcaaaacctccaggccataattaggtttctatgtcattctgttctccaggccccaggcctcttgacaacttgtgaatctaactgtacaagtaatacaacactatt

SEQ ID NO: 9198 - DNA, 120 bp, synthetic construct
  source 1..120: mol_type = other DNA
tgatgtcattcttggcactgacttcaaagtaaggaatatctttctctctacaccagccttgagctacttcctggggtacctgaatgagggaaagaaataggcgtggtgtctgtattatca

SEQ ID NO: 9199 - DNA, 120 bp, synthetic construct
  source 1..120: mol_type = other DNA
aggatcacagcaaagatgtggggagagtcagggttcttcactattaggagggggcttggaaaacggcaagtttcaagcatggcttgtgttttaaaaagatttttctgcctctccctctcc

SEQ ID NO: 9200 - DNA, 120 bp, synthetic construct
  source 1..120: mol_type = other DNA
tctgaatgcagctttaaaaaaacaaaacaaagcaaagcaaagcaaaacaaaacagctctttataatgtacaatggcttaagcaaatcgctttagttttttttctatttaagatttaggac

SEQ ID NO: 9201 - DNA, 120 bp, synthetic construct
  source 1..120: mol_type = other DNA
aattacgaaactttatatgttaatattcttatgtaaaccatagtgttagcagtaaaaagagtagctattgaagaatgtactgcaaataaaattacctaatattatccatctaggacataa

SEQ ID NO: 9202 - DNA, 120 bp, synthetic construct
  source 1..120: mol_type = other DNA
caggttgcagcagtcactataataaacaaaagaataatcaaaaacttcactgagaaagaatagtcagatttcatattgaagaatgaagcacaggtatacagtaaatgactaaacatacag

SEQ ID NO: 9203 - DNA, 120 bp, synthetic construct
  source 1..120: mol_type = other DNA
ctctttcctggggcctccctatttcctaagatacaacaatattgaaattgggccagttaatatccctacaatgacctctaagtgttcaagtgaaagagagtggcatgtctctcactgtaa

SEQ ID NO: 9204 - DNA, 120 bp, synthetic construct
  source 1..120: mol_type = other DNA
aaggcaaacaaatgaaaacaaaagttgtgtttggactaggagtgccagttatttgtaagactatattgcaaaagtaaattccatgactttaattaccgcctatattcattcattcatcca

SEQ ID NO: 9205 - DNA, 120 bp, synthetic construct
  source 1..120: mol_type = other DNA
aggaagagtacacagctttacctgggtaaatcaaaaaacttgtaaagtttctatcattatcatgaaattcatttaaaatgaattgtggttattaacctgcttcctctggctctatatcca

SEQ ID NO: 9206 - DNA, 120 bp, synthetic construct
  source 1..120: mol_type = other DNA
cactagcatgacttacttggtaggagggatgtctgtagagaaaaggtctatttcagtatcagccagcaaaacagccttcattcccctagagctgagcacttgtttacagaatttgcaaca

SEQ ID NO: 9207 - DNA, 120 bp, synthetic construct
  source 1..120: mol_type = other DNA
tttccgtggatctatcaattcacaattcgaatttggaagaaagaaggaaaacatgacgtctccagccaaattcaaaaaggataaggagatcatagcagagtacgatactcaggtcaaagg

SEQ ID NO: 9208 - DNA, 120 bp, synthetic construct
  source 1..120: mol_type = other DNA
cttcaaccttgccacaaacagactattttgctttgctctgatattttcccattgatactattcaggatcatagaattttataggtggctgagcatgatgtcttactccgagaaggtgcct

SEQ ID NO: 9209 - DNA, 120 bp, synthetic construct
  source 1..120: mol_type = other DNA
ggtttaaatcttggttctgacagtagctagcctttcacttcaggcaagttacatgacttgtctgagcctcagtttccttatttggaaaataggtaaaataaaatacatttcctaagatag

SEQ ID NO: 9210 - DNA, 120 bp, synthetic construct
  source 1..120: mol_type = other DNA
agtagttggaaacagtgttcatgaggggtccttagctttttcaatttcaggtgttcttggggaatgagaacagaaatttcctttgaagaagcctatctggtaattgtggccacatccgtt

SEQ ID NO: 9211 - DNA, 120 bp, synthetic construct
  source 1..120: mol_type = other DNA
tcctgcccctgtctctggcaagcaccattgtactttgtctctatttgataactccagatactgcaggtaagtggaatcatattgtatatattttttgttactggcttatttcacttccta

SEQ ID NO: 9212 - DNA, 120 bp, synthetic construct
  source 1..120: mol_type = other DNA
gccttacagctgaactgcctctagtttcctttctttatcatgttgtgtcatggtttgtgctgtatccatgctgtgccctctctttggaatgggtcctcttccttgaacctgtaaaactta

SEQ ID NO: 9213 - DNA, 120 bp, synthetic construct
  source 1..120: mol_type = other DNA
agtctaagtttgagaaagtttgtctgtcttgacctggagttaaaactgggttgacctgaaaaaggaactgttttgttcctttttcaaagcacggtgtggagagagctattgcctggttag

SEQ ID NO: 9214 - DNA, 120 bp, synthetic construct
  source 1..120: mol_type = other DNA
gatgtggagtggcctcttgcctcttacattgctctttatgtattaggccttttgtcaactaaggatttctttgaggattgtgatgaagcatgctgtaatgtggaattgaaatgttttcat

SEQ ID NO: 9215 - DNA, 120 bp, synthetic construct
  source 1..120: mol_type = other DNA
gcacgcacacaaacaccatacacacaaatactctaacaaaacttaatgtaaaatgatctcatgtttatgagagctggaattacttgggagggatacttgtgttctgcaggcttagtgggc

SEQ ID NO: 9216 - DNA, 120 bp, synthetic construct
  source 1..120: mol_type = other DNA
taccatttttaaacaaattacattttggatcgttttttgagatagcaagggtttcgtctctcatcttgggttggatgaaaagtgtaagacaacacagaactcagaacctagcagcgaggg

SEQ ID NO: 9217 - DNA, 120 bp, synthetic construct
  source 1..120: mol_type = other DNA
tgctgccacttagtagctgtgtgactctgtataagcttctaggctttctgtgcctcaatttcttcaaccgttgacaatatgaccgtgtatcatcacataatacactatgatgtgaagttt

SEQ ID NO: 9218 - DNA, 120 bp, synthetic construct
  source 1..120: mol_type = other DNA
aggttgaagcacctccagttggacctacttaacaattttgcttagccttgaactcttggcctctctgataattagttttctaattttttttttttttttagacagagtcttgttctgttg

SEQ ID NO: 9219 - DNA, 120 bp, synthetic construct
  source 1..120: mol_type = other DNA
ctagttgcagttccccaaggctttaagcagtctgaattccatatctgatgaatgaatcccaaaggtgttgaagatcccagttctgaaaaatgagcaaaccccaagttttataatagaaac

SEQ ID NO: 9220 - DNA, 120 bp, synthetic construct
  source 1..120: mol_type = other DNA
tccccagtgtctaactcttaacagctggtggccatccctggcctccatctttactttgctgcatacctcagcttgatgagtccttgatgttgactccttgaccttactgccatcttcttt

SEQ ID NO: 9221 - DNA, 120 bp, synthetic construct
  source 1..120: mol_type = other DNA
ctggaagggctgtatcccaccaagacagatggctgcctagcctatttttaactgtctctggggaagaagattccacaacctattttgaaacctgtttcattgattgacagctttccaatt

SEQ ID NO: 9222 - DNA, 120 bp, synthetic construct
  source 1..120: mol_type = other DNA
gtctaatctttgaacagttgagaaatgggtagtttgttttcatagtgctgcttcttattttcaaggttgagggcccttctaggcgaggtgaaaggaacccttaaatctagagactgccta

SEQ ID NO: 9223 - DNA, 120 bp, synthetic construct
  source 1..120: mol_type = other DNA
gtttggctgtaaactcatggagctggctccttgaaatgctagcgtcctagccatgcacgcatgcaagcaagcagaatttgttcacgcctaggccatatgtggatgtcactcttctttagt

SEQ ID NO: 9224 - DNA, 120 bp, synthetic construct
  source 1..120: mol_type = other DNA
tgtgtgagagaaaatagcaagtgaaaaggatgtgtacacagcagcatgaatggggtgctattcttagctgggtctctaacctagagaacaggaaacaagatgcttctgaatgtggactat

SEQ ID NO: 9225 - DNA, 120 bp, synthetic construct
  source 1..120: mol_type = other DNA
taaggcctggaattgtcacttcgaatgtcttcttaatctgggaaatttgaagaggtctgcagcagggaggctggtcagggaagtaactttgcaaaataaaatcttcatactgatgcaatc

SEQ ID NO: 9226 - DNA, 120 bp, synthetic construct
  source 1..120: mol_type = other DNA
ggtaatgtggatagtagatgaacacaattcttgtgaatccatttgccttgtgcttgggagttctattcttagaccacaatcaccggaatagaaagcctccgaccccacatccgaactgaa

SEQ ID NO: 9227 - DNA, 120 bp, synthetic construct
  source 1..120: mol_type = other DNA
tcatttgttctccttcacattgaggggagactcaggcacagatgagagacagaggcagagaagttaaataattagtccaaggtcacatcaaatgatttccaactcagctgatgaatctgt

SEQ ID NO: 9228 - DNA, 120 bp, synthetic construct
  source 1..120: mol_type = other DNA
ggaaaccaaaatcaagaccctttgttgctccagttcttttattacatgtcacagtcgaatgtgtctccatttaaattcagattttttgatgaatggccagaccagctgcaggccctttgg

SEQ ID NO: 9229 - DNA, 120 bp, synthetic construct
  source 1..120: mol_type = other DNA
gatagatttgcatgacctagctccctgccttctcctgccattcttttagaaagtggtgagtggctgcctgccaggtaaaatctgggtgacaaaatccaaagttagattcagagttataag

SEQ ID NO: 9230 - DNA, 120 bp, synthetic construct
  source 1..120: mol_type = other DNA
agtaatttgaaaaaataaataaatagagctatgggagttagagtgtttgggcattgggatgggtactaatgggaatgggcagtgaaggcctctctgaggaggtgatatttgagctgaggc

SEQ ID NO: 9231 - DNA, 120 bp, synthetic construct
  source 1..120: mol_type = other DNA
gatcttggtgcatggttggtgttccatgaacctagaatgaaattgatcaatcaacaggctattaactgagacaggagaagtggagatacaaagagcatacactgccaggaagaaggaatt

SEQ ID NO: 9232 - DNA, 120 bp, synthetic construct
  source 1..120: mol_type = other DNA
tgtgggttcttttaacccacaaagctagataaacccattagaagtcctgaacaatagcttcccctttcctttttgtctggggaaggggaaccacagaaatacttaataaaaaagcacttg

SEQ ID NO: 9233 - DNA, 120 bp, synthetic construct
  source 1..120: mol_type = other DNA
tttaaagggtcgcacagcagtgcatatgctacttaaaatgagattattattcttcattcttagaatgccagttggttttgttggttgataaattcccaattactcgtattcacgagtgca

SEQ ID NO: 9234 - DNA, 120 bp, synthetic construct
  source 1..120: mol_type = other DNA
tttgtatgtccctcgatttgtgtttaggggagaatagtgaggatgtggtcatacgggtaggcgtggggcccgaggaaggggtccaaggaagcaaatccaggagacttggctgcagttcta

SEQ ID NO: 9235 - DNA, 120 bp, synthetic construct
  source 1..120: mol_type = other DNA
attcaaaaactttgggcactggaagagtatgggctgtttaattctatgtccaaactgggaaacatgcttttgctactgcaatgaagggaattcagagtgatgtgcatggtgacatttgcc

SEQ ID NO: 9236 - DNA, 120 bp, synthetic construct
  source 1..120: mol_type = other DNA
gaagtacagccgaatacacaaaggcatttggcatagagtaaaccatggtatttcaaattggtgggatgggagagaggaatggatttttcaataactggttttgagacaactgggtagcca

SEQ ID NO: 9237 - DNA, 120 bp, synthetic construct
  source 1..120: mol_type = other DNA
tggtttcctcagaggtatagacctttggggaagggtagggatgagagggaaacttacttgtcattgtttactgttttgtattgagaatgtttcccccaggtgaatgactgttatacctat

SEQ ID NO: 9238 - DNA, 120 bp, synthetic construct
  source 1..120: mol_type = other DNA
gcagatactgacactagaaataagtgtcagagaggtctgatatcacttcagtttcagactgaccccagagcaacccttgaggacagcagtgtgtaagctcagaaaagattgttctaattt

SEQ ID NO: 9239 - DNA, 120 bp, synthetic construct
  source 1..120: mol_type = other DNA
gacaatgtagtgagaccttatctctactaaaaataaaaaataaaaaattcaccgggtgtgatggtgtgttcctgtagtccctgctaatcccagaggctggagtgggatgattgccttacc

SEQ ID NO: 9240 - DNA, 120 bp, synthetic construct
  source 1..120: mol_type = other DNA
aaaagtatcaggaataccctgctttgctttaaatctctatttgccttagagcagtcatctgtagtgtggtgaccacaggctttctaatgtctatgggtttaaccccctagagagcaattc

SEQ ID NO: 9241 - DNA, 120 bp, synthetic construct
  source 1..120: mol_type = other DNA
cttatataaaacttggttgttgtttttgtgtgtggggtggggggtggggtagggggtggagttgaggaagggtgggaaggtggagtgaagaaaattgcctgggttgaaaagccagtgact

SEQ ID NO: 9242 - DNA, 120 bp, synthetic construct
  source 1..120: mol_type = other DNA
ctcattatgggttgtggtcagaaaaaattcagaaaacgctgtctcagactgtcccaaagttgtatttgcttattatggaactgatgaggatagaagatgagtggctcagaaggttgtatc

SEQ ID NO: 9243 - DNA, 120 bp, synthetic construct
  source 1..120: mol_type = other DNA
cactggggctcacacgggtacttttaaatcttcttctcactggcctctgtgattctgtgaacctggttattacatgttcaaaaagtgtcagcttatttgaaagggatattcttattttgt

SEQ ID NO: 9244 - DNA, 120 bp, synthetic construct
  source 1..120: mol_type = other DNA
gtggcatcggggatcagcagggaacaaagtgaagtccctaccatcatggaacttacactctagtgggaggagaaaatgataaacacctaaatagatttacaagtggcatgaagaaaaatt

SEQ ID NO: 9245 - DNA, 120 bp, synthetic construct
  source 1..120: mol_type = other DNA
ggcagggagtacggacaccattttgagtcttaatgtaaagagaagccacgatgaaaaggtaggtgggttgggagaagggaagagatcaaggaaaatatgcgtttgtttgtttaataagat

SEQ ID NO: 9246 - DNA, 120 bp, synthetic construct
  source 1..120: mol_type = other DNA
gaatgcggtctatcctcttaatcactcagctttgctgtgaactaatctccctggggtgttttgaggattaagtgagatacctttatacttgaatagtgactcaataggagcctacttggc

SEQ ID NO: 9247 - DNA, 120 bp, synthetic construct
  source 1..120: mol_type = other DNA
gaatctggcagagcaggccctcaataatgatagacttctcattgccaaggttaatgagctctttgccttgctgtcttatttaaatactccatagttattgacacttttgtacatctctct

SEQ ID NO: 9248 - DNA, 120 bp, synthetic construct
  source 1..120: mol_type = other DNA
tactaagttcatagaaaggcaaactagcagagtagagagcaagacttggcagggcattctggtattttgtttcctgaggaacagttttgagaggggctgattactgttgtgataagaagt

SEQ ID NO: 9249 - DNA, 120 bp, synthetic construct
  source 1..120: mol_type = other DNA
tgtatatatcactccaggtgactcatggcgaccttagtactttggctttgtgaatagccagggaattcttttgtacccctaagatatagctgcttctagaaagtgagagcttgacttctt

SEQ ID NO: 9250 - DNA, 120 bp, synthetic construct
  source 1..120: mol_type = other DNA
aacaaaaatgtagatggggacagattgtggagcctcgactactttaaggcaaagctaaacgcaccatttacccatcctcattgcttcaagaacatttcagcatcatagttctgatcctga

SEQ ID NO: 9251 - DNA, 120 bp, synthetic construct
  source 1..120: mol_type = other DNA
gcctcataggatggttggggtgataattcatttgggccctctgccagaagacaacccagattctggctctgtgccactagaaacatagtaatataaatggtagataggaatgttattatt

SEQ ID NO: 9252 - DNA, 120 bp, synthetic construct
  source 1..120: mol_type = other DNA
ccaacaactccatatgatggttattgttattatccccaatttatagatgaggaaactgaggcataaaaaggttaaggggcttaactcagggtctatcttaatctctgtctctctctctct

SEQ ID NO: 9253 - DNA, 120 bp, synthetic construct
  source 1..120: mol_type = other DNA
tccattccaatctgcctgctccattgtgatcggagttaatcttcctggaacacactggcgatcagagaatttctttctgcaaaactttcaatgtctctccattgtctatgttctttttat

SEQ ID NO: 9254 - DNA, 120 bp, synthetic construct
  source 1..120: mol_type = other DNA
agaaattaacagaaggttctttggtgtgttttgcatgggcccagttcatgtagaaccttaggtcattgttgagtcctttttggaggaagagttgggaggacttctcacacatgggtaaag

SEQ ID NO: 9255 - DNA, 120 bp, synthetic construct
  source 1..120: mol_type = other DNA
tgcaggtttggggtcacaaagaggtgtaggatcctgttctttccctcaggaagctcatggtgtcatgtggaagacagagagtttatgggaaaaagataacacaaaataatatacacttac

SEQ ID NO: 9256 - DNA, 120 bp, synthetic construct
  source 1..120: mol_type = other DNA
gtcatttttccagttttcatcattccttctacatttatcagttgcaattctactgtaaggaagagcttttccatcacccccactttttggtctggttgttggtttatatcagtgtggact

SEQ ID NO: 9257 - DNA, 120 bp, synthetic construct
  source 1..120: mol_type = other DNA
ccttggcctcccaaagtgctgggattgcaggtgtgagccacaccttacaagttctcaataaaacttattagcattaagtgataaggcattttattttaaaagatttctacttccagccat

SEQ ID NO: 9258 - DNA, 120 bp, synthetic construct
  source 1..120: mol_type = other DNA
ggttgatcaccttgatcttgtgggggcttggctttatacttcattacagtgggtatattttggttttgcccttcgtcttagaaaatactgtatacttaaggcatggcctttctggggttt

SEQ ID NO: 9259 - DNA, 120 bp, synthetic construct
  source 1..120: mol_type = other DNA
ctgcccgtatcccatatttcctgtaaattggaagttggttctaaaggtccaagtggattcaagtgacttagaatgcataataagtgatgttagtacttcatgtagcatcagagcaggaaa

SEQ ID NO: 9260 - DNA, 120 bp, synthetic construct
  source 1..120: mol_type = other DNA
attactcataccctcactgttccttctcagaatgctataggcatcagtaaaacctgggaacaaagtgctctgcaaagttatgttatggtcagaaggtatctggttgtgttcatgcagaag

SEQ ID NO: 9261 - DNA, 120 bp, synthetic construct
  source 1..120: mol_type = other DNA
ttctcacttaagactagtgtattctggctgcgcattcctcacaagatgtagtcaggttaggttagaccttagagtcacaccttgttcaggttcaacctgagtgaaataaggaattgaggt

SEQ ID NO: 9262 - DNA, 120 bp, synthetic construct
  source 1..120: mol_type = other DNA
tgggcagggccttgcctgccacatcaaagggcttataccctgaagccagtgaagcagaagcccctgtaatgttattgttttaacttcttattttgagataatttcagacttaaagaaaga

SEQ ID NO: 9263 - DNA, 120 bp, synthetic construct
  source 1..120: mol_type = other DNA
ggggccctgatctaaggcagtgagaggaggagtagagaagacagaagagccatttaggctatgtttggaatcaataagcagggtttacattttgtgctatagatttaaatgctggaaaaa

SEQ ID NO: 9264 - DNA, 120 bp, synthetic construct
  source 1..120: mol_type = other DNA
gcaagccggcaacaagacagaggggaaaagggaagtggctcagttcttactttaagaaacaacatggaagatatgtttgttgatttgagggtggtgaatttttgcactatagctttgtga

SEQ ID NO: 9265 - DNA, 120 bp, synthetic construct
  source 1..120: mol_type = other DNA
agctgggtaaccccttggctgagttccatctgcactgtggccagggtgcgtggtgagacatgcttttgccatttgccctttgaactgccaacaatcccaatgtagcaaatggatttaaag

SEQ ID NO: 9266 - DNA, 120 bp, synthetic construct
  source 1..120: mol_type = other DNA
aatctttctcagaccccagatggccccatatagagcttttatacgtgccaatttttagaatttcttgtagagttcctccatttggtggtcaccagaggatctctgagattagtatctgga

SEQ ID NO: 9267 - DNA, 120 bp, synthetic construct
  source 1..120: mol_type = other DNA
ttctggaaaagccgtaaggaaatggctttcagaaagccatttctgtcctagaggagagaggtcctggatttcactgaaccagaacttgatgggtggttttggtattctgtgacctaggta

SEQ ID NO: 9268 - DNA, 120 bp, synthetic construct
  source 1..120: mol_type = other DNA
atttttgattgtcacaactggaggagtagaaggtgctactgacatctaatgatctagaggccaggggtgctgctaaaatcctacagtgcacagggcagctcccacaacaaagaattatct

SEQ ID NO: 9269 - DNA, 120 bp, synthetic construct
  source 1..120: mol_type = other DNA
tgtatgtaagccatggcataagtggttttcattttctgactgatgcaccgggaatgcctttgaagtcagaacacactgcttcccaaagaactctgggattctttgcctcagttgtactca

SEQ ID NO: 9270 - DNA, 120 bp, synthetic construct
  source 1..120: mol_type = other DNA
tggctgtttcccctacaggtatatagatagtcaagactctggagaacctcttccgaatctgcctggttggctagaggtgtagaggagccaggggcacattgtgactcagaccctcactca

SEQ ID NO: 9271 - DNA, 120 bp, synthetic construct
  source 1..120: mol_type = other DNA
tgaagtagcgcttaattaaataatgtcattttatccttatgaatcttcttcctcctaaccgcctcacagccctctagggtgtgtttaactgttgaattgggagtcaagaactgagaactc

SEQ ID NO: 9272 - DNA, 120 bp, synthetic construct
  source 1..120: mol_type = other DNA
gaggctttagtggggaagcgagggctaggcagggaatgctgtgatcttttggcatttggcagagttctgaataatcttattctcctgaaattagaagactgtgatgaagtgtatagtttg

SEQ ID NO: 9273 - DNA, 120 bp, synthetic construct
  source 1..120: mol_type = other DNA
acatagaaaccacgagccttataccttgaatatgggtagtttcattgccagtaatgggaactctggaactgccaaagggactgtatcctctttctgacctggtgttgctttcttttgtta

SEQ ID NO: 9274 - DNA, 120 bp, synthetic construct
  source 1..120: mol_type = other DNA
tctcaggcacaggggatcctgaaaggggaacttcatcttttagttcttggagagtacatacaaatattcataataacacatattttgtttataaaaatctataatctcttctaggtgata

SEQ ID NO: 9275 - DNA, 120 bp, synthetic construct
  source 1..120: mol_type = other DNA
ggaacagtgtgagcaaaggcaggtaaaaggtgataccagtgctttcaggataatggtatagtctgcgtgagaattacttgctttatagatcatccatggcttcgttttcccactaagtaa

SEQ ID NO: 9276 - DNA, 120 bp, synthetic construct
  source 1..120: mol_type = other DNA
cactgcacccagccaaaatgtaccattcttaagtgcatagtgcagtgacgttaagtataacctcacattgttgtacaaccatcacgaccatccatttccagaacttttgttttccccaac

SEQ ID NO: 9277 - DNA, 120 bp, synthetic construct
  source 1..120: mol_type = other DNA
aagcttggaaatctagtaataactggattcatactggcatccggctgacttccaaggccatctgttgccaggttgaagtcaactacagaggtagagagaatattgctctggatttgttgt

SEQ ID NO: 9278 - DNA, 120 bp, synthetic construct
  source 1..120: mol_type = other DNA
gttgtgttctctggatctcactgtggcttcatttcagtttggacggtggagaactctttagccgaatccaggatcgaggagaccaggcattcacagaaagaggtagaaagggtctgttgt

SEQ ID NO: 9279 - DNA, 120 bp, synthetic construct
  source 1..120: mol_type = other DNA
ggttccctaagtcagctgttggcgaactatgtggatccaggactcttttacatcttcaaagttatagaggacccccaaagagctttcacttatgtgggttatatatacatatatatgtat

SEQ ID NO: 9280 - DNA, 120 bp, synthetic construct
  source 1..120: mol_type = other DNA
ttgacctcatggaataggtgtgaagatgaaaacagacaatgcatatggatgcttcacacagaccctggggtggcaaatgtgctcagtacttgttagttattagtgtgagtctactctttt

SEQ ID NO: 9281 - DNA, 120 bp, synthetic construct
  source 1..120: mol_type = other DNA
ctgctcctatctaaaaattggcacaacttcttttcccatgttatgtagcaagaaaatgagatgttttccatcagagacagtgcacacaggcggtttctgctattccggagagcattcaaa

SEQ ID NO: 9282 - DNA, 120 bp, synthetic construct
  source 1..120: mol_type = other DNA
aattatgtcagtcaggatttacctggagaaatagaaccgcaggatttattgtagggacctgacttgacataggtgtgggagatagttaaatggtgtttacaggaggctgttccttcaatg

SEQ ID NO: 9283 - DNA, 120 bp, synthetic construct
  source 1..120: mol_type = other DNA
ataaagaaaagatgcttacttgactcagagttctgtaggctgtacaggaggcatggctagggacccctcaggaaagttacaatcatggtggaaggtaaagaggaagcacgcatatcttca

SEQ ID NO: 9284 - DNA, 120 bp, synthetic construct
  source 1..120: mol_type = other DNA
ttgctgttccagggtcagagttaggaaggcattacattagaagactgggtttctaataacaacaatgagtgatttatcaggttatcatggagtaatcagtgaaactccaagcctgggtcc

SEQ ID NO: 9285 - DNA, 120 bp, synthetic construct
  source 1..120: mol_type = other DNA
attccctgtccccatgttgtttccactcagttggggaaagggacaagaaaaaaaataaatacgatgctatgaagatagtagagcaaagcatttaggcatgagggaaaagtgaggagcaac

SEQ ID NO: 9286 - DNA, 120 bp, synthetic construct
  source 1..120: mol_type = other DNA
cataacttatatagagattcttgctgtctaagaaattcagtgctccttgaagcagcatgacaaatttctgttctaccatcatgaatgaaagctcattgattggactactcaagctttctc

SEQ ID NO: 9287 - DNA, 120 bp, synthetic construct
  source 1..120: mol_type = other DNA
ggaaaacagtaaattacacatgcgacccccacccagacagagggacgagcttcgacctcattggagagagcaccatccgctgcacaagtgaccctcaagggaatggggtttggagcagcc

SEQ ID NO: 9288 - DNA, 120 bp, synthetic construct
  source 1..120: mol_type = other DNA
ttgatttcttggtctctaggtcactgtcaagccccagatcattttctgtttgccaagttgaaaacccaaaccaatgcatctgactttcccattgggacatctttaaagtacgaatgccgt

SEQ ID NO: 9289 - DNA, 120 bp, synthetic construct
  source 1..120: mol_type = other DNA
cttgaacacaggtgttaactcctgattgaaatgaacaaagataggagaagattagggggaaaatctgtatccttgctggaaaccagggcagtgcacatataaagagtatgctgttcactg

SEQ ID NO: 9290 - DNA, 120 bp, synthetic construct
  source 1..120: mol_type = other DNA
ttggttcctgaggtttaaggaaagaagccctctccataacataaaggtccaaggtgaagcagccagtgctcatatagaagttgcagcaagttatctagaaaatctagctaagatcactga

SEQ ID NO: 9291 - DNA, 120 bp, synthetic construct
  source 1..120: mol_type = other DNA
gaggtggagtgtcttcctggtgatgatgacatgagcattgtgaaaatgaccacaaaggatacagaatattacaaaaacttaggtgataaagcagcagcagtatcgggaggattaactcca

SEQ ID NO: 9292 - DNA, 120 bp, synthetic construct
  source 1..120: mol_type = other DNA
caacctataacagagcccctttgaaaatgtcaggcatcaggtgctcacagcacacggtccagctgttggtgctcacccttgctcagcacacggtggaggctctgcctcaatctcattctt

SEQ ID NO: 9293 - DNA, 120 bp, synthetic construct
  source 1..120: mol_type = other DNA
agtaattgagggggaaggaaaaggaatagcaaggaatccatttttctcttccaccagaaataagctccctcatgtttgggtcaggtcactttattcattgctttctccacatcctcatca

SEQ ID NO: 9294 - DNA, 120 bp, synthetic construct
  source 1..120: mol_type = other DNA
cttaaacagtcccccaatttcatcctctgttgggtgaacacctcccagtttaaagagcattttatttagtgaagtcaacaaatacaaagtcagtgaaagaaaccccatatcctctctgca

SEQ ID NO: 9295 - DNA, 120 bp, synthetic construct
  source 1..120: mol_type = other DNA
gagggagaaaggtgtttgagcttgtgggtgagccctccatatactgcaccagcaatgacgatcaagtgggcatctggagcggcccggcccctcagtgcattatacctaacaaatgcacgc

SEQ ID NO: 9296 - DNA, 120 bp, synthetic construct
  source 1..120: mol_type = other DNA
tcagataacattctgagacagtaacttgcagacaaaactggattgcaagtccacctcactccagagccttggctttgctcatcagcattcagtcatgaaatcaaaacttactctagatac

SEQ ID NO: 9297 - DNA, 120 bp, synthetic construct
  source 1..120: mol_type = other DNA
aaggcctccattgttagctgtcaaaagacagtgcagaaatgtgaggctgggggccaacagaaatttaaccagcacagcacctcaatattacatcaccaggcattgattagtccagggaaa

SEQ ID NO: 9298 - DNA, 120 bp, synthetic construct
  source 1..120: mol_type = other DNA
ttcgtaattattattcccttggccagtttaacagtgagaaaaaagttgttttcacacaattagctgtactttgtttctctctccccagtatgtcagccacctccagatgtcctgcatgct

SEQ ID NO: 9299 - DNA, 120 bp, synthetic construct
  source 1..120: mol_type = other DNA
gctggcctaaggtcctaataatcctgaaattggggctgggccttagattgtgaactaagggttctcttggctgaaacagctcacactattcactcctattttcttctttagatttcaatt

SEQ ID NO: 9300 - DNA, 120 bp, synthetic construct
  source 1..120: mol_type = other DNA
acatccctaatgggttcagaatatctaacccagcccctccatatttccataattacagtgtagtatttatttgtatgtatgcatttgccacaatggaatgccaaaccaatgatagatggt

SEQ ID NO: 9301 - DNA, 120 bp, synthetic construct
  source 1..120: mol_type = other DNA
actatgtttgtttgatccttcacctcaacattaacaaagggaactcaggaggccctggagaagcagagtttaaaattgtactcttagcctaatgggtgcagcaaaccaatatggcacatg

SEQ ID NO: 9302 - DNA, 120 bp, synthetic construct
  source 1..120: mol_type = other DNA
acctgcctcgactttccaaaggtgtgggattacaggcatgagcctggtgctgacttttttgacctgttggctaattggacttagaacttctgtatgttgaaaaaatgactataaatcatg

SEQ ID NO: 9303 - DNA, 120 bp, synthetic construct
  source 1..120: mol_type = other DNA
cacaagaagtctccatgccatttctaaggtaaatggagtttcttcagttctgcatagttcgatgcaacacagccttgaaagtttctgcagggaaatgcagaaactatcttaggatgcaag

SEQ ID NO: 9304 - DNA, 120 bp, synthetic construct
  source 1..120: mol_type = other DNA
attgaaggtactattgtaaattggcaaaatctcttatgaaaaacaattatgcaatgtgtgtggacaataatacaaatattctgccagttagcctcctagaactgcaacctaagaaaatag

SEQ ID NO: 9305 - DNA, 120 bp, synthetic construct
  source 1..120: mol_type = other DNA
aaccaaaacccacaaccacacctcccatagcctttcttgttttgtattctctctttttaaagttgggttgttatctttgcaacagagaatgccagcaggtgttgctggcagctgtttaat

SEQ ID NO: 9306 - DNA, 120 bp, synthetic construct
  source 1..120: mol_type = other DNA
gggagggacaagagacatttttcagtttttttgcagacctaagaattttgaaccagaattacatgcagcttgctgtgtctctggacaaatatcttagctcctcactcagcatctaccact

SEQ ID NO: 9307 - DNA, 120 bp, synthetic construct
  source 1..120: mol_type = other DNA
gtaaaactcccagcacctcaaagcctgtttctaccagtttccctatggacagtcagtcctgaattatttctagttaacagactgtaacacaatgctccagtctctttatgatcagaatgg

SEQ ID NO: 9308 - DNA, 120 bp, synthetic construct
  source 1..120: mol_type = other DNA
tatgaataaatagaatgtgactttctgggaagctcccttacaccccctgccgccctcactctgctttaatatctctccgtttcttgctttcttaaagaagttctcatcttgagtctagta

SEQ ID NO: 9309 - DNA, 120 bp, synthetic construct
  source 1..120: mol_type = other DNA
tgttcatgtgaaggtgtgtgtgtgcatgtgaaggtatgtgtgtgcaggtggaggtgtgtgtccctacggaggtgtgcatctgcatgtgaaggtgtgcgtgtgcatgtgaaggtgtgtgtg

SEQ ID NO: 9310 - DNA, 120 bp, synthetic construct
  source 1..120: mol_type = other DNA
attaatctcctagggctgctatgacaaagtaccacagtcaggggaacttcaaaaacaaacttattttctcatagttctggaggctaaaagtctgagatcgaggtgtcagcagagttcgtt

SEQ ID NO: 9311 - DNA, 120 bp, synthetic construct
  source 1..120: mol_type = other DNA
cactgtaagatccagactgattgggcaggttctttctgaaactttcttggttgtcatggcagagagcatagaaaactaatccttgtcttttaaagcttttgcccaaaattgacacatgcc

SEQ ID NO: 9312 - DNA, 120 bp, synthetic construct
  source 1..120: mol_type = other DNA
ctgtagtcctccagtttttgatgatgttcaggtttggaggattacagccccaatcaagaatgcttttgatctttgtcatttctttgagggtaatgctgattgcacttgccaagacaacag

SEQ ID NO: 9313 - DNA, 120 bp, synthetic construct
  source 1..120: mol_type = other DNA
aagtgtctttgccaaaagagaccttgctcgcttttccaatcaatctttctctgcaccctctggctgtcaagtagttacctaagtgagttttttggtggttattctacaaatatgataatt

SEQ ID NO: 9314 - DNA, 120 bp, synthetic construct
  source 1..120: mol_type = other DNA
ctttagtgaacatatttacataacccttttaaaattcacctgggatgatttcctcagggtaatttcctaggtcaaaggcttttgcaactcattgccaaaccagacttgagggaaggtagt

SEQ ID NO: 9315 - DNA, 120 bp, synthetic construct
  source 1..120: mol_type = other DNA
gataccaatcactggatgctaggaataatgggacgatcaggactttgggattgtggggtgtaaaacttgctctacaatgatgtgaccttgttaaaaagcagaatgtttctgcagttgtgt

SEQ ID NO: 9316 - DNA, 120 bp, synthetic construct
  source 1..120: mol_type = other DNA
taatggaagaacctcagggtcagcactggcacaaccataggagtcggtgccttattcatgtggctcattcctttttattttttaatttttgagacaagttctcactatgtttcccaggct

SEQ ID NO: 9317 - DNA, 120 bp, synthetic construct
  source 1..120: mol_type = other DNA
agtcacttactgagtcaatgggttgggacccagcatgatttgggaacatgtcacaagtgtctggtgtgaaccttgcacagtccctctgcctactcagtgtgaatgcttgtactcttgcat

SEQ ID NO: 9318 - DNA, 120 bp, synthetic construct
  source 1..120: mol_type = other DNA
tctgcatcgttgacgttgggggcttccacttaaacaacacattaaggaatatcacactcatgaagaaaagagtatttaccagaaagtcttttcaatccaatcaccaagggccaaggggtg

SEQ ID NO: 9319 - DNA, 120 bp, synthetic construct
  source 1..120: mol_type = other DNA
tagagggaatacagaagggtactgggcatgtgggatatagattctggaacagatgaggtctcagccctgtggggtccaaatatagctaagaaaatgaagcagctgagcaactgtataatt

SEQ ID NO: 9320 - DNA, 120 bp, synthetic construct
  source 1..120: mol_type = other DNA
ctggctgtcatctggattaagcataatcaacaggtatatgtggctgttgaatccatagctttgaccccttagcactaagtgacctggatctgatggtgacatttttaggactaatggttt

SEQ ID NO: 9321 - DNA, 120 bp, synthetic construct
  source 1..120: mol_type = other DNA
cagcatcttttagtaaaggagctgagaattagcccagctcaaaatattttccctgctttgaaaatagactcctcttagccttatggaggatgacaaagcctgtggttgcccattaaccaa

SEQ ID NO: 9322 - DNA, 120 bp, synthetic construct
  source 1..120: mol_type = other DNA
gatgcctatagggggaggaactgagggattagacagaggagtgaggggagatttccttttccctgcctaccctttggtaccttttgtattttatattatgcattatctggtcaaaaagag

SEQ ID NO: 9323 - DNA, 120 bp, synthetic construct
  source 1..120: mol_type = other DNA
tgttttacatcagattcttttctccctaccccaactgaaaggcagccttttaatcgctggtatcccagcacttagcctactgctctgtatatagtaggagctcaataagtgttgaatgat

SEQ ID NO: 9324 - DNA, 120 bp, synthetic construct
  source 1..120: mol_type = other DNA
atgatatctcaatggaatcaaaaaccattttcagatttccagcgtggtagatgacaactcccaagattagcccccaaccaaggcaccaaatgccttcgcaccatgtaaaattgcccacaa

SEQ ID NO: 9325 - DNA, 120 bp, synthetic construct
  source 1..120: mol_type = other DNA
acagagatctccttgtgcttcccctttatggtcacgcttccctcagcaatcacaacctttttctcctttattataattatgtcattttaagaatgttataaaagccaggcacagtggctc

SEQ ID NO: 9326 - DNA, 120 bp, synthetic construct
  source 1..120: mol_type = other DNA
attaaaaaaaaaaaaaagaactcctaatccccactgtgatgtgtgatggtattaagaggtagggcctttggtaggtgattaggccatgagtgcagagcccttaccaatggaagtagcatg

SEQ ID NO: 9327 - DNA, 120 bp, synthetic construct
  source 1..120: mol_type = other DNA
aaaatggtctttccatacactctgcataccatccctctgactgacctgatgattataattattccctaactactagcaaagaagcttcaatctcccttcacttctgcttttaaacagttt

SEQ ID NO: 9328 - DNA, 120 bp, synthetic construct
  source 1..120: mol_type = other DNA
agccagtgaggaaaagattgccaagccacacagacacaaagagaacaagaacaaaaacagatgtataaataagtcagtttctctcccaccttcattcttctctgaacaccaggtaacagc

SEQ ID NO: 9329 - DNA, 120 bp, synthetic construct
  source 1..120: mol_type = other DNA
gaaagggaaccatgtttatatacaccagagcattctgttcttaacaaggcctgacctcaggagaaactatttaaccagagcctaactaactgattggaggaaaggaaatacccatctcca

SEQ ID NO: 9330 - DNA, 120 bp, synthetic construct
  source 1..120: mol_type = other DNA
ttcgattaggggtcttgtgtttaagagccagacttaatgctggaacaaacttgtacatgccatagcattacattggaaagcattgatctgatcattggaaagcatcttttttgtttcagg

SEQ ID NO: 9331 - DNA, 120 bp, synthetic construct
  source 1..120: mol_type = other DNA
cctttttaaagtgtgtagaggctagaagcatggtatacagtatttgcattttaattataagccacctcttaaatatattcatttcctagtcattactgcttaaaaaaaaatgcttcccaa

SEQ ID NO: 9332 - DNA, 120 bp, synthetic construct
  source 1..120: mol_type = other DNA
ggacattcatagctagagaaatggcatgaatctaaagcatggagatgaaacgcataggcacgttcagaagacagtctgtatacacagcgtgctgggataagtttaacctagatttctttc

SEQ ID NO: 9333 - DNA, 120 bp, synthetic construct
  source 1..120: mol_type = other DNA
gaaagcattacagtttcatgttcataacacaataaggatccaaaagtagcttagggtggttcatcagtgaagtgtgtattgcagggattgcataagtagaggggtaggcaaggaccaatc

SEQ ID NO: 9334 - DNA, 120 bp, synthetic construct
  source 1..120: mol_type = other DNA
tgttgattcattcagattatgtctatgaacatccaaatgtagatttgtctgaggttatgtcaggctaagatgtattctccacatagtacttttgatgaaaagtgaggattcagagtaccc

SEQ ID NO: 9335 - DNA, 120 bp, synthetic construct
  source 1..120: mol_type = other DNA
tgttgacccagatctatattcctagccttaacctttctgcaagtacttcagattcaacatatcaaaaagtgaacccacaattcctccctgaactcatgatttctccctggcaatgccatc

SEQ ID NO: 9336 - DNA, 120 bp, synthetic construct
  source 1..120: mol_type = other DNA
atggcggttccggccgaaaagaagctggatatgaaattctgggtcaacagcttttttttcctttcattgctaaagttgttccactatcatctctgctttcattgagaactctgtggttgt

SEQ ID NO: 9337 - DNA, 120 bp, synthetic construct
  source 1..120: mol_type = other DNA
tatataaaaatgttgcatgtcttgaacctacaagtaggccagccagcagtacatgacagcagcttcgcttctctcatttaaccgtttacagtatggcctactcttcacaactgttttacc

SEQ ID NO: 9338 - DNA, 120 bp, synthetic construct
  source 1..120: mol_type = other DNA
ccattttgttttaagtgtgcaacagaaagcactgtccctggtttctattatccatttcttcctttagtactagaatggctttcccaacccagatttcagcagaatccactccccctgctg

SEQ ID NO: 9339 - DNA, 120 bp, synthetic construct
  source 1..120: mol_type = other DNA
acatgtaggcatagatgccacttactcaaacagggaaaggtggcaaaggaaccagttagggggcatgaaagaatcctgttttatgttcatcttttatttctcctactcagacataagctc

SEQ ID NO: 9340 - DNA, 120 bp, synthetic construct
  source 1..120: mol_type = other DNA
gcagtggatgtgacattttgcgatgctgttaggtattttggttctgcagccctagagttgagaagaaggaatataggattgaataaattagggcatggtgaagaaacacagattctcacc

SEQ ID NO: 9341 - DNA, 120 bp, synthetic construct
  source 1..120: mol_type = other DNA
cccccagtttctgccattaaatatcttgggttggtgtagtacgtttgttacagtcgatgagatatacctattgtttttttttgaaaacacttgtcatctagtttaatagattagtatagt

SEQ ID NO: 9342 - DNA, 120 bp, synthetic construct
  source 1..120: mol_type = other DNA
aactctacaccttaactttgtcccccagcttttaaacattttgttgtttctgtcttattgtgttgcctatgtcttgaaaagttattatttttcattggttcatcattcagacttcctact

SEQ ID NO: 9343 - DNA, 120 bp, synthetic construct
  source 1..120: mol_type = other DNA
gactacatattttattattttacttatatgaaatgttcagaaagggcaactttatagagacaaaaggcaggtcagtggttgccgagggctggggatgggggtggggattaactgtagatg

SEQ ID NO: 9344 - DNA, 120 bp, synthetic construct
  source 1..120: mol_type = other DNA
aaaagaaagaaaagaaaaaaaaaagaactcatttcctttcctaacctaggtaggcagaaatctattagcagagtgcgcatgggcagggcctgacaggtgtgttgtgtcaagaaagacagg

SEQ ID NO: 9345 - DNA, 120 bp, synthetic construct
  source 1..120: mol_type = other DNA
gtgttgagggaggaaaacgagagtattcacattaacttgtccatgggttaaaacatggacatgtatatgtaatagtaaaataggtgaagctaaggactgtggcttgatgtgtgaggaaag

SEQ ID NO: 9346 - DNA, 120 bp, synthetic construct
  source 1..120: mol_type = other DNA
caggaagattcatattctttacagctgatacagcacaggctggagctcccactaagccaccctcagatttttccagcttactttgtgcatcaatttgtgtaacaatctcattcatgtttg

SEQ ID NO: 9347 - DNA, 120 bp, synthetic construct
  source 1..120: mol_type = other DNA
cagtaatgttctttgttaatatatattaggtactcttgatgcaactgaactagaaagctgttttaagttgggcagatccgggatcaagcctggtgccgtactttcccagctgagtgacgt

SEQ ID NO: 9348 - DNA, 120 bp, synthetic construct
  source 1..120: mol_type = other DNA
acagcaaataaaaagtcatgaatacaacgagagagtaagaacgctggagatggacagagaaaacctaagtgtcgagatcagaaaccttcacaacgtgttagacagtaagtcagtggaggt

SEQ ID NO: 9349 - DNA, 120 bp, synthetic construct
  source 1..120: mol_type = other DNA
tttatgctacctgagtaacttctactcagattcagatcacagcttcagggtcacttatcgtgtgcagcatgtctcattctcttacatcctgtgcatcaggaacattctgtactttctgtg

SEQ ID NO: 9350 - DNA, 120 bp, synthetic construct
  source 1..120: mol_type = other DNA
aggcaaggagaaccattacacagccttccttacctcatctcagattagagtgtatttgaggactttatttagtagaaacctggctttgtggtttggatgttggagatgaacttgctttcc

SEQ ID NO: 9351 - DNA, 120 bp, synthetic construct
  source 1..120: mol_type = other DNA
gaaaccagtcttatggagatttatgtctcctaatgtaagaaatggagtttttcctaaaatcacgttaaaatattggaagtttggtaacttgtggaatacccctaaagaggaggcctgcaa

SEQ ID NO: 9352 - DNA, 120 bp, synthetic construct
  source 1..120: mol_type = other DNA
aacagaagcagatgattgaaagaagtggaggtgaataattttaccccagaggagtaaacacaggagctaacttcctagctggttatgtttcttttcttttctttctctccctccctccct

SEQ ID NO: 9353 - DNA, 120 bp, synthetic construct
  source 1..120: mol_type = other DNA
cctcccaatagttccccgaagttttaactgattacagcattaactcaaaagccccaagtctcaagtaccaagtctaaaatctcatctggagactcatctcctttcacctataagcctata

SEQ ID NO: 9354 - DNA, 120 bp, synthetic construct
  source 1..120: mol_type = other DNA
aggtggtacaacatttatcttggtctttcacgtacatatttaggtttattgttctgagggaactgaaaacttctccaacatttcacggagaaatggtaagaatagatcagtcaaaattcg

SEQ ID NO: 9355 - DNA, 120 bp, synthetic construct
  source 1..120: mol_type = other DNA
cacttttactttatgccaaagtccttaaaacagtctgctgcatgaagtagctcctgtctaactttctagtctcatctgtgccattcttttcttcactccctagcctagctacaatgtcct

SEQ ID NO: 9356 - DNA, 120 bp, synthetic construct
  source 1..120: mol_type = other DNA
gacttctatgcatgaaggattgtgagggcaaagagaagcagctacaaagaggtttttaaaaaataagatagggagtggaggtgattaggcacatggctggaaatccttgttctctaagga

SEQ ID NO: 9357 - DNA, 120 bp, synthetic construct
  source 1..120: mol_type = other DNA
aaacacctccagccccaaatcacatgttgcctttagttgtcatgactctaagttttcttttgatctgaaagagacacgtatgtttattgcggccctattcacaatagcaaagatttagaa

SEQ ID NO: 9358 - DNA, 120 bp, synthetic construct
  source 1..120: mol_type = other DNA
ctcacgctcaaacatacaggagcagccactgagactgcaagtcacttttcatctcttacttaattacaaagcaatgcaatatgcagtcactaaggacagctagtggacatctacctataa

SEQ ID NO: 9359 - DNA, 120 bp, synthetic construct
  source 1..120: mol_type = other DNA
catctgcatttaaaaacaaatagttttggggacttgttcaatacacacacacacacacacacaacttctcaaaattaagtttatatttaggcttggcaaactgactttggaggcaaacac

SEQ ID NO: 9360 - DNA, 120 bp, synthetic construct
  source 1..120: mol_type = other DNA
aaaaagaaatatttctgccactttttaaaaattttaagaccgggtcttgctctattgcccagattgacgggcagtggcatgatcatagctcactacagcctcaaagaactcctaggccca

SEQ ID NO: 9361 - DNA, 120 bp, synthetic construct
  source 1..120: mol_type = other DNA
attaccttcggtaatctcaatcctttcacttttatcatcctcctcctttaaaatctttcctttccccaactatcttctcaagctttgctacttactaagagtgggtcccaggccagcatc

SEQ ID NO: 9362 - DNA, 120 bp, synthetic construct
  source 1..120: mol_type = other DNA
tttactctggatagtttcttcagatacagcttctatcttgctaattctctttcttttgccaatccatagagttaattttgatgactgtatttttcatttctaaaaagtactatttggtcc

SEQ ID NO: 9363 - DNA, 120 bp, synthetic construct
  source 1..120: mol_type = other DNA
aacacatgctaattatttccctacacgcaaaactgtcttgatggaaccatcaacagcctttatttatttgaggaaatctgacgaaagaatatctcatcagctatctcataacattctgta

SEQ ID NO: 9364 - DNA, 120 bp, synthetic construct
  source 1..120: mol_type = other DNA
tttttattatggcatatctggtaagaaagttgttttaaacttgtcaggcaagacattatctaaaaggctctttattcagcctgaggcagtggctcacgcctgtaattctagcactttggg

SEQ ID NO: 9365 - DNA, 120 bp, synthetic construct
  source 1..120: mol_type = other DNA
ctttctggatgtaggcacttccaagactgcagtaagagaggaggaaccatgacaaggcagatccaacttactgaatttaatagacagagatcagagttaaaggagctaaaagagctgaaa

SEQ ID NO: 9366 - DNA, 120 bp, synthetic construct
  source 1..120: mol_type = other DNA
atccgtggtgaaacctgaacattctacccctgctttggagaagggctatcatacaacattcagtcagctgaagatggattggtagaggtgtgtcgatacataaatttcgagtcatttttg

SEQ ID NO: 9367 - DNA, 120 bp, synthetic construct
  source 1..120: mol_type = other DNA
ggccaacagagcagcagaagcatcaagatcaggtccaaagagttatgcccacattacaggcttcctgagttgctcagccctctttaaagcttagttgaatctctaaatacctttaaaaag

SEQ ID NO: 9368 - DNA, 120 bp, synthetic construct
  source 1..120: mol_type = other DNA
aatttgggggatgacacaactttaaccacagattgcttcacgttcactgtgggtttagcttcaccccttttttccaaggtctgtgctgaccatttcacattcaataatgagtctgcaatc

SEQ ID NO: 9369 - DNA, 120 bp, synthetic construct
  source 1..120: mol_type = other DNA
tttatctgttgcgtcctcattatttggatcagctgacatgcctaatcgctccttaagagacttggaaacttgagctttctttggtgtttcgtcagtgttagtttctggagcttcaacttt

SEQ ID NO: 9370 - DNA, 120 bp, synthetic construct
  source 1..120: mol_type = other DNA
taatgtgcaaacagtttcattgcctagtgcagcttcacagtgacggaatgggcagctgtcacctttggtacatgtagaatagaaaaaaaaatagcagtcttctccttgattaggcatgct

SEQ ID NO: 9371 - DNA, 120 bp, synthetic construct
  source 1..120: mol_type = other DNA
gataccggaataaggttggtggctttctgtatgtggagtttgagacaagctccaaagtagtgggacccgaaccgatgacactatccccgactcccgcttgctgccacgtctttcttcttg

SEQ ID NO: 9372 - DNA, 120 bp, synthetic construct
  source 1..120: mol_type = other DNA
tttgggttggttccaagtctttgctattgtattttcactgattttaagactcttccatattttcacaactctgaaattgagatctgaaaattgatggtgtgtctttcactggcaacagtt

SEQ ID NO: 9373 - DNA, 120 bp, synthetic construct
  source 1..120: mol_type = other DNA
tcgttcacttcctgacaggttattttccttctttgagagagtcttacctcaagagtcactcatttgtcagccatttgttctcaaaatctgaatgggggaaatgcagatgaaagaagggag

SEQ ID NO: 9374 - DNA, 120 bp, synthetic construct
  source 1..120: mol_type = other DNA
ctccaccccactgcggccgccaccgagccccaatagctctagccaagcagaaggcggagaaaccaaaccggaagctgtcactgacacgggtccgctgtctccgagtactgcgcaggcgca

SEQ ID NO: 9375 - DNA, 120 bp, synthetic construct
  source 1..120: mol_type = other DNA
gatgtaatttttttccattcttattttgttgagtggtgtttttaatcatgaaagggtactgaattgtgtcagtgctttttctgcatctattgagatgatcaggcaattttaattttcctt

SEQ ID NO: 9376 - DNA, 120 bp, synthetic construct
  source 1..120: mol_type = other DNA
ggtattatttctccagaatcgtttgtcgatctctgtgttacaccatacttggtgatggggatgcaaaataatcaaggattctgctcccatacagcttacaatgaagggtttctccttagg

SEQ ID NO: 9377 - DNA, 120 bp, synthetic construct
  source 1..120: mol_type = other DNA
attgttttctttagacaggacactggaaaaagattaacatctgcagtagtccagacccatctgccaacttcatgtctgtctgaatttttgttcaccagtgaaccccagctttgggctcat

SEQ ID NO: 9378 - DNA, 120 bp, synthetic construct
  source 1..120: mol_type = other DNA
catctccaactaattgtgtctggatttagttgctaaaattgtcttatttatgaagcagcaatattcagcctgaaagcatttctgccatagttgttgtagttatatcgccaatggctgatt

SEQ ID NO: 9379 - DNA, 120 bp, synthetic construct
  source 1..120: mol_type = other DNA
tggttacttattttaaaaagcaaacatactgaatggtatgactagggtgattacactagtttaaaaataggccaggtactgacactgcattcccctcatgcattgctcatttaaaatagt

SEQ ID NO: 9380 - DNA, 120 bp, synthetic construct
  source 1..120: mol_type = other DNA
agtagtggtaaattagaaaatagactattaattgcacaattaatagaaaagtaaaaacatgtttcaaaatctacaataaacctgtatcccaaggagtcctatacgtcagtgtgatgtgct

SEQ ID NO: 9381 - DNA, 120 bp, synthetic construct
  source 1..120: mol_type = other DNA
cttgtcagtgcctcctttaagaagaatgtgggagaaaagatcatccatgtttatactgctatagcaatactctgtttttgttttagcaaattgcagagcatttgcagatttggcctaatt

SEQ ID NO: 9382 - DNA, 120 bp, synthetic construct
  source 1..120: mol_type = other DNA
ttgcacttagaatttctctagcagtaaataagataaaccacagaatttcagttcttatttctcaaaatgatttctctgaagcttgtagaataactattatattcagagggttatctgcct

SEQ ID NO: 9383 - DNA, 120 bp, synthetic construct
  source 1..120: mol_type = other DNA
actaggatattggataacttgggatatctgttttaatgcaaccaattgcttattttttctttccctttgtgatgagagggaaaacaaagttctgcagactgtctttaaagagctcatgtt

SEQ ID NO: 9384 - DNA, 120 bp, synthetic construct
  source 1..120: mol_type = other DNA
tgtttcatgtgactcactagaggaattagagctatacagagttaagaatgcttggcgtagagggaaccgtagaaccctgggactagcttagcctcttaaagttaactaaatattgtccct

SEQ ID NO: 9385 - DNA, 120 bp, synthetic construct
  source 1..120: mol_type = other DNA
gatggctgggtcaaatggtatttctagttctagatcccttccacaacgacttccacaatggttgaactagtttacggtcccagtgtaaaagtgttcctatttgtctacatcctctccagc

SEQ ID NO: 9386 - DNA, 120 bp, synthetic construct
  source 1..120: mol_type = other DNA
ccacagagtctttaaaaatgtcaagcagaatggtaggcaaaggtcccattggcatgctgctttagccatggttggctatagaattcttggcttcccagcttcctgaacaaattaactttt

SEQ ID NO: 9387 - DNA, 120 bp, synthetic construct
  source 1..120: mol_type = other DNA
gaatctacaatgaactcaaacaaatttacaagaaaatgcttgcccttcttaatacaagatgaacgagtccagcaggctctgtccctctcagcaggctgggttaataacctgctcacaata

SEQ ID NO: 9388 - DNA, 120 bp, synthetic construct
  source 1..120: mol_type = other DNA
gccatgaacctatcttatgcttgccccagcaaggcccatgttcatgttctttctgctaaaaccccctgcagttcacttcgtcctgttgaaatttcacaaatattttttttcattcaacaa

SEQ ID NO: 9389 - DNA, 120 bp, synthetic construct
  source 1..120: mol_type = other DNA
gcaacctctatggccccttcagctctaacataacaaaccccaagcccagactgagtggactacagatctaagcaacaggaacattcattacgcttctaatattcaaatggaaaaaaaaaa

SEQ ID NO: 9390 - DNA, 120 bp, synthetic construct
  source 1..120: mol_type = other DNA
tgtcttcaatattttatcacagctgaggcatccttagcctactcttccacagaaggctgctctaaatgtttttatacacagggagctatttcagctctgtacattaccacgaagcagtca

SEQ ID NO: 9391 - DNA, 120 bp, synthetic construct
  source 1..120: mol_type = other DNA
tgtatcaaaggttatttgaaaattcagaccttgagtagtctatcactagtaaagctaaaattcttactgactgaattcacctcagtgtaattgtatcaaaggttatttgaaaactcagac

SEQ ID NO: 9392 - DNA, 120 bp, synthetic construct
  source 1..120: mol_type = other DNA
cttgactgggtctccagtgcccccatcctgcagccctagcactatctgtagccacactccacctctgccctttcccccagcctagccctggagcacagatgcctaccagccctggtaacg

SEQ ID NO: 9393 - DNA, 120 bp, synthetic construct
  source 1..120: mol_type = other DNA
gtttaaagactagcaaatagatgttggctggtttgatggagaaagtaaatccattctttttcttaaaaatgatctcttcaccaccagtcccagcaccccccttaccagcctcccagggca

SEQ ID NO: 9394 - DNA, 120 bp, synthetic construct
  source 1..120: mol_type = other DNA
tagctggactggtgtttgtgaggaattatatctccaccttgttcagcaccagtccccaagaagaccagccaagggacactcatctggggatttgagaaatgaaggaccgtgggttccatg

SEQ ID NO: 9395 - DNA, 120 bp, synthetic construct
  source 1..120: mol_type = other DNA
gggtgggggggagagaatacaataacaccatgtactgtaaagaaaaacagtcagttctaaaagaaaaacaacccagaaagaagggaatgtgtcaaaaccgggagaggggaaaaaaaaagg

SEQ ID NO: 9396 - DNA, 120 bp, synthetic construct
  source 1..120: mol_type = other DNA
agagaactgcaagagaaagtttctaatttaggttcctgttagattcagacaagtgcaggtcatcctctctccacagctaccgtcacccgtctccagcctaacaaagcctgcagtccacac

SEQ ID NO: 9397 - DNA, 120 bp, synthetic construct
  source 1..120: mol_type = other DNA
ggctggtgcgggaaattcctgacaatatgcccatcacttctttgcacaaagcagctcgaatttgtttcctcagtgatgtgtttccattacttcctctaggaaaatattccctaaccacag

SEQ ID NO: 9398 - DNA, 120 bp, synthetic construct
  source 1..120: mol_type = other DNA
gcaaactagtcatccatttcccccttgtttccaatgcttagtgagaagtggtggtaaggggcagcctaagcttctgtgaagttttttctgtttgtttgtttagttggttggttggttttt

SEQ ID NO: 9399 - DNA, 120 bp, synthetic construct
  source 1..120: mol_type = other DNA
attctgagaaacagccgtgtgcaatgtgtggtaaatgaatgcttgtgcctgcgttccagtaaaactttatttacaaaaccaggcataggctaaataggggtatagttggccaaccctaag

SEQ ID NO: 9400 - DNA, 120 bp, synthetic construct
  source 1..120: mol_type = other DNA
gttgggattactggtgtgagccaccacgcccagctcaaaaacaatttttttaggggcacttctacaaatcatgaaagggggataaaagcactgactttaaaaagccatgtttaagatgct

SEQ ID NO: 9401 - DNA, 120 bp, synthetic construct
  source 1..120: mol_type = other DNA
cacattctatctggtattacagttatttgtatgcaattaatcactcttagattgtatgttcctggagggcagaatatgcccattcatatttgtatcttcttccttctgctcttggcacct

SEQ ID NO: 9402 - DNA, 120 bp, synthetic construct
  source 1..120: mol_type = other DNA
acatgtttgtggagcctatatgaccttgcttggattctgcggggaatgggtaaaattcatcttttttaggcaaagaaaaactgttaaaggaaagtaggcattggaatcacatcaactcaa

SEQ ID NO: 9403 - DNA, 120 bp, synthetic construct
  source 1..120: mol_type = other DNA
agatatagaacactgctatcaccacagtttcccttgtgttggccttttatagctatatccaccttcctcttattcctactctctccttgacctttggcaaccactaatctgtttgccatt

SEQ ID NO: 9404 - DNA, 120 bp, synthetic construct
  source 1..120: mol_type = other DNA
ctgcgcagcaaaggaaataatccacagggtgaagagacagcctgcagaatgggagaaaatatttgccaactgttcattctataagggattaatatgcagaatataaaggggactcaaaca

SEQ ID NO: 9405 - DNA, 120 bp, synthetic construct
  source 1..120: mol_type = other DNA
tccaaaatgatgaaaagtcattacacaattataattgacatgttgatttcaggttgtggaatcatcattgcagcagctggaatgtgatcccactgaaatagaagaatttctggagcattt

SEQ ID NO: 9406 - DNA, 120 bp, synthetic construct
  source 1..120: mol_type = other DNA
tgacaatgtatccaatataatgtagatgccaaaatggacaggatttggcgcagaaactcagccttcatttattaaaacttgcattttggaggattgacccagaggtggtggtcatgctgc

SEQ ID NO: 9407 - DNA, 120 bp, synthetic construct
  source 1..120: mol_type = other DNA
tgggttgcttccaaattttggttattgtgaatagtgcttcaataaacacagagtgcagatatgtcttcagtatactgatttcctttcttttgggtatatacctaacagtggaattgctga

SEQ ID NO: 9408 - DNA, 120 bp, synthetic construct
  source 1..120: mol_type = other DNA
ttatcacagaatattcaagatctgtctatagttgcagcttgtgttccagttgtgaatgatatcagcccacgtcttctcaaacacttttccatgctggtattacctcatccttcacaagac

SEQ ID NO: 9409 - DNA, 120 bp, synthetic construct
  source 1..120: mol_type = other DNA
catgtgtacatatgtgcatgtgcacatgtgtacatgtgtgcatgtgtgcatgtgtacatgtgcgcatgtgtgtatatatgcacacacgtacatgtgtgtatatatgcacatatacacatg

SEQ ID NO: 9410 - DNA, 120 bp, synthetic construct
  source 1..120: mol_type = other DNA
catatatgtataagactacacatatgtatgtgtatatgtagacagacctcaagcaacctcatatatatatataaagttataagactatgcaacagtataaaccaaagcacaaaacagaaa

SEQ ID NO: 9411 - DNA, 120 bp, synthetic construct
  source 1..120: mol_type = other DNA
ttttcccaagccacgccgtatttcttcttacagtggtactcgtcacgagcttctcggtggacaagcaacatggtgaaataaattatgtagaaataaggcagaatgtggttaaaacctgtg

SEQ ID NO: 9412 - DNA, 120 bp, synthetic construct
  source 1..120: mol_type = other DNA
aaacttaaaatagtgcttttaggcttaaagtaaaacttcaggctctgtgaattcccaattcccctcagaagccagaggagcttctacagaggccaacctcacagtagaaaagggcgacaa

SEQ ID NO: 9413 - DNA, 120 bp, synthetic construct
  source 1..120: mol_type = other DNA
aattgtgttaggtttcaactcgattccacaaatattgttcacatttataacacaggtcctggcatatagtaaaagtgggcgagaccagctcagttatataagattgtgggccaggcgcgg

SEQ ID NO: 9414 - DNA, 120 bp, synthetic construct
  source 1..120: mol_type = other DNA
caatgcatcagtaccctttgttcacaatgctcaatgctcaaaagctttaatttgggccctccctagttcctcaactggcttatttcaaaaatctccttacctgtatctctcactgcaatc

SEQ ID NO: 9415 - DNA, 120 bp, synthetic construct
  source 1..120: mol_type = other DNA
taagtaacccttcctccaacaccaatcctacctctattccacaacctcaatacccttctccatacacaaatccttaagagtaatacttttctccctctccctctccccggtctccctctc

SEQ ID NO: 9416 - DNA, 120 bp, synthetic construct
  source 1..120: mol_type = other DNA
atgttttctacattgtcagtatctagttttatatagttaatatgtacttctaaaatttctgacagtgtttggtgtataaaacagaccaagctcaagatgtaaagaagattgagaaattcc

SEQ ID NO: 9417 - DNA, 120 bp, synthetic construct
  source 1..120: mol_type = other DNA
catattttccatctgtagtttctcagaagggctatggattagtttgaactgtcaaatccttgcatacttctgtgacacccctgcccattttctgtctttaattaaccaaggtgttaggtg

SEQ ID NO: 9418 - DNA, 120 bp, synthetic construct
  source 1..120: mol_type = other DNA
aggcttgaaagaagcgtatggtggccacattcctcagggtgggagccctgggaggatgaggtgtgggtggtaaggtcagtttgggacgtacttcctataggaggtacctataggtggttg

SEQ ID NO: 9419 - DNA, 120 bp, synthetic construct
  source 1..120: mol_type = other DNA
ggttcacactctccctggttcccattctccctggttcacactctccctggttcccgctctccctgattcacactctccctggctgccactctccctggctgccactccctggttcacact

SEQ ID NO: 9420 - DNA, 120 bp, synthetic construct
  source 1..120: mol_type = other DNA
tgtgtttattagcagcatctgtttattagcagtctgtgtttattgatttgagaagaacaggttttgcatcccagtatgcaggaccacatatctatggggtatttcccctattgggccctc

SEQ ID NO: 9421 - DNA, 120 bp, synthetic construct
  source 1..120: mol_type = other DNA
tcccttggaccttgcagggaagttctttgggaattggatgctcctctcccaacaggcagttttggtccagagggatgaaccctagactgggagtctgtgcgcctgactcaagtcctggtt

SEQ ID NO: 9422 - DNA, 120 bp, synthetic construct
  source 1..120: mol_type = other DNA
aacacccacacatcttaccctccacacacccacgcacctttttacatcctccacacacccacctcatacctgcacacctccttacacaccctctacacacccaccacacacacctgctta

SEQ ID NO: 9423 - DNA, 120 bp, synthetic construct
  source 1..120: mol_type = other DNA
gcagagactccaccagttttatctcactgtgttgcatggctgagaaatgataggaaagcacttagacctaataaaaagcccattaacgagttcagtattcagtgatggcctttgtcagga

SEQ ID NO: 9424 - DNA, 120 bp, synthetic construct
  source 1..120: mol_type = other DNA
aatgagtgccagaattgcttatgtcaacaattctcccacctatgcaatgaattgattcttctgtaataaaatatatttataacataacagtaagtcctgagtgaggcaaacacacactcc

SEQ ID NO: 9425 - DNA, 120 bp, synthetic construct
  source 1..120: mol_type = other DNA
gacaggagaacgggagtcagttgttgacacagcacatgaggagactgctacaagcatttaacatctggaaactcagaatgttcaatatctcagagtgtgaaactctctctcatgtgaaaa

SEQ ID NO: 9426 - DNA, 120 bp, synthetic construct
  source 1..120: mol_type = other DNA
gggatttgttgccaggaaaactatatttcaggaaaaattgaaaagttcttcaaaaagaagaaaaatgatacaaatcagaaacagaactatgtaaagagaggaacagcatcagagaatgaa

SEQ ID NO: 9427 - DNA, 120 bp, synthetic construct
  source 1..120: mol_type = other DNA
ctgacctagcctcaatgtataaaatgggcaaaaactgacaagagttacacagaaaaattggcaaacttgccattaagctaggtaattttaacacctgtctcagtaattgataagtgaagc

SEQ ID NO: 9428 - DNA, 120 bp, synthetic construct
  source 1..120: mol_type = other DNA
ctatgtgtggtcagggcttttccctatgtgtggtcaggactcctcactgtgtgatggagctcctccctatgtgtggtgagggctcctcctcatttggtggggatcctccctctgagtgtt

SEQ ID NO: 9429 - DNA, 120 bp, synthetic construct
  source 1..120: mol_type = other DNA
atccctgctcccacatccagcggactgttgtcatttctgccctaggctctgggactactccggatgatgccctcgggcaggctattgcagttctgccagtccctgggcaaacagggtctg

SEQ ID NO: 9430 - DNA, 120 bp, synthetic construct
  source 1..120: mol_type = other DNA
tgcagaagcacctcgcgctatacaggatccggcggaaggtcacggtggagccgcacccggagctgcgagtgtgggcggtgttgcccagttcccctgaggcctgcggggctgcatcgctgc

SEQ ID NO: 9431 - DNA, 120 bp, synthetic construct
  source 1..120: mol_type = other DNA
aactagtatgaaacacttaactgtcttgcttctttaaaaaaaaattgcttctctgaccttcctttcatcccaaaggtaccttagagaaatgggtgctgtactggtgggttcccaccgcag

SEQ ID NO: 9432 - DNA, 120 bp, synthetic construct
  source 1..120: mol_type = other DNA
gggtttttgagttttctgtttgtttcccctgtgcccagaatagtgtctagcacacaggggcgcagtatgtgctcttttaatgacttaattaaaggaaacccagttaccagaaagagagaa

SEQ ID NO: 9433 - DNA, 120 bp, synthetic construct
  source 1..120: mol_type = other DNA
gtccttaaagcgtgtgcctcttgctaacagtctcaaggcagagaggaaaagcttcaagctacatgaagaccttgaagcttcctgactaagagctaaaaagtacatttaaaagtagctctt

SEQ ID NO: 9434 - DNA, 120 bp, synthetic construct
  source 1..120: mol_type = other DNA
gatgaatggttagtacaatgtcttaattgaactttggctatttagttgagggagggaggaagctatcttatctagaggcagtacagctaaatgactgagaccataaactccagccctgag

SEQ ID NO: 9435 - DNA, 120 bp, synthetic construct
  source 1..120: mol_type = other DNA
tttccttcttcatctcctttcttcttcctctacttcctcttcctctttcttcttcgttcttcctcctcctccttttttttttctctcttggtagatggggatctttctatgttgcccagg

SEQ ID NO: 9436 - DNA, 120 bp, synthetic construct
  source 1..120: mol_type = other DNA
aggaagacgttgaaagataagaatggtggatttttccttccatcagaacggatttttcacagaatcccagacgacaaagtgaaatgccattcaaatgcagccattatcataccccgtggt

SEQ ID NO: 9437 - DNA, 120 bp, synthetic construct
  source 1..120: mol_type = other DNA
ctcagtcacggcagaggaggtacatgatgacgccctgggtgaagagctcagtttagatgcttctaaaaataggcaaggagatcttttttatctcttacctaaccttctcttgaaaaaaat

SEQ ID NO: 9438 - DNA, 120 bp, synthetic construct
  source 1..120: mol_type = other DNA
acacacagacacatacacatacatacacaggtacacatacagacacacacagacttacacaaagacacacacagatacacagatacagacagacacacacacacacacaggcacaaagac

SEQ ID NO: 9439 - DNA, 120 bp, synthetic construct
  source 1..120: mol_type = other DNA
cagaaacatggacttcttttatccaaattctacctatggctcctcagagaacgccaccccatatcctatactcatattcaacaaaccatgcctattttatctccctggagatcagccact

SEQ ID NO: 9440 - DNA, 120 bp, synthetic construct
  source 1..120: mol_type = other DNA
tcctctctcactcctaccctcctctcctccactcacgctcctgctgatccccaagctcctctcgttcccaccttcctcccttcctctcctcccactcctccccatccccgagctcttctc

SEQ ID NO: 9441 - DNA, 120 bp, synthetic construct
  source 1..120: mol_type = other DNA
tctcttactcccaccctcctcccctcctcacgctcctccccatccctgagctcctcccttttacttcccaccctcctccccaacctcaagctcctctttcttttgcttccctctttcttc

SEQ ID NO: 9442 - DNA, 120 bp, synthetic construct
  source 1..120: mol_type = other DNA
ggagttacaaaaccatggtgtccgcctgaaacaacaccgtgtactgacatgagatcccggcaggccactctgctctcagagcctccatttccttgcatttaaaaccggaagcatacactg

SEQ ID NO: 9443 - DNA, 120 bp, synthetic construct
  source 1..120: mol_type = other DNA
tctggcatctccagaccttgctggaaatgtggcttttcttcactggaaggccatgtgaaagacagaatgaatgaaaaagaaagagagaaagaaagagaaaaagagagaaggagaggaaga

SEQ ID NO: 9444 - DNA, 120 bp, synthetic construct
  source 1..120: mol_type = other DNA
ctcaggttccatgtgctaggaataccatgcaaagtcatgctattcttgccacatactaggaatagcaagcaaaaaccaacacagaagacaaagatttgcctatcagatcaaagtcagctc

SEQ ID NO: 9445 - DNA, 120 bp, synthetic construct
  source 1..120: mol_type = other DNA
atgtgccaggcactattccacatgctcaagatgcggttgaacaagtctaccaactcacaagattgggcttacgctctcgagaaggaaatagacactaaacaaatgtataatagaatgttg

SEQ ID NO: 9446 - DNA, 120 bp, synthetic construct
  source 1..120: mol_type = other DNA
ataatcatctactcaacaactcttctgttaattaggtcagcattactcccatttcatagatggagagactggcagagttgttgagtgccttgctcagtagtagagagccagatgacaaga

SEQ ID NO: 9447 - DNA, 120 bp, synthetic construct
  source 1..120: mol_type = other DNA
ggtacaactgcacatctagaattctaaagcaagaattaacctagcaaatgtgtctggagaggtatgccctccagagaagacattatcactatatggtagtttccatcctggtatataccg

SEQ ID NO: 9448 - DNA, 120 bp, synthetic construct
  source 1..120: mol_type = other DNA
aatgtcctgactgcagcctgtgagaaatagtgaggcagaagatgtagctagactgtgcccaattccttgtctacagaaagtatgacataacaaatgtgtgttgttttaagctgctaaact

SEQ ID NO: 9449 - DNA, 120 bp, synthetic construct
  source 1..120: mol_type = other DNA
attttcaactggagccccatggattatcaaagatgagagatagtcattttagaatgatcatagctagttctaatattgcagctgcaagtcaactctcacaaacatgaaagcatgtgacct

SEQ ID NO: 9450 - DNA, 120 bp, synthetic construct
  source 1..120: mol_type = other DNA
gctccttttactaaatgacatgatctccctcaggaaatgtcctcacagcccaagccagcccctgcttgttttcatcatccaacaaggcaaaacattcaaaactttgaccagacgatggga

SEQ ID NO: 9451 - DNA, 120 bp, synthetic construct
  source 1..120: mol_type = other DNA
atggcaggaagattagaatcaagcctctgtacactattgtaatttcgcggttttcttccagggggcttcttttgagtacatccaggtctgactattgcaagacaaatcctcattttcttc

SEQ ID NO: 9452 - DNA, 120 bp, synthetic construct
  source 1..120: mol_type = other DNA
gcttcctctcgatataccaaatcaagtcaatggatggaaactgcatttctagcttctggcacattctttacagtttgcttgccaacaggagatactaaaaaacctcaagataaggctgtg

SEQ ID NO: 9453 - DNA, 120 bp, synthetic construct
  source 1..120: mol_type = other DNA
gaaagagatggacatgacaatgttctttatttattaaacttacattccatgcctcagcccccacctccctgacctacctcttgtcttttccgtgcacagtgttgaatccattctagataa

SEQ ID NO: 9454 - DNA, 120 bp, synthetic construct
  source 1..120: mol_type = other DNA
aggaaagtgagaagaacgtaatgctaacagaatgtaatggaacataatttgtatgatgaggaagaatgacagtcagccccatcctttctgagaaaagcacacaaaagcaccctctgacgg

SEQ ID NO: 9455 - DNA, 120 bp, synthetic construct
  source 1..120: mol_type = other DNA
gctcctgctgttggcagcatggtgattcctcattcatttttctcctcttctcatagaaataaactaacccatcagcctaggtcacttgactgactaaagaagagcagaaatggataatca

SEQ ID NO: 9456 - DNA, 120 bp, synthetic construct
  source 1..120: mol_type = other DNA
gactatactggcagcagttttgaaatttgatgaaggggaaccaggttggaaatatgaatgtgagagtcatcagcatgaaaaggtatgtaaagccctgagattggctgagattatctaggg

SEQ ID NO: 9457 - DNA, 120 bp, synthetic construct
  source 1..120: mol_type = other DNA
aagtgctgggattacaggcttgaggcaccacatctggccaagagtcttcatttcttaatgtccagatcctaatacatttttaggagggtagaggtgaatcgattttctgtaattagcagc

SEQ ID NO: 9458 - DNA, 120 bp, synthetic construct
  source 1..120: mol_type = other DNA
tgctgttagccatgtctattgtttttcctctggattcttttcttataacttggaatacacaaaagtgtaaaacaagagatgtgcaccaatgaaaactatgctgggtcgaattaccttcag

SEQ ID NO: 9459 - DNA, 120 bp, synthetic construct
  source 1..120: mol_type = other DNA
tcaaaaaagccactggctttccctctgaagcaaaggtagctccctatgcagataaacaatgtttcaatgaaaatctaagtggatcctgtcttttacaaagaagctgtgtctagcctggta

SEQ ID NO: 9460 - DNA, 120 bp, synthetic construct
  source 1..120: mol_type = other DNA
gaagaaaaaataaagctaggtagccatgcgagagcatgctgttttagaaggatgctcagggaattcctctctgatgaagtgacatttgaccagacttgaatgtggcatgtaaattggtca

SEQ ID NO: 9461 - DNA, 120 bp, synthetic construct
  source 1..120: mol_type = other DNA
gctcatcatcagactgtgtgttttattcaaaatgcagtggggaaccattgaagggctcaagtagggaactgataagccaaatttaaattttaaaaggatcattctggctgccctctggag

SEQ ID NO: 9462 - DNA, 120 bp, synthetic construct
  source 1..120: mol_type = other DNA
ggttaaacaacaccacaggtagctactctgtgttcaccttatcttacataaagtgctgatatactgagtaattgactattcccctacctgctccttttctcctgcaacttgtggattacc

SEQ ID NO: 9463 - DNA, 120 bp, synthetic construct
  source 1..120: mol_type = other DNA
agaattttgcatatatgaaagagatgaagagacatgtcagtgtcttgcacattcaagacacttgccaagtgaaggtgatgtgatggtggtggtagtgatggtgttatagggtgatggtgg

SEQ ID NO: 9464 - DNA, 120 bp, synthetic construct
  source 1..120: mol_type = other DNA
tggcagtggtagtgatggtgttatagggtgatggtggtgactgtgttggtggtggtggtggcagttcagatggcggtggtagtgatggtgttatagggtcatgatggaggtggtgactat

SEQ ID NO: 9465 - DNA, 120 bp, synthetic construct
  source 1..120: mol_type = other DNA
cataagccccctaaggaaaaaaaagcactgcttaagtgctagcatttactgaaacaagccacagaaatggctgttattcccaatcttccattaaaaatatagtgaccaaccttgtgcaac

SEQ ID NO: 9466 - DNA, 120 bp, synthetic construct
  source 1..120: mol_type = other DNA
tgagatacacagaaagagctcataacctttaaggccagagttaatttcattatgccaggatgtgataaaacatgggatatccagactcaattgggattgctagttaacactgtgctttgt

SEQ ID NO: 9467 - DNA, 120 bp, synthetic construct
  source 1..120: mol_type = other DNA
gatgtgacaagtacttttcagcacctctctgtgtgacactccataaacccactgcaccactcctacatggaaaacactgcagagtttttgtgatctttgcaggcatctggtgtttatatg

SEQ ID NO: 9468 - DNA, 120 bp, synthetic construct
  source 1..120: mol_type = other DNA
ttaggtcagtattctagttcccactccacagaggaatctgactggaggccagctgtggtcgatgagtcatccggaacacaagcaggcagctatttccgaactaaatggcatctgatctcc

SEQ ID NO: 9469 - DNA, 120 bp, synthetic construct
  source 1..120: mol_type = other DNA
gttgggtgctaggtgcttgaaacaaaaaaagaagagaaactctgtgtggcagggagtagtggaattatgtgaatgcatgggtgcatgtatgcatgtgtctatgtgtgcatatgtgtataa

SEQ ID NO: 9470 - DNA, 120 bp, synthetic construct
  source 1..120: mol_type = other DNA
tggtccattgtttgatgggtcagttggctggtccattgtttggtgggttggttggttggtccattgtttggtgggtcggttgtttggtccattgtttgatgggtcagttggctggtccat

SEQ ID NO: 9471 - DNA, 120 bp, synthetic construct
  source 1..120: mol_type = other DNA
acattctgagaaatgtatccttagggatttcgttgttgtgtgaacatcatatagtgtacttacacaagcctcgacggtatagcctgctgcacacctaggctataatgggatagcctaatt

SEQ ID NO: 9472 - DNA, 120 bp, synthetic construct
  source 1..120: mol_type = other DNA
gagggagagggagggggagagggagagaaagcacatggttatatacttatgacctaacaattccatgctaggcttttatggattggaatccaaagaaactgtacaaaaaagaatgatagc

SEQ ID NO: 9473 - DNA, 120 bp, synthetic construct
  source 1..120: mol_type = other DNA
ggaagactgaatagaaaaaggttgacttaacactagagtgactagaggagtcctgcagaaagatgccggacaaagcattctgggcgctaaagaacacagagcagagcatattaaaatctt

SEQ ID NO: 9474 - DNA, 120 bp, synthetic construct
  source 1..120: mol_type = other DNA
ggatcatcgaagtggtcaggactaaaagacaccacacaggtacaatgagtgagcaagtcaatgacgctaaaggaggttgttctgtgtaggtctttatcaagtcggataatcttaagatat

SEQ ID NO: 9475 - DNA, 120 bp, synthetic construct
  source 1..120: mol_type = other DNA
caaaaaacaaaaagacctatcttgagctttccgtgtaagaaaaagatgatactgttgggtgaagtgactcaacgtctgtaatttcagcaatttgggaggctgtagcggccggattgcttg

SEQ ID NO: 9476 - DNA, 120 bp, synthetic construct
  source 1..120: mol_type = other DNA
tatctgaaatacaagcttaactgagcatcttcgattctatgtggcagtcctgatggggacataggacagaatgaatcttgataactgggttttatgagcacatgctgtttccacaagggc

SEQ ID NO: 9477 - DNA, 120 bp, synthetic construct
  source 1..120: mol_type = other DNA
aacctctttcctttagaaattacccagtatcaagtattcctttacagcaacacaaaacagcctactacagaccctacagtgactgccttcaaatcttgatcctgctctccccattctaga

SEQ ID NO: 9478 - DNA, 120 bp, synthetic construct
  source 1..120: mol_type = other DNA
atgcggggtgaacgtgtgtgtaagtgtatggagtgtgtgagagggtgtggggggtgtgtttgtgtctggagtgtgagtgtgtgggtataagtgtgagtccttgaggatgtgtgcacatgt

SEQ ID NO: 9479 - DNA, 120 bp, synthetic construct
  source 1..120: mol_type = other DNA
ttctaaagtcaatcagacaaacgcagtctcttacagcctcttatggtttggatatttggatatccaaatctcatattaaaatgtgattcctttgggaggctgagacgggtggatcacctg

SEQ ID NO: 9480 - DNA, 120 bp, synthetic construct
  source 1..120: mol_type = other DNA
aacctccttaaccaaccagttagtgtttgagaacctggtattgctgcactgccaggggacacccaggtaatggccaggaaccctcctcttgctagacaggtaagcccagactagtgtagg

SEQ ID NO: 9481 - DNA, 120 bp, synthetic construct
  source 1..120: mol_type = other DNA
aaattacagggcagcctttaaagctctgctacaactttcagcagtatgacaatggttagactgaggcgaggttagcatttttcagttcaagaataccaataggctaaggggacaaggaaa

SEQ ID NO: 9482 - DNA, 120 bp, synthetic construct
  source 1..120: mol_type = other DNA
atgcagtgtatcatatttcattatacctcaaagtaaagctgtttaaaaatcatagtaccaatcactggagaagttgtagaacagataactgatacactactagtagcaatataatttggt

SEQ ID NO: 9483 - DNA, 120 bp, synthetic construct
  source 1..120: mol_type = other DNA
ttttaggctggattttactactagtggcctcagatctcattaaatgatgattgcaggggtggggggtgggggaattcaaaaagatcttgagagagatacactgcatggagataaaatgta

SEQ ID NO: 9484 - DNA, 120 bp, synthetic construct
  source 1..120: mol_type = other DNA
catgaaatgtcaactgttgttctcatttttcccactgccagttcctgctacccaacctccgccctcatttcaaggccttgagtactttttttctatagtgaagtctcccaaaaatgatat

SEQ ID NO: 9485 - DNA, 120 bp, synthetic construct
  source 1..120: mol_type = other DNA
accactgaagggatatgcaagagactgatagcttcattcctcactgtgtgtttatgtatacacagataccactgaagggatatgcaagagactgatagcttcattcctcactgtgtgttt

SEQ ID NO: 9486 - DNA, 120 bp, synthetic construct
  source 1..120: mol_type = other DNA
atagtgttgtccagtagaattttctgtgatgataggaatgttgtatatttgcaccatccaatactactagccatatgtggcttttgatcacttaaaacatgacttgtgcaactgaggagc

SEQ ID NO: 9487 - DNA, 120 bp, synthetic construct
  source 1..120: mol_type = other DNA
catgccacctcctcagggtgctttcttcatgcacttgtctttctttgttcctgttaagacctacaagtatgaaagttagggatctttaagcctttccagtcactatttgtggaaatgctt

SEQ ID NO: 9488 - DNA, 120 bp, synthetic construct
  source 1..120: mol_type = other DNA
ccctggtaatagagtatatactgcagagtgcccgctgccactgttagaaccctggtaatagagtatatactgcagagtgcccgctgccactgttagaaccctggttatagagtatatact

SEQ ID NO: 9489 - DNA, 120 bp, synthetic construct
  source 1..120: mol_type = other DNA
tagaaccctggttatagagtatatactacagagtgcccgctgccactgttagaaccctggtaatagagtatatactgcagagtgcctgctgccactgttagaaccctggtaatagagtat

SEQ ID NO: 9490 - DNA, 120 bp, synthetic construct
  source 1..120: mol_type = other DNA
tgccatcaaacagtttggttagtgatgagttgtatccatttcttggtttcaatttcaattcagactcaaggcacaggagggaagaaagtcattcagactgatgagtggagaaatggccct

SEQ ID NO: 9491 - DNA, 120 bp, synthetic construct
  source 1..120: mol_type = other DNA
ggaaggggaggtttcaggggaaggcagtgggatttattttggatgtatttattttgagatatgttatggactgaattatggctccctaaaaagtatgttgacatcctaatccccaggacc

SEQ ID NO: 9492 - DNA, 120 bp, synthetic construct
  source 1..120: mol_type = other DNA
tgtgaggactgcagcactgcacctgtgaggactggagcactgcacctgtgaggactggagtactgcagctatgaggactagagactgcattgtgaggactggagcactgcacctgtgagg

SEQ ID NO: 9493 - DNA, 120 bp, synthetic construct
  source 1..120: mol_type = other DNA
ggtgggagcttgaaaggggaggaagggtaaaagttagggatgcttttcttttctcatgaaagagaccataatctaaggttgtagaggagaagtggtgattgatgttgcaagttcctaagt

SEQ ID NO: 9494 - DNA, 120 bp, synthetic construct
  source 1..120: mol_type = other DNA
atctgcatccctccaaagtcacctgcttttgtcttattgcataacttgtttcaaatgttctgccacaacctcccccagcccagacatattcatgatgttcttttatgattagtcagtcac

SEQ ID NO: 9495 - DNA, 120 bp, synthetic construct
  source 1..120: mol_type = other DNA
aaaaaaaaaaaaaaaaaaaaagaaagtcaacaaaggtctgagctacggactcgatgtacctacatttgctttggttcaggatccacaggtttgtgcccctcagtccccttgtatgggtac

SEQ ID NO: 9496 - DNA, 120 bp, synthetic construct
  source 1..120: mol_type = other DNA
gacaggtcctattgtaagcagcgttcatgttatattaacttattgactcttcacaggatcatgtgaggtatgggaggttaagccacacagctcatcgttttgtgccagaacttaaaacct

SEQ ID NO: 9497 - DNA, 120 bp, synthetic construct
  source 1..120: mol_type = other DNA
tgatgggcaaccttttatctccctccctcctaccccatcagcctggccaaggctttctcagagctccactgcagtctgaggctccttctccataatcctccttccttccctctttcttcc

SEQ ID NO: 9498 - DNA, 120 bp, synthetic construct
  source 1..120: mol_type = other DNA
taagagatcagagagaggtggcagtgcagattgtgtaggacctctttgagcagtttattaatttggaccatgactttgagtaagtcaagccatcagaagttttgagcagaagagtgacat

SEQ ID NO: 9499 - DNA, 120 bp, synthetic construct
  source 1..120: mol_type = other DNA
tagagaatcccttacccactcctagtcttttccgaattgactaaggtttggcatctttttaggactaataagagacatttaccatctgttatctctgaaacttgctacctggaggcttca

SEQ ID NO: 9500 - DNA, 120 bp, synthetic construct
  source 1..120: mol_type = other DNA
gtagatcatttgtggaaaaatgacgataaaaggtacgaacccaattagtatgagttaggggcatccaggtgaatgattgttctataccagtcatcagcatcatacaccagtcggactctg

SEQ ID NO: 9501 - DNA, 120 bp, synthetic construct
  source 1..120: mol_type = other DNA
aattacacagactttcgtagagtgcccactctccctttctcacctattcattgtggaaagattcctgtcagggctaatctttaataagagaggcagttacagtaactatagggcgaagaa

SEQ ID NO: 9502 - DNA, 120 bp, synthetic construct
  source 1..120: mol_type = other DNA
cccccccccccccccccaaaaatgatgatgtatcatttgaaaaaaaaatccattggtttcaaaggagaaatactgctttgggttgtgcattagttgctatttgactaagtcatgttttgc

SEQ ID NO: 9503 - DNA, 120 bp, synthetic construct
  source 1..120: mol_type = other DNA
atgccattttacattttccttcaagatttgtcttgcttaacagtgctgtctgtcttccatgagtcatactgacccagtacaaggtcctcgtgggtgatcagatctcaccaaaattggttt

SEQ ID NO: 9504 - DNA, 120 bp, synthetic construct
  source 1..120: mol_type = other DNA
tggagaaagttccatgcgcttttaatagaatgcagttgttggatgaaatgctccgtatatatctgttaagtccatttcttccaatgtgtagtttaaatccattctttactttttgtctcc

SEQ ID NO: 9505 - DNA, 120 bp, synthetic construct
  source 1..120: mol_type = other DNA
gccctttcaccactgtacgttcttaataaacttgcttttgctttgcactgcgcactcaccttgaattatttcttgcatgaaatctaagaatcctcccttggatctggatttgtgtctgga

SEQ ID NO: 9506 - DNA, 120 bp, synthetic construct
  source 1..120: mol_type = other DNA
gtaagcccaaatgttttcaatctgtggattggattgtttgcactggaaatgtagatttccaactgattttctactgatcaggttacttaatgaaacaggccaagtttttcggatctgtga

SEQ ID NO: 9507 - DNA, 120 bp, synthetic construct
  source 1..120: mol_type = other DNA
tggtgaagtgcataaaataaatacgtaggataacaaaggaaactaaaggtattgaagtatagtctgtgtactccagctaaagaactcctggaaggtgatttatcgtgtcccttccatttc

SEQ ID NO: 9508 - DNA, 120 bp, synthetic construct
  source 1..120: mol_type = other DNA
tgatgcattcgatcataggctacatgatggaattcaatctctagcatccttcctatccctagatgttgtgctggatcaaacctctacccctttaatcgtgtggtttatctttccagcatg

SEQ ID NO: 9509 - DNA, 120 bp, synthetic construct
  source 1..120: mol_type = other DNA
cttagaactagctgaaaagagaattggtgaactggaaatcagatcagaagactattcagactaaaacactgacagtcaaaagattgggaaacaggctgggcttggtgtcacacacctgtc

SEQ ID NO: 9510 - DNA, 120 bp, synthetic construct
  source 1..120: mol_type = other DNA
aatatctggcaatctaaaattttatatccggtaacacagtgatactttatttaatttactttgggacagggccttgctccggctagagtgcagtggtgtgatcatggttcactgcagcct

SEQ ID NO: 9511 - DNA, 120 bp, synthetic construct
  source 1..120: mol_type = other DNA
atcatgcctagacttccaacctacggaatggtagaataagaaatggtggtgtttctcagccatgaagtcaggggtaactgattacacaggaatagactaccaaaacattctgtgtgacat

SEQ ID NO: 9512 - DNA, 120 bp, synthetic construct
  source 1..120: mol_type = other DNA
tcattcttttctttgcatgctgaattcttactcagctccaggagtgaacccaaatatctccctcatgaaaactttgcagagctcttcttgacaatttatgtcctttcatcccctcccctc

SEQ ID NO: 9513 - DNA, 120 bp, synthetic construct
  source 1..120: mol_type = other DNA
catgtatccacaattgcagtatcacacacaataatttcactgctctcaaaattccctgttccccatttattccttcttccctcccctgaactcctgaaaaaatatttattttactgtctc

SEQ ID NO: 9514 - DNA, 120 bp, synthetic construct
  source 1..120: mol_type = other DNA
tccaagggtttagagaaagtacagtactttcttcctatatttcctttattcacttatttaattggcaggccccagagcagcgtagctaagaacacagactctggagttgggtcatctgga

SEQ ID NO: 9515 - DNA, 120 bp, synthetic construct
  source 1..120: mol_type = other DNA
agtagggacccaggacacagggatggagaggaaagcagtatggaagggagacaaataactgataaggggagaggtggaatttttgtccaagagagcaagttagtttctcatacctctttt

SEQ ID NO: 9516 - DNA, 120 bp, synthetic construct
  source 1..120: mol_type = other DNA
ccagacatctgctctgagtgacggaattgtttgtcctatcattccattgacattttcccctggatgcatcagaagtgacctagacctatatagctttatgtcccctgtatttgcatttag

SEQ ID NO: 9517 - DNA, 120 bp, synthetic construct
  source 1..120: mol_type = other DNA
tgaagaagtctatagctcagactatgtctggggtttgtgcgcatcaagctctttagctagaagaaagatcaaggcaaagggaaccacatccattctcatattagttacgttacaagtagc

SEQ ID NO: 9518 - DNA, 120 bp, synthetic construct
  source 1..120: mol_type = other DNA
ctcctcctcccccttctcctcctcctctttgtgcaaaggatgctgtagggaaaaattaagcaacctgttagtcatctaatttgttagcgtaggtgcaatctatctcaagagttacttttt

SEQ ID NO: 9519 - DNA, 120 bp, synthetic construct
  source 1..120: mol_type = other DNA
agcctgggtgacagagggagaccttgtctcaattattatattaaaaaatgatgagaggagccatgtgacagtgaattcaagattggaaatgagagaaaggaggcagcaagttcagactga

SEQ ID NO: 9520 - DNA, 120 bp, synthetic construct
  source 1..120: mol_type = other DNA
ttctgacaaccccatttaaaattgctgcccttgattctggttcccccattctagctttctgtcccccaaacccccaggcccatgacatctcttttaaaataccatttaattcatttaatt

SEQ ID NO: 9521 - DNA, 120 bp, synthetic construct
  source 1..120: mol_type = other DNA
gtttataatgtggtgtctgtgtgtgtgcgcgcatatgcgctgtcgttaatgacttcctatatggttttctttcccctgataggaatatactattttcgagctcagggccacaacatttat

SEQ ID NO: 9522 - DNA, 120 bp, synthetic construct
  source 1..120: mol_type = other DNA
gggagacgggagagggagagggagagggagaagattccacatttttaattgcctatttcaaaatgctgctcagggataatatgcctgtattctaaaaccaccccataaatgtttgttaaa

SEQ ID NO: 9523 - DNA, 120 bp, synthetic construct
  source 1..120: mol_type = other DNA
ccaaaatggcagaccagtaggaaacgtgttgaactatacagtcaggatcctggcttttaggttattgagattagcaaaccagagaaatgagtcttgggcatagaagataggttacagact

SEQ ID NO: 9524 - DNA, 120 bp, synthetic construct
  source 1..120: mol_type = other DNA
tcacgcagctctactggcagttctctagagtttgattctcagttgcattttccttgctattactgggtcatggaggatgttattaagggctaaaatgacttcgtggagatttggaagaat

SEQ ID NO: 9525 - DNA, 120 bp, synthetic construct
  source 1..120: mol_type = other DNA
tatctcctaatgctgtccttcttgatagaggagttttagggtcttttggacgtagagaaggtgtctataagaaaatgttggctaggcacagtggctcacacctttaatcccaacagtttg

SEQ ID NO: 9526 - DNA, 120 bp, synthetic construct
  source 1..120: mol_type = other DNA
aacgttgaccagcacttagtaggtgctaaagaaattttcctaaaatgccatttttcacaaaccgttatccttctcatggtactgcagtggcactcaagttcctgtggggtacacaaatgt

SEQ ID NO: 9527 - DNA, 120 bp, synthetic construct
  source 1..120: mol_type = other DNA
agcgctgggttgagaaagcctgctgcggagtaggaagtcaataaatgtttctctgtcggaggataaataacaacgacaattcctgaaacactttaaaactgttttaaaggaggatgacac

SEQ ID NO: 9528 - DNA, 120 bp, synthetic construct
  source 1..120: mol_type = other DNA
cttttcaggcaccccttcctcggtgcctttgatctatagagccagggtgtccttggttccaggcaggcatttattcagcagtaaatattaaccacttactaatcaaaaatatcacttaag

SEQ ID NO: 9529 - DNA, 120 bp, synthetic construct
  source 1..120: mol_type = other DNA
ctcgaatattgtggagccctcggacatccagtagaatctaggaaatgttgtaaccgtctaggtagtgtcttgtgattgcttgaatttgcctactctaaaccctatcatcttagtcactta

SEQ ID NO: 9530 - DNA, 120 bp, synthetic construct
  source 1..120: mol_type = other DNA
ccccagcttttggcaaccaccaccctgatcagtcagcacccatcaacattgaggcaaaccctccaccaaaaaaaaaaaattataactctataaaggctcagatgattgttagtattttct

SEQ ID NO: 9531 - DNA, 120 bp, synthetic construct
  source 1..120: mol_type = other DNA
cctgttgaaagaagcctctcatctggccttccataattattctgtctctagttttgttttcttctttatttggctaactatataattaggacagcattctctggaattgccaatcttagt

SEQ ID NO: 9532 - DNA, 120 bp, synthetic construct
  source 1..120: mol_type = other DNA
caccgtggggttgccaaatcccatcatagcagcacctgactgctcctgtgagcttcacatttttcttttttttttttttggggaatttgtatttctttgtgaattttcttttttttaatt

SEQ ID NO: 9533 - DNA, 120 bp, synthetic construct
  source 1..120: mol_type = other DNA
agccccatacctatgggacacagcttgagggatttactccacagatttgcacttggtctgcctcctatccatacactgatgaagttcaatgattcaaatgaagtctctaaaacacataac

SEQ ID NO: 9534 - DNA, 120 bp, synthetic construct
  source 1..120: mol_type = other DNA
cttagaagtgctattttccctccagacgtctccattgcctaaatgccattttattcagtaaagatgttacggcacattatccttttgtcttctgtttcttggtcatttaatcaggttgac

SEQ ID NO: 9535 - DNA, 120 bp, synthetic construct
  source 1..120: mol_type = other DNA
tgagagctctctcaccaggttagtctttgaaaataataaccattctagtgatgaatattcgatggagatgatcagtctgtcctagagctgggtttaaggcaattcctgaaagtgccctgg

SEQ ID NO: 9536 - DNA, 120 bp, synthetic construct
  source 1..120: mol_type = other DNA
ctgatgcatctttctaatgtggttttctaagtacgtttttctgataaactgcacttgttctttaccatcagagcccagaagtttactttttgggtccagttaccgggtcaaggactatag

SEQ ID NO: 9537 - DNA, 120 bp, synthetic construct
  source 1..120: mol_type = other DNA
gagcgggcataccccctccgcccccacttcccggagcgggcataccccctccgcccccacttcccggagcgggcataccccctcctccccctcttcccggagcgggcatacctcctccac

SEQ ID NO: 9538 - DNA, 120 bp, synthetic construct
  source 1..120: mol_type = other DNA
ggtaacatgaaagtgagctcgtctttgcacagtgtgtgtcagtattagggaagtgtttaccttcaaactcgggaaaattactgttgaatgtatttttaagcacaactctaaaactcgtct

SEQ ID NO: 9539 - DNA, 120 bp, synthetic construct
  source 1..120: mol_type = other DNA
atcagctttagaagattgtcattagaagggctcatttgcctacaagttacaaaggatcaattcaattacattacacgcccaaaggcatttctcagaggcctccagaatcccatgcaaagg

SEQ ID NO: 9540 - DNA, 120 bp, synthetic construct
  source 1..120: mol_type = other DNA
attgaggaagaactggacagaatgaggaagagcttggaaaaggaggagaatgagagtgggtattaatgaagcatagagatgaggaagaataatggtgcttaaaaatggaaggcatagggc

SEQ ID NO: 9541 - DNA, 120 bp, synthetic construct
  source 1..120: mol_type = other DNA
aggagctggcagaccaggcagaagttaagcagaagcagggaaaagaacatgtgctttccatctctctgtacacttgtcaaaccattttaattgtaatttttgtttgcttgggcaaatggt

SEQ ID NO: 9542 - DNA, 120 bp, synthetic construct
  source 1..120: mol_type = other DNA
cccaattcctgttcctgaactctccattagacaacactactttggcactttcaaggagatgtaaattaatcattctcaacacatacttattgtgagcctactatgtgccaggtgcagtgg

SEQ ID NO: 9543 - DNA, 120 bp, synthetic construct
  source 1..120: mol_type = other DNA
tagtaataaatcacagtcatagcaatactcttgatttgctacctaatgtggctcagttttagaaaggggtcagcggtgatgggagatacatcatcactcatggccattgccttagtctgt

SEQ ID NO: 9544 - DNA, 120 bp, synthetic construct
  source 1..120: mol_type = other DNA
agtcctctcctgtagacacatttaccaaccaagtgaaacatggcgtcttgtcggccttaaccgctagacttgagagaatggaattttcatgaaataagagtgccgatccataaaatacat

SEQ ID NO: 9545 - DNA, 120 bp, synthetic construct
  source 1..120: mol_type = other DNA
ttttgctaatgctcttctatcttcatctctttttcctgtggtgaatcccaactgaggccataaagttcaattcaaacattatctactccaggaagcctgttgtgcccacccctcaacaaa

SEQ ID NO: 9546 - DNA, 120 bp, synthetic construct
  source 1..120: mol_type = other DNA
tgaccagctagtactggggagaaagggaaaaataaataatactgaatccatccaaaagaatgtaaaaaaaaaaaaaaaagaacaaataaggaatatgctgggttaattagaaaataaatg

SEQ ID NO: 9547 - DNA, 120 bp, synthetic construct
  source 1..120: mol_type = other DNA
gagattgctgtgctctgtggcaattctttgaaactggtgactgcatttggcattgttcctcagggtgtcatatggaaccatgtggcatcaacacaattaaaagatgatcctggataatat

SEQ ID NO: 9548 - DNA, 120 bp, synthetic construct
  source 1..120: mol_type = other DNA
gatgacaacagcacgtgaaataaaatcatgaatgctgagttgatggggtatgaataaatgcaactgcccttcacgtggatcggttcttgagaaagcagtcttaactgttccataagcaca

SEQ ID NO: 9549 - DNA, 120 bp, synthetic construct
  source 1..120: mol_type = other DNA
tcaaaggcaggcttgatattattaaaaaatagaaaataaaacaggaagttaaaataagtaaataaaaaaagaaagtaaactagaaatatcatttgacccagccgtcccattgctgggtat

SEQ ID NO: 9550 - DNA, 120 bp, synthetic construct
  source 1..120: mol_type = other DNA
gtgggggccaggtcctacttgccatgtgcttgtcctcctctttctgcctaggtgttttgggtttcaaaataaaaataagaattaggagaagcacgtaattacaccagaaaagtatttttc

SEQ ID NO: 9551 - DNA, 120 bp, synthetic construct
  source 1..120: mol_type = other DNA
aaagattttccccttgttggtggtgttcacaggaaaaaatcaaactcggtaaagtattttacagaggtttattctgagccaatctgagtgaccatagcctggggaacacagtctcaagac

SEQ ID NO: 9552 - DNA, 120 bp, synthetic construct
  source 1..120: mol_type = other DNA
tattccaacatgtggatgatccactgtttaattctaaaaaccgtgctgcagtgtacgtctttgtacataatctttgtgaacctaactctgagcagctgctgtggcaacctgaaggcaata

SEQ ID NO: 9553 - DNA, 120 bp, synthetic construct
  source 1..120: mol_type = other DNA
ctgggcagctgccctcactttggctcaagtaaactcttcaaattatattttgtgcatcagcctcttccttttaggttggtagcatgtactctttcctcaagaggaaccataatttatcag

SEQ ID NO: 9554 - DNA, 120 bp, synthetic construct
  source 1..120: mol_type = other DNA
taagtcccctgtccagaggattccacattcatgataaccatgaggactgtccttcacttgaaatgttcagcctccttaacgatggcaacctttcagacagtggaaatgaaaggtagaata

SEQ ID NO: 9555 - DNA, 120 bp, synthetic construct
  source 1..120: mol_type = other DNA
tgaccaagagttcaccccaagagcatgctttgtattgcctttataaacaaaaagtaacagaaaggaaacaatatggataaaaagatagggaaatctagaaatttaattttaaaatctcat

SEQ ID NO: 9556 - DNA, 120 bp, synthetic construct
  source 1..120: mol_type = other DNA
atcagctccttaaagttatcacaaaacatatataggtggcacagactaagctctatgtttaatcacttataggtctgtgtgcaggagagaagggagggggaagaaaatacatgtttgatt

SEQ ID NO: 9557 - DNA, 120 bp, synthetic construct
  source 1..120: mol_type = other DNA
aggtgataataaccatgtggtggaagatctctttggtagctgtgtggaagatcagatggtgaaagaggaaaggtgacaaaggcttaagcaaagtattaagagacctgaaataaggcaggt

SEQ ID NO: 9558 - DNA, 120 bp, synthetic construct
  source 1..120: mol_type = other DNA
ttctaaagacttatacatgttctacatacagtatacacatcatgtgcatccctaagagccagagaggcctaccatcactacctagaaaatagctatgagaaattagggtcctgttcattg

SEQ ID NO: 9559 - DNA, 120 bp, synthetic construct
  source 1..120: mol_type = other DNA
agaaacttaattctgaggcttatgtagactctagtgctggctttcaagcttgttttagcagttgaactcttagtgcaaataaaaaggtaagcgaaacctctccaatcccttcctttcctc

SEQ ID NO: 9560 - DNA, 120 bp, synthetic construct
  source 1..120: mol_type = other DNA
atggaagccactaataatctgataaagttaaatatcaacacatttaaagagaaccaattacaagaaggaagatgcttaacacaatggggacctggtgatacaggcgatacaggctcctgg

SEQ ID NO: 9561 - DNA, 120 bp, synthetic construct
  source 1..120: mol_type = other DNA
ttgaaatggaagtcacacattacaggggaaggtctactgagaatcaattacacgcattctcaatgggagcgatattgccccaaagggactgaaatagtgttactctttcgatgactaaca

SEQ ID NO: 9562 - DNA, 120 bp, synthetic construct
  source 1..120: mol_type = other DNA
cttagattgtccttataccaaagaagaaaagtaaatgtatgccttctctagaaagctatgaataggtgggtacctcatagcaaaaccatgaaaggaggcaatatctggtgtggaagggaa

SEQ ID NO: 9563 - DNA, 120 bp, synthetic construct
  source 1..120: mol_type = other DNA
aataaatatttgctacacaaatgagagatgaagggataatagctgtactctacaaaatgtgttaaaaattggctaggtgcagtgcttacgcctataatcccagtgctttggaaggccatg

SEQ ID NO: 9564 - DNA, 120 bp, synthetic construct
  source 1..120: mol_type = other DNA
tgagaattgatcttgagcaaatggacagtaagaaaaaaacgcacagatatttactgcagcagctcattcagaaaaagggggaaaagataaatgcttaaatgtccaatagagggaaatagt

SEQ ID NO: 9565 - DNA, 120 bp, synthetic construct
  source 1..120: mol_type = other DNA
taggtagctctactaatgagcctctgtcagttatatttcctgactgtttctgaacaggcttgatttcataaattcccatcattttgtctcataaattagcaatcaagatgtcccaggaat

SEQ ID NO: 9566 - DNA, 120 bp, synthetic construct
  source 1..120: mol_type = other DNA
tttttcctagcatatttttgcacgcaataaaccaatgagagactatctgccaatatttatagggtcttggtaaagataaaagggcacacacaagtccaaagactgcctgcccaaagtttg

SEQ ID NO: 9567 - DNA, 120 bp, synthetic construct
  source 1..120: mol_type = other DNA
catgtacgagtaaaactaataaaatctgtagacttttctcctgctaatctgcctggtgtcaatttctagatctagccaaagagcccacgtaagagcaaaaggggtattggaggtgatctc

SEQ ID NO: 9568 - DNA, 120 bp, synthetic construct
  source 1..120: mol_type = other DNA
atttaagtgtaggccaatggctatatatttagatagggtagcttaatgtaaactatcatggttgtaccaatataaagaaaaacactaaaatcaccagcaccattttcttacacccagagc

SEQ ID NO: 9569 - DNA, 120 bp, synthetic construct
  source 1..120: mol_type = other DNA
atgtggggcatacattggaactcaataaatgcagtaattattgctgagcatctactgatgcttcctagcctatggtgtaaagtgacactgagaagaaaattataaaacctgcttgttgca

SEQ ID NO: 9570 - DNA, 120 bp, synthetic construct
  source 1..120: mol_type = other DNA
ccagaatgggctctgggtatgtggctcagataaatttgcagttttggagtccaatcagcctatcatcacccaaaaatttatttaaaatttgttgagcctttataagcacagggcaggcaa

SEQ ID NO: 9571 - DNA, 120 bp, synthetic construct
  source 1..120: mol_type = other DNA
actggattcaaatgccctttgtgaattccataccacagccatatttgtcatctttacttccttccccactattctttctgacttttgcatttcacatgcattgtcctaatcccaattcct

SEQ ID NO: 9572 - DNA, 120 bp, synthetic construct
  source 1..120: mol_type = other DNA
ccaaggggagagagagttacaagatggaaaggggattatttgatgtacctcgaggccttcgaaggcaatagacagaggttgaagttggatatcttaattctatccacatttaaagcccaa

SEQ ID NO: 9573 - DNA, 120 bp, synthetic construct
  source 1..120: mol_type = other DNA
atctcagtgacatgctgtgctcaatgcctgcttcatagtaaacccatgtttaccatgatgttgggcatttttcttatgttggttgctgatatgtctccttttgaaaagtgtctgttcacg

SEQ ID NO: 9574 - DNA, 120 bp, synthetic construct
  source 1..120: mol_type = other DNA
agacagtatggcagtggaggaagtataatggtagctattatttgttgcttacagttttaaaagtacttctgcagatattattacatagcatcgtcaacaacaaccctgcaagatagggag

SEQ ID NO: 9575 - DNA, 120 bp, synthetic construct
  source 1..120: mol_type = other DNA
gaaatgggttgcagcgggacaagggttgcagcgggagaacaattagaagaccgctgcgatagcatggagcctcggcgaagggcggtggcagcttgaaccaccgtgtgaatgctggggatg

SEQ ID NO: 9576 - DNA, 120 bp, synthetic construct
  source 1..120: mol_type = other DNA
ttccaaagtgcacttccatttctatatagtattttgtcttcccaaatcctgagctgttgaagagatgacacagggtgtctggagaggaatgccttggagatgcaccaaggtagagaggag

SEQ ID NO: 9577 - DNA, 120 bp, synthetic construct
  source 1..120: mol_type = other DNA
caggcttctcctttgttctccttttgctatctaataaaacgtattgattgtcaccaccaataattgtctacactccattaatacatggatggatttctatccctgaaaggaccacattaa

SEQ ID NO: 9578 - DNA, 120 bp, synthetic construct
  source 1..120: mol_type = other DNA
ctatctcttggataggagactcctggatatcttcccagaaagaccagtgggattcttttatttcttttctagcatacttaataaaaccaagtctctctgaacttagtgggtagtaacagt

SEQ ID NO: 9579 - DNA, 120 bp, synthetic construct
  source 1..120: mol_type = other DNA
tctctctttgtcattggcttttgacagtctaacttggtgtgggtctttgaggtttatctcagatttctttgagcttcttgcatttgtacatttatgtctttcctcaaattgggggtattt

SEQ ID NO: 9580 - DNA, 120 bp, synthetic construct
  source 1..120: mol_type = other DNA
tttgcttcttcttggggtctcacctgttctattgtattgctcaaagatctcttgccccagatatctgtgggtctataaaacccttgtgattttcacaagccatgcctgcttcttctccta

SEQ ID NO: 9581 - DNA, 120 bp, synthetic construct
  source 1..120: mol_type = other DNA
tcatgcttgttcacaacttttaagagcagtttctgttctcattacctatctaaggtctaatgaagtttttattctagtggcattatgagaaagttacacataagacttaagtcttacctt

SEQ ID NO: 9582 - DNA, 120 bp, synthetic construct
  source 1..120: mol_type = other DNA
agcagttctggtgaattttaccctgaccgtgtaaattcatcgttaatcttctcaggtatgggacaaaggacagaactgaaaagtcatctctccactcacccgagacaaatgcctatctta

SEQ ID NO: 9583 - DNA, 120 bp, synthetic construct
  source 1..120: mol_type = other DNA
actatcaaccgaaagaaataaaaatattttaccccaaagtgtatttctttgacatagtttgagactgcttgctcagagacccagcaaacagaagtaactctgcaaagctgtcttttgtgg

SEQ ID NO: 9584 - DNA, 120 bp, synthetic construct
  source 1..120: mol_type = other DNA
tgactccataggtaagggtgttaagcctgcatggcgagatatatatatatatagggagagagagggagagagagagagtgggggttgtggggggagagcgagagaaaggggtggggggga

SEQ ID NO: 9585 - DNA, 120 bp, synthetic construct
  source 1..120: mol_type = other DNA
ttctgtgagaccccatccacatgcatatgaaataaacctttttctcctgttatcctatttttttgtcagttcaatattcagggctgctgccactgaaaccaagaggtcaaggaaagagtt

SEQ ID NO: 9586 - DNA, 120 bp, synthetic construct
  source 1..120: mol_type = other DNA
attctacgctcaaatcaaggctgcttaaatgaccaagtttgcacagtaggtagacgagctgagatgcaaatcaggtctcctggatgtagagcctgagtgagctcttgggcatgtctcaca

SEQ ID NO: 9587 - DNA, 120 bp, synthetic construct
  source 1..120: mol_type = other DNA
cttttagactcacagttcaaagtttcccctctgaagcataaacccattctgaaatgctgcattccaaccttgcaacctgttctaaatgtctaaattctatggttttggaagctgaggtcc

SEQ ID NO: 9588 - DNA, 120 bp, synthetic construct
  source 1..120: mol_type = other DNA
taatacatgccatcttataggagagtagagttcagaagcataaaaatatctgtatttaaatgtgtttggagacttctcttttccttcacttaaaatcaagctatctcccatttccagtta

SEQ ID NO: 9589 - DNA, 120 bp, synthetic construct
  source 1..120: mol_type = other DNA
agcaaaataatacaaaggggggaagaaataaaacaagacaaaaaatcataaggatttttttataggagacatacttttttagagaggcatatgaaagttggaaaaacattgagtgggcag

SEQ ID NO: 9590 - DNA, 120 bp, synthetic construct
  source 1..120: mol_type = other DNA
tgatctggcaaatagatgggaggaaaattaagacagaaggggttgatagaggaggaggttcagggaggtaagagactgaataaacaaatggacaatggccaaatcatatatgaaggctgt

SEQ ID NO: 9591 - DNA, 120 bp, synthetic construct
  source 1..120: mol_type = other DNA
tatatttccatagaaccaaagactaaaatcatgatagattcgagataagtgaagacgtgggaggaaaaggaagtaggttgtgaatagagaagaggaatttctagactctttggaggaaca

SEQ ID NO: 9592 - DNA, 120 bp, synthetic construct
  source 1..120: mol_type = other DNA
tggaaatggagttgcttgctggcaggtaggtgtgagggtgaagtggatattaaatgtattgatttgaagtgcttaaaaaatggcaaggctagagtattgggaagtaaattcttaagttgc

SEQ ID NO: 9593 - DNA, 120 bp, synthetic construct
  source 1..120: mol_type = other DNA
gggccccttgtctatgtatatttgacaagtaacagcattagcaaaagatgacagtaatctactgttcttccattgctttcattacagtaatcacaaaacaatttttcatccaaatccagt

SEQ ID NO: 9594 - DNA, 120 bp, synthetic construct
  source 1..120: mol_type = other DNA
tctcaacacagccttcaaaccccactctaagtgatagaccctgttaaataattcaagtgtagtatccaggcttctgaatgagtttgctcttcttcttcttcctactcaaaagcagtccag

SEQ ID NO: 9595 - DNA, 120 bp, synthetic construct
  source 1..120: mol_type = other DNA
tgaagacagtgctctttttccattgtatattcttagcacctttgtcaaaaatcaattgaccacagatgtgtggtttaatttctgtgctctctcttctgttccattggtcaatgtgtctac

SEQ ID NO: 9596 - DNA, 120 bp, synthetic construct
  source 1..120: mol_type = other DNA
cctttttcctagagagttctaaataatccaccctgaatttgcattgatccaccccttaattttcctataattgaaagcagatttatctgagtataaataaagttgccaagatcccttgtg

SEQ ID NO: 9597 - DNA, 120 bp, synthetic construct
  source 1..120: mol_type = other DNA
ataggggtaatgctgactttgtaaaaagactttggaagtattctttcctctgtgatttttttagaaaagtcagtggggaattggtaatagttctttaaatgtttggcagcattcagcagc

SEQ ID NO: 9598 - DNA, 120 bp, synthetic construct
  source 1..120: mol_type = other DNA
gtctatccaatattgaaagtgattattaaatcctctacttacattgtattgaaatatacctttcccttcagatactttaatatttcctttatagattcaggtgctacactgttaggtgca

SEQ ID NO: 9599 - DNA, 120 bp, synthetic construct
  source 1..120: mol_type = other DNA
gtaggtaatatattgcttgtctcttgctgctctcagaaattttttgtttttgatttttgatagtttgattattatatgtcttggtgaactcctttttgggttgaacttagttgatgacct

SEQ ID NO: 9600 - DNA, 120 bp, synthetic construct
  source 1..120: mol_type = other DNA
aggtgtcatgatttctcaaatctgtgtaatctttgtgttcctgcattgctgtttatgcattttcagagaaagccaccttttctggcatttataagagttctttggcagagatagaccttc

SEQ ID NO: 9601 - DNA, 120 bp, synthetic construct
  source 1..120: mol_type = other DNA
tgtgtggtgctgtggcaacttgaggaagagggaaggatgacatggtcaaagcaagactgtttctttcagctttcaatggggaattttatttagttccatggaaatgaagaaaagcattga

SEQ ID NO: 9602 - DNA, 120 bp, synthetic construct
  source 1..120: mol_type = other DNA
agacttatcacttcacttcctacatatatttccatgttccttagggctctatcttaggattttctcttctcactctgtacccctttcctgagggactttaatttactcccaaggcacccc

SEQ ID NO: 9603 - DNA, 120 bp, synthetic construct
  source 1..120: mol_type = other DNA
tcacaacctctggcatctagtaatatctaccagacatgccaagaaacaggaaactatgatccacactgagaaaaataattaagcaattgaagtcaactcagaaatgacatagattagtag

SEQ ID NO: 9604 - DNA, 120 bp, synthetic construct
  source 1..120: mol_type = other DNA
gtgggagggtaggaaggcagggatgaaataagcagtcaccttgggagttttggtaattaggaattctgtccagaaagtttgaaaacaggagcatttggtacattttgcttccattatctc

SEQ ID NO: 9605 - DNA, 120 bp, synthetic construct
  source 1..120: mol_type = other DNA
agctttcatgatgtgcaacttgacacttaggtactacgccttccttattcccttcccctacgaggaacttgtttgttttctacctgttctttcctgcttgaaaaacagatcccattgctt

SEQ ID NO: 9606 - DNA, 120 bp, synthetic construct
  source 1..120: mol_type = other DNA
acacctttcacaaaagttaactcaaagtggatcatagatatagaaacaaaacacagaactataaaactcctagaaaataatacaggagcaaatctaggtgaccttgggtttggtgatgac

SEQ ID NO: 9607 - DNA, 120 bp, synthetic construct
  source 1..120: mol_type = other DNA
ccaaatacatcactgtcataaagctttctgatgatctaaagctggttaaaaataaagaccttgtacatgcacattactttaggacatgaagctaagtgaattatattgatcagaatctgc

SEQ ID NO: 9608 - DNA, 120 bp, synthetic construct
  source 1..120: mol_type = other DNA
aaagttgcagtttaacctttatagactgatggggtcaagggggaaaatccaggtctactaataatatttaactgaattaagatacaccccaattatagtgttctggaaacacaaaggtaa

SEQ ID NO: 9609 - DNA, 120 bp, synthetic construct
  source 1..120: mol_type = other DNA
tatgtcattgtgtccaatggtaatgagtactaatataaatcctattattaagaagcaaatagaatggtttaacaaatctgtacagatgaagaagtccatttcagggagcagcttggcaca

SEQ ID NO: 9610 - DNA, 120 bp, synthetic construct
  source 1..120: mol_type = other DNA
tagctgtactgtaaatcacccagccctgaatactttctctgggtcctttgatgtggcacttacgggcatttcagagacttgtaagtctggtatttgaagatgtggaattcaagaaaaatc

SEQ ID NO: 9611 - DNA, 120 bp, synthetic construct
  source 1..120: mol_type = other DNA
tcaatttggcattgggcagagtagggagttgggagaaggaagtaacatagatgtaagaatcatgtagaagggacttttaaaagtatacccccagtctaccagctaacaagcactgtgtta

SEQ ID NO: 9612 - DNA, 120 bp, synthetic construct
  source 1..120: mol_type = other DNA
ttttcagttcctgtaagatagaagaaatctcctgcagggaaagcaataacaaaaattagcctacttttagctaaatgttatcactttacaagcaatgaatttcactctcactttatttgg

SEQ ID NO: 9613 - DNA, 120 bp, synthetic construct
  source 1..120: mol_type = other DNA
tagtaagaaacacaaaaggctcctccttcataccctctgcaactttgaaacaatcaacattttaaacctgtgagtcagtagaagaaataaaatttcccaaaattttgcatttatatcttc

SEQ ID NO: 9614 - DNA, 120 bp, synthetic construct
  source 1..120: mol_type = other DNA
aacatgtatcacctgggtataaggagaaaagactgtgtaactgtcacttataaagaaaatgcaattttattcagacagaatatatgcagtataggaataagtgagatgaaaataggttga

SEQ ID NO: 9615 - DNA, 120 bp, synthetic construct
  source 1..120: mol_type = other DNA
taaaccatagacatttcacctttggtgaaaatgggtttttcacgggttgcccctgaaaaaaaaatgcccccctgaagaaataaatggtttattttaaaatacagtttgttggccaggcac

SEQ ID NO: 9616 - DNA, 120 bp, synthetic construct
  source 1..120: mol_type = other DNA
acctgccttctacactcaaatgtgaggacatcaaaaacagtgctagacaaataacatacagtcaaaaatcattcaatgaatgaatgagtctggagactttattcccatataagatgatct

SEQ ID NO: 9617 - DNA, 120 bp, synthetic construct
  source 1..120: mol_type = other DNA
ctttaaaaaaacaatggataggtacgtaatggtagtcattaaaaacaccttcaacattatttatatgtacaaggtactctttacgaaaagccaaacgttttaaacattctattgctgttt

SEQ ID NO: 9618 - DNA, 120 bp, synthetic construct
  source 1..120: mol_type = other DNA
gagccaccatgcccggccacctttaagaaatttttaagatacaggctcaagataaaaagaaagctctttctgtttcttaacatgccaagtaaaatttacctatataggccaactttctac

SEQ ID NO: 9619 - DNA, 120 bp, synthetic construct
  source 1..120: mol_type = other DNA
gatcctgtctctcttacttccaactgaattataaaagagaagatacaaataacttagagtactaaatttattatttattctttcaccaagtaatgtgaatacagaaatcaagaagagtac

SEQ ID NO: 9620 - DNA, 120 bp, synthetic construct
  source 1..120: mol_type = other DNA
gatcaatctcttctggtcaactgtttctttctacattattcctctacccagcccttaagcctataccacctctgtgtgttgttcataaatcacctctttccacagtagtatttgaaataa

SEQ ID NO: 9621 - DNA, 120 bp, synthetic construct
  source 1..120: mol_type = other DNA
ccattcaaaaatgtaaaaaccattcctagttctttggtctgtattaaaactggcagcaaggccagtttgccaacctccaaacacagaagttcattcttttaaatgccaatcctttgctta

SEQ ID NO: 9622 - DNA, 120 bp, synthetic construct
  source 1..120: mol_type = other DNA
ggcagtgcctgatgaagtcactgaatctatctctcctgctacatcgttgatctcccgagcaatgagagcaagatcttggctgatcctggtaataattttagaaaagaagtttaatccctt

SEQ ID NO: 9623 - DNA, 120 bp, synthetic construct
  source 1..120: mol_type = other DNA
gggtctacagtaccaagaaattaagaaccctgcactctttcgtagagcactttacactatgcacagcactttctagtacatgttatgtcacttgaggcccacaaagttcttttgaggtag

SEQ ID NO: 9624 - DNA, 120 bp, synthetic construct
  source 1..120: mol_type = other DNA
taagtcctaaagactacagcaatgaagaagcagacagggtccttgtccccatgaagcttagaatacacagaaggcaccattataatatgatgagtacattataaagcagcttcatagtcc

SEQ ID NO: 9625 - DNA, 120 bp, synthetic construct
  source 1..120: mol_type = other DNA
ggtgagataacatgagaaatgtactttaagtcataaagtttataattttcctatgtaaattatctcagtcataacacttttttttcactgaagggttgtatactggaaaaaataattgta

SEQ ID NO: 9626 - DNA, 120 bp, synthetic construct
  source 1..120: mol_type = other DNA
agtttgtaaatgaccagaagtgttaaaatgtaaaatgagtttaaggagagacatttaagggtcattccagaaaagctcatggtttccacactatctagaagagtttagtaagcaaaaaaa

SEQ ID NO: 9627 - DNA, 120 bp, synthetic construct
  source 1..120: mol_type = other DNA
ccagagtatttttagagacttaggtacagactatgaggaaggaataatgaagttctaggaaatgtggaaaactacagagaaactgaagaatcactgtcatctgaacctgtgggcaggtgg

SEQ ID NO: 9628 - DNA, 120 bp, synthetic construct
  source 1..120: mol_type = other DNA
ttcagccgcatttgcagctccctcaccattccgtggtgataccatctactacaatagctccaagtatttactctttacgaatgactacaacgatgagtctagccctcacggcttcctgtt

SEQ ID NO: 9629 - DNA, 120 bp, synthetic construct
  source 1..120: mol_type = other DNA
aagctggtattgtagctctgtttaccctaatattcataaaaacctgcatcatgtcttacattcctactcgatggaagtcaatatctgttttcataacagagaaactgaggcaggagctac

SEQ ID NO: 9630 - DNA, 120 bp, synthetic construct
  source 1..120: mol_type = other DNA
aagtgtatttggctcagaagaaggtttttagtctttctagtttggggtagagggagcttgagagaggaggcctcctgccaggaggcatctagacatacaggcaccactggatcttgtgta

SEQ ID NO: 9631 - DNA, 120 bp, synthetic construct
  source 1..120: mol_type = other DNA
cagagctgagactgagtgaaatgatggctactggtggagaagggactgggaaagggagttcaatgctaggccctctaacctgttatttctcaaagaatttatttcaaaactttctttctt

SEQ ID NO: 9632 - DNA, 120 bp, synthetic construct
  source 1..120: mol_type = other DNA
gttttgtcctttgacctggagaaagagttaactcaagccatgcatgtctaacatttaatttctactgcctataaattttgaagattagaattaaaaagggactgcaaacagtctcaaaaa

SEQ ID NO: 9633 - DNA, 120 bp, synthetic construct
  source 1..120: mol_type = other DNA
ttggaaacattatggaattatttttacatatccaattgggacaatatcacaagtgctaggttcagattatttccaaggtctttaaagtttatactgtgcacagcaacactgatcggcatg

SEQ ID NO: 9634 - DNA, 120 bp, synthetic construct
  source 1..120: mol_type = other DNA
taacatagaaattatgttaagacaggaaaatacatacatatcttaatggagatgaggtgataaaacaaggagtacagcagaagaaatttcatcaggaaatgcagcacagatgaaatgtga

SEQ ID NO: 9635 - DNA, 120 bp, synthetic construct
  source 1..120: mol_type = other DNA
ccttggagtctgagagtcgagagatactgttagctctaattctaggagaaaatttatctgatggtactagtctggctccacttctaatgatggcttctgcggtcctcgaagaggcactac

SEQ ID NO: 9636 - DNA, 120 bp, synthetic construct
  source 1..120: mol_type = other DNA
ttcacgtagtttagcttctagaaaagccattactgcttctgtgtcttttagaataagggttgtgtccatactagaatcaggatccaaagactcacttctttctcgtattctacttgcaga

SEQ ID NO: 9637 - DNA, 120 bp, synthetic construct
  source 1..120: mol_type = other DNA
aggccccttattcccccaggataccaaatcccaaggatgcttgagtaccttatataaagtggtataatatttgtatataacctactcacaccctcccatatactttaaatcatgtctaga

SEQ ID NO: 9638 - DNA, 120 bp, synthetic construct
  source 1..120: mol_type = other DNA
ttccatccttgaggtttgctcaaaaaaccagaatctattgtagatttatacagagaatgtcaaataaacattgtttattttctatattttcaactacatagtagagaagaacaacataac

SEQ ID NO: 9639 - DNA, 120 bp, synthetic construct
  source 1..120: mol_type = other DNA
ttgtaccttttgaccatcatctcctcatcctcctttcagggtcttattgttaattagaaaactaatgaacaaaaagtaataatgaaatccttgaaggtacacaacttcattttgtttaaa

SEQ ID NO: 9640 - DNA, 120 bp, synthetic construct
  source 1..120: mol_type = other DNA
taaagaatgaaagagagaaagagaataccattctctaaaggaagaggtgcagaaaattccattatcctttcttcttgatcatgccttgtatgattggcagccaaactagcccactgtgaa

SEQ ID NO: 9641 - DNA, 120 bp, synthetic construct
  source 1..120: mol_type = other DNA
tctgtgaagagtgttctaaatgtcctgttaggtaatgttaggtaattcctacaaaggaacctaccagggctatagcttttgcttggcaggggttgaaggaatagagaagaaagaagagag

SEQ ID NO: 9642 - DNA, 120 bp, synthetic construct
  source 1..120: mol_type = other DNA
cttctaagaaagtataagcaggatatgtttcttgttttatctcataatgccaatcagaaccatgagcatatagctcattaactgcttactgaaacctaatattttcctcattgacaaatg

SEQ ID NO: 9643 - DNA, 120 bp, synthetic construct
  source 1..120: mol_type = other DNA
atgtattgtttattttaaatcaaatatgaattttaatacatggaagcacaatgtacagaagggaaaaaacaaaaactgcttcgttttgcttaacattagcgttaagtttaacagcagtga

SEQ ID NO: 9644 - DNA, 120 bp, synthetic construct
  source 1..120: mol_type = other DNA
agtacaaaatctaggtctttcattcagctaggaacttctgtaggctagaagtccacagtggggaaggagatgagacacctaatttttatgcttgcaccccaagtttgccagtttctaatt

SEQ ID NO: 9645 - DNA, 120 bp, synthetic construct
  source 1..120: mol_type = other DNA
atggtgaggatgggggatacagggtcaactttcatgcagataaatatcctacctattgaatatttgcagagaggtcaaaatttacatttagtaacatcagatacgggaagcttgctgatt

SEQ ID NO: 9646 - DNA, 120 bp, synthetic construct
  source 1..120: mol_type = other DNA
atgaacaagaatcaaaactcaggacaagaaaagtatctggcagagttggtctatggtatgaaatttatgaggagaaatatttcttttaagaggatagttcctcaagccctccacaatgat

SEQ ID NO: 9647 - DNA, 120 bp, synthetic construct
  source 1..120: mol_type = other DNA
tatattaatgctatcttgtgagttcttgttcttatgggaatggatttgttcccttcacagtagactgttataaagtgaggcagcccctcttgttttgcctttttgcatatgtccacttcc

SEQ ID NO: 9648 - DNA, 120 bp, synthetic construct
  source 1..120: mol_type = other DNA
gagagaaagagctcagtcttttcattgtgaatcaccttctcgtagacacaaagcctggcacatagttaatgttgaattaaagttgctaaataaatgaatcaatgaaatagaacacatctc

SEQ ID NO: 9649 - DNA, 120 bp, synthetic construct
  source 1..120: mol_type = other DNA
aagataggtattgtgataagccttttacatgttttattgaattctttttataatctagtgatatcgcctctgtttcagagataaaagaaactgaggcttaaagaggtaactttacccaag

SEQ ID NO: 9650 - DNA, 120 bp, synthetic construct
  source 1..120: mol_type = other DNA
gactggtcatatacgtggttaaactagtaaactaaatcataaacaactgattttgttttcatatacttctcttctaccaccaatgacagcagtgaatagaaattaagaaaacatacggac

SEQ ID NO: 9651 - DNA, 120 bp, synthetic construct
  source 1..120: mol_type = other DNA
taatactataaaaatcatatatgacaacaaatctgaagatctttcttcaaattgttgactactcaaaatgcaatctgaaaagaaaaaatgggattaattaatgaaatccctgcctcaggt

SEQ ID NO: 9652 - DNA, 120 bp, synthetic construct
  source 1..120: mol_type = other DNA
ctccatcaatgatgtgactgcattaccaaagtagaacttttggctcagaccaaatgacttaaaatttctttcagaatctagatattgatctcaatagagaacagaattgaatatatcttt

SEQ ID NO: 9653 - DNA, 120 bp, synthetic construct
  source 1..120: mol_type = other DNA
taatggccatgtgtactactccgtgagaaccagaaggcagatcacagtctggatgaaaaccaatggcatttatatcacagaacaaatgtcacagagaagaaagaatcttgattataaaca

SEQ ID NO: 9654 - DNA, 120 bp, synthetic construct
  source 1..120: mol_type = other DNA
ttccctaaagctcaaaaataaattctgcttttaaacagattaatagaaaaatcacttacagacaatttattaggaaaacaaggcaatacagggagactaggttgtttccaaacattttct

SEQ ID NO: 9655 - DNA, 120 bp, synthetic construct
  source 1..120: mol_type = other DNA
gatgtggctcagctatgaagcaacacaaaaaagctggccagggatatagcacttatcaaggtcacctgttttgaaggtcaccattcccatgttagtactacttcaaactcgcattcactc

SEQ ID NO: 9656 - DNA, 120 bp, synthetic construct
  source 1..120: mol_type = other DNA
aacagtcttatatactacagtctcctgaggacattactgtaaggcagtatcagtattattatattactaatatatttgattattgattatatcaatattgctattgctattgatatatat

SEQ ID NO: 9657 - DNA, 120 bp, synthetic construct
  source 1..120: mol_type = other DNA
cattctgcttaagacatccatctaacctagtctgttcaagcatgtcaaattaagaagactgggaagctccttttgcttaaaaggagctacgacttgaaaatttccaaatttagtttcgct

SEQ ID NO: 9658 - DNA, 120 bp, synthetic construct
  source 1..120: mol_type = other DNA
gtgagagtctcttaaggctattactaatcagctgtatctgacagggcactttaaggaatttgacacaagacataaatcactgaattattactcaaaaagaaccccaagatcatgagacgg

SEQ ID NO: 9659 - DNA, 120 bp, synthetic construct
  source 1..120: mol_type = other DNA
gtaaatctttccccctctcagtactaggtggctctagggcacagtgatagtatattatgcggtacttgaataagacatgtatagtttagctgtggggaggaggcacacacacaacataat

SEQ ID NO: 9660 - DNA, 120 bp, synthetic construct
  source 1..120: mol_type = other DNA
ttttctttcaatatcctttccctgttctttcctcctcaaaggactccaaaaatctctggcatccactctttcctgacatagatcatgtggcttaggggaaaactaacatcacacacagct

SEQ ID NO: 9661 - DNA, 120 bp, synthetic construct
  source 1..120: mol_type = other DNA
tttatccttggttcagagccagacttagtcttccatactgagcccaggtgcctgtacttaattcctccagttctggatccttgtctgctgttatctcaaaaactggctgctccatctttc

SEQ ID NO: 9662 - DNA, 120 bp, synthetic construct
  source 1..120: mol_type = other DNA
gaactaacatttttttgtttgagcaaatgtagtaatgcctattcatttaaaaacttgtttctgtttgaatgggattatttatgtaaggcattttataacgtgcctagaattgtaaattat

SEQ ID NO: 9663 - DNA, 120 bp, synthetic construct
  source 1..120: mol_type = other DNA
gcttcagtagttttgtgctgcacttcagtagcagcgtctgctacctttgaatctatgcttttggcacttgcagatttggataattctgattctgaagatttttgggacaactgaagctga

SEQ ID NO: 9664 - DNA, 120 bp, synthetic construct
  source 1..120: mol_type = other DNA
aaattctattccttaccagttcagagcactcatgacttcgagggtagaaagctgtaactatcatgactacttgggggaaaaagatgacttcccaagcataagggaagtaggaaacttgtg

SEQ ID NO: 9665 - DNA, 120 bp, synthetic construct
  source 1..120: mol_type = other DNA
ccccacattcatatctttagcttctacttcacccctggattcaactttacattcaacatgccccaaatcaacttctcaatcttctggataagatggagtaaaaagaattggatttattct

SEQ ID NO: 9666 - DNA, 120 bp, synthetic construct
  source 1..120: mol_type = other DNA
acggcaaataagccaacaaaggagataaaatgaaataataaaaactattcagataactcaaatgaaatcagaaacagggaaagagaaaacataaaactaatgggtcaaacaggacacaaa

SEQ ID NO: 9667 - DNA, 120 bp, synthetic construct
  source 1..120: mol_type = other DNA
aagtagtaattgggggaaaatttatagctctaaacaccagtattagaaaagaaaggtctcaactgaatgacctcagctcctacctagaaaaaagtttagaataaaggtaacagaaatcaa

SEQ ID NO: 9668 - DNA, 120 bp, synthetic construct
  source 1..120: mol_type = other DNA
tttgccccagtgctggcttctcattgaggtcttcgtgaatattctttttaaaactctaacttcccacttaccaacactagctctctgcctcccactttcacttttttccatagaacttac

SEQ ID NO: 9669 - DNA, 120 bp, synthetic construct
  source 1..120: mol_type = other DNA
cctttttacaaagcttcttgcctactatgaatggaaatgtctttcttcttctgcaatcatgctccttcccttcactagagattcttcacgctgccccatgcagtttaatacagtcatgtc

SEQ ID NO: 9670 - DNA, 120 bp, synthetic construct
  source 1..120: mol_type = other DNA
acaaaaaaagatgttaggttacgtatgaggtattaattcttacatttcagataagcaaattctcaaatctgagagttaaaagcacatatcatacggtggctaatacagcctgagtatcat

SEQ ID NO: 9671 - DNA, 120 bp, synthetic construct
  source 1..120: mol_type = other DNA
tgaaggaaagagttcaggttgggcagattgtgttagaaaaatctcactgtctccgagtggaattaatatactgattattctgtgcaggctcaaactggcagcgtgtgcaaaagttcaaga

SEQ ID NO: 9672 - DNA, 120 bp, synthetic construct
  source 1..120: mol_type = other DNA
tctccattttacaaatggagaacctgaggttgagagagatactcagtctcaggcttaaggtaaaatagctagcttgtgatgtcccccatttccaagttcagcactcataggattaggatt

SEQ ID NO: 9673 - DNA, 120 bp, synthetic construct
  source 1..120: mol_type = other DNA
gagggtcacagagagaggagcattagaaggtgactccagtgtgtcaggtggtgagtttgaggtgggcttggaaatgcaagagagaggcccgaggctgagatcaagtgctcaggatccttg

SEQ ID NO: 9674 - DNA, 120 bp, synthetic construct
  source 1..120: mol_type = other DNA
gaggagacatgtcacacttatcaagctctaaattttgggttctaacttttgtttcttgaaaacttgagcactggcccagataatgacttctaatacttcttccattctccagctgtcaga

SEQ ID NO: 9675 - DNA, 120 bp, synthetic construct
  source 1..120: mol_type = other DNA
atagtttctctaattaaggccatgtggtgttaatgctagagtacagaaaggtcaaaggggaaaaaaagactaaatcctaaaagcgcaaatatgtatatgtgttatccacaatcagtgaga

SEQ ID NO: 9676 - DNA, 120 bp, synthetic construct
  source 1..120: mol_type = other DNA
taaaaatttagaaaaaaaaatcaagtcatatagaatgtccaaacaccagattctagaggtatatagaaatgcacataccaatggcaaatatgagtatgctgtttttcatttgtattaata

SEQ ID NO: 9677 - DNA, 120 bp, synthetic construct
  source 1..120: mol_type = other DNA
tttaacagtcaggaatcaagactaaacattctctagacagcctgactaaatagcctgacaaaagctatgtagctgaatgcaagaccaccagcctcatgtattatgaggtcacaggcagaa

SEQ ID NO: 9678 - DNA, 120 bp, synthetic construct
  source 1..120: mol_type = other DNA
tacccagaggtaattgctatactcttctgccatttctgcatcattacatccaaaattggctacataaatttgtgaggcctggtgtaaaatgaaagtgtgggggtctcttgctcagaaagc

SEQ ID NO: 9679 - DNA, 120 bp, synthetic construct
  source 1..120: mol_type = other DNA
atggtgttttttatttgcaatttaacatcatgctcccttagacaaggagtactcgtgggccaagtgtagaccctcgtagtcacctggtgggtggttcagcatgtggggtactcgtgggcc

SEQ ID NO: 9680 - DNA, 120 bp, synthetic construct
  source 1..120: mol_type = other DNA
atttgcttagagtatacctttctataagacccattcaggaggtccatgaggttcacccttttctaaccacctatctgcataaggatggatcttccccccttttacttctaccgagataat

SEQ ID NO: 9681 - DNA, 120 bp, synthetic construct
  source 1..120: mol_type = other DNA
agcttatcactgtgtgggcatatgatccagaaagtgcagatcctgatgagttgctggggaatgcagaagaaccttcaatagtaggtggaaacattagtatcgtcatagtaagaacagaat

SEQ ID NO: 9682 - DNA, 120 bp, synthetic construct
  source 1..120: mol_type = other DNA
gatgcacataccccatggttacaagctcaataccactgtataccctagagaaatccatgcacagttacctcaggagatgtgtaaaataatattcgtagcagcattgtttgcaattgcaaa

SEQ ID NO: 9683 - DNA, 120 bp, synthetic construct
  source 1..120: mol_type = other DNA
agaactcagaagtgaggctgaaacaccccattggactgcagaactaagaaaagccatattcaaagggtaagagaaattgtttctctttgatcatgttacgtgtctcccaagctacacagt

SEQ ID NO: 9684 - DNA, 120 bp, synthetic construct
  source 1..120: mol_type = other DNA
tattgagtaatggtgatatttgggcatctagtgtacccattacccaaatagtgaacattgtactcaataggtaattttttaaccctcactcccctcccaccctgtccctttttggagtcc

SEQ ID NO: 9685 - DNA, 120 bp, synthetic construct
  source 1..120: mol_type = other DNA
gtgggtcacaatggaagcaagaggtgtcatatgctcagtgataaagctaactcacaccttgtcatggctcctctcttaaatattagtgtacagtgaaggaccaccagaaaattacagaaa

SEQ ID NO: 9686 - DNA, 120 bp, synthetic construct
  source 1..120: mol_type = other DNA
ttaatgatttaggaaatttttcagcctatctagattgcaaaagatgcgaaattaggagcttcactattaggaaaggatgctacagagaaagccaagggcatgactggaccaccttcccct

SEQ ID NO: 9687 - DNA, 120 bp, synthetic construct
  source 1..120: mol_type = other DNA
aggtgagccacagctgtgtatacatgtgtagtgggttgaatagggacccaccaaaaaaggtgtgtccacctagaatctcagaatgtgatctgatttggaataaaggtcttttttataaca

SEQ ID NO: 9688 - DNA, 120 bp, synthetic construct
  source 1..120: mol_type = other DNA
aacaaagctggaggcatcacactacctgacttcaaagttttcgttttttaaagcatctccggaaaagtttctcgtaaagcccagtctcttagagccaggtggcaacctttgatatgcaaa

SEQ ID NO: 9689 - DNA, 120 bp, synthetic construct
  source 1..120: mol_type = other DNA
catggcctcatgtgaaattctccataaagaatcccaggcagaaggccatggacaggcaggctggtgcaccgcatgtgtgaagatgagcagcagggacaacgggtgggtggggggagggag

SEQ ID NO: 9690 - DNA, 120 bp, synthetic construct
  source 1..120: mol_type = other DNA
ccagcgccacggtgccaagttgtgggggtgctgagccaggagcttcagaagagcctcacaagcagggcacaagctgagaaaaatgacagctcacgacactctttcttcatatttaaacca

SEQ ID NO: 9691 - DNA, 120 bp, synthetic construct
  source 1..120: mol_type = other DNA
aggagtctggactgtgagggaggaagcttgggaaggagtcaggatgggatgtgctgcccatcaacgcctgcagggaaagaagagtcccacgcagggaaaggagagtcccacgcgggaaaa

SEQ ID NO: 9692 - DNA, 120 bp, synthetic construct
  source 1..120: mol_type = other DNA
agtgaccttgatctgctctggggagggatgctgttttgcctttcttcacgcacgtggaatcaggactagctggactggcaggaaaaggttctctctggaataatggtttgcttctctgca

SEQ ID NO: 9693 - DNA, 120 bp, synthetic construct
  source 1..120: mol_type = other DNA
tgctgttttccagaagactcaaaaacaatgatgggggtcctaggtgacttactgttttaggtcggggtccccagaagcagatcttgatgaagtgaggatttctctgcaagtgatttatta

SEQ ID NO: 9694 - DNA, 120 bp, synthetic construct
  source 1..120: mol_type = other DNA
cactgttcaccctgcggtcatctctctcactgttcacctagaggagaggtcatctccctcactgttcaccctgcggtcatctccctcactgttcacctagagcggtcatctccctcactg

SEQ ID NO: 9695 - DNA, 120 bp, synthetic construct
  source 1..120: mol_type = other DNA
gaaatgggaaaagagccgcaagattaaccagatacccgtggtattttcaagcaacaccatctgctgtatttccacagaaagggtgttgattttcctgaattctagaggtggtgttttcat

SEQ ID NO: 9696 - DNA, 120 bp, synthetic construct
  source 1..120: mol_type = other DNA
tcctcaacaaagacgtcagattcccctctttgtaatgtcttctttgaatttcagcagtgtgggggatgttatgcttttgccttactccgccttatattttggctgtttgtgagctagtcc

SEQ ID NO: 9697 - DNA, 120 bp, synthetic construct
  source 1..120: mol_type = other DNA
tgttggtgagcttgtccaagccctattaaactatgggttccttgagacagactgccacagtgctggtgctgtgtccgctgcatgctgttggtgagcttgtccaagccctattagactata

SEQ ID NO: 9698 - DNA, 120 bp, synthetic construct
  source 1..120: mol_type = other DNA
catggaatgcttttcccatcccttcactgttagtctatgtgtgtctctataggtgaagttagtttattgtaggcaacatatacttgggtcttacttattaatccattcagccactccatg

SEQ ID NO: 9699 - DNA, 120 bp, synthetic construct
  source 1..120: mol_type = other DNA
tcaataaatataaattccaatattttcttccccaaagcaccatcttgtaccgctttggagaacattagagggactcacctgggtttccagagctggaaaacataagccccataatgcacc

SEQ ID NO: 9700 - DNA, 120 bp, synthetic construct
  source 1..120: mol_type = other DNA
ccagaagcaggtcacgtgtaaaatggtctgctctctgctgacagtggcctgagtctcccatagtgtctgctgagctggatagtccctctccagggagctttgcaggggatgggtgatgag

SEQ ID NO: 9701 - DNA, 120 bp, synthetic construct
  source 1..120: mol_type = other DNA
agccagtggaatgacatcttccatgttctgaggaaaacaaactcctcctctagaattctacatcccaaaagacatctttcaagaataagattgaagagctgaagggtgcagggcttctga

SEQ ID NO: 9702 - DNA, 120 bp, synthetic construct
  source 1..120: mol_type = other DNA
agtgatttcatcaagctggccactttcttcttcatccacatgggatacctatactaaactactctgggcatcttatggggaataaaatcagttgggggaaagagagcctattatgttacc

SEQ ID NO: 9703 - DNA, 120 bp, synthetic construct
  source 1..120: mol_type = other DNA
ctgttcgatgaaatttgatttatgtcctctttctgggcttactctcaaatatatatgaaagagtgctgactttgtacctagagggtttacaactgagccaactcattcattcattcactc

SEQ ID NO: 9704 - DNA, 120 bp, synthetic construct
  source 1..120: mol_type = other DNA
atgctcagtacgtgagaattttgggttgaggtacagaaaccagataaagccttgttcatttgctcattcggcatcaacgtccagtgtgtcccaatgtaaatgaatcactgtctagaaagt

SEQ ID NO: 9705 - DNA, 120 bp, synthetic construct
  source 1..120: mol_type = other DNA
tttctcctacctgttccatgagtctggaagcccctgtgagagaggaattgatgagcacagcaagaaacagaacttcactgagcatgctgaacatgtgtcattattctaaatacatttttc

SEQ ID NO: 9706 - DNA, 120 bp, synthetic construct
  source 1..120: mol_type = other DNA
tgaccaaacacctcatttctggtttactacctttgtccaaacaaatatcctagaccctggactcacttctgttcttatgttgaccctgggaaattcctctccctctagcgggaacaggaa

SEQ ID NO: 9707 - DNA, 120 bp, synthetic construct
  source 1..120: mol_type = other DNA
tggcatttagagaaactacacaagaactgaagaaaaacaaggaggcacattgtttctgcatcactcttattacctgcaaaccaggggatggataatttaaaataccagcggagtccacgg

SEQ ID NO: 9708 - DNA, 120 bp, synthetic construct
  source 1..120: mol_type = other DNA
agcatccactttgtggcttaaggatgttcctaacttccccaaactttgcatccttgaccagtacactacaatatttattcacaaccctgggaaatacctatgggaaagttactgttccct

SEQ ID NO: 9709 - DNA, 120 bp, synthetic construct
  source 1..120: mol_type = other DNA
tttctccccaatccatgtcatccagtctatcagagtcatgacaattctgaccccagaatgtatcttgaatctatttcatttttcccatctcctacatctcctatgccaacctcctaaagc

SEQ ID NO: 9710 - DNA, 120 bp, synthetic construct
  source 1..120: mol_type = other DNA
ctccgcttgatccagcctctaccacacaacagccatccccactcttctagccttgctccctcatggcatggctttaaatgccaccattggaggaagtccatccttaatcacaaaaccgaa

SEQ ID NO: 9711 - DNA, 120 bp, synthetic construct
  source 1..120: mol_type = other DNA
ggaatagagccacagcttaaaagttatgtcgttatagacagagataccagcagagaactaagccacgtgcatttgttatctgtttctgagcagcttaaagcaaccagctaagtgacttca

SEQ ID NO: 9712 - DNA, 120 bp, synthetic construct
  source 1..120: mol_type = other DNA
tgtgaacctcgggatgcaggaatcattgggatcaggttgaagcctgactaccacaccatgttcttccaaaacatttcaacaaaggagccatgtagtaaaatcagcatggttctagaatgg

SEQ ID NO: 9713 - DNA, 120 bp, synthetic construct
  source 1..120: mol_type = other DNA
accactgtaattgcagagtccctatcttccttacgattctgtttactagaaccaaacccatcatttttgagacattgccaaattcactgcaggaacaagtcataagtccactgagaagcg

SEQ ID NO: 9714 - DNA, 120 bp, synthetic construct
  source 1..120: mol_type = other DNA
tcactgcatggctcacacggaaacatctcagtttaccaccgcacgatgtaagtgcgttctacactcaccaaagagaaaagaagtctgaaggataaggcagagaagagaaaggttgtaggt

SEQ ID NO: 9715 - DNA, 120 bp, synthetic construct
  source 1..120: mol_type = other DNA
cactgcagatggccagagccgtaaggcaagtctctccaatcaggtcttagtattctccttatttaaaaaaggagaaagacattaaaataccttcaaaattattgttgtgaccccaggcag

SEQ ID NO: 9716 - DNA, 120 bp, synthetic construct
  source 1..120: mol_type = other DNA
ttgcaggagaaatctgagtgcatttttggcaagcagctgagttatctttgcttattcattaaacgaacagtgtgacggagaaagtccaaataggaaagacaaggaaaaatggggaaaagt

SEQ ID NO: 9717 - DNA, 120 bp, synthetic construct
  source 1..120: mol_type = other DNA
tatcactgttaggtgggaggggataaaatgaggaactacagagatcactgaatttacagcaaatgtcctggccaggtaacctagaggtcaaattgagatgaaaatcaggttgcttctatc

SEQ ID NO: 9718 - DNA, 120 bp, synthetic construct
  source 1..120: mol_type = other DNA
atacagcaagtggacagcatctaggaagggagatacagcaagtggacagcatctaggaagacagatacagcaagtggacagcatctaggaagggagatccaggaagtggacagcatctag

SEQ ID NO: 9719 - DNA, 120 bp, synthetic construct
  source 1..120: mol_type = other DNA
agtgattactgagtatgggaagagcctagtacctaggggtggtgccattataatcccaaaggacacaatcctgaatgccatcatccctgaaaatattggtatacaggcctttaaaaacaa

SEQ ID NO: 9720 - DNA, 120 bp, synthetic construct
  source 1..120: mol_type = other DNA
tagtaacttggtaaagcattatttcagatatgtctgtaagggtgtttccagaggagattagtacatgactctgaatggagtaggtggagatctgcctaaaatgttggcgggcaccatcca

SEQ ID NO: 9721 - DNA, 120 bp, synthetic construct
  source 1..120: mol_type = other DNA
agccagttgggtgactacagttcccttcacacagaataaaagttcctaaacaataacacagctaatctcacctacaattcaggtaagtcaaaactatgagccctttcccttactgagtcc

SEQ ID NO: 9722 - DNA, 120 bp, synthetic construct
  source 1..120: mol_type = other DNA
tatctcatgaaggaaaagaaagttatgaaagataaaaatggtatacctatgtagagcactgaccatgaatggagcttgcaggactacaagttgctctccgtgaatgagcgagtggcaggt

SEQ ID NO: 9723 - DNA, 120 bp, synthetic construct
  source 1..120: mol_type = other DNA
cctagaacactcactgtactctactgtagactttatcaacaccgcacacttaggctacacaggcctagaacactcactgtactctactgtagactttatcaacactacacacttaggcta

SEQ ID NO: 9724 - DNA, 120 bp, synthetic construct
  source 1..120: mol_type = other DNA
agtaaaataaagccctgtagtcccagcattttcattacttttccagtagtgctggatgcagtgtgaatttcaatgaggtgggaaacagtggctgctccctttaaagaacatataccacac

SEQ ID NO: 9725 - DNA, 120 bp, synthetic construct
  source 1..120: mol_type = other DNA
ataccacacagaggagaagcgctcctcaattcacactgtgatgaacatataccacacagaggagaagcgctccccaattcacactgtgatgaacatataccacacagaggagaagcactc

SEQ ID NO: 9726 - DNA, 120 bp, synthetic construct
  source 1..120: mol_type = other DNA
ttcacactgtgatgaacatacaccagaggagaagtgctccttccactcacactgtgatgaacatgtaccacatggaggagaagcactccttcagttcatactgtgatgaacatataccac

SEQ ID NO: 9727 - DNA, 120 bp, synthetic construct
  source 1..120: mol_type = other DNA
aactttgaaagtactgttccgtgatcttctagaattaaatgctgcatatgagaaatgtgattttagtccagttcctgcatgttttgtcacttattttttccctctaggggaatatgttgg

SEQ ID NO: 9728 - DNA, 120 bp, synthetic construct
  source 1..120: mol_type = other DNA
agtcagctactcatcactcatttcccacacctaaaagaggccaaggacacttaaatgtaaattcattgtacttttcacctttttgagtgaccccattttataggtatcttggggctagct

SEQ ID NO: 9729 - DNA, 120 bp, synthetic construct
  source 1..120: mol_type = other DNA
ttgtatgactctgcactgagacccagaggaaccacaatgaaaaattagctgctcagtataacgaattgccagatgctggactcaagtaggtaatgacatttgaaagcatgtgtgcaagta

SEQ ID NO: 9730 - DNA, 120 bp, synthetic construct
  source 1..120: mol_type = other DNA
ctttacttggaatattcacaggtaagctgcaaatataaaacaccttccacagagtgttattttgtaatcggggcttatctcaagtgcaagaacctccagcctacagctttagtaggtgcc

SEQ ID NO: 9731 - DNA, 120 bp, synthetic construct
  source 1..120: mol_type = other DNA
ggtgccgcggacactgcgcccggctttagtaggtgcctcggacactgtgcccggctttagtaggtgcctcaaacactgtgcccacgtactctgaatggcgtatacacaatgataataaaa

SEQ ID NO: 9732 - DNA, 120 bp, synthetic construct
  source 1..120: mol_type = other DNA
cggcatggctcattctggcacccaggcttatagtttgcctgctcctggccaacaacaaagatatggagtctgatgcccaagtttgaatactaactctgttttttactagctgtattaaca

SEQ ID NO: 9733 - DNA, 120 bp, synthetic construct
  source 1..120: mol_type = other DNA
gtctgatgcccatgtttgaacactaactccattttttcactacccgtattaacactggcaggttatttaatgtttctagtggagtctgatgcccacgtttgaatactaactctgtttttc

SEQ ID NO: 9734 - DNA, 120 bp, synthetic construct
  source 1..120: mol_type = other DNA
tctttgattaattaattttataccagagtaaaatgaggagaggagcagtagactgggataaaaatctctgcccagggatcttcacccagttcccgtgtgcttgatgtgacttgcaccatc

SEQ ID NO: 9735 - DNA, 120 bp, synthetic construct
  source 1..120: mol_type = other DNA
tccaacaatagaaataattaccacagaatagccacaaacttaacactaggaatgaggtaataatcatcataaggtatatttttatctttcagtaggtgttcgtgtttatagtgttgaaca

SEQ ID NO: 9736 - DNA, 120 bp, synthetic construct
  source 1..120: mol_type = other DNA
tcaaaacgaaacctacctttgcttagcactcagatatgggaagctttttaagtcatcacaagaaggtggctacctacatggtagtttcagagaagaatgatgcttcacactgccacagag

SEQ ID NO: 9737 - DNA, 120 bp, synthetic construct
  source 1..120: mol_type = other DNA
actttagacatgctgagttgagatgctttaactatctcccccaaatcacctgggtgacaaaaaagcagatatttttaaaaacctgaattatagctctccctctccctctccctctccctt

SEQ ID NO: 9738 - DNA, 120 bp, synthetic construct
  source 1..120: mol_type = other DNA
agagagagaggcaggaggcttagagtcagagaagtcaatgtggtgctgggatctgagaaaaagaacctggaagatggtcagttgctggctttgaagatggaggaagacactgaaccaagg

SEQ ID NO: 9739 - DNA, 120 bp, synthetic construct
  source 1..120: mol_type = other DNA
aaagcagcagtgtgaggcagggaagtctcctcggaggaagaaaacctgaaggaaaagtaagagttctgaaggacttctagttacagctatgtggagaagtcagtaatttgttactatata

SEQ ID NO: 9740 - DNA, 120 bp, synthetic construct
  source 1..120: mol_type = other DNA
ctcgaggttgaagtcagtttctggggacatccttgtagaaagcattcattcttgaaaatcacctcgaggttgaagtcagtttctaggggacctccttgtagaaaacattcattcttgaaa

SEQ ID NO: 9741 - DNA, 120 bp, synthetic construct
  source 1..120: mol_type = other DNA
taacaacgccatcttaaagatgatcccatatctgagcacgtgatacctctgtgatttcagggcacaaatccctctatccatcaaactaaatagaagggttagagaggttaatcgagacag

SEQ ID NO: 9742 - DNA, 120 bp, synthetic construct
  source 1..120: mol_type = other DNA
gccatcagctggagttgtaaaaatccataactgctttcccacatatatctacataagtctaggctatgactctatacacaggctgagaaatgaaacagcaatcaaccctgctgtgttccc

SEQ ID NO: 9743 - DNA, 120 bp, synthetic construct
  source 1..120: mol_type = other DNA
tggaggtatttcagatcacagtagtagaaatcaagtacttgagttgaactagagcgaaggccgtatgtggcagagtggactaaaaagctagaaatatagtttggagccagcacatttggt

SEQ ID NO: 9744 - DNA, 120 bp, synthetic construct
  source 1..120: mol_type = other DNA
gtagataagggcaaagatgactgagagaatttgcttctaaggtcctcccagtcttcatactaacaaacatctgttgaggacctactgagaacatatgtggctaggtacccagttacattt

SEQ ID NO: 9745 - DNA, 120 bp, synthetic construct
  source 1..120: mol_type = other DNA
acctgtcctctgtcctggagctggtacataagtgctcatatatgtacacctgtcctctgtcctggagctggtacacaagtgctcatatatgtaaacctgtcctctgtcccggagctagtg

SEQ ID NO: 9746 - DNA, 120 bp, synthetic construct
  source 1..120: mol_type = other DNA
ctatgaacaattaagatggcatagcacaggaaaaaaaaatgaccagcaatgagcattcacattctttctcctctctcatcctctctgctttttgggacctttccaataaaaggagagcaa

SEQ ID NO: 9747 - DNA, 120 bp, synthetic construct
  source 1..120: mol_type = other DNA
aatacctaaaccattgtactagttacacctaaaaacacatcacttcaaccaaaatacctaaaccattgcactagttacacctaaaaacacatcacttcaaccaaaatacctaaaccattg

SEQ ID NO: 9748 - DNA, 120 bp, synthetic construct
  source 1..120: mol_type = other DNA
cctctcaggtcgcctgttttcctctcctttctcagctactgtgggtctcctattgctgcgcgtcgcgccaatttctccctccctaggggactagcgccagaagtcgttcctcacccggct

SEQ ID NO: 9749 - DNA, 120 bp, synthetic construct
  source 1..120: mol_type = other DNA
tttctcagtaattggtggtgggagagttggatcctcacgtgcctatgataaccgtgcagtcacagtgtataccgtattccactagtgaacaaaactttaatttttacagagcagcatcgt

SEQ ID NO: 9750 - DNA, 120 bp, synthetic construct
  source 1..120: mol_type = other DNA
caatgtgtgttcatatttcaggtactcaatagccctgtgtggttagtggctaccattttgaatagcataggtatagaatagagctcacagttgaagatgtcagctaagaaaccctgaatc

SEQ ID NO: 9751 - DNA, 120 bp, synthetic construct
  source 1..120: mol_type = other DNA
ccggggtaggtgtcttccggccggggtaggtgtcttccggccggggtgcgtgtcttccagccggggtaggtgtcttccggccggggtgcgtgtcttccggccggccctcttcctgcttct

SEQ ID NO: 9752 - DNA, 120 bp, synthetic construct
  source 1..120: mol_type = other DNA
cattgcggaggccactcgtcctctcacggtctttggcttcctcctgcctttaaggaccgtttttctctggttatcatacgcagggactccgagggtgttgcccgcctgctttggaagtaa

SEQ ID NO: 9753 - DNA, 120 bp, synthetic construct
  source 1..120: mol_type = other DNA
ttacagtctcctgtaaacaggaagtgtccctgtctgacgtcactgctacgtggtacccggatggcctctctctcgatcctcaggagtaatgtcttccggccagccctcttcctgcttcgg

SEQ ID NO: 9754 - DNA, 120 bp, synthetic construct
  source 1..120: mol_type = other DNA
gagagattaagtaacgtgcccgatgtcattgctgaaaagtgtatcactgagataaagtacatcccaggacttcatcccaggtagtctgacttcagactttgtgtctaatggttaagctat

SEQ ID NO: 9755 - DNA, 120 bp, synthetic construct
  source 1..120: mol_type = other DNA
attttttaaagaagcacagcacgtggaattgtagtgttgaagacaccatgctgggtatcactggaataacccctgtgctgccagcgttgatgtgaaatagaagatgacatcttaaaccaa

SEQ ID NO: 9756 - DNA, 120 bp, synthetic construct
  source 1..120: mol_type = other DNA
tcatgcatacacacgatgggctctgggcacactctacagggaagacggcttcagtcgtgcatacacacgacgggctctgggcacactctacagggaggatggcttcagtcatgcgtacac

SEQ ID NO: 9757 - DNA, 120 bp, synthetic construct
  source 1..120: mol_type = other DNA
atccatttctttgttttatgttttcaactggagaaattaagatggatataatataattattgcaaggctctagtattggttcgaaccccgggagcgcgccaacagacagcacaaggcggt

SEQ ID NO: 9758 - DNA, 120 bp, synthetic construct
  source 1..120: mol_type = other DNA
gcttttccattatcgtctatgttaagacagcaattggagatgttaaacttaccacagaccgcaccctcttctgctaataagtagtctagagccagcctgttttgataaattgctgggtgc

SEQ ID NO: 9759 - DNA, 120 bp, synthetic construct
  source 1..120: mol_type = other DNA
acgtctgcttatggtttttgtgtaaagggatggaaataccacgggtgattttcaggggtagttgttggttttgagacttttgctttggctataatccattctctctttctgtcttcgagc

SEQ ID NO: 9760 - DNA, 120 bp, synthetic construct
  source 1..120: mol_type = other DNA
gaaattgaaagagatgtcagaattcaaacccatttctacttgttgcaaaaacttatcctttttattgctaccctttgctacctccctttaagaagttgctcggcgtggtggctcacgcct

SEQ ID NO: 9761 - DNA, 120 bp, synthetic construct
  source 1..120: mol_type = other DNA
cacgtgcacttttcaagggaagggaatggcttctgataggttgttaaaagaatgttgcccaaaacgttcaagaacttttgctgtacattttacagaactatgcagagacagacaggtcca

SEQ ID NO: 9762 - DNA, 120 bp, synthetic construct
  source 1..120: mol_type = other DNA
ctttcttcttggggcttctctcttccttaacagccttagatcctacatcttcagatggattgatttttcttggtctaccacgttttctaggtatggcagacatatcaaattctgcttgaa

SEQ ID NO: 9763 - DNA, 120 bp, synthetic construct
  source 1..120: mol_type = other DNA
gcagatttgaccaatttagtgggacacattatgttttggctcactaaaggtattgtttcatgaatggactgttccattgtatctgaagtaatttctttacttcttgtgtctttaattaca

SEQ ID NO: 9764 - DNA, 120 bp, synthetic construct
  source 1..120: mol_type = other DNA
aaagtcgggttttcaggtggtaatttttggtggaccatttgcacaggtcactctcttctcgatttcctaataaacagtctatcttatggttgtatttcctagtggtaaaaacaatccctt

SEQ ID NO: 9765 - DNA, 120 bp, synthetic construct
  source 1..120: mol_type = other DNA
aagaacgctggaattaagtgcatctctaacaaacgggaatttaataaaagcatatgaaagaatgattacacccccccccccacacacacacacacacacattacgtggtaatactagcta

SEQ ID NO: 9766 - DNA, 120 bp, synthetic construct
  source 1..120: mol_type = other DNA
cctaaggtgcagtttgcttggcaggtttttgtgtcatcttcctgggaagaaattttcttgttctttaaggttgtttttctcccttcacaagtgtgaaagaatccagagggcaggaatcat

SEQ ID NO: 9767 - DNA, 120 bp, synthetic construct
  source 1..120: mol_type = other DNA
gtgagtgtgcctagggaagacaaaaggaggagaggtacaaagaattttttatagtggactagatcaggtgattattctctgttttcacaaggaatgttcagaaacagctcctcactgctc

SEQ ID NO: 9768 - DNA, 120 bp, synthetic construct
  source 1..120: mol_type = other DNA
aaaataaaaaataaataaatttggtttgtttccttacacactttacagaagcctttccatcaagaccgtccggtggcccacaaaccaaaaaccgtggctgggtgctcccctactcatgaa

SEQ ID NO: 9769 - DNA, 120 bp, synthetic construct
  source 1..120: mol_type = other DNA
cgtgtctgaatgaggcagcgttctggctacagctcttctccaagagggtttcctctctgggttgggacccagccttgcctaggggacattcatttatatacacttaaccttgtatacaat

SEQ ID NO: 9770 - DNA, 120 bp, synthetic construct
  source 1..120: mol_type = other DNA
tgatacgtcatgttgagggttaggatttcagcgtatggattttggggcacacaaacattcagaccatagaaatgggagaagaagagtaagacagagagaaaagtaggcagaactactcat

SEQ ID NO: 9771 - DNA, 120 bp, synthetic construct
  source 1..120: mol_type = other DNA
atctttctagatggcagctgccttactctgagggcaggagcttgctttgtatgttccagtcccttctgagaaccagaagcctgagcatctattagaaatgcaggattgtggacccaatct

SEQ ID NO: 9772 - DNA, 120 bp, synthetic construct
  source 1..120: mol_type = other DNA
ggttacggacatttggatcacatgtggagaagcagtatatagtgaacttggaaaatgtggtagagtgattaaataattctgaagacatttattagcttacttcaatggtcagtctggaga

SEQ ID NO: 9773 - DNA, 120 bp, synthetic construct
  source 1..120: mol_type = other DNA
gggagatagtaaatgattttttggaggattcattgggcttggagtgcatacagtggcttgggacaaagtgttgaaaagtagacagtggtttgtgactaaagtctgtccaggtgtattgat

SEQ ID NO: 9774 - DNA, 120 bp, synthetic construct
  source 1..120: mol_type = other DNA
cctgcaccaccacgcccagaagaacgaggattagtatattcatgagcagtatcagagtcatggccacccatagagcctgcaccaccacgcccagaagaacgaggattagtatattcatga

SEQ ID NO: 9775 - DNA, 120 bp, synthetic construct
  source 1..120: mol_type = other DNA
tctccatttgcagtgtcactcttatttgaaatcatggaaaatgggagctatacctcttatttcattctcctaggactctttaaccacaccagagcccaccaagtcctcttcatgatggtt

SEQ ID NO: 9776 - DNA, 120 bp, synthetic construct
  source 1..120: mol_type = other DNA
gggagccctgacaaggtgtatgggtcggtgtgtggccttaagtcgtgaataagactatatatttgccccaacattcaaaactgtgcaaagtgtttgtgtggaatttcctagaaataagga

SEQ ID NO: 9777 - DNA, 120 bp, synthetic construct
  source 1..120: mol_type = other DNA
tttctcatcattaggactgtatgagaatgtcataataatatgagaaaaggtagtagttgcctgatgttgaaagatttacctaatctcacataaataaccaaaacagcatggtactggtac

SEQ ID NO: 9778 - DNA, 120 bp, synthetic construct
  source 1..120: mol_type = other DNA
ctttccatgcattaatttctttttttagaaagtaggagatattgtcaacagtacttatatcatggggttgttgtaggatacaaagtaatccatagatactacttcacttgaagaaaagta

SEQ ID NO: 9779 - DNA, 120 bp, synthetic construct
  source 1..120: mol_type = other DNA
acagctgccagctcatgagagtgggatatcggagtgggtggcagacagccgcatagcggtcataggccatggctgctaagaggaagcactctccaccacccagtgtggggaggaagaaga

SEQ ID NO: 9780 - DNA, 120 bp, synthetic construct
  source 1..120: mol_type = other DNA
atacacaaacttaattttctcttcatgaattactaaagggagagaattacatagtgttaaaatgttaataaattcaggaacttagactcatctgacactagatcatcttgacctgtgggc

SEQ ID NO: 9781 - DNA, 120 bp, synthetic construct
  source 1..120: mol_type = other DNA
tgtggttaaagagtcctaggagaataaaatctggggtagtatttctcatctccataatttcccctggtgtgatggtgcaaatggaaaaatagagaaagaagaggcttttatggtctgaat

SEQ ID NO: 9782 - DNA, 120 bp, synthetic construct
  source 1..120: mol_type = other DNA
cctggagagctactcaagttttatcctccacaaccctaacaaaattttatgtcttcagcgctcttctttgcagcctttcttgtaacgtctcatcctggaactgtttttaattgtcatggg

SEQ ID NO: 9783 - DNA, 120 bp, synthetic construct
  source 1..120: mol_type = other DNA
cctgaagtgtttcctagtgttatcatcatggagaaagcactgcactagcctgagtgtgttcatcctctcctgaagtgctccctaatgttatcgtctgtttctgctcccattgacattgcg

SEQ ID NO: 9784 - DNA, 120 bp, synthetic construct
  source 1..120: mol_type = other DNA
tttctcactttcctaaatgaagtctcctgttcactgtgctgagaacactccttcaagaacctcctttgttggtctacttgcaaaactctaccctttttctccataatttcttggctaggg

SEQ ID NO: 9785 - DNA, 120 bp, synthetic construct
  source 1..120: mol_type = other DNA
atcttttgtatgcagataggaaaagtaaggccacttggctgcaaaatggagtagactttagaatttccctttgcattgctaggtttgcagggctagctggccatagaaaaagctagaacc

SEQ ID NO: 9786 - DNA, 120 bp, synthetic construct
  source 1..120: mol_type = other DNA
tctactctcaagtatgactaattttcattagtcacattagttattacattgttaacaatttagcaggttcacatgcttggtacattttatttgctaattacagtaaatgtctagctgcta

SEQ ID NO: 9787 - DNA, 120 bp, synthetic construct
  source 1..120: mol_type = other DNA
tgtgggatctgacactatctccagatagatagtggcagatggtcatgggagtttagcttgggctagagcatttgactgtagatagtggcagatggtcacgggagtttagcttgggctagc

SEQ ID NO: 9788 - DNA, 120 bp, synthetic construct
  source 1..120: mol_type = other DNA
accttccgtttctcctgccatgttcacatgtattctaaataaatacaagagggctccataaacacaaaaatgtgtttccatctgcaagctggtagaaagagtcattgaacatagtcttct

SEQ ID NO: 9789 - DNA, 120 bp, synthetic construct
  source 1..120: mol_type = other DNA
cgaggctcttatccccacatcactgcctttaaaatctctctggagagatgccaagattcagtaagacattttcatgatgaaataccaagaaacgattccagtccttcacttgggaaaaca

SEQ ID NO: 9790 - DNA, 120 bp, synthetic construct
  source 1..120: mol_type = other DNA
ggaagctcaggctgtaggggtataataatgagtgcattgtgtttatagttgcaggtgtctgccccttgcttcagctcacctcacctcaccactgctgttcctgtgtaatcctccatgccc

SEQ ID NO: 9791 - DNA, 120 bp, synthetic construct
  source 1..120: mol_type = other DNA
caggagtagcttgtgtaggtagaagaagaaaaggagttcctggccaaagcccactgtggctatgaacacttatgagtagcaattaatattaatcttgctttcaagactaaaactgccagg

SEQ ID NO: 9792 - DNA, 120 bp, synthetic construct
  source 1..120: mol_type = other DNA
aagagatggagttagtgaagctggcgatttagatgtgccaaagagaggctgtaaggtgcttgctttaactaaaaaggtgaaagttcttgacttaaggagagagaaaccctcataagctga

SEQ ID NO: 9793 - DNA, 120 bp, synthetic construct
  source 1..120: mol_type = other DNA
atgtgccccttaagaatattgtcagttctatcaatcttcatagctcacccagtgctaggtgagtgttttgaacacggaatgtgtttgtgcttcaggcattctgtctctaaggatggaatg

SEQ ID NO: 9794 - DNA, 120 bp, synthetic construct
  source 1..120: mol_type = other DNA
tgtccataatgcagatattttccctgtctacttgcaatgcccagtagcctatggaataacattaggcatgcatttgaacatgtcacatttggttctaaatattggcttcattgaaatggg

SEQ ID NO: 9795 - DNA, 120 bp, synthetic construct
  source 1..120: mol_type = other DNA
tcatcttttaggcctattactcatatctccatctctgagcactaagaaggaaaactctactgttgctattgtttttgcttcaacataaggagagtttattccttgatgcttcagggactg

SEQ ID NO: 9796 - DNA, 120 bp, synthetic construct
  source 1..120: mol_type = other DNA
ataacgaaactaaagccctgttctgaagcagtttgtggtggttgtcctgccagatttatgatccccaaattattctgtgagaacaaatagacacaagttctcacagcagtccatgcctaa

SEQ ID NO: 9797 - DNA, 120 bp, synthetic construct
  source 1..120: mol_type = other DNA
tataacagccaacttggtcatgattctgctcatccacatggactcccgcctccacacacccatgtacttcttgctcagccagctctccatcatggataccatctacatctgtatcactgt

SEQ ID NO: 9798 - DNA, 120 bp, synthetic construct
  source 1..120: mol_type = other DNA
aacatctgcggtgctgcggccaataacgcagctattacagaaaatatggtattggttctgaagaatgttcagtgtcactttcagcaattcaaaattaacaggcaaaatcatcctgttgca

SEQ ID NO: 9799 - DNA, 120 bp, synthetic construct
  source 1..120: mol_type = other DNA
agctaacttagttcccgtggaataagttgctcaattttcttattctcaacatcttcattgatatgctgaagacaagtatttttgtaattagttggagttaggtgtggtgctttgatagat

SEQ ID NO: 9800 - DNA, 120 bp, synthetic construct
  source 1..120: mol_type = other DNA
catggtgtgtatccactcccttcacacataaaactagtcccactgtaaaagggagtgaccaaggatttttccccagtcatctcaccaaattcttacataaggtaatttgtggtcaccaga

SEQ ID NO: 9801 - DNA, 120 bp, synthetic construct
  source 1..120: mol_type = other DNA
tggtctagccaaggacctgatgacccacattgaggggtaatcagattccctgtggggtctttctgcaggtaagggatatggatataaaattaacttgcttctacagacttgttttataca

SEQ ID NO: 9802 - DNA, 120 bp, synthetic construct
  source 1..120: mol_type = other DNA
tctgcagcatttattgctgtgatttcttgtaaaaatatttctctgcctgacagttaataaattaaatgccttagatttcactggggactgggagagggctcactgtgcctactgctgctc

SEQ ID NO: 9803 - DNA, 120 bp, synthetic construct
  source 1..120: mol_type = other DNA
catgtacttcttcatcagccagctcgcgctcatggatctcatgtacctatgcgtgactgtgcccaagatgcttgtgggccaggtcactggagatgataccatttccccgtcaggctgtgg

SEQ ID NO: 9804 - DNA, 120 bp, synthetic construct
  source 1..120: mol_type = other DNA
gccactggggtcagtgtttctgctattgtatctcagtaagtacaaagaaacgcattttctccaaaggctgaagtgaactttgtagtgtaaacaccagtagttttagcattggccattgga

SEQ ID NO: 9805 - DNA, 120 bp, synthetic construct
  source 1..120: mol_type = other DNA
tatctcctctttagtgaacagatctttcactccctcagctgtatttattcctatgtattttattctattggatggtattgggaatggtattcttttcttaattacatatttggatggttc

SEQ ID NO: 9806 - DNA, 120 bp, synthetic construct
  source 1..120: mol_type = other DNA
ttatgaaagctgtttttcaggaatattgacctataatattttgggagttagtgttcttatctggctttggtttaaaggtaatgttggcttcagtaaatgaatttggaagtgtttttgccc

SEQ ID NO: 9807 - DNA, 120 bp, synthetic construct
  source 1..120: mol_type = other DNA
gggctgagacgtgcgttctatctcaggttaggtgtgtgatattaggcaggtaccctgagaacctgcattttttaatatgtaaagagagaaaataataggaagtaactcataggctcttgg

SEQ ID NO: 9808 - DNA, 120 bp, synthetic construct
  source 1..120: mol_type = other DNA
ccctgaatagactgactgtgacctccttaagtgcactcaagttcaatttttctttgattcatcttctgcatataacacagaggctgtgagtatcatgatagagaaggaaacagtgagttg

SEQ ID NO: 9809 - DNA, 120 bp, synthetic construct
  source 1..120: mol_type = other DNA
tcctcattttaccctcaccacacctgagctcaaacatgatttttatcctttttgatgtagattggagaaaggaatggcagacagagaaaaaggtggacccatagctggagtctactgtgt

SEQ ID NO: 9810 - DNA, 120 bp, synthetic construct
  source 1..120: mol_type = other DNA
aataaggtctcagcccctgagtgtgggatgcagatgttcctctatctgacactagcaggttcggaatttttccttctagccaccatggcctatgaccgctacgtggccatctgccatcct

SEQ ID NO: 9811 - DNA, 120 bp, synthetic construct
  source 1..120: mol_type = other DNA
ggaaagagggagggagatagagaggggcaatgaaacaaactgagttcaatgttgctgccacacatgagtatgggtaaagggtatataggtattaattgtactattgttttttaatgattt

SEQ ID NO: 9812 - DNA, 120 bp, synthetic construct
  source 1..120: mol_type = other DNA
tagtagatacattaatattgattagaggagaaataaaaaaatgataaaaacaatgcaaaacatcagatgagttgttttgtgaaaaaacaaaataaactagactaagaaggttcaaatcag

SEQ ID NO: 9813 - DNA, 120 bp, synthetic construct
  source 1..120: mol_type = other DNA
ccagcaaaagaccagaacggtcactcttgccacttttatgtaacatagcactgaaagtcccagctaaagcaattagggaagaaaaataaatagaaatgtaaataggaaaggaagaagtga

SEQ ID NO: 9814 - DNA, 120 bp, synthetic construct
  source 1..120: mol_type = other DNA
ttctgagcaaaatgaatgaatatgtaggcatcatactacccgatatactacaagctattaaacatcaaaagagaatggtactggcataaaagcagacacacaaacagaagagaacccctg

SEQ ID NO: 9815 - DNA, 120 bp, synthetic construct
  source 1..120: mol_type = other DNA
tatggtagagtgaaatcatcatacctgtacaggaatgtaaatttggaggtcatttttcttatcaggacacatcacacggggaatgtgtttctttagtaaatgttgtgtactcctttagat

SEQ ID NO: 9816 - DNA, 120 bp, synthetic construct
  source 1..120: mol_type = other DNA
tgatcccaaacagtatacgattttttttttacttataaaaatttttgtcataaactcactttgtctcacattaacatagccactctggctatctttcggttaccaactgcacgaagtatc

SEQ ID NO: 9817 - DNA, 120 bp, synthetic construct
  source 1..120: mol_type = other DNA
ctcaatatactgggcaccaaatgaacttatctcaaaaaaataagagccatctatgacacacccacagccaccatcatactaaacaagtaaaatctggaagcattcctcttgagaactgga

SEQ ID NO: 9818 - DNA, 120 bp, synthetic construct
  source 1..120: mol_type = other DNA
atagggtgtgtaggagataattactgttttatattcactgctcagagatgtcttctctgataatcaagagagcagagaagagagacctaaatcagttgaagaaatgggtcacaacgtatc

SEQ ID NO: 9819 - DNA, 120 bp, synthetic construct
  source 1..120: mol_type = other DNA
tttgcctttccagttgttaccaggtggattgcatagggcttgcaggcattggggaatattcttgtttctcaagccctacagcttcattgtatgcattcctgctgtcttctccatgttcat

SEQ ID NO: 9820 - DNA, 120 bp, synthetic construct
  source 1..120: mol_type = other DNA
aagatcagtaacacgaggagttggttctgtaaaaacgtgaggaaaattggcaaacctttaggtagacaaaccaagaaaactaagagagatgactcaaataaaactataagtaaagcagga

SEQ ID NO: 9821 - DNA, 120 bp, synthetic construct
  source 1..120: mol_type = other DNA
agtaatcccaggaccttaaatctccactgaaactctcgaagtttaattggtcagctgggattgtagtccctggggtgttgaaagcataaataagccataccttaagtctggaccatttat

SEQ ID NO: 9822 - DNA, 120 bp, synthetic construct
  source 1..120: mol_type = other DNA
gcctggctcatgataaattttatttatttagtgtggtgagagcacttaacaggaaatttaccctcttacactttttcagtgcacgattcagtactgtgaactccaggcacggtgctgcac

SEQ ID NO: 9823 - DNA, 120 bp, synthetic construct
  source 1..120: mol_type = other DNA
gattctggggatcgggatgagacaattctgcttaaggcaacttctcttaggatggcaggaggtagcaagagaagaaagggcagaataaccattacagtttacaccatatttatagctata

SEQ ID NO: 9824 - DNA, 120 bp, synthetic construct
  source 1..120: mol_type = other DNA
ataagaggttcagatagatccacccagcagtgagtgcagtgggtttttctaggcagaaaacacagaagaaacatcaagaaatcacatgattggcttgccatgtccaagtccttttctaat

SEQ ID NO: 9825 - DNA, 120 bp, synthetic construct
  source 1..120: mol_type = other DNA
cagacatggttagtgtcatagtatatatagagagtaggaacccaaaaggggtttaactgtggagttcctgtgggaagagtaagttcaaatagaatgaagaggtctcacaagaagccagag

SEQ ID NO: 9826 - DNA, 120 bp, synthetic construct
  source 1..120: mol_type = other DNA
caagaagaccatgctctataaatcagaaaatgggtccttacagaccaaactggctggcacctttattgtggactttccaatctgtggaaatgtgagaaataagtgttgtgtaaggccatg

SEQ ID NO: 9827 - DNA, 120 bp, synthetic construct
  source 1..120: mol_type = other DNA
gtttgtcagtgtggaagggagagaaatcattctatagtcctacaaattggtctgaatctatttgccagcatgtgttcttggactgcaaccttcaaagagcttcttaacatcccctgccca

SEQ ID NO: 9828 - DNA, 120 bp, synthetic construct
  source 1..120: mol_type = other DNA
gcaatgagtccatattgtcctgggcttttttttttttctggtgggagacttttattactacttcactgcattattcattattggtttgctaagatttactatcgtaggatttatgtatca

SEQ ID NO: 9829 - DNA, 120 bp, synthetic construct
  source 1..120: mol_type = other DNA
tgtactgttgaaaacacctgattattcgcaagttgtacatagccaattaggaagttatagcatgcagctaccacatgtatgcttttaggtaacaggttcagcaggccccacctcaaatgc

SEQ ID NO: 9830 - DNA, 120 bp, synthetic construct
  source 1..120: mol_type = other DNA
acagcataggtacatgagggtctcatagagtgaggtgtctgagcaggacaggatcgttacagcagggacttcacagaagaaatgatgaatctcccaggatctgcagaaggggaagctcat

SEQ ID NO: 9831 - DNA, 120 bp, synthetic construct
  source 1..120: mol_type = other DNA
ctagtatgtggtcctccaacctcatctccttaaagctcctctcattttaaagctcattaaatctcagcgaggaagaactagaatttggagggtcactgctgtttatcagacaaggcttta

SEQ ID NO: 9832 - DNA, 120 bp, synthetic construct
  source 1..120: mol_type = other DNA
gtttcctaagaaatctctgctgctctttaggaaatggccatcactatcattaagccactatcattaagccactatcaacagctcaaccaggacacgggacagataagggaacactatcca

SEQ ID NO: 9833 - DNA, 120 bp, synthetic construct
  source 1..120: mol_type = other DNA
actaggggaggggttgaaagctttcggttgatacatcacctctgggagttgaagaagaatgcaattaagagagctaaagaagtcagtaggtatctctcctgaacaattctggttttcttc

SEQ ID NO: 9834 - DNA, 120 bp, synthetic construct
  source 1..120: mol_type = other DNA
ggtgattgaaaaatgaagttaaagcacatgaggcagttgtgttgaatctttcataaaaccgcagccctgcaaccaagcctagggatcctcttgtcctgcatctcctttgcataacaaact

SEQ ID NO: 9835 - DNA, 120 bp, synthetic construct
  source 1..120: mol_type = other DNA
catcaccgctgtcaacatgaagccctgtacgtactattccctgttggggatctgagatttgaagatctctgtaatgtggcagagttcacttaaggagaaaattccaatgtttctagcata

SEQ ID NO: 9836 - DNA, 120 bp, synthetic construct
  source 1..120: mol_type = other DNA
taggatagcaatgtagaagggccacagtgcagaaatagagtttcagtcaatcttattcaacttgaacttctacatgagagctgggttgtatcaacatcgaggataaaggggggaatctca

SEQ ID NO: 9837 - DNA, 120 bp, synthetic construct
  source 1..120: mol_type = other DNA
ttttccaagtttatagaatacttcattaacatcactggtcatttcaattaaacactttggaaatccagggaaagaacaattttgacaacatcaactgacatatgtaatcctaaactttgc

SEQ ID NO: 9838 - DNA, 120 bp, synthetic construct
  source 1..120: mol_type = other DNA
gttttcacagaattgtcagaattcttagcagaacttcacttcatttaaagtcagttgtccaacttgacagggatgttctgtcactttttcagatttttaatttttgtggatacagaggtc

SEQ ID NO: 9839 - DNA, 120 bp, synthetic construct
  source 1..120: mol_type = other DNA
gacgtggttctgaagccccatctgcctcttgctggaatggggcaataatttgctgtgaacatcagcttcttcatctcccatggggctaattctttctctaaatactttataagaatttgt

SEQ ID NO: 9840 - DNA, 120 bp, synthetic construct
  source 1..120: mol_type = other DNA
gtctgtttcttcacttaatccctccaggacattcttccatctcttttccatgtgtttgatttcagggtaaagatcaaattattaggaaccttctgaatgaaaagccacctaggggttagc

SEQ ID NO: 9841 - DNA, 120 bp, synthetic construct
  source 1..120: mol_type = other DNA
gcaaatgctccttccaatttccattcaaaagttggtcagcaatacagacagacaggcaggactcatgatcacaggttaacaatagagacaggcaggactcaatcacgtgttagcaataca

SEQ ID NO: 9842 - DNA, 120 bp, synthetic construct
  source 1..120: mol_type = other DNA
atctccctagtactttcctcagagctgcagccacatctttattcctcaagctgtagatgagtgggttgagcatgggggtgaggatggtgtagaaggcagacaccactttatctttctctg

SEQ ID NO: 9843 - DNA, 120 bp, synthetic construct
  source 1..120: mol_type = other DNA
aggcagaaatctggcagcttatttaacgacctgatatgtaggaagagcccaccaggaatagtatgtcagaagcagcgtgagatcaagaaaagatcacctacttcaggatcatttgaaatc

SEQ ID NO: 9844 - DNA, 120 bp, synthetic construct
  source 1..120: mol_type = other DNA
acttgggttttttcctcaagtttatttctctaccattttactgatccttcatgtttataagtaaaaataactacagtcgggtgcagtggctcccacccgtgatcctagcactttgggtgg

SEQ ID NO: 9845 - DNA, 120 bp, synthetic construct
  source 1..120: mol_type = other DNA
aatacatgagcatcaaatattaactcctgtcaagcgtgataaaagtcagctacttttgccttctctaacaggtgaaagattttcttgtgatagccacagcttcgaatcatgggtcaagag

SEQ ID NO: 9846 - DNA, 120 bp, synthetic construct
  source 1..120: mol_type = other DNA
tggcacaaacgagcaattcacccatttcaatgaagccaatatttagaaccaaatgtgacatgttcaaatgcatgcctaatgttattccataggctactgggcattgcaagtagacaggga

SEQ ID NO: 9847 - DNA, 120 bp, synthetic construct
  source 1..120: mol_type = other DNA
gggttttccattccatccttagagacagaatgcctgaagcacaaacacattccgtgttcaaaacactcacctagcactgggtgagctatgaagattgatagaactgacaatattcttaag

SEQ ID NO: 9848 - DNA, 120 bp, synthetic construct
  source 1..120: mol_type = other DNA
cagtcgatttgataacctagacagctactgaatgactcggggtagcatagacagtgtgaatcaactacacagagggatgatatttccaccacactactcaaaatggtgggcaatttaaaa

SEQ ID NO: 9849 - DNA, 120 bp, synthetic construct
  source 1..120: mol_type = other DNA
tcagtgtggaaagttaggcataagatagaagaggtttgcttggcttaaaaaaaaaacaaaacaaaatcagcactataatggcatgtaggtgaacatttattgaacacttactatgccaga

SEQ ID NO: 9850 - DNA, 120 bp, synthetic construct
  source 1..120: mol_type = other DNA
tttaacaagatattcagagggcaatctatgcttatccaatagtatgcacccctgctaccaattaagtctgaaactttctcattgtgaataccaagcacattcttccaactgtcggctctt

SEQ ID NO: 9851 - DNA, 120 bp, synthetic construct
  source 1..120: mol_type = other DNA
gacaggagcatctgagatttgtgcttcttccaaagacggttgggagacttcaatatttaaaagggaaacagtgggcattagaggaaaaaagaaaaaggaagtgtgaataaatgaagtagt

SEQ ID NO: 9852 - DNA, 120 bp, synthetic construct
  source 1..120: mol_type = other DNA
tgggcacattacttatgatttctagtcatcacaaatccattggacacatattttataccctctgttgcaggtaatcagaaaaccctatacctttttcagcctttagaatgtgattcaata

SEQ ID NO: 9853 - DNA, 120 bp, synthetic construct
  source 1..120: mol_type = other DNA
tggtgtagaaggcagatacagctttgtcctgctcaggggtgtggtaagaatgaggcagcacgtatgtgtacatggcagccccatagaagaggctgacaaccaccatgtgtgaggagcagg

SEQ ID NO: 9854 - DNA, 120 bp, synthetic construct
  source 1..120: mol_type = other DNA
ttgttcatgaccatttatttctgtctttcgagtaccaccttacattggtgaggatgcatataagacataagaatggaaccagcctgattcaataggatagggtggtggggaggaaaggag

SEQ ID NO: 9855 - DNA, 120 bp, synthetic construct
  source 1..120: mol_type = other DNA
ccacaaattagaattgagccaaaaaatttaggtgtgtaccaaattagaaaaatggctttacttgtatatgcattcaccctcaaatagcagtaagaacattaataagtgattcgtaaattt

SEQ ID NO: 9856 - DNA, 120 bp, synthetic construct
  source 1..120: mol_type = other DNA
cccagcttacttcacaaagggaaaggggagatatgagtggctccataaccactcagattttacaaccatcttccaactctggtagtgttgattcattcactgtattttaagagttaccca

SEQ ID NO: 9857 - DNA, 120 bp, synthetic construct
  source 1..120: mol_type = other DNA
ccattatgtttttctcttcaatagcaggtccagcagcaggtagccaagttttctactttttcatttttgttgtcgttctgtcagaccctgctctgcatcaaagattggcacaattcttgg

SEQ ID NO: 9858 - DNA, 120 bp, synthetic construct
  source 1..120: mol_type = other DNA
tgttggaatcattatgcagacagatctgcatagaattcaagtaatctgctacattctgatgtacagaaaagataagagtccataactactaagaaacgagattgaattatctaagattta

SEQ ID NO: 9859 - DNA, 120 bp, synthetic construct
  source 1..120: mol_type = other DNA
gcatctctcttgaaatagaaatcaatgtttctaaggaagtattgtcttgcaaaagatacattttgggccattccccatcactcaagtattagtatgtaatcatcctgtctttcttgtaac

SEQ ID NO: 9860 - DNA, 120 bp, synthetic construct
  source 1..120: mol_type = other DNA
tacttccccccgctcccccgaagtttccagactagctgataagttacctaaaatgttacaagttgtacaatatgacctttaccaaccatcttcatgttccctacagagaatagtgtatag

SEQ ID NO: 9861 - DNA, 120 bp, synthetic construct
  source 1..120: mol_type = other DNA
tttttaaattatgtctgtccctgtattatgggggttgaggtcagcgggactgcggtcggccctcggtcccgagggcacccacacggttcatctcctgtaaagacacaggcatgtcctgtc

SEQ ID NO: 9862 - DNA, 120 bp, synthetic construct
  source 1..120: mol_type = other DNA
cccttatttcaacgacggcaaagtcctggcactttttctgttgagaactgttttaagaccccttctgcccagaggtctgacggcattctcttttgcaacgtccaattctctacacttaca

SEQ ID NO: 9863 - DNA, 120 bp, synthetic construct
  source 1..120: mol_type = other DNA
atgcccctgttcaggcaacacttgtgacagacttgtacaattactacttgaaaccatcattacaggactgaatgaagaaatgaatgtagaaatagtaacaaaagacagaagaaaacggtt

SEQ ID NO: 9864 - DNA, 120 bp, synthetic construct
  source 1..120: mol_type = other DNA
cagagcttagaggggagggagggatgcgtaggtagagcatagaggaattttaaggcagtggaaatactctatatggtactactacaatggtggatgtatatcattctacatttgtccaaa

SEQ ID NO: 9865 - DNA, 120 bp, synthetic construct
  source 1..120: mol_type = other DNA
ctctggtggggatgttggcagcgggggaggttatgcgtgtcaggtagatgagaaatttctatcacttctgcccaattttgctgtgaatctaaaactactctgaaaaaaaatgtgtattta

SEQ ID NO: 9866 - DNA, 120 bp, synthetic construct
  source 1..120: mol_type = other DNA
ttttaagacatagagtcttaacagagggcctgagatcacaaaatttgagaactactgaccggaactaaagtccctctcgcacaacttgcaatgtctgtcttcactaagaaagaggggagg

SEQ ID NO: 9867 - DNA, 120 bp, synthetic construct
  source 1..120: mol_type = other DNA
aggaaggcaggaaggctgtccacatggccagcagcacccacccagggcatcgcccgcacggccagcacccacccagggcatcccccgcacggccagcacccacccagggcatcgcccgca

SEQ ID NO: 9868 - DNA, 120 bp, synthetic construct
  source 1..120: mol_type = other DNA
tagcaactgtttcaggcaaaggcagaaaatgcaacctcagtatcatgcagttttgaagacactggagagggttttccggaaaaaataataataattcttcccatcgggtaacccctcctt

SEQ ID NO: 9869 - DNA, 120 bp, synthetic construct
  source 1..120: mol_type = other DNA
atttaccctatacacggtcgctgtgaggcacacatagttatttatgattcttcgagggtagataaaatgaaacattctgtttctcagtagcactggctacattcccaatgctcaggagcc

SEQ ID NO: 9870 - DNA, 120 bp, synthetic construct
  source 1..120: mol_type = other DNA
tcacatgtcatacatactacatacacacaacacacacaacacataacatcacatgtcacacacatcacatgacacacaccacacactccacacatcacatacacactgcacatacactac

SEQ ID NO: 9871 - DNA, 120 bp, synthetic construct
  source 1..120: mol_type = other DNA
cgggcgctcccccagcaaattttaaagcaccctctgggtgctctacttcctctgtccactaactgccactgttctgggtgcagcagggagacagagaaggatatgacaccaggtgggaga

SEQ ID NO: 9872 - DNA, 120 bp, synthetic construct
  source 1..120: mol_type = other DNA
tcacaagagccaaagggtagaaaaagcccaaatctccatctacagatgaatggataagcaaatatgattgatacacacaatattattcagccttaaaaagaaaagaaattctaatacatg

SEQ ID NO: 9873 - DNA, 120 bp, synthetic construct
  source 1..120: mol_type = other DNA
atctcaggcatgtatcaaaccaagaaagcggctaggagggcaacacatctacctgtatacagggagctatgaaatacgtgagctgcgcaagtgatgcacaaggaaacggaagcagtatga

SEQ ID NO: 9874 - DNA, 120 bp, synthetic construct
  source 1..120: mol_type = other DNA
ggtccaggccaaacccaatccacgcatggttggtgaaaccagcacgtatccaagggcctttcccccacctgggccatgtgcccactgcatagataggcctgtgcttgctcccctaggaca

SEQ ID NO: 9875 - DNA, 120 bp, synthetic construct
  source 1..120: mol_type = other DNA
ctggaaaagcaccattcctgtccatgaagcccccagatggaaccaggtaattgggaaatacatgggcaccaagcctgaacccccctcagacccaggtgggaactgcagtggtgacttgcc

SEQ ID NO: 9876 - DNA, 120 bp, synthetic construct
  source 1..120: mol_type = other DNA
ccactcaggcatttttctcactggttgccagttgggggaagcagtatttgtgagcacctgcctgtctccccagctcctgttcagaaaccccatctgtgcctttggagggactgccctgcg

SEQ ID NO: 9877 - DNA, 120 bp, synthetic construct
  source 1..120: mol_type = other DNA
tatagtgacacatggctgtcagaacacagtaaagaatccacactgcttcccccctttacctagaaaaggagagttctaggccacctcctcctcggcatactcctcatcctcctcctcctc

SEQ ID NO: 9878 - DNA, 120 bp, synthetic construct
  source 1..120: mol_type = other DNA
cggtgtccgacaccttgggcgagggcaggatgctgaatgtgtttatgatcctgtctgggtactcctcccggatcttactgagcagaagggtacccatcccagacccagtccccccaccca

SEQ ID NO: 9879 - DNA, 120 bp, synthetic construct
  source 1..120: mol_type = other DNA
atgcacatcagatcttgagatacgttatagtcaggatatgggttgccatccagtttgaatgtctgggcattctggtaatttgaaaagcagcaatacaaaagtgttctgcctgtcctgtag

SEQ ID NO: 9880 - DNA, 120 bp, synthetic construct
  source 1..120: mol_type = other DNA
ttgtcattcatacgttggtcagaacccatgggcactacagtggcacatgcttgtcattcatacgttggtcagaacccatggaatgtacaacaccaagagtgaaccctaatgtatactgtg

SEQ ID NO: 9881 - DNA, 120 bp, synthetic construct
  source 1..120: mol_type = other DNA
ccatttgttttcagtctttctgagtcactgtttttaaattgttgagtttagcccatttgtatttactaaaaagacaaacatgtctggttttggtcttctcatacgtactacgccttctgt

SEQ ID NO: 9882 - DNA, 120 bp, synthetic construct
  source 1..120: mol_type = other DNA
aaataaaagaatggctactccacaggcagagcagcagcaaggacggctcagctgcttatacttattgttactagggaggcaaaagtcaaaactacaatgagatatcatctcattccagtt

SEQ ID NO: 9883 - DNA, 120 bp, synthetic construct
  source 1..120: mol_type = other DNA
tagagccgatttttgcaaagtaaaaacaaacacccaatgtgtctctgtacacctgtaatgtttcctgtgtcaggtatgttctaaaaagtgcttgtccaggcgccaagtcagcactggaaa

SEQ ID NO: 9884 - DNA, 120 bp, synthetic construct
  source 1..120: mol_type = other DNA
gttagaacagtccgtcgggggtgcggggctccggcgagagaccggcgctgttagaacagtccgtcgggggtgcggggctccggcgagagaccggcgctgttagaacagtccgtcgggggt

SEQ ID NO: 9885 - DNA, 120 bp, synthetic construct
  source 1..120: mol_type = other DNA
cgagagaccggcgctgttagaacagtcagtcgggggtgcggggctccagcgagagaccagcgttgttagaacgcagtcagtctgagagcagacacccccgtttccacactcactcacgat

SEQ ID NO: 9886 - DNA, 120 bp, synthetic construct
  source 1..120: mol_type = other DNA
tacagcatcctcctacttataaaaaagaaagtaaattgtaaaacagcctcagtgggtccttcaggagggtcttccaggagaaggtattgttatcctaggagatcatggctccgtctgcgt

SEQ ID NO: 9887 - DNA, 120 bp, synthetic construct
  source 1..120: mol_type = other DNA
gtgttgtggaggcctaggcagctgtgtgtgtgttgtggaggcctaggctgatgtgtgtgtgtgttgtggaggactaggctgatgtgtgtgtgtgttctgtgaaggcctaggcagctgtgt

SEQ ID NO: 9888 - DNA, 120 bp, synthetic construct
  source 1..120: mol_type = other DNA
gagagcgagaatggagccatgaacgtggacccagatgaaagcgtgctcacttcacacgggtctcctgcttactacatacactaaaaccatgtagctttaacgggcagatgaggttaccga

SEQ ID NO: 9889 - DNA, 120 bp, synthetic construct
  source 1..120: mol_type = other DNA
aaaccccacactcacccaacccagacacatcgcgcatagttctcccgggaaccctacatacacccaacccagacacatcacgtatagttctcccggaaacgtcacactcacccagacaca

SEQ ID NO: 9890 - DNA, 120 bp, synthetic construct
  source 1..120: mol_type = other DNA
acccggacacatcgcgcatagttctcccggaaacgtcacacgcacccagacacatcgcgcatagttctcccggaaaccccacactcacccggacacattgcgcatagttctcccggaaac

SEQ ID NO: 9891 - DNA, 120 bp, synthetic construct
  source 1..120: mol_type = other DNA
acaggtgcattctctgcccacactgttctcccctgtacttcctccttcaacgaggaaaatatagctgaatcctctcaaactcctccagctgtagacgaaggaaaacagatctatactttc

SEQ ID NO: 9892 - DNA, 120 bp, synthetic construct
  source 1..120: mol_type = other DNA
agacaatcacaaaaatcacatcggcagttctctttgaaacacaactcccacttctagaactgtttccattagacacgagggggtcactcactgcagcagcaaaagagggaaattcaccaa

SEQ ID NO: 9893 - DNA, 120 bp, synthetic construct
  source 1..120: mol_type = other DNA
ccgaacagaaaggcgagacagcttctggagtgcctggccctagcgcagctcaccatgaaggggcatgaggggtctgcctctgtgagactccatggggcgagggtccctgctgaggcccac

SEQ ID NO: 9894 - DNA, 120 bp, synthetic construct
  source 1..120: mol_type = other DNA
cacccatggacatgcataaagacacaaatgaacagacatgcacagatgtgaacagacatgcatagacacatgtgaacagacatgcctagacacacgtgaacacagacatgcataaagaca

SEQ ID NO: 9895 - DNA, 120 bp, synthetic construct
  source 1..120: mol_type = other DNA
tgggggggagggaggacatggggagatgttggtcagaagagacaaagcctcagattggaggaagaggttttgagatctattgcagagcagggtaactataataaatgaaaatgtaatcta

SEQ ID NO: 9896 - DNA, 120 bp, synthetic construct
  source 1..120: mol_type = other DNA
aacaatgataaatgttttgtgtctggttattgaaccatcaccatatgctcatgcctacaagttcctgcaaatcatcatttcactgtcgcttagagacctcagagcatgtccagagagccc

SEQ ID NO: 9897 - DNA, 120 bp, synthetic construct
  source 1..120: mol_type = other DNA
ccactgttgcctggccagtatgttttctgatggtccttaacagtatggtgtatcttgacgaagaacaattttccttcgatgatagagtgttaatagacaaccctatttctggattcccac

SEQ ID NO: 9898 - DNA, 120 bp, synthetic construct
  source 1..120: mol_type = other DNA
ccaatttagtaaagacgaactcatcagagaactaaagcaaataatgacaccaaaaggcattccaggaaaagtcatcgcactggcaatcagggcgatttcaagcgcactaactggacactt

SEQ ID NO: 9899 - DNA, 120 bp, synthetic construct
  source 1..120: mol_type = other DNA
cgcaagatgacagcataccaaggctgctccatgcagcttcacacaagggcattgtatttcaccgctaggttctaccctgacttttatgacctcgggaaggactgagacctaaatggaata

SEQ ID NO: 9900 - DNA, 120 bp, synthetic construct
  source 1..120: mol_type = other DNA
caaccatctccccagaatgtcttctcacaactctttacaatctttcattccccactcccacctacctcttccaagaaacctgaaggataatatgatatagacactcaacataatagcagc

SEQ ID NO: 9901 - DNA, 120 bp, synthetic construct
  source 1..120: mol_type = other DNA
agcatgaccagtggtgactaatatgacacggatgatacagcatgaccagcggtgactagaagtaaataccagagcgacaggaattcaggttaacattcaaaagtgaattaatgtcataca

SEQ ID NO: 9902 - DNA, 120 bp, synthetic construct
  source 1..120: mol_type = other DNA
cagagtggtatacttgtcacaactgatgcttctacactgaaacatcattatcacccaaactccatcgttcacatcagggttcattcttggtgtcgtacaatatatgggtctggacaaatg

SEQ ID NO: 9903 - DNA, 120 bp, synthetic construct
  source 1..120: mol_type = other DNA
ctccggtttctctgtgtatgcagtgattgtttgcttaatattgcacattgtgggtaacgtgttgagcacgctcaggatcccataagcttcttcggaagctttccagctcttgttttagca

SEQ ID NO: 9904 - DNA, 120 bp, synthetic construct
  source 1..120: mol_type = other DNA
tagggtgatatgctccgtccacacctgagctctgagctccgcctcctggacatggtagggtgatatgctccacccacacctgagctctctccaagctccacctcctggatgtggtaggat

SEQ ID NO: 9905 - DNA, 120 bp, synthetic construct
  source 1..120: mol_type = other DNA
atgtagtaataatttgtaaaaagcttcggcatctatatgtcaagaagagtgaaaagtgtgagatttttgtctcgcatgcaaactaacaagggagccagcaccagcccaacatgctgacag

SEQ ID NO: 9906 - DNA, 120 bp, synthetic construct
  source 1..120: mol_type = other DNA
attgatattcaggatcacacacagtggggcagcaggacccgctcactcccactgatgctcaggatcacacacagtagggcagcaggacccactcatccccgtctatactcaggatcacac

SEQ ID NO: 9907 - DNA, 120 bp, synthetic construct
  source 1..120: mol_type = other DNA
cacagtggggcagaaggacccactcatcctcatctatactcaggatcacacacagtggggcagcaggacctgctcactcccgtcgatactcaggatcacacacagtggggcagaaggacc

SEQ ID NO: 9908 - DNA, 120 bp, synthetic construct
  source 1..120: mol_type = other DNA
aaaaaagaaaatctgagaacaagatatcattgtgagattgttatctccaggaaggagtgaaatgggtgctgggaaattgagggagccttggaacaggaatctcaccatctcgaatgggga

SEQ ID NO: 9909 - DNA, 120 bp, synthetic construct
  source 1..120: mol_type = other DNA
attgcaatgagatattcgggggataaaaacatgagcacccctggaaccctcagagaaagaggtagtatacaaatgcgccctttatgcttgaagtcattattgctgttactagtattctag

SEQ ID NO: 9910 - DNA, 120 bp, synthetic construct
  source 1..120: mol_type = other DNA
gtaaatgagatgaaaacactctgcagtgagtccctgcctgaggggagaccgtgaggaataaatgagatgaaaacactgcagtgagtccctgcctgaggggagaccgtgaggagtaaatga

SEQ ID NO: 9911 - DNA, 120 bp, synthetic construct
  source 1..120: mol_type = other DNA
tggtgattaaaacactctgcaagtgcaagagcttaagatgctcctcctggttagtgtgacccaagtctggaaagaggacagagaagaaagccaagcctgggagaagccaaaactgtgcaa

SEQ ID NO: 9912 - DNA, 120 bp, synthetic construct
  source 1..120: mol_type = other DNA
actcgctgcaggtttacatgagcaaaccttctagcagcacttttacatgccgtcctttattttgaagaaccaatgtttcccgtgcgaatacaatcaggtcataggtgacaggtagataat

SEQ ID NO: 9913 - DNA, 120 bp, synthetic construct
  source 1..120: mol_type = other DNA
ctccatttcacattggttcaggctgaatgatcaattaattcctgcctctcttctctccctctcaccttgcgtccatcagggcatgtggtcatcagcatgcagctacgtaaactaaaggcg

SEQ ID NO: 9914 - DNA, 120 bp, synthetic construct
  source 1..120: mol_type = other DNA
agcaaaggaccctggagtgagggaactgtgtgtgaccaacacgttcatttctacctgacactaaggacgctggagtgaggatgcacggactctgtgtgacacatacactcatttctacct

SEQ ID NO: 9915 - DNA, 120 bp, synthetic construct
  source 1..120: mol_type = other DNA
taaagaaccctgtgactctgtcccaggaccttttagcctagacctaaaaattcgcagcccaggaaacccaaagcattttaggaacctgaggggtgggccaaggggatctcagagtttgat

SEQ ID NO: 9916 - DNA, 120 bp, synthetic construct
  source 1..120: mol_type = other DNA
ttaaacaaccaccagccatcatgtcctgttgaaatgttttagctaatcaggaacatctttaccaagcatctgtgtttttaggaaatcagttgacagattccaaatctcggagcccacgac

SEQ ID NO: 9917 - DNA, 120 bp, synthetic construct
  source 1..120: mol_type = other DNA
cattcaaatggtaaggaacaagggtacttttccctcaacacaaaacaagcttgacctctatgagcccggagaacaccgacgtttgtgtagacactttcccactgacttcgtcagagcaag

SEQ ID NO: 9918 - DNA, 120 bp, synthetic construct
  source 1..120: mol_type = other DNA
acgtgggaggccacactgccataggtcaccccatgtgaaatccaggtcatttaataaaatgaaataaaaataccccaaacctacagtcctataaaggtcattaatcccagctatcctcaa

SEQ ID NO: 9919 - DNA, 120 bp, synthetic construct
  source 1..120: mol_type = other DNA
gagtcaaatcagtgctgctcaaatcttgtcatcaactgtcttgttaaattgggagattccatctccgggggtctcaagggaacctgaggctccgcactgggtgaggtgagcactcatgct

SEQ ID NO: 9920 - DNA, 120 bp, synthetic construct
  source 1..120: mol_type = other DNA
ttcctaaatctgacttcagagcctgcaaacacccacgcccagtgtaaccctaagtccacgtttaccccagagagtcccaattttatatgttttcccaacatcaccttagtgataatttat

SEQ ID NO: 9921 - DNA, 120 bp, synthetic construct
  source 1..120: mol_type = other DNA
tgcgcagcgtggagaccgggaagcaccaaagatacagaaacccacgaacccgtttctcctcgcgctgctttctgggttctaagttgtcctcagaacgagtcctgcataaaccctgggctg

SEQ ID NO: 9922 - DNA, 120 bp, synthetic construct
  source 1..120: mol_type = other DNA
agaaaagcgaaattcataaaagagaccatgtgattctataaagcaacacagaatccgttttcagaagaggcaaacgtggaccacaaaacgccagtgttgcctgtgaagagagaaacagtt

SEQ ID NO: 9923 - DNA, 120 bp, synthetic construct
  source 1..120: mol_type = other DNA
ccagaacccgttctgcagctgaactcgaagctgattctggaaggaactgaggaggatgaggacgagatccttctacctcaaccgggatcaattttttaatgatttctttcttttagaaaa

SEQ ID NO: 9924 - DNA, 120 bp, synthetic construct
  source 1..120: mol_type = other DNA
attcctgtttcaggtttgccagcattggagcaatcctggcatttattcacccaggacactagaaggctgaagtctgcagggtgcacatatttaaaatcacgggagcactggagtaatgga

SEQ ID NO: 9925 - DNA, 120 bp, synthetic construct
  source 1..120: mol_type = other DNA
gtcattaaacgcatggcaagctcgccttggaggcattttactttgctaatgacaacgaagcattctcattgcactgaatagtttagagcagtctttcatgtccactgcctctttgaaata

SEQ ID NO: 9926 - DNA, 120 bp, synthetic construct
  source 1..120: mol_type = other DNA
aattaaatctgtgactctcaactgggggaggtgggcacacacagagtgtggaagtgaaaatcctttttttcttccaaacctcacacagactcggttggtaatttccattgctagaattat

SEQ ID NO: 9927 - DNA, 120 bp, synthetic construct
  source 1..120: mol_type = other DNA
tttgacggtgggagagaacagagggaaactgagtccacgtccacatttgacggtgggagagaacagaggaaaactgagtccacatccacattggacggtgggagagaacagagggaaact

SEQ ID NO: 9928 - DNA, 120 bp, synthetic construct
  source 1..120: mol_type = other DNA
ggtgggcgagaacagaggaaaactgagtccacgtcaacatttgagggtgggagagaacagagggaaactgagtccacgtccacattggatggtgggagagaacagggaaactgagtccac

SEQ ID NO: 9929 - DNA, 120 bp, synthetic construct
  source 1..120: mol_type = other DNA
gcgactctgctattccacactatgctatgtaatagtcactgtcctctctgttctgtgctttgcgactctactactgcacaccatgctatgtaatattaataccatgctgtgtgttctaat

SEQ ID NO: 9930 - DNA, 120 bp, synthetic construct
  source 1..120: mol_type = other DNA
cgctttaccatgtcccactacataagagcagagccagttatactttcataatctcttttccaagctcttacccagtgcggtattcaaatgtgatgttttactatgccacacgtaagtgca

SEQ ID NO: 9931 - DNA, 120 bp, synthetic construct
  source 1..120: mol_type = other DNA
tggacctgccgctggacctgccactggacctgaccctggacctgcccctggacctgcccttggacctgtccctggacctgtccctggacctgacgctggacctgatgctggacctgtccc

SEQ ID NO: 9932 - DNA, 120 bp, synthetic construct
  source 1..120: mol_type = other DNA
tggacctgacactggacctgaccctggacctgccgctgggtctgctactggactgctaacaaatgctgcagacctttatggagagaaaagtacaatccatctgagagcagctgtcccagc

SEQ ID NO: 9933 - DNA, 120 bp, synthetic construct
  source 1..120: mol_type = other DNA
agggtatatgaagtaaacatgtagagagaaatgaccacacacacctgaaaccaggtctcatttcaaaaccgtttcctaccttggatttgcttaatttacttcatgaggtgcctccaggag

SEQ ID NO: 9934 - DNA, 120 bp, synthetic construct
  source 1..120: mol_type = other DNA
catagacacacggacggaggaaaagccacagacgcacggaaggaggaaacaggccacagacacacggaaggaggaaacaggccacagacacacggaaggaggaaacaggccatagacgca

SEQ ID NO: 9935 - DNA, 120 bp, synthetic construct
  source 1..120: mol_type = other DNA
agtatcgactaaaaggggccaccaggaagagagaagtcctatctttaaaaaaagaaagaattttttaaaaaagaggcactgaggctctgacccatctgagcacagagtacgtgttcggca

SEQ ID NO: 9936 - DNA, 120 bp, synthetic construct
  source 1..120: mol_type = other DNA
cccatctctactccccacacccaggctccccgcgcccgtcctccccacacccctgctccccgcacccgtgctccctgtgcccatctctgctccccacgcccaggctccccgcacccatcc

SEQ ID NO: 9937 - DNA, 120 bp, synthetic construct
  source 1..120: mol_type = other DNA
gatccacattaatcctgacagtcggtttattagccccattcaacagctggggacactgaggtggggagggatgggcttgcttaccctggacgatgctgacagtgtgggcccagcccggtc

SEQ ID NO: 9938 - DNA, 120 bp, synthetic construct
  source 1..120: mol_type = other DNA
ttttgcaggctatattatgagttctatcaaaataattcagcacctcctaaacaaatgggaaagagctccttctgaagcatgcactgcccaaaaagatcagtgaccagtcaacagagaaac

SEQ ID NO: 9939 - DNA, 120 bp, synthetic construct
  source 1..120: mol_type = other DNA
gaaactactctctctgatgctacaatggagggtacatgtcattatacatttctccaaacccacagaacgtacaacaccaagagtgagccctcatgtaaactgtagactccaggtaataat

SEQ ID NO: 9940 - DNA, 120 bp, synthetic construct
  source 1..120: mol_type = other DNA
tagctttctccacgtgtgggtgttgaatgaggctgatgtgttgatgctgctgcatgtggaattgcacgtcgtgctctcttctgcagtggagtcgttgatttgccgtcagtcacaactcat

SEQ ID NO: 9941 - DNA, 120 bp, synthetic construct
  source 1..120: mol_type = other DNA
ctttttaaaaaacgaaaacatccttagaccgtgtcctccattagttgctatcctgccttcttctctcagctgagctgtctgaaacatgctaacatgcttatacaatacttgctgtcctgc

SEQ ID NO: 9942 - DNA, 120 bp, synthetic construct
  source 1..120: mol_type = other DNA
ctgcagtttccgtctgatggtttctgtctgatggttgtccctttgtgttcatatcagtaacccccaaaatggggcagtgagggagagagcattgtttatatctgaaatataaattgtgat

SEQ ID NO: 9943 - DNA, 120 bp, synthetic construct
  source 1..120: mol_type = other DNA
atgtttagatacacaaatacttgctgttgtgttacaactgcccacattattcagcacagtcacacactgtccaaatttaggcctgaagcaacaggaaaaacagcctaagagcaactggct

SEQ ID NO: 9944 - DNA, 120 bp, synthetic construct
  source 1..120: mol_type = other DNA
cacagcccagctgctccactgtctacaccacacagcccagctgctccactgtctacaccacacagcccagctgctccactgtctacaccacacagcccagctgctccactgtctacacca

SEQ ID NO: 9945 - DNA, 120 bp, synthetic construct
  source 1..120: mol_type = other DNA
acttaaggaaatgattgcgtttgaatcgctctactggacagctttgtttcggcctgtcagattctgtcacttttctttgagatgactgtaagacagccatcaggctattgacacatactc

SEQ ID NO: 9946 - DNA, 120 bp, synthetic construct
  source 1..120: mol_type = other DNA
tgagctgcagggtttctggtgctcagcagcagagcagagaaacacttcatttaacaccatctttggagagcacgatgttccacagaagcgatttctccaatgatccctcaagaaccaaca

SEQ ID NO: 9947 - DNA, 120 bp, synthetic construct
  source 1..120: mol_type = other DNA
aaactttaactcagctggattgcattgctagcggtagttgtggatagagccagacaaggtgaagacacatgtgctcaggcctagaaatgaaagcctggcttgtgtttaattttaactcct

SEQ ID NO: 9948 - DNA, 120 bp, synthetic construct
  source 1..120: mol_type = other DNA
gtgatgatgatggtgatggtggtggtgatgatggtgattgtggtggtgatgatggtcgtgatggtgatgatggtggtgatgataaattgaacataaaatagttcgtatgactcaaaacac

SEQ ID NO: 9949 - DNA, 120 bp, synthetic construct
  source 1..120: mol_type = other DNA
atattgatagatctgatgcatcagatacgtgtcgtgtgcttgtgtgtgcacatatgcttatgtatgtgtttgtgtgtgcacatgtgcttatgtatgcgtgttcatgtgtgcacttgtgct

SEQ ID NO: 9950 - DNA, 120 bp, synthetic construct
  source 1..120: mol_type = other DNA
tacacacctgtgattctgtggatttgccagtgctgctcatggccatacctcacagtggactgtgggtttgacgtagcctgagtgggcagcttgtgtgtgattaaaaggaggaaaagagct

SEQ ID NO: 9951 - DNA, 120 bp, synthetic construct
  source 1..120: mol_type = other DNA
tctgcctcccggtgtttactcccctctgcctccggtggttaattccctcttgcctccggtggttaactcccccctgcctccggttgttaactcccccctgcctccgggtgttaactcccc

SEQ ID NO: 9952 - DNA, 120 bp, synthetic construct
  source 1..120: mol_type = other DNA
tactcccctctgcctcccggtgtttactccctgcatcccggtgtttactcccctctccctccctctggcgatactcccctctccctcccggtgtttactcccctcttcctcccggtgttt

SEQ ID NO: 9953 - DNA, 120 bp, synthetic construct
  source 1..120: mol_type = other DNA
agaaagaaattagctctgtagtaattggagaggggcaggtaacacaagcactgtctgaacatgttatgattctgtgtctggaaacctccagagaatccagttgacatactgctagaaaca

SEQ ID NO: 9954 - DNA, 120 bp, synthetic construct
  source 1..120: mol_type = other DNA
ctgcatattaaatgcaaggcatcaccatcaacagcccctttaagaatcattcgctcatgaaacacaagagtttctaaataaagcggtgccctgacagtttggctagtaagtattgtaggg

SEQ ID NO: 9955 - DNA, 120 bp, synthetic construct
  source 1..120: mol_type = other DNA
atagggctcactggattattttaagtaaatggctgtggtagttggccaagcatcctgctctctggggagaatgcctgagggtggaagcatttgttcagcatgaaagatggagtcccaccc

SEQ ID NO: 9956 - DNA, 120 bp, synthetic construct
  source 1..120: mol_type = other DNA
taataaaaaaaataaattaaaaaaaaaaagtatctcccactgtagtacacacagagcagtttccctgccctaaaatcccctgtgctccacctactcagccctccttcctccagctcctgg

SEQ ID NO: 9957 - DNA, 120 bp, synthetic construct
  source 1..120: mol_type = other DNA
ttggaaaactgaatgcaagtgaatttgaccattccccccatacttggtaaaacttacccattttggtgtcttgtccacagagtgaaacacacagagaacaggaagtcactatcttcagct

SEQ ID NO: 9958 - DNA, 120 bp, synthetic construct
  source 1..120: mol_type = other DNA
actgcacagcgcctcctcactgcacagtgcctcgtcacagtttagtgcctgcccacagttcagcgcctccccaaggcacagcgcctcctcacagttcagcgcctccccacggcacagcac

SEQ ID NO: 9959 - DNA, 120 bp, synthetic construct
  source 1..120: mol_type = other DNA
gattctggaacccctgactgtagtcaacgaagggcagcatccaggaaattggcagttaacagcagtggagggtggaagggataggactgcaaaatggcattggcctcgaagaaaggctct

SEQ ID NO: 9960 - DNA, 120 bp, synthetic construct
  source 1..120: mol_type = other DNA
ccacccgtgaccaagtgcagactttcaaaaaggaatgcattcccaacaatatgacacagaaggtttggaataactgcttttgatagaagttttgacggttttgaagctactctcacagca

SEQ ID NO: 9961 - DNA, 120 bp, synthetic construct
  source 1..120: mol_type = other DNA
atccaccagagaaccacgcgccccacagcggcaataaccagcatccaccagagaacaaagtgtcccgcagtggtgataatcagcatcaggcagagaaccacatgccccaaagcagtgata

SEQ ID NO: 9962 - DNA, 120 bp, synthetic construct
  source 1..120: mol_type = other DNA
gggctcttttgtgataactttttcctgagccactttcaccctctcactcttctttctgatgtgtgcaccccaggctcattgatcatggtattgctacattttctttcagccaggttttgt

SEQ ID NO: 9963 - DNA, 120 bp, synthetic construct
  source 1..120: mol_type = other DNA
tctcaggaatctcacgggcagagcagtaactttcccatgtagtcaggtggtttatttctccaggtcttggcctctagttgctacagaaaggcggctgctgcacctctgtaagtttgaaac

SEQ ID NO: 9964 - DNA, 120 bp, synthetic construct
  source 1..120: mol_type = other DNA
agatttcagaagtagtgatcaataaatggactcatctggaaattttccagtttgggtcaccagagaacagaagcaacctgtgtcaaagcttagcttgaatctcaagctgtgctagagagg

SEQ ID NO: 9965 - DNA, 120 bp, synthetic construct
  source 1..120: mol_type = other DNA
aatgatcgcgtaagtaatttgtttagagagcaggtcaaagagttaatagctgagcttgcaagtctaaatctaattatttcctcagcactgagctcctggctggtacacgggatgggtttt

SEQ ID NO: 9966 - DNA, 120 bp, synthetic construct
  source 1..120: mol_type = other DNA
catcagcctctcccctcccgagtggaggcttcctgggtcaccgtccgtctcttccctcccgagcgcaggcttcctgggtcaccatcagcctctcccctcccgagtggaggcttcctgggt

SEQ ID NO: 9967 - DNA, 120 bp, synthetic construct
  source 1..120: mol_type = other DNA
caccatcagtctctcccctcccgagtgcaggcttcctgggtcaccgtcctcctctcccgtcccgagtgcaggcttcctgggtcaccatcagtctctcccctcccgagtgcaggcttcctg

SEQ ID NO: 9968 - DNA, 120 bp, synthetic construct
  source 1..120: mol_type = other DNA
tctgcaaacttgacttgacctgcagccaaacagagaatttttctcttttcagatgtttcatctctgtggccacctgaaccccatctgcgtggggcgtgtggcttggccatcgctgtggca

SEQ ID NO: 9969 - DNA, 120 bp, synthetic construct
  source 1..120: mol_type = other DNA
cctggctgtggtcatggggaaggattctcctcgctgctgccacgagcacagtatcagggatggaaaggtttgggccagaggacttctcaggctgagataatgtaatctcatttcctgaga

SEQ ID NO: 9970 - DNA, 120 bp, synthetic construct
  source 1..120: mol_type = other DNA
tttactcatgagaaccgcttcgtccccttcccttcctgccacctctcactccctcctctcctttgggcagagtggctgaagcagggtgggcagacaaaggccctgaagaacactagctct

SEQ ID NO: 9971 - DNA, 120 bp, synthetic construct
  source 1..120: mol_type = other DNA
ctgaatctcctcagcagatggaggcaggtccttcactgtggggcttctgagtctcccccaggatggaggcaggttcttcactatggggctcctgagtctctgccaggatggaggcaggcc

SEQ ID NO: 9972 - DNA, 120 bp, synthetic construct
  source 1..120: mol_type = other DNA
gacagaggcaggtccttcactatggggcttctgagtctcccccaggatggaggcaggcccttcactatgggtctcctgagtctccgctgcacattagtgctgacaagctgagcagcacct

SEQ ID NO: 9973 - DNA, 120 bp, synthetic construct
  source 1..120: mol_type = other DNA
gcgttacgaacctgcctgtgacctgagtttacctgtgtaacgaacctgcctgtgacctgagtttacctgtgtaacaaacctgcctgtgacctgaatttacctgcgtaacgaacctgcctg

SEQ ID NO: 9974 - DNA, 120 bp, synthetic construct
  source 1..120: mol_type = other DNA
ttttgattgtctactcagatgagaaaagtagtcaacgcaatcaacttccttaaaatcagtatctgctgcacgccagggacagcaacagaagaaatcatttcagcaacaacgtgacacttc

SEQ ID NO: 9975 - DNA, 120 bp, synthetic construct
  source 1..120: mol_type = other DNA
ggccttactaagaacttgtgctctttgaaatgcactaagaatgaaaagagaagccacagacagggagaaaatatttgcaaatcacacagccaatgctggaccagtatccagaatagggaa

SEQ ID NO: 9976 - DNA, 120 bp, synthetic construct
  source 1..120: mol_type = other DNA
acacacgcactgggggcagtcacagcgggcagtgcactggagaagagggtggacacacactcggcggaggccccggtgacaccagcctcagtcacctcccgcagggtgaggacgctcaca

SEQ ID NO: 9977 - DNA, 120 bp, synthetic construct
  source 1..120: mol_type = other DNA
gtaagaagtcacagaatcctgaacgacaactttacagttcgatggtaattccaagacaatggtacagtcgtttcgtcctagctatgcagatgttcacggaaaacaatacttagctcccta

SEQ ID NO: 9978 - DNA, 120 bp, synthetic construct
  source 1..120: mol_type = other DNA
cccagaaggcaagctgataattagaggtgtaagagacagtttggattttatctgaatcgtggcagctctgacttgtttttaaaatctgggaaccaaatcaaggccccgattctcaacaat

SEQ ID NO: 9979 - DNA, 120 bp, synthetic construct
  source 1..120: mol_type = other DNA
cgcagttcagaccctggatcacagccgtccagaccccactcagacgtagttcagaccctggatcacagccgcccagaccacactcagatatagttcagaccctggatcacagccgtccag

SEQ ID NO: 9980 - DNA, 120 bp, synthetic construct
  source 1..120: mol_type = other DNA
gctgcgccaggtccttccaacttcaaagagttgcctgtgaagggcgtcctccaggtgggtctgcagtgcagtcaaggcctcctgcaattaatatgctgggaacacattttaaatagctcc

SEQ ID NO: 9981 - DNA, 120 bp, synthetic construct
  source 1..120: mol_type = other DNA
cacaggacctgaagataagatactgtggcctgtcggtcaccactctgtgtgcatagcagtgcaggtgacatcattacctttggggaaactgggagagatgctgcgcaggtgtatacactg

SEQ ID NO: 9982 - DNA, 120 bp, synthetic construct
  source 1..120: mol_type = other DNA
gtcacagtgttttgtgggcctgaggattcaggacacgtggtacttgcttgaccatatagtttattttaataatggaattatagagaatttctgttttccctctgggaggctggagtctga

SEQ ID NO: 9983 - DNA, 120 bp, synthetic construct
  source 1..120: mol_type = other DNA
ctatctaaaaacaaaacaaaacaaaacaaaatccatgttcttccagcatctgtggctgccacattccctgccctccttttaaagcagctgcaagcagctgagttcccagcctcagtggca

SEQ ID NO: 9984 - DNA, 120 bp, synthetic construct
  source 1..120: mol_type = other DNA
tgctcagcttgccttatttttcttcagagccatgaccacttcccagcataacatgcatgtgtttctgttttatgcgtggatgtttatgttccatgagaaccaacagtgggctggtttgtt

SEQ ID NO: 9985 - DNA, 120 bp, synthetic construct
  source 1..120: mol_type = other DNA
ccactgatgaaattttgttgaatgaatataaggccactactataatcgcgccagtttatggaacaaacagaaggctgacttgaggaagagagagcactccctgtctctataggacatttc

SEQ ID NO: 9986 - DNA, 120 bp, synthetic construct
  source 1..120: mol_type = other DNA
tctgaatcagctcaacccagtccacctgcatccctcctccactgcacattgctcaggaaacccttcctgtcagagagcccatgaagcccctcaagtcagagaggggcacctatagctgca

SEQ ID NO: 9987 - DNA, 120 bp, synthetic construct
  source 1..120: mol_type = other DNA
agcaatctctgtgtagcgctggtatcttgtaagtgataaattattataatgaaagaaaatcttcttgccagttcatcttggaaaacacaagatcgacctccggccggcatccttcacctc

SEQ ID NO: 9988 - DNA, 120 bp, synthetic construct
  source 1..120: mol_type = other DNA
cctccataggtctcctctctggcatggtcccctctgtcacccagctcccttcacccaagccacgctccatcggtctcctctctggcatggtcccctctgtcacccagctcccttcgccca

SEQ ID NO: 9989 - DNA, 120 bp, synthetic construct
  source 1..120: mol_type = other DNA
acataggaagggcattgatggtggcttgcatttctatagagggtcccagtgggagtgtaactggattgaaatcatcattcaaaactactgctgctagaactttgtatttctcttctgttg

SEQ ID NO: 9990 - DNA, 120 bp, synthetic construct
  source 1..120: mol_type = other DNA
ccgtccagacacactccacaccgccctgctgtgctctgcctcctgggaactgacctcagagggttacattctgtcgctagatgtttgtgtgcctctccagacacactctgcactgccctg

SEQ ID NO: 9991 - DNA, 120 bp, synthetic construct
  source 1..120: mol_type = other DNA
aattgctgtccacttttttcccctaaggctgcatctccccgggagcttcatcatgccctttagtttctgtgacattctctgcacctttaagacgacttcctttattaaatttcttactta

SEQ ID NO: 9992 - DNA, 120 bp, synthetic construct
  source 1..120: mol_type = other DNA
ccacgctcgctccagcatggacacaggcctccactggacctcagctcctgcatggacacaggcctccactggacctcggacactaaccccacatctgcccacgctctctcttgcatagac

SEQ ID NO: 9993 - DNA, 120 bp, synthetic construct
  source 1..120: mol_type = other DNA
aaactggctcaagctgttcgccagggtgtcccctagcaacacagagtccacgagtaacatgttccttggaagtttaggttattattttttaattttgagaggtttgtggttacttgattt

SEQ ID NO: 9994 - DNA, 120 bp, synthetic construct
  source 1..120: mol_type = other DNA
tcagaataaaaagcgtatacagcctagcatgaagtagtcacgatcgtgatttgataaactgtgcagatatcgttggccaaaaacctcaagttactcctgtcaagccctttggttgtgttg

SEQ ID NO: 9995 - DNA, 120 bp, synthetic construct
  source 1..120: mol_type = other DNA
tgggttcagggatgcacggaagttctggaggcttgggttggggggtacatggatgttctggaggtttgggttcagggatgcgtgaatgttctggaggtttgggtttgggggttcatggat

SEQ ID NO: 9996 - DNA, 120 bp, synthetic construct
  source 1..120: mol_type = other DNA
ttttgacagtagtggataaccataacccattcattagatggaattaccatgcagtcaccatgttttagagacgaccctcaaacccctcttgaatacaaaggctgaggagggaagatgaag

SEQ ID NO: 9997 - DNA, 120 bp, synthetic construct
  source 1..120: mol_type = other DNA
atgtttcttatttaagtaactttacttgtctttcattcttttagatacataccctcctcccacagaaggcaggaagatcaatacctgcctttgcagacctgacacatccgtgcccatctg

SEQ ID NO: 9998 - DNA, 120 bp, synthetic construct
  source 1..120: mol_type = other DNA
tacaggcgtgagccaccgtgcccagcctcatgtccagcttttaagaattttattccttcttctatgtctttccacttaacatttcctaaaatccccgagttcttcatcattcctttatga

SEQ ID NO: 9999 - DNA, 120 bp, synthetic construct
  source 1..120: mol_type = other DNA
ccttctgagcactggcaggtttcccctgtctgctttctaagccatgtttccctttggtgaaatggttgctactattattctttgctcatttatctgtgtatccatttgtttatcatttgc

SEQ ID NO: 10000 - DNA, 120 bp, synthetic construct
  source 1..120: mol_type = other DNA
ttccccagcacagtcccccaccccttccccagcacagtcccccactccactctccagcacagtcccccactccactctccagcacagtcccccactccactctccagcacagtcctccac

SEQ ID NO: 10001 - DNA, 120 bp, synthetic construct
  source 1..120: mol_type = other DNA
cgtcttgggaacataaattctcatggaccctcagaccgccaggactttgtatgagtggtgggttctataaccagctgtagcaataaatgttgaatccatttatggtatcatcattttgct

SEQ ID NO: 10002 - DNA, 120 bp, synthetic construct
  source 1..120: mol_type = other DNA
ccctatcattttctatgggtgggtctttaatttggggcttaatagaaagcgagtccattgaggatgagttaatccacatcatggagtggtcgctatgttcctttcatgacctctttaggc

SEQ ID NO: 10003 - DNA, 120 bp, synthetic construct
  source 1..120: mol_type = other DNA
cccctgtccctccctgctgtcacccagcacacctttcaccaccttctgatgtcattgggaagcagctcttaggaagttaggcaaagattcctgcccagaaagaggccagttcagtttgag

SEQ ID NO: 10004 - DNA, 120 bp, synthetic construct
  source 1..120: mol_type = other DNA
ctaagtacacgcaggcataaacagaggaggcaaggatcactccattcctggcctgagcacatggaaagggtagagttgcaatttatgaggactaggaagccctgagacacacttcttgca

SEQ ID NO: 10005 - DNA, 120 bp, synthetic construct
  source 1..120: mol_type = other DNA
acttatgaattttcttaggtaagaaacggttgaactggatgcaatttttatcacagcttgtgtaagactgcctctgtccctcctctcacatgccattggttaaccagcagacagtgtgct

SEQ ID NO: 10006 - DNA, 120 bp, synthetic construct
  source 1..120: mol_type = other DNA
ttgtatctcaagactgtcttgggaatacaatgtgtgtgaatagggactagttacataaaatttgggtttcacatttctgatctatacaatataaggatttacaaagggacattttgaaga

SEQ ID NO: 10007 - DNA, 120 bp, synthetic construct
  source 1..120: mol_type = other DNA
catagaagaagaatcctaaatctaactcctaattcctttctatgggatacattttgaatccatacttccgtgattgcatgtctataagaaaagaaagtgcagaactctcaaagcctctgc

SEQ ID NO: 10008 - DNA, 120 bp, synthetic construct
  source 1..120: mol_type = other DNA
catcacctacctcatggaggattagtgtccttaaatgtacctcagagcatggctatgtgtggagaaattgacttgtgacatcactaaactgactgcttctacttcagccaggtgaggaag

SEQ ID NO: 10009 - DNA, 120 bp, synthetic construct
  source 1..120: mol_type = other DNA
aattagaagttagatgagagtgttttattacattgacttaaacctttggggcaagaaaatatttttatcatgctgtgtttttcaaattgcaccacactagactgcatacaatcacagaat

SEQ ID NO: 10010 - DNA, 120 bp, synthetic construct
  source 1..120: mol_type = other DNA
tgaacttcttccttcaattagcaatgtactgtgaacgtaattactgtaatgaccaccatcagagtagacaaagattgttgttctttttctcattgtcgcactaattactacagactcacg

SEQ ID NO: 10011 - DNA, 120 bp, synthetic construct
  source 1..120: mol_type = other DNA
ataagacaaacccacttaatatagaggcttaatgcaaaagcatttattgagctcaaggttccatggttagaaaattagcctgggctcagcctaaactcagtccattccttctgttcctgg

SEQ ID NO: 10012 - DNA, 120 bp, synthetic construct
  source 1..120: mol_type = other DNA
catcttattaacttccacaagcaaataaatgtttagtctcttgttgacattgtaataagcctccagatcaatgtggagagaactaaatgtttgacaatattgagatttccaatgcatgat

SEQ ID NO: 10013 - DNA, 120 bp, synthetic construct
  source 1..120: mol_type = other DNA
ggcctaaacagaaatgtgcgatatttgacccttgatatgtaagtaattttggagatggttgtcctaatttattttcagaggaggaacgtaggatgggtgttgagagtgacctccacacca

SEQ ID NO: 10014 - DNA, 120 bp, synthetic construct
  source 1..120: mol_type = other DNA
agtgatgagcatatgtcttgcttattcctcttcaatgtaaggcagtatagttccatttttactgagaatttgaaatagaaaaggtcagtatatctctttgctctgttgacagatgtagag

SEQ ID NO: 10015 - DNA, 120 bp, synthetic construct
  source 1..120: mol_type = other DNA
taggctgaaaaatccccctaaaaatatttctagctcagatttttcctccaaattctgcaatagaagatcacaatgtgaactctgcatctccatgttaaagtctaatggacattcacactt

SEQ ID NO: 10016 - DNA, 120 bp, synthetic construct
  source 1..120: mol_type = other DNA
ctttcttgctttatttatagaacacttacagagtagatatagattaaatcttaaggaccctaggattgttagaatagtaaatgaacatcatatgttgtaatatagttagccagggagggg

SEQ ID NO: 10017 - DNA, 120 bp, synthetic construct
  source 1..120: mol_type = other DNA
tcatagcccctcttcccccattgcctgagaaaccactttccctgggcaacttagggcaagctcaaatcccactgctaccaccacagctggtgctcttttgcaagtgccacctcctagctg

SEQ ID NO: 10018 - DNA, 120 bp, synthetic construct
  source 1..120: mol_type = other DNA
tttcccaacaggactgccttttggcaatgtacctaatctgatagctttcttatagagaggctgaaacagattactgctgtttccgtgcctgctaatacaacgtgcattctgtttcccatg

SEQ ID NO: 10019 - DNA, 120 bp, synthetic construct
  source 1..120: mol_type = other DNA
tcaatatgaatttaacttcagtttcatctaaaaccatccacttccccaggttttctccacttcacatagttttggtcagtaattacagcttcctacattgcatacgtattagcttagaat

SEQ ID NO: 10020 - DNA, 120 bp, synthetic construct
  source 1..120: mol_type = other DNA
aatgaacgtgactttatcatatctgtattttcaaaataaagaataatttaattctattcccctgcctggaacttaacacataaaacacacaaagtgaaatgttcaaacatgtttctctac

SEQ ID NO: 10021 - DNA, 120 bp, synthetic construct
  source 1..120: mol_type = other DNA
caataatggtgcttttgcatctacactctgcatttgattttaacacttcctcattctctacactgagatctccatattgcagaacaccaaggccaagtgctcctattcgctccactaaga

SEQ ID NO: 10022 - DNA, 120 bp, synthetic construct
  source 1..120: mol_type = other DNA
tatcatataaatgatagattaattaggaacatgccctctaacaatcacatgtccctgtgtccacttgcttggctatatgaatttccagttccttccagtaagaggtggtgtgtgtttccc

SEQ ID NO: 10023 - DNA, 120 bp, synthetic construct
  source 1..120: mol_type = other DNA
gaaaaattggggaagaagatagtgattgcaagagtgagaatttctgtttcctccttaggaaagtggagagattaatgtacaggcaaggaaagaaatcccagtcctccttacccccaattc

SEQ ID NO: 10024 - DNA, 120 bp, synthetic construct
  source 1..120: mol_type = other DNA
atattacaaaataaaccactcctgtcaatggtcttcaaaatgtccctttgtaactccttatgtcttatagatgagaaatgtgagactcaaattttatataactagttcctattcacacac

SEQ ID NO: 10025 - DNA, 120 bp, synthetic construct
  source 1..120: mol_type = other DNA
gaaataaacttatttatttctggagtggctcagtagagattcagggtgactatacacatacagatgttataggcaaaaggccaggggaagagacatgcaatagtccatctaagctattga

SEQ ID NO: 10026 - DNA, 120 bp, synthetic construct
  source 1..120: mol_type = other DNA
gaattctctttgataagaaacaaatgaactgaatgcaattttctccacagaccatataagactgcctatgtacctcctcctacatgccattggttaaccatcagtcagtttgcaggggtg

SEQ ID NO: 10027 - DNA, 120 bp, synthetic construct
  source 1..120: mol_type = other DNA
atcttaaaagacaaatgtattactcagacaagcactgacatcaaaaggaaactacaaaaacaggtcataggtccaaataacaccgcacctccccctgtgcctgagctgtcttttctgtgt

SEQ ID NO: 10028 - DNA, 120 bp, synthetic construct
  source 1..120: mol_type = other DNA
taccgtcttaattaccctgggttccatggactcactagacatgggggcaaaggattctggacacccttagttattagttgttggcaccagcagtgaagagatttcctcctgtgatggtcg

SEQ ID NO: 10029 - DNA, 120 bp, synthetic construct
  source 1..120: mol_type = other DNA
acattgacgtttctcatcgaatccttcacttaaccttcatgaggtggttattgccatcccatttatcagagaaggaaattgaaattcacagaggttatcggcccaaaccctcaggcaaat

SEQ ID NO: 10030 - DNA, 120 bp, synthetic construct
  source 1..120: mol_type = other DNA
tgtgtgtatgtgcgtgtgtgtatgcgtgtgtgtatgcgtgtgtatatgcgtgtgtatatgcgtgtgtatatgcgtgtgtgtatgcgtgtgtatatgcgtgtatgtgtgtgtatatgcgtg

SEQ ID NO: 10031 - DNA, 120 bp, synthetic construct
  source 1..120: mol_type = other DNA
gtgcatgtgtatggttgtgtgtatgcatgtacatgtgaggtatgtatgtgtgtgcatatgtgtgcatgtatatgtgtgtgcatgtgtatgtatgtgcatatgtgtacgtgtgaggtgtgt

SEQ ID NO: 10032 - DNA, 120 bp, synthetic construct
  source 1..120: mol_type = other DNA
acgggggccgctggaagtgagggtggcacaggctggagtgacagtgtgcctggccttggaccgaggtcggtcctgagaccccaaactgcgattttccctgcctgtggcaaaggggcgggt

SEQ ID NO: 10033 - DNA, 120 bp, synthetic construct
  source 1..120: mol_type = other DNA
ccaactcaaagcactgggacaatgctggatgtgatagatggtcttactaatttgatagcttcaaggagttagcaaactgtagggtgggtgaagaattcatttgacaaccatagaaacaga

SEQ ID NO: 10034 - DNA, 120 bp, synthetic construct
  source 1..120: mol_type = other DNA
ctcaggtaaacacccacacaggtaaacacccactcaggtaaacaaccacgcgggtaaacactcacgggggtaaacacccactcaggtaaacacccacgcaggcaaacacccactcaggta

SEQ ID NO: 10035 - DNA, 120 bp, synthetic construct
  source 1..120: mol_type = other DNA
gctatcacactcagcctattttctcatttcagtcgcaagttctgtgtgggtaaaagcaatgcgtatttattctctgacttgatagccttgttactcaaaatggggttcatgcacccacaa

SEQ ID NO: 10036 - DNA, 120 bp, synthetic construct
  source 1..120: mol_type = other DNA
tatgtgggggcaatagtcactaaaggcttctgagatgcacttgaaagataagtaggtggggtgcttctgagaagactcttccatgttctttttcctgccagttgcacatgttttaaaaaa

SEQ ID NO: 10037 - DNA, 120 bp, synthetic construct
  source 1..120: mol_type = other DNA
aactcttgggctcaagtgatgctcccgcctcagcctgtccagtagccgggactataagtgtgcaccaccacacccggctaattaaaaaaaatttttttttttttttaattgatcattctt

SEQ ID NO: 10038 - DNA, 120 bp, synthetic construct
  source 1..120: mol_type = other DNA
agggtgtctaggaccctgctttttatagacaaagaacagtaaaacaacaaaacaaaaattactatatcaataagctgcattatattcttgccttggaggcaccttaacgggatgccctgt

SEQ ID NO: 10039 - DNA, 120 bp, synthetic construct
  source 1..120: mol_type = other DNA
gtgattaccccatctgtccaagacagtggtgggtgtctgaagggagggacaggtgcaaacacctcaggcgcccctctctttgtttttttttgtttttttttgtttttttgtttttttttt

SEQ ID NO: 10040 - DNA, 120 bp, synthetic construct
  source 1..120: mol_type = other DNA
gcatagggagaatggctctgctttgccaagaagggactggcagtttatttgggtttgaaatccagtctgaccttttgccctgtgtatttactctgctgtctttattgttgttattgttat

SEQ ID NO: 10041 - DNA, 120 bp, synthetic construct
  source 1..120: mol_type = other DNA
gttgctgtgggtattaaacaaaatagtgtgtgtggaaatgaatctctgcattggtcctcagtgggcaattgataactgatggcagctgtccttctaggaagcaatttaaaagccaggaaa

SEQ ID NO: 10042 - DNA, 120 bp, synthetic construct
  source 1..120: mol_type = other DNA
taatgggagcgatggaacagctctgaaaacttaagaagcagtacatggggccatataagtaatgaacatctagttgtacacaaaataagtgtcctgggtccttaaggcaagaggaatcca

SEQ ID NO: 10043 - DNA, 120 bp, synthetic construct
  source 1..120: mol_type = other DNA
tcctgggagaaagagtaattttatattgtgcctatttcatttacaggacttgggtgtcggttattgatctcaactgtgatttgagctttccttagaaaaaggtccccccaccctgtagtc

SEQ ID NO: 10044 - DNA, 120 bp, synthetic construct
  source 1..120: mol_type = other DNA
gtggatggatggatgtgagtgtgtgtgtgcatgtgtatgtggatgggtgtgtgtgagtgtatggatgggtggatgatgggtgtgagtgtgggtgtgagtgtatggatgggtggatggatg

SEQ ID NO: 10045 - DNA, 120 bp, synthetic construct
  source 1..120: mol_type = other DNA
caataaaagcagctatgccagtgggctgttgaatgccagtgggctgttgaaggattaggtgaattaacacacgcaaagaacttaacattttctgtgcctgccacacagtctgaactcata

SEQ ID NO: 10046 - DNA, 120 bp, synthetic construct
  source 1..120: mol_type = other DNA
aaattattagaacaagatgacatcaggtgtttcctcatggcttgtattcaaaggcacactgctctaacccagtccatacctttatggggttatgtgggaaggccacatatgtataagcct

SEQ ID NO: 10047 - DNA, 120 bp, synthetic construct
  source 1..120: mol_type = other DNA
ttttgggtcaagatatcgtagatggaggcatgaagctaagtatttgtgcatctacacacagcttaccatgttcgtctggtttccttccagtgtggctgtagtgataagaactcttatatg

SEQ ID NO: 10048 - DNA, 120 bp, synthetic construct
  source 1..120: mol_type = other DNA
gagcgagactctatctcaaaaaaaaatgaaggcactgcaggatttttgcacctgcccagggacaagaacaatgaacatatttcattaaacccaccttctcatcctactgaagaatgcaac

SEQ ID NO: 10049 - DNA, 120 bp, synthetic construct
  source 1..120: mol_type = other DNA
ttaagctggcatttttttttccccacaggacggatattctgctttaggaagagctattcaatctctctaccctccttccctcagctcagcagctacaggctccttatgaccttgtaaggc

SEQ ID NO: 10050 - DNA, 120 bp, synthetic construct
  source 1..120: mol_type = other DNA
gtccagagaacagggtaagcacattccagacagatcagaggatgcccagagaggcagaagttgtgtcctctgagcctgtccagaggaaaagggaacatcacttcagggactggacaagat

SEQ ID NO: 10051 - DNA, 120 bp, synthetic construct
  source 1..120: mol_type = other DNA
acggatttgtgtgttctggacatttcagctaaatggaatcatacacatgtgaccttttcagtctggcttctttcacttagcataatgttttcgagactccgtcacactgtagcatgtgtc

SEQ ID NO: 10052 - DNA, 120 bp, synthetic construct
  source 1..120: mol_type = other DNA
gcccatgttgtagcgtgtgtccatgttgtagcgtgtgtccatgttgtagcgtgtgtccctgttgtagcgtgtgtccatgttgtagcgtgtgcccatgttgtagcgtgtgcccatgttgta

SEQ ID NO: 10053 - DNA, 120 bp, synthetic construct
  source 1..120: mol_type = other DNA
aagcaatggttagatgtgattagcatctaagcctaggaggagacaatcactgagactgttgataataacaatattaataaaaactgagtgacagcctgggcagcacagcgatacctcacc

SEQ ID NO: 10054 - DNA, 120 bp, synthetic construct
  source 1..120: mol_type = other DNA
atggcagctatgactgtggtttggtcaagaatcaccaaaggggatttccctagatgaggtctgttcaaagcaagaagacagagaagaaataaaacaacccaagatttggggaaaatggtc

SEQ ID NO: 10055 - DNA, 120 bp, synthetic construct
  source 1..120: mol_type = other DNA
aaatgcaaattaaagcaatgacaagatcccactgtacagctattaagatggccaaaatccagaacactgacaacatcaaatgctgacggagatgcagagcagcaggaactctcattcact

SEQ ID NO: 10056 - DNA, 120 bp, synthetic construct
  source 1..120: mol_type = other DNA
caaagctaacatatacaaagcactttcattactgcagtgagtataatatggattcagaatggggaaagacttctgtgaggtaaagcaactggaagaagcctggggaggaggtagatcttg

SEQ ID NO: 10057 - DNA, 120 bp, synthetic construct
  source 1..120: mol_type = other DNA
tgggactgcatggaacccatagaccaatttggagagagttgagatcttcacaatattgaattttctgattaaagaatataaggctgggcatgacaggtcacacctgtaatcccagcactt

SEQ ID NO: 10058 - DNA, 120 bp, synthetic construct
  source 1..120: mol_type = other DNA
aacacagaactttccatagtgagattcagagtgcacatcataggcaaatgaatgaattagtcctagttaacacagagctctccatagtgagactcaagagtgcacgccataggcaaatga

SEQ ID NO: 10059 - DNA, 120 bp, synthetic construct
  source 1..120: mol_type = other DNA
taacacagagctctccctagtgagattcagagtgcactccataggtgaatgagtggattagtcctagttaacacagagctctccctagtgagattcagagtgccctccataggcgaatga

SEQ ID NO: 10060 - DNA, 120 bp, synthetic construct
  source 1..120: mol_type = other DNA
tctagaagttaagatacctcacttccattttaaagtcttttactctaatgtttggcttctgaacccttaatccggtccatgtgtcacttctgaaaagaagcagtcaagccaggtctcccc

SEQ ID NO: 10061 - DNA, 120 bp, synthetic construct
  source 1..120: mol_type = other DNA
tttttgtttgttttttcagcctgtactgtcttcagaactgcctgttttgctaggtgtgcatcttactccttgcttctgactgctgcgtgggtcctataacatagatcacccacatgttat

SEQ ID NO: 10062 - DNA, 120 bp, synthetic construct
  source 1..120: mol_type = other DNA
actatcatgttttctactttatcctcagtgtgttgcacagggtctagcccatcatggccactcagtaattactggatggttggatggatggatgatgggtagatagatggatgggtgagt

SEQ ID NO: 10063 - DNA, 120 bp, synthetic construct
  source 1..120: mol_type = other DNA
gagtgtgtggtgggtggatgagggatgagtgcgtggtgggtggatgagggatgagtgcgtggtgggtgggtgagggatgagtgtgtggtgggtggatgagggatggaggggtgggtggat

SEQ ID NO: 10064 - DNA, 120 bp, synthetic construct
  source 1..120: mol_type = other DNA
gtgtgtggatgagagatggatgtgtggatgacggatgggtgggaggatagtggatctgtggatggataattaagtggatggatggatagttgggtggttacgcggaatgatggatggatg

SEQ ID NO: 10065 - DNA, 120 bp, synthetic construct
  source 1..120: mol_type = other DNA
cctcgtaggcagccgtgtcaactcttcaagaaatggcaccaggaacaacatttaacccggtcattggtgattcatctgtggatccaaaaaagtaagatatgtatctctgttttcatattc

SEQ ID NO: 10066 - DNA, 120 bp, synthetic construct
  source 1..120: mol_type = other DNA
cttaactttatatacagaagtcaggatcatctgatcagtttttttagttctttttctgagcttcttctgtcacacccacctggaggaatcttggtcccagatcagctcatgcatctgttc

SEQ ID NO: 10067 - DNA, 120 bp, synthetic construct
  source 1..120: mol_type = other DNA
actgtgtcctcctctctcacctccccctcaggacactgtgtcctcctctctcacctccccctaaggacactgtcctcttctcgcacctcccactctggacactgtgtcctcctctctcac

SEQ ID NO: 10068 - DNA, 120 bp, synthetic construct
  source 1..120: mol_type = other DNA
gtacaattcatcataacatttgggcagggacaaatatccaaactttatcagtgtgttagagagaagtcaggccctgttctcttctctggggtgtatgttttgtgatgatggcgatgatga

SEQ ID NO: 10069 - DNA, 120 bp, synthetic construct
  source 1..120: mol_type = other DNA
tttggatcgtttccttgagacacgctgtttcttagtcatagtgtcctagctttttgccttgattagttgaatgattgattgccttaattctccatttggcttggcctgtgtagacatagt

SEQ ID NO: 10070 - DNA, 120 bp, synthetic construct
  source 1..120: mol_type = other DNA
tagaatttccagaaggtttgagaagaattagcctctgtctttgtcatcctttcctttcatggggttgtttttcttattggattcaggcaagcaaataattaggtcttggagggctggggg

SEQ ID NO: 10071 - DNA, 120 bp, synthetic construct
  source 1..120: mol_type = other DNA
cataagcttttaagaatccaattttaaaatgtgcaccttctggagaaaacaatgttatattttacttggagaacactttagtggaaatgaccctttcaaaggatttggtaaatgcatgtg

SEQ ID NO: 10072 - DNA, 120 bp, synthetic construct
  source 1..120: mol_type = other DNA
ccgtggggagagggagagggagagggagcgggagaggtatatgatatatttcatatccaatttaaactttatctctactgagtctttactgactctttctttcgtggtgtttatgtgtgt

SEQ ID NO: 10073 - DNA, 120 bp, synthetic construct
  source 1..120: mol_type = other DNA
ttgtttatctggctgtgagattatttgaatggaaggaagtggctcataagtcactccaagtaccatctcctggttatcattccataaagtgattctgtcctcctttgcagactgacccaa

SEQ ID NO: 10074 - DNA, 120 bp, synthetic construct
  source 1..120: mol_type = other DNA
atcagaagtgtcttgagcaccagttggtacaagtattattaggtctgaagacacagaaacagaatgcatgcaactcctgttctcatacaggaagcatgttaaggactgtaatgggatgtg

SEQ ID NO: 10075 - DNA, 120 bp, synthetic construct
  source 1..120: mol_type = other DNA
taaattatttaaccgttcttgaaggaccacagatttcaagtgagatgatcacatcataagtgtctccaagactgtggatgaagccccctgtggtgggctaaatcctagatctcttgtgct

SEQ ID NO: 10076 - DNA, 120 bp, synthetic construct
  source 1..120: mol_type = other DNA
tatcaaatttgctttctctttctttgttgtctgcatcctttcaagctgcctttcaggcctgctgtttgcaacagagttgggcagaaaaagtagctcattattggtggatttgggcatttg

SEQ ID NO: 10077 - DNA, 120 bp, synthetic construct
  source 1..120: mol_type = other DNA
ctgacctcagtattatgagagagaaagcaaacaggtcagcttaatgtatgctaagggctacatcattcagcccttgaagaattatttatttattgcctaccttctgttctgggcactggt

SEQ ID NO: 10078 - DNA, 120 bp, synthetic construct
  source 1..120: mol_type = other DNA
cgtatccttgaaacaattgtcttccgtgaaacgggttctttgtgccaaaattggggatcgctgctctaggacacgagctgggatcaggatagatggtgggggtagggtggaggaaggaga

SEQ ID NO: 10079 - DNA, 120 bp, synthetic construct
  source 1..120: mol_type = other DNA
aggaaggagatgtgagaaggctcaggcattgatcaggtgagactgtgagaaggctcaggcattgatcaggtgagactgtgagaaggctcaggcattgatcaggtgagactgtgagaaggc

SEQ ID NO: 10080 - DNA, 120 bp, synthetic construct
  source 1..120: mol_type = other DNA
gccatgagggccaatggtgaaagatgagacggaaacaaaattaattttgctggcctgctgtattcataggacatgctatcattaggttggcgcaaaagtagttgtggtttcttccattaa

SEQ ID NO: 10081 - DNA, 120 bp, synthetic construct
  source 1..120: mol_type = other DNA
ctcattgttcaattcccacctatgagtgagaacatgtggtgtttgagatagttattcttatttgatgggagaaagctgactacacagggattcttcactaggaaattggcccccactgtc

SEQ ID NO: 10082 - DNA, 120 bp, synthetic construct
  source 1..120: mol_type = other DNA
atacaataccctactgttaactattaacatcctacagtgctataggacactcgaacacattcctcctacctcactgtaatttctgtcctacaacaaatctcccccatcacctactctctc

SEQ ID NO: 10083 - DNA, 120 bp, synthetic construct
  source 1..120: mol_type = other DNA
ccgagtgcccagtgacacggacacaccagcaacattccacagaagcagctcaaagggcgtcaggagagggagcccaaaatgccctctgatattgatctgctttcccacgtcctccacaaa

SEQ ID NO: 10084 - DNA, 120 bp, synthetic construct
  source 1..120: mol_type = other DNA
tatagtacctggcagagttgggagctagcagaaatgtttataccacagaaatcttacagtgttgtgacatggctcagacacaccatgatttgggtttagatgagggtcagagaataattg

SEQ ID NO: 10085 - DNA, 120 bp, synthetic construct
  source 1..120: mol_type = other DNA
ctttctcttggttttacctacggtttgctctgacacagtgcgctgtttgcagtatctgtctttggacagacttttcctcctcctgtgccatttggaagactctaggcagaattgtagcta

SEQ ID NO: 10086 - DNA, 120 bp, synthetic construct
  source 1..120: mol_type = other DNA
cccttcactgtgggaatggctatcttttttgccttttcactcacagctctgttcctgactatatccccactgaaccactcattaacgtttaaaatgggcatgttttctctgcaagatttt

SEQ ID NO: 10087 - DNA, 120 bp, synthetic construct
  source 1..120: mol_type = other DNA
ctttgacaaatactgacccctgcagcagatgactgtgagccaggggccaaaactttcaaggaacgaatgaggagctacgaccacgaaatgctagcactgagggtagaggacagaatacga

SEQ ID NO: 10088 - DNA, 120 bp, synthetic construct
  source 1..120: mol_type = other DNA
atcctaaatcccagaatcgtcggcaacataataaatggcaacaccaggagagctggcatctgacgatgtctgtgggacacagtgcataggtagattttaacacactgagattgctatttg

SEQ ID NO: 10089 - DNA, 120 bp, synthetic construct
  source 1..120: mol_type = other DNA
tttagtccactaatgtcctaaaacttacagtgtctaaggtttgggtgttaaagtatttttgcatttctggaatgaaacatcttattcatgatgtactatttaacactgctagattcagtt

SEQ ID NO: 10090 - DNA, 120 bp, synthetic construct
  source 1..120: mol_type = other DNA
acatggaacatgagactacttgaaatgagaagacagcgcagaggactgaatatggaaatcaatgacttttttcaatatgtaaaattactgagacattgtagaactttgataccatgcaaa

SEQ ID NO: 10091 - DNA, 120 bp, synthetic construct
  source 1..120: mol_type = other DNA
ttttaaaatctaagaatatcagaagaacgtgaggaaagggaacactcacatgctgttggtaaaatgtaaactgaaacaaccactttgtaaagcagtctggcattgctgctgccaccacca

SEQ ID NO: 10092 - DNA, 120 bp, synthetic construct
  source 1..120: mol_type = other DNA
ttgcgatctttggacattttttattcacctattttatggaattgtaatagatctttgtgctacgtgtgtgcacatgccctggtgttctggttggaatcccaaaacacttcactagaagga

SEQ ID NO: 10093 - DNA, 120 bp, synthetic construct
  source 1..120: mol_type = other DNA
gttgtttcatttttcagctgtgggctctgcctaatcactagctttcttgggctgtcatggctctggatgaataattagcatggagtgagcactagctcgtttgaggaataatcttcttaa

SEQ ID NO: 10094 - DNA, 120 bp, synthetic construct
  source 1..120: mol_type = other DNA
tgaaatatgtcagaagtaaacattccttgttaattatatagcaaagtatttgcccggtggtcaattatctaatcattcttgttgaaagcaatcaaactgaagagcaaaagttatgtgcag

SEQ ID NO: 10095 - DNA, 120 bp, synthetic construct
  source 1..120: mol_type = other DNA
ctggctccagagtccaggactcttaagcgttacaatatactgccttttaataccttgaagaagacataatgagaggacaagtcctttatgaattagtttgtacctaaaagaaaaatgttc

SEQ ID NO: 10096 - DNA, 120 bp, synthetic construct
  source 1..120: mol_type = other DNA
ttaatgacagatagcttaagatagttgaagacagcgtaagtctgtgttttggtatcacagcttggtatcaccagcttaaggtatccccccttaagctgggatgttgatgttgtactacag

SEQ ID NO: 10097 - DNA, 120 bp, synthetic construct
  source 1..120: mol_type = other DNA
ccaaaagaaaaaatttctttcatgtatgcaacagacctaggatagtcacttcatctctcataaatcaaagattacaagtcacaatgtggctgggtgcggtggctcacgctgtaatcccag

SEQ ID NO: 10098 - DNA, 120 bp, synthetic construct
  source 1..120: mol_type = other DNA
catgtctgcaaacaggacaatctgacttcctcttttccaatttggatgccttttatatctttctcttccctaatggcttaggctaggacttccagtactatgttgaacagaagtagcaga

SEQ ID NO: 10099 - DNA, 120 bp, synthetic construct
  source 1..120: mol_type = other DNA
ttatcccattgataaggatcttcactttgatcgcgtaagtctgcctggcctctccattgtcaatgtcttgttttcccctcttgtaattagtaaatttgggaaaaggaggacgggtacttt

SEQ ID NO: 10100 - DNA, 120 bp, synthetic construct
  source 1..120: mol_type = other DNA
tatgatccatacacagtttaaattcttgtcatacattccattcgaatcagaatcaggagaggcaaaggtattattcgagcctgtcagataaccaccacatccttgctgaggccctgcatt

SEQ ID NO: 10101 - DNA, 120 bp, synthetic construct
  source 1..120: mol_type = other DNA
ctttccctccctccctctatctttccctccctccctctatctttgcctccctcactctatctttccctccctccatctttccctccctcactctatctttccatccctccctctatcttt

SEQ ID NO: 10102 - DNA, 120 bp, synthetic construct
  source 1..120: mol_type = other DNA
caggtagtcatgggagcaggaggtggagggaaccacatcaaaatcactgaacctgtgaaatgtaccttgttaatactgatgtttccatttggacttctattaaattgtagctttagctct

SEQ ID NO: 10103 - DNA, 120 bp, synthetic construct
  source 1..120: mol_type = other DNA
ggggatgatggcaaggcccacatgtcagaaaacagggcattccctagtgggttctgtatcttagaaaaaagtgttaagtgtagcttgcactcttgcaggatttttttttaagttgaaatc

SEQ ID NO: 10104 - DNA, 120 bp, synthetic construct
  source 1..120: mol_type = other DNA
ggattggggcgccagcagtagaacaagcttgtgtttcaaggtgagtatcagttataaagctggtaagagaatctggagtatgcttcagcctaaagaatcatctaaggacatagaaaacaa

SEQ ID NO: 10105 - DNA, 120 bp, synthetic construct
  source 1..120: mol_type = other DNA
tttctcccattgttgggcatttaggttgttttacacatacacgcaggcacatatttgtatagatacacacatatgtgtatatatttcaacatctatatctcgatatgtaaatatagatag

SEQ ID NO: 10106 - DNA, 120 bp, synthetic construct
  source 1..120: mol_type = other DNA
tacacagacagtgaatcagtgggtctgtgcaaacgagggccagtgagaaacaccctagtgtcctaactgaaggaagaggccatttccagtgacagcacactcatcagttcacctggagta

SEQ ID NO: 10107 - DNA, 120 bp, synthetic construct
  source 1..120: mol_type = other DNA
gaatggaatcgaatggagcatggaatggaatggagaatgctatggaatgcattggagaatggaacagagtggaatagagaatgggatagaatgcagtggtgaatagaatggaatgaagga

SEQ ID NO: 10108 - DNA, 120 bp, synthetic construct
  source 1..120: mol_type = other DNA
ggatggtatggagaatggaatggaatggagcatagaatggaatggagcatggaataaaatggaacatgaaatgcagtgatggagaatggtatggagtggaatggaaaatggggtatggaa

SEQ ID NO: 10109 - DNA, 120 bp, synthetic construct
  source 1..120: mol_type = other DNA
ggagaatggaatggaatggagaatggaatagaatggagaatggaatagaatggagaaaggaatagaatatggaatagaatggagaaaggaatagaatatggaatagaatggagaacggaa

SEQ ID NO: 10110 - DNA, 120 bp, synthetic construct
  source 1..120: mol_type = other DNA
tctaactatggccttgaagaaaaataagatacagatctttaacaccaggtgaactaaaagtaaggcaactgtcccagtttgccagggactgagggatttcccaggactttcaaatgctga

SEQ ID NO: 10111 - DNA, 120 bp, synthetic construct
  source 1..120: mol_type = other DNA
tagtggagacccaagaaaaataaaagcaagccctttttattaacattttacttaacttgttttgaatgaagcaggcatgcgtcaagaaaatttccttgaattttgtcaaaggctttttct

SEQ ID NO: 10112 - DNA, 120 bp, synthetic construct
  source 1..120: mol_type = other DNA
tatcagtttggttaaaaccagcaataaaaaataggaacagccaaggtgattttgaaaccatgagatggtcattatttacaggtgtaacagacattttttgaaggaagtaattgcttgtat

SEQ ID NO: 10113 - DNA, 120 bp, synthetic construct
  source 1..120: mol_type = other DNA
agacaggcagcaagtcaataaatagaaagcgctgcagatggtgttaactgctacacagcagaagggaaacaaggaaagggtttgttagtgatggagcatttctttctgaatggaacacaa

SEQ ID NO: 10114 - DNA, 120 bp, synthetic construct
  source 1..120: mol_type = other DNA
caatatacgcaaatcaataaatgtaatacataccaactttttatgtctacctctttcatctttatgtaccacatgtaacaaatttttatcacagtgactgcatgcatctagtctaaaagt

SEQ ID NO: 10115 - DNA, 120 bp, synthetic construct
  source 1..120: mol_type = other DNA
atcatttcctctctatccatttacttgtggttcgttgttatgccacattttgatacattacataaaaatttggcattattgttgtcatcgtttttaatatttaccgtcaagtgtactgct

SEQ ID NO: 10116 - DNA, 120 bp, synthetic construct
  source 1..120: mol_type = other DNA
cccatgggagtcaggaaaagcaaaataaaatttagagtatgaaacctccaccagccagtatgtttatgtgaaaattcagcagaaatagacagttgctttaaccaataaagttaacatctt

SEQ ID NO: 10117 - DNA, 120 bp, synthetic construct
  source 1..120: mol_type = other DNA
agcaaagcgggacaggaggtacaaggatgatcacagagaatagaaaaggatgcggaataaatattgtagggctgtatatcagggagtcacttacatagaaaactagtaaagaatgtgcag

SEQ ID NO: 10118 - DNA, 120 bp, synthetic construct
  source 1..120: mol_type = other DNA
tgtcatatattctcttctgaaaggtatctgattgaggaaggtgtaccagcctgctgtgccttctttgtcatttcctctttctcatatgtccttttctttatctcaaaactgggttggggc

SEQ ID NO: 10119 - DNA, 120 bp, synthetic construct
  source 1..120: mol_type = other DNA
agattgagaaagagattttcagtctagagggcataagcctgttcagacgagttagatgagagatgatgaggacttgaacctgagcagcagtgattgcttaatacaagtcatgggtttgaa

SEQ ID NO: 10120 - DNA, 120 bp, synthetic construct
  source 1..120: mol_type = other DNA
gggggggggagagggtgggagggagggagggagaccagtacattaaatttctctaagccaacattttttctcatttgtacaacatattaataactatatcataggaatcttgtgaggatt

SEQ ID NO: 10121 - DNA, 120 bp, synthetic construct
  source 1..120: mol_type = other DNA
agtcattatgagcttatcctttgatgttgttttataaaagcactctatgggggtttggacattctcttgaaggaacaagataaaggtaatttctggtgagactcacatagtcttggagag

SEQ ID NO: 10122 - DNA, 120 bp, synthetic construct
  source 1..120: mol_type = other DNA
tctaatacatgtagacacacccaatttaatgctttgcatggcatagttatgcaaagcctagttcttaagtgcggtggtctcaatgtgtcccccagaattcatatgattgaggcttaatcc

SEQ ID NO: 10123 - DNA, 120 bp, synthetic construct
  source 1..120: mol_type = other DNA
atttaacaatagaaaaagattcaaggtttcatggaagtgaacaagtccagtagtaggtcacatctagatagacttgcgcagggatctggctttttccccttccttccttccttccttcct

SEQ ID NO: 10124 - DNA, 120 bp, synthetic construct
  source 1..120: mol_type = other DNA
tatgtgctatacatacacacaacctattatacaaacactacatatatacacacatacatttgtacatttgcgtatacatatatacacatatttaatagtatatacacaggctatataaaa

SEQ ID NO: 10125 - DNA, 120 bp, synthetic construct
  source 1..120: mol_type = other DNA
aggcaattaaaacccaaagcatctaaagaaattattgggatacattagatatttgggtggaaaaaaaagaaagaaggaaggaatagactctcgatttgggaatgttggtacaatgcagat

SEQ ID NO: 10126 - DNA, 120 bp, synthetic construct
  source 1..120: mol_type = other DNA
gaaagagattgaggaaaaaaaataaaaataaaagatggctgggtaagggaagaagagatagggaagagagacagaaaaggtagaatgcggctgggtgcagtggctcacacctttaatccc

SEQ ID NO: 10127 - DNA, 120 bp, synthetic construct
  source 1..120: mol_type = other DNA
tctctcatttgcctgatttgaagcatttcaacagtgcctggagagtacattattttcaggggaaaaaaaggagagagtcttttttatatgccagctgggatcatgggaacttcgaatgcc

SEQ ID NO: 10128 - DNA, 120 bp, synthetic construct
  source 1..120: mol_type = other DNA
tctatttaagagagtctgtaactcaggaggttgggatttgaaaagtcagcccctgaactactgttgcactcagcacagatgtaatcgccgctcttcaacttaatcaatgtatgtacaaac

SEQ ID NO: 10129 - DNA, 120 bp, synthetic construct
  source 1..120: mol_type = other DNA
ttaactaagggcataatctgttgggtgaaatagagaaaaataaaggctagggaatttgagaaatgtgtctatatagactttgtgcaagtatctctatatgtacactcagacacctttaca

SEQ ID NO: 10130 - DNA, 120 bp, synthetic construct
  source 1..120: mol_type = other DNA
caattcagtctgacctctttcctctggagcgaagtaatgcacacggcatttacagtcttttaaatggttagctgggaaatgcaatagcaatttgcaggagtagtttactaatggggaaag

SEQ ID NO: 10131 - DNA, 120 bp, synthetic construct
  source 1..120: mol_type = other DNA
gactttgttctgtggcattattgagttgcttgaaaacagtttctttctgttgggtctttcatgttttctttgactggaccagggctgtgtttagggttaattttttcctccttctgaaga

SEQ ID NO: 10132 - DNA, 120 bp, synthetic construct
  source 1..120: mol_type = other DNA
tctcattagcatttctacgtgctgctcttcttggtggggagaataccttttgcacttatggatgggtaaagataagcatataatacaggggatggcaaacttttcctctaaaggaccaga

SEQ ID NO: 10133 - DNA, 120 bp, synthetic construct
  source 1..120: mol_type = other DNA
acaatgttcttctggcgtctactcatactgtattcttctcctgagatcactgtttgtctccatcttttcacatctagtgggctgaaaatgcagcatttgagaagtcactgccatctcttt

SEQ ID NO: 10134 - DNA, 120 bp, synthetic construct
  source 1..120: mol_type = other DNA
gtcatactatttgcctttggtgtcttcctactgatcttagcaaaaattcagaacacctgtacatggcttacaaggccttatgatctgttccttcccctctctccaactttgtcttttacc

SEQ ID NO: 10135 - DNA, 120 bp, synthetic construct
  source 1..120: mol_type = other DNA
ctagtagaagttaaaaacttagaataacttgaaacttgatttgtgctgggaaaaggagatacttgtaaaattggcgggtggggggtggggaggggagtctgatagcagcatacattttgg

SEQ ID NO: 10136 - DNA, 120 bp, synthetic construct
  source 1..120: mol_type = other DNA
acattgcgggaagagcggactcctgtccatgtgactgttaatcatggatcagggtagaggtataaattagtttctgtaggagtgtcattaatttttcattttgcctttcaaatcctgctg

SEQ ID NO: 10137 - DNA, 120 bp, synthetic construct
  source 1..120: mol_type = other DNA
tattagcaggcatgagataataagagattggactaggatggtagcactgagggatttccaaggaagagatgaaaacacagagaggtagggccaggataaactggacttgtaaaacaagaa

SEQ ID NO: 10138 - DNA, 120 bp, synthetic construct
  source 1..120: mol_type = other DNA
cggccaataagcgattgccctctattgacaaactaggtaaaccagtcctcgaaacctttggagttaacttggtaattgggagagttaaggaggactgatatttcatggaatataatcaca

SEQ ID NO: 10139 - DNA, 120 bp, synthetic construct
  source 1..120: mol_type = other DNA
tgctctgttgtatgtttgcagagctctctctacttctcctatagtggcatacatcatagcatgttgggattatctgtcacaacccgtttagaagttccttgaggtcaaggacaattgtgt

SEQ ID NO: 10140 - DNA, 120 bp, synthetic construct
  source 1..120: mol_type = other DNA
taattcagatctgcatttggtaacaggagaattgagagttttgatgctttgctggttttcccacagtgggagatgtagataccattgccccaaactatgcacttttcaggtaagctttac

SEQ ID NO: 10141 - DNA, 120 bp, synthetic construct
  source 1..120: mol_type = other DNA
atgagtacttcactgagtttggttttcatttttcctacaccgaagccacctctgtccatccaatgttcatgtctgtccgaggctgcgcaggaggttacgtcaagatgtggccaataaagt

SEQ ID NO: 10142 - DNA, 120 bp, synthetic construct
  source 1..120: mol_type = other DNA
cagtcacatgatttgtaatgacataggactcaattgtgtaactacaccatcatttaatctcactgttgtgcattcacaattttccccccattttggccattatcaacagagttgcatgat

SEQ ID NO: 10143 - DNA, 120 bp, synthetic construct
  source 1..120: mol_type = other DNA
ctcatcctcagactgctttattttctgctctggctttcttctctgttgttagagtctctgttgctcaatattctcatcactgctactcatccatccctgtggttccagtcccatagcttc

SEQ ID NO: 10144 - DNA, 120 bp, synthetic construct
  source 1..120: mol_type = other DNA
cttttctttgttttgctctgccctaccctttggcctctctgagcctctccccactggactaaaagctcctcaagaacaaggaatgttctaatttgaatagtttattttcatctcctgtat

SEQ ID NO: 10145 - DNA, 120 bp, synthetic construct
  source 1..120: mol_type = other DNA
ttgagtgaaagaagccagacaaaatcaagtacatatgggatgattccatttatggacgactctagaaaatgcaaactaaaacagatcagtgtttgggctgcggatgagtggagttgggat

SEQ ID NO: 10146 - DNA, 120 bp, synthetic construct
  source 1..120: mol_type = other DNA
ccgaggatctgggacagtggattgtaaacttggtggcggcagggtggggactgacccctgtgagaatccgaggaaatgaacaaatgatccccctaaatgtgcgcataattttttttttct

SEQ ID NO: 10147 - DNA, 120 bp, synthetic construct
  source 1..120: mol_type = other DNA
taccaattaaatttgttttgttttgtttcttttgttttgtttttttctgtgaatattgacaatccgattctaaaatttacatggaaatgcaaagatccaataaagctggggcactcttgc

SEQ ID NO: 10148 - DNA, 120 bp, synthetic construct
  source 1..120: mol_type = other DNA
gttcctaaagaaaacaaaattgatgtgttataactcacatagacttattcccagggtttgaggagaaagttgggatctggagagactaggattggagaaactgacaagtttggccaggct

SEQ ID NO: 10149 - DNA, 120 bp, synthetic construct
  source 1..120: mol_type = other DNA
tcacattttcaattttgctctctgagagcagaatctaaagattaattcattttagtgataaatgaaaaatgtgattttcaatgattttgacattttatctgtacattttagggttatcca

SEQ ID NO: 10150 - DNA, 120 bp, synthetic construct
  source 1..120: mol_type = other DNA
tcttattactctgctgtatattgtttcaacctcacggttcaaacagtaggatccatgctctagcggaagaagtaagaaaaggaaggaaactaggaaaaaaggaaggaaaaccgggaaggg

SEQ ID NO: 10151 - DNA, 120 bp, synthetic construct
  source 1..120: mol_type = other DNA
atgtgaaccgtgtctcaaagaaggttcctcagagctgccacagaccattcccatctgaatcctactgaccagaacgtggtcatttggacacacttagttacgaaagaataaaattataaa

SEQ ID NO: 10152 - DNA, 120 bp, synthetic construct
  source 1..120: mol_type = other DNA
tcctggcattttaagaagaaagccgcatacatagatcaaatcccttccttcagaaacctgtactctctgaacagagccttggaattcagcctagagaaagaatacttggtggttcataga

SEQ ID NO: 10153 - DNA, 120 bp, synthetic construct
  source 1..120: mol_type = other DNA
ttagtcagtaactctggcaaagtgggtatactgacttcgttttcacaggtgataaaactgaagccaaagaggtctttcccaagctcacacatctgatcaatgttggacactggatttgaa

SEQ ID NO: 10154 - DNA, 120 bp, synthetic construct
  source 1..120: mol_type = other DNA
tcctagtgtatgtctgcgccggatgcttttccttttagcagtctcggcattcactttgtgattccctactccaaacatgtcatccgcaggggctctgggtctcagttttaaccgatctgc

SEQ ID NO: 10155 - DNA, 120 bp, synthetic construct
  source 1..120: mol_type = other DNA
agaagtgacctggggctctctttcaggatggcaaagcgacagctgagagttggtgacttgttgtgttttgagttgtgtggtggtgagggttcttcagaaggcgtgctctcttttcctagt

SEQ ID NO: 10156 - DNA, 120 bp, synthetic construct
  source 1..120: mol_type = other DNA
atgataaaagcaagagtaacttcatgtttgttggtagatgccaaccatgccagcatagggaatgggagaaggggatggtgtagatggagaaggactttctttttattatacctttctgca

SEQ ID NO: 10157 - DNA, 120 bp, synthetic construct
  source 1..120: mol_type = other DNA
agcactagctggagccatgcttcttttcctgagaaggtcatttgtactctgacatcccattgagatgacagtctattttttatgattttaaaattgatgttgtgtcaactatcttatcaa

SEQ ID NO: 10158 - DNA, 120 bp, synthetic construct
  source 1..120: mol_type = other DNA
agattccattatactccagggtgggagttgttggatgacacctccaagagcaaattaaaattcactctgcagaaacatttaggaaactaattacacacatttgtccctatgcctttggtt

SEQ ID NO: 10159 - DNA, 120 bp, synthetic construct
  source 1..120: mol_type = other DNA
tttgcctatgtttatgccttctataagtggaatcgtataatatttattcatttgtatctgacttattttatttagcataatgttttcaagattcattgatatggtaccatatattataac

SEQ ID NO: 10160 - DNA, 120 bp, synthetic construct
  source 1..120: mol_type = other DNA
cacctgggtcctgttctgcctccacccaccctgtctgcctcgcccatttttaatccctatgaaaccaagattagtagtatgttaaaccaaatataaacagatagttttttctacttctcc

SEQ ID NO: 10161 - DNA, 120 bp, synthetic construct
  source 1..120: mol_type = other DNA
ttacagaagaggaaacccagctgggcaatattcacataaagaactgtacaacctcaagagcagttaaggaaatgcaaagttaaactgcgattccatttcacatccattggttgtggagat

SEQ ID NO: 10162 - DNA, 120 bp, synthetic construct
  source 1..120: mol_type = other DNA
taccatgttccttcctcttgtttttgtatgtatattctccctgttttgggtgtggggaggggaaggaggatgccaaagtatgtacgggtacatgatattctgggtaattttctaagatat

SEQ ID NO: 10163 - DNA, 120 bp, synthetic construct
  source 1..120: mol_type = other DNA
accatccactccctatcgttctccagtaacagtctgtagcagccaaatgggtccataaaaacagaaaattcagggcccttcaattaaatggataattggatttcttcctcttttgtctta

SEQ ID NO: 10164 - DNA, 120 bp, synthetic construct
  source 1..120: mol_type = other DNA
gcacagtgcagatgtttataattttagtgaagcccaatttatcaattttttatttcatggatgatattgttggtgttgcatataaaaacttatttccaaacccaaaggtatctagatttt

SEQ ID NO: 10165 - DNA, 120 bp, synthetic construct
  source 1..120: mol_type = other DNA
caaagaaatagaacagcagatggaggaaactggaagtcaggggaggcagtttgttgttgtttgtggggtgggtgatataacagagaaaattcaatgatgtaggaatgagagaaaaagcag

SEQ ID NO: 10166 - DNA, 120 bp, synthetic construct
  source 1..120: mol_type = other DNA
acatctaaccttttgaaaatttataatgtgatttattttgtattcctgttaaattttgctgaatagtaattaaaaatgaccataccttgatcaccaatgacctaacactatctccaacaa

SEQ ID NO: 10167 - DNA, 120 bp, synthetic construct
  source 1..120: mol_type = other DNA
ggctgggataggagacagcaataatttataaagtgtataatttataaagtgtatttgttattaatcactagagatcactgaacccaaaaggacttaactgtgatactttactgtgaaaaa

SEQ ID NO: 10168 - DNA, 120 bp, synthetic construct
  source 1..120: mol_type = other DNA
ctattccagtattggcagaggaagggctatgcgtctattagacttaggccaaatttggcatgctggtttctaccaatagcacatgctggtgattttacttttcagaactcacatatttat

SEQ ID NO: 10169 - DNA, 120 bp, synthetic construct
  source 1..120: mol_type = other DNA
aagattcgtgagacttctgccattccagtcccacaggaaacagtaaacctgctcacagacccagtacatcgttattactaccaacatctgagaaaatcatcacacaaagattctctgtaa

SEQ ID NO: 10170 - DNA, 120 bp, synthetic construct
  source 1..120: mol_type = other DNA
acttaattgacattgtaacagtattaagaagtggggcctttaagaagtgaataagacctgagggctctgcccttatgaacggattaatgctgttacaggggggttgggctcctaataaat

SEQ ID NO: 10171 - DNA, 120 bp, synthetic construct
  source 1..120: mol_type = other DNA
cacctcagagagagtggtgttggcaaagttctccactgccagttctttttttctttcccccagatgacatgctttctaggagtccaggagaggtaatcacaggaggccctgtggttcagt

SEQ ID NO: 10172 - DNA, 120 bp, synthetic construct
  source 1..120: mol_type = other DNA
ggaactactcatccatcactcacatgtggagaggtgctgaacccaggatatttatcctgatattgtttcccacatattcctcatctcacaggacagaagcaaacttttaaatcttctagc

SEQ ID NO: 10173 - DNA, 120 bp, synthetic construct
  source 1..120: mol_type = other DNA
taagaaagcgctgcaacccacctgctggggtggcctcagagaaggcctgacagggagtcagatgctcactacatcgtggcaaaaatgaagtcacttatccgaactgtgatatcagtagag

SEQ ID NO: 10174 - DNA, 120 bp, synthetic construct
  source 1..120: mol_type = other DNA
agtgaacgcagcctcaaggaactgtgagattgtaacaaaagcgctaatatccaccactctgaagctaataaaagtggctgacccttatcttccagacatgtcactttttttgtcaaactg

SEQ ID NO: 10175 - DNA, 120 bp, synthetic construct
  source 1..120: mol_type = other DNA
attatagttttctattttcttatcttccccacccaacgttgcaacagggcctgcacctggttttccaggtattcgcaggctttgcatagtccttggcattctgtgttctcccttgaatac

SEQ ID NO: 10176 - DNA, 120 bp, synthetic construct
  source 1..120: mol_type = other DNA
acattgacatggttataatcacaatacacagcagcccagcagttcagaagctttaaatcatgtttaaaactattgttttaattgaaggggagtaggaggaagccagggcagtggcaccca

SEQ ID NO: 10177 - DNA, 120 bp, synthetic construct
  source 1..120: mol_type = other DNA
ttccagatttgttagggagaattattaatcatatcccctcaccccaccaaaagaaaaacagcagtgaggtgtgacttaatcacaaaggactccatctgcctttgtgcctcaatttagagc

SEQ ID NO: 10178 - DNA, 120 bp, synthetic construct
  source 1..120: mol_type = other DNA
actgctgacaagcagcaaggtcatgaacctgtctctcctcgaagtcttcagcgctcaaggtaggttgatattgtatattgagaccacattgttttatttaatgatggtacactgcattgt

SEQ ID NO: 10179 - DNA, 120 bp, synthetic construct
  source 1..120: mol_type = other DNA
aaggaggttcttaaaactttgccaggaattgttacccatttccaaaaacagtttattatgttcaaaaaccaccatatctttgagggactgtttgaaaggggagagggcaacgcgggaaat

SEQ ID NO: 10180 - DNA, 120 bp, synthetic construct
  source 1..120: mol_type = other DNA
aaataatgccacctctgctggcattgtggggagtggggggacctgactgttggtctagattaggctcagcccctgactgggtgtacagcttcaggtgtgccatcccagcccccgatgtgc

SEQ ID NO: 10181 - DNA, 120 bp, synthetic construct
  source 1..120: mol_type = other DNA
gatggcatcccaagggcttagattcaagaaaaaaatgtattattgggagtccccaatttagtacgttatcaagtgaatcagggcttgtttctctaatcagtcttgaccaaaacttctttt

SEQ ID NO: 10182 - DNA, 120 bp, synthetic construct
  source 1..120: mol_type = other DNA
tggggtaggatttgcacacagcctgtgcacatccccgctgtgtactttaaatcatttcgtgatgacttataatacctaatacaaggtaatgttatgtaaatagttgttctgctgtattgg

SEQ ID NO: 10183 - DNA, 120 bp, synthetic construct
  source 1..120: mol_type = other DNA
gccacacacacacacacacacacacacctctctttcaaagtgaaatgcaccaaataagttatttcccaaaattaaaacagaagttcttttcctattgctcagaaattgcagtgaggctta

SEQ ID NO: 10184 - DNA, 120 bp, synthetic construct
  source 1..120: mol_type = other DNA
tatgatctggaatttcaatggcagcagacactgagcatataaatgtgccagattcacctttcttgaaatttcgggcacttgttctggggctgtcatagatctgagctggatacactgacc

SEQ ID NO: 10185 - DNA, 120 bp, synthetic construct
  source 1..120: mol_type = other DNA
tgttgggactacaggcacggccattgagcttggctccaaagtaaatcttaacataataaaagacctaaaatgagatgctggctggagcccctcaaatatgttttcttttgagaccaatcc

SEQ ID NO: 10186 - DNA, 120 bp, synthetic construct
  source 1..120: mol_type = other DNA
cttccacacctaaggtgatcctccattcttctaagggggcagtgcacccatttcactattcaccaggaacctcttttgcttcgtgctttttggcttcatttaaatttccactggctctct

SEQ ID NO: 10187 - DNA, 120 bp, synthetic construct
  source 1..120: mol_type = other DNA
tcataatgcggggttctcacacatacctgtgtcctagtgtgtgatatacttacagaactaggcattctagttctatttcgtgtatattgcagtcatacttctgtgctctgcactgagatg

SEQ ID NO: 10188 - DNA, 120 bp, synthetic construct
  source 1..120: mol_type = other DNA
tcacataaggctctagtatatggtacatgtgccttatctgccagagagactcttaacctgttttcaggaagccaaaatcacatgtgctgctgaagaaatctaatacaaggttacaaccag

SEQ ID NO: 10189 - DNA, 120 bp, synthetic construct
  source 1..120: mol_type = other DNA
tctttttttgccatcagaaatttctcctaaaaaataggcatctttcacactacacactaccaggctgcacaagtaagaataatgaaatacatttcttctcagaggttagatatgtgaaca

SEQ ID NO: 10190 - DNA, 120 bp, synthetic construct
  source 1..120: mol_type = other DNA
gatattctgcctacttgttctagcaactgaaagaaaagtgagaaagagaagtgttgagaaaactaactgtaatagctttatctatttctcttttctgttctgtccattattgcttcaagt

SEQ ID NO: 10191 - DNA, 120 bp, synthetic construct
  source 1..120: mol_type = other DNA
ttgggcattcatttttgtgtgtgcgaattgcttgtgcatattcttactgggtggttcatcttatgagtgtttaagaattctctgtaaaataaagatgtcagcctttagtcatatgtgttg

SEQ ID NO: 10192 - DNA, 120 bp, synthetic construct
  source 1..120: mol_type = other DNA
aagccttaacaatagactagacaaaccagaagaaagatttcagagcttgacgactagtctttcaaattaacccaatcagaaaatggccgaataggaacagctccggtctacagctcccag

SEQ ID NO: 10193 - DNA, 120 bp, synthetic construct
  source 1..120: mol_type = other DNA
gggagggggaggagaaaataaggtaatacgggtacacatgatatgataaactgcagacacatgagggaagcgaattagaagactgggaaaatttagaaacttttgatgcctactgacaag

SEQ ID NO: 10194 - DNA, 120 bp, synthetic construct
  source 1..120: mol_type = other DNA
aagcctaattcaaaaatcaggagtttatttttatttaattgaggcaacttaaaatgcaagctcatagacgagaagagtgcagtaaaacttttagaaacagaaaaagggcaactgaattag

SEQ ID NO: 10195 - DNA, 120 bp, synthetic construct
  source 1..120: mol_type = other DNA
gtaccagaaaccacccacagctttgtgggcaagttggggatggaaagattcaagagacttcatttttagcttgttacttgtcctaatgatagtagaccaggaagatccccatttaatagt

SEQ ID NO: 10196 - DNA, 120 bp, synthetic construct
  source 1..120: mol_type = other DNA
gtctgctatgttgttcagtgctggcttttctgattcatgattttccctgttgaaataaagttcaatcaattacttatctacaacataaatattcagcaaatgaacattatcttcccaaca

SEQ ID NO: 10197 - DNA, 120 bp, synthetic construct
  source 1..120: mol_type = other DNA
acatcccagatgatgggtggctgggcagaggctctcctcacttcccagatgatgggtgggcgggcagaggtgctcctcagttcccagacggggctgccagtcagaggcgctccttgcctc

SEQ ID NO: 10198 - DNA, 120 bp, synthetic construct
  source 1..120: mol_type = other DNA
caacagcagcagcagaaaccatgacaaacaattatggtattaatgagggcagacggaaacatttggaaatgaggatctctttgtggccttgatgatgatgatattttcatgggtatattc

SEQ ID NO: 10199 - DNA, 120 bp, synthetic construct
  source 1..120: mol_type = other DNA
ctttttcttgtctgttatttccttgactctgttcatatatactctgattctttccaattcctgttttactggatgttccttaggattaactccttgggttgccaaataaacccaaaacat

SEQ ID NO: 10200 - DNA, 120 bp, synthetic construct
  source 1..120: mol_type = other DNA
gggggggggggggtctaatttctctggctagaaactccattgtagtgttaaacagaagtgataagacatccttatcttgtttttactttagtgggaaagcattaaccattaagtataatg

SEQ ID NO: 10201 - DNA, 120 bp, synthetic construct
  source 1..120: mol_type = other DNA
gttttttggagttaggccattctaataactgtgtaattgtgtttcattgttgttctaatgcacaatttcctaatgacatatatgttacacatctctttatatgcttacttatcatctgta

SEQ ID NO: 10202 - DNA, 120 bp, synthetic construct
  source 1..120: mol_type = other DNA
gttttgaattaatccatcaaacacaaagaaacaagaattttcaaaaatgaacaaagactccaagaagtttgggactatgttaaatgttcaaacctgagaataattggagttcctgagaag

SEQ ID NO: 10203 - DNA, 120 bp, synthetic construct
  source 1..120: mol_type = other DNA
agaactcaccatactgtttaccacagaggctgtgccattttcctctgtatctactcatctgtttctttagttttaggggcactggtttgctctgtgacctcaattctcatatggatctaa

SEQ ID NO: 10204 - DNA, 120 bp, synthetic construct
  source 1..120: mol_type = other DNA
gctctaagatgttcataaagttaattctgcttaatattgggatgaaacctctctcccagcgtagcaggataagtaaggatctatccaccatgattcagagagcccaaggacagtcttcaa

SEQ ID NO: 10205 - DNA, 120 bp, synthetic construct
  source 1..120: mol_type = other DNA
actctctgaatttttcccatggcctttgtagatcaactatttcaaacgtattttacaccagcaactctcaacatacttgtctttcagatatgtcatcagtcatgtctaacaggcaaatag

SEQ ID NO: 10206 - DNA, 120 bp, synthetic construct
  source 1..120: mol_type = other DNA
caaggccttgtataagctgttattaattgcctttaaaaatctgtcctgtttttctccaggtacttaaaacacaagtgccaataagtggtttgtatgtatttctgggggggggggggggat

SEQ ID NO: 10207 - DNA, 120 bp, synthetic construct
  source 1..120: mol_type = other DNA
ggcatttctgttgaggatacgttcctctcaggtagcagagaactcagctaatatagtgccggtggattgcaacagggaaagaagctggtattttaattcacatatcctccaatagtaaat

SEQ ID NO: 10208 - DNA, 120 bp, synthetic construct
  source 1..120: mol_type = other DNA
tcatggggaagataatattgtctctctacctatttgtctctatttctacatatcagcaggtagtcaactaagacaggggttggaggacgagctaattgtcattaatgcccctgattgaaa

SEQ ID NO: 10209 - DNA, 120 bp, synthetic construct
  source 1..120: mol_type = other DNA
aaatttactaatatgacagttggccttgtaaattagaaagaatgaatgaggagaagcagaaatcaagaagtcaaactggtgcaggcgcagtggctcaggcctgtaatccaaacacattgg

SEQ ID NO: 10210 - DNA, 120 bp, synthetic construct
  source 1..120: mol_type = other DNA
cagcaaatgtactagattctagtctgcattcgcttaaacaaaagatatctcaaaaaaaacattatacagtcatgcaccccataacaacgtcaatggaccacatatataatggtgatcaca

SEQ ID NO: 10211 - DNA, 120 bp, synthetic construct
  source 1..120: mol_type = other DNA
tggctgtgacacagacacttaggagcctagtgagagaactgtgtgacaatttgatagttcatcggtcaactctaggaggcacaaacacctaagttagaaatatgttgtctgtgtaaatca

SEQ ID NO: 10212 - DNA, 120 bp, synthetic construct
  source 1..120: mol_type = other DNA
gctgaggtatgctgtgagtatctggatttttaacagatcttgattgaatttggctgaggtatactgtgagtatctggatttttaacagatcttgattgaatctggctgaggcatactgtg

SEQ ID NO: 10213 - DNA, 120 bp, synthetic construct
  source 1..120: mol_type = other DNA
cactgaacacagaaaagtaatctgaacacagaacaataatctttttaagcaagaaaccattagtcatggatgttttcattcagcaaacagttgggtgccaactccgtgcccctcaccacc

SEQ ID NO: 10214 - DNA, 120 bp, synthetic construct
  source 1..120: mol_type = other DNA
cccatgaccctacactgcttgtgaccctgcgctgctcatgacacatgaccctacagtgctcgtgaccctgcgctgctcatgacacatgaccctacagtgctcgtgaccctgcactgctca

SEQ ID NO: 10215 - DNA, 120 bp, synthetic construct
  source 1..120: mol_type = other DNA
aagtaatgagagctgacaggtaattaaagttatctgagtgaacagcaaatatctgacatagtatgcttcacgggagaagaggataggacttcttttgtgaagaaataattaatacaaatt

SEQ ID NO: 10216 - DNA, 120 bp, synthetic construct
  source 1..120: mol_type = other DNA
aggcttagaattcaccagtaattcacatgagttctgaggtgaaatttgatcaaaagctaaagaattactccgagttcatctttgggcaattatatgactcagtggtatatctagacgtac

SEQ ID NO: 10217 - DNA, 120 bp, synthetic construct
  source 1..120: mol_type = other DNA
aatacccttagagggtaattgacattgtggacttcctggggtagtcctgagtaaaaagcacttaagcacctgtggtacatcaaaggtgagtcttaagattatatgagtaaacaagctagc

SEQ ID NO: 10218 - DNA, 120 bp, synthetic construct
  source 1..120: mol_type = other DNA
ggaatatgtagagagtgcaaaaaaaacaaccgaattatttgtttgaatccaagatactctaggacatgacgaaagtcaggaaacaagtaagggaaaaggagtaaaaagggaatgaagact

SEQ ID NO: 10219 - DNA, 120 bp, synthetic construct
  source 1..120: mol_type = other DNA
atatgctgctaaatttagaaccttctctgcaatgataagtacattgtacctttgaactctcatcacaactttgcaattcctaaactccaggacaaattgaagaacataatagctacatgt

SEQ ID NO: 10220 - DNA, 120 bp, synthetic construct
  source 1..120: mol_type = other DNA
ttagcctgccactgaaatgcaaaagtctgtcccaaataaagccttggaattgaaaaatgaacaaacattgagagcaggtaaatttttcaatgtaactatggaaagaccaatatttcaata

SEQ ID NO: 10221 - DNA, 120 bp, synthetic construct
  source 1..120: mol_type = other DNA
ccattgtatgacagtaccatagttaattgcacaatttttatgccgagaagtaataaataaaactgaaaacatgcaaatttgggagtctttaaaaagttagttttatctgctgatttctta

SEQ ID NO: 10222 - DNA, 120 bp, synthetic construct
  source 1..120: mol_type = other DNA
gagatgataggtaattacagttttctgaatgaacaggaaacctagggcatactgtgtttcacaggagaataggatatgactgctttgtgaagaaataattcatacaagttagtcaaattt

SEQ ID NO: 10223 - DNA, 120 bp, synthetic construct
  source 1..120: mol_type = other DNA
tagagagacactttaaactgcaatattgtaaaagttgggacctgaaaatttaatgcctgggacttgaacatattgacatatctttattgttcagtatagatctgaaggaacatttcagca

SEQ ID NO: 10224 - DNA, 120 bp, synthetic construct
  source 1..120: mol_type = other DNA
aaatgcaaaccatggaaaaaaagagaagtgcaatggtcataagttatgtgtctcatcaggtgatggcaacagactatattgtgagtgctgaagcggagctgaattactagtttgaattca

SEQ ID NO: 10225 - DNA, 120 bp, synthetic construct
  source 1..120: mol_type = other DNA
agagcctgaagtagtttttgtcattcccgtgaacgtttacaacattttacaacaggccttgcacggtggcacatgcctggaatcctagcagtttgggagacaaaggcgggcagataagtt

SEQ ID NO: 10226 - DNA, 120 bp, synthetic construct
  source 1..120: mol_type = other DNA
tactcattaaccatgaaaattatgacattgtgacatgtcatgagtctgaaaaattttagtttacactttttagaaaatatcagtaaataggagaaataggaaaaacattatggcccccgg

SEQ ID NO: 10227 - DNA, 120 bp, synthetic construct
  source 1..120: mol_type = other DNA
ctttccaaatctaaagtattcattctccaattggagcaagaggagtcagttagatactatcacggcattcatttgtggctggcttgtcatatttacttatgattgataataaatctattt

SEQ ID NO: 10228 - DNA, 120 bp, synthetic construct
  source 1..120: mol_type = other DNA
agaaactcttcttatgcatgtttaaacattttacaacatgtgtgcgtggtcatatttaatatgtacgatttttttcaacttctaatgtgtacatggttgtagagtgtagtgttcggcaac

SEQ ID NO: 10229 - DNA, 120 bp, synthetic construct
  source 1..120: mol_type = other DNA
agcagttcttaatttatacgcaataaaagttttttaagcttatcttcctaaagcttatacacacgcaaaacacacccaatacactgtcatagcatactgaaatgtaaaagggttggacat

SEQ ID NO: 10230 - DNA, 120 bp, synthetic construct
  source 1..120: mol_type = other DNA
atatatgattctgtcttatatctagaggtagaaaagttctaattgtattcatagagagacactttaaactgcaatattgtaaaagttgggacctgaaaatttaatgcctgggacttgaac

SEQ ID NO: 10231 - DNA, 120 bp, synthetic construct
  source 1..120: mol_type = other DNA
gctcagtcaccgagttaatggccacgtgaacgtaaagatgagcttgatgtagagagggttatgtgaggttttctatcaaaatgtgtttgttttctacatgtatctgctcttaagtcgaat

SEQ ID NO: 10232 - DNA, 120 bp, synthetic construct
  source 1..120: mol_type = other DNA
tgcacggccacacatgtatataaattgtcatatacactccgtatagaccagaggttttcaaactttagaaagtcagctgaaaaccttgttaacaattcacactgagattcagccgacctg

SEQ ID NO: 10233 - DNA, 120 bp, synthetic construct
  source 1..120: mol_type = other DNA
gagatattgagatgactaagctagaaattacaaaaatgttggcatactattcctacattatgggaatgaatacccatattccaagtatatgggtatgaaaatcaaggaatatttatattt

SEQ ID NO: 10234 - DNA, 120 bp, synthetic construct
  source 1..120: mol_type = other DNA
aagatggtcttctgaaggtaataacttttatatttttatcttgagtattaactacatattttatgaagtatacattgtatattaattgttttctttccaaacccatttaggctaactgcg

SEQ ID NO: 10235 - DNA, 120 bp, synthetic construct
  source 1..120: mol_type = other DNA
tataggctgtgtgtagaatttgttttcatgtcttaaattttctttttttttgtttgtatttttttcttcagtttttttgtttggttttgtttttgtttttttgagatcacccaggctgga

SEQ ID NO: 10236 - DNA, 120 bp, synthetic construct
  source 1..120: mol_type = other DNA
aatgtagactgtgggcactccagagactaccagaattgggggaaccacagtgactcattaggtttctctgttacaatcaggcatgagaaatatatatattttgttgatgttagctattga

SEQ ID NO: 10237 - DNA, 120 bp, synthetic construct
  source 1..120: mol_type = other DNA
gccattgaaatgcaaaagtctgttccaaataaagccttggaattgaagaatgaacaaacattgagagcaggtaaattttttaatggaactatgcaaagaccaatatttcaatattggaca

SEQ ID NO: 10238 - DNA, 120 bp, synthetic construct
  source 1..120: mol_type = other DNA
gagagatgataggtaattccagttttctgaatgaacaggaaacctagggcatactgcgcttcacaggagaataggatatgactgctttgtgaagagataattcatacaagttagttaaat

SEQ ID NO: 10239 - DNA, 120 bp, synthetic construct
  source 1..120: mol_type = other DNA
tttcgcaaatagaactccttgagtccccttatggcagtcaagctgaagcagcatgagcgtcatatcatagtgatgtattttaaggtcacaacggcggaaagacatagaaagtatctgacc

SEQ ID NO: 10240 - DNA, 120 bp, synthetic construct
  source 1..120: mol_type = other DNA
caattcgaaagacagaaaaaaaacagcaactggcagaagtgagtccttccttcttagaaacgactttaactatttccttcctttccttttcttttcccttcccttccctctccccctcct

SEQ ID NO: 10241 - DNA, 120 bp, synthetic construct
  source 1..120: mol_type = other DNA
aaaagaattgaaatcattctgagtatgtatgttttctggccataatgaaaccaaactacaaatcagtaatagagtgacaataggaaaatatctaatcatttagaaattaaacatcagact

SEQ ID NO: 10242 - DNA, 120 bp, synthetic construct
  source 1..120: mol_type = other DNA
ttggtacaatgtgcataaactacctagcagaatgcctgacaggtacgaagtgttcgccgaaagatcactcctttataatgggattactagctattttcacttttgcatatccttctagtc

SEQ ID NO: 10243 - DNA, 120 bp, synthetic construct
  source 1..120: mol_type = other DNA
agacagcggtgatgagcatgcccatgaactgacatgattattttggggaaaatgaaagacttgtattctttttgagatagtaattccactttcaggggcgaatacattttgtttatttta

SEQ ID NO: 10244 - DNA, 120 bp, synthetic construct
  source 1..120: mol_type = other DNA
tgaagctggccatccctatcttgtattcaatcttagtggaaaagcttttagttgttccccactaactattatgtagactgtgggtttttcataaatgggctttattacgttgaggaactt

SEQ ID NO: 10245 - DNA, 120 bp, synthetic construct
  source 1..120: mol_type = other DNA
agaggagttgttgctttttcagtgttcagcttttgacttgttaggatggagtgatgacttctagctccaggcatgccagaccagaaactgagaatgccccatttgttttaagtatatgta

SEQ ID NO: 10246 - DNA, 120 bp, synthetic construct
  source 1..120: mol_type = other DNA
ttcacgtggctactacaatggcaccttttccagaattttctccctcacctggggccacttctcaatctcatttcctgacttaactttctttacctctatttaacctctagaaattggcat

SEQ ID NO: 10247 - DNA, 120 bp, synthetic construct
  source 1..120: mol_type = other DNA
gcctttgggataattttgcttgtattacaacaaaaagcctgagcaacggggaacaatctgtgccttttgaagatggcaaagggctttagccaggctggctggtatctcaaaagaaaaaag

SEQ ID NO: 10248 - DNA, 120 bp, synthetic construct
  source 1..120: mol_type = other DNA
gaagccccaaccacaaacctgtattctactgggagggagcgccttccaaaggtgccattgacctctttcacacagctgggtattagtgaggaagcccggggatggtctcctcaaactgcc

SEQ ID NO: 10249 - DNA, 120 bp, synthetic construct
  source 1..120: mol_type = other DNA
tcccttatatgattaaaagcagaaactgtgacaaatgaggctgccataaattccctcttcaacggtttactcccaggaaggagatcaagagtaaacgtaccataattcccctgtctagga

SEQ ID NO: 10250 - DNA, 120 bp, synthetic construct
  source 1..120: mol_type = other DNA
aaaccttgaaataatctatgtcaatataagtcagaattcatttgctgtaaaggttgttatagaaattataacactgtgccctctccctctccctctccctctccccacggcccacggtct

SEQ ID NO: 10251 - DNA, 120 bp, synthetic construct
  source 1..120: mol_type = other DNA
tatgagcaagtaacctttctagaaagacagttaatggtctttagtgcagaatgtactcattcagaaacacgtttattaaccacctactatgagccaggtacaggtccagcccctgcgaat

SEQ ID NO: 10252 - DNA, 120 bp, synthetic construct
  source 1..120: mol_type = other DNA
agcttcgttttactgaggaaagctcagaaaagttaaataactcgcccttgggcacacatgactggaaagaaattgggatttttattttagtaagtaagttggtcaggcacaagggcgact

SEQ ID NO: 10253 - DNA, 120 bp, synthetic construct
  source 1..120: mol_type = other DNA
gagcggcaggggtgacgcttggcttgcgcgcaggagggccggaccgcgactgcccctgcacctggcccgtcccgttgcctgccctcttaggaacacacgccccgtttagcccccgagaat

SEQ ID NO: 10254 - DNA, 120 bp, synthetic construct
  source 1..120: mol_type = other DNA
aggtggtaggaatacataggtaaattagatagagcctctcccttggcaaatagtataattccagcatacaaaggaagtaagtatggctggagcagagtggagacttaagagatgaggatg

SEQ ID NO: 10255 - DNA, 120 bp, synthetic construct
  source 1..120: mol_type = other DNA
tctgattgtttacacagaatgtccatgcttggtcctgactatctcactggaaaagtcagggactctagactcaacttctctggtgtgcacagccccataatgttttcatcaagattaatt

SEQ ID NO: 10256 - DNA, 120 bp, synthetic construct
  source 1..120: mol_type = other DNA
ctttccccttttaccctgtctccccagatgaggagcaataccaaagatatttaacagtcctgggtatagctatctgactgtaaattgatcacaaaacacatgaagctgtgagtttagcag

SEQ ID NO: 10257 - DNA, 120 bp, synthetic construct
  source 1..120: mol_type = other DNA
attaaccaaccattgaacttttcagtgtatttttttctgttcttgttttttaactttaaccttttctagatgactgtgtgtgtgtgtgtgtgtgtgtgtgtattttcatttgcagcctac

SEQ ID NO: 10258 - DNA, 120 bp, synthetic construct
  source 1..120: mol_type = other DNA
cagagatcaaatccttgaattctgatataagaatagagtagaagtcagcaaacttcttttgtaaagggccagatagtacatattacagatttggagggtcacagaggtcatttttttcct

SEQ ID NO: 10259 - DNA, 120 bp, synthetic construct
  source 1..120: mol_type = other DNA
acaactattatgtttgggctactttaattgggcacacgattagtaagtcatggacttaacctctgggaagtgagtatgtcacttagtagtctcacattgactccaccagaaagactcgct

SEQ ID NO: 10260 - DNA, 120 bp, synthetic construct
  source 1..120: mol_type = other DNA
acaggatctatacattgatcgtcctttaccatatctcattgggtcaaagctgttcatggaacaagaagatgtaggtcttggagagctgtccagtgaaggtacttttcttcaccaaataat

SEQ ID NO: 10261 - DNA, 120 bp, synthetic construct
  source 1..120: mol_type = other DNA
ctcgaacgcctgacctcaggtgatcctctgtgtgtgttttctaagaacaaggacatctcttgtataatcacagtagaattacaaagccaggatattttcctggacataagggtattatcc

SEQ ID NO: 10262 - DNA, 120 bp, synthetic construct
  source 1..120: mol_type = other DNA
gtaaactataaaacctagagcaggatataccgaaagccaccacttacattctattttgctgctgccgctagcgctttcatatccacagagcataatttcatttccttgtctagagtttga

SEQ ID NO: 10263 - DNA, 120 bp, synthetic construct
  source 1..120: mol_type = other DNA
acacaaactgactttcagtaatttagttagttaaatgtgcaactctttaaatccaaaggcaagagttgaaagtgcaggtgatgtgaacaaattgttagaggcatttaagtgaaccacaaa

SEQ ID NO: 10264 - DNA, 120 bp, synthetic construct
  source 1..120: mol_type = other DNA
ggacattgaagaaaatactagacctgtaaggaaggctgtagttgctatcacttggcagagttttagaaccaatgacttgtttttctttttattgtgacttactttgtacatcactcattt

SEQ ID NO: 10265 - DNA, 120 bp, synthetic construct
  source 1..120: mol_type = other DNA
gtcccccagctgacccactgctgtggcttgatgacggtcagcatgctcttccatttgagtcacagctcagattgtgttaatcccaaaaaaaaagtcctgacatcggtagagaagaaaata

SEQ ID NO: 10266 - DNA, 120 bp, synthetic construct
  source 1..120: mol_type = other DNA
tccaaggaaaagcccctatggtccccctcccactggcctctttgatgatgatgatggtgatgatgatgacgactttttctcggcaccccacagcaaaccttctaaaacacgtatgtgttc

SEQ ID NO: 10267 - DNA, 120 bp, synthetic construct
  source 1..120: mol_type = other DNA
acaactcctagtctcttcagacattcatgagtcagtgacctcatttcagcaacacatgccctattcggtacagcagtgcttatggtgatgaaaggttggaaaccacccaaatacttatca

SEQ ID NO: 10268 - DNA, 120 bp, synthetic construct
  source 1..120: mol_type = other DNA
tggctgtgaagccctgactttctcctgccgaccacctaaggcccagcattcagaacctgtcaggcccgtcaggcagcctgtctttccatgctgtctctcattgcatatgtcccatctgtg

SEQ ID NO: 10269 - DNA, 120 bp, synthetic construct
  source 1..120: mol_type = other DNA
catactggctcagggctgtaggggagagtcctcagagagagcccgatggaggccatgtcgccttctgtgttccagccttggaagtcaacggtggtccttttccttcatttgttggtcaag

SEQ ID NO: 10270 - DNA, 120 bp, synthetic construct
  source 1..120: mol_type = other DNA
tgttcggctcttgtgtattgaagtttatcttcccaagggaatagatgtcccattttatgtttctacttcatgtaggtcaacttgcaggtctttctttgcaggataagctgatgttttata

SEQ ID NO: 10271 - DNA, 120 bp, synthetic construct
  source 1..120: mol_type = other DNA
cattgtctctacaagctcagagagaagagaaagcaaaagcctccgagctctccaaaaagaaagcatctgccctgttgttcagcagtgatgaggaggtgagctgaggtttctgctaaaaaa

SEQ ID NO: 10272 - DNA, 120 bp, synthetic construct
  source 1..120: mol_type = other DNA
aaatcctgagtattaaacatcttcctgtgttataataattcctcttttttttaacattgtaggcaagttagtagggggtgaagtggatatataagtcatagatatgttcatgtccttact

SEQ ID NO: 10273 - DNA, 120 bp, synthetic construct
  source 1..120: mol_type = other DNA
tgggaagagacatcgtggcaggtgttggaggaggaaatcatgagaagctctgtgaggtcagagagcccagctgtctagatttgagttcaaagaaaagtcttaagcatgagctttcttcaa

SEQ ID NO: 10274 - DNA, 120 bp, synthetic construct
  source 1..120: mol_type = other DNA
tttctttgtttgtcagggatttgagtatcttttgtttgtgatttttctctgggctactctaaagtatgtcaggtttggtcaggattacttaaaagttactttaggccaggcacgttggct

SEQ ID NO: 10275 - DNA, 120 bp, synthetic construct
  source 1..120: mol_type = other DNA
tattgccagttagcatcgtgactgcagggaaatagtacattcctttatttttgttgctctctcctgggacattcttcttcctgtgttgcctggccaccttctttcaaaactaagtgtaag

SEQ ID NO: 10276 - DNA, 120 bp, synthetic construct
  source 1..120: mol_type = other DNA
gaggatgtggaggaattggaaccctcatacactgctggtgggaacgtaaaatggtgtagtcactttggaaagtagtttggcatttcctcaaaatgttaaacatagagtcaccatatgaca

SEQ ID NO: 10277 - DNA, 120 bp, synthetic construct
  source 1..120: mol_type = other DNA
atcattccttttatgagtgtgtgtcgagtactaacactggtcctggtttatattagccagtcagtaaaaaggaaggaaattctcacatgtgctacaaaatgcatgaaccttgaggccgtt

SEQ ID NO: 10278 - DNA, 120 bp, synthetic construct
  source 1..120: mol_type = other DNA
caaaaggttaaaccacaggcaggagaacttaaagaaatgtaatgtgagttttgttttgagccaagcttgagaactactagcccagtaaagagactccacacaaactgagaatgcgtccca

SEQ ID NO: 10279 - DNA, 120 bp, synthetic construct
  source 1..120: mol_type = other DNA
cctgcctccctgataaggaagagatgagaaatgggctgaagtgcttgcagacttgtattgaacactgagttggtataaaacactgggactgtccatgaaaatatagtgtatagtcctttc

SEQ ID NO: 10280 - DNA, 120 bp, synthetic construct
  source 1..120: mol_type = other DNA
gaaggaggcacaacttggagtgaagtctgtggataagaaggttgagagtgccaaggagtcattaaaatttgggagaactgatgtggctgagtcagaaaaggtggactttttttcttgtat

SEQ ID NO: 10281 - DNA, 120 bp, synthetic construct
  source 1..120: mol_type = other DNA
tccctgagtgtaagccccttgcggactaggcccagtttgttttgctcaccatcatatctgtagtactggcatattaccttgcacacagtaggcactatgttataaactttgtatttcttt

SEQ ID NO: 10282 - DNA, 120 bp, synthetic construct
  source 1..120: mol_type = other DNA
gattctgtgcagtcatttagatatttgggaatcttaatcaggaactcttacctcaagtagcagtgttaggataggggattagaatttcacccccctcttctgggatttacagaccttgtt

SEQ ID NO: 10283 - DNA, 120 bp, synthetic construct
  source 1..120: mol_type = other DNA
ccaaaccttttcatggtaaagcactcaattaggcataggaggaagcttaatgaacttgataaaggacatctatgaaatccctcagctgacatcatacttaatggtgaaagactgcatgct

SEQ ID NO: 10284 - DNA, 120 bp, synthetic construct
  source 1..120: mol_type = other DNA
agtaataccaagaagggtaaaatacttaggagtaaatttagcaaaagaagtacaagacttgtaaactaaaatctacaaaacattgaaagaaattaaagacctaaaattgatggaaagaca

SEQ ID NO: 10285 - DNA, 120 bp, synthetic construct
  source 1..120: mol_type = other DNA
acgtaaatgggtagattttatggtatatgaatttgatctcaatggtgatgttatgcaaaccaggttggcaggtcatagattgccaatcctttttatagatctaaccaaagaaatagtcta

SEQ ID NO: 10286 - DNA, 120 bp, synthetic construct
  source 1..120: mol_type = other DNA
aggaaggcttgtggtcgcacctgtgccaggtctttggcctgcagtgcttacaggtgagggacacatacttgaccactctgtgtagtttgtgcttgagtcagctgctgtctcttcttccct

SEQ ID NO: 10287 - DNA, 120 bp, synthetic construct
  source 1..120: mol_type = other DNA
tgatgaagatgatgatcttttcagctctgccaagtcccagcctttggtaccagccttttgttctcaatactgggttgtgtgggaaagattctgggaaaggaaactaacgtccagttagat

SEQ ID NO: 10288 - DNA, 120 bp, synthetic construct
  source 1..120: mol_type = other DNA
aggatgaagaatcttcttcccactaaagaatttatttctccctctggatttccttggaatagaattaaaatagaaataaatataaattacatctgatttcctgcctgctctcagtgttgc

SEQ ID NO: 10289 - DNA, 120 bp, synthetic construct
  source 1..120: mol_type = other DNA
gtatgaaacccctttgcaatcggtgccagcccatgtgtgcagcttcctcactagtcacttcacactttccagcctgactccaggcacaccaggtgccactccctgaacacacatggtctg

SEQ ID NO: 10290 - DNA, 120 bp, synthetic construct
  source 1..120: mol_type = other DNA
agaatgacttagtcttggagtactaggagctattaaactccttccttggaaatcattaagaaataacctcttctatgttcttagataatatcttcattgaagtagaccagataaccttac

SEQ ID NO: 10291 - DNA, 120 bp, synthetic construct
  source 1..120: mol_type = other DNA
cagcgggttcacttcagtgtaatcctgagttaggctgaagataggtaagagatggactaattattttagtgaagtaactctttcctatgatagtcatcaaagaatttgaaggcacccaga

SEQ ID NO: 10292 - DNA, 120 bp, synthetic construct
  source 1..120: mol_type = other DNA
cagtggttggtttgttttgtttttaaaccacagtttgatttagttagccttgctggggccataatatgcttcagggtgtgtaaaagaagaaatctctttgtggctttcatgggcagggaa

SEQ ID NO: 10293 - DNA, 120 bp, synthetic construct
  source 1..120: mol_type = other DNA
tagctaggactaaaggcatgaaaacaccatgcttggcttgtcccatttcattctacacactttcttggtatttaaacagctgctgttgctcttcattctgtagctctacatcagattcat

SEQ ID NO: 10294 - DNA, 120 bp, synthetic construct
  source 1..120: mol_type = other DNA
atttcttaagaatgtctttgatgaagcagtaaaaattaatgttgttaaatcttgacatgtctctaatattctgaataagtggaaagttaaccagaagcgctttttttttttttgttttta

SEQ ID NO: 10295 - DNA, 120 bp, synthetic construct
  source 1..120: mol_type = other DNA
tgagcttgatatcttgcaaagtacttagctagaataacaagacaggtttctaaaaagctcacctttgtgtgatatgatgaggtatctccaaggtcacactgtggaaggaaaaaaattcat

SEQ ID NO: 10296 - DNA, 120 bp, synthetic construct
  source 1..120: mol_type = other DNA
ttaattcaacactcgttttacagatcagggaaacagaccttaaaactgacttgcccaaggtcccaccaaattggagcagtttctcgtcctaaactcaaattaagcagtggctgtcaaact

SEQ ID NO: 10297 - DNA, 120 bp, synthetic construct
  source 1..120: mol_type = other DNA
gaagaaacacagggagaaacataagatcatggtgtagcggggaaggtatgcttttacctgctgtgacagaaagtcaatagacagtgctggcaattaacttagctattctatttttgttct

SEQ ID NO: 10298 - DNA, 120 bp, synthetic construct
  source 1..120: mol_type = other DNA
tacaaaagaaaagggcaaaaaaattaggccagatgaaaaatttagctaataaaaagtttaactgttgcatatatgagccatgatccattagtattctctcattctgcatttacacatagc

SEQ ID NO: 10299 - DNA, 120 bp, synthetic construct
  source 1..120: mol_type = other DNA
aaacgactatgttttttaatttgtttaaatgaaaaccaagctgaagttctatcattcatctttaaaatgtactttttggagcaagggaaaagggattgtaaataaagatgaatccattaa

SEQ ID NO: 10300 - DNA, 120 bp, synthetic construct
  source 1..120: mol_type = other DNA
gtttcatggagcaactttgaatctatggttacagcaattgaggcaccttgtataaaataaagctaatacatgaaaaaaaaaagccatttaaaattctgttgttctcagagaatggagaaa

SEQ ID NO: 10301 - DNA, 120 bp, synthetic construct
  source 1..120: mol_type = other DNA
ttagggaaaacatctcaagggagttgacatttgagctgtgacccaaatacagtacaaatgcttgggaggcaagtatccaggaaaatagctagtgcaaatgtcctgaaacaaaacaaattt

SEQ ID NO: 10302 - DNA, 120 bp, synthetic construct
  source 1..120: mol_type = other DNA
cagatttagtgcagtgcctgtcaaaatcccagctggcttttttgcagaaattgacaagcttttatcctaaaattcatatggaaattcaggggacatagaatggccaatgaccttgagaaa

SEQ ID NO: 10303 - DNA, 120 bp, synthetic construct
  source 1..120: mol_type = other DNA
gacctctgtacattgctggtgggaatgtaaaatgatacagctgcttttagaaacagtctggcagtttctcaaagtgttaaaaatagagttaccttatgactggcaatttcacttgcgtat

SEQ ID NO: 10304 - DNA, 120 bp, synthetic construct
  source 1..120: mol_type = other DNA
tgaatcactaacggcatctgacagctgctgcatttcttgtttgcgttaagtgttcaaattgaagcaagttgatggttcggaccttgccaatttaaagcttcattatttttgaaatgtttt

SEQ ID NO: 10305 - DNA, 120 bp, synthetic construct
  source 1..120: mol_type = other DNA
attgatggacgtttgcttgcaacccttgttatatttttcagttgatactagcaggagaatgagttggtgctaacgtgcacttttgcttgcttgataatgttcatcacagccttttttttt

SEQ ID NO: 10306 - DNA, 120 bp, synthetic construct
  source 1..120: mol_type = other DNA
tgcatgacaggtgagtgttacatacttttttctcaagagtgctcagttcaagtagttgagggtgcgtaaaatcaaaagcaattagaatgttggtttcagggttttttttttaatatttac

SEQ ID NO: 10307 - DNA, 120 bp, synthetic construct
  source 1..120: mol_type = other DNA
ttgcccatttttatgcttcatgtaagtggaatcatgagtatgtattcttcgatggctactgttttgttttaggacactttaaactccatcttcctttcatattgttcagccagcagatgg

SEQ ID NO: 10308 - DNA, 120 bp, synthetic construct
  source 1..120: mol_type = other DNA
gtagaacattaattgagtcgtttaataattaaactgaatgagttccttcactctttgttactgtatttccataatttccagcagtagtcagctgtctggacagaaccattcctgggatca

SEQ ID NO: 10309 - DNA, 120 bp, synthetic construct
  source 1..120: mol_type = other DNA
aagtagagatctcatttgataataaattgttaaagaaagaatgcacaaatatcatgaacaatttgatcaacccatattctggtcctaggatatgagacaattatgtttaaacccattcca

SEQ ID NO: 10310 - DNA, 120 bp, synthetic construct
  source 1..120: mol_type = other DNA
ttacccatcttaaccatttttaagtatacagtacattagtattatagtcacatgattatataaccaatctctggaactttttcatcttgcaaaactgatactctgtacctattaagcctc

SEQ ID NO: 10311 - DNA, 120 bp, synthetic construct
  source 1..120: mol_type = other DNA
tctgaaggtagtagactggtactcccttgttttatagacaaactaaaattcagacaagttaaattacctccacatgctcacacagctctgtcacggtctagtgcatcaaactctagtctg

SEQ ID NO: 10312 - DNA, 120 bp, synthetic construct
  source 1..120: mol_type = other DNA
gagtgctgcccttgtactgccaattgaagtttaacatttgtctaaccctaaagactttcaaagtgaaattatttttaggttcttaacaaggtttttctatgccaaggtaaaattttcaag

SEQ ID NO: 10313 - DNA, 120 bp, synthetic construct
  source 1..120: mol_type = other DNA
aataccatgctcatctataaaattggggtatgatgattatcaatttacaggattgtggtgcattttaaatgaaacaagttccattaagtgcttattgctgaaggtataattcagtgaatg

SEQ ID NO: 10314 - DNA, 120 bp, synthetic construct
  source 1..120: mol_type = other DNA
atacagaaaaaaagtagaatggaagacggctgggatggggtgtagttattgctaaatgggcagagagtttcagttttgcaagatgaaaagagtcctctgaagatagatgttggtacacag

SEQ ID NO: 10315 - DNA, 120 bp, synthetic construct
  source 1..120: mol_type = other DNA
ctggctctgtctgtggtcggatctcttgcttcctcctgggagggtcaggctcctctgcagcctcagtgggcatctggggaagccaggcctgtctctcctcagagtgtggggcacatgtct

SEQ ID NO: 10316 - DNA, 120 bp, synthetic construct
  source 1..120: mol_type = other DNA
agtgtccaagctgcatgtcttcctcatggccacgttgcttttcagggcaatctggataccttttgtgacctctctcacgcaagctgccaccaggtgccatggatgtgttgtcagagcagg

SEQ ID NO: 10317 - DNA, 120 bp, synthetic construct
  source 1..120: mol_type = other DNA
cagccggctgaggtcgggcagggaaggagggagggaggaagggaagctaggtgctgggccaacctgttctttgactaaccaggtcaaactctgcccctaatgttgcagcctttcagagcc

SEQ ID NO: 10318 - DNA, 120 bp, synthetic construct
  source 1..120: mol_type = other DNA
tcttggagaggggagaatctttagaactatgacaaaaaaatcagcgccataaaggaaatattaagtaaatttgacaatccaaaactgaaattttctatagccaaaaaaaaaaaaaacact

SEQ ID NO: 10319 - DNA, 120 bp, synthetic construct
  source 1..120: mol_type = other DNA
gagtcccagcagaggccaacctgtgtctcttcatctccgtgagaaaggtgcccccgaagtgaaagagatggcctggtggaaagcctgggtaagtgggagctggcaggagatttgcgttcc

SEQ ID NO: 10320 - DNA, 120 bp, synthetic construct
  source 1..120: mol_type = other DNA
gatgtcagggctgcactttctgttttgcagatgatgaaatgaaggctcagagacactgagtgacttgctagggtccaatggccagcaggctccagtcagagagcagttgggtctctctgc

SEQ ID NO: 10321 - DNA, 120 bp, synthetic construct
  source 1..120: mol_type = other DNA
gtgcctgtcacagaacaagttatattaatagatgtagtcacaggctggtctgagtcaccttttcagtgaaaatgtgcctgtctggactagcacggccctgggcaagaccctgcaggagcc

SEQ ID NO: 10322 - DNA, 120 bp, synthetic construct
  source 1..120: mol_type = other DNA
taagtgaacaggtaaatggaagacaagactggatgggactaaactctttttcatcctggaggatctctgagtctccctctaattcaatacctatctccaatatccctccattctctacca

SEQ ID NO: 10323 - DNA, 120 bp, synthetic construct
  source 1..120: mol_type = other DNA
ctgctttgagcaggcctggttctcttgcagattgaacaggagggtgtcacagtgaagagcagctcccacttcaacccagaccctgatgcagagaccctctacaaagccatgaaggggatc

SEQ ID NO: 10324 - DNA, 120 bp, synthetic construct
  source 1..120: mol_type = other DNA
atgccctctgctttctgtgaagcagaaagttatctccacttcccaaatgagaaaacggaggcccagggaaatgaggctggctgcccaatgccacgcagttgctgggccaggcctcggatt

SEQ ID NO: 10325 - DNA, 120 bp, synthetic construct
  source 1..120: mol_type = other DNA
tgggaattctaagagcctggagtaagcatgccaggccctttgtttctcctcccacctgcactccacccctaggacaaagcctgacatttgggggtacacagtaaacacaggattaaatat

SEQ ID NO: 10326 - DNA, 120 bp, synthetic construct
  source 1..120: mol_type = other DNA
tgggcccagtgagcaggcagcctgctgctcagactgcacccaacacctggagtcactggtgcctgattgacacgttgagtggccgtgatgaagccaaaatcagtacttctcagaacctca

SEQ ID NO: 10327 - DNA, 120 bp, synthetic construct
  source 1..120: mol_type = other DNA
gtgcctgatggtgacactgaacatgattcagacttgatctgtaagctcaccagctcctcttacaggggagagaggcctgtgaccaactaaaatctctgcccttgaggactgtggtagtag

SEQ ID NO: 10328 - DNA, 120 bp, synthetic construct
  source 1..120: mol_type = other DNA
tgcctaccctccaagcccaggatcccccctgtgcccttaatgctctggtcagctggcctgccttacagagccacctcctctgttcctagggcagcagggatgatgtgagcagctttgtgg

SEQ ID NO: 10329 - DNA, 120 bp, synthetic construct
  source 1..120: mol_type = other DNA
tccacagtgtttgaagagtatgagaaaattgccaacaagagcattgaggacagcatcaagagtgagacccatggctcactggaggaggccatgctcactgtgggtaagagctcagacttg

SEQ ID NO: 10330 - DNA, 120 bp, synthetic construct
  source 1..120: mol_type = other DNA
agacaccccagctggccttggatgctgtgatacaatccggtctatgtcaggacatctaatcacacccctgctccaatctcagcttccacccctggatctggcctgaacccaccaagaatg

SEQ ID NO: 10331 - DNA, 120 bp, synthetic construct
  source 1..120: mol_type = other DNA
ggatcagaaaggttttagttctcggaggtgaaattgagtctgggaaagggacgctgcatctccagaggtgaataattccctgaaactaaaaccattgcccgttttctctgattgatggtt

SEQ ID NO: 10332 - DNA, 120 bp, synthetic construct
  source 1..120: mol_type = other DNA
taaggagataagtcagatgagcgccaatagactatctaaccagattccaattagcaaaagttctggagccttcaaaacacagactgattatcacgctgcgataattgggagaaacagctc

SEQ ID NO: 10333 - DNA, 120 bp, synthetic construct
  source 1..120: mol_type = other DNA
ttttactaaatggtgaaaagtagacaataaccatgagacctaaactggtccagagtgtggaaagtgggtctagccccagtctaccccttactcaccatgccgttgtgaatgaattcactc

SEQ ID NO: 10334 - DNA, 120 bp, synthetic construct
  source 1..120: mol_type = other DNA
gactcctcttcccaacttcctccaggtcatttcccagtgtgagcacaatgccaaccttagtgtttctccagccagacagatgcctcagcatgaagggcttggggacttgtggatcattcc

SEQ ID NO: 10335 - DNA, 120 bp, synthetic construct
  source 1..120: mol_type = other DNA
tactcagggtgcagttgagtactccgggtgcacttggctgcctccaaagatgggactcactgcgtcctttgacagcccaatctttttccaatggatgtgaccagcaaagttcttgtttta

SEQ ID NO: 10336 - DNA, 120 bp, synthetic construct
  source 1..120: mol_type = other DNA
ctcagtttcctcacatttctatacagggtgggctcccagttacaactgctgcctttcgaaccaccccagagccagtagcataaaatcctcatgtataatgttcacagattctgtgggtca

SEQ ID NO: 10337 - DNA, 120 bp, synthetic construct
  source 1..120: mol_type = other DNA
caaggaaatttggtcaagtccaagtacatgcccagcaaggggatctgcttaagcagagtcatgaagttgatcatctcccctgatggggcagaatggacatcacccccactgcctccctgc

SEQ ID NO: 10338 - DNA, 120 bp, synthetic construct
  source 1..120: mol_type = other DNA
aatgttttgcatttcctaggagctgaattccttttcttccattgcagcactggctgggagagaaggcacaacatggtccagcatactgagccccaagtttgtcctgcagcatgatttgag

SEQ ID NO: 10339 - DNA, 120 bp, synthetic construct
  source 1..120: mol_type = other DNA
tgccctgaaattgttccagaccttttttggaaatcaactttgcagcacacgtcaagagccttgaaaactgtccatgccctttgttaattccacttctggaaatctctcctaaggaaataa

SEQ ID NO: 10340 - DNA, 120 bp, synthetic construct
  source 1..120: mol_type = other DNA
gcaggagactatggctgcaggagcctgagccctggcccccttcccatgctggactcctgtccagcaccaaacattcagcagtgagtggcacctttaccatcaacccaccatggaaaactt

SEQ ID NO: 10341 - DNA, 120 bp, synthetic construct
  source 1..120: mol_type = other DNA
cagggccttgatctccttcttgaagttggtgttgagaaagccatagatgaatgggttgacacaggtggaggccatggcaagcaagtggcacactaagaagatgaggttcccatggcagat

SEQ ID NO: 10342 - DNA, 120 bp, synthetic construct
  source 1..120: mol_type = other DNA
gtgttcatagtggatgtgaaaagattccaggactcttgaactaagtgatacacttgagggatgacgcctacaaggcaaacagacaaacaatactcagggatcatgcccagggtagaatcc

SEQ ID NO: 10343 - DNA, 120 bp, synthetic construct
  source 1..120: mol_type = other DNA
aatttagactccagagttcccccgtgttagtgccaatgatggatgttttgcatgggaagcaccataccactacatacatcattgtgactcacctctcagattctctagtcattattaatc

SEQ ID NO: 10344 - DNA, 120 bp, synthetic construct
  source 1..120: mol_type = other DNA
cttggttccttctggagctctcagccctgggggagaagacagacagggtacaaggaaagagggaaataaattattacagggggtgagatgctgtgagcaaatgggttcgataggccagat

SEQ ID NO: 10345 - DNA, 120 bp, synthetic construct
  source 1..120: mol_type = other DNA
tagttggttgtctgcctgagcagctttgtctccccactcccctatgtctaggtcacagctcttgtctccgcctccagatcccagcacaagtccacacacagcatctgacaaagaaagaaa

SEQ ID NO: 10346 - DNA, 120 bp, synthetic construct
  source 1..120: mol_type = other DNA
gactcattctgcatgtaaactctccattttcagggagtatggttgagtttctcagatccaggcttgtgtagatgttgcttccacggcctgaactcatcaagctctccattctcagagacc

SEQ ID NO: 10347 - DNA, 120 bp, synthetic construct
  source 1..120: mol_type = other DNA
agagcagagaaccacagtagagaatgcatctgggtggggtgtgagcaaaatagtcgacacatagaatcatcaatagcaagagtattccagagctacagattaaaaggaagcccgaggaac

SEQ ID NO: 10348 - DNA, 120 bp, synthetic construct
  source 1..120: mol_type = other DNA
tgaattgagaaacacagtcttccacatgcttctcagcgtggcctttatcctgctatggcctctgtgttcctcagtgatgagagatgacacttccttagacagggatgattcttaaggtta

SEQ ID NO: 10349 - DNA, 120 bp, synthetic construct
  source 1..120: mol_type = other DNA
aattgtgagcccaggatgtgtatgatgcatggacaatgtgggcagaagctggggcagctcatcccaatggcaagagcccttcatctgccattcagcacagcctcagccctggaggtggat

SEQ ID NO: 10350 - DNA, 120 bp, synthetic construct
  source 1..120: mol_type = other DNA
ctttgcaggtgtgattaagttaatgatcttgagatgggggtggtggttatcctggattatctgatgagcctcttatagagaaacgccacactctgagatgaattcagaagtcctttatta

SEQ ID NO: 10351 - DNA, 120 bp, synthetic construct
  source 1..120: mol_type = other DNA
acagcgacctggggtaagcagaagtgggggaggattctccagacaccccagactgtctccaagtagagcggagatctcgccagttaagcgcacagctgaggacagttactgggtgaagtg

SEQ ID NO: 10352 - DNA, 120 bp, synthetic construct
  source 1..120: mol_type = other DNA
ctcggcttgaggaggatctgggagggcgggggctcagtcctggccaccaggtgtgaggggtcgggtgcggagccctgtgtcagacgcggcggtgaaggctgtagccctgctctccgggat

SEQ ID NO: 10353 - DNA, 120 bp, synthetic construct
  source 1..120: mol_type = other DNA
atggaggttctggtgagggcaggtttgatttctactcagaagcgcaaggaaatggcttctttaagccagaatcccaagggcagggccagctgttttccaaggaaaactagaaggttctgc

SEQ ID NO: 10354 - DNA, 120 bp, synthetic construct
  source 1..120: mol_type = other DNA
cttgccacctacatgttgtctccctgactctggacaggccaccagctgtgccattcgtggtgcccccaacccttcaaggccgagattgggtgcccctgcacagtggagagtgggccgatg

SEQ ID NO: 10355 - DNA, 120 bp, synthetic construct
  source 1..120: mol_type = other DNA
tgggcttgatcaaggcacagcacctgcaagccccctcggagacctgcagccccctggtgaagctctacctgctgcccgatgagcggcgcttcctccaatccaagaccaaacgcaaaacct

SEQ ID NO: 10356 - DNA, 120 bp, synthetic construct
  source 1..120: mol_type = other DNA
attcacaggtgaatcgctcttctcaagacatcagaatccaaggctgcagccttgctgacgtgcgacacgtcatgcttgcaggctaatttttcttagctcatcacttccccactctatctc

SEQ ID NO: 10357 - DNA, 120 bp, synthetic construct
  source 1..120: mol_type = other DNA
ctggaggtatggtcaaggtcaccatgcctatgccactgagcatcagctggcaggtgtgcacagggcccagcacctgctggcggcatcagccctcagcatcctgcacaccaccctacaaca

SEQ ID NO: 10358 - DNA, 120 bp, synthetic construct
  source 1..120: mol_type = other DNA
caggagctgcagaaggggaggccttggttcaccccacatgtcccaccccatttgggctcaccccacacatcccacccatcccagtgaggtggtggtcagccacctgtttgtgttcacatc

SEQ ID NO: 10359 - DNA, 120 bp, synthetic construct
  source 1..120: mol_type = other DNA
atgttactgctgaatgtactctcggatggccgaggccttctttctagaggggccctttcctccctcagctctttggcataaggtagacttaatacggccccacagaagggtgtggggcag

SEQ ID NO: 10360 - DNA, 120 bp, synthetic construct
  source 1..120: mol_type = other DNA
gaagaaagatcctgtttagtgatgacccagctctacctgctgaatggacctgcagggtaaacttgggtgcctccatctgggaaagctgatgatgtgttcatgcagtcgatgaccctcact

SEQ ID NO: 10361 - DNA, 120 bp, synthetic construct
  source 1..120: mol_type = other DNA
caactttagcaaaagaggcaatgaatgttatactgagtttctacctctttaactccacctccaatttctgtcaatctacaaacacaagtgtcgcctcgcagtgtttcgtatgaacagaat

SEQ ID NO: 10362 - DNA, 120 bp, synthetic construct
  source 1..120: mol_type = other DNA
tggcctgggttgtctcaaatcctgtccacaaggcaactccagaagaaagaagccctttacatttccataaaacactttagaatcagctagtcaatttccacaaaataaagtgctagaatt

SEQ ID NO: 10363 - DNA, 120 bp, synthetic construct
  source 1..120: mol_type = other DNA
tgcaccttttgaaataattttatttttctcctttattctttggatgtgatgacttatactaattgactgttgaatgtcaaaccaaacttaacattcttgtaatagaaaccagcagggtgt

SEQ ID NO: 10364 - DNA, 120 bp, synthetic construct
  source 1..120: mol_type = other DNA
attactgagagaggataaagcctgccactgttattatgaatttgtttatttctcctttgagttttgttagtttttgttttatgcatttagaggttgtgttattaggctcatacccattta

SEQ ID NO: 10365 - DNA, 120 bp, synthetic construct
  source 1..120: mol_type = other DNA
tttcatagcctttctgcatagcttaactcagcagatgcctcaaggggaaagtgttccttttctgtgtctcccttctacatgatatctcggccccttcagttccagctgccttgacaacct

SEQ ID NO: 10366 - DNA, 120 bp, synthetic construct
  source 1..120: mol_type = other DNA
ttccatttccagaaaaatgtaataaatacttttaaaggggatggagatggtaccgtgtgctaaccccactctgagacaaacctgggtcacaggaaccatagggaagatgtctgcagtaga

SEQ ID NO: 10367 - DNA, 120 bp, synthetic construct
  source 1..120: mol_type = other DNA
gctaatgagatgcagttcaatgaagacatctgtattcttgctgtaaagcacagggcttggcgcagaccaaggaatgactcataaggattaaaaggcatgaaaccaggttctttcttagaa

SEQ ID NO: 10368 - DNA, 120 bp, synthetic construct
  source 1..120: mol_type = other DNA
tccaaacccagcattacctccctgtgctggccaattctgctcctccagctgagccttcccagtgtgatgatttgaatgtttgtcccctcccacactcatgtattaatattcaaagaaatt

SEQ ID NO: 10369 - DNA, 120 bp, synthetic construct
  source 1..120: mol_type = other DNA
cttgcaaagctcctagtgctactggtaattggtaagactcaagggtttaaagaggcctccaaagaagggtagtaaactgtgatgggccctaaactttatagttcttcgaatttttcacag

SEQ ID NO: 10370 - DNA, 120 bp, synthetic construct
  source 1..120: mol_type = other DNA
gcaaagctccagtgcgcaggctcgcgggcgcaggtgggattggatagcgacgaaggccggcaggctaggcgtggacccaactggcgaggctgctggggttgcagcgggacagttggggcg

SEQ ID NO: 10371 - DNA, 120 bp, synthetic construct
  source 1..120: mol_type = other DNA
atgtcgggctagagttaacctttggaatcggcatcatatactgtacatagtatttaaaatatatgggactggtgaagacatctagtttaatagtgtacacaaagaagaggaggcgaagcc

SEQ ID NO: 10372 - DNA, 120 bp, synthetic construct
  source 1..120: mol_type = other DNA
gagccattgtcctggactgtttgggctggggtttgtcacagtgacagtccttaagtttttgtgaaaatcttttatgactgcatttcatattggatctgatgtactggtaatctacagaat

SEQ ID NO: 10373 - DNA, 120 bp, synthetic construct
  source 1..120: mol_type = other DNA
atagagttcatttcattaatcctggcattacataccacttagcaaaggggaataaggcttggggagtaatgtgattccatgttgcttttcccagatcagcagcccatttagaggaatttg

SEQ ID NO: 10374 - DNA, 120 bp, synthetic construct
  source 1..120: mol_type = other DNA
tgagagccttatatagaatctcaatatttcagcaactctgggaggtacatatatttcccatgttgtagatgagaattttgaggctaagggaggttaagtagcttgcacactcagttgtgt

SEQ ID NO: 10375 - DNA, 120 bp, synthetic construct
  source 1..120: mol_type = other DNA
aaaagtggttttgggaaaaataaagcaagatgatgagtagagatcccagcagcaatgcatgagattccatttgctccacatcctcaccagaatcactttgtattggactgtgtgtgtgtg

SEQ ID NO: 10376 - DNA, 120 bp, synthetic construct
  source 1..120: mol_type = other DNA
tagaaataacatgactttggcaaagacacaggatgtgaggccaatatacaaaaatcaattgtatttagcactggcaatgaacaattggaaattaaaacttagaaatacagtttacaatgg

SEQ ID NO: 10377 - DNA, 120 bp, synthetic construct
  source 1..120: mol_type = other DNA
acactggccacattttaagtgatcagtagtcccaagtggcttccacattggagggtgctgctatatagaatgttttcatcattatacaaagttctactggacattgagggtctagaggtt

SEQ ID NO: 10378 - DNA, 120 bp, synthetic construct
  source 1..120: mol_type = other DNA
tcccatacccttttggcttaaatgaggctttctttaatgactcaattttttactccattttatctccactctgcccttatgttgcttctgctttttctcctccatgcttcttctccttct

SEQ ID NO: 10379 - DNA, 120 bp, synthetic construct
  source 1..120: mol_type = other DNA
gcatatctagtttattggcagagggtgatttttaggggaaacttatggacagaaatgtgttcttgggcagaaatgtgttcgtgtaagacaggtagatgttcacaccattactccccagac

SEQ ID NO: 10380 - DNA, 120 bp, synthetic construct
  source 1..120: mol_type = other DNA
cttctactttcatattttgtgtgactctctaaatcccttccatctctaggtaaggttaaattcttctcctgtgatctggattttcagattcccagcagggatgtgtgtttggaggtcggt

SEQ ID NO: 10381 - DNA, 120 bp, synthetic construct
  source 1..120: mol_type = other DNA
ggtagaaatacagatattaaaggtgattctggtgaaggctcagtagagaggggaattttagaaaaagcatctatcatagattctttgcatcttagagaatacatatgttgtcatgaacag

SEQ ID NO: 10382 - DNA, 120 bp, synthetic construct
  source 1..120: mol_type = other DNA
atagcagctcttgggcaccaatacagttatcttctagaagtttgagagtttttgtgttttacatttaggtctgtgattcattttgagttatttttttgtgaaaggtgtaaggtctgttcc

SEQ ID NO: 10383 - DNA, 120 bp, synthetic construct
  source 1..120: mol_type = other DNA
aacatgagtaccatttgctattctttaggaacagctttcttaccagaagtgggtggctcaggcatcactgccttatcacagggaagtattttccacctattacctcatatctgactgtga

SEQ ID NO: 10384 - DNA, 120 bp, synthetic construct
  source 1..120: mol_type = other DNA
tgttactttaaaaaagcatttagtgcaaaaatggtcaattgtaggtaagccttgtatgcaaaattatttgcagttaaaaatattgcaacattacacagttcatttttccttcttttgcgg

SEQ ID NO: 10385 - DNA, 120 bp, synthetic construct
  source 1..120: mol_type = other DNA
aacactgaaattctctctgcttttaagataacaaaactggctgaaatcagttggaaccaatacagcaaactagagtctacacagaatgagcttgctgacgccacagcccaaatttccact

SEQ ID NO: 10386 - DNA, 120 bp, synthetic construct
  source 1..120: mol_type = other DNA
attgaagtacattatctttttgtggctttttaaaagtcaactttattgaggtgtaattatgtataaagcttttaaccttgcaagtaaagatggttttccttcttccttcccaatatgaat

SEQ ID NO: 10387 - DNA, 120 bp, synthetic construct
  source 1..120: mol_type = other DNA
tcttttatcagggctaattctctattttctatactattgcaccttccccaggagttggagggaaacctttatcttacgaacctgaccactggtccctcaatatctttcacaatctttccc

SEQ ID NO: 10388 - DNA, 120 bp, synthetic construct
  source 1..120: mol_type = other DNA
ggtttgaacaactgactattggtatggtttgatatgaattttagtctattcatctgtgcactggagaggtcttaataatatgtgtgtgtatttatataaagaggataagtcattggggta

SEQ ID NO: 10389 - DNA, 120 bp, synthetic construct
  source 1..120: mol_type = other DNA
agatggcaaaggtagttcaaagaacagtttgaggatctaggtttttcactggcgttttgaaccaatgttagagtaagaatgctagattagattaagaaaacctggttaatgccagacaga

SEQ ID NO: 10390 - DNA, 120 bp, synthetic construct
  source 1..120: mol_type = other DNA
tacgtcattggagtggaggggccattcacatatttatttgtggaatgcaaggtatagcatatttaagctctggtatttgaataaataagcgtatctccagttctcaaggaatatcctgaa

SEQ ID NO: 10391 - DNA, 120 bp, synthetic construct
  source 1..120: mol_type = other DNA
tcattccttccaccttcagcccagcttctattccctcttctatccgccctccttgtcattattattgctctctccctagaagtgtttttccaatccttatcgggtataattgacaaaaat

SEQ ID NO: 10392 - DNA, 120 bp, synthetic construct
  source 1..120: mol_type = other DNA
ttgataggaattgcattgagctctcagattctttggttatattgtcattttaaaaatatttattcttttattccatgaacatgagatgtctttccattggtttgtgtcttcctcaattta

SEQ ID NO: 10393 - DNA, 120 bp, synthetic construct
  source 1..120: mol_type = other DNA
aattacccagccttagacattcctacgtagtgatgctaacagactaacacacagtattatgggttttttaaaaaaaaatttaaaaataacatctgcctgattccctcactgattaatgaa

SEQ ID NO: 10394 - DNA, 120 bp, synthetic construct
  source 1..120: mol_type = other DNA
tcaaatggtagttctgttttatgttcattgagaaatctccaaaccacattccacagtggttgaacttaaattcccatcagcagtgtataagtgttcccttttctctgtaacctcacaaac

SEQ ID NO: 10395 - DNA, 120 bp, synthetic construct
  source 1..120: mol_type = other DNA
cttggaactaggcattccctgtgggtaagcgggaactgctttaccatttcacatatagttgtaggaacataagatacttccatttcctcccatttgcctttcatgctattattgatacca

SEQ ID NO: 10396 - DNA, 120 bp, synthetic construct
  source 1..120: mol_type = other DNA
tgcgcttcattttggatatactcttgctgtatgttgacagacactgattttttttccttctgccttatctgctgttaatttattttagttcatacattgtctctagaaatttcagtaggt

SEQ ID NO: 10397 - DNA, 120 bp, synthetic construct
  source 1..120: mol_type = other DNA
ttccggtggtccttcctgagtgtcagagattgtcctccttcatataagcatatccatattctgcaaaggacatgagagggtttctttgcagctacttagacttctcttgttctgtatagc

SEQ ID NO: 10398 - DNA, 120 bp, synthetic construct
  source 1..120: mol_type = other DNA
gtagtttctctgggtttcctcagtttttctttggcttctatgattgaatacaaaactcatttatatcagctttttttttctgccttttttgtaaacacatttaaacctatacattttccc

SEQ ID NO: 10399 - DNA, 120 bp, synthetic construct
  source 1..120: mol_type = other DNA
tagcttgttttttctcattaaggctccatttttccttctgtatagtgttttctatttgatcagtttttccccccgcctttgttcagtaaacgattatgagggaaatgactctgaagcaga

SEQ ID NO: 10400 - DNA, 120 bp, synthetic construct
  source 1..120: mol_type = other DNA
gctctccgctcactcttgattcttttctctgatcagaatggttttctctttgaagcagagacgatttgaaagggagcaccttcacagaatggcccaagtatatcctttatatagtcttat

SEQ ID NO: 10401 - DNA, 120 bp, synthetic construct
  source 1..120: mol_type = other DNA
agctgaaagatgtctcaggtttaaattgtgttaggacttccagatatcactttttctaagtaaatgaattgtactcaaatgacttttaagcatgtctcataagagggaagtgggatcatg

SEQ ID NO: 10402 - DNA, 120 bp, synthetic construct
  source 1..120: mol_type = other DNA
gcactgcgagttatcaagactgaagtccactgcccggtgcaaaattgggcagtggaatgtggagaaatacttagaattagtagattagatggtgcaagtactaaagtaaagataaattta

SEQ ID NO: 10403 - DNA, 120 bp, synthetic construct
  source 1..120: mol_type = other DNA
aatttaggtgttataagcaaaaacatcaaatgaggaaacattttgttaagccatattttcttagagatttatcagtaatattagctaccctcactggaatagcactgtataagaatgtgt

SEQ ID NO: 10404 - DNA, 120 bp, synthetic construct
  source 1..120: mol_type = other DNA
gccaatatcctaaacttttgtgtctgataaggggccttgatttatcctgatattggtgggcaggtgtaattaagtttgtattttaggaagaattttctctaaacattgaaggttagatgc

SEQ ID NO: 10405 - DNA, 120 bp, synthetic construct
  source 1..120: mol_type = other DNA
gatgaggaggctgcagggccatcacaggctctctcccctctactttctggtatgacatcatcctatttgtagtagcaagttgaggctctattttagagatatgcacaaagatatttctaa

SEQ ID NO: 10406 - DNA, 120 bp, synthetic construct
  source 1..120: mol_type = other DNA
gttaaccctttaccctaccaccggtgcctagcaaccagtaatctattttcattctctttacttttgtctttttcaaggtattgtataaatggaatcataaatatgtagccttttgagtcc

SEQ ID NO: 10407 - DNA, 120 bp, synthetic construct
  source 1..120: mol_type = other DNA
cctagaaatagtcatgcctattcctctggtaggccatttaggacatgagctgggttttggttttgtgttgctctcattacctatggtgaaccattggcttagaattccttaggatttagc

SEQ ID NO: 10408 - DNA, 120 bp, synthetic construct
  source 1..120: mol_type = other DNA
tgcattacattttatgtctgaatacttctttcccatttgtatagtgcctggtatctctttctcccttgaactgccacagggagccagtgttcatgtcctgtcactccttaggagagtctg

SEQ ID NO: 10409 - DNA, 120 bp, synthetic construct
  source 1..120: mol_type = other DNA
agatatctgtcaacaccagcatgtatgaattagatattgtattttgtttaatgtgaagatgaataaacccagatgcagtcttagcaaaaaagtcaagatttaaaacaaaataatgtaatc

SEQ ID NO: 10410 - DNA, 120 bp, synthetic construct
  source 1..120: mol_type = other DNA
agatctgacatgagaacctcgcttgtgccctgttttagctggaaacattcagagaacagaattctgggaaaagtggtccagcctagccatgtcaacatattataaagctatcacagttca

SEQ ID NO: 10411 - DNA, 120 bp, synthetic construct
  source 1..120: mol_type = other DNA
tttgtatattaccaatgtgtccttcaaccttcctaaatgctcattaattctagggccttttaaatatattttttggaatttttttaagtagatactcatgttggtgaataaacacagttt

SEQ ID NO: 10412 - DNA, 120 bp, synthetic construct
  source 1..120: mol_type = other DNA
tctgaggcctctctccttgacttgcagatggccgtctttcctctgtgtcttcacatggtcttcccactgtgtatatctgtgtcttaatctcttcttataaggatatcagttatattacgt

SEQ ID NO: 10413 - DNA, 120 bp, synthetic construct
  source 1..120: mol_type = other DNA
agagggtgtgcttagattatatgcaaatactatgctattttgtgtaaaggacttgagcatctgaggattttggtatctgtgggaggtcctggaaccaattccttgcaaatacagagggac

SEQ ID NO: 10414 - DNA, 120 bp, synthetic construct
  source 1..120: mol_type = other DNA
cctagatgggctcctgaaacagtaaaaagatattaaggaaatctaagaaaaccaaaatacaggatggactttagttaacaaaaatgtatcaatattggttcaatactaatgaatgtacca

SEQ ID NO: 10415 - DNA, 120 bp, synthetic construct
  source 1..120: mol_type = other DNA
taacagtgaaggcattggatccagggcttacttttttgggatagttttgataacttattcaatcaccttactagtcataggtctgttcagattttctgtttctttgtggtttggttttgg

SEQ ID NO: 10416 - DNA, 120 bp, synthetic construct
  source 1..120: mol_type = other DNA
aatttttgctttgtgtattttgattgttactaggcgtgtaaatgtttataactgttatatgttcttgctgtattgaaccttttatgatatataatgtccttctttgtcatttttaacttt

SEQ ID NO: 10417 - DNA, 120 bp, synthetic construct
  source 1..120: mol_type = other DNA
cccaattctccttctcttctattttgggattccatttacaggtataatatattagtctgtttgatattggtttgtagttcttggatggtctcttcttctctgcctctgcccctcatctac

SEQ ID NO: 10418 - DNA, 120 bp, synthetic construct
  source 1..120: mol_type = other DNA
ggcattaaatttatgggtggaagacatgaacaaaaatatgtttcagttgatgacgatcaggttcaatactatccagagtttcatgcatccactgggggtcttggaacatatcccctgcag

SEQ ID NO: 10419 - DNA, 120 bp, synthetic construct
  source 1..120: mol_type = other DNA
aattattctgcatgctatattatattattattttttctgtgtttcacattttattccattttgttatgaacacgtatagctttttctgtctcttcggttttgttgattgagcaggaatga

SEQ ID NO: 10420 - DNA, 120 bp, synthetic construct
  source 1..120: mol_type = other DNA
agcatctgttcttcaagcccacacaatggtgatacaacaccaaatagctagatcaaatccctttctgtaaactggctgaaatgattcccaggatctacagctgaaacctcacctttatac

SEQ ID NO: 10421 - DNA, 120 bp, synthetic construct
  source 1..120: mol_type = other DNA
tttgaagcttttaaaatactcttttactgttgacttctagatttattgcattttggccagtggacataatgtataaaatttcagatgtttggaaccttgactgtcaacattacctaaaag

SEQ ID NO: 10422 - DNA, 120 bp, synthetic construct
  source 1..120: mol_type = other DNA
gatgtacgtggttaaaaaaaaagccaaatagcataaaaggatataaaatagaaagtctctctctttctctcaagactttctagggcccctttacactattcattttgtcattttgtcatg

SEQ ID NO: 10423 - DNA, 120 bp, synthetic construct
  source 1..120: mol_type = other DNA
ttggggcttctgggtttggggctttctgtgctctttaggaatgcttcttttactctaggattgtaataattacttcatgtttttttctagtacctttatgatttttaagcatttaaatct

SEQ ID NO: 10424 - DNA, 120 bp, synthetic construct
  source 1..120: mol_type = other DNA
tatactactgtctccgtacattggtcacatggtatttgattacatgtcctctaactactctgttcactccttaaggatgaggccattatccaattcatccctgtattccagtgtctgaaa

SEQ ID NO: 10425 - DNA, 120 bp, synthetic construct
  source 1..120: mol_type = other DNA
gcatgagccttccaaaacataaaatccaatagtctgagtcatacaccacttttggtacccgaagccttaaccaccttctctggctattttgtttagacacgcgaaaaaagagctatttgc

SEQ ID NO: 10426 - DNA, 120 bp, synthetic construct
  source 1..120: mol_type = other DNA
gtaaccactctccccttctaccaaaccatattttaattattttcacttttgtttctcctactagacttgagatagttattataaaaaccagagtggaacacagtgactgcggtcactaga

SEQ ID NO: 10427 - DNA, 120 bp, synthetic construct
  source 1..120: mol_type = other DNA
atgaattcacacacctttgaacactgcaaatatagggaaccttcactttgcatggccccaatatgctcaaatatcagttactgtgtttagctaaataacaccagtcccacagtacaattc

SEQ ID NO: 10428 - DNA, 120 bp, synthetic construct
  source 1..120: mol_type = other DNA
cataaaacttctgaaagaaaccctaggagaaaacgttactgcccttggctttggcaaatttttcctaaataggacacaaaaccctcaaattgtaaaagaaaaaaaataaattggacttca

SEQ ID NO: 10429 - DNA, 120 bp, synthetic construct
  source 1..120: mol_type = other DNA
cctgctgccaccttgatctttgtcttagtttctttgtgttgctatagaggaataatttatgaaggaaagggatttagttagctcatagttctgcagaccggaaggttcaagagtgggcat

SEQ ID NO: 10430 - DNA, 120 bp, synthetic construct
  source 1..120: mol_type = other DNA
aacatttccactaaagattgccttggtaggggctctctttggtggctccactcctgcaataggcatctgcctgctttcccaggctttttaatatattctctgaaatttaggttaaagctg

SEQ ID NO: 10431 - DNA, 120 bp, synthetic construct
  source 1..120: mol_type = other DNA
tctattcatgagtgatttgtctccatgactcaaaacctcccattaggccccacttccaatgttggggatcagttttcaacataaggtttggagaggacaaacatccaaaccataacaata

SEQ ID NO: 10432 - DNA, 120 bp, synthetic construct
  source 1..120: mol_type = other DNA
ttagtttctatgaattttagggttgcctcttggttctatcttataaaaccttttctcgttacttcttttacctctgtagttttgcaagtactttctctatctctctctctctctcatttt

SEQ ID NO: 10433 - DNA, 120 bp, synthetic construct
  source 1..120: mol_type = other DNA
tcctgaaaatggctgaattacagtgcaaattgaatccccacccttttagggtgtctgctgttaaaatgagggcattaactgagaaggaatgggatcttgaaaactggagtgcagacatat

SEQ ID NO: 10434 - DNA, 120 bp, synthetic construct
  source 1..120: mol_type = other DNA
acttgatagccaaaggcaaggtgagcatggtatggtaatagcagagtcaaagcagcaatcagaacagtctgacctgtagagacctgtggtgttgattagttgatcatggtgttcctagaa

SEQ ID NO: 10435 - DNA, 120 bp, synthetic construct
  source 1..120: mol_type = other DNA
ctatgtagctattgatctgggaaatgcttttttctctatacctattaatcaagaacaccaaaagtagtttactttcagctggcagggccaacaatacaccctcactgtcctacctcaggg

SEQ ID NO: 10436 - DNA, 120 bp, synthetic construct
  source 1..120: mol_type = other DNA
accatcaaatgaaagtggtagatacaacattgggcttgagcagatcctgaaggcacaaataagttacacgaagaagctgcccaaatgctcactgttcccacccctgctacattacctgct

SEQ ID NO: 10437 - DNA, 120 bp, synthetic construct
  source 1..120: mol_type = other DNA
cctacagaatgccttatccaccatcatggtattccatacagcattgctgtaatcaaagaactcactttgtggcaaataccttgtggcaatggcctcattgccactatgttaccatattcc

SEQ ID NO: 10438 - DNA, 120 bp, synthetic construct
  source 1..120: mol_type = other DNA
tttttctgagttctgggaaaattttttaagctgattttctaaacataaatttgtttttctgttcaattcctgctttaggagtttgagttgaatgattgtgacttttatatgaaatcaagc

SEQ ID NO: 10439 - DNA, 120 bp, synthetic construct
  source 1..120: mol_type = other DNA
tcagcatatttactagataagtggtccatgtgattctgagtagtaaggagaggttattggtgagagagctgcatggcagagaagggcctcctttgctgtgtgtgtttctgctctcactgt

SEQ ID NO: 10440 - DNA, 120 bp, synthetic construct
  source 1..120: mol_type = other DNA
attgccatgataaccagagagatagaaggtggaattatcaaatgctaccattactggcccatttctctgaagaagccattggaattgaaacacttccgtgtattcctggagaactaccag

SEQ ID NO: 10441 - DNA, 120 bp, synthetic construct
  source 1..120: mol_type = other DNA
agctaagtagcatgaactttattatgaagataattgggagacattgaagaattttagtaagtgacatgatcaactacggctgttggcatgggggtggaaagcacagacgcaagtgttttg

SEQ ID NO: 10442 - DNA, 120 bp, synthetic construct
  source 1..120: mol_type = other DNA
ggagtttgagtccaaaagcaatctgctggtagaattccttcttgctcatgggaggtcagtttttgttctcttaaggccttcagctgattagatgaagccaacccactttatggagaataa

SEQ ID NO: 10443 - DNA, 120 bp, synthetic construct
  source 1..120: mol_type = other DNA
cgtgtgaaccttctgacctagcatacatctctcgtccccctcatccttaaattttcatctgtaaaatggagataaaatggtgcctatctcacatggttgatgtgaagattaaaggagaga

SEQ ID NO: 10444 - DNA, 120 bp, synthetic construct
  source 1..120: mol_type = other DNA
ttaggacagtgtctggaacataatagatacacagaaaatgtgagttccatttccttttccttccctgtatcttacacggggtgtttagactcttactagagaatgttgatggaatgtgcc

SEQ ID NO: 10445 - DNA, 120 bp, synthetic construct
  source 1..120: mol_type = other DNA
atgagaacatgcagtatttatctttctgtgcctgccttgttttgcttaatgcaatgttctccagacttgtccatattgctgtgaatgacaggatgtcactctttttttatggctgcatag

SEQ ID NO: 10446 - DNA, 120 bp, synthetic construct
  source 1..120: mol_type = other DNA
tggcttcatagaatgagttagagaggagtccctcctccttgaattttttggaatggtttcagtaggattggtagcagttcttctttgtacatgtggtagactttagctgtgaatccgtct

SEQ ID NO: 10447 - DNA, 120 bp, synthetic construct
  source 1..120: mol_type = other DNA
cagtgtttttaatctttttcagatttgctttatggctgagcatatagtcgatcttagagtatattccatgtgcagataagaagactgtatatcctatggttttggagtggactagtctgt

SEQ ID NO: 10448 - DNA, 120 bp, synthetic construct
  source 1..120: mol_type = other DNA
gcattgaccttggtgaatctgttaactatatgtcttgaggatggtcatcttgtatggtatctcacaggactttgctgaatttcttaaatttgcctattgacttctctagtgagattggga

SEQ ID NO: 10449 - DNA, 120 bp, synthetic construct
  source 1..120: mol_type = other DNA
ccatggcagtgtcagaaccccaaacagcacctggggtgaaggagctactgaaagagtggagagactccactttgtcctgttagatctgtctcagaagtatttttattaggattgactggg

SEQ ID NO: 10450 - DNA, 120 bp, synthetic construct
  source 1..120: mol_type = other DNA
agggtgaccagacatcacctgggaaggtggaggatgaggaccctgatcggatattgggagtggtcagataggaacaaggggagttcttgctgaattgacttagtgggattcttgctcaaa

SEQ ID NO: 10451 - DNA, 120 bp, synthetic construct
  source 1..120: mol_type = other DNA
aaagcagctaggcaatggctcagaactgaaagcaagtctgcacacagagcaggacttgaactgaaagaaaggaataagaattctcacccagggctgggatccaagagacgcacactgata

SEQ ID NO: 10452 - DNA, 120 bp, synthetic construct
  source 1..120: mol_type = other DNA
gtcccctttccttgaagctggggtggcttgtggtgtcttcaactgatagggcaccggggaagtgatgccatgtgactcctgacgctaactcacagaaggcaatgtggtgtccttcttgtc

SEQ ID NO: 10453 - DNA, 120 bp, synthetic construct
  source 1..120: mol_type = other DNA
taaataaattacccagactcaggtattgctttatggcaacacaagaatagcctaacacagtcaaagtcatggagctggtgcagggcagagccagaatctgcctcccgtccaagtgaattc

SEQ ID NO: 10454 - DNA, 120 bp, synthetic construct
  source 1..120: mol_type = other DNA
cgaggcgctcaggcttcgtggctccccaaagctctgtttctgacaaattaaattggtcctacactggtccctgctaaacatccaaagatactttgagttgaatacaaatctttattattt

SEQ ID NO: 10455 - DNA, 120 bp, synthetic construct
  source 1..120: mol_type = other DNA
gcgtccatggccgaggttgagtgaggagtcctggagactctggcttcatggtctttgctcttgttcttctgtgcctcaggggtcgctgcccaccaggctcagcagggcgttcttgtagtc

SEQ ID NO: 10456 - DNA, 120 bp, synthetic construct
  source 1..120: mol_type = other DNA
gtaaggggtagactggggctagacccactttccacactctggaccagtttaggtctcatggttattgtctacttttcaccatttagtaaaatttgcctgttttgagcctgaaatctcatt

SEQ ID NO: 10457 - DNA, 120 bp, synthetic construct
  source 1..120: mol_type = other DNA
agagctgtttctcccaattatcgcagcgtgataatcagtctgtgttttgaaggctccagaacttttgctaattggaatctggttagatagtctattggcgctcatctgacttatctcctt

SEQ ID NO: 10458 - DNA, 120 bp, synthetic construct
  source 1..120: mol_type = other DNA
ctcatttcctgggcagaagtggccagagggcttgggtttcgggtgtggaactaacttcaggggatatcagcaaccatcaatcagagaaaacgggcaatggttttagtttcagggaattat

SEQ ID NO: 10459 - DNA, 120 bp, synthetic construct
  source 1..120: mol_type = other DNA
attttcacttagggctgcagaaggagcatgggctttgagtgaggtaggcatgtgttcacttcctgccttgatggtgcagtatggcttcattactcaacctccctgactcatctgggaagt

SEQ ID NO: 10460 - DNA, 120 bp, synthetic construct
  source 1..120: mol_type = other DNA
tgaaaaacgtgcaagtctgagctcttacccacagtgagcatggcctcctccagtgagccatgggtctcactcttgatgctgtcctcaatgctcttgttggcaattttctcatactcttca

SEQ ID NO: 10461 - DNA, 120 bp, synthetic construct
  source 1..120: mol_type = other DNA
cccaagtcacactccttcctcccgagtctcccaacaccctcactctcctccccagacaccacaggacaaaggcctatagggagctgagctgggtgggtcccagcccagtgtcagagaaag

SEQ ID NO: 10462 - DNA, 120 bp, synthetic construct
  source 1..120: mol_type = other DNA
tgcttcacaactagaagcgacatgcgtacccaaccaagctcaaagcacaagatggaccaggtcagagagccaggctaggggctgccaaccaagctccatttcatctcaaggcttggcaaa

SEQ ID NO: 10463 - DNA, 120 bp, synthetic construct
  source 1..120: mol_type = other DNA
aaaatgactatagttactgggtccccatccttattaatctgcaaaagcaaagagtagtgagaggtaaagggaaacccaaggggctgtgcctgggactgtagaggtgggtttccaatacca

SEQ ID NO: 10464 - DNA, 120 bp, synthetic construct
  source 1..120: mol_type = other DNA
ttgttgattacaggctctgggaccttgggcaacttaaaacctctctgagtgccagtttccccaaatgtttgaatacaaagaatgtatcactgtgaggactaagagagggaaactgtaaaa

SEQ ID NO: 10465 - DNA, 120 bp, synthetic construct
  source 1..120: mol_type = other DNA
agaccattttcgtggtgtaaacaagacccttaggaaatctgcctccccatttcccaccccacacccccacaatgttggggcgtgcccaaggccagcctcacaagatggaatctgaggtct

SEQ ID NO: 10466 - DNA, 120 bp, synthetic construct
  source 1..120: mol_type = other DNA
ctcctgtccagtcttgcagggtgggtgctgacctcactgcagaaacagagggctgtgtgattctctgggtagtggaatcagtttcagagtatcatgggacaccccagctccccagatgtc

SEQ ID NO: 10467 - DNA, 120 bp, synthetic construct
  source 1..120: mol_type = other DNA
agggatattggagataggtattgaattagagggagactcagagatcctccaggatgaaaaagagtttagtcccatccagtcttgtcttccatttacctgttcacttattccttccatcac

SEQ ID NO: 10468 - DNA, 120 bp, synthetic construct
  source 1..120: mol_type = other DNA
aaggaagcttcacccacaggaacgcaggtcatctgggaatgtgggaggcatctcagctctcagtgcctgccggcttccctctgccccagcactcgggggctgtggtgcaccagcgagtgg

SEQ ID NO: 10469 - DNA, 120 bp, synthetic construct
  source 1..120: mol_type = other DNA
ggcacctgcctagcctacttgtgcctcagtttcctcatctgtggataaggatactggtgtctacttcatagactccttgtgaggttcaagggagatattgaatgtgaggtgcttagagaa

SEQ ID NO: 10470 - DNA, 120 bp, synthetic construct
  source 1..120: mol_type = other DNA
gtccccaacagcaggttcaggttactctcatgctcaaagcccttcagtgccttcccacttctcttaaggtaaagcctaactcctcagcctgccaggcaaggcctttcaggacctggccct

SEQ ID NO: 10471 - DNA, 120 bp, synthetic construct
  source 1..120: mol_type = other DNA
tctgagcttgcgtttgggtcaggagaatttgaaagtcatcaggaaccaaaccaggatataaggttcagctgtagctggaaagtggcaagcgttccaaagctaagacattggctatacctg

SEQ ID NO: 10472 - DNA, 120 bp, synthetic construct
  source 1..120: mol_type = other DNA
tccaaccagcagcaggggccccagtgccagtgtccacctcagcagaggagacacgggggacatgcaaagtgtttctgttgaaaaatacttcacctagggtgactatagttagcagcaatg

SEQ ID NO: 10473 - DNA, 120 bp, synthetic construct
  source 1..120: mol_type = other DNA
gttggtcactgtctcggtgatttccttcatctttttgtcccctgactcctgggctttctttatggcttcagcaatggctgttggaaagaggaagaatgtcctagtgatccacctgctgaa

SEQ ID NO: 10474 - DNA, 120 bp, synthetic construct
  source 1..120: mol_type = other DNA
tctaccttccacctcttggttccctcatctttagaatgggaatctgttgggatgatgagacccaacaccaggtcacgggggcggcaagtccagcggagtcaaaggaatgacaaagagaca

SEQ ID NO: 10475 - DNA, 120 bp, synthetic construct
  source 1..120: mol_type = other DNA
gtgccagagcaagactccatttcaaatacaaatacaaataaaaataaacatgctttaggggacttggatgaaattgaaaatgccctttttgactttgaacagacttggtgacttgttaag

SEQ ID NO: 10476 - DNA, 120 bp, synthetic construct
  source 1..120: mol_type = other DNA
agggtggtgccttgcccgagtcagaggggggcacagcactgggcagaagcgtagtcacctggtgtcgctcagctgatgctcactcacccaagaggctctgtgaggtcagcagtgccctcc

SEQ ID NO: 10477 - DNA, 120 bp, synthetic construct
  source 1..120: mol_type = other DNA
gactgtggccccacacatgccattgctgtctcctttgggcaggggtgaatcggggcttcaacaatttagaggggcctctttatgaaaaagaatacaataatatgattcttgcacattttt

SEQ ID NO: 10478 - DNA, 120 bp, synthetic construct
  source 1..120: mol_type = other DNA
ccgtccatgggccccagcaagccatctgtgccccacagagggcagacccctaagagtgggacccctttctagccaaagaacatgagatagccccaaatcctcctaaacatgatggatcct

SEQ ID NO: 10479 - DNA, 120 bp, synthetic construct
  source 1..120: mol_type = other DNA
gtagaaagatgtggccactgccaaaccaacaaggaagaatctgagcgaataaccacctctcctctctctctctctcccacctcctatgacgtcctccactgtgtgaattccactagggcc

SEQ ID NO: 10480 - DNA, 120 bp, synthetic construct
  source 1..120: mol_type = other DNA
aggaggaagaggaggaggaggaggaggaggaggaggaggaaaaagcccatcatcaatacacacatcaaactcaacttcagagaaattaggaagctgggaagccacgtaaacccaaaagca

SEQ ID NO: 10481 - DNA, 120 bp, synthetic construct
  source 1..120: mol_type = other DNA
gcgagaccctgtctctaaaaaaataaaaccaacaacaaacatacataaataaaaagatcacatccaaataatagaaaaagatgatatggttttggtccccaaaactgacatcatgtagga

SEQ ID NO: 10482 - DNA, 120 bp, synthetic construct
  source 1..120: mol_type = other DNA
tgcagttttacactctccgcagccaaaacggaggcttccagttgttgtacatccttgtcaacatttgagatgtcagtcattttcactgtagccattctagaggctgtaaagtggaacctc

SEQ ID NO: 10483 - DNA, 120 bp, synthetic construct
  source 1..120: mol_type = other DNA
gataattcacacagaaagaaggacggtagggagagacgtgcggggggtagggagggcggaaggaaggtctaggggaaggagcggagggggaagggaggaaggaaggcagcaatggaatga

SEQ ID NO: 10484 - DNA, 120 bp, synthetic construct
  source 1..120: mol_type = other DNA
tcctgtaacttctagctataaaaataggctctgttcagcatttaaaatgtccaatcccatgtaggagtctaaactttcgatttcattttaagtttaagcttcctcttgattcctccccca

SEQ ID NO: 10485 - DNA, 120 bp, synthetic construct
  source 1..120: mol_type = other DNA
ggctgtgtccattgccctgtagtgttgcagttcccctcaggaaaaagatatcatttacttctctgacccttgatttggagcttggctatgtgacgtgctttggccaatgggatattggat

SEQ ID NO: 10486 - DNA, 120 bp, synthetic construct
  source 1..120: mol_type = other DNA
atggttagcattcaacaataagtgatcaaacacaccacaaaacaggaaggaggggaaaacagacacaacaaaacggagccactaatgacccagatattggtgttatcagacacagacttg

SEQ ID NO: 10487 - DNA, 120 bp, synthetic construct
  source 1..120: mol_type = other DNA
gacacattactctcaaaggagaaacaatagcactgaaaatcacttgtcaacagaaatgatggaagtgagaagataatggagtgccattctgaagttcctcaaagaaaaaagtgtcaacct

SEQ ID NO: 10488 - DNA, 120 bp, synthetic construct
  source 1..120: mol_type = other DNA
aagtaaaaccaatggtagggggggaaacggaattaaaaaaataatcagaaagaaagcaacagaaaagaaaaaataaaaacaaaaatgggtaagacaaatggaaacaagtagtaagatggt

SEQ ID NO: 10489 - DNA, 120 bp, synthetic construct
  source 1..120: mol_type = other DNA
cactggataacaaggtcaacatagttttgtagcaacagaatctgtatatactagccataaacaaatataaaacgtctaagaataaatctattgaaggatgtgcaagaacactttactgaa

SEQ ID NO: 10490 - DNA, 120 bp, synthetic construct
  source 1..120: mol_type = other DNA
catagcagtgtgttttctctgccaggcagaaggcagagaaaccctggctgaaaaagcagtgagggtcatcgactgcatgaacacatcatcagctttcccagatggaggcacccaagttta

SEQ ID NO: 10491 - DNA, 120 bp, synthetic construct
  source 1..120: mol_type = other DNA
tggagaagggtcttaagtccaggccatgtggccagccacggcctgatggctctgtttccccagagtggcagtgggtgctggggtgtggggcagtgtgggagctggctgacagaactcgcc

SEQ ID NO: 10492 - DNA, 120 bp, synthetic construct
  source 1..120: mol_type = other DNA
tgctgggattacagatgtgagccagcatgcccggctgcttaacctgtttctagggtgccacagacagagctcaactggactaaagctgggcctgaaacccaggccttgggcaatatttca

SEQ ID NO: 10493 - DNA, 120 bp, synthetic construct
  source 1..120: mol_type = other DNA
aggacagttcaaagagccaagacgctgcctcgggaaacaggaggggcagggcctggtattgcggctgggttagaaccctccgtaggggaggccaaggagatgcagctttgggttcaacac

SEQ ID NO: 10494 - DNA, 120 bp, synthetic construct
  source 1..120: mol_type = other DNA
gtcccccactagggtctcattcttcaaggggaagagcacctggcccaggagctggtgcttcctctgcctgtccacgtggtagacggagaacttcagcaccctctgggtgatggtcttgct

SEQ ID NO: 10495 - DNA, 120 bp, synthetic construct
  source 1..120: mol_type = other DNA
tgactggctgaacctcacctcttggctagcttgccacccagctcttgagaacatgtttgtccaaggcctcttggcaggtctcgatgactccttcccctaagggcccccagtcacctgcta

SEQ ID NO: 10496 - DNA, 120 bp, synthetic construct
  source 1..120: mol_type = other DNA
tgtacagctctgggttgatggcccccaccatacatgcatctcctatgacagagggtgggagggctggcaggccagaggaaggcaggggcatgggagacagtggcaagctctgggcaccca

SEQ ID NO: 10497 - DNA, 120 bp, synthetic construct
  source 1..120: mol_type = other DNA
gcatcggcccactctccactgtgcaggggcacccaatctcggccttgaagggttgggggcaccacgaatggcacagctggtggcctgtccagagtcagggagacaacatgtaggtggcaa

SEQ ID NO: 10498 - DNA, 120 bp, synthetic construct
  source 1..120: mol_type = other DNA
gtttaccccagggtctgagagccctgggcagaaccttctagttttccttggaaaacagctggccctgcccttgggattctggcttaaagaagccatttccttgcgcttctgagtagaaat

SEQ ID NO: 10499 - DNA, 120 bp, synthetic construct
  source 1..120: mol_type = other DNA
gtgagagtaccacccccatcccggagagcagggctacagccttcaccgccgcgtctgacacagggctccgcacccgacccctcacacctggtggccaggactgagcccccgccctcccag

SEQ ID NO: 10500 - DNA, 120 bp, synthetic construct
  source 1..120: mol_type = other DNA
gcggagacccaggccacttcacccagtaactgtcctcagctgtgcgcttaactggcgagatctccgctctacttggagacagtctggggtgtctggagaatcctcccccacttctgctta

SEQ ID NO: 10501 - DNA, 120 bp, synthetic construct
  source 1..120: mol_type = other DNA
aattcatctcagagtgtggcgtttctctataagaggctcatcagataatccaggataaccaccacccccatctcaagatcattaacttaatcacacctgcaaagccccttttgctatgta

SEQ ID NO: 10502 - DNA, 120 bp, synthetic construct
  source 1..120: mol_type = other DNA
gctgtgctgaatggcagatgaagggctcttgccattgggatgagctgccccagcttctgcccacattgtccatgcatcatacacatcctgggctcacaatttagggcccaacaggagctc

SEQ ID NO: 10503 - DNA, 120 bp, synthetic construct
  source 1..120: mol_type = other DNA
attcattgcagcagatgattacgagaaaggccactttcaattaaccttaagaatcatccctgtctaaggaagtgtcatctctcatcactgaggaacacagaggccatagcaggataaagg

SEQ ID NO: 10504 - DNA, 120 bp, synthetic construct
  source 1..120: mol_type = other DNA
ttcagtctcttgaccaccaaggctgcccctcagcatggagcagaagtcaggaactgaggcaaggcttgtccttcctcaatcgtcacctctgggcactcagctgtcctaaagttttttgac

SEQ ID NO: 10505 - DNA, 120 bp, synthetic construct
  source 1..120: mol_type = other DNA
cttaaagttattttctattccctaagttatttcagcttcttttggggtcagttattttgtttattcatcttgacctatctcctttgtgctgttgatttcctaaatgtgtgaggatctttg

SEQ ID NO: 10506 - DNA, 120 bp, synthetic construct
  source 1..120: mol_type = other DNA
ttgcccataactgtgtggagagccattctcatctcaactcatttcttgccacaacatctcccgaggcaaactttgttattagctccgctttgcagatgagaatctggggcaatgcgagac

SEQ ID NO: 10507 - DNA, 120 bp, synthetic construct
  source 1..120: mol_type = other DNA
gaattataagctagtgtattcaaaacaggagcagcccttgtaagcaaagctgttccattatagccaagtcatgtgcatctcagctccaaaggagaaagtgaccattctcattgaattctc

SEQ ID NO: 10508 - DNA, 120 bp, synthetic construct
  source 1..120: mol_type = other DNA
gtgggccccggtacgaaccctccgggaagccgggcgcgctgcctgcccttggcccggggcgcagagcgtcacactggatctggggagcatcctacccccactgtggacctcagtctcctc

SEQ ID NO: 10509 - DNA, 120 bp, synthetic construct
  source 1..120: mol_type = other DNA
ttgacacacacttattgagtgggtgaatgaagcagtgagcattttctggagccctcccagcccagtccttccactctgatcctgctttaggtggttggtttgggatgaatggtgtttctc

SEQ ID NO: 10510 - DNA, 120 bp, synthetic construct
  source 1..120: mol_type = other DNA
ctctgacacacccttggatagagcaggcacttaagcatttgccaagtgaagaattaatatgaaagaagcttacctattcactccgcaagagttttctaataaccagttctgggttctcca

SEQ ID NO: 10511 - DNA, 120 bp, synthetic construct
  source 1..120: mol_type = other DNA
tgctggccattggaccctagcaagtcactcagtgtctctgagccttcatttcatcatctgcaaaacagaaagtgcagccctgacatcctgaggctgcctgggaggaaaggaaaagggtgt

SEQ ID NO: 10512 - DNA, 120 bp, synthetic construct
  source 1..120: mol_type = other DNA
cttcccaccctccatgcttggcccaggaggcagccaaatgtagactgagccactcccagccaagggcgactttacatttctcaggactccctggtgaccagcacccaacaccatgcagga

SEQ ID NO: 10513 - DNA, 120 bp, synthetic construct
  source 1..120: mol_type = other DNA
cttgctccctggggcatcaggaggggcttctctgtagcttctctgaacccctctctgcttctggctggggcacctacatctgagcttccagtggtgcttctgagcagctgtagtaagcgt

SEQ ID NO: 10514 - DNA, 120 bp, synthetic construct
  source 1..120: mol_type = other DNA
gaaatgtagcacagacactaactattcttccagaagagccccttcctgacatgaaagatcttacttagcatgacagagaagtatctgattcatcatgaggacctatccaaccagcagcag

SEQ ID NO: 10515 - DNA, 120 bp, synthetic construct
  source 1..120: mol_type = other DNA
tccaaagcctcatccactaagaccaggtctctcaaagcaattcctccaacaaaacggaattctctgcctacttcagagttttttaaagtgtgggtggtagtgtgctagaactgaaggatt

SEQ ID NO: 10516 - DNA, 120 bp, synthetic construct
  source 1..120: mol_type = other DNA
cctggaactagggtggcagcatcccctgacagcatgaggcttctgtaaccctgtcctagggaccccgtgaaggataggggcagggagcagggctggacagtagagatctggacatgcttc

SEQ ID NO: 10517 - DNA, 120 bp, synthetic construct
  source 1..120: mol_type = other DNA
ccctgagacaaagcatgcaagctcctggtaaacacctgttccctccactcatcattgaggtgccctttggcagtgagctctgaccaactggtagggtgtgccaaggagtgactgggacgt

SEQ ID NO: 10518 - DNA, 120 bp, synthetic construct
  source 1..120: mol_type = other DNA
gcgctttcaggagctcaccagacccagacagcctgttgtcagagctcatccacacagcaggaccctggcccactgcccagcccagagccaggcccaccacggcctctggggacaactgcc

SEQ ID NO: 10519 - DNA, 120 bp, synthetic construct
  source 1..120: mol_type = other DNA
ttgaaacacttaaatacttaggctgtctcatgtctgaagcatgatgatgccttgcgtgatttaaaggacagacgtcacgaatgccaagagttttgtggcggtccatcctgccagtgtctt

SEQ ID NO: 10520 - DNA, 120 bp, synthetic construct
  source 1..120: mol_type = other DNA
tatatggggcaacaacaagactgaggaggaagaggaggaggaggaggaggaggaggaggaaaaagcccatcatcaatacacacatcaaactcaacttcagagaaattaggaagctgggaa

SEQ ID NO: 10521 - DNA, 120 bp, synthetic construct
  source 1..120: mol_type = other DNA
tttaactgatttaaaatgaacatattcgctaaacaaaagaccttattggagtttcaccactttttccactaatgtcctttttctgttcccaaattccacccaggatcacgctgcatttag

SEQ ID NO: 10522 - DNA, 120 bp, synthetic construct
  source 1..120: mol_type = other DNA
ttctgtgggataattctcagggatttcattgttgggtcagtgggtatacccatttttatagcttttgatatttctgaatatgccagcttcagcaaaattttgccagcattggacagtttt

SEQ ID NO: 10523 - DNA, 120 bp, synthetic construct
  source 1..120: mol_type = other DNA
aagatatcaaaacatattacacccataaccttggagccaagccccttaacagagtccttccactgtgataaccataaaactcctttgttccaaggtgaactatgaagtgcaccctgcaac

SEQ ID NO: 10524 - DNA, 120 bp, synthetic construct
  source 1..120: mol_type = other DNA
actcccaatgctgtaaagtgttgtacttccccataaatgaacatgcacagtcttcaaagcctctgaatcttccactctattaacttgttgcttcctatttcagataagaaccagcccttt

SEQ ID NO: 10525 - DNA, 120 bp, synthetic construct
  source 1..120: mol_type = other DNA
catgtgtgaaatgggggtgatgacagtccccatgttgtaggtcgttgtcatggtgcaagggccatggtaagtgttctgtgaaaatggccattacaatgacgcatgacccccaaagaagat

SEQ ID NO: 10526 - DNA, 120 bp, synthetic construct
  source 1..120: mol_type = other DNA
gacacagcccccccaactctgggttcctggtatggggtaagtttttagtaaatgtgagatgctgtgattagtactgtgaatatgatggctatttcaacagaagaattataaagaaagggc

SEQ ID NO: 10527 - DNA, 120 bp, synthetic construct
  source 1..120: mol_type = other DNA
gtagaaactgtgttttcttataaacatgggaaagaaacattcaagaagttttatcaaagaatgggaaatctagcctattgcccaggcctaggctcaccactgtccccaccacctcaagca

SEQ ID NO: 10528 - DNA, 120 bp, synthetic construct
  source 1..120: mol_type = other DNA
aaactcttcagtgggtatttttaagaggaatcccagttcagctctgaagtcagtgaaaccattctgaaggctctgcttgctacagaatgtttactgagaaaagacactgtgcccaacttt

SEQ ID NO: 10529 - DNA, 120 bp, synthetic construct
  source 1..120: mol_type = other DNA
acatgagtttaatgatatgtgctaggcaaaaagagaaagagaaagataaccttaaacattctgcaaagaccaactttccaaccgataagtgtaagccttgaagtgcacatgagtgggaga

SEQ ID NO: 10530 - DNA, 120 bp, synthetic construct
  source 1..120: mol_type = other DNA
gtggacttggtttgagttctttcagaggggaggaaaggttcctaagtgagggagggaaaacgaagtaaaaataaagccaggaaatgtgatgaggcagaaagcattcatcaacagaactac

SEQ ID NO: 10531 - DNA, 120 bp, synthetic construct
  source 1..120: mol_type = other DNA
gctatattaaattaaaggcacttggcaagtcaaattcccagcttgtacctatacccagggtcactttataattcagctctcagggtccctgttcattatcccaagctatctggcagcaaa

SEQ ID NO: 10532 - DNA, 120 bp, synthetic construct
  source 1..120: mol_type = other DNA
attatactagcaatagaaacgaggatgcatgtaggaacttccttcttactacaaagctttaacaggccatggaagatacaagagaaaggtttgtgtgccaggagaaaacctgaggcctgc

SEQ ID NO: 10533 - DNA, 120 bp, synthetic construct
  source 1..120: mol_type = other DNA
actgggcaacacactcaggcaccttggctttggaagctctccataaatgtgagccttatttttaaataaaaaatatttgcaaaatttagacaaagataaaaatggaagataaatatgcaa

SEQ ID NO: 10534 - DNA, 120 bp, synthetic construct
  source 1..120: mol_type = other DNA
aagaagaccatattttgtcacattttcatactctttggagagacctccaaaatctgttttctaacctatcctctccttctagctcattatccctggacatgctctccagcaatccttccc

SEQ ID NO: 10535 - DNA, 120 bp, synthetic construct
  source 1..120: mol_type = other DNA
tctaaagctgaagaacaatattttgtcctttcactctctctctcagcaacgttcaacaaagtgtgtccctccctccttcctgagagcttccttgctcattagccctacttacatggagtt

SEQ ID NO: 10536 - DNA, 120 bp, synthetic construct
  source 1..120: mol_type = other DNA
tgcttcattaacgatggcccaagcacacttgtatttttgtccctcaaacatccaagtgggttcccatctcagggcctttgttcatgctgttccttctgcctggaatgcccttaccccaaa

SEQ ID NO: 10537 - DNA, 120 bp, synthetic construct
  source 1..120: mol_type = other DNA
ttcctaggaaccccacagaaggcatggcaatgggtaattgtatctgtcaacttggctaggccatggtacacagataggcggtcacataccatctagatgtcactgtgaaggtattttttt

SEQ ID NO: 10538 - DNA, 120 bp, synthetic construct
  source 1..120: mol_type = other DNA
ctgcaccttgatctatttctcactccagagaactccggagaaccctgctgtgggcctgacttttcaaagtgcaaggaaccaaggtcagtggcctgcagcttccacaaagttgatgcaaga

SEQ ID NO: 10539 - DNA, 120 bp, synthetic construct
  source 1..120: mol_type = other DNA
gccagaagcactcatcagttgtgacaatcacaaatgtctctggacttaatcaaatatcccatgagaaggaaataatctctgcttaagaactgctgatcaagacactccccagtccctgct

SEQ ID NO: 10540 - DNA, 120 bp, synthetic construct
  source 1..120: mol_type = other DNA
cagcacaaaggccagggctttatcttcagcttctctcatgaacccagtgagaagcaaggctgactcaaggtcagatatttaaaaacagagattttaaattaaatgtgagcatgtaccact

SEQ ID NO: 10541 - DNA, 120 bp, synthetic construct
  source 1..120: mol_type = other DNA
caagtcctcaataaccacatgtggcaagtggctaccatattgaatagcacaattatagataactcaactatgtttatacataaagatatagctgctaggcatacacaacatgctcttggc

SEQ ID NO: 10542 - DNA, 120 bp, synthetic construct
  source 1..120: mol_type = other DNA
cgctttcttttcaggacccagaggaagccttcctgcctttcccttttgacttgacaattcaaaagcggcacacaataacatgacaatagtaacactcaattctctcccctctcaccatct

SEQ ID NO: 10543 - DNA, 120 bp, synthetic construct
  source 1..120: mol_type = other DNA
ctttctttccaatgtgatttcccacatttctccccacaacaccatatacccttgtcgccctaagtgtgattcaagaaccagcagatagacatcacctggaagcttctcagaaatgccaag

SEQ ID NO: 10544 - DNA, 120 bp, synthetic construct
  source 1..120: mol_type = other DNA
agaattcaggcaagccaccagtaagtttctaaggctatctatggggggtgagattttttttactcagaaacatctatctgctatctcctgggtttcacatccccatagaaaagtgagggt

SEQ ID NO: 10545 - DNA, 120 bp, synthetic construct
  source 1..120: mol_type = other DNA
cagtatgttttcccatggaggccaaagagcaacacaagtcttttaagtcttctactatttttctatcacctatgcttcccagtgtgccactgcagaccccccaacctatcaaatgggcag

SEQ ID NO: 10546 - DNA, 120 bp, synthetic construct
  source 1..120: mol_type = other DNA
tagtcagtttttcagatgaaaaatagctatgtttggtgtctgataaggctgttaccccaagccaagaataaatggaccatatttggtatcagcctgttcactccatgtggattcatgagc

SEQ ID NO: 10547 - DNA, 120 bp, synthetic construct
  source 1..120: mol_type = other DNA
cacccatccttggccagatgacagtggactgcccttcttacctttagcttgtgtccctgaagccccaatgtgcttctctctctctgcagtccagcttgacctcagagtcaggacacatca

SEQ ID NO: 10548 - DNA, 120 bp, synthetic construct
  source 1..120: mol_type = other DNA
caagctggaggaagctgaacaacgaagcctcaactgctgaggttgagacctgaagtgagaatctaaagtccaccataccacagaggatcatctggccacaaagttggccaagagacccag

SEQ ID NO: 10549 - DNA, 120 bp, synthetic construct
  source 1..120: mol_type = other DNA
cccccgaagcagggcacaagaccctcaagtgagaatgccctccctatatctggaaaaatggagcatcttatgtgggaagacacagggactgagagaggaatctgaacaagcaggccttgc

SEQ ID NO: 10550 - DNA, 120 bp, synthetic construct
  source 1..120: mol_type = other DNA
actgaagcacacagccctccatacacctactccagatcccatcttcttcctccatggggtatggtcaagagcaaagccactgagttcccagcttgaggaccaattcaaggacaagaatag

SEQ ID NO: 10551 - DNA, 120 bp, synthetic construct
  source 1..120: mol_type = other DNA
ggcaccttagatatacatataggaagatatggacatcttcccatcttctcagcaaacccaccaggaaggtgtaatcccagttcaaacatgagaaaacagagtcaaagctattaagtgtcc

SEQ ID NO: 10552 - DNA, 120 bp, synthetic construct
  source 1..120: mol_type = other DNA
cctttatgaaacctgtatgcccagcaaaatggaatatttttctttgacagttgctgtttttgcctctgttctttcctctcactattcattcccttcaccatatcccccatcccttctacc

SEQ ID NO: 10553 - DNA, 120 bp, synthetic construct
  source 1..120: mol_type = other DNA
aagggttgggattacaggcgtgaaccgccacacctagcgtggtatttattttttagaaatggggcctcgctgtgttgcccagactggagtgcagtagctattcactggcctgaacataat

SEQ ID NO: 10554 - DNA, 120 bp, synthetic construct
  source 1..120: mol_type = other DNA
tcccttttaacacaccgtgtatttttaaaaatgtatcgtgcttatggtctttgtctccctgcaacccaaataagaatggggacagagattttgatcagttttcaccccaactgtggccac

SEQ ID NO: 10555 - DNA, 120 bp, synthetic construct
  source 1..120: mol_type = other DNA
ctattttggaataagatacatcggtccctgatacagtgcctggcacagagcagaacacagtaaatgctcctcctcaccctgcttgacccaaaaacaaagtgtataaaacctgaaaggtga

SEQ ID NO: 10556 - DNA, 120 bp, synthetic construct
  source 1..120: mol_type = other DNA
tgcctactggcttgaggttcccaacttgcaaacactgctcctgtgtgcacttagagatgagctcttgtaagcttggggacttaaagggtcattttgagaataaaatactctaaaaatatc

SEQ ID NO: 10557 - DNA, 120 bp, synthetic construct
  source 1..120: mol_type = other DNA
ctgctgtgcagcctgatgtcccacatggagggcagtcctccagccccacagctctctgggacatgctggaaaggaagtttctggaataccagcagttgactcacaagagccccattgagc

SEQ ID NO: 10558 - DNA, 120 bp, synthetic construct
  source 1..120: mol_type = other DNA
gccaccatgcccagcccacggttttctataactatcagagaagaggggaaaacaaatgacatgcaaacatacaatgtgcaaaaacatgcaatgtgacaacatacaaacatcctctcaatg

SEQ ID NO: 10559 - DNA, 120 bp, synthetic construct
  source 1..120: mol_type = other DNA
tggcaggatagtggtacctgctagggttgcattcttcagttcgtccttcccgaaataagaaagcagatactattaaggacattttcaaaaagccagaagacttaggaaatcctagggtaa

SEQ ID NO: 10560 - DNA, 120 bp, synthetic construct
  source 1..120: mol_type = other DNA
agccatgagctccaggtggctatcaagtcccaaaatgtgatgaatccaaaatgagatgtgctggagtgtgagatcacaccagatgataaagccacaccttagcataaaaaaagaaatatc

SEQ ID NO: 10561 - DNA, 120 bp, synthetic construct
  source 1..120: mol_type = other DNA
ctcctctttcccttacactccctgtttagtctgtcaacacaatttgtcagctctgccctcaaagtacgcccagaattaatccctcttaggcctcctgactaccccctctgcattttttgt

SEQ ID NO: 10562 - DNA, 120 bp, synthetic construct
  source 1..120: mol_type = other DNA
acaccacaaacacaatcacacacaccacacacactacatacactacacacacacaaccacacacaccccacaaataccacaccacacatgcaccaaacatgacacataccacacatatca

SEQ ID NO: 10563 - DNA, 120 bp, synthetic construct
  source 1..120: mol_type = other DNA
tgaatgtgcccctctccacatcctgcccgctgagccgcacgtggatgccttccttcagcagggagccaaaggccatgtactctgccaacgcccagtccaccgtccggttcttggtcatgt

SEQ ID NO: 10564 - DNA, 120 bp, synthetic construct
  source 1..120: mol_type = other DNA
ttgaatgcaataagattaactcctttacttgtagactttgatcacatctataaaatactttcacagcaatacccgaattagtgtttgacagaataactgggggctgtagcctagctaagt

SEQ ID NO: 10565 - DNA, 120 bp, synthetic construct
  source 1..120: mol_type = other DNA
taactaaaatccaggaccacctgcagaaatggctgattccagagctggtgcagggaatatacaagatgagcctacaacatctttttgtgctaaaaagatggagatgctcaaagaagaaag

SEQ ID NO: 10566 - DNA, 120 bp, synthetic construct
  source 1..120: mol_type = other DNA
taaatttcctgattttgataactaactgtgctgtgctgatgtaagacaatgtcctagttcttaggaaatatacaacaaagtatttagggataaaagggcacagtatctccaacatattcc

SEQ ID NO: 10567 - DNA, 120 bp, synthetic construct
  source 1..120: mol_type = other DNA
ctagtgagtaaaactgacatgaataaacagagacatacatcctagacatgtgtcaaagacaaaacattgttaagatgtcaattccgaggtgggcggatcacctgaggtcgggagttcgcg

SEQ ID NO: 10568 - DNA, 120 bp, synthetic construct
  source 1..120: mol_type = other DNA
acagaatgagaccttgtctccactgaaaattaaaaaaaaaagttaggtgggtgcagtggtgtgagcctgcagttcctgctactcaggagtttgaggtgggaggatcccttgagctcagga

SEQ ID NO: 10569 - DNA, 120 bp, synthetic construct
  source 1..120: mol_type = other DNA
gtgttcttctctgagaggaacaaggttagatttacttccttccctccttcatgggaaataaaaaatacacatacaaacacttttgtactaaacaagttaaaccctgggttttctaagtag

SEQ ID NO: 10570 - DNA, 120 bp, synthetic construct
  source 1..120: mol_type = other DNA
atctgattcactagaggcaggttttacgttaaatacaggaatactctgcccagtaggtttcatgtctaggcacctggtttatgtgctcaccaaacagaagcagaaaaacaactctcagaa

SEQ ID NO: 10571 - DNA, 120 bp, synthetic construct
  source 1..120: mol_type = other DNA
agcttccctacaatagtatgagaccaatagccaaagtgctggttgctcaacaatagatttatgccagttttttttgttctgtaattccttgcaatcttatctcccctagtaccttgccca

SEQ ID NO: 10572 - DNA, 120 bp, synthetic construct
  source 1..120: mol_type = other DNA
tgagaatgtccacaaagggctttgaaaagttctaatatattaaaacaagaaggaatctagagggctcatgcgtgcccatggccatatgaatgctcaggaaaaactagagaaagccctcag

SEQ ID NO: 10573 - DNA, 120 bp, synthetic construct
  source 1..120: mol_type = other DNA
gagcttctgagacctgtggaacatcaagtgaatcaacaaacacgtaatttgggagtcccagaagatgaggaaaggggaagaacaaacatttgaagaaataatggcccaacatttaccaaa

SEQ ID NO: 10574 - DNA, 120 bp, synthetic construct
  source 1..120: mol_type = other DNA
tgtgataattagacattcattgtgatccagcacctcagtgaagagccgtgaaataatcaactcaggattgattaaaaagcggatttcttcttgcacaagtcctgcactggttacaccacc

SEQ ID NO: 10575 - DNA, 120 bp, synthetic construct
  source 1..120: mol_type = other DNA
cctactaataaagaagaattacacaatcctccagagaaagcaaactcaacttgctggcattatttccgtttgtccagtgtgtccagcactatgccagcctcatgaagcagtatgtaagaa

SEQ ID NO: 10576 - DNA, 120 bp, synthetic construct
  source 1..120: mol_type = other DNA
tactatgtatttgatactttctaataatacaattaactaaaattggagcatgggaggaagataggaaagctttacaaggggatgtggcagctgacatgcaggctgagggcatagctgcac

SEQ ID NO: 10577 - DNA, 120 bp, synthetic construct
  source 1..120: mol_type = other DNA
tgtgaatgcatccttatttttagccagttattttccaagtcactttaaagctactcattcagattactcagcttctgaattataacttgatgaaaagacaggaatgataaagctcctcag

SEQ ID NO: 10578 - DNA, 120 bp, synthetic construct
  source 1..120: mol_type = other DNA
caaaagattaggttagatattactatattttaaacacggggcttttgttaacccccttctccaaaaatactttttaaaggtaaaggcggtaacagattattaacaaagattgagaagtgg

SEQ ID NO: 10579 - DNA, 120 bp, synthetic construct
  source 1..120: mol_type = other DNA
aagttgttcactgcggacaaaagtgaaaatataggtaactattcaaaaaccgaaaccaccccaaatctcgaaagtcagaaacagatgcctactgttaacattcttggtattgatcctcct

SEQ ID NO: 10580 - DNA, 120 bp, synthetic construct
  source 1..120: mol_type = other DNA
gccattttattcagaggaagacccctgtaagcatactactaaaaagataaagaagcataatctaaaaatctctgggctgtcagtcaggacttcagaatgggaattccatctgttgtcaac

SEQ ID NO: 10581 - DNA, 120 bp, synthetic construct
  source 1..120: mol_type = other DNA
tatgcactgttagagagggaagtaggttaagaagccattaagatacatgaaggagggtcaaatgttaaagaaaactagaaattcagatttatttatgtagctccagaaggaagaaccagg

SEQ ID NO: 10582 - DNA, 120 bp, synthetic construct
  source 1..120: mol_type = other DNA
tctttaagtatattgggagacttgctttagattaagaaatatgttaactatttcaggacactaaggactttacaaatctgaattagctcatattggctgctatctcctcaatattttctg

SEQ ID NO: 10583 - DNA, 120 bp, synthetic construct
  source 1..120: mol_type = other DNA
caaataacagcacaacagtaggatttgagtgctggtatttttggtaaagtttttgaagctgaatacacttttttttaaaaaaaaaagcattgaaaaaaaggatgtataactggtacagct

SEQ ID NO: 10584 - DNA, 120 bp, synthetic construct
  source 1..120: mol_type = other DNA
ttagcagagaagaacatcaaatgtccttaatatatactaagagatgctaaaagaaattcataaacactgctggcaaagcaagaaaaggcagaagaacatggtttcttagattaacaaaaa

SEQ ID NO: 10585 - DNA, 120 bp, synthetic construct
  source 1..120: mol_type = other DNA
agtctattgagtaggctccagaacttctacacaaccactcattatactgcaacctcttttattctctttagtatttcctcttcaaaccattagctttacacactgaagaccaagagcaat

SEQ ID NO: 10586 - DNA, 120 bp, synthetic construct
  source 1..120: mol_type = other DNA
aaaagaaggatatgagaaaaatgaccttaaaatgattcaaagacatattttaagacaatcctatgacccagaactgaaaaaaagccatttcacttgaccaggttgaccttacctacttag

SEQ ID NO: 10587 - DNA, 120 bp, synthetic construct
  source 1..120: mol_type = other DNA
actgttcccatcagcaagaaaaattacagtaagaatgaaaggaatttacttttctctgtgactcttctaaagtagcagaagagcgttttaagtttctccggtttccttgatgaacgtccc

SEQ ID NO: 10588 - DNA, 120 bp, synthetic construct
  source 1..120: mol_type = other DNA
atatgatttactaaatgaatacctaaggctccactgcaaaatctctttctaggctcactatgcactagaggaaagcaatatgaatacaaaagtagccaccaccttttcctagagatgaat

SEQ ID NO: 10589 - DNA, 120 bp, synthetic construct
  source 1..120: mol_type = other DNA
agagaagagaaaggctgatagaaatggggttagagaaagagagcatgagagacagacacacagagagaaagacatacacaaacaggctcagagaaagtgaggccttctcataatcattaa

SEQ ID NO: 10590 - DNA, 120 bp, synthetic construct
  source 1..120: mol_type = other DNA
atgctacataatcagcttaacaaatggctcatcagattacgtactggatctttcagaagccacataaaagtggggggactttcagttgtttggcatttccggagcactcagagcattttg

SEQ ID NO: 10591 - DNA, 120 bp, synthetic construct
  source 1..120: mol_type = other DNA
ctgtgttaacttggtgaagtaacctcccctctctaaacttccacctcattttaaaaatgagtgtaacaacaattcctaatcaatattctaattcatatggttaatgtgacaagtaaatga

SEQ ID NO: 10592 - DNA, 120 bp, synthetic construct
  source 1..120: mol_type = other DNA
ctgcctgtcagccatccagcagcgatgggtctttgctccctacagaactctgtggattctatttcttccataagaaataaaatgctatatgctgaataagtaaaatagggtgaagtagac

SEQ ID NO: 10593 - DNA, 120 bp, synthetic construct
  source 1..120: mol_type = other DNA
tgcattgcagtagcctctccaattgggtaaactcatgtactctggcccctctctgcttgattcccacattacagccaaaataaacttttgaaaatgtaaatctgaacacatgtgctagtc

SEQ ID NO: 10594 - DNA, 120 bp, synthetic construct
  source 1..120: mol_type = other DNA
tgtaaccttatggcacttaatacactgtggggaatattgcagttgctcattgtacatttgaactaaacattgactaaataccagtatctaaaaacaaacttacctactgtacaaacttga

SEQ ID NO: 10595 - DNA, 120 bp, synthetic construct
  source 1..120: mol_type = other DNA
gcaaatgtagaagagggaagcagaaaattcacaacaggcaaacactatggtaataatcattgcagacaagatgcaccaatggatgccaaaattagtagggataaatgtgaggcaaaacaa

SEQ ID NO: 10596 - DNA, 120 bp, synthetic construct
  source 1..120: mol_type = other DNA
agaggcaggctctgggtgaccagaggcagtgaagggcattacacacagcctgctgggaaaggggcacagattatagcaattttctcaagtctcacactgaaatcagggaagaaaactcat

SEQ ID NO: 10597 - DNA, 120 bp, synthetic construct
  source 1..120: mol_type = other DNA
gaaagcattagctaaaagactggcaatctgttcctgcgacattgtgatggaatgattcatcttctgtttcaggagtggtattggctgataaaagaaacaaaaaaatacagacgagaagag

SEQ ID NO: 10598 - DNA, 120 bp, synthetic construct
  source 1..120: mol_type = other DNA
agtccacaccatgataggaagtgtgggtctgacacgcctcattatatgctcctcactttagaattcagcacaagtgaccagcattaacaagaaaacagagaccttaaaactgatgaaaca

SEQ ID NO: 10599 - DNA, 120 bp, synthetic construct
  source 1..120: mol_type = other DNA
ctaaaatgtataaagccaagcctgaccatcttgggcacatgttctcagatctcctggggctgtgttacaggccactggttactcccatttggctcaaaataaatctcttcaaatatttta

SEQ ID NO: 10600 - DNA, 120 bp, synthetic construct
  source 1..120: mol_type = other DNA
tctcctctcttggtgaggagaaatgcctaaaaactcattatttggagaaatcaggagatgtaaatcttactgtcaagcaatcggctcaacaaaataagaggctggttactgtgaaccaag

SEQ ID NO: 10601 - DNA, 120 bp, synthetic construct
  source 1..120: mol_type = other DNA
accattatacacattcagaaattgttccacccaaatgtccatagggcccctgtggagtaaaatgctagcagaaccctggctagcagccatgcagcaagaggcgttggccctagaaataaa

SEQ ID NO: 10602 - DNA, 120 bp, synthetic construct
  source 1..120: mol_type = other DNA
ggcagtctcagggaagctactgaggaagctacatccactaacctgggtgcaaatatttggcagacagagtgcaattttcaccatatcaggcaagatggactgatataaatgttgagcttc

SEQ ID NO: 10603 - DNA, 120 bp, synthetic construct
  source 1..120: mol_type = other DNA
atcagaacaagaacctaagtgttctggcctctatgccacagctcttcctacttccctatgtgaccaatgtttggaatcgatgaagaaacagactcttgacaaaaatcaggaactaaactg

SEQ ID NO: 10604 - DNA, 120 bp, synthetic construct
  source 1..120: mol_type = other DNA
ccatggtttgtttagcaatttcacctactgagaggcactttggttgttttcagttttgtactattataaataaagctatctttagtctcaacctatctatattgttgtctgaaatcactt

SEQ ID NO: 10605 - DNA, 120 bp, synthetic construct
  source 1..120: mol_type = other DNA
tttgcctttggttttaagaaatgtaattatagtatgtcttggtatgaatttctttgggtttatcctacttaagttttggtcagcttcttgaatctgtagatttatgacttttgtcaaatt

SEQ ID NO: 10606 - DNA, 120 bp, synthetic construct
  source 1..120: mol_type = other DNA
tggtgccatgtactctcctagggtcccatagtccctgctggtcagtggtcttctacctttcagagtcttatgtttgttttacatacaaggtcccctgtttttcactgtaattagtgggaa

SEQ ID NO: 10607 - DNA, 120 bp, synthetic construct
  source 1..120: mol_type = other DNA
tattctagttataactggcatttctccagtgacaaataatatcaagcattttttaatgtgcttattggcaatttgtataccttcctttgtgaaatcctttcaaactcttgctcattttct

SEQ ID NO: 10608 - DNA, 120 bp, synthetic construct
  source 1..120: mol_type = other DNA
tggggttccttggcatgcagatacatcagtccaatctctaactccatcatcatataagcgttttccctcagtgtctttgtctctgtgtcctttccttctctcataaggacaccagtcatt

SEQ ID NO: 10609 - DNA, 120 bp, synthetic construct
  source 1..120: mol_type = other DNA
gattgcctgactgccccttactctatgactctagagccaaatgtacatacttgtattagaacacttactgcggttattacaattatttatctgcatttcctgtcctctgatctgtgaaac

SEQ ID NO: 10610 - DNA, 120 bp, synthetic construct
  source 1..120: mol_type = other DNA
gtgcagcctacatactagaaactcagaaattcatttttctatagcatctgtttgtgctgctacagatacgatcctggaatatctttccttcttaactccaaaacttatccaaccttttga

SEQ ID NO: 10611 - DNA, 120 bp, synthetic construct
  source 1..120: mol_type = other DNA
tttaagaaggcatatttcaccaattagcagctaacttatttagttcatggacctaaataagactgtgcatggagaggtacaaaatcagtgtggtagcagagggcaaggtggtgtgaaagg

SEQ ID NO: 10612 - DNA, 120 bp, synthetic construct
  source 1..120: mol_type = other DNA
tcagtttaggaagaagatcttcatccaattcttgaaacaaaatatgcctctaatcaaaaacagtcacactattttcctacacaaacttcattaaacatgaagaatagaattgtgtaggtt

SEQ ID NO: 10613 - DNA, 120 bp, synthetic construct
  source 1..120: mol_type = other DNA
tgaacttcactcttattaaggatgaaacaaaactaattttcctaaaaggcttgaggacactctctggaagcgcactctttggagaaagaataaaaatgcaaatacatttgtagttaaaac

SEQ ID NO: 10614 - DNA, 120 bp, synthetic construct
  source 1..120: mol_type = other DNA
ctcggtaagtgattgtggttcaaggcccacatttttgtgtgctggactactctccctgaatatcctgaactcagttcaagaaacattaactgtgcattagccatgggctagaaaatagta

SEQ ID NO: 10615 - DNA, 120 bp, synthetic construct
  source 1..120: mol_type = other DNA
gcatgcctgggagtgggggatatatgagaaatcagtgtattttgctatgaatctaaaactgctctaaaaaaagaaagtctaggtcaggcacgatagctcatgcctgtaatcccagcactt

SEQ ID NO: 10616 - DNA, 120 bp, synthetic construct
  source 1..120: mol_type = other DNA
atttcttcctccttcccttccttccccattacaactgtgctctgcaaagtgtgctccatggaatacttgctacaaaggaagtcaaaagctgttacatggaagctgtttataaataagttt

SEQ ID NO: 10617 - DNA, 120 bp, synthetic construct
  source 1..120: mol_type = other DNA
ctagccattttcaattgacctaatgtttgggtagtatgtttaatctgattcagcttctttcctaggtgctatgtcaaagaccgactctgacagcatgtgccacagtccatagataaaaat

SEQ ID NO: 10618 - DNA, 120 bp, synthetic construct
  source 1..120: mol_type = other DNA
accattggcttagtctttggtaaaccacagcactaacagcaccccctcatataaaaggaccaatggacctatttagtctttgatgagcaagtttaccgcttgtttagataggctacacac

SEQ ID NO: 10619 - DNA, 120 bp, synthetic construct
  source 1..120: mol_type = other DNA
ttgagctgtaaagtaatgcagaccttatgattccagagactgtgagtcaccaagggaagaggtccaaaaaggttaaatttccactgaactccaaatcagaggttcgaaagctagagagat

SEQ ID NO: 10620 - DNA, 120 bp, synthetic construct
  source 1..120: mol_type = other DNA
aattatgttgtacctgtttttaaaattttaaatggcctttctctttctgccaacttggagcctgtggaggcctgctgggaacaggaatactaaaaggaagtatgtctggaaggctgtggt

SEQ ID NO: 10621 - DNA, 120 bp, synthetic construct
  source 1..120: mol_type = other DNA
ctatctctcactctctacctttaccagccacagatgcaaaaaacaaaagcaaaaccaaaaccacttcattttgttatttatgacagccttcatggaaaaaccaatggaaggatgaaacga

SEQ ID NO: 10622 - DNA, 120 bp, synthetic construct
  source 1..120: mol_type = other DNA
attgattcatttagaatataaattacagaagtgtttgaatttaattttgtgaaacaccacacaggagggccataaaacacagattgtgtgtttgtagcacttccagcagctagcagtgag

SEQ ID NO: 10623 - DNA, 120 bp, synthetic construct
  source 1..120: mol_type = other DNA
cttgctatatattacccgtttcaggcatgcttctgggcaaggtcaccagataaaggggaaacaaggtcctgtctgagtattctgattaagaagagagaaacaaatgactacttcatagca

SEQ ID NO: 10624 - DNA, 120 bp, synthetic construct
  source 1..120: mol_type = other DNA
ccagcagttcacataaattacacatttatgtagaatgaaaagtcaaaatattatgccatctactggtgtagcttttaactgtttgaataggcaatactatacatctggtttccagagtca

SEQ ID NO: 10625 - DNA, 120 bp, synthetic construct
  source 1..120: mol_type = other DNA
atttctcagcatactattttggggtttggatcagcggtttgaaaatttctgtgcaaaaaaaggaataatgactacaaattgttttcactgtgataataaatacaaatcaaatgatggttc

SEQ ID NO: 10626 - DNA, 120 bp, synthetic construct
  source 1..120: mol_type = other DNA
agccaaaacagtatatgttccagctgcagagagcagactgctctcagcttgcacagcaccttaggtgtgggaagaatatatggatagggaatggggtggagaaagaaggacggaaatgtt

SEQ ID NO: 10627 - DNA, 120 bp, synthetic construct
  source 1..120: mol_type = other DNA
caaagcaaatgctataaaatagagaccagctcccaggcaagaaatcaccaaagaacccttcagttcttcccattcctcacctccattcaaccaggtccaagtcaccagatatagtatata

SEQ ID NO: 10628 - DNA, 120 bp, synthetic construct
  source 1..120: mol_type = other DNA
gttaagatcttaggagttgggcaagtcagctccagcatgtgtactagggagcaaaatggcaaagtttaactggtatatgaccttataagaacactcaactggtaagggaagaatacctca

SEQ ID NO: 10629 - DNA, 120 bp, synthetic construct
  source 1..120: mol_type = other DNA
ccatacactagttcaggccatgatgggaacgggtggttggacatgcttcattataccttcctccctttgaaatttagatgtgactgaccagcattaacattaaaacaggtactttaagac

SEQ ID NO: 10630 - DNA, 120 bp, synthetic construct
  source 1..120: mol_type = other DNA
ttcttcctgaggggcctggagacagtgacacccacatgccaaaccttaacattcctttctgctgatcccaagtttctaggcaaagccttgcttccttaaccaatcgcaaatcaaagaatc

SEQ ID NO: 10631 - DNA, 120 bp, synthetic construct
  source 1..120: mol_type = other DNA
aagaaatttaggattatattgtgtcacggagccaaaggatgagtatattccaaggagaaaagaaatgtctatggagtcaaatgtggccaggcacagttgctcacgcctgcaatctcaaca

SEQ ID NO: 10632 - DNA, 120 bp, synthetic construct
  source 1..120: mol_type = other DNA
tcgaccactaagtgcaatttcagattgccttacatttctaaagctaaatgttggttttatttttaagaaacagggtcttactctgtcatccaggctaaactgcagggctcaagtaatcct

SEQ ID NO: 10633 - DNA, 120 bp, synthetic construct
  source 1..120: mol_type = other DNA
accttacttaactcttatctgggctcttacattacctctcctgtctcccagtgtatcctcacttctgttttccttacatgcagctgtctgattaatcttgctacagcacagatactgtct

SEQ ID NO: 10634 - DNA, 120 bp, synthetic construct
  source 1..120: mol_type = other DNA
ctaaggtcaagacaaatgtatttagtcacaaattatttactgttttaattcccttagatacacaagcacaaaacttacccagacgttattgtttaaagtatgccatacttggtcactcac

SEQ ID NO: 10635 - DNA, 120 bp, synthetic construct
  source 1..120: mol_type = other DNA
taccttctgtcctctgctttgggcagtctcatgaaatgatctgtgattttagaatccttttttccatgttgcttagaatttctgcattctacattcaggctagaaatatttccaggtagt

SEQ ID NO: 10636 - DNA, 120 bp, synthetic construct
  source 1..120: mol_type = other DNA
ttcaagtcataaatgtcactcacctctctgtgcagtcttcctttagggaccaaaggtaaagttgaacatttgtttcttctacacactaaccaccactgtgccttgctcatacctttacta

SEQ ID NO: 10637 - DNA, 120 bp, synthetic construct
  source 1..120: mol_type = other DNA
tgccctcaagtatatgggtaagacaggaacataaatgttaatacatatgacacagggtagaaaatgactggtgcctaaaagagttggtatggcctaatggataagagcataggctatgga

SEQ ID NO: 10638 - DNA, 120 bp, synthetic construct
  source 1..120: mol_type = other DNA
gaagccagccacaccccagtccttctgaatcagaatctatatgtgagtaggatgaaggcatgaggggagctggaatctatttttttttttccaaaagtgattctgatgatccactagatt

SEQ ID NO: 10639 - DNA, 120 bp, synthetic construct
  source 1..120: mol_type = other DNA
ttccttcccagcacaccacaggactgtgtcagagctttatccctcttactcctgaagtaagcataaaattatgctttccaggtttcctaggaattttaactagaaatagtcacagcaagg

SEQ ID NO: 10640 - DNA, 120 bp, synthetic construct
  source 1..120: mol_type = other DNA
acatttaaacatgcgaaatacagccccaagtattcatttggtacctcttctgcagaaatcttaattaagatccaaccagtgaggactgactgccctcacccctatttgcaactaactcct

SEQ ID NO: 10641 - DNA, 120 bp, synthetic construct
  source 1..120: mol_type = other DNA
aactccccaatctacttctccagcacagaaatatttcttctcaagtatcccattctttcatgaatccatccccttccctattgccagcatccaggcctaagctacaattatttccaacct

SEQ ID NO: 10642 - DNA, 120 bp, synthetic construct
  source 1..120: mol_type = other DNA
ctgtcattcatctatcagaacatccattaccttttattatattaacttttgctatcgtctatctctccagatagattttaaggtatgaaggcagaggccaagtttctctcgttcaacact

SEQ ID NO: 10643 - DNA, 120 bp, synthetic construct
  source 1..120: mol_type = other DNA
gttagtgaattcaggtctggccctctcaaagtttgtgttttcttttgcacagacccacatacctgtggtaatgacccaaggattctcaaccttgccacagtaaatcaatcgttaatagta

SEQ ID NO: 10644 - DNA, 120 bp, synthetic construct
  source 1..120: mol_type = other DNA
aaactatctgtttacaaatgacatgatcttatctatagaaaatcacaagggaaatcacaaaaatctgttaaaactaatgatcgagttcagcaagttgcagaatacaagttcaatatacat

SEQ ID NO: 10645 - DNA, 120 bp, synthetic construct
  source 1..120: mol_type = other DNA
aattgtcagtggtctttactatgttaaatgtaacacactatgtgtctttttgccaagggtgtgacctagccattagaggcttattttaaccatctttggatggaaagcgtgccaaaaatg

SEQ ID NO: 10646 - DNA, 120 bp, synthetic construct
  source 1..120: mol_type = other DNA
ttactttatattctgtactttgatattctttactttgattatctttaacattctaagcatatgttcccctcccaaaaagaaccttttagaagctagctcgccatagttaacagtggcatt

SEQ ID NO: 10647 - DNA, 120 bp, synthetic construct
  source 1..120: mol_type = other DNA
ccatactgacttttgtgttgaaaaaaaaaaacagtttttcctctgctctcacactacaacagtcaacataggatagttctgtgaccagttatgtgggaatatttccccacataccaagta

SEQ ID NO: 10648 - DNA, 120 bp, synthetic construct
  source 1..120: mol_type = other DNA
agtcttccgaccccatccacttgggcctcatgtggaaaattgattggataggcatgactgaagcatggacaaccttatagaactgtgattggacaaaaaggacatgctctactactaata

SEQ ID NO: 10649 - DNA, 120 bp, synthetic construct
  source 1..120: mol_type = other DNA
tctccgtctcgaaatgaaatgagatgacatgagatgaaatgggatgaaatgaaataatgaacaatgaaatgccgggtgaaatgaaatgaaatgaagaaataaatgaaatattgaaatgaa

SEQ ID NO: 10650 - DNA, 120 bp, synthetic construct
  source 1..120: mol_type = other DNA
tgctgggtgaaatgaataatgaaatgccaggtgtggtggcgcagtccagcctgggtgatagagcgagtctctgtcttgaaatgaaatgaaatgatcaaatgaaatgatgaaatgaaataa

SEQ ID NO: 10651 - DNA, 120 bp, synthetic construct
  source 1..120: mol_type = other DNA
ctcgaaatgaaatgaaacaaatgaaatgaaatgaaatgagaaatgaaatgatgaaatacgaaatgccaggtgaaatgaaatgaataatgaaatgctgggtgtggtggcgcactccagact

SEQ ID NO: 10652 - DNA, 120 bp, synthetic construct
  source 1..120: mol_type = other DNA
cagaaaaacttagattttacaatccttttaagacttaagactcttaggtctgtggagtcaaaatgctacgtgatatttgtggtggatgaattactgaaaaacagaattcctcagcgaatc

SEQ ID NO: 10653 - DNA, 120 bp, synthetic construct
  source 1..120: mol_type = other DNA
ggaactggaacccttgtacacaaagctctctatcatccaaatcctgctgaactctcttaggaaagaacagttttacagattcattctttccacacacaagatttccccactgcccagtta

SEQ ID NO: 10654 - DNA, 120 bp, synthetic construct
  source 1..120: mol_type = other DNA
tgcctgtctgttgacattatctgtaaaaattgtgggaagttttctgcaccctgaaatttctgttatgcggattaaatatccactatccatgtttttccaagtcttacagtagaaagggta

SEQ ID NO: 10655 - DNA, 120 bp, synthetic construct
  source 1..120: mol_type = other DNA
aggaatctgtggacatctttggggggccattattttgccaatcacatattacatatattttaatatcctagactagtatgaaaacaatgccactttcattgctttatatatgcatatata

SEQ ID NO: 10656 - DNA, 120 bp, synthetic construct
  source 1..120: mol_type = other DNA
cagtctctttccttgtagcaggcaatcaaggtggtggctggaaagggccaaggagccacatctcacagtgccctgctgcctgaacaaggaccagaggcctgtggaacacatggctctcag

SEQ ID NO: 10657 - DNA, 120 bp, synthetic construct
  source 1..120: mol_type = other DNA
acactggagttcagttgtaagacccttttgatcccttattctgttcctgtagtagaaaaggcatttcactcaatggaatagaaacccagatccaatggagagatattctaatctgccata

SEQ ID NO: 10658 - DNA, 120 bp, synthetic construct
  source 1..120: mol_type = other DNA
gggaagagaagccctgagtttgtgtcattgttttctcacctccagttcactactttacccactgcctgacatccagctcgctcacacacacacacacaagcccagtcactaagttgccat

SEQ ID NO: 10659 - DNA, 120 bp, synthetic construct
  source 1..120: mol_type = other DNA
caaatgatcatagactttttcctccgcttttgtcactgccactgcccttagcattactctgcctttagagaaagtctcttaatttgtttggttgcttccttcagtccttattgtacagac

SEQ ID NO: 10660 - DNA, 120 bp, synthetic construct
  source 1..120: mol_type = other DNA
gtaatttgaacacaaaaggaaaaagaaaaaaggagagtgcttaaagtaattgtgaaaggtgtaaaatgtcacagccggggctgcagaaaaatggttgtgtgtgtgtgtttggggtttctc

SEQ ID NO: 10661 - DNA, 120 bp, synthetic construct
  source 1..120: mol_type = other DNA
tcgaataaacgagttgataaatttttatcaatgattacatctttttttcttttcttcctctgtgcatatagctttggagtttaacccttctgccaatccagaggcaagcacaatattcca

SEQ ID NO: 10662 - DNA, 120 bp, synthetic construct
  source 1..120: mol_type = other DNA
ctcagcaaacttataatcatgataaaaggcaaaggggaagcaggtggttccacacggtgaaagagggaggagagaggggaagggggaaggtaccacacttttttttttttgttttgatat

SEQ ID NO: 10663 - DNA, 120 bp, synthetic construct
  source 1..120: mol_type = other DNA
ctcctttatctactttttatgtctcagcatttattaaaaattatctctgtcaaccttctgtgctggtcatgggtgtaacctttattttatgactgatgaggcttccggagggagacgaaa

SEQ ID NO: 10664 - DNA, 120 bp, synthetic construct
  source 1..120: mol_type = other DNA
ataatagtcttacttccatccaggttgctgggaatgccatgaatttattccttattatggctgaggtggaattcctcatatatatatatatatatatatatgtatgtatatcacggtttc

SEQ ID NO: 10665 - DNA, 120 bp, synthetic construct
  source 1..120: mol_type = other DNA
gtcatttgttttcagggtgtgagagaatatttaagtgatactctttttatcctccacataagaaaataggactagagaaacctatggcttcctcacttgttggtggcctagcagccctgg

SEQ ID NO: 10666 - DNA, 120 bp, synthetic construct
  source 1..120: mol_type = other DNA
gaggaaattgtgtttcgaacaaaaactggactcaaactctgtctcaagtcctgagctttgggacctattgagtaatcactaaatgtctgtagtcagctaagtctcttaaatctttgagca

SEQ ID NO: 10667 - DNA, 120 bp, synthetic construct
  source 1..120: mol_type = other DNA
ccttaagactctcataattcttaaatgactgagaatctcaaagagtatgtgtttatattgattatattgatatttagtgtggtagaattatacagttgaaattttttcaaaatctgtttt

SEQ ID NO: 10668 - DNA, 120 bp, synthetic construct
  source 1..120: mol_type = other DNA
ccaaagcacacaggaggcagtattttactaaacaaatattatactaagatattaacagtttttgaagtaatgcgctttcttattttatagagatgcagatagaactttgagcatacctga

SEQ ID NO: 10669 - DNA, 120 bp, synthetic construct
  source 1..120: mol_type = other DNA
cacgcccgtttgcaagcggtccatgcgctggtccaacctgtttacatctgagaaagggagtgacccagacaaagagaggaaagccccggagaatcatgctgacaccatcgggagcggtag

SEQ ID NO: 10670 - DNA, 120 bp, synthetic construct
  source 1..120: mol_type = other DNA
tttagatcgcatacagcttttgctacccaagaccaagcggctctggcaagacagggttgttttccgaatgccagaccgaggtgccttatgaaggcagctgccgatggttccagatgtaga

SEQ ID NO: 10671 - DNA, 120 bp, synthetic construct
  source 1..120: mol_type = other DNA
atcttggtgccatccctgacttgccttctgttcataaacgcctattaaatgtttctttctgagaaactggatttgtcagcctctttctttggtatctcaggttccttggcctttgcgggt

SEQ ID NO: 10672 - DNA, 120 bp, synthetic construct
  source 1..120: mol_type = other DNA
cccaaatcgaagaacatttgacaaatagtgatcagtactgtttcaaaatgtcacggttatgaaagataaggaaagactgaggaactgttattgcagtcctacaaaacggcgagagactaa

SEQ ID NO: 10673 - DNA, 120 bp, synthetic construct
  source 1..120: mol_type = other DNA
actggaaagaaattgggatttttattttagtaagtaagttggtcaggcacaagggcgactcagcagagggaacttcaaggaagtgtgagacaacagctggagccctgagctgggagagtg

SEQ ID NO: 10674 - DNA, 120 bp, synthetic construct
  source 1..120: mol_type = other DNA
agccttaattatctgttaatttaggaattggatcctgaaatagcaagtgccatagttaatgactttagtttgttaaatgaactggtgagggaggattttttctttttaaagtcaattgtt

SEQ ID NO: 10675 - DNA, 120 bp, synthetic construct
  source 1..120: mol_type = other DNA
ttcagtacttgagataaaagactaaaatgctcgtagggttttttttttgcctttggccctcagaacaacactgtgtggtttggttccttctagaatatttgtagagggggaaatgacact

SEQ ID NO: 10676 - DNA, 120 bp, synthetic construct
  source 1..120: mol_type = other DNA
gtacacttgctgcttggattttcactgtatgcctttaaaagtcagcagtggactctgggaaatggattgcctggaccacacttgatacttccaagacacacagcactttctctctttttt

SEQ ID NO: 10677 - DNA, 120 bp, synthetic construct
  source 1..120: mol_type = other DNA
cacaataattctttcaacaaatacaatcctgttatgcacatgagcctggtacgaaagcagaaggcttctgccttacaaagagactcttgagtgcccactgtgggcagggccagggggttc

SEQ ID NO: 10678 - DNA, 120 bp, synthetic construct
  source 1..120: mol_type = other DNA
cttgtccctgtgtcagtttgcagatccctttgtttattctgcccttccttcccccagattggttggggaatgggtcttgaatgtggcgtctgacccgaatgcttgcttcagagtaaagct

SEQ ID NO: 10679 - DNA, 120 bp, synthetic construct
  source 1..120: mol_type = other DNA
acggaagccccccaggatcggcaagctggagcctctgttaaggagggtaagctggggctgggcagctgcgtctccgtgtgcagagttccaaaactgtctttctcactaggagatggaaca

SEQ ID NO: 10680 - DNA, 120 bp, synthetic construct
  source 1..120: mol_type = other DNA
aaaaagccgtagcatcgccagaagccactgtgagtcagacagatgaaaataaagcaagagcagaaaaaaaggtgagcaggagggaagacttaacgcaggagcattgatctgccgcatttt

SEQ ID NO: 10681 - DNA, 120 bp, synthetic construct
  source 1..120: mol_type = other DNA
acttgtattgtagaatgtgtctcgtgaatttgcttgattattttcctatgaatagattcagggtgagaagttttggcaagaatacaagcaggcagggttgtgcacttccagttggatcac

SEQ ID NO: 10682 - DNA, 120 bp, synthetic construct
  source 1..120: mol_type = other DNA
cattctcactaactagaccatgccttaacgctgtagcagatgggttctggcatagccatctgtcttgtcgagactgagaccactaacagcctctgggaccctggttcataggttgctttg

SEQ ID NO: 10683 - DNA, 120 bp, synthetic construct
  source 1..120: mol_type = other DNA
taaatgtactctcagacttgtgtgaaaaccctaccaaaggctttgccccatgtgtgtcatcatagagcgaatgtttttattggatattgttcagattctaaggcaaggagaggtaaaact

SEQ ID NO: 10684 - DNA, 120 bp, synthetic construct
  source 1..120: mol_type = other DNA
accttccctctcaggaaagaagcctagacacatggcagctgtcatgtctgagtcacttgtgttttatactgacctgatattttaaaaactgatattcctgttaaccagcaactttaattt

SEQ ID NO: 10685 - DNA, 120 bp, synthetic construct
  source 1..120: mol_type = other DNA
cctgacatatccagcttttccttattttttttatgatatttctaggccacatggtttgtctgcaagatttttcaaattgttgcaaatgtccaaaaaaattttcaacatattactgagaaa

SEQ ID NO: 10686 - DNA, 120 bp, synthetic construct
  source 1..120: mol_type = other DNA
ttgttctggtttctcattcgtggagacaacagtgtgagtttctggctgctgcgggggctcccgtgcccattgcaggctgtaaccccctgaaatgagcagagaggcacttgcccacagggt

SEQ ID NO: 10687 - DNA, 120 bp, synthetic construct
  source 1..120: mol_type = other DNA
tgtcaattttatgcagtctgatgaagaagcggacagttttggggagcacgattagatgaaaggggtgtgacctgatgggaataagctggggggagctcagcaaggcctgtgtggtcagat

SEQ ID NO: 10688 - DNA, 120 bp, synthetic construct
  source 1..120: mol_type = other DNA
attataggtatgagccactgcgcctggcctggagttttaatatatattttatgttttaaggaccagtggaatattcctgcttcacagacccacttagcatctgacagcaggtctaaagga

SEQ ID NO: 10689 - DNA, 120 bp, synthetic construct
  source 1..120: mol_type = other DNA
aagctgctaggatattcagagtgagcgtgggctgtggttggtataacatgctgccagattagcttatgggttcagaattacttccctgcaaatactttttttccttttgaaagcctgaca

SEQ ID NO: 10690 - DNA, 120 bp, synthetic construct
  source 1..120: mol_type = other DNA
ggtcataaatctggcagtctgaaccccatcttgtttgtgggtcctggttccagccacacaccatacctggctttcaggaatgctttctctgctccagatacatcctacctcctattgttc

SEQ ID NO: 10691 - DNA, 120 bp, synthetic construct
  source 1..120: mol_type = other DNA
aaggcttgtggtcgcacctgtgccaggtctttggcctgcagtgcttacaggtgagggacacatacttgaccactctgtgtagtttgtgcttgattcagctgctgtctcttcttccctttg

SEQ ID NO: 10692 - DNA, 120 bp, synthetic construct
  source 1..120: mol_type = other DNA
aggtgcaaagttttgagtctgagttttagcctttctatgtcattttctcccccagccccagtaggtttttgtaagtactctgttttctttttatcatagagaggactcctgtgacagcca

SEQ ID NO: 10693 - DNA, 120 bp, synthetic construct
  source 1..120: mol_type = other DNA
acccttcctggggctcagatcttttgcttttagagccagtgcattaggctatggttgaatttttgtgtgctccttgaaatttctatttgataaccaacatggtaattttgcctgctggtc

SEQ ID NO: 10694 - DNA, 120 bp, synthetic construct
  source 1..120: mol_type = other DNA
cagctcaggcagacaccttacacagtgcaaacaaggtgatgaaaccatctttgcttccttgctctcttcttttaaccagaacatgcatatgcttctttctagtttatcagttgcatacac

SEQ ID NO: 10695 - DNA, 120 bp, synthetic construct
  source 1..120: mol_type = other DNA
tctgtggagagaacaaaacccaaggcaaagatagcagagaatcctgccaacccaccagtgggtggtaaagcaaagagccccatgtttcctgctctaggtgaggccagcagtgatgatgat

SEQ ID NO: 10696 - DNA, 120 bp, synthetic construct
  source 1..120: mol_type = other DNA
tgcatcccaggcagagtgggcagtctcgaggctgttccacacaccctggccaattgtatttccatagctcgttgttgtgtttgagcttaaaaagaaaaattgatttaacattattttgta

SEQ ID NO: 10697 - DNA, 120 bp, synthetic construct
  source 1..120: mol_type = other DNA
ctttggtgtttgggaacaagcttgtcttccttatatggcacaacttctgctttattagtagacaaggcaaatgcccgagaaccctaaatattggacttttgataaatcctgtgggctgag

SEQ ID NO: 10698 - DNA, 120 bp, synthetic construct
  source 1..120: mol_type = other DNA
tgagggtggctcaaatttttagtattcacaagtatttatgaactcgtaaggctggaactctgaaccctatctaaagggagagaatggtcttcattggttatacttgccattttagcaggt

SEQ ID NO: 10699 - DNA, 120 bp, synthetic construct
  source 1..120: mol_type = other DNA
aaccagcaagtcaggttggatacccaggaagcaagagcatcatttggaagaactaaacacatgagaagttcatctagtgatgaaaccttttggctaaagatagaatccatgcgctaatct

SEQ ID NO: 10700 - DNA, 120 bp, synthetic construct
  source 1..120: mol_type = other DNA
ggatctgtgtttttatatcaacagataagttcaattacttcatgatattcttttatgcacaggtaaagaactgatattgataatccaggaatttggttttatttttacacatgaactgcg

SEQ ID NO: 10701 - DNA, 120 bp, synthetic construct
  source 1..120: mol_type = other DNA
ttctgggcatataaatcttaaatattctatgattgaatgggtccatgagtgagtgagtgagcaaatggtaaaagaacagataaattaatttagaacctctgctttgaggagtgctttccc

SEQ ID NO: 10702 - DNA, 120 bp, synthetic construct
  source 1..120: mol_type = other DNA
tctgtctatttatggcaaatgacattgggaaggccttagatggagaagatatggtgggctttttgaatatgtctagagtagagactgaagaacaagtctaggcctctgaataccagggat

SEQ ID NO: 10703 - DNA, 120 bp, synthetic construct
  source 1..120: mol_type = other DNA
gcatcctcagccacagtgaaaaccatgacctcgaaatcacagtcatatgcccactctttttccactataaattcctttattatttgaggttttacaactagaatgtgtccagttactgct

SEQ ID NO: 10704 - DNA, 120 bp, synthetic construct
  source 1..120: mol_type = other DNA
cctcatggacatgagtagaaaactctacaatatatcagcaaatcaaattcagcaacatctaaaaaggattatacaccatgactaaatgatacggcatttatttaacatctgaaaaccaat

SEQ ID NO: 10705 - DNA, 120 bp, synthetic construct
  source 1..120: mol_type = other DNA
acagtttctgcacaaccaaaaaaacaattaacaaagtgaggagacaacctaaagaatgggagaaaacacttgcaaactatgcatccaataaagagttaatatccaaaagatataaggtac

SEQ ID NO: 10706 - DNA, 120 bp, synthetic construct
  source 1..120: mol_type = other DNA
gaataagttcaagagggctactgtacaacttgatggcttcagttaaaaacaacatattgtgttttaaaaattgttaagaaagtctcaaattttctcacaacaaaaaataatatgtgacat

SEQ ID NO: 10707 - DNA, 120 bp, synthetic construct
  source 1..120: mol_type = other DNA
taccactctgtattcaggttttgctggctgcaggacatccccgaaagttctgccttttggtgctctatccacaatactaggaattaatggaactattaattgtttgaaaaagggaggttc

SEQ ID NO: 10708 - DNA, 120 bp, synthetic construct
  source 1..120: mol_type = other DNA
ctccttaatttcacatgatggttgtaaaaatagtgagaaaatatatatgaaagaagctgccaccatgaaaggatgttaactagatccaaaatttggaaataaattttatttattttctta

SEQ ID NO: 10709 - DNA, 120 bp, synthetic construct
  source 1..120: mol_type = other DNA
caaagttatcaaatctaaaaccaacctcaccacttcagacataccagcttcctccacaacattctcatctcagcgaatgtcatctttccagtctcccatgtgaggatcagccggcagtta

SEQ ID NO: 10710 - DNA, 120 bp, synthetic construct
  source 1..120: mol_type = other DNA
ggcattattctaagaaataacgataaaatattcctaatagcaatatttaggcccagaaaacccaaagattctcagggagagacagagggagaaggaaggaaggaaggaagggaggaaggg

SEQ ID NO: 10711 - DNA, 120 bp, synthetic construct
  source 1..120: mol_type = other DNA
agttgagtagcatggagtaagtatgcggagggtgatggtaaggagatggtagccagagtgggagacacaggttagctgatggatagtcttgcatgctatgctactgagccttcactcagt

SEQ ID NO: 10712 - DNA, 120 bp, synthetic construct
  source 1..120: mol_type = other DNA
ttgtgtcctgaaagcttgctgaatcagttattagtttcaacagtttttctggggggaggagggatgagaagaggggagtctggattccttaggaatttctacatatagtatcatgtcatc

SEQ ID NO: 10713 - DNA, 120 bp, synthetic construct
  source 1..120: mol_type = other DNA
acagtagttctatttttaattttttgagaaacctcttgctgcttttcataatggctgcactaattcacattgtcatgaacagtgtgcaagagttacctttttctacattcttatcaacac

SEQ ID NO: 10714 - DNA, 120 bp, synthetic construct
  source 1..120: mol_type = other DNA
ctgccgtggcccgtaaactgatgacattgagctggtggattacagggttcttgtttgtctgctgccactcaaatatcactgtctttctttgtcacttgaaaatccattgtttaatatata

SEQ ID NO: 10715 - DNA, 120 bp, synthetic construct
  source 1..120: mol_type = other DNA
accttcccattcctgtttttaaaatgtcattattgccaagataacaattgtggcaatatgacattctcaaatatgacattggaggaaagtcttctacttcttaggtagtcaatatgcacc

SEQ ID NO: 10716 - DNA, 120 bp, synthetic construct
  source 1..120: mol_type = other DNA
tggcccacatgtaaataggtgatacatttagcaaggggttatttgagcaccagtaaatgacagatgtaaagaactgtgataaatataagtgaattagacatgtaccttttagggtcacaa

SEQ ID NO: 10717 - DNA, 120 bp, synthetic construct
  source 1..120: mol_type = other DNA
ctgccttgttcattagcagcagaataatcaaatatttgttgagagtactgaacccatcactgagaaacacagaatgtcgagcacactctctgtgcccaagagatttactttcagcataac

SEQ ID NO: 10718 - DNA, 120 bp, synthetic construct
  source 1..120: mol_type = other DNA
tgtcttcctaagtgtccttatcccactggattgtgtctcttactcccaagacttattccaaatgattttttgactcttttcattaatcaaattcaccccaaaccagaaagttttgccatt

SEQ ID NO: 10719 - DNA, 120 bp, synthetic construct
  source 1..120: mol_type = other DNA
aggatatttgcaagcagccctaaaggttaccacagtgggcaagcaataatatctgcatatccaaattaactgctctttgaaataattagaactcgttttactctagaaaatatattttgg

SEQ ID NO: 10720 - DNA, 120 bp, synthetic construct
  source 1..120: mol_type = other DNA
tatataaaacaaatgtgaaagggggagagacagagagagagagagagagagagagatctgtcgataattgatgagattgttcttttcagccaaatttgggagaggtaggatggaggtgct

SEQ ID NO: 10721 - DNA, 120 bp, synthetic construct
  source 1..120: mol_type = other DNA
cggtgagcttcaggtacctatgtaggcaagaatgctttctgcctggagctctggaaaaagctagggtgtgagatatagatttagtcatcctcagcttatagatagtaatttcagcgaaat

SEQ ID NO: 10722 - DNA, 120 bp, synthetic construct
  source 1..120: mol_type = other DNA
tgagcaggcttctttaaaagatcttttattccccattggaaaaaagaagggtgtgaacatttgtttcctacagagtttaattaatagcctattgtaataactttcacttaaagccattca

SEQ ID NO: 10723 - DNA, 120 bp, synthetic construct
  source 1..120: mol_type = other DNA
tagcttggaagcaaaaatacaaatcaatatcttacttctatcccaacaatttccttacttaaactgcaggcttactaggttttctgtccacagagttcatgctgcagggccatgtttata

SEQ ID NO: 10724 - DNA, 120 bp, synthetic construct
  source 1..120: mol_type = other DNA
gcaaggccattctttctatgtgctgctagaaaatgaagactttgtcatggtgcattcagcagctctgatcaactggtaacttgtcagttggacagatcctattttccagagccttactga

SEQ ID NO: 10725 - DNA, 120 bp, synthetic construct
  source 1..120: mol_type = other DNA
ttgttgacatgagcattgactgcttttttgccatagtgggataatttattttatacgaggtggtgttttcaacaaccactatagaatgttctgaatcactgtgaactctatctggataaa

SEQ ID NO: 10726 - DNA, 120 bp, synthetic construct
  source 1..120: mol_type = other DNA
cctcacttcccagacggggtggcggccgggcagctacatgatgaattttcatctacattaaaagtcaaggtgaccaaacaaaggtggtattttaatataattaataagaagcaaaggaga

SEQ ID NO: 10727 - DNA, 120 bp, synthetic construct
  source 1..120: mol_type = other DNA
gcccaaggctagcaaacttcaacattactatttcctgtgctgctacggtgatgtacagagaagcatgttttcttagcattcaagcataatttaaaaccactctgcactaacaccggagtt

SEQ ID NO: 10728 - DNA, 120 bp, synthetic construct
  source 1..120: mol_type = other DNA
tgtcatgtgattccatttatacaaagtaccaacattggcaaaactataatccagtagtcagaataggagttattttctttgggaaagagggtggtggtaggactgtgaggggacacagag

SEQ ID NO: 10729 - DNA, 120 bp, synthetic construct
  source 1..120: mol_type = other DNA
actgccatgggtgaacaggggcagaaacaaagcaaaaatgtgaacaaagcccctaacatagagatggtcatagagattgtccttcaaatcaaagctgacagaataaggaagctttagttc

SEQ ID NO: 10730 - DNA, 120 bp, synthetic construct
  source 1..120: mol_type = other DNA
ccagtatcatttatcagctagatcactgtattagcatcctaaaaataagttccttgcttcaaatcttgcctctttccattctctcctgaaaaggcagccaaagtgatctttgtggaattg

SEQ ID NO: 10731 - DNA, 120 bp, synthetic construct
  source 1..120: mol_type = other DNA
catgatggtaaatgtcattcttttagatttaggattctcttgagcatttctgccaaagctgacctagtggtcatgcattttctcaagttttgcttgtctgggaaatgctttatttctctc

SEQ ID NO: 10732 - DNA, 120 bp, synthetic construct
  source 1..120: mol_type = other DNA
ctaactcactgtttttctgagacttgaaagtgcttggcagagtaccaagcacctagaaagccttctgaaatggtagaatggtagctgaaagtcacaatcttcctctcctttcctttcctt

SEQ ID NO: 10733 - DNA, 120 bp, synthetic construct
  source 1..120: mol_type = other DNA
ggtcttgccttatctcctagtactcctttatattccccacatcaccaaaccatttacatagttctgtgatagtgaggcaggagaatagggtctgggggcagggaactttttttttttttt

SEQ ID NO: 10734 - DNA, 120 bp, synthetic construct
  source 1..120: mol_type = other DNA
gaattcccactgcagctctagctgtgggtttgtgtccaggttttgccacttagatacagaacagtgaagttactcatgagaggtcttaaagtttctgtctcttcatttgcataaggtaga

SEQ ID NO: 10735 - DNA, 120 bp, synthetic construct
  source 1..120: mol_type = other DNA
acaactactattaccagtagtgacatgtatcctgaattcagaaactctaaagtatatgtaaagcaggagctgttgggggagggaggattatgaaagtagtgcaggagtgtttctagggct

SEQ ID NO: 10736 - DNA, 120 bp, synthetic construct
  source 1..120: mol_type = other DNA
aaagaattcagttcttccagttacaaggcttgggtttctgtttctctcagagaaagactcttgacatttacttgggctgacagagagagttatttatactgcgtgtgccttttgtgtcga

SEQ ID NO: 10737 - DNA, 120 bp, synthetic construct
  source 1..120: mol_type = other DNA
gctgactatctgcagggtgagtggtcagaaggcagccccattttctcagcaataaaaaatattttctattttattgcagggcaaaatataggggacgaaaatatttctgcagttggccct

SEQ ID NO: 10738 - DNA, 120 bp, synthetic construct
  source 1..120: mol_type = other DNA
gaaaactatgtgggaaaaaggaagtcaaatatgaaaaaaaatctccagctgttaaatggcataaagaattgtcataatagctccggtctacagctcccagcgtgagcgacgcagaagacg

SEQ ID NO: 10739 - DNA, 120 bp, synthetic construct
  source 1..120: mol_type = other DNA
gccaaaatgtctcatcctcagactcactggatagctacttatctcctgggccattttaatccaccccaaaaatcttgtgtgacttatggaacttcctgaggctttcagaagatatagaac

SEQ ID NO: 10740 - DNA, 120 bp, synthetic construct
  source 1..120: mol_type = other DNA
tggatgttaaacgcagctctaccaaggatttactgtgttttgacttgggaggtggctgaggttcatttaagtgcgccatgtacctgttaatttggggataataatgcactcttacaagtc

SEQ ID NO: 10741 - DNA, 120 bp, synthetic construct
  source 1..120: mol_type = other DNA
agataagagaagattcaacacttgtatactaggaatctcccagtgagacagaggagggatagaactttgggttcagatcacctctactagagcattatttcatgcagtcacactagtcac

SEQ ID NO: 10742 - DNA, 120 bp, synthetic construct
  source 1..120: mol_type = other DNA
agccattgctccttcactgctgaagacagaatgagatttggtttcaacaaatacttagatatgaggaagagcctttctaattggtaaagtaacatagtctccttcagaaggatacatgta

SEQ ID NO: 10743 - DNA, 120 bp, synthetic construct
  source 1..120: mol_type = other DNA
ttctcaaagtgctgagattacaggcatgagccatctcacctggccggataggagtttttagagaaaatatccaagcagatattcattaagcagactgacagtaaatgctaaatggggcat

SEQ ID NO: 10744 - DNA, 120 bp, synthetic construct
  source 1..120: mol_type = other DNA
tgtctaaattctgaagcctgctgtcattttttgatgttattatttagttagcttacatgccatggttgctggctgggtcgatctgtaaaaaaaatcactatatatatagtgtgtgtatac

SEQ ID NO: 10745 - DNA, 120 bp, synthetic construct
  source 1..120: mol_type = other DNA
cgccaagatgaacttaagttcacctctgtattttttacccaaagaggcccattcaggaaaacatttgtttttaatgcttcatacatttgaaaatgcacatctaatatacttcaaaggagc

SEQ ID NO: 10746 - DNA, 120 bp, synthetic construct
  source 1..120: mol_type = other DNA
gggcaagcatgtgattcaagctaggtcaatcagttgctctctccctcaaatttgcactgggttaaaaagacaaagaattacatcctgtctatacagtcatgccaaatcacatgatccatc

SEQ ID NO: 10747 - DNA, 120 bp, synthetic construct
  source 1..120: mol_type = other DNA
accagtctttatccgcctaagaaatgctggaaagaaccatgaatcttttgtaacaagccagaataatgtttaaacacaaatgttgtctcacatacacatacttttgtaaatggcacattt

SEQ ID NO: 10748 - DNA, 120 bp, synthetic construct
  source 1..120: mol_type = other DNA
gttttcttgctctcagctcactcctgagttcaatgattgaaactcaacaaaaaatctttctactgctggtgtgttgaaagagttttgtttgcttgcctgctttcccctttagaattgtcc

SEQ ID NO: 10749 - DNA, 120 bp, synthetic construct
  source 1..120: mol_type = other DNA
cttaaattggatgagagtatatgaaatacattaagaaataatctctgactctgtagtttttttatttgtaggttttactagaacatgaaatcaatatgtgaatcctggctggagtttgca

SEQ ID NO: 10750 - DNA, 120 bp, synthetic construct
  source 1..120: mol_type = other DNA
ttcaacaggtaggttgaaaatgtgcttcagcatttaggataccagatgtaaacatccatgcatagaattagaaaggttcaactttcatggctgctatggtttgaatgctccctccaaaac

SEQ ID NO: 10751 - DNA, 120 bp, synthetic construct
  source 1..120: mol_type = other DNA
tgtgtttaaatcctagattaaaggaggaaaacagcgtcctgtgaacactagcctcaggtgctgacagcatcatcctttgtagcagtccctgcaccttatccttacttagtaaataatcct

SEQ ID NO: 10752 - DNA, 120 bp, synthetic construct
  source 1..120: mol_type = other DNA
atatctagatgcttgtgtttctcttaatcttttaaagcttctttttaaatgtcttgttctactgggcttactctacagtgcaggtagatatattgaaaattcctaatttttcaatatatg

SEQ ID NO: 10753 - DNA, 120 bp, synthetic construct
  source 1..120: mol_type = other DNA
ggagggagctgtgtcttaacgtgattagtatttggacttcctattattgtatttgaagacagaggatgcttggctttatgaagcaagctcccaattggattaccatatgtctcaaaaaac

SEQ ID NO: 10754 - DNA, 120 bp, synthetic construct
  source 1..120: mol_type = other DNA
ctcaggaggtcttattgggtctctgaatacagccatgcctgaaaaactcactgtaagacccttcattgctttatattatttgagctgcttttctttcccttgtaatcaaaggaccactga

SEQ ID NO: 10755 - DNA, 120 bp, synthetic construct
  source 1..120: mol_type = other DNA
taaataaataaaaaagaattagaaatgcaaggcttttgatatacatagaataaactctcacattaaaaggagtaatgggatgaattaaaatttggaagtaaagccctctaattagctagt

SEQ ID NO: 10756 - DNA, 120 bp, synthetic construct
  source 1..120: mol_type = other DNA
ggccgactattttttatttcaccaaaaagcatgcaagttgtcatgaggactgtagggagaggcccaaagcctttgtaaatctcttctaccaacattttcctcctcaatatagtagtaggt

SEQ ID NO: 10757 - DNA, 120 bp, synthetic construct
  source 1..120: mol_type = other DNA
gtcctactttacggtgatattgtgaatgctgagtgtgagaatgtatgtaatatgcttagttcagtgccaggttgatggtgcttaataaacatcagttcagatgcagcagtactgtctcac

SEQ ID NO: 10758 - DNA, 120 bp, synthetic construct
  source 1..120: mol_type = other DNA
agcaatacaaggaagctttttaaaaagaaaaataatcgtcagtaatctcaccatcctaacaaccattttcatttttctgccttgaattagagtttatgtagttgctggtatagtatttac

SEQ ID NO: 10759 - DNA, 120 bp, synthetic construct
  source 1..120: mol_type = other DNA
atcctttgaccaacatcttcctaattccacacctctccttcccacccagcccctggtaaccatcattctactatttgtttctgtgagtttgacttttttagatttcgcatataagtgaga

SEQ ID NO: 10760 - DNA, 120 bp, synthetic construct
  source 1..120: mol_type = other DNA
ctagaagctccaaaagtcaaggagacagattatcctctagagtttccagtaggattgcagtccatcaacacctggattttaacccagtgaaatccattttggacttctgacctctgaaac

SEQ ID NO: 10761 - DNA, 120 bp, synthetic construct
  source 1..120: mol_type = other DNA
gaatagaatagaataatccagcctgggcaacatggagaaatctctcctctaccacaaaaacaaacaaaaaacccaaattagccaggtgtgatgatgtgcacctgtagttccagctcctct

SEQ ID NO: 10762 - DNA, 120 bp, synthetic construct
  source 1..120: mol_type = other DNA
gcagctactcatggtggcttcttattcctgagttccgaaagaggctgggggtgttttcatgtactgagtactgtcattatgtagatcttagcttgtcttccctgaaatgtttattaaatc

SEQ ID NO: 10763 - DNA, 120 bp, synthetic construct
  source 1..120: mol_type = other DNA
ttggccaagtaaccagaaatagttttgggattcatggagctgtctccaaaattccagagatattgcatcatcttggtgggtctggtttgttttcagttcttttagaaactgagccctgct

SEQ ID NO: 10764 - DNA, 120 bp, synthetic construct
  source 1..120: mol_type = other DNA
gccactgacagttttaaggaaggcaaattacttaccaaactaggatttcattttattttcaaactaattactgtgtgtttgtacctctgtagattatataagtaggctccagaagaaact

SEQ ID NO: 10765 - DNA, 120 bp, synthetic construct
  source 1..120: mol_type = other DNA
cctgtaagacaggtgctggactataaagctgtctgttccttcttcctaagatcaaaatccagctagttataaaatgccgtggagcacaagcttttatgattctggtagtagcaccatcta

SEQ ID NO: 10766 - DNA, 120 bp, synthetic construct
  source 1..120: mol_type = other DNA
gtaccatgtctgcaggtcaaggggaaatattagtgaaggggtgttagtgaatgccaagaaaatgagacaatatatttctttgggcaaatgagtaattttcctgtgtctgtgtttttcttt

SEQ ID NO: 10767 - DNA, 120 bp, synthetic construct
  source 1..120: mol_type = other DNA
ttgtcacagccccttccttgctcatatcaataaatgtatcttcactaagttcctatggctgagcatctggagtcactcaaataatcagcaatgtcagcattcccacaatcatctccttct

SEQ ID NO: 10768 - DNA, 120 bp, synthetic construct
  source 1..120: mol_type = other DNA
ggctctggaacttgactaactgggttgaatgctggttccgccacttattggctctgtgacattggacaagttaataacttgtcacagtatcttcaactgtgagatgggaatgataataat

SEQ ID NO: 10769 - DNA, 120 bp, synthetic construct
  source 1..120: mol_type = other DNA
acttactgttcttaatatatattaaagaatttccaagtaagatggtacttttgggcatgagcatcaaactatcccctccataagacctgggccaaaatgagtaagaaatgaaaatagagg

SEQ ID NO: 10770 - DNA, 120 bp, synthetic construct
  source 1..120: mol_type = other DNA
atgtaacaatggcaggttgttggtgagagggaggcacaggaagatggcagatttttaaaactcaaaggaaaaaactactgtgtgacaggatcatcacgtgtacatgagtttaggtatgct

SEQ ID NO: 10771 - DNA, 120 bp, synthetic construct
  source 1..120: mol_type = other DNA
caacatgaaaatacttattccacttccaaggtactaatgatccacttgtttctctgtagagcaaagttgtcataaagctgatggtcagtgtgacttgcacactgccagacactgcttgct

SEQ ID NO: 10772 - DNA, 120 bp, synthetic construct
  source 1..120: mol_type = other DNA
cacgcaggcgtaagttgtagctatttagccatcctttttttttccccaccacttttcattcttgaattatttgccctcatttttctatgctcatctttaaaagctttgctcaccaggtgc

SEQ ID NO: 10773 - DNA, 120 bp, synthetic construct
  source 1..120: mol_type = other DNA
cacatttctctagcatctggttccagaacgataggaactgagtaatgttaagatcagaggcggtgtgaccctgtctctacaaaagatttttaaagccctctcccctctcccctctcccct

SEQ ID NO: 10774 - DNA, 120 bp, synthetic construct
  source 1..120: mol_type = other DNA
aaatcaagtttgtatctaagttctggtccagtctgtgctacttagcatgggattttaagccaattgtttgttggctttgagcctcagttttctcatttgtaaaataggataagagtgggt

SEQ ID NO: 10775 - DNA, 120 bp, synthetic construct
  source 1..120: mol_type = other DNA
gccaccagtttgtaagcccttgcctttgaagtcaactctgactccagggaccataagaacaatgtattttctaaatggcttggtcccctggcaaaaaaaaccacaacaacaaaaaaacaa

SEQ ID NO: 10776 - DNA, 120 bp, synthetic construct
  source 1..120: mol_type = other DNA
aaccaaactccaacctacaaaaccaaaggaaaataaaagaaatccagtggacccatagggacttggggaggttctcattaataatcgcgcgttatttttataacactctcaactgggggg

SEQ ID NO: 10777 - DNA, 120 bp, synthetic construct
  source 1..120: mol_type = other DNA
aaaactgaggagctctacttggtattaagaccaaagaaaacaattttcttgtgagagtccccatgaaggggacaatgtgtgatagggtagacgtaacctcaaaaatatcctcactccacg

SEQ ID NO: 10778 - DNA, 120 bp, synthetic construct
  source 1..120: mol_type = other DNA
gttctgtcgctttcaggattttttgcatagcctcttccctgggcccagaacatttttttaccaattctcttcatggttaactccaaaaaagatatacaggggattgcagcctacatgtca

SEQ ID NO: 10779 - DNA, 120 bp, synthetic construct
  source 1..120: mol_type = other DNA
ttaagcagcagcttctggaggaagaaggaggctacaataatagtatccaaaataaacaattcagtaattgatcaactagtcagaggaaattatcctaattcaagatctcatatgaaatat

SEQ ID NO: 10780 - DNA, 120 bp, synthetic construct
  source 1..120: mol_type = other DNA
tgtagttttccactctgttctttgtgtttattgtccctcgttgcttgtctccttttgtgctggaattatttagtatactaatcattgaaacattatatatatcattggctgtcttctgat

SEQ ID NO: 10781 - DNA, 120 bp, synthetic construct
  source 1..120: mol_type = other DNA
gaagcatttctctcttggttgtctagtgtttaagaaatacctgctgttgacaagtattgagaaactttaaaagtctcaaccaagatttaatcagaagtatactctttaaatggaacgaga

SEQ ID NO: 10782 - DNA, 120 bp, synthetic construct
  source 1..120: mol_type = other DNA
tgaactaaatcaatgttacaagtttaaatgtctggtgcccacgggggccagatagttaagggaaaactggactgaatacaatgcaatagggagtggtggggattttacatcttgtctgaa

SEQ ID NO: 10783 - DNA, 120 bp, synthetic construct
  source 1..120: mol_type = other DNA
gctggcgttcagagactgttgaaatcatcttgattgtgaaaagtcgctaaatggagctgttaaattgtgcttcgcaaattacatttagctgcaaagtattggttcagtctaggcctcctg

SEQ ID NO: 10784 - DNA, 120 bp, synthetic construct
  source 1..120: mol_type = other DNA
tttcacaactgtacttattcacagctgttcttgctctgttaggattaacagagcattaactatttacactatcatgggagggacatggatcctgacttcctttgctgtacacccacaacc

SEQ ID NO: 10785 - DNA, 120 bp, synthetic construct
  source 1..120: mol_type = other DNA
agaaagctgagagtaaaacccatgtcagctgaccactaacccaagttttcttttcacagcggtaaaagaccaacataaataaacagaaatactatttctaaagagtttatctggagctct

SEQ ID NO: 10786 - DNA, 120 bp, synthetic construct
  source 1..120: mol_type = other DNA
atagttgtgattttattttccgcattagctgtatttcccatggaagcataagagcttcctatatgcaaggggtacaaggttaagatttttaaagaacaggccaggcgtggtggctcatgc

SEQ ID NO: 10787 - DNA, 120 bp, synthetic construct
  source 1..120: mol_type = other DNA
tccaaagtcaatgtagagataatctaaaacagattatgctgaattttttggaccagtatgtgctttccaggtgggacagggaaacaactctgaggcttacctctaatgtattctttcctt

SEQ ID NO: 10788 - DNA, 120 bp, synthetic construct
  source 1..120: mol_type = other DNA
taaaaagtctcccaacaaagaaaagcccaggtctggactgatttactgctgacttctaccaggcctataaacaagaactaataccaatctttcccaaactactccaaaaaattgtagggg

SEQ ID NO: 10789 - DNA, 120 bp, synthetic construct
  source 1..120: mol_type = other DNA
caaaactaaattgtatcaaaagctaacctactcatccagaagaaagccacaattaaattgcaacatgaaacaatacttttagtatacaaatattatggcactaaaacagcgatacgcatt

SEQ ID NO: 10790 - DNA, 120 bp, synthetic construct
  source 1..120: mol_type = other DNA
catgataatatcaaaaggctggtgagaatgtgcagtgactagaacactcctacattgctgttgggcactctcttgtttacacttcccatatgcctcagcaatactattcctgggaattta

SEQ ID NO: 10791 - DNA, 120 bp, synthetic construct
  source 1..120: mol_type = other DNA
acccctgctactaggttcctgtgactcctgagtaggagtctggctaatcatccaaaaatgtcaaaagagaaaccaaggtgaatttctttcccaagctgagatttgaaataaactgctaga

SEQ ID NO: 10792 - DNA, 120 bp, synthetic construct
  source 1..120: mol_type = other DNA
ataaccaatatgcaattcatagatcttctatcatggctaatagttcaaattttgcaagctattggtttgaattattgcatttgctacatataaaaatggaaggtttctaaaagaaaatga

SEQ ID NO: 10793 - DNA, 120 bp, synthetic construct
  source 1..120: mol_type = other DNA
catctgtgaattccaagggatcacaaacagaaaagcacaatggcagctgagaacaatagtggaagaatacatttttattactgttattacttattccacttatacaaatggaaaatgcca

SEQ ID NO: 10794 - DNA, 120 bp, synthetic construct
  source 1..120: mol_type = other DNA
cagaagtttccaattctcaagagacccactgcattgaaaatcctggggtctttttgtatggtccaaaactaatggagacaacttagcccatctaaaaattgggtgaaagagacgtaaggg

SEQ ID NO: 10795 - DNA, 120 bp, synthetic construct
  source 1..120: mol_type = other DNA
aaaatgctagcagcagtctccctcatggctcttgttttgacaggtgtctactcaggtgcttgtgttttctaagcaatgtttctctgttcctgtgtataagcggccctcacctttttatga

SEQ ID NO: 10796 - DNA, 120 bp, synthetic construct
  source 1..120: mol_type = other DNA
tgctgaagcctttattccatccctggtagaatgaggaaaataaaatctacacctaccatacaggactttacttaatgtagctttataacatgttttaatatcgggggcggggggcgggta

SEQ ID NO: 10797 - DNA, 120 bp, synthetic construct
  source 1..120: mol_type = other DNA
gagagagacccaatgatctgttgcctacaagaaacacacttcacttacaaaaatacacatagactgaaaacaaaggaatgataaaagatactctatctgaatgaacagccccccaaaaaa

SEQ ID NO: 10798 - DNA, 120 bp, synthetic construct
  source 1..120: mol_type = other DNA
atgatcaggtgggttttatatcgtgatgcaaggatagttcaacatggccaatcaataaaacctgatacattacataagcagaatcaagggaaagaaacatatgttcatctccatagatgc

SEQ ID NO: 10799 - DNA, 120 bp, synthetic construct
  source 1..120: mol_type = other DNA
gaagggtgagagggttagagcggagaggatagtgagaaattggttaatgcgtacaatgtacgttacttgggtgatgaataccttgaaagccctgacttaaccactatgtaatctatgcaa

SEQ ID NO: 10800 - DNA, 120 bp, synthetic construct
  source 1..120: mol_type = other DNA
ggaatcagggagcaaccttaagttcttaagcagccaagtgttattatacatagactttagcaggctgggcttagttatttaaaagcatgaagcttctgaaggccatttcctgggcaggtt

SEQ ID NO: 10801 - DNA, 120 bp, synthetic construct
  source 1..120: mol_type = other DNA
ttgggtagatattcagtagtggatggctggatgcaatggtagttctatttttagtcctttgggaaatctccatacagttttccatagaggctgtactaatttatatttctaccaacagaa

SEQ ID NO: 10802 - DNA, 120 bp, synthetic construct
  source 1..120: mol_type = other DNA
aacctgactgtggtaaggtgcctggaaataaaacaatcttactgcaaagctgaagaggaaggatgacagagcagaactatagaaagaacttgggcccttgatgacatccgttattaactt

SEQ ID NO: 10803 - DNA, 120 bp, synthetic construct
  source 1..120: mol_type = other DNA
tagaagctagtgattaaattggttacagattactcgctgaatcccaggcaaaaataatgtggttaaaaacagtatttaagcatgtgaaaaatcagatgtatcggctaacagtcctgttca

SEQ ID NO: 10804 - DNA, 120 bp, synthetic construct
  source 1..120: mol_type = other DNA
tgtagaaagagcagagcacatgaatgaactaatgtaattctgagtggctgaaacatgaaattctaggcatggtgaaggagagcaaaaggggatggagaattaaggtacacagcatgaagg

SEQ ID NO: 10805 - DNA, 120 bp, synthetic construct
  source 1..120: mol_type = other DNA
acagacatgtgtcaccacgccctatggccaaattcatcaggcttaggaaattctcatggggttccatatttactaaccactaattatcagttccgtgtcatccttagtcaactctcataa

SEQ ID NO: 10806 - DNA, 120 bp, synthetic construct
  source 1..120: mol_type = other DNA
agaagaggcacaaactagtgagtagctctataatggtcccgatcaggagcccaaccatcaaaataaagatgcattcttaactgcagtcatgcaagttatcatgtgttcgttggtttggaa

SEQ ID NO: 10807 - DNA, 120 bp, synthetic construct
  source 1..120: mol_type = other DNA
tccaatatttgttttcctttaagcaaacagcaaaatccaagtctacactgggtcactcacggtttttataaaagaaaggagtgcccagcatgtctcactaaaaccccagggtctctgtaa

SEQ ID NO: 10808 - DNA, 120 bp, synthetic construct
  source 1..120: mol_type = other DNA
ctagagactcaaagtcactgtcttccccagtgtcattttaactaattgtgtagcattagctttgatgtttaaatgtccagtataggccaggcatgcctgtaattctagcactttgggagg

SEQ ID NO: 10809 - DNA, 120 bp, synthetic construct
  source 1..120: mol_type = other DNA
agtttgcattgctatcagcagtgaatgtaggagagtgcctcttttcccccatattctcatgagcacaatgctgtaaaaacttttagctcatttgatgggtaagggggagatactactaca

SEQ ID NO: 10810 - DNA, 120 bp, synthetic construct
  source 1..120: mol_type = other DNA
gccaccgcgcccggcctacaccaggtattttcattagagcattcctttgagagaggtagggaggtgacatttccactttgcagaggagtagactgaggctcagagaggttaaacgacttg

SEQ ID NO: 10811 - DNA, 120 bp, synthetic construct
  source 1..120: mol_type = other DNA
ggcaaaatggtttttaagtatacagttcggtgacattaagtacattcacatagtcgcacagctatcaccaccatccatttccggaactcttttcatcttctcagctgaaactctgtacgc

SEQ ID NO: 10812 - DNA, 120 bp, synthetic construct
  source 1..120: mol_type = other DNA
tgactgtcagccagcagactctacatacacaccattgaaaggggaggggaagagagagaagggaaaggcaacagaccgggcaaaggaagatgatgagctgtgccaactctcagtgatggc

SEQ ID NO: 10813 - DNA, 120 bp, synthetic construct
  source 1..120: mol_type = other DNA
ctgtgtgtcctctgttgtggatggtagaagtagcagtaggaataatgataggagccagcgtttattgaaacttattggatgctagacactgttccaagcactttgcctgtattaatttaa

SEQ ID NO: 10814 - DNA, 120 bp, synthetic construct
  source 1..120: mol_type = other DNA
tccttttcatttgaaattctgaggctgaggctcagttggaagcagttttcaagcactcagtccttaccaggccagagtattgccgctgccttctccctgacttgtcacattggaatcatt

SEQ ID NO: 10815 - DNA, 120 bp, synthetic construct
  source 1..120: mol_type = other DNA
aaggggaggaggggatggaaggggaggggaggaagcaaagtaaagagaaactaatattctttcttgacacagattttgcaatctggaggagagtctagaatccttatatgtgcaaaaata

SEQ ID NO: 10816 - DNA, 120 bp, synthetic construct
  source 1..120: mol_type = other DNA
cctgtagtgttggtgagacatctgaaacagacacttctggcaggagtcctggttcaatctttctgaaaaatatttctgtaaaatgtatccaaaaccttttaaaaagctcataggtcttga

SEQ ID NO: 10817 - DNA, 120 bp, synthetic construct
  source 1..120: mol_type = other DNA
ccattgttttaatccagccacccaataattatcttttctgtcccctagtcagtcatgagacctgtcagcctccacttgctcaagctggatatgggaactggtgaggagacagatgctggg

SEQ ID NO: 10818 - DNA, 120 bp, synthetic construct
  source 1..120: mol_type = other DNA
catgtaaagctgttcagcagtgaaaggaacaaactactgattcccaccaaacatggatgaatcgcaaacacgtgatgctaaagtgaaagaagccaggctcaagagcttatttactctatc

SEQ ID NO: 10819 - DNA, 120 bp, synthetic construct
  source 1..120: mol_type = other DNA
tacaggcgtcagccactgcgcctggctgtaatcagtggatttttaacatgagggcttatttaatatctttataaggacatggtgccgttgcagttggatttaatcactattacagcaatg

SEQ ID NO: 10820 - DNA, 120 bp, synthetic construct
  source 1..120: mol_type = other DNA
aacatcatcaacatgtggcttccgtcttatgatctaagatgttctacctctgccatcacttctggattttagccaggcagaaggggagaagacaaaatagaaggcacctcttctctttgg

SEQ ID NO: 10821 - DNA, 120 bp, synthetic construct
  source 1..120: mol_type = other DNA
atgccttagcgaaaggaggtgggcttgatagtgtttatatcatacagcgcatggaaagaatctaaagccacagaggcagcttcttcttttttcttgtttcttcttctcttcctcctcctc

SEQ ID NO: 10822 - DNA, 120 bp, synthetic construct
  source 1..120: mol_type = other DNA
tctggtgtttctcagactcaagtcaccagtgctgctgttttatccattttcaaaatattggagagggagagggctgctgttatgtacacattacttgtcatggaacattgaaaaaccctg

SEQ ID NO: 10823 - DNA, 120 bp, synthetic construct
  source 1..120: mol_type = other DNA
atccacggccacagttttggggaagcggatctctcacaagggtggtatacccaagggagtttgttttaaggcctgacccgaaggatgcttgtttagcatggtttcattccaaagtcagtt

SEQ ID NO: 10824 - DNA, 120 bp, synthetic construct
  source 1..120: mol_type = other DNA
tgaaggctgcgagtagtttgtggatatatcagtcatatcttggcataatccaacagcgtactaagggatcaagggactattttcaaggctgagcaggtttaaggaaaacatctaggtgaa

SEQ ID NO: 10825 - DNA, 120 bp, synthetic construct
  source 1..120: mol_type = other DNA
ctaatgggatctcatttcaaaacacagcatatgtgaattaatcaatctgaaaccaataaccataactcaaaatcttcaagacaggaaacaaaacagtacatatatatagatatatagata

SEQ ID NO: 10826 - DNA, 120 bp, synthetic construct
  source 1..120: mol_type = other DNA
cccattagtcttgggggaaggaagagaaatgttgaacatctagaaaccttaggaaggtcaagaattctggaacacgtatatcatttgacctagtagttctgcttctgggagtttatcctg

SEQ ID NO: 10827 - DNA, 120 bp, synthetic construct
  source 1..120: mol_type = other DNA
aatcatacctctttctttctatttactaaacctaatattctcaaagtggaggggtgattttgtctcttacctccaggggacacttggcagcatttggagacatttttggtggtcacagct

SEQ ID NO: 10828 - DNA, 120 bp, synthetic construct
  source 1..120: mol_type = other DNA
ggatggcttagaaagtatcctgctcactctgccctcctgtctctattctctggaataagaacctccaataaatatatcacaggtgtattggcccagggcaaaacaaaatttagagcataa

SEQ ID NO: 10829 - DNA, 120 bp, synthetic construct
  source 1..120: mol_type = other DNA
ccgctctctacaccttccttcctgtgtacctcggtctgcccagggactcctctctgagggactgcaggatgcggccaggtcatgagtgggacctacagcccgacttagtgtcagcagggc

SEQ ID NO: 10830 - DNA, 120 bp, synthetic construct
  source 1..120: mol_type = other DNA
ttttcacttttatttttgggcaggcaataataacatatgtagaaaattcaaaaggcccaaagtggaatccagtgaaactcttctctcccacctctctcctccagacacctaggcttcgct

SEQ ID NO: 10831 - DNA, 120 bp, synthetic construct
  source 1..120: mol_type = other DNA
tcacagcagccagggtgcttcttgaaaactggttattcatatcacgtgtttcctcacaatcagtggcctacaaagtgtccatgatggaccctgagatctctctgccctcatctcctgcaa

SEQ ID NO: 10832 - DNA, 120 bp, synthetic construct
  source 1..120: mol_type = other DNA
gggaaagaataatgatccatgattaattaagcaatcttgattaaacagtctcaagtatacagagggctctgagactatagcactgtgaggcaggtcccaggggccatgatttcagagggg

SEQ ID NO: 10833 - DNA, 120 bp, synthetic construct
  source 1..120: mol_type = other DNA
gtggagccaggggtggtggagccaggggtggtggagccaacggtggtggagtcaggggtggtggagtccaggggtggtggagtcagggatggtggagccaggggtggtggagtcaggggt

SEQ ID NO: 10834 - DNA, 120 bp, synthetic construct
  source 1..120: mol_type = other DNA
atcccaaggctcatgtctcagaacgagagctgctgaagggctggacgttctgagacttcttaagatgtaagtcatttggcatctgtagctggtgaatttcaggtctctaggggagaatct

SEQ ID NO: 10835 - DNA, 120 bp, synthetic construct
  source 1..120: mol_type = other DNA
ccttgaatgttgctgccacagaaccagaatggaaggtcatctgtgctgtccggagcgtgaactctgccctccctgcccccagtttttctctcctccctttctctcacctacatccccatc

SEQ ID NO: 10836 - DNA, 120 bp, synthetic construct
  source 1..120: mol_type = other DNA
atatatatatatatatccctgagataataatacttaaaaagacttagtccagtgcccagcacagtgggaactcaggaaaggtagttctgttccccttcctgaacctcttcctcctccctc

SEQ ID NO: 10837 - DNA, 120 bp, synthetic construct
  source 1..120: mol_type = other DNA
tcaaaggtcaccaattactgccatttcaccaaaaccaatggatgttaccacctttagcttactggatcctcgctgttatatgtgacatggtagacccctcagttcttgaaccttctattt

SEQ ID NO: 10838 - DNA, 120 bp, synthetic construct
  source 1..120: mol_type = other DNA
actgggagggaaacagaaagaatgttcctagggtcaatggaaagtattttgacgtggaacacggaatgatcagctgtgtttgatggcagaaaatagctgatgactgggactatatttttg

SEQ ID NO: 10839 - DNA, 120 bp, synthetic construct
  source 1..120: mol_type = other DNA
aagacactaggtaaacagaacacctaggcacatctgtaaggcatttgtttcctatcacacagcccattctagcttaacacccaccaactgagatgtagtgaaatactaaaactggatgct

SEQ ID NO: 10840 - DNA, 120 bp, synthetic construct
  source 1..120: mol_type = other DNA
tattcaggtttgcattcccaacatttagcaccacatgtatcaaaaatgttgttggatgaatactgaacaacagtcaaacactgaataaacctggcaggtgtgcatcacaggggagggcac

SEQ ID NO: 10841 - DNA, 120 bp, synthetic construct
  source 1..120: mol_type = other DNA
ccacaggggttcttttaaccttcgacacttgttccaaaccttcttttagaaggctccaactttatttttcctcatacagatcccttattcaactgttggtcctcctgaaatctgtttcag

SEQ ID NO: 10842 - DNA, 120 bp, synthetic construct
  source 1..120: mol_type = other DNA
gactttatttatggagtttttctttcccgtgcagaaatgcttaatttttgcataatcaaattcatcagtcttccctttatagcttctggtttcaagtcatgcatagaaaggcctttccta

SEQ ID NO: 10843 - DNA, 120 bp, synthetic construct
  source 1..120: mol_type = other DNA
aaagtgcattacttcaaaaactgttaatatcttagtataatatttgttgagtaaaatacttcctcctgtgtgctttggtgtttactttaccaaagcagtttttacaaattcttctcctgg

SEQ ID NO: 10844 - DNA, 120 bp, synthetic construct
  source 1..120: mol_type = other DNA
caatgagtactgatggaataaatttattaatatgtaaaatgccaccgtaactaatttaagaaaccaccacttgtgaagttttgatttagtgttttaacaaatacccacaactgtctgaaa

SEQ ID NO: 10845 - DNA, 120 bp, synthetic construct
  source 1..120: mol_type = other DNA
ttaatggcattcccagcaacctcgatggaagtaagactattattctaagtgaaataactcggcatggaaaaccaaatatcatgttctctttcagatgtgggagctaagctatgaggatgc

SEQ ID NO: 10846 - DNA, 120 bp, synthetic construct
  source 1..120: mol_type = other DNA
ctttctgcgctaactctgcttttactttccaggcctgcttttactttccaggcagaaaattgggagatccttctcagaagaaactgaaatgtcttcaataaagatccccaaataatacac

SEQ ID NO: 10847 - DNA, 120 bp, synthetic construct
  source 1..120: mol_type = other DNA
aacgatatttggatagataaactaacgtaggctaggaaaaaagaagatccagaagaattgcagaagtgctcagatttcagaactgtttcagagacaggatgaaggacatgtaatgcagag

SEQ ID NO: 10848 - DNA, 120 bp, synthetic construct
  source 1..120: mol_type = other DNA
catggtttgtacagttgcttcttcttatttctacaactaagaataaaaaaaaaaactggtcacttctgatacaaataccataaaataaaagtagttgttaacatcttactgattactcct

SEQ ID NO: 10849 - DNA, 120 bp, synthetic construct
  source 1..120: mol_type = other DNA
agttgaggccagcacgagtaacacaatgacaccctcctttatttaaaaaaaaaaaaaaaatgaagaggtaaattttggctttgagttgtgtaaaatcaactttgcataaaataaatcaag

SEQ ID NO: 10850 - DNA, 120 bp, synthetic construct
  source 1..120: mol_type = other DNA
taataaacagagctacagacactgttgtctcaccatctgtttgagagttcctctggaatattgtgcttgcctctggattggcagaaaggctaaactccaaagctatatgtatagagggag

SEQ ID NO: 10851 - DNA, 120 bp, synthetic construct
  source 1..120: mol_type = other DNA
ggccccgggcaccatccctggccccggccccggccccggctagggctgcgggtcaaggcccacaccctgctgcctcccctgagttgacttgtctgggagggtgaagaccagctggcttat

SEQ ID NO: 10852 - DNA, 120 bp, synthetic construct
  source 1..120: mol_type = other DNA
gaaggaatgaggctagggagagagtgcctagggcattgtggtctctgacagggtctgccaaaggttatttgctgagttgtggctgtgtcctcttcttcacccccaggctgtattcgtgcc

SEQ ID NO: 10853 - DNA, 120 bp, synthetic construct
  source 1..120: mol_type = other DNA
aatcacctgatagaaggtatagttcagagcaactgggtctccatgggctcgctgatgctgaaggacaaagagaaggaaggtgaaggactggtgatttgacagtattctgcccttacgctt

SEQ ID NO: 10854 - DNA, 120 bp, synthetic construct
  source 1..120: mol_type = other DNA
ttttataagaaaaggaatttatttcttacagttatggaggttgagaagtccaaggtcaaagggctgcacttggtgagaaccttcttgctgatagtgactctacagattcctgaggtggtg

SEQ ID NO: 10855 - DNA, 120 bp, synthetic construct
  source 1..120: mol_type = other DNA
accttagtatcaagttgtgggggtttttgatacccccaaattgacagttattcagctgaaacttggagataggacagaccttgattaatatttggcaataattgtcagttctaatgttgg

SEQ ID NO: 10856 - DNA, 120 bp, synthetic construct
  source 1..120: mol_type = other DNA
tgatatggtactcagagaactgagtgcagtacagaagcttatacacccccttttttttatagggaagtggggaaatggagaatgtagacagttcttttgagggccagtaaatcatttagg

SEQ ID NO: 10857 - DNA, 120 bp, synthetic construct
  source 1..120: mol_type = other DNA
tcacttcataagttgcctttttactctgttgtttcctttgctgtgcaatagtttgtaagtttggtagtcccatttgtcttatttttccttttgttgcccatgcttttggtgtcttatcta

SEQ ID NO: 10858 - DNA, 120 bp, synthetic construct
  source 1..120: mol_type = other DNA
gctttctatttcttctttcagtcttggtaggttttacgtatccaggaatgtgtccatttcctctaggttttcaaatttgttggcatatagttgttcacggtagtctctagtgatcctttg

SEQ ID NO: 10859 - DNA, 120 bp, synthetic construct
  source 1..120: mol_type = other DNA
tttgtgataaaaaaaaacaacaaaaagcacattgctagcatttatagaagcactataataatggttaagtgtattatccttggagtcagactgtgggtgctagtctgttctccactactt

SEQ ID NO: 10860 - DNA, 120 bp, synthetic construct
  source 1..120: mol_type = other DNA
gcaacagagtgagactctgtctaaaaaaaaaaaaaaaaaagtacacgcaaccttgggaggaaggaagggcatcaggaagaggcatcctgaaggagccactcattcattcattcattcatt

SEQ ID NO: 10861 - DNA, 120 bp, synthetic construct
  source 1..120: mol_type = other DNA
tggccttgggagctgaagagtgattcaggcagagggaacacaacagacaatgaacaagtgtattcaagggacacaaacagggaaggcagaggccagatcacaaagggacttgtaaaccat

SEQ ID NO: 10862 - DNA, 120 bp, synthetic construct
  source 1..120: mol_type = other DNA
gtggaagggcccaaaaggtacaaaatgtactggctttcaatatcctgtcatttctagttaggtttaggtatatattggtcatttgcaggactagagcacatttcatagccagagtgccct

SEQ ID NO: 10863 - DNA, 120 bp, synthetic construct
  source 1..120: mol_type = other DNA
gggcccaaatacatccaaatacaaagtggtgcagactaggaatgttgggaggaactatgagtgcaagagcctttcatgattgcccaaaggcactgggagaatgcaattaaagattttgtc

SEQ ID NO: 10864 - DNA, 120 bp, synthetic construct
  source 1..120: mol_type = other DNA
tggaggtggggcctaatgggaccactttttgggtgatggggatggatgcttcataaatggattggtaatgaatgaggtattgctctattataagttcctgtaacagctggttgttaaaaa

SEQ ID NO: 10865 - DNA, 120 bp, synthetic construct
  source 1..120: mol_type = other DNA
ccttaccctccttccaccctcccgccttttagagcaatctttcttttgtctttgatttctacctagaaaatgggggtaagttggaagacttagatgagttaatacatatcaggaactttc

SEQ ID NO: 10866 - DNA, 120 bp, synthetic construct
  source 1..120: mol_type = other DNA
ttcattccttttcccctcccccacctcctttctttctttttcctttctagtttcttggtataacaacctttttccataaaagaagggtagaacttctttcttaaaggcgaagttatttat

SEQ ID NO: 10867 - DNA, 120 bp, synthetic construct
  source 1..120: mol_type = other DNA
aaaagaagaggtggagctgggatttagagctacatttgtctgtttctatcataggtcttctctctaatgccatgtttctttggccaccattttgatgtcatagtgaaggatgatttcata

SEQ ID NO: 10868 - DNA, 120 bp, synthetic construct
  source 1..120: mol_type = other DNA
cagacaatgcagagcatgaggttccataaaggaccatagaatacataagagggaaagcaaggtgtcagtggccagaaatctgtgtagttatcactcagaggaagttagatttgttttcca

SEQ ID NO: 10869 - DNA, 120 bp, synthetic construct
  source 1..120: mol_type = other DNA
gcttatcttgtattaaaaggcatcttgctggcagccagtcagtcagttcactgggagaaatgcaacatgtggaccagaaggagagctaggaacagtgggcaagggcacacctaccatcta

SEQ ID NO: 10870 - DNA, 120 bp, synthetic construct
  source 1..120: mol_type = other DNA
taaaatactagggtatcatatccaagactgcattaaatgaataaaagacatgagctatagcagatgctgtagggtacagcccaaatcccctcttcagggaccttatttgtcctgggctct

SEQ ID NO: 10871 - DNA, 120 bp, synthetic construct
  source 1..120: mol_type = other DNA
ggactcaagcacacactttcaagacttgtgatacatcttaccaacttgtcctcacaatttgcattcccttcagtatgcaaatgctcttttgcctgtattcccactggattgagtacagtg

SEQ ID NO: 10872 - DNA, 120 bp, synthetic construct
  source 1..120: mol_type = other DNA
aaagagtgacaggcataatccttacccatctgacttccctggagtctctttataaacacatctgtactacaaaacagaatgactagtgcttctcaatgtccagagtgcagggagactcag

SEQ ID NO: 10873 - DNA, 120 bp, synthetic construct
  source 1..120: mol_type = other DNA
taatcgagggaagactgtaaagagtattaatatcacggccaaggtcactcagctggctcctgctgccattccaacccaaaggctgaattactatggcttttactaataataacaagaaca

SEQ ID NO: 10874 - DNA, 120 bp, synthetic construct
  source 1..120: mol_type = other DNA
caaggggctgcagtgtaacccaaggtgacacagccattaagtgaaacactcaggtctgagctagggcaccctttccaatgcattatgacacatttaatctgtaaaactgtaaattatttt

SEQ ID NO: 10875 - DNA, 120 bp, synthetic construct
  source 1..120: mol_type = other DNA
gctcttttaagatgtgtggtcttttatatgtgggttgtgtgtgtgtttgaggggtagtgacgaagacacccccatcaagataactgaagaagaactgcccaaactgaaacattcaaatct

SEQ ID NO: 10876 - DNA, 120 bp, synthetic construct
  source 1..120: mol_type = other DNA
cttgcaaagggccatgcttccatagtagggagagagaagacacaaagccacagcaagttcatggcccagcaacttgtagtgttgactttatctggtgttttaagtagttaaaaacattac

SEQ ID NO: 10877 - DNA, 120 bp, synthetic construct
  source 1..120: mol_type = other DNA
taataaagaagcatgtttctgacacaggggtgtctatgtctatcctaattcctccctcaccatcatcaccggagcatgttccttgcatcagataaacagagagaaacagaagcatgaaaa

SEQ ID NO: 10878 - DNA, 120 bp, synthetic construct
  source 1..120: mol_type = other DNA
tctattaaaatatggaacctctgacacttagaatattagatcaagggcaacactgggtgagggtgggggcgtttttgctcaacacagttaacaacagagatgggactgtgatgaattatg

SEQ ID NO: 10879 - DNA, 120 bp, synthetic construct
  source 1..120: mol_type = other DNA
ggttctctagccctagctgtccctgggctgcctcctgactcatgtgtctctccagcactccctgcttttccatcatttcctgtcttgaagacagtgaaagagttgacttgtagaagaatt

SEQ ID NO: 10880 - DNA, 120 bp, synthetic construct
  source 1..120: mol_type = other DNA
gtatgaaccgagtttccacacagtctggctggcattgcagtcaggagatgtttggctacttcacatgttttgaacactagtaaatcttaaggtacttgtgttctctggtgtgaattgtct

SEQ ID NO: 10881 - DNA, 120 bp, synthetic construct
  source 1..120: mol_type = other DNA
ggcagaaaaaaggaaatggcctaaaaaggtgggtttgctgtgttgcctcacactacttgattcatggttctgattctaaaaatctcacttgatacttgatttcatatgaaagacgtgtaa

SEQ ID NO: 10882 - DNA, 120 bp, synthetic construct
  source 1..120: mol_type = other DNA
cccctcacactacagccctggtgggggagaagggggtgggtgctgcttgtggtttagtcttttttttttttttaaattcaatctggaatcagaaagcggtggattctggcaaatggtcct

SEQ ID NO: 10883 - DNA, 120 bp, synthetic construct
  source 1..120: mol_type = other DNA
gaaacaccctgacttttgtagggactgaacctcactgataacctcaattgcggatggtatggagggtgtctaggtgtgctaggacccctgcccattccccagaaatagactcccatcttt

SEQ ID NO: 10884 - DNA, 120 bp, synthetic construct
  source 1..120: mol_type = other DNA
ggacctgcaggctttcccctgtaaatccgtgttctgtcattgacattttgtgactgtaagacagacttgagataagacatctagaaaacaataattgaacaatgatgtgaatatatttca

SEQ ID NO: 10885 - DNA, 120 bp, synthetic construct
  source 1..120: mol_type = other DNA
agcctcccccttctctccacgctctccagggacaccaggggctccaggcagcccattattcccaggaggacatggtgtttctccaggcggacccatggggcctgcagagaaaagagacat

SEQ ID NO: 10886 - DNA, 120 bp, synthetic construct
  source 1..120: mol_type = other DNA
taaacagacttagataattcatctatctgctgataaatatacacacaaaccagtatacacacccaagatgcacagaaatatctccagcatatcatttataaatacccataaaaacagttc

SEQ ID NO: 10887 - DNA, 120 bp, synthetic construct
  source 1..120: mol_type = other DNA
attcttctggtatacatatcttacatctcatattctccaaatataaactctcactcctacacactctcacaaaaacagttatgaccttcttttttagggggcggggaatggagtctcgct

SEQ ID NO: 10888 - DNA, 120 bp, synthetic construct
  source 1..120: mol_type = other DNA
gggaacaattccacactccccatccctgactctgcaacacagtgcagaattccagttggcaataaaaaactagtagagaagcaactcactgacttcagtttgtaataccttcagaagaaa

SEQ ID NO: 10889 - DNA, 120 bp, synthetic construct
  source 1..120: mol_type = other DNA
ggccactgtggagacatttcacagaaatgcttgctggaccattcaggttcagagttgggacaaaaccgagaactcatggggatattggacaggagttaggaaatgaccttctcacacaac

SEQ ID NO: 10890 - DNA, 120 bp, synthetic construct
  source 1..120: mol_type = other DNA
acctaatagtctggatcggctgagaccatcctgatttcaaacacccagtccccttgccttcctaagaacccctgtgtttctcagactgaaaatgtgttttgaactttgttcacgaagtga

SEQ ID NO: 10891 - DNA, 120 bp, synthetic construct
  source 1..120: mol_type = other DNA
gtgttcagagagatttggactggagttttctagatcttagggaggagtggggagaagtggtctcagccagaaaactgttgggtgggttggctgtgacagagcatgtagtgacagcccctg

SEQ ID NO: 10892 - DNA, 120 bp, synthetic construct
  source 1..120: mol_type = other DNA
ttgtgtgtccacctcccctactcctggcagctgctcctgtggtgcctgttatggctgcccaggtggttgggggcacccaggcctgtgagggaggctggtcccagggccttcctcttccac

SEQ ID NO: 10893 - DNA, 120 bp, synthetic construct
  source 1..120: mol_type = other DNA
gtgcccctgggttatctttcaggggcccacagtcctagcctcaggactcctgcatctgggcatcatccctgatgccttctgccataaatcccacccctggccagctgaaacctggaggag

SEQ ID NO: 10894 - DNA, 120 bp, synthetic construct
  source 1..120: mol_type = other DNA
gtggccacagggactggcctcggggccctcaaggtcctgcatggagccccccacagctatgattcccttcccatatgatgactgaactcatgtggaattgatgtagacacagatttacat

SEQ ID NO: 10895 - DNA, 120 bp, synthetic construct
  source 1..120: mol_type = other DNA
ataaggtagcactgcccctttgcagggtttaggaatgttaagtgagccgtgtttgaagggaacatggtccatactctggcgtgtgtgggtgcccagccaacttcctcacctaagggtgaa

SEQ ID NO: 10896 - DNA, 120 bp, synthetic construct
  source 1..120: mol_type = other DNA
gtctccatcatgctctgccaagagaggtattttacagtgacaaaacttctcttctggtgccctgacacatcctaggactttgatgctggtaattctttccccccagcaaatgttggttct

SEQ ID NO: 10897 - DNA, 120 bp, synthetic construct
  source 1..120: mol_type = other DNA
tggcaatcaagacagagaggctagatgctttacctaaagtcatccaacaaatatttggtagaaccagtgctagaatgcaataaatggaaacagagtttatttcggtgtttcttttcctga

SEQ ID NO: 10898 - DNA, 120 bp, synthetic construct
  source 1..120: mol_type = other DNA
atgcatagatatttgtagagggcctgctgtgtgccagatattaagcaattgcaattgagtaaaatagtatttaaaaactactcacagccttcaaggagcacagcgtctaactagggaact

SEQ ID NO: 10899 - DNA, 120 bp, synthetic construct
  source 1..120: mol_type = other DNA
ggaaaggagcgcggcctgggcatcccgcagggcccccactaggaaagctatgaacgcttccgccttgagcacagccacaggcctgctctggtcacaatgtggggtcgccccgcggacact

SEQ ID NO: 10900 - DNA, 120 bp, synthetic construct
  source 1..120: mol_type = other DNA
ctctttggaagcctgtcccctgctgaaaagacaccccaccgagggcctgggctcagggtctctggggagcaatccctgacttgggggctgggtggcccctcacagtctcaaaagagaaag

SEQ ID NO: 10901 - DNA, 120 bp, synthetic construct
  source 1..120: mol_type = other DNA
gtactctttgaagcacaaaagtttttactttggatgaagtccaatttatctattttttcttttgttacttgtggttttgatgtcatgtttaagaaaccgttagctagtcttaggtcatga

SEQ ID NO: 10902 - DNA, 120 bp, synthetic construct
  source 1..120: mol_type = other DNA
tagggttttctacatataaaaccatataatctgtaaatagaaataattttacttcttcctttccaactggaatgccttttatatatcttttccttgtctaattgctctggcccagtacta

SEQ ID NO: 10903 - DNA, 120 bp, synthetic construct
  source 1..120: mol_type = other DNA
tattttaatcctgtaatcagcggaatctgctgcaataggcaaactgagaaatctcagtggctgaatttaacacaggtttatttcttgctagtgtcacggtctgttgtgggactgggagac

SEQ ID NO: 10904 - DNA, 120 bp, synthetic construct
  source 1..120: mol_type = other DNA
gtccaagcatgaaatggctctgttgtattcaacttctgacacttaccctccttaaattggtcaggaagccccttttgtgacgtcttggataaattttaaaactttttgttacagttgctt

SEQ ID NO: 10905 - DNA, 120 bp, synthetic construct
  source 1..120: mol_type = other DNA
taagcaaggaaagggtctatcttggagaatatttcatggttacttgaaaatgtctattactgttggattattttctaaatgcatttacatcagtttggtcgatactgtggttcaagtctc

SEQ ID NO: 10906 - DNA, 120 bp, synthetic construct
  source 1..120: mol_type = other DNA
acctatccatatgctacatctgacaaatagtttggcacacaatttgcttagcctttgtatctcgaggaccagagaagttaagtacgtttggccaaaagtcacccagcaaattgatgacag

SEQ ID NO: 10907 - DNA, 120 bp, synthetic construct
  source 1..120: mol_type = other DNA
tgtaatttccatatgacttattaaatattttgaacatcacatccatacatactttccagacaagaaatttggatgtgggagaacattctttaataaagaaacacataaattctcatttaa

SEQ ID NO: 10908 - DNA, 120 bp, synthetic construct
  source 1..120: mol_type = other DNA
ctgggtgagatttaggagttcagcaatcacaagacagctccagctatttgagattatgctgagtgttggcttgtgtcactcttttttttttttttttttttttttttttaatttattttt

SEQ ID NO: 10909 - DNA, 120 bp, synthetic construct
  source 1..120: mol_type = other DNA
aggtgaaggatatccactatccaatttaatatccttacatgactaacatttttagagaaatagtcctttgaaattaataggaggtgatgtgacagtggaaaaaaatgtaaaaatcaatca

SEQ ID NO: 10910 - DNA, 120 bp, synthetic construct
  source 1..120: mol_type = other DNA
tgtagttcttcatataatgcatctaatattttaagggcttatatctgtaatttgactaggtcatttgtttagttatatttgaattttcagacaatcattaaaaaattgtggaagggtcac

SEQ ID NO: 10911 - DNA, 120 bp, synthetic construct
  source 1..120: mol_type = other DNA
ggactggacagggtgcatttataagcccatctttgtgtttagactgtactattaagaggaatatagcaaggacacctcttctccatttcacatgaagatggatgtattaagtattaacta

SEQ ID NO: 10912 - DNA, 120 bp, synthetic construct
  source 1..120: mol_type = other DNA
tcttagacaaatggctaatcctaggtctggtgtataagatgagcctgaaacattttcataacagatagtaagaaaagtagggcccatcaagagtactcatgatccaacctggagcccagg

SEQ ID NO: 10913 - DNA, 120 bp, synthetic construct
  source 1..120: mol_type = other DNA
gtaggcccatggggatgacaatatgtggaaggcccaggactctgggtcaatgggacaaaaacatcttcaaaaatcaacatgctaaatggctgatttgctgaatttattacatttaccaat

SEQ ID NO: 10914 - DNA, 120 bp, synthetic construct
  source 1..120: mol_type = other DNA
gggctgctatccctaatggagctcctatccagtgtggtactgggcaagttgcttaaattctcttgacaattttcttgtcaataaaatgggatgataagcaatcacctacctcattagttt

SEQ ID NO: 10915 - DNA, 120 bp, synthetic construct
  source 1..120: mol_type = other DNA
ttgtttttggtgggaaatttgaccatcgttcctgtactgataattcccaaatcatcatcttcctttcagattttgcccttgcatttcagactcctttgaccggtaaacaccctcgcgtat

SEQ ID NO: 10916 - DNA, 120 bp, synthetic construct
  source 1..120: mol_type = other DNA
ttgcaggtgctttttttcattcaatagctgtggagcctgctacacagtaggtgctcaataaatggctattaagttgctaaacatttattgaatgccccaactgcatgctgtggtctgcaa

SEQ ID NO: 10917 - DNA, 120 bp, synthetic construct
  source 1..120: mol_type = other DNA
aattactcttcctttaaatctgggctgaatctgatgctgtatgtctttgggactaggtcagaaagggccatacagtgtctgcttagttctcttgagatacttgctctaggacaaagcttt

SEQ ID NO: 10918 - DNA, 120 bp, synthetic construct
  source 1..120: mol_type = other DNA
cttaaagatgtacctcacagaccttctctgttagacaacagaaattctaaaaatccctaggagcctgtttgggaattcaagctaaagaagagactgtcagaaatatttgcaagtgtggct

SEQ ID NO: 10919 - DNA, 120 bp, synthetic construct
  source 1..120: mol_type = other DNA
gacaccaccttaaacaggcaatcaaggttaacatcatatggatatcatgtatcccctgatatgatacaatgagaagggtaccaggtggtgttcttccccaaaattcataacctccgtcta

SEQ ID NO: 10920 - DNA, 120 bp, synthetic construct
  source 1..120: mol_type = other DNA
tagagcttccttctcttatgaaacccaagtggagtgttataaagaaccagagtctgttctgctctgttcattccacagatggccccattcagcactctcagaagcagcagctccatcaca

SEQ ID NO: 10921 - DNA, 120 bp, synthetic construct
  source 1..120: mol_type = other DNA
aagtttgagtagtgcttcctcaggggccttcctataccttgcatctgaatggggtcccccagcaacaccatttcacatcttcacatcctcacctttttcttcatagacatcataatttgt

SEQ ID NO: 10922 - DNA, 120 bp, synthetic construct
  source 1..120: mol_type = other DNA
tttcctaagtatcagcaaaatgccttgtttaacctcctagccttttcacaaaattattacagtggttactgggcctgggaggagtataaacaaatgtctctccacttacaaccccccaga

SEQ ID NO: 10923 - DNA, 120 bp, synthetic construct
  source 1..120: mol_type = other DNA
taaagactgatgaaaattcaatgtcttaaatgttctcaaggtacagcaagatcttagggttggccctaactccgcttgcagagcaagggatgactgtcctccagctagtttgattcattg

SEQ ID NO: 10924 - DNA, 120 bp, synthetic construct
  source 1..120: mol_type = other DNA
taggggtcaagtaaccctttgatataatgattccctttccttggatagaactcagcagtgctcccactttctgagccctgaagagcactctgatggaaaggaatgtgttattaaaatttg

SEQ ID NO: 10925 - DNA, 120 bp, synthetic construct
  source 1..120: mol_type = other DNA
cttcctcagagaacacgcagaggaccctctgctcataggcaaacagaaaacaccacatacagtgagtttggccaggaatgtaaggaaacttcagatgaaattgtatgtgaagggcaccat

SEQ ID NO: 10926 - DNA, 120 bp, synthetic construct
  source 1..120: mol_type = other DNA
taaagaaagaaacagtaagtaattaacaggtgatatgaagatatgataaaaatgtggaagtcggtcatgaatcactggagttcaggccagctggtctggggtacctgaagctcggcagct

SEQ ID NO: 10927 - DNA, 120 bp, synthetic construct
  source 1..120: mol_type = other DNA
tccaaatcacctacagaataagcctcaactcctcaggacagtctccaaagcccttcctgatctggtcaccaccaagtcttccaacaaaccttctgattcaagaattccaaaacacaccca

SEQ ID NO: 10928 - DNA, 120 bp, synthetic construct
  source 1..120: mol_type = other DNA
tctacacaccaactccaaccatctctgattgaagaatgctcccaggtagactaattccctcacttccaacctgctctgagtgcaagcaaaacatggcctttaaggttccagaaaaagccc

SEQ ID NO: 10929 - DNA, 120 bp, synthetic construct
  source 1..120: mol_type = other DNA
catcacatcttatgatgtagtcctgccactatccctactttagatataagaaaacaaaggtttggagaagttttataacttgcccacagccaccagccataagggcagtgcttggattct

SEQ ID NO: 10930 - DNA, 120 bp, synthetic construct
  source 1..120: mol_type = other DNA
gtatatgtgtttagatatagatacagcaatagctatagggatgggtacagggagtagccgcagatagactgtctcaacttgtggatctggttattctctgtgtatttctctctccccttt

SEQ ID NO: 10931 - DNA, 120 bp, synthetic construct
  source 1..120: mol_type = other DNA
tatttccaaaccacttctgtttgactttggaaagaacagaatagtctttacacttaatttgcttttgaattgtgctcatctgcagctagtgctacagtgagtcagtgggaggaggggccc

SEQ ID NO: 10932 - DNA, 120 bp, synthetic construct
  source 1..120: mol_type = other DNA
gtcctccagatgaaagctactggtcacttggcgactttatggaattactgataaggagcagtctggttggaaactaacttcaaccccaccaaaggtagcaaaggtgtccatgtcagaaaa

SEQ ID NO: 10933 - DNA, 120 bp, synthetic construct
  source 1..120: mol_type = other DNA
attcaattaatagtcacctaatgaaggtgacaagaccctgcaggtggacaggtaggctgatggggcaaaggacagaggcatgagaagcaagaagagcgtaagaacgaaagggaagaagga

SEQ ID NO: 10934 - DNA, 120 bp, synthetic construct
  source 1..120: mol_type = other DNA
gcagtttatccttcactacattatcaagcatctaccagaggagccaccctgagctgtgcgcctgcagctggtggaaaggggaagcctccaaagccacagagtcaagaaagggagcctccc

SEQ ID NO: 10935 - DNA, 120 bp, synthetic construct
  source 1..120: mol_type = other DNA
gagggcatccctgtcttgtaggcacactaatctctaggcacaatgccagcctggctaagtgttgaaggatttccctagcacagagaaatctgcaaagactgagagagatgtttggggtat

SEQ ID NO: 10936 - DNA, 120 bp, synthetic construct
  source 1..120: mol_type = other DNA
caagaaagaattcctcccaaactgggagaagaatacatttctgttgttgtaagccatccagtttgtggaaatttgatatggtagccctagaaaactaaaacagtgggctcgatggcgcaa

SEQ ID NO: 10937 - DNA, 120 bp, synthetic construct
  source 1..120: mol_type = other DNA
caaaaaaaaaaagaaaaaggaataacagggacatagcagtacgtgcttatagtcccacctagagctacccagggcactgtggccagcggttcatttgaggctgctgttatgatcacacct

SEQ ID NO: 10938 - DNA, 120 bp, synthetic construct
  source 1..120: mol_type = other DNA
gatggttgcacaactttgtgaatatgccgatagctactgaactgcacactttaaaagagtgaattttattatacgtcaattatatctccaaagaatggaataaagcctcaggggccccca

SEQ ID NO: 10939 - DNA, 120 bp, synthetic construct
  source 1..120: mol_type = other DNA
agtatcacggatgcatttgtcagatgaaaagcctgcttctggctttataatggaccctttatcctcattgtctttaggggactcctggtcctagagtagttaaatagtaagaattgaatg

SEQ ID NO: 10940 - DNA, 120 bp, synthetic construct
  source 1..120: mol_type = other DNA
ggaaatcagtatattgaaggcctgttcattcccctgtgtttaagcactattcataatggccaagatgtggaatcaaccgtgtccatcagcaggtgaatggataaagaaaatgtggtccat

SEQ ID NO: 10941 - DNA, 120 bp, synthetic construct
  source 1..120: mol_type = other DNA
caagccgcctttcctaagggaaggtctcaggcctgctgtgtgaacccttatctgcacctcataagtctttctactgcagagcaaaatgaaacaaaataataaaaactattcattagtagg

SEQ ID NO: 10942 - DNA, 120 bp, synthetic construct
  source 1..120: mol_type = other DNA
atgagcgcagcagagatggagaaatagactttgccttttacctgagactttcagttcgtttgtattctacctttgtaaaacagcctatagatgatgatgtgtttgggatactgcttattt

SEQ ID NO: 10943 - DNA, 120 bp, synthetic construct
  source 1..120: mol_type = other DNA
ctagtcagtatctgtagctacactgtataactgttcttcaataaaatggttcatattttatagatgccttgttatctcaagaaatctgatttacataaacttatacttctttaatgcttt

SEQ ID NO: 10944 - DNA, 120 bp, synthetic construct
  source 1..120: mol_type = other DNA
cacaagttcagcgggtggatcactaggacattcttcctctttctttccaacagccattgctgaagccataaagaaagcccaagagtcaggggacaaaaagatgaaggaaatcactgagac

SEQ ID NO: 10945 - DNA, 120 bp, synthetic construct
  source 1..120: mol_type = other DNA
ttaataaaccttggtttcattacttctacataaattcacaggaaatagtaaaacaatgtattaattaagaactagtgctctccctctccctccccctccccctccccctctccctccccc

SEQ ID NO: 10946 - DNA, 120 bp, synthetic construct
  source 1..120: mol_type = other DNA
aacttggatcaggcaggtttcttaaatatgactccaaaagtgcaaaagaacaaatagataaattggactttattaaaattaattttttttttttggtgagatggagttttgctctgttgc

SEQ ID NO: 10947 - DNA, 120 bp, synthetic construct
  source 1..120: mol_type = other DNA
tatctgttaagggtctagtatttagaatatgtaaagaactatcacagctccataagaaaaaagcaaataatccaattgaaacaatgggcaggccaggtgcggtagctcacgcctgtaatc

SEQ ID NO: 10948 - DNA, 120 bp, synthetic construct
  source 1..120: mol_type = other DNA
atgagaggtgaggaaaagtaagtagtcatgtgtggctctttgtttctggctttaataactccagtagttctggaagagacttagtgggaaacattttggataaactgagtttgtccaaat

SEQ ID NO: 10949 - DNA, 120 bp, synthetic construct
  source 1..120: mol_type = other DNA
aatatcagctctaaaggttgagtagagaaggaaggagtgatctgagaggtggaaggaggagtaggaattatcatagaaactttaagcttcttgagggcttgtgactgtgtcatgttcatc

SEQ ID NO: 10950 - DNA, 120 bp, synthetic construct
  source 1..120: mol_type = other DNA
gattgaacgggaggagcagttgctggttatgacagagtacaggatccagctatggagtgggtttatgaagtagagacaacgttcccaagtctttagtgaacatcagagagtgtcatctgt

SEQ ID NO: 10951 - DNA, 120 bp, synthetic construct
  source 1..120: mol_type = other DNA
gtgatggaattctctattgtttcgaagagttttgtttgttttaaagacattaaccagttttctcgagggatattctatgaaaaagtgggttccatcatccaataagtttgagaaactgca

SEQ ID NO: 10952 - DNA, 120 bp, synthetic construct
  source 1..120: mol_type = other DNA
cagtatctggcacatggaaagttctcaatgttaattacccatttttttctgtttaaggaaatagtctcaatcctataccatgaatgaattatgaaaatagttggaaaggaaacaacagtt

SEQ ID NO: 10953 - DNA, 120 bp, synthetic construct
  source 1..120: mol_type = other DNA
tctcagttttcacaacagcatcctgagcaaagaaaaaataggttggtttgagttgtatgtgatgagatttctaatattctattcgaaatgccccctagtaagcactagtgataggtatta

SEQ ID NO: 10954 - DNA, 120 bp, synthetic construct
  source 1..120: mol_type = other DNA
gagttttgttatttccatggaaaacattattgaatctaaatttaactagagatgtgtagttcagggagggagagtggttttataatatgaatcttggatttgaaatgaacttaaagcaaa

SEQ ID NO: 10955 - DNA, 120 bp, synthetic construct
  source 1..120: mol_type = other DNA
gtggaatagctgcgtacactttattgttcttggtgcttaaactttagttgtcctgctaagataaaggaagacattctttcagttggaaatcataatgtatttctccattgaaacagtatg

SEQ ID NO: 10956 - DNA, 120 bp, synthetic construct
  source 1..120: mol_type = other DNA
ttaatactgacagccagcgttgctataagtgttttatgtgcattatctcacttaagctttacaacagtcctaagagaggaatgctgtggttattacacccacttgacagaccagggagca

SEQ ID NO: 10957 - DNA, 120 bp, synthetic construct
  source 1..120: mol_type = other DNA
acctagctaacttttttgatttttagtagacaaggtctcgctgtgttgcccagactggtctcgaactcttaagcgccaagcatttctcttgcctcagcctcctaaaattctgggattaca

SEQ ID NO: 10958 - DNA, 120 bp, synthetic construct
  source 1..120: mol_type = other DNA
ggcctgtaatcccagaattttgggaggtcgaggcaggtagactccttgcgtctgggagtttgagagaagcctgggcaacatagcaaaaccccatctctactatagaaaaattaacccagt

SEQ ID NO: 10959 - DNA, 120 bp, synthetic construct
  source 1..120: mol_type = other DNA
ttcctcagtgactgtaccattttatattcctattagcaatacacaagtgtcccaatttctccacatttttgccgacactgttttccattaaaaaatttttattgtagtcattctagtggg

SEQ ID NO: 10960 - DNA, 120 bp, synthetic construct
  source 1..120: mol_type = other DNA
aaatattagtatggacttatggatattttataccttgggttaaaatcttattattgctttatttattttattggtcaagttgttccagctttggccactgggagctctttcagttggtat

SEQ ID NO: 10961 - DNA, 120 bp, synthetic construct
  source 1..120: mol_type = other DNA
tctggtgtgtaataaaaagttacaagacacaagaaaagcaagaaaatgtgaccaaaggtcaagagaagaaatagtcagtagaagaagacccagagatgatccagatttatcagaattatc

SEQ ID NO: 10962 - DNA, 120 bp, synthetic construct
  source 1..120: mol_type = other DNA
gattgtagcacagagtaggggaatccaaatagagcccaggagagtttggagaagtcaaggcaactagaatttgtggggcagaaaacaataaaaggaactacacagaaatctatagaagta

SEQ ID NO: 10963 - DNA, 120 bp, synthetic construct
  source 1..120: mol_type = other DNA
accaaaagactcacaagtagtatctaaagatgaaaaataccagatataatatccaaaactgggggaaaaactggatgtgattaacagcagattagacactgtggaaaaaaagatcattaa

SEQ ID NO: 10964 - DNA, 120 bp, synthetic construct
  source 1..120: mol_type = other DNA
gcaggtggaggtggagaaaagtggtcaaaccctgaatgaacgttaaagataggaccaaaaggatttgatgagaaattggaagtagagcacggggaaaaagaaagacatcagtgatgatgc

SEQ ID NO: 10965 - DNA, 120 bp, synthetic construct
  source 1..120: mol_type = other DNA
gggctgagacattttctattaattctgaatccaaaaaactcttatcccattgtctcatagcttcattacacagacctggcagccatgatcctctttttttcccccttagttgtcaaacat

SEQ ID NO: 10966 - DNA, 120 bp, synthetic construct
  source 1..120: mol_type = other DNA
tgtttgagtgcttggactttattgggagaaggcaaatgccctggaacaagagtgaaagggagaaattcccgttgtattgcaagccagaataagagaggctcacccgcactggcctaaggc

SEQ ID NO: 10967 - DNA, 120 bp, synthetic construct
  source 1..120: mol_type = other DNA
taaattggagtatttagtagcagtagcctttggtataaacactttttaaaaatttactattttttgatttaatagggccactttctagtcaaattttttttgggggtggtgaggagggta

SEQ ID NO: 10968 - DNA, 120 bp, synthetic construct
  source 1..120: mol_type = other DNA
catagtaggcctgtcccttgggtaaggcaattagggcagctttcctgggccctattttggggtggggaatgactcggggactttattatatgactttttttctgaacattaataaaattc

SEQ ID NO: 10969 - DNA, 120 bp, synthetic construct
  source 1..120: mol_type = other DNA
tatgtggtaagaactttaacacaaatttgtttcagttgggccataaatgtgcagctgtgttggatttggtttgtagtactgaaaaaattaatatagggcctgaagtggtacaaagagagt

SEQ ID NO: 10970 - DNA, 120 bp, synthetic construct
  source 1..120: mol_type = other DNA
caggtgaggtcattatggtatagtggtagcttattttataaagctaagttttgtttgtttttgtttttctcccacttagtctttgaagactctttagtcatttgcctcttctgagcgcag

SEQ ID NO: 10971 - DNA, 120 bp, synthetic construct
  source 1..120: mol_type = other DNA
caagtgcagtgggtactcacgggcacaatcccattgctgatcagcatgagaatttttaaattgttatttttaattttttgtttgtttgtttaatagggacagggtctcactgcattaccc

SEQ ID NO: 10972 - DNA, 120 bp, synthetic construct
  source 1..120: mol_type = other DNA
ggcgtgagccaccgcacccggccgagtacaatcttttataaagaggtaaacacaagattgtaatgaacaggcttagcatagccacatcccactggcagtattagctaatattatttatat

SEQ ID NO: 10973 - DNA, 120 bp, synthetic construct
  source 1..120: mol_type = other DNA
ttaggcagttgtaggtaaaaggttcaaaagctgaggaaagggtctggaatctaaatctgtaagtaatcacttggaatttatacatccttggttttctttcctattatctctacattattt

SEQ ID NO: 10974 - DNA, 120 bp, synthetic construct
  source 1..120: mol_type = other DNA
acatatataccttatagggttgttatgaagattaagtgagaaaatgaatataagatgttgaacctgcacataatgtagtagtaacatagtaatattagagggagaaataataagctagca

SEQ ID NO: 10975 - DNA, 120 bp, synthetic construct
  source 1..120: mol_type = other DNA
aaatgtcatataagaactggaaacaaagttcaggactcagaagacaggtttaaaattaagaggcaaattttagagttattagcatacagataatatttcaaatttaaaagttttttaaat

SEQ ID NO: 10976 - DNA, 120 bp, synthetic construct
  source 1..120: mol_type = other DNA
agactgacaaaggaaaactacagaggaggggaactagctttaccagatgttaaaacatactataaagcctctgtaattaaaacagtgaagtactgatgcatgaatagacaagtagaccag

SEQ ID NO: 10977 - DNA, 120 bp, synthetic construct
  source 1..120: mol_type = other DNA
aacagtcagttttcaaaaaaagatataaaaatggctatcaaatataacttattagagaaattcaaattaaaactacatggagataccatttctcacctatcagattggcaaaattaaaaa

SEQ ID NO: 10978 - DNA, 120 bp, synthetic construct
  source 1..120: mol_type = other DNA
cgaaccagaggtattgttataaactgaggatttttaatatagataaatggatacagaaatataggcatgtgtatatgggtgggatagtacacatacataaacatctcctagttctgtcca

SEQ ID NO: 10979 - DNA, 120 bp, synthetic construct
  source 1..120: mol_type = other DNA
gcaaattcaggataagcctggaagtctagtggtgccagacaagacatgttgaaataatgcaagagccaacctgaaggaacacctactggctaaagctgaagcaatttgagtaagaaaata

SEQ ID NO: 10980 - DNA, 120 bp, synthetic construct
  source 1..120: mol_type = other DNA
agcaaaggagctggatataagattaacatacaaaagtcaatcacatttctagagtgactaacaataacaaaggaagctgccattgacaataatattattttgtactaatagtaataaatg

SEQ ID NO: 10981 - DNA, 120 bp, synthetic construct
  source 1..120: mol_type = other DNA
ttgtagaattatgtgaaaaatcttgaactaattagataatctttagaagttacttcacaatctttgtttttacacatacacaggaatttatggtgctttattttttacaggttagtagct

SEQ ID NO: 10982 - DNA, 120 bp, synthetic construct
  source 1..120: mol_type = other DNA
ttgtaaaagccttcaaacatatacaaaagtagagaatacaaagcataatgaacttaagtacctattagccagcttattaaaacatggtcagtcttgtttcacctgttacatcccttttct

SEQ ID NO: 10983 - DNA, 120 bp, synthetic construct
  source 1..120: mol_type = other DNA
acaacataaaatacagttctaaaaaatattatttgtgaagaaaaatataatgttgccatcttttgtctgtctgtatgttttttttcccttagattccagtgtagttagtgaagttgtact

SEQ ID NO: 10984 - DNA, 120 bp, synthetic construct
  source 1..120: mol_type = other DNA
ttttaaaagcatgcactgttagccatccctagaatgttcagtgttaaaatatgacccatgattacatttttctttaaagcataaattatttctggtatattgaattaaatggaattgatg

SEQ ID NO: 10985 - DNA, 120 bp, synthetic construct
  source 1..120: mol_type = other DNA
acttaagtaattctattttcctgattttacttttcttttcaagagaccaaccccatttccaaattcccagcaaagagaatctgattgcccagagtaaatttgattcaaaaaactgtgatc

SEQ ID NO: 10986 - DNA, 120 bp, synthetic construct
  source 1..120: mol_type = other DNA
cctttatatataatagtatctcattttaataaaaatgtatctataagtacatatgtgcatttgaaaacctggaaatatgcatgtatagcaaaatgctagcagtggttatttctgtatggt

SEQ ID NO: 10987 - DNA, 120 bp, synthetic construct
  source 1..120: mol_type = other DNA
acaaaattgaaaggcaaccaaaaaaaaacagaaaaaaaattacattgtcagaaaataatgcagtaagcaaaagacacatatctatagagataaatggggaaaggatatgagtaggcaagt

SEQ ID NO: 10988 - DNA, 120 bp, synthetic construct
  source 1..120: mol_type = other DNA
ctctgtctttacagatttactgagatgtttgatgattttccaccaaaaaaaaaaaaaaaaaatctctagtgaaagaaactaaggagatgagcaggtgtagtaaattagatttatggcctg

SEQ ID NO: 10989 - DNA, 120 bp, synthetic construct
  source 1..120: mol_type = other DNA
ccaatatatgattgaaggttagcattgttatatcataaaactatgctaaggagaatacaggcagaaaacaaagacaatacctctcaaaaaacccaacttttaattgaatacagagatttc

SEQ ID NO: 10990 - DNA, 120 bp, synthetic construct
  source 1..120: mol_type = other DNA
agatcagcatgggagcatttcctagaagggtctgcttgctcaacaaaagccagagggggatgaggctaggcctgagtccttgtaaagaaatgaagacgcttacccagtacctcatcttac

SEQ ID NO: 10991 - DNA, 120 bp, synthetic construct
  source 1..120: mol_type = other DNA
gttagctagtttcaagtattcgaagggatttcttctaaaggaggtattgaacttattttgcctgattccagaggatggggaaggaaggaaacatcacatgttcagccaaattagccaagt

SEQ ID NO: 10992 - DNA, 120 bp, synthetic construct
  source 1..120: mol_type = other DNA
tctaaaaaccaaattcagatatattccacatgttatcatggcatacttcaagaaaagttatagaagcttaatttgtaaaccttatttctctttacagatattatgtttgttataaataag

SEQ ID NO: 10993 - DNA, 120 bp, synthetic construct
  source 1..120: mol_type = other DNA
ttatagtcaaggtgtaggctggggctgcagtcatctgaaggcttgactggggctggaggattcatttccaaagtggctcattcgtatggctggcaagttgagttcctcttcacttgggtg

SEQ ID NO: 10994 - DNA, 120 bp, synthetic construct
  source 1..120: mol_type = other DNA
tactctctctcccctattatgtcttcagtttcacttcagttattccattctactcctaccatgctgcagaagctgcttttgtcaaagttacacttttgatgttgcctgaggcatggatac

SEQ ID NO: 10995 - DNA, 120 bp, synthetic construct
  source 1..120: mol_type = other DNA
tgccactcccctgtcgtccagcactctagccacgtggccttctttcagttcttcattttgatttttctccttaggatgttctcgaatgtcttccttctgtctgactccacaaggctggtt

SEQ ID NO: 10996 - DNA, 120 bp, synthetic construct
  source 1..120: mol_type = other DNA
tgctgggtcatatggtaactgtctgtttaaccttttgaggactaccaggctgttttccaaaattgctgcacaattttacattctcatcagcaatatgagggttgtaatttccccatattc

SEQ ID NO: 10997 - DNA, 120 bp, synthetic construct
  source 1..120: mol_type = other DNA
tgttgttccctagagtctatcctggtgctccttccctaatagcacttgcaaatgttcttcattctttttatcagctacatagcattaagatgtaggatgcactgaaaattgttaatccag

SEQ ID NO: 10998 - DNA, 120 bp, synthetic construct
  source 1..120: mol_type = other DNA
aaatacaaaatttaaaagttattgtagagaattatcataccccccaaaatatgtcattggtcctccaggactctgtagtccccatccaagaaagactgtgataattgtcaaggggttagt

SEQ ID NO: 10999 - DNA, 120 bp, synthetic construct
  source 1..120: mol_type = other DNA
agcatggagccaatgcccgtctctgaggccagaggaagaaattgcaggcatttcaaggaagaagtactgaaatgatttgtcttttgaaataaatgaatgacagggcttttgctttggatt

SEQ ID NO: 11000 - DNA, 120 bp, synthetic construct
  source 1..120: mol_type = other DNA
ggtggttgttttttaacttggcttccctaagaatgaaccacaagagttttgtgattctttcaaaaataatatgccaaaatgactttgtgggagcacacacacacaactgcatgtttctgt

SEQ ID NO: 11001 - DNA, 120 bp, synthetic construct
  source 1..120: mol_type = other DNA
acaggatacagccagaaggtgtcatctttgaagcagagagcaagccctcactagattctcaattttctggcaccttgatcatcccagccttcaaactgtaaaaaataagtttctgttact

SEQ ID NO: 11002 - DNA, 120 bp, synthetic construct
  source 1..120: mol_type = other DNA
acaaaatgaaaggatttctggtctcggtgctgtaggtcacatagccactctttcctggattgaggctttccagcaaaggggctgggacgtaaggctggcctgctggtgtggacagagatt

SEQ ID NO: 11003 - DNA, 120 bp, synthetic construct
  source 1..120: mol_type = other DNA
gatgcctgggggaatacaccgtgtaggagaaaggacagagtggatggattgatcctttctagaaggagacaggtcacgtcattgtgtgtttgtagggagtggtgggatcatgttgtgctg

SEQ ID NO: 11004 - DNA, 120 bp, synthetic construct
  source 1..120: mol_type = other DNA
acatgttccacccatagtactgagtccacttctcaacactgaggactcgaggggcagtcggagaggccacttggtagcttgtgttgatgtttgatcttgggggtgtgtcctggggcctga

SEQ ID NO: 11005 - DNA, 120 bp, synthetic construct
  source 1..120: mol_type = other DNA
ctgtggccacagggactggcctcggggccctcaaggtcctgcatggagccccccacagctatgattcccttcccatatgatgactgaactcatgtggaattgatgtagacacagatttac

SEQ ID NO: 11006 - DNA, 120 bp, synthetic construct
  source 1..120: mol_type = other DNA
tatgtgaactgcagtcttattttgagagctaatctagaattatgattatatttggaagcctgattctgtttgcctcatttggtccatttggttgtacattaaggcttgaacataaggttt

SEQ ID NO: 11007 - DNA, 120 bp, synthetic construct
  source 1..120: mol_type = other DNA
tgtgaaaatccctagacacctcccctgttagctctgctgctcgccatttgctggctgtgttctaatcgtgtgtggcttttgctggctatgcagtgacactgtctcaggggactccaccac

SEQ ID NO: 11008 - DNA, 120 bp, synthetic construct
  source 1..120: mol_type = other DNA
ggaccgggcgtgaccgcgaaccctggcacctccctgtctgtgttcacggctctgcccttcaccacacccgctcccggcccagcacacgggccgctccttgtgactgcaggggctcctcca

SEQ ID NO: 11009 - DNA, 120 bp, synthetic construct
  source 1..120: mol_type = other DNA
gagagagctgtctctggctatgtctcctcgtggctgagagcaagagccctggcgtctccttctgcccttatcagggcttggattccatgactgggacccacgctcatgacctgctttaac

SEQ ID NO: 11010 - DNA, 120 bp, synthetic construct
  source 1..120: mol_type = other DNA
cctaagccaggagctggagcaggaggaaggactcacccttgcccaggtaccccaggggcaggagggacctggcacacaaggcccacctgattgtctaatcccccccgctggggatgctcg

SEQ ID NO: 11011 - DNA, 120 bp, synthetic construct
  source 1..120: mol_type = other DNA
ttggatgacagatccccgaagaagccatagcctcctgggaaactccatctgacaacgtgagcaaggcttgcccccgttagtgaacatgctgtgctttctgacagctatgaggatggactt

SEQ ID NO: 11012 - DNA, 120 bp, synthetic construct
  source 1..120: mol_type = other DNA
gggtgagatataatgggaaaaaataggaagtgtggaagtagggcatggctggagaagaattagccatggggtttctggtagttcaaggaaggagggaagccataaaaatacaagtatttt

SEQ ID NO: 11013 - DNA, 120 bp, synthetic construct
  source 1..120: mol_type = other DNA
gatggaagtttgagagttgagccgctgtgaggcgaggccgggctcaggcgagggagatgagagacggcggcggccgcggcccggagcccctctcagcgcctgtgagcagccgcgggggca

SEQ ID NO: 11014 - DNA, 120 bp, synthetic construct
  source 1..120: mol_type = other DNA
cttaggctatctatatggtctcttcctgagggctattgtccgttaatacagaatacagtacactgttagtggattagcgagctcggtaatccggtctcctaaatgaacaaaaaagtagac

SEQ ID NO: 11015 - DNA, 120 bp, synthetic construct
  source 1..120: mol_type = other DNA
ctaattgtgtcatgttcttggcaggaccgccagagggagccatggatttagaaattcttcagtaagcacattcgtttttctcacctgtaactcttcgaccacattattgagcaaactgaa

SEQ ID NO: 11016 - DNA, 120 bp, synthetic construct
  source 1..120: mol_type = other DNA
ttctgacttcagagagtgataataacctttgagaagtgacccagccacaggttaagtttgcctccaaagaattatctccatttaatccccgagttcccttcactagggctcaacattcac

SEQ ID NO: 11017 - DNA, 120 bp, synthetic construct
  source 1..120: mol_type = other DNA
aaatttgggcctctatgtagtggtaggctaaaagctattaacctcttcttactgcagtttcttgattgaagggttgccaaacctaccatgtcctagatgtggagatttggcaagtcagat

SEQ ID NO: 11018 - DNA, 120 bp, synthetic construct
  source 1..120: mol_type = other DNA
tactcatctttctaccctaccatgcctggttccatgctttgtacatagcagaccctcaaatgtttctgggaaaaacaagccaatgaagagactccttacatccattttctacatttggag

SEQ ID NO: 11019 - DNA, 120 bp, synthetic construct
  source 1..120: mol_type = other DNA
agggggtgaatgaagggagaaggagaagaaggaataccttatctcgggcgctaatttttgctcctttattcagcaacaattttaaaacatccaggtttcctccacggcttgcccagtgga

SEQ ID NO: 11020 - DNA, 120 bp, synthetic construct
  source 1..120: mol_type = other DNA
tatgcctacaagtttttgattggccatattgactctcaatatggtccacttatttgagcttccatcaatgtgtgcttccttctcatctgtgccagtcttgtggaatctggacttaaccca

SEQ ID NO: 11021 - DNA, 120 bp, synthetic construct
  source 1..120: mol_type = other DNA
tcgccccttcccccaggaagaatttgtatttctagatgttcccagatgatgctgatgttgctagtctgcacaaaatactacgaaacactcttccatggttttaaatgagagaacaatggt

SEQ ID NO: 11022 - DNA, 120 bp, synthetic construct
  source 1..120: mol_type = other DNA
agctggaagcattccctttaagaactgacagaagacaaggacgccctctcttactactcctataaacatattattggaaattttggccagggcaatcaggcaagtgagagaaataaagga

SEQ ID NO: 11023 - DNA, 120 bp, synthetic construct
  source 1..120: mol_type = other DNA
gaagtgatcaggaaggaaggctgaagtcagggctaatgacagcaagagctgaccttcccctctgacattttcctacttggcttctgcaatgccattctttctcttttttttttttttttt

SEQ ID NO: 11024 - DNA, 120 bp, synthetic construct
  source 1..120: mol_type = other DNA
taagaagaattggtttttcctaatatctcattttcaaattactgatacaaatttgccagagaaacaattacatgttttacctaacatcaaataatctccagtttctaagacagatgcatt

SEQ ID NO: 11025 - DNA, 120 bp, synthetic construct
  source 1..120: mol_type = other DNA
ccctttggtatgttctgttttgtctgttttgcaccgaaggattgagggttttacttgagacatttaaaaacctgtctacttttattctctttattatttgggatattagggctgtatcag

SEQ ID NO: 11026 - DNA, 120 bp, synthetic construct
  source 1..120: mol_type = other DNA
aaaattaaagttgagtttttgcatatggtctcattacaaacattagaattcaaattaataatatgcactttcagccggcagagccgcctggcagctcctcctcttctccgccccggcggc

SEQ ID NO: 11027 - DNA, 120 bp, synthetic construct
  source 1..120: mol_type = other DNA
ttctgtcccttgctttttctgttatgtaaacgtgcagacctgtgataacagagccattttctcgtcacgatttgcttttcttccacaacagtatcagttttcttgtatctgagatcagtg

SEQ ID NO: 11028 - DNA, 120 bp, synthetic construct
  source 1..120: mol_type = other DNA
agttctagtgacaataacaaaaagcaataaataaatttttatgttttcccttttatttttgcttagttccttttagaaagtggtgttttctgaaccactttttccctaaacgtggtctag

SEQ ID NO: 11029 - DNA, 120 bp, synthetic construct
  source 1..120: mol_type = other DNA
cctgaaactgacaatatagacttaaatagaaataatctctaatagaaataatttacatagagttaacacaattgctcgtctccctctcccgtctccctctccccacggtctccctctccc

SEQ ID NO: 11030 - DNA, 120 bp, synthetic construct
  source 1..120: mol_type = other DNA
caccagtactacatgttgggtcattattttcaccaatgacaatcttttgaagttatgcagaaatgattaaattctaaacctgaaggcagctgagggggcaggaaagcaaaccagatgtcg

SEQ ID NO: 11031 - DNA, 120 bp, synthetic construct
  source 1..120: mol_type = other DNA
aacaacaacaaaaataggagatatgagtatgctcattttacagataaggaaactgaggatcagggttgttaactgacttgcccgagatcatagagccagtaagtggcagagctgagcttc

SEQ ID NO: 11032 - DNA, 120 bp, synthetic construct
  source 1..120: mol_type = other DNA
gacatggggatgggaccttggaggtgagtggcattagggagggattgtgagaaatgacttgtaaatataccttgggaaggtaaaacaaagatgatttattgatgggaaggatggaattga

SEQ ID NO: 11033 - DNA, 120 bp, synthetic construct
  source 1..120: mol_type = other DNA
actaccacttgatctggcctgtcgagtctgggatgtattttgcagagatggggaagaatttttatttaggactggattaggaatcctccgattatatgaagatattctcctgcagatgga

SEQ ID NO: 11034 - DNA, 120 bp, synthetic construct
  source 1..120: mol_type = other DNA
tctgctgttctctttagagccagcaggcaggaacatttaagtctgccgaagctgcacccactgccaccccttcttccaggttctcagtacagtgagatgggagttttatctataagcccc

SEQ ID NO: 11035 - DNA, 120 bp, synthetic construct
  source 1..120: mol_type = other DNA
ctaccttcttcattgatctcgctgggagctgctgactggagcttttcttattcagtcatcttgccagccaccctcctgattgagtttctttaaggtaattattttgaattccttttttga

SEQ ID NO: 11036 - DNA, 120 bp, synthetic construct
  source 1..120: mol_type = other DNA
gaatctagtctatttcagtggtgttaactacacaatgtttaacatgacacaggtcacttggagactctaaaagcataattaatttattgctggcctagggacttgttagaaagtaatatg

SEQ ID NO: 11037 - DNA, 120 bp, synthetic construct
  source 1..120: mol_type = other DNA
tgccaaaaaatatgctgtgtgagtcagctaactgcagagtctgacaaatggaatttttaagcaagcatggaataagggggtaggaaataaagtttgggccagttggtctacagcatccac

SEQ ID NO: 11038 - DNA, 120 bp, synthetic construct
  source 1..120: mol_type = other DNA
ttcagacttgcacatttgccaaaattttaccttctattgtccctttctcagaaaaatattggagaatgtgcttaattcaaatgcctgaagcctagttatagaaagtcctgagctccagca

SEQ ID NO: 11039 - DNA, 120 bp, synthetic construct
  source 1..120: mol_type = other DNA
caaaatggtagatttggaaagtgtgagaatgaagagaataccattgcaaattgcagactctcacacacacaagcacagctgcacaaatacacagttatatatatgcgtaaatctgttagc

SEQ ID NO: 11040 - DNA, 120 bp, synthetic construct
  source 1..120: mol_type = other DNA
tcagaaggttgcacccaagtacgcaagtactcagtacttcaaatgtggttgtgggcattttatttatttatttatttatttttttcatcagcagattttattaagaagaagaaacaggaa

SEQ ID NO: 11041 - DNA, 120 bp, synthetic construct
  source 1..120: mol_type = other DNA
aatcacctaccttcttcattgatctcgctgggagctgctgactggagcttttcttattcagtcatcttgccagccaccctcctgattgagtttctttaaggtaattattttgaattcctt

SEQ ID NO: 11042 - DNA, 120 bp, synthetic construct
  source 1..120: mol_type = other DNA
tagtctatttcagtggtgttgattacacaatattcaacatgacacacatcacttggagactctaaaagcatcattaatttattgctgctggccttggggctggttaaaaagtaatacgtt

SEQ ID NO: 11043 - DNA, 120 bp, synthetic construct
  source 1..120: mol_type = other DNA
gcaaaaaaaaatatgctgtgtgactcagctagctgcaaagagcctgatgaatggaatttttaggcaagcatggaataagggagtaggaaataaagtttgggcaagttggtctacagcctc

SEQ ID NO: 11044 - DNA, 120 bp, synthetic construct
  source 1..120: mol_type = other DNA
taccagaagtgaaattactccatcaaatgcactacacgagcatttggaaaatacatttctggattgccttctacaaaaaagtgccaattcccacactcaatggcatcgtgtggtagggtg

SEQ ID NO: 11045 - DNA, 120 bp, synthetic construct
  source 1..120: mol_type = other DNA
atatagttgtgtttgttgttattggtcatgggaggagaaggggttggggaaggcccatcccatccctgccaattctcattgttataataagaaactctatggaagaacattccatgctca

SEQ ID NO: 11046 - DNA, 120 bp, synthetic construct
  source 1..120: mol_type = other DNA
gctgctccagggtggatgagaaaaagagaagaaaggcaagagaaagagataaaaggaggaagaaagttgtaaaggaagaaagaagttaagttcagaaggtaggagagaaggaaaggaggg

SEQ ID NO: 11047 - DNA, 120 bp, synthetic construct
  source 1..120: mol_type = other DNA
tctcaatgagttattgggtacacctcccagacagggtggcagccgggcagaggcaccccccacatcccagacagggtggccaggcagaggcgccccccacatcccagatggggtggccgg

SEQ ID NO: 11048 - DNA, 120 bp, synthetic construct
  source 1..120: mol_type = other DNA
tgtcattgctttagtcagtctggctacactgtagccttggttgctaaacagaatccaatgttgtgggcaaattagaaacactaacaagaaagagggaacatctgtagggaattacttatg

SEQ ID NO: 11049 - DNA, 120 bp, synthetic construct
  source 1..120: mol_type = other DNA
tttgcaagaaatacgggtcggcatattattaattcagtgcctactgtgtgtgctgaacaccttgccttagtcctgatcttcacattaggataagcaggaagatgaacttggaaggtagaa

SEQ ID NO: 11050 - DNA, 120 bp, synthetic construct
  source 1..120: mol_type = other DNA
taaattcacagatcagaaaatcttttgtcacgccgtttgttcctaagttttgattttggaaaacaagataacagttaagttaatttttaaacttgccagttaatgcaatacatggaagtc

SEQ ID NO: 11051 - DNA, 120 bp, synthetic construct
  source 1..120: mol_type = other DNA
ctggcccacggttctaaacaccatttgtcatagtgtttctataggaaattatttttggttttataacttgaaagtccaacttccactccaccagcacacaatactgagatagattacaat

SEQ ID NO: 11052 - DNA, 120 bp, synthetic construct
  source 1..120: mol_type = other DNA
gggaagttcatttatgaacaaaatggaaggttcaagggaaatataccagttagacctcaacattgtgggtttgcaattcagccatcatcatctcttcaatcaagagcaagtattatgcgc

SEQ ID NO: 11053 - DNA, 120 bp, synthetic construct
  source 1..120: mol_type = other DNA
agaacctacgtgaaataacgttgaattattgggggcgggttcccctgataacaaatcagttggaaaagaatgaaggatgcattaactggttctggaattgttattcatacatgtggaaag

SEQ ID NO: 11054 - DNA, 120 bp, synthetic construct
  source 1..120: mol_type = other DNA
tgcctaccacagctcatgaattcttcctatgaaaaacaaatgctttgcttactggctactaatctatagttaacatctcttaaaggttttgccagtgtcttacaaattacagccttgttc

SEQ ID NO: 11055 - DNA, 120 bp, synthetic construct
  source 1..120: mol_type = other DNA
ccataaccaaaagaatacttaacaagaataaagcatatgtcattattttaagcaacactgagctccttgtaggcctcaaatatgcccttgcacatgctatccgctccctaggctgcccat

SEQ ID NO: 11056 - DNA, 120 bp, synthetic construct
  source 1..120: mol_type = other DNA
tagctactccaaaaacaggcacttctgccctaacgaaaggtgtgtccttttgtaattattttcttggttcccttgcagaaaggaattctgcagcacaagcataaggatcacacagtctat

SEQ ID NO: 11057 - DNA, 120 bp, synthetic construct
  source 1..120: mol_type = other DNA
tggaacttccagaactatgctgaatgacagtacgaaagcagacatccttgccttgttcttggtcttgggaaaaggtgtttggtctttcgaccattgagtataatgtaagctgtaggtttt

SEQ ID NO: 11058 - DNA, 120 bp, synthetic construct
  source 1..120: mol_type = other DNA
accaacatctgaggcttccttctgtgagttatgttccttattcgcttctgatcatggccattcacctttctttcctttgaactcaactctgtatttttcacttggggtggtgaaaaggta

SEQ ID NO: 11059 - DNA, 120 bp, synthetic construct
  source 1..120: mol_type = other DNA
gttatcgtgtgtcaataatatgtcatatttactcaaccataaatgatgccttctctttggcaaatgctgcccttcaacctcagcatgcagtacagggtccaacttctaattgcctgaggc

SEQ ID NO: 11060 - DNA, 120 bp, synthetic construct
  source 1..120: mol_type = other DNA
ttttcattgtgccaagatatgtcccattttcttacttagaacacttatatatggaaataaagacattaattcatacattaaagtgatttcaaataaattatatgcactagaacttaacac

SEQ ID NO: 11061 - DNA, 120 bp, synthetic construct
  source 1..120: mol_type = other DNA
ccagtcttctcacttggccaattttagtcaaaagttctgcgtatggccaagagttcaacccaagtccaagctactttgagaaataaagtccctgtcctccaggtgtttagaaagtgtttg

SEQ ID NO: 11062 - DNA, 120 bp, synthetic construct
  source 1..120: mol_type = other DNA
agatatctggccatataccttgctgtagtttgttggtggtctatcttgtataccttttcttgcttttcagtttaatggctgagaaataagtatggtgggggccattccctgggttcagaa

SEQ ID NO: 11063 - DNA, 120 bp, synthetic construct
  source 1..120: mol_type = other DNA
cttttattaaaaaagtatagtatatataatacaaaacaataacccttctggggtttcttgtggcggttgaaatagtcccacatgtggtcatcagaaaataagccattcctcataccaata

SEQ ID NO: 11064 - DNA, 120 bp, synthetic construct
  source 1..120: mol_type = other DNA
gctttgccccttcagaggctctcccatcccttagggcataatgtccaagttgtgtcactggcccagaggccctcactgatctgcccttcttttttatttatttatttatttatttatttt

SEQ ID NO: 11065 - DNA, 120 bp, synthetic construct
  source 1..120: mol_type = other DNA
tttcttaaataaaagagcttgcaagctcaagtgggaaccatcatttctagaagcaaagaaatgtgagtgccctgaggtttaaatgtcagccagaggcttgcttgctttctctttcttcct

SEQ ID NO: 11066 - DNA, 120 bp, synthetic construct
  source 1..120: mol_type = other DNA
aaaattaaaatatttatggtcaagttaaaggcgctgagaagtcctgcagtaaataaacctgtatttacttggaccccgtagcccctttctgtggtagtgattggaccccatagccccttt

SEQ ID NO: 11067 - DNA, 120 bp, synthetic construct
  source 1..120: mol_type = other DNA
gtgattggaccctgtagcccctttttgtggtagtgtggctttgtatcttgtggcgcttgggttctgggcacactttgggccacatttcccttccctttccctgcaatagcagaggccggc

SEQ ID NO: 11068 - DNA, 120 bp, synthetic construct
  source 1..120: mol_type = other DNA
tgaatggtaaatacatggaaatgagggactctgagtaccataaagagtattactaatccttgaactggtggcaagatagggttacagaaccctacattaagccgggacacttggagagag

SEQ ID NO: 11069 - DNA, 120 bp, synthetic construct
  source 1..120: mol_type = other DNA
gagcagaaaagactaaggatgaagaattagggaatacccatagtaagggtgcaggaggcagaaaaggagccagtaaaagagtagagggagattgtttagagaaaaaaggaaaacaaggca

SEQ ID NO: 11070 - DNA, 120 bp, synthetic construct
  source 1..120: mol_type = other DNA
caagacttgggacattttcagctgttacttcattaaataggttttttgtgcctttagccatctcttctccggaactcccaaaatttaaatatttgtcactttgtgatgtccctcatttca

SEQ ID NO: 11071 - DNA, 120 bp, synthetic construct
  source 1..120: mol_type = other DNA
tgaagaagaagaagttatgtctgacacaaagtaggatcaatagaactggtgaatggatgaagagatatactttccagtttccttgggaagcctcccttgttggcatctttccctctgaga

SEQ ID NO: 11072 - DNA, 120 bp, synthetic construct
  source 1..120: mol_type = other DNA
cacacacacacacacaaactcaagtgacgatattgaaactgacttttccatgtttaaacattcatttaaattcagaattacttgaactagacaaaatttcaagaagttgagcaagaggtc

SEQ ID NO: 11073 - DNA, 120 bp, synthetic construct
  source 1..120: mol_type = other DNA
ctttgactaagataaggcccaagtggcagaacagtgtgataggcgctaaaagtagaaattctgaaaaacaaagcattatttctagccatagaatcagaaaaagaggccccccgcaacatg

SEQ ID NO: 11074 - DNA, 120 bp, synthetic construct
  source 1..120: mol_type = other DNA
agaatatgattcatattaagccacatgaaaaaaataataaaacaaaacaaaaagaaaatctgaccaattctcaagagaaaagacaatcagcagaggacaatcctgagatgatccagacat

SEQ ID NO: 11075 - DNA, 120 bp, synthetic construct
  source 1..120: mol_type = other DNA
ggaagcctggaatcctgagtcactagatgacacgatgagccacctatatcagacttattctgaacaaaagctaaacttttgttgggctaaaccactaacatctagatttagtgctacagc

SEQ ID NO: 11076 - DNA, 120 bp, synthetic construct
  source 1..120: mol_type = other DNA
gattcaatatggtaaaaatagcaattccccccaaattgatttttagattcaataaaatcccaatcaatttcccagcatgtttgtgtgtgcatgtttgtgtatgtggaaggagagaagaca

SEQ ID NO: 11077 - DNA, 120 bp, synthetic construct
  source 1..120: mol_type = other DNA
tctcttccccagtagaatgtaagctccatgaggacagaaatttgtatctgtttggtttgttacagcccggtgatacagggcttggaacatggcagacattcaatagatatttgttggata

SEQ ID NO: 11078 - DNA, 120 bp, synthetic construct
  source 1..120: mol_type = other DNA
tgatcttcaaaacagtactcttgtctactctgtcaaccaaaggaacttcaccccaatgtttgagaagcctatttctgccttacttaaaaactcatgcacatgtatgtttattgcggcact

SEQ ID NO: 11079 - DNA, 120 bp, synthetic construct
  source 1..120: mol_type = other DNA
gcaaaagaacaaagaaattggaagcttcagcatcagtggacactgcagatcctataatcttccatttttccactgtttataacctatagccaagcaaggctttccttgaccagggttgtg

SEQ ID NO: 11080 - DNA, 120 bp, synthetic construct
  source 1..120: mol_type = other DNA
atagcttttaaaataaattgcaatggtttctgcaaagatcatttctgtacccttgtggtagacagcctccaagacaggccctaatgatccccaccccttcgtattcatagccctgtgtag

SEQ ID NO: 11081 - DNA, 120 bp, synthetic construct
  source 1..120: mol_type = other DNA
gaaaaggggctgagaatgagtaaatgtgggagatactaattattatacaacctgaaaacggaagtttaaactgtatccccctactaccccaaggcagagctaatctatccctcctctata

SEQ ID NO: 11082 - DNA, 120 bp, synthetic construct
  source 1..120: mol_type = other DNA
taaattcaatcatattaataattgcactaaatttgaatggactaaacagtcaatcaaaagagagactgtcagattgagtttcaaaagattcatgagacacagtttaaacagtgcttagag

SEQ ID NO: 11083 - DNA, 120 bp, synthetic construct
  source 1..120: mol_type = other DNA
gaagagtcttcgttccagacgcagtccaggaatcatgctggagaagttctgcaactctactttttgggtgagaaattacatttatcttcatattgactcttctcagactcagaacaagtg

SEQ ID NO: 11084 - DNA, 120 bp, synthetic construct
  source 1..120: mol_type = other DNA
cacctggggcaataaatgtagtttaagtatcttaagtgattcttctgaattctaacatttgataaccttatatagaggtgagaggggcagggatgagatagcagagcacctgggcagcac

SEQ ID NO: 11085 - DNA, 120 bp, synthetic construct
  source 1..120: mol_type = other DNA
ccacgtgtataaatccaggaccaagagatcctctaccaccaaactctatcttgctaagcaggtaaagttaacaccactgtttctgaactctaattccttggtgcacagtagagacatttt

SEQ ID NO: 11086 - DNA, 120 bp, synthetic construct
  source 1..120: mol_type = other DNA
tttttaatgagctctaaaggtgattctcatacgcatactacagtgtgaaaactgctgattagagaggtcttccttcaaaatataggcatttctggccaggcacggtggctcacgcctata

SEQ ID NO: 11087 - DNA, 120 bp, synthetic construct
  source 1..120: mol_type = other DNA
atgggtatatatacacacgtgtatatatgtgtgcatatatgtgtatacacacatatgtgtgtatatacatacacacatatgtgtgtatatacatacacacaaacatatatgtgtgtgtat

SEQ ID NO: 11088 - DNA, 120 bp, synthetic construct
  source 1..120: mol_type = other DNA
caagttggcggctctgccttcttggtggatggcaacttcatctgttcttctgacgtcaccattttgttcatcttgtgagtcaacggtgctcgactgtggtgtctccgtctccgcggaggt

SEQ ID NO: 11089 - DNA, 120 bp, synthetic construct
  source 1..120: mol_type = other DNA
tttgaagaatcctgtctttaatgtacaaagaacagtttgcaaaacatccccgtaagccctttttctggtgaacactgagagaacatttctgagcagttttgtaagctccagagcctagga

SEQ ID NO: 11090 - DNA, 120 bp, synthetic construct
  source 1..120: mol_type = other DNA
aagtgttatcaccacctcaggcagctgctgtgatgttaaataattgctgctggttttttgagctagctcagtgttaggtcaaataggccctataaatgggggttttcagagaattccaga

SEQ ID NO: 11091 - DNA, 120 bp, synthetic construct
  source 1..120: mol_type = other DNA
atctactctcacttcagcgagaccgtatcaggtttgccagttatccgtgcctttgagcaccagcagcgatttctgaaacacaatgaggtgaggattgacaccaaccagaaatgtgtcttt

SEQ ID NO: 11092 - DNA, 120 bp, synthetic construct
  source 1..120: mol_type = other DNA
tgtaaagatattttatttcttagagactttctaagaaggaaaaggcatataagtaaatcttattagaccttcactgtaaaggacatatcatatttattcatacacatgctggaattattg

SEQ ID NO: 11093 - DNA, 120 bp, synthetic construct
  source 1..120: mol_type = other DNA
aatactgaaatcaaacagggcacgttgacccttcctatggtgcttactttttaatcttacacatggattcactatggcattgcttccccagcctgatcaaaagaagtcatttggagcgtt

SEQ ID NO: 11094 - DNA, 120 bp, synthetic construct
  source 1..120: mol_type = other DNA
attacaggcatgagcaactgtgcccggccctagttacatttttaaaacacaagggtggaagttggctatttactcaataaatgataggccactgggtaaccagctggaaaaataaagttg

SEQ ID NO: 11095 - DNA, 120 bp, synthetic construct
  source 1..120: mol_type = other DNA
acagcaaagtcctttctacatatgacacaaaactaagaagccataaaatgcaagtttaaactcttaagcggagaaaacactttaagcaaactcagaagtcaataaactgaggtaggggga

SEQ ID NO: 11096 - DNA, 120 bp, synthetic construct
  source 1..120: mol_type = other DNA
aggagtccgtgaggaacccaggactgcagtcagactgctcatatccgattctaagaagacctgcactcctttttaccattttattcctaatgcatttcctgttcaaataaaaaatccaac

SEQ ID NO: 11097 - DNA, 120 bp, synthetic construct
  source 1..120: mol_type = other DNA
aggaaaatagcataattctacagctttaagaaagccagttgatttcaaagccagcagagtgggagttatggcacgcttttattcttccccttcaccaagaggcccattgtgtctgaacag

SEQ ID NO: 11098 - DNA, 120 bp, synthetic construct
  source 1..120: mol_type = other DNA
tatgatatgagaccctattccacacaaggaggtttttattgttatgaagccgcatcattattaaccccaaagccttactccagttacactgtctctccatctgaaacctaggcttgcttc

SEQ ID NO: 11099 - DNA, 120 bp, synthetic construct
  source 1..120: mol_type = other DNA
ttgttttgtcagatccccctgaacccatataataaggcttgttttcctatctattttcaacaggataactgttttgataagctttattacctgatggactgctattttattggttatttc

SEQ ID NO: 11100 - DNA, 120 bp, synthetic construct
  source 1..120: mol_type = other DNA
caattttaacagaaaaagggactctgtcacaaatggttactgtgaaccaagatactttctacatggtaaggttacccctgccttctacgcggtaaggttcacggtaatcactggctaaat

SEQ ID NO: 11101 - DNA, 120 bp, synthetic construct
  source 1..120: mol_type = other DNA
gttagcaaaccactagtactaaaaatactagtttcttcctcaaaggaaaagtgatctttcaagaaaatcctcaactgactattcatttaagacatatttatctacattattaaaggtgct

SEQ ID NO: 11102 - DNA, 120 bp, synthetic construct
  source 1..120: mol_type = other DNA
aggggagcctcctatactacatttatcacaatcagcggacgttccacctcacagacggcattgctgttgactttacacatccttctagtgtaaaccaacagaagcttctttatctaaaat

SEQ ID NO: 11103 - DNA, 120 bp, synthetic construct
  source 1..120: mol_type = other DNA
ggatacggaagagtgtggaagggataggataacatcaactggagtacgtaagggggctggctgtttaatctgcttaatagttgctacgatttccacagcactaacagaaaaacatttttt

SEQ ID NO: 11104 - DNA, 120 bp, synthetic construct
  source 1..120: mol_type = other DNA
gcacaagcttaacaaaagtgatctggtgaaggaatgagtgctgtgtaacaaaatgcctgtttaaacaacatgagcatgagtctggaaatgtgtgtgtgtgtgtttgtttgagacagggtc

SEQ ID NO: 11105 - DNA, 120 bp, synthetic construct
  source 1..120: mol_type = other DNA
tgcaggtgacacaggctgcccactagcaccttgtccttggacactaaggcagagccttaatgacagctgaggagggaagaaagtggaaagatgtgagccaccagtgtggcactgggagga

SEQ ID NO: 11106 - DNA, 120 bp, synthetic construct
  source 1..120: mol_type = other DNA
gattaatataatatgttttgtacctgcctcctcaagcttgacagtgaccctgtccctcaatcccctcactctctagccccgtctgttggcatcacagagctttaacccaaaggattttag

SEQ ID NO: 11107 - DNA, 120 bp, synthetic construct
  source 1..120: mol_type = other DNA
gtttatccgcataaaaagtaggctgaactgaagattgaagatctctggaccagctgtactcaaattgttatgtgagagaaatatcaggatttggttttgagtaatttcataaccgctgtc

SEQ ID NO: 11108 - DNA, 120 bp, synthetic construct
  source 1..120: mol_type = other DNA
cctacagtattcggtacagtaacatgctgtccctgcttgtagcacaggagcaatatgctctacctatagtctaggcgtgtggtagtaccttctagatttgtgtaagtacactgtgatcac

SEQ ID NO: 11109 - DNA, 120 bp, synthetic construct
  source 1..120: mol_type = other DNA
aaaactctcttaactgtggtgttttgttttctaatttaccattcctaatattgtaatgtttctgtgaactcctcctctttctgcttagtctgcacagtattacaccctgtggtgagttta

SEQ ID NO: 11110 - DNA, 120 bp, synthetic construct
  source 1..120: mol_type = other DNA
attaacccagcaatgggctgcgttgtcacttacacacagctgattgagatatctcatggagaatactgaataggaatgataatgtggcactgggacggaagattgctttttcaatccatt

SEQ ID NO: 11111 - DNA, 120 bp, synthetic construct
  source 1..120: mol_type = other DNA
ctcacgcctgtccttttccgaatccacccccgtgtgggacccatctaagtccaacacaacagcatgctcaaataactacaaagcgggcctttatggtttgcaaaatgcagtatgatccta

SEQ ID NO: 11112 - DNA, 120 bp, synthetic construct
  source 1..120: mol_type = other DNA
aattgatggaaacactgtcatcccaatggctacacagctacctagacagctcctatgactcaaaagtaactactttcacagtccaggaagtacctacctatttcaaactgtcccaaagat

SEQ ID NO: 11113 - DNA, 120 bp, synthetic construct
  source 1..120: mol_type = other DNA
catgaaatcaaaggcttacttccaggcaatcctaaaactgggatatattccacttatatcaggttcctagagcagtcaaatttatagaggcagaaagcagaatggttgctgtcaggcctt

SEQ ID NO: 11114 - DNA, 120 bp, synthetic construct
  source 1..120: mol_type = other DNA
agcttcatggggtctatgagctagacctttatctttaaggccagagagtataaccccctccctcagagctatggtttcccatctgcccaacaaaggtgacagggacaggatgagaggtaa

SEQ ID NO: 11115 - DNA, 120 bp, synthetic construct
  source 1..120: mol_type = other DNA
cagatagaaggggaagcctttcatggattctctcttctcgcccagtccctgcccttcctgcagcttaggactatctgcacagcactttccatcctcctccccaaggcctgaggagcccac

SEQ ID NO: 11116 - DNA, 120 bp, synthetic construct
  source 1..120: mol_type = other DNA
acaacactataagattgttgcccatatatgaacatcttggcaactgcgtccaattatctcaggatcagtttctaaagtgggattgtgggtcacaaggtccgcagattttacagtttggca

SEQ ID NO: 11117 - DNA, 120 bp, synthetic construct
  source 1..120: mol_type = other DNA
tgattcgttgtcttcctaggggtgacagtcagtggcatgatcttctgacttcccttctgctattcaaatcactatggcaattaataacactttattttgccaagatgggtgtgggtacaa

SEQ ID NO: 11118 - DNA, 120 bp, synthetic construct
  source 1..120: mol_type = other DNA
atctttttctgcctttggacgtatgccccatgcgtccttgtttccatacttttattcatgctctgctctgcgtagtgtgctcattttatccactgaaaccctacgtattatttcagtatc

SEQ ID NO: 11119 - DNA, 120 bp, synthetic construct
  source 1..120: mol_type = other DNA
cttatctaaactgatttgtgaaagtcttgtgacagctccacagaacacctcatttccctactgtcaccacaggtgagaaaggtggtgcttacgcaagccctttcaggttaattttttttg

SEQ ID NO: 11120 - DNA, 120 bp, synthetic construct
  source 1..120: mol_type = other DNA
tgaggtccacttttttagctcccacatatcagcgagaacatgtaatattcgtctttttgaggttggcttatttctcttaacataatgacctgcagttccatgcatgttgctgcaggtgac

SEQ ID NO: 11121 - DNA, 120 bp, synthetic construct
  source 1..120: mol_type = other DNA
aacaaccaactctcccacagtacccagtaacacctttagcaaaatccgtatcattaacttttgaaaaattagaagtttagagagacggggtttcactgtgttggccaggatggtctcgat

SEQ ID NO: 11122 - DNA, 120 bp, synthetic construct
  source 1..120: mol_type = other DNA
ccaaagaaggtcttctgtagccatcttcaggaagaccaaaaacagagtttccttatgaaaatatctcaatttgccaagactaaatcccaacccccatcctttccaaaaagaagtcatatg

SEQ ID NO: 11123 - DNA, 120 bp, synthetic construct
  source 1..120: mol_type = other DNA
acctgtgtattttacaaaggcatgaatttcttttatagacaagacgtattcaaaaggtcaccagaacaagagctgaaaattcgtatgcatgaccgcctatctaccacgaccgacgccacg

SEQ ID NO: 11124 - DNA, 120 bp, synthetic construct
  source 1..120: mol_type = other DNA
tgaaggtctgtttagtcttgtccagctaacataaaccagccggaactgggccgtggcagggaactttgctgtagttcccttatttggaatgaaattcattgtttttcactgggaggtatt

SEQ ID NO: 11125 - DNA, 120 bp, synthetic construct
  source 1..120: mol_type = other DNA
tcacaatgtaaacatgaccacacaataaactataatggcagtgaggaggagcacgggattaatgtagtggggagatctgtcattaactagctgtgggattttggaaaagttgtttcctgt

SEQ ID NO: 11126 - DNA, 120 bp, synthetic construct
  source 1..120: mol_type = other DNA
tcaaggccaagacagtgacagttatgaaagatggtctttgctggcacctgggaactgctttttcttcaactaacagtgacaatggcctggcccagaagcaggcttgagctcagaagacac

SEQ ID NO: 11127 - DNA, 120 bp, synthetic construct
  source 1..120: mol_type = other DNA
aaggaggaggagagaaaaatcaaactgagttatatggagaccacagaacacactggagtcagtaaacagaatggacccacaaatctccatcagtggaatcttgagtaagttactaagcct

SEQ ID NO: 11128 - DNA, 120 bp, synthetic construct
  source 1..120: mol_type = other DNA
atctagggtcacaggcaggttgactcggatttcaagcagccaaccctgaacatccacaaccacagcaagacatttgactgttttctctttttaaaagtacttttgattgctctcttttta

SEQ ID NO: 11129 - DNA, 120 bp, synthetic construct
  source 1..120: mol_type = other DNA
gttctgtgacattttcttgtattatttatttgacagcctccacccaccacttcccccaataatgactcttgccatggtcttaagattcttcatgtccctaaattcaggggacacttacca

SEQ ID NO: 11130 - DNA, 120 bp, synthetic construct
  source 1..120: mol_type = other DNA
ctcttgattttccttccacctctgtgtctgttcgtcacactcctttgctggttcttcctctttctgactttaaggtgtgggaattccacagggcttgggtataggccaccttctcctttt

SEQ ID NO: 11131 - DNA, 120 bp, synthetic construct
  source 1..120: mol_type = other DNA
aagcaggtccagtgtgcctgtgtgcttcattctgtgtgtgtgtgtgtatgagtatgtgtgtatgggagtgagtgtgtgtgtgtatgggagtgtatcggagtgtgcgtatgggagtgtatg

SEQ ID NO: 11132 - DNA, 120 bp, synthetic construct
  source 1..120: mol_type = other DNA
tcaagtactgacgtaggtactgacgcacgtcatcccctggagaggagaggatgcactagcaggacccacccaggccatgggggtcgcagccatgatccagccacagcctgggctcccctg

SEQ ID NO: 11133 - DNA, 120 bp, synthetic construct
  source 1..120: mol_type = other DNA
agtctggcaatcctggctccagctgtgtgaacctgagaaggtcacttcacctttgtttccgtttttataacatggggttaaaagattgcctccttcttgggaaggttgttgaatgaaata

SEQ ID NO: 11134 - DNA, 120 bp, synthetic construct
  source 1..120: mol_type = other DNA
ttgcagtcttaggggcaataagaagcagggcccagtgaaaagagaccagggtttggaataatcataatagctctgaaaattccttgaatccctactatttgccaggcatttggctaaatg

SEQ ID NO: 11135 - DNA, 120 bp, synthetic construct
  source 1..120: mol_type = other DNA
tcacaactcacccacatatccatgacattttatatcgatccagccgaggcactttccagaaacaggttcttgattcatcttgaaggagcagtttatggatgtagcctcttagaaatacct

SEQ ID NO: 11136 - DNA, 120 bp, synthetic construct
  source 1..120: mol_type = other DNA
acagctcaggatttacatagagaaaatgatcagtaaatacttgagtagtgggcagtgtttgtccacttaatctgtgctgcagcaatggaaaaaatgaccttctcaagagggtggcaagtc

SEQ ID NO: 11137 - DNA, 120 bp, synthetic construct
  source 1..120: mol_type = other DNA
atttgtaacagcccttcaaaatcaagctttgaagccaattcttttgtgaccaggagtgttttccggacaatgcagaaggagatgcacccagatagtaattccctgaacataaccatgaca

SEQ ID NO: 11138 - DNA, 120 bp, synthetic construct
  source 1..120: mol_type = other DNA
atttcatgagagacctggccaaggaggaagatagggcccatggatttcctttccaggaaattaagggaaactaccccttatttagtacctaataagggctgctgacacattatctcaatt

SEQ ID NO: 11139 - DNA, 120 bp, synthetic construct
  source 1..120: mol_type = other DNA
agtgtttttgctcgtggtcccacaataggaagtacagagctaagatttgaactgaaatctgtctgaactcaaagtccacgtgctttctgccaagcatgctggccctgagattatcccttt

SEQ ID NO: 11140 - DNA, 120 bp, synthetic construct
  source 1..120: mol_type = other DNA
gcttgcttacacttaccaagtaccatgtgccggacaatgatcgaagtgctttacatatgtttaactcattgctataataaaccaggtaaaaataggtaaacactgttatccccattttac

SEQ ID NO: 11141 - DNA, 120 bp, synthetic construct
  source 1..120: mol_type = other DNA
ggggggcggggaaagaacattttattatctacccagtctccttaattaccttctgaaaatacttgcatttttcaggttccaagcctttgagcatactctttgtcttctgttgaccttcca

SEQ ID NO: 11142 - DNA, 120 bp, synthetic construct
  source 1..120: mol_type = other DNA
caattcagaaagaacaaaacaaacaatgggatcatggcagcatggcagtgggggagggagcttctcacaactaaagaacaatataggaaaaatgctgtgattaacagtggcatggagaat

SEQ ID NO: 11143 - DNA, 120 bp, synthetic construct
  source 1..120: mol_type = other DNA
aaaatgttgtataaatggaaggcgattctgttttgacctggctgttggcattgtggtatcgttcagagtttaagtaaaactgcatgtgctttctgcaggagaaatctactgttggaggcc

SEQ ID NO: 11144 - DNA, 120 bp, synthetic construct
  source 1..120: mol_type = other DNA
aaaattatattatccaattcttatggctgagaaagaaactgggagaagaatgagatgtaggggtttcagggagcatagaaggacaggaggaggacagcaaatagccagtctcagaaaatg

SEQ ID NO: 11145 - DNA, 120 bp, synthetic construct
  source 1..120: mol_type = other DNA
ctaagaaataatttaatgtttagtaaaaaagaaaacagaaaaaagaaagatgcgtgtgttggcttacgcactggccctcagagctgaccaacccgccaggcctgctcaatgcattgggtt

SEQ ID NO: 11146 - DNA, 120 bp, synthetic construct
  source 1..120: mol_type = other DNA
ccttcacttaccatagggacctttttagaaggcaagccactaccctgtgaatatctcaccagccccttcttttctttttttgtttgttttaaggagcggagagtttaataggcaagaaag

SEQ ID NO: 11147 - DNA, 120 bp, synthetic construct
  source 1..120: mol_type = other DNA
ttcccacattttgcttttggtgtctgtgcttttggtgtcaaattaaaataaaatcatttctaagaccaatattgaggagattttcttctatgttttcttctaggagtttcatggtttcag

SEQ ID NO: 11148 - DNA, 120 bp, synthetic construct
  source 1..120: mol_type = other DNA
accagtcaggggtaattcatggatggtcttaaccaggccactgttctcccttcttcaagcttattgtcatgcatgttctcctaattccatagatacccatggtatttcttaccatttgat

SEQ ID NO: 11149 - DNA, 120 bp, synthetic construct
  source 1..120: mol_type = other DNA
ttgggtacgtgagtccaccttttcaactgtcagtcttatgaaatctaaacacagatcaaatatttccaatgaaaatttcacattcaaattgcgaagttttgtaaatgtaaaaacttccca

SEQ ID NO: 11150 - DNA, 120 bp, synthetic construct
  source 1..120: mol_type = other DNA
cttggaaaaagcttacttatcatatctgaggactcttaaagcattaattttagaggctgggatgtggctcttgtcatatacaggcagcccaagttctacagctagatctcagagaagctg

SEQ ID NO: 11151 - DNA, 120 bp, synthetic construct
  source 1..120: mol_type = other DNA
aagcaaatggtaataatcttaatttattggaagggccacaagaaagggggaaaagaacaactaaaaaaaaactttttctaccaacattaacttgtcctaacaatcaacttatttttgctt

SEQ ID NO: 11152 - DNA, 120 bp, synthetic construct
  source 1..120: mol_type = other DNA
gatggtcaagaaccttagtgctgactgcaggagaggccatttaaccttaaatagctgttattccatcaaaacaaaaggcttatccttattataactttggcaaagctagaagggccaagg

SEQ ID NO: 11153 - DNA, 120 bp, synthetic construct
  source 1..120: mol_type = other DNA
tccatagtaatataataatcaattttaccacagagaactgtgtacatgtcaagccttggctgcctctaattagcaatggatggggtagctggggaaagtgctggagagcagtttcaagta

SEQ ID NO: 11154 - DNA, 120 bp, synthetic construct
  source 1..120: mol_type = other DNA
gcatcacatttctctccagttctggggcagaggtttgtccttagatctcaaaaggatgtaagaaaagttgataatcttcactttgttcagcctttttcttgtgaggacaggaacgatgac

SEQ ID NO: 11155 - DNA, 120 bp, synthetic construct
  source 1..120: mol_type = other DNA
tgacctacccatactccaacaaccgtagtgtgtgaggtgcttaagggcagctattttgtcttaactcacatctacagtatgtacagagtacctagaacacatagtatgcattcagtagaa

SEQ ID NO: 11156 - DNA, 120 bp, synthetic construct
  source 1..120: mol_type = other DNA
ctatgatttggggatttttaaaaatcaattgactagcgaagagaacattcccgtgacctcaaaatcggcatttatggtctctttaattcaattcataaaggttttggaaagagtgagggg

SEQ ID NO: 11157 - DNA, 120 bp, synthetic construct
  source 1..120: mol_type = other DNA
cggccggtctccatcttttaaacttggtcacttcacaccgtgcacttgttatcatcctctaaacatttgagctcataaccccggaagttttaatatggatccttttttaaaagcctgctt

SEQ ID NO: 11158 - DNA, 120 bp, synthetic construct
  source 1..120: mol_type = other DNA
gttttatctagcttcgttcttcagagtaacatgagactagcacttgaagatccaagaccattctgagtcagttttcttgcagtaaactcttgggcaccttgatttttggctgtcttcagc

SEQ ID NO: 11159 - DNA, 120 bp, synthetic construct
  source 1..120: mol_type = other DNA
acattactctgcgtacaaaacgattgaacaccagattgcagttcaggtaggaaacgcaagagattctgaagcttgaattgtctatatgtaggtctcttgtgtgttttattctccgcccct

SEQ ID NO: 11160 - DNA, 120 bp, synthetic construct
  source 1..120: mol_type = other DNA
cttagtcaatgccgggaaacggcggtctgacagctaatagatatctctgccctcaattgtttagacattttttgtcttttgtgacattgaagaaaagacaaggaagggaatggaagcaac

SEQ ID NO: 11161 - DNA, 120 bp, synthetic construct
  source 1..120: mol_type = other DNA
agccaaaatgccactgtaaaacagcatcactcgtgcctcctcgggtcagcgacagcaaaccttagcgcgccccctcccagggaatgttacctgccaacccccatcccttccttgtgacag

SEQ ID NO: 11162 - DNA, 120 bp, synthetic construct
  source 1..120: mol_type = other DNA
ttccactagataaatcagacactctaccactctcccaggcccatatgttatgaaatattcactttttaactgacaaccagggaagtcctttgtcttccagtaggtctcgaacactacctt

SEQ ID NO: 11163 - DNA, 120 bp, synthetic construct
  source 1..120: mol_type = other DNA
cttcatgtaatacatgctgtgttctgtgaggatgtggtccacacaattccttctttgttaagggacatacagttgcaaatactcactgcatgaaggcaagattcccaagggagatgtgat

SEQ ID NO: 11164 - DNA, 120 bp, synthetic construct
  source 1..120: mol_type = other DNA
catcacatgcagccaagatcagcttgctctacaagcaataacagaactacttagcacttcaaggttgaaagttcttcactaatggatccattgactaattgatcctggaaggccaaagga

SEQ ID NO: 11165 - DNA, 120 bp, synthetic construct
  source 1..120: mol_type = other DNA
aaaaatgaaccttacaaggtcagaattgtgcaccactgggagggttacactcagtggtttgttggagctggctcctgtaggctggtgagagccatttgttaaatatgtaagaaattttat

SEQ ID NO: 11166 - DNA, 120 bp, synthetic construct
  source 1..120: mol_type = other DNA
gtttgttacatagtggaataaatttttaaccattaaaaaatattttgtaagtagtctcaacattgtatttcaaagaaacattgcttctgtaatatgctactatgtgaaaatcctgataac

SEQ ID NO: 11167 - DNA, 120 bp, synthetic construct
  source 1..120: mol_type = other DNA
ggctggctatgtttgggcccgctaaaaccagttacttcttaagctcttaggctctgtatttcccttcaattggtacaaaagggttcagaactgatagcaggagagttaaacataacattt

SEQ ID NO: 11168 - DNA, 120 bp, synthetic construct
  source 1..120: mol_type = other DNA
gaatagttatttggcagtgacggcatcataagcttgtggtgaaaatgccttttttgttaataactcccctgatgtgtgtgcatcttacaaagcattgtcctcacatcctcagtacctgga

SEQ ID NO: 11169 - DNA, 120 bp, synthetic construct
  source 1..120: mol_type = other DNA
ttttatgaacactagaatttgagactagactcaaaagataaacttcttacagtaggctgctgtgggttcattttggtaacagccacccactaggtcctcagaggtgctagacccagtatt

SEQ ID NO: 11170 - DNA, 120 bp, synthetic construct
  source 1..120: mol_type = other DNA
aaggaatggaaatttttaaaaatgcaaacaatctcaggcaaacgaagtaaaaataacacgcggggacattgattctcccttagtagcattacagtcctggagactggcagcaaacagcca

SEQ ID NO: 11171 - DNA, 120 bp, synthetic construct
  source 1..120: mol_type = other DNA
gatgcaggagggggcgcagatgcaggaggcgacggggctgcagaaggagatgcagatgcaggaggggatgcagatgcaggaggagatgcagatgcaggaggggatgcaggtgcaggaggg

SEQ ID NO: 11172 - DNA, 120 bp, synthetic construct
  source 1..120: mol_type = other DNA
ggcaatagcgtgaaaatgcacagctaccttcctgcctggcccagtggggatcatgcatatcgccaagccacattaacacaaagtggaagaattagagaccaggactgagatgacacacac

SEQ ID NO: 11173 - DNA, 120 bp, synthetic construct
  source 1..120: mol_type = other DNA
tgacctgcataacatccaggagcacagacagagggaagagaagagagacagaatgaagagaggagcacgcccaagtgcagagacacaaagagagagacccagatgtggcaactcggctgc

SEQ ID NO: 11174 - DNA, 120 bp, synthetic construct
  source 1..120: mol_type = other DNA
aagaaaaaaaaaatgcagctgtttcagcttctccatccttggaaagagcttccaactaagagctggaaggggcccagcgctgatgctgcatcctgaagaaactctttcctagacagattt

SEQ ID NO: 11175 - DNA, 120 bp, synthetic construct
  source 1..120: mol_type = other DNA
actctcaattctattccactgacctatgtacctgtccttatcccagcaccaccctgtctcggttactgcagctttgcagtaagttttgaaattgagaaatatgaatccttcaacttgctt

SEQ ID NO: 11176 - DNA, 120 bp, synthetic construct
  source 1..120: mol_type = other DNA
atcctcctggtcattcaaggtttgtatttcagagttgcctgggattcattcatcttctattctccttagcctctagtgtattgccaagttgtatcagttttgcccctactatatctctcc

SEQ ID NO: 11177 - DNA, 120 bp, synthetic construct
  source 1..120: mol_type = other DNA
acaggtgaacagttacattacttaatttcctctgaatcagatttgtgcttaattgctgagagggcaccatcagggagggaattcagattaatgtttgcatagggtgtgcagtggaccaga

SEQ ID NO: 11178 - DNA, 120 bp, synthetic construct
  source 1..120: mol_type = other DNA
ttctgtgggatcgtttattggaataagagaatagcttggtcattgtggaagtatgaaatgattgtattttaatatacagctactttgttattacaaccagaagcagggttcaaaagccct

SEQ ID NO: 11179 - DNA, 120 bp, synthetic construct
  source 1..120: mol_type = other DNA
aagaagctctccagtgatgtttgttttttactcagtttggctaaggtttgtttgtgggcttaccaaaactgtaactgaaacaagtgtgcagtgtgggaaagaggtgtggacagaaatggt

SEQ ID NO: 11180 - DNA, 120 bp, synthetic construct
  source 1..120: mol_type = other DNA
agaggtatttgaatttcactctacctgtccccctcccgaataagttgattggaaaatagtgacctcaagatagaaaatccaggagaaagaaaaggataatggataatgaatctctctcat

SEQ ID NO: 11181 - DNA, 120 bp, synthetic construct
  source 1..120: mol_type = other DNA
agtaatactttacttacaaactcatagagggactgccttgatggtcttggacaaggtctgggagaattctggattaccaggcagagactattgttctcttaccttattttctcccgaaca

SEQ ID NO: 11182 - DNA, 120 bp, synthetic construct
  source 1..120: mol_type = other DNA
gtacaaggcaaagtaccatttacttttccctgtgcttttctctaacataagagttttgccctttagccactgcagctggtaatgtgctgtgtttcacctgaagccagcaagtctcagagg

SEQ ID NO: 11183 - DNA, 120 bp, synthetic construct
  source 1..120: mol_type = other DNA
ggactctcatgtcaaatgcatgtgtgttataggatgaactactgctatacactagtatgtccttttgatttatttctggagctccagtgtagtggctatgttgtatagtttagcacttct

SEQ ID NO: 11184 - DNA, 120 bp, synthetic construct
  source 1..120: mol_type = other DNA
ttatagcagaaatcattactttatttctttttatgacaaaataatattttattgtgtgaacatatcacattttgtttaccattcagttgaggtacatgggttgtttttacattttggcta

SEQ ID NO: 11185 - DNA, 120 bp, synthetic construct
  source 1..120: mol_type = other DNA
tgtctgtcctcccagctcaaaacatggtacaataggaaaagtgtgtagtttctgaccacatgatggaaaagtagagcccacaaatccagaaaggacctaggagataatggagatagaaaa

SEQ ID NO: 11186 - DNA, 120 bp, synthetic construct
  source 1..120: mol_type = other DNA
tactcaatctgcactaagccaggaagaggatctgtgggaaattcctgcactctcatttgaactacacactctgatctagatgcatagttattggaagtgcacccattcaaaaatcacatg

SEQ ID NO: 11187 - DNA, 120 bp, synthetic construct
  source 1..120: mol_type = other DNA
ttctatggtgatatcactatgatatgtgataataactccctcaatgtataagttccagtcagaagatgattatgtgcagaaagcttttgcttttgtgaccctatatctcacctgttcttt

SEQ ID NO: 11188 - DNA, 120 bp, synthetic construct
  source 1..120: mol_type = other DNA
caataagctgactccacacaacatccctgcccttgcctctgactctgtctctgttgttctcttgtcctagaggaaattgcctaaagtggtagtttaactaattcttaaagttcgaaacaa

SEQ ID NO: 11189 - DNA, 120 bp, synthetic construct
  source 1..120: mol_type = other DNA
tgaactacagagacattaaagaaagatcagtggttgccagagacttggggaaagggggatagattggtgaagtgcgggggtattttagggcagtgaaactattttgtatgatactgtaat

SEQ ID NO: 11190 - DNA, 120 bp, synthetic construct
  source 1..120: mol_type = other DNA
tgagtgaagtaacaatgtttctggagaaacgaaaaagccagtggcaaaacacaaaatgtgaacgacagagcactaaaatggcacatcaacaaagtccttaaaaatagcagtgttggccgg

SEQ ID NO: 11191 - DNA, 120 bp, synthetic construct
  source 1..120: mol_type = other DNA
ggaaataataaaaattcaagggaggggtaagagtagagagggatgttcatgggtttgtaaggtaccagcaagtataaagagattccttttactggtatttcctctgtcttccatatatat

SEQ ID NO: 11192 - DNA, 120 bp, synthetic construct
  source 1..120: mol_type = other DNA
aagccttgatgagaggtacagatgccttagtggtcttatcattataacacaatggtcatgttgtcatcaacctttctggctccaattgaaaagaaatgattgtgtgttgaagctcccccc

SEQ ID NO: 11193 - DNA, 120 bp, synthetic construct
  source 1..120: mol_type = other DNA
gcataacaacctacttaccaatgttctaggttcatatgggaagagtatatttcaaagggtgattatatctttaaaaagcatgaccccatttccaaaaccaaaagtcaagtcacatgacgc

SEQ ID NO: 11194 - DNA, 120 bp, synthetic construct
  source 1..120: mol_type = other DNA
catgaactaacaaatcgtttgcacaacttgtgaagaagcgaacacttccatggattgtccttggacttagggcgccctgcccgccttttgcagaggagaaaaaacttttttttttttttg

SEQ ID NO: 11195 - DNA, 120 bp, synthetic construct
  source 1..120: mol_type = other DNA
cttgaactcctgggctcaagcaattctccctcttcggtctcccaaagttttggaattatagatgtgagccatggtacctggccatggtatgtaactttataatacaattgacctaaggtt

SEQ ID NO: 11196 - DNA, 120 bp, synthetic construct
  source 1..120: mol_type = other DNA
aacacgcacatgcacacacaaactcagaggacagcgttacaaggaaactaaggaattcctgcattaacaaaggaagacatgttagggggacatcctagccacatatgctttctttgttat

SEQ ID NO: 11197 - DNA, 120 bp, synthetic construct
  source 1..120: mol_type = other DNA
atacctcaaaatacctaaaataggtacgtatcaaccacttaagggtgtgaaaattgtttcagattcactgctttaaagggtcttcaaatatattttaacagaaccttacttcattccaaa

SEQ ID NO: 11198 - DNA, 120 bp, synthetic construct
  source 1..120: mol_type = other DNA
tcccgtgacctccttctttatatcctatcagagaagtttttctccctgtgtgagcctgtgtgtgagttcctgggtttgaatgtattttacatgtgtgaaagctcaccacattcattgttc

SEQ ID NO: 11199 - DNA, 120 bp, synthetic construct
  source 1..120: mol_type = other DNA
tatttgcaagtattgagatttgacctgaaaaacaatgaaacacatgaacacacttccgattttctcctcgctgattagcttcctgcctgctgtcagtgctggacgaagtgctataactac

SEQ ID NO: 11200 - DNA, 120 bp, synthetic construct
  source 1..120: mol_type = other DNA
ttggtattacatatttgttcaataaaaattaaacaccctcccttttttttgagtgagggcagggagtacctgaaataagacaatgtttactaaggcaaataattgaaaattaaatctgca

SEQ ID NO: 11201 - DNA, 120 bp, synthetic construct
  source 1..120: mol_type = other DNA
agaagcaagacacaaaaaactacagtgtgattcacttatgtataatttctggaaaaggcaaaaactaagaagacagaaaagcaagtcagtggccaggcatgggggctcacgcctgtaatc

SEQ ID NO: 11202 - DNA, 120 bp, synthetic construct
  source 1..120: mol_type = other DNA
cctgctagtaccacacccccgggagggactgaggggaggcagaagcatccgaggcattaaagcatccgagggagccggaggggaggagaatggagtgacagagacacgcggagggtgggg

SEQ ID NO: 11203 - DNA, 120 bp, synthetic construct
  source 1..120: mol_type = other DNA
gtaagtgtgctggtgctttagatacgttttctatgcaaatcattagatttcctgcatttagctggcaggaaatattgtctaaatggagtgtgtaagatcctgagtcaaaccctaagaacg

SEQ ID NO: 11204 - DNA, 120 bp, synthetic construct
  source 1..120: mol_type = other DNA
ggcttccttttctgcatcatactttctgctcattgtgtttctcttcatatgttcccactaccagctaactgaatgttgacaccccaaagagagaaaaattggttggtgagttagtcactg

SEQ ID NO: 11205 - DNA, 120 bp, synthetic construct
  source 1..120: mol_type = other DNA
tagaattcagaagcacaagtggtgcccctgacagcagcctaagtgtgagtttctgaagtcagagccaaatagggttctgtgcagcctgaagattatatatgaatgtttttaactttgggt

SEQ ID NO: 11206 - DNA, 120 bp, synthetic construct
  source 1..120: mol_type = other DNA
tgtatgttaggtttttttgactcattcttgccacagtctgtgattggatttttcagtaccatctaattgttggttgtacaatatagagacagtcacacgtgggggtctggagggccccag

SEQ ID NO: 11207 - DNA, 120 bp, synthetic construct
  source 1..120: mol_type = other DNA
gggagaaggtaaggagggagggaaggaagaaaaaagggaagagaggaagaagggagtgaaaagctacatctgtccgtccattattaataattcatcacaaatctttcatttcaggataag

SEQ ID NO: 11208 - DNA, 120 bp, synthetic construct
  source 1..120: mol_type = other DNA
cttgcttgttgtagttctagtgtctggttcagggtctagcaaatagtaggtgcttaacaagtaggtatcgactgggtggcctccgagccctgcttccctgtttccccaaagctttattgt

SEQ ID NO: 11209 - DNA, 120 bp, synthetic construct
  source 1..120: mol_type = other DNA
tagattccttgggctgggtttccccttctgtgtgtgtgtagccttctgctcacatcggtcctgcaacagccctgtgttgagacataatcatctcttccttgtttgtctcatcttctgggc

SEQ ID NO: 11210 - DNA, 120 bp, synthetic construct
  source 1..120: mol_type = other DNA
ttcctcttcatcctcttcctcatcctcctccttatcctcatcctcctccttcttctcttcctcctcatcctgctccttatcctcattctcctctttatcctcattctcttccttcttctc

SEQ ID NO: 11211 - DNA, 120 bp, synthetic construct
  source 1..120: mol_type = other DNA
aagtccatacatattcagtacagatacagtttttttttttttctgaatgttttcaatccatggttgattaaatccacaaatgcagagcccgtggatatgggaggccaactgcgtgttgac

SEQ ID NO: 11212 - DNA, 120 bp, synthetic construct
  source 1..120: mol_type = other DNA
caggagcagaagtcccaggctgtgggggattcctagaggaaaatgtagaatcttttaacatgggggaaaaaaaatcatcttcatagtgtgaagatttccttgaagtagtctagtacttgg

SEQ ID NO: 11213 - DNA, 120 bp, synthetic construct
  source 1..120: mol_type = other DNA
tttgagcaagtagcttactttctctagtttgcagtttatttgtgtataaactggagacactaacaccaacctggtagagcctctgggaaggccagcagagtgttgcacacaggccatcat

SEQ ID NO: 11214 - DNA, 120 bp, synthetic construct
  source 1..120: mol_type = other DNA
tcccactgcaaggagatatctaaattgtttgccttttttgtccttggtgatagaggtcactgccggactctggcagctccattactgctcatggtgatggtatagtccatgtcctgtcca

SEQ ID NO: 11215 - DNA, 120 bp, synthetic construct
  source 1..120: mol_type = other DNA
tgcattaggatctatcagggacccccttctctgccacagccccccgtaacctggtattttgggaaaatgaagttaaataaaataaaataaaccttcagttggtggagagatggttccagg

SEQ ID NO: 11216 - DNA, 120 bp, synthetic construct
  source 1..120: mol_type = other DNA
gctacctcctatctcctttctcagtcatcggagaagtaaaacccatcatttcctgagtctgatagaggagataggatctgtccagtggctgctgtttctgtggcacctactgtgtgctga

SEQ ID NO: 11217 - DNA, 120 bp, synthetic construct
  source 1..120: mol_type = other DNA
agggatgttatttttttaacgtgggttttagtacccacagcaagagtatttttagctggttattgaggctgattagtgagccccaggcctccatttggttaaatagagccaccttcacag

SEQ ID NO: 11218 - DNA, 120 bp, synthetic construct
  source 1..120: mol_type = other DNA
tgtctgtgtgtgggtttgagtgtgtgtgtgggtgtctgtgtatgggggtgtgtatctgtgtgtgggtacgtgtgggtgtgggtgtgtgggtgtctgtgtgtggatgtatctgtgtgtgtg

SEQ ID NO: 11219 - DNA, 120 bp, synthetic construct
  source 1..120: mol_type = other DNA
tataaaatgaggggtgggattccttacagaaccactgccctatctccctgtgatctaaatgattgtagtgttcatgtttcttcatgggagaaaatcattggatcttggctctccattaga

SEQ ID NO: 11220 - DNA, 120 bp, synthetic construct
  source 1..120: mol_type = other DNA
ggtcactcacgactctacacctcagtgtcctcatttgtaaaatgtggatgattgtgcctgcattgtgggcttgggctgaggaggagataagataagcacaacacctgctggaacaaggca

SEQ ID NO: 11221 - DNA, 120 bp, synthetic construct
  source 1..120: mol_type = other DNA
catcagcatcaccgccatcatcagcatcaccaccatcatcagcatcaccgccatcatcagcatcacagccatcagcagcatcaccgccatcatcagtatcaccaccatcctcagtatcac

SEQ ID NO: 11222 - DNA, 120 bp, synthetic construct
  source 1..120: mol_type = other DNA
tttattcctaggagttcaaataatgacatctgacacatcaccagtttacaaagagccctccactggatgtaaggccttctcatgatcattttcctcagaggagttggagcagccttgggc

SEQ ID NO: 11223 - DNA, 120 bp, synthetic construct
  source 1..120: mol_type = other DNA
ggcttcaggagttttgaaacctccccagctgattctagcgtagagccagggttgagagtcactattatgggaagtgccacatgcaaggagtgtgttgtttgttgtttgtttttagtgcca

SEQ ID NO: 11224 - DNA, 120 bp, synthetic construct
  source 1..120: mol_type = other DNA
gccgtgtaccctgtggcccagggcctctgttcctggcatccgaggcctcaggtcagcaaaggttgcaggccctggagtgcgaagccgctgtgagctggggactttgccttttccccactg

SEQ ID NO: 11225 - DNA, 120 bp, synthetic construct
  source 1..120: mol_type = other DNA
aaccttcgtattagccaaatgtcaggagactataagcaggaggtagcctctaccctccagtgacagatgtgtcaccaggtctggggatcccttcacaccccacctggggctgtctctata

SEQ ID NO: 11226 - DNA, 120 bp, synthetic construct
  source 1..120: mol_type = other DNA
aggattacaggcgtgagccaccgtgcctagtctccaattcctttttgaaatctcttaaaagaaaagcatgcacccctgcctccattgtccctcccattcattcctcacgctacacacagg

SEQ ID NO: 11227 - DNA, 120 bp, synthetic construct
  source 1..120: mol_type = other DNA
ctcctctccaccccgtcttcttccagagatggaatgtgggagacaattcctaggacaatgaaaggatcaagacactaactttactaacatcaatttcagaaagagaatgaggcaaagaaa

SEQ ID NO: 11228 - DNA, 120 bp, synthetic construct
  source 1..120: mol_type = other DNA
agcacagaggcgctgtgtcattgctgaatgttaggctacagcacagctatcctgaagcaaaattgttctggagttaaccatttagagcatcttggctaatcctaaaaaaatacattggtc

SEQ ID NO: 11229 - DNA, 120 bp, synthetic construct
  source 1..120: mol_type = other DNA
ctttaagtagtaaatccttccagcgtgattctgtgcaaatgatctgatttcaacttgcctcccccctttctacatcatatgtttacctatccatttgggagccttctgtgtaccatgcac

SEQ ID NO: 11230 - DNA, 120 bp, synthetic construct
  source 1..120: mol_type = other DNA
cactgtggtttttgttttctcttctattctgttttagtgctattaatgctgatctctttataagaaattgatttgatgacccactgatggattgactccccccctttttcttgacaacac

SEQ ID NO: 11231 - DNA, 120 bp, synthetic construct
  source 1..120: mol_type = other DNA
tttgcagggcttatggttaaagttcctgtggggttatatttttcctgcaaattacttcttttccaaagtctgatgttgatgtcccctgaagacagcggcttttatgcgaccattgttgca

SEQ ID NO: 11232 - DNA, 120 bp, synthetic construct
  source 1..120: mol_type = other DNA
tagattaagactgttggactcaagctacaacgaggtgtctctgatgtaaaaaactgcagtttaagattatggtaaatccttccctgcagtacctgttaaacaatgacctcattcttacgc

SEQ ID NO: 11233 - DNA, 120 bp, synthetic construct
  source 1..120: mol_type = other DNA
cccatgctttattgtttgattgaaaacttttgtctcacttttgtccggatttcttccacagtgacataaagaaactgttgcttgatccagaattcactctcttgcagaggtgcctgcttg

SEQ ID NO: 11234 - DNA, 120 bp, synthetic construct
  source 1..120: mol_type = other DNA
tacaaagtagtaaagcacctgtctcaacagacagctataccccaagcctctcatggtcccttagcagtaaggctatggcctcatttttgtcccttctctggtgactcttcagaaaaggct

SEQ ID NO: 11235 - DNA, 120 bp, synthetic construct
  source 1..120: mol_type = other DNA
gcgtatgtgttcttatggacaggaacatgtcaaggaggacttctcgcctttctaggaaatttctccttccctgccacccctcctgtatccatggatatacccagaattctacctctggct

SEQ ID NO: 11236 - DNA, 120 bp, synthetic construct
  source 1..120: mol_type = other DNA
atatgttaaagtacctagcacagagtccaaccatgacaggcactcaataaatggtagccagttatcatcatcaccatcatcatcatcatcatctcaaggaatgggctaaagaaacgtgac

SEQ ID NO: 11237 - DNA, 120 bp, synthetic construct
  source 1..120: mol_type = other DNA
ccctctccaatgttcttcgccgggcctaatggcaatgtggcagagtattttgtattttgaagcttcaaacagaaaactcttttgccaaaatacattgttcctcatgaagtatgtgtctgc

SEQ ID NO: 11238 - DNA, 120 bp, synthetic construct
  source 1..120: mol_type = other DNA
ctgtcaatgtaaaaccagcaaggcactgctttttcactggtctctcaaagccagtgttactttcagaatccataatttctgaaatcgaaccatctccccagtcattcagtgcttaacatc

SEQ ID NO: 11239 - DNA, 120 bp, synthetic construct
  source 1..120: mol_type = other DNA
tccaagccccgttcatcccaggctggaaggacgatggagagtttggggcctgcatagagccaggtgaggagacatgagaggatggcgacctcacctgcccacagtggccacatctacagt

SEQ ID NO: 11240 - DNA, 120 bp, synthetic construct
  source 1..120: mol_type = other DNA
tgcccacagtggccacatctacactgagaagacagtgacctcatctccccagggtggccacatctacactgaaaggatggcgacgtcacctgcccacagtggctgtgttcatatggggag

SEQ ID NO: 11241 - DNA, 120 bp, synthetic construct
  source 1..120: mol_type = other DNA
tctgttgcccaggcttcagtgtagtggcacgaccttggctcaccgcagccttgacctctgggctcaagaggtcctctgattgttctttattcttgttgcacagctgttgtttggggactt

SEQ ID NO: 11242 - DNA, 120 bp, synthetic construct
  source 1..120: mol_type = other DNA
tttttctaactgccttctttagcttttaaagaaagcacttttccagagcgtctcatttcatgcctgcttataaaggatgaggagtggccccaggtcacagccggtgttatttcccccatt

SEQ ID NO: 11243 - DNA, 120 bp, synthetic construct
  source 1..120: mol_type = other DNA
ctcaagggttaggagtgcaaatgggtgtctgtttgtatcaggcctgggttgcgtggggttggagttcttgacctcagctcttctcagaacgctgctgagcattgcctgtgttctaggtct

SEQ ID NO: 11244 - DNA, 120 bp, synthetic construct
  source 1..120: mol_type = other DNA
atcactgctggaaacattccgagattatgattccgagatttctatccagaagaggcagagtttgtgctcgggcagggagagggataataaaggtttgtgatgtctctgcttaaccagaaa

SEQ ID NO: 11245 - DNA, 120 bp, synthetic construct
  source 1..120: mol_type = other DNA
cactggcaatttgccagaaggcagagaggcccatgcaggtgccaataagctcctgaatatggagggggtctaggcctgtcatttgtagctgtgtagctccatcctgtgttcacccagagt

SEQ ID NO: 11246 - DNA, 120 bp, synthetic construct
  source 1..120: mol_type = other DNA
ggaaagtgccaggtctttgccttttagtgtggctggaaaggaatagctggggctggtttgttcatgaggaaagaggctgatttgggtcttggctttgcaggctgcataggaccatggtgc

SEQ ID NO: 11247 - DNA, 120 bp, synthetic construct
  source 1..120: mol_type = other DNA
ctcctcacatttgctaactcagggactgctaagacatgcaagggagagggtaggttttgtgtcaacctgattactatgggcagacacaaggttaatcaccttggagttggcaatagtgga

SEQ ID NO: 11248 - DNA, 120 bp, synthetic construct
  source 1..120: mol_type = other DNA
actgggtgagggtatcatggacataggacagacagcaaggtaggggaggaatcctctcactgagaggaactctgagctaaagatgcttgtctgaaagtgagttctcagctgagacccagt

SEQ ID NO: 11249 - DNA, 120 bp, synthetic construct
  source 1..120: mol_type = other DNA
atgagctttggtccttttatattccggactcacatatagtttctgaaaattgagggtgtcaccctctgacccgttcaaggcatcgtcagggcaggctcgatacccccatccatcactgct

SEQ ID NO: 11250 - DNA, 120 bp, synthetic construct
  source 1..120: mol_type = other DNA
cattttagctcgagctagtagagtgtcagcaatggtgttagatgtacccgtcagtgcatgtgtcagtgcatggaacaggctaaccctttgtgactgagaagaggacatcccacacttcag

SEQ ID NO: 11251 - DNA, 120 bp, synthetic construct
  source 1..120: mol_type = other DNA
tacccccatccttcactgctggaaacattccgagattatcatgggccacatttgtatccagaaaaggcagagtttgtgcttgggcagggagagggataataaaggtttgtgatgtcactg

SEQ ID NO: 11252 - DNA, 120 bp, synthetic construct
  source 1..120: mol_type = other DNA
ttgccatcactggcaaattgccagaaggcagagaggaccatgcaggtgccaatgagctcctgaattcggagggggtctgggcttgtcatttgtagctgtgtatctccatcctttgtgtac

SEQ ID NO: 11253 - DNA, 120 bp, synthetic construct
  source 1..120: mol_type = other DNA
aactctgaaccaaagatgcttgtctggaagtgggttctcagctgagacccagtgaggaggtctggaaacagaggctcaagggttaggagtgcaaaatgggtgtctggttctatcaggcct

SEQ ID NO: 11254 - DNA, 120 bp, synthetic construct
  source 1..120: mol_type = other DNA
catgaaacagtttcatactgtcccagtggacagcccttacaggttcaggaagtggccccatgtttaatgagttttggtccttttatattcaggactcacatatagtttcgaaaattgagg

SEQ ID NO: 11255 - DNA, 120 bp, synthetic construct
  source 1..120: mol_type = other DNA
gggggagagccttctgtgttgctacatgcataaaaaaactctacaaggatacacgccaaactgttagctgtgtatcctctggggtatagaatgacagctggaaaacatttttaattttta

SEQ ID NO: 11256 - DNA, 120 bp, synthetic construct
  source 1..120: mol_type = other DNA
aattaaaacgtccaagtgttgaggatgtgtagaaatgttaggaatgtcagatggtacagctgctttggaaaacagctagcagtccctcaaacataccgttagcacatgacccaacaattc

SEQ ID NO: 11257 - DNA, 120 bp, synthetic construct
  source 1..120: mol_type = other DNA
tgtatgtgaattatgtcctaataaagctaacagaaaaataaagttcagcttctcagtaacactgcccacgtgtggctattggctgctgtattgaataaagcagatatagaacaggtccat

SEQ ID NO: 11258 - DNA, 120 bp, synthetic construct
  source 1..120: mol_type = other DNA
aggaaagaaaaaaatttcacaaaatatgtgagaaaaaaagccaaagttctggaaaataatgccccattccagccttccccagaaaatggtgttcacgacaaccttccttcagccagggcc

SEQ ID NO: 11259 - DNA, 120 bp, synthetic construct
  source 1..120: mol_type = other DNA
accaactatttctgttaggctgaggaccagggaggcaagaagctttcacattcagttcctaggatacatagagtatttgttattaaaagaagaaaacacggtgactacttggggggacca

SEQ ID NO: 11260 - DNA, 120 bp, synthetic construct
  source 1..120: mol_type = other DNA
cctaatagggaccctggctctaccccctaacagggaccctggctctacccctgataggtaccccggctccaccccctaacagggacgccggctccacccctaacagggaccccggctccg

SEQ ID NO: 11261 - DNA, 120 bp, synthetic construct
  source 1..120: mol_type = other DNA
gaaaccaaaattgtctgtagacattgccagatgtgccctggggagaaccgcagcattaagcggtattaagagaacggttacggagaactctagtactgaacccaagattactttgccaat

SEQ ID NO: 11262 - DNA, 120 bp, synthetic construct
  source 1..120: mol_type = other DNA
caggtgtggagggtagacaggatttcaggtggggggatagggagtatttcaggtgtggagggtagacaggatttcaggtgtggagggtagacaggatttcaggtggggggatagggagta

SEQ ID NO: 11263 - DNA, 120 bp, synthetic construct
  source 1..120: mol_type = other DNA
cacttccagcactgaaagaatgggcccaggacgggggtcagccctcctgcagccctggtttgaattggaaactctgtccaccgatgcctggcacctggcacctagccctgcagctgtggg

SEQ ID NO: 11264 - DNA, 120 bp, synthetic construct
  source 1..120: mol_type = other DNA
cgtgagctaccacgcccggcccatatgtggctttttaattaaatttttgaggtataacattagtaaagtgctctaaaagtgaagaataggatgttagccccacccaggtcaagatctaga

SEQ ID NO: 11265 - DNA, 120 bp, synthetic construct
  source 1..120: mol_type = other DNA
tgacactgacacgggttgttcttgctggggttgctaatggagcgggtgcgggtgtgggtgcgggtgagggtgctgatggagcgggtgagggtgcgggtgagggtgctggtggagcgggtg

SEQ ID NO: 11266 - DNA, 120 bp, synthetic construct
  source 1..120: mol_type = other DNA
gagggccaggaggtagcctccaggccactgggctgagaacccttaaaagaaaaagcccccctgcccatgacagtcattttagggtcaagaaagccctttgcagaaaccaaaccctttgaa

SEQ ID NO: 11267 - DNA, 120 bp, synthetic construct
  source 1..120: mol_type = other DNA
agtaggtactcttccattaatcctcccagattttcagctcccttttctgaccactggtctttagtctccacgggttcttccacaatcagcccctccccacaaggtaaaatgtgcatactt

SEQ ID NO: 11268 - DNA, 120 bp, synthetic construct
  source 1..120: mol_type = other DNA
cacaactagactatcagacaaccattgcaggttttattatcccaagttatcaatgacaaaataatagcttctggttttccaaaagggcaaagctagaaattaatgcaatgacccctaact

SEQ ID NO: 11269 - DNA, 120 bp, synthetic construct
  source 1..120: mol_type = other DNA
tttgagtgcaacaaattgaatgtagaccatgacaagtttggagaacaaagaggaaaacaccaaaaatagaaattgattgttttccacctttgacagaactccctaagagtttcagaaagt

SEQ ID NO: 11270 - DNA, 120 bp, synthetic construct
  source 1..120: mol_type = other DNA
cctcggacatttcagtgcctttacgcctgacttccactcctaaccagtcttctttcacaggtaccctgtcccctaaaatcaaatgttgcttttcacagttgcctttacttgtcacctaaa

SEQ ID NO: 11271 - DNA, 120 bp, synthetic construct
  source 1..120: mol_type = other DNA
tggaaatctttctactggcaagattagtaatcacttccatgacccccaaaacggctcttccttccatttccctcaagtactgtctggagcagcggttggaattaatagaggggccataat

SEQ ID NO: 11272 - DNA, 120 bp, synthetic construct
  source 1..120: mol_type = other DNA
tgtgggcgccccgcgcgcgactccgcaggtttcaacgctcggacacggaaatacggtttgcgtctcctcgcgcttttctctcctggagaggggagaagggggctacatcctgccaagtct

SEQ ID NO: 11273 - DNA, 120 bp, synthetic construct
  source 1..120: mol_type = other DNA
gtcattcgttttccaccaagaaagtttcaaatacttttccttttaactcatttgctgaggagaaagcttgcaagttgtgacttatagttgcttgatagattttgtacagtatttgtcatt

SEQ ID NO: 11274 - DNA, 120 bp, synthetic construct
  source 1..120: mol_type = other DNA
ccagggaaagggcaaattaaatacgttcacaaccttgggctgttgagagtggttttggctcttggcttgcacattgacgtctttaattattttcttgctaaaccaacttcagtgttggaa

SEQ ID NO: 11275 - DNA, 120 bp, synthetic construct
  source 1..120: mol_type = other DNA
gttcaagggatccttccccattggcctcccgagtagccaggactgcctactgggctcacgcatgtttttaaagaaatggtagataagagatctaaggtatttcagtgactaagaaactga

SEQ ID NO: 11276 - DNA, 120 bp, synthetic construct
  source 1..120: mol_type = other DNA
gtgtcttttaaacagtcatgttttaaaatccccatcaaaatggtaaaattcattgtgatcctgacctctgatgctgtcagccacaggaaggggcaaaacgacttgaggcttgaagccgtg

SEQ ID NO: 11277 - DNA, 120 bp, synthetic construct
  source 1..120: mol_type = other DNA
atgacttctatttcatcttgaaccaagagattgcttccttttcctactgatttacctttcagttacatgtagactgaaccagtcccagccatctttagttggtctctattcaaacattgt

SEQ ID NO: 11278 - DNA, 120 bp, synthetic construct
  source 1..120: mol_type = other DNA
gtgggtcctgatttgagaaatgctttagctgggtggttctgtcttggtcaatatgttgattaggcctgcagtcatccgaaggcttgactgaggctagggcatccaatttcaagacggctc

SEQ ID NO: 11279 - DNA, 120 bp, synthetic construct
  source 1..120: mol_type = other DNA
atttctggtatatcattccagagatagtttaaaccttgtatatagaagcaaattatgtatactgcattcctgtgtctgttctgtactttgcttttttcacctgacattatattttggtga

SEQ ID NO: 11280 - DNA, 120 bp, synthetic construct
  source 1..120: mol_type = other DNA
ggaaacttagaagagctgtttttacaattataagcaaagctgcaagaaacaatgtgtatctgacattttgcatttgggcaagtatatctgcagaatgaatgtctagatgtggactaggta

SEQ ID NO: 11281 - DNA, 120 bp, synthetic construct
  source 1..120: mol_type = other DNA
aaagatactggtaattctccacccttatctgattgcacctacattttgcttgttgctcattctgcatgacacctaaacgctgcatgacacccaaactcattctgcatgacacctaaactc

SEQ ID NO: 11282 - DNA, 120 bp, synthetic construct
  source 1..120: mol_type = other DNA
ccagctcagcatctttgtatgccatatatatatatttaaaaagtctcagtggtctttttatgtgtcagtttctacaccccagcctcaggtagtgtaagcttcatgaggacaggaaccagc

SEQ ID NO: 11283 - DNA, 120 bp, synthetic construct
  source 1..120: mol_type = other DNA
aaaactatcattcatatagatataaatgttattttattaatgaagtgagcagtgagatgttacaaccagttcaaaagggaacccaaagggacggacacatctattactcagaatattgaa

SEQ ID NO: 11284 - DNA, 120 bp, synthetic construct
  source 1..120: mol_type = other DNA
ctccacttttcatcaaactgttaaaaattatgggaggccattcttttgggctgagctcctgcactagccctcaacagatcagaccaaaccaaaatggagttacttatgctaaatgctgtg

SEQ ID NO: 11285 - DNA, 120 bp, synthetic construct
  source 1..120: mol_type = other DNA
cgcagctgaccatgataccctcaagtgagtttttccactgaatttgattattttctcatttggcacttctttctgggctttctaagcagcccaaaaactctagatgattttacttttgta

SEQ ID NO: 11286 - DNA, 120 bp, synthetic construct
  source 1..120: mol_type = other DNA
aaacttctggcaatcactgatctgtgttcctctagcattgcttttttttcagaattttatacaaatggaatcgttcaggctgtagcctttgagtctggctactttcatgtactgtatcaa

SEQ ID NO: 11287 - DNA, 120 bp, synthetic construct
  source 1..120: mol_type = other DNA
cgccatttaacttctcatatttggggatgttctagaaatgttctagattcctagtttaattctgtcgtcagagaaaataattcactgaattttaattgtttaacttcagggtttgtttta

SEQ ID NO: 11288 - DNA, 120 bp, synthetic construct
  source 1..120: mol_type = other DNA
agcactttgagaggcaaaggtgggaggatcgcttgagcctgtaagggggaggctgtagtaagctgtgattgagcgactacactccagcctgggcaacagaatgagaccctatctgaaaac

SEQ ID NO: 11289 - DNA, 120 bp, synthetic construct
  source 1..120: mol_type = other DNA
actttcttagaaatttgttacttaacactcgtctatatggttaatttttgaacttgtccacattttcttgaagggaagtctgtttctgtagttaaatctcatgttctatatgtttgcatt

SEQ ID NO: 11290 - DNA, 120 bp, synthetic construct
  source 1..120: mol_type = other DNA
tagtcattttaagttctagtctttgtttatattcttttagtaactgtcatgctaatttaaatgtgcatatttaagttatgaaagtctaaaatttatcctcctcctgggtgataggataac

SEQ ID NO: 11291 - DNA, 120 bp, synthetic construct
  source 1..120: mol_type = other DNA
aatttgatctgtatctgggagtgcaagtgctttatagagtgtacgtacagttttaggagatactgctaaaaattttgcagtggctatatcagtttacactctgccagctgtggatgaatg

SEQ ID NO: 11292 - DNA, 120 bp, synthetic construct
  source 1..120: mol_type = other DNA
tcaaggtacttagggacggaagtcaacacattcattgaaacaaggctgtgctgactgtagaaattgttttctgtttggaaggttttgttttctgttgggagtattctgattctcagtctt

SEQ ID NO: 11293 - DNA, 120 bp, synthetic construct
  source 1..120: mol_type = other DNA
aggaaaatggggattgagataaagaattttgctgtatcacagtttggctgaaaggcgttctgcctagcaaggatgcaggtgatttacacacgatctactcttgaagcttaaaccagtact

SEQ ID NO: 11294 - DNA, 120 bp, synthetic construct
  source 1..120: mol_type = other DNA
gttgctctgggagcttggagcagcaacagcactttgtgaaaacggactgtggggtaggagacacagggttattgttttgttgaacacctctcccatatcccttcttctaggaacgagaac

SEQ ID NO: 11295 - DNA, 120 bp, synthetic construct
  source 1..120: mol_type = other DNA
ctatcacctgacagcgagaaaacaacaatcacaatgagaccacagccaaagtgtccatcgccagcaatatcagcaaatgaaatgaatcaaaagtttggtttctcttcctctaggcaagaa

SEQ ID NO: 11296 - DNA, 120 bp, synthetic construct
  source 1..120: mol_type = other DNA
tcacctctgcataagtgtgtaggcaaagagtgagaattctctgcaaattataagaacccaaacttgctaataaggaaggctctatgtagtctttcacctccagtagatggagagctgcta

SEQ ID NO: 11297 - DNA, 120 bp, synthetic construct
  source 1..120: mol_type = other DNA
tgggtgccaggggccagagagaccttgagggttttccttcagttcagcatgtcaaagatccatattttggggtatcattttctgagccccaacatacataaccacaaaattttgcagatt

SEQ ID NO: 11298 - DNA, 120 bp, synthetic construct
  source 1..120: mol_type = other DNA
ctgaagagaagagtgtgaagaaggggtagtccttagtcataggtagagagctccaggatggtggaggagtctggtgaccttgacaatggagatgcagcaggtgagcccaggtcaaggtga

SEQ ID NO: 11299 - DNA, 120 bp, synthetic construct
  source 1..120: mol_type = other DNA
ggtggggaggatgcacagagcatggaggggggatgcacagagcatggaagatgcagctaaggatgcacacagcctattctctactgagccagaacccatagtggcctcaatagtcttaaa

SEQ ID NO: 11300 - DNA, 120 bp, synthetic construct
  source 1..120: mol_type = other DNA
atttgccttttgagaaaaagcctgtaggaaccaaattccaatcctgtttgactcctgtgacttctcagcctcaattctgggtttgtctgggcatggcagttctgaggataaattatgttt

SEQ ID NO: 11301 - DNA, 120 bp, synthetic construct
  source 1..120: mol_type = other DNA
tcctaaacatttcctctctgcttaagtcagcagtgtgcatttgtcttgcctgcaatcaaagaaacctgtccagagagtgggtagcatgttattattctttatttagatgaggaagcaggc

SEQ ID NO: 11302 - DNA, 120 bp, synthetic construct
  source 1..120: mol_type = other DNA
gtattggagaatggattagatagatggatggaatggatgggatggatggatggatgggagaggattaattatgggaattggctcatgcagttatgaagaataagaaggcccatgatacgc

SEQ ID NO: 11303 - DNA, 120 bp, synthetic construct
  source 1..120: mol_type = other DNA
aatgcacctgctgcctatttcacttggtacacattccctcccattttagttaaatttagttctgatcataattgttcttgtgtaccccacgaggagtgcaatcatacccagtaggaactc

SEQ ID NO: 11304 - DNA, 120 bp, synthetic construct
  source 1..120: mol_type = other DNA
agagagtacctactcttcaggcttaggacaccatgacacccatgagattggcatcaacgaggggtgtgttgctgggaatgagtgaatgtcatctcaccctggaacaacagggatgggaaa

SEQ ID NO: 11305 - DNA, 120 bp, synthetic construct
  source 1..120: mol_type = other DNA
ggctaatttcgcagagcacagtatcttccgggttcatccatgtcacagcacacgtcaacacttccttgctctgaagaatatttcactgtatgcattagccacattttgtttaatttgttc

SEQ ID NO: 11306 - DNA, 120 bp, synthetic construct
  source 1..120: mol_type = other DNA
ggtgatggtggtggttggtagtattactgttggtggtgatggtggtggttggtagtattactgttggtgatggtggtggttggtagtattactgttggtggtgatggtggtagttggtag

SEQ ID NO: 11307 - DNA, 120 bp, synthetic construct
  source 1..120: mol_type = other DNA
cttttgagggcatctggatgaacctcttttttacgtggggtggggtcgggataggcaccctgaaacagggccctcaaaatgctccaggccacagatggagaaggaaagtttcccgatgtg

SEQ ID NO: 11308 - DNA, 120 bp, synthetic construct
  source 1..120: mol_type = other DNA
gatacagacacagacatacatacagatacagaaagacacagatacagaaacacagacagacacagatttagccacacgcatacagatacacagacacagatacacagagacacacacaga

SEQ ID NO: 11309 - DNA, 120 bp, synthetic construct
  source 1..120: mol_type = other DNA
cagacgtcagtactgttcagccctggaagccgtcttcctctttactgccttctcacggtgtttcctttaattcctgctacacaaaaagttacaagtggaaatggaagaaaacaattcttt

SEQ ID NO: 11310 - DNA, 120 bp, synthetic construct
  source 1..120: mol_type = other DNA
aaacaatagacatgttcagctcagaactctgaggacagagaccatcccaacccttttggattcgaaccacaaagaatctgtagaatcttctacactggagatgctgacctgcccaagggg

SEQ ID NO: 11311 - DNA, 120 bp, synthetic construct
  source 1..120: mol_type = other DNA
gtttattttctgttttacataaaatgttatcctgaaccttctaatcaaggattccagtactgtgaggccaggtcgttgagcagtgtttcctccatgggagcttcctgcagagaagtgatg

SEQ ID NO: 11312 - DNA, 120 bp, synthetic construct
  source 1..120: mol_type = other DNA
tgcatgtgggtgtgtgtgtacctgcatgtgtgtgcatgtgggtgtgtgtgtacccgtgctcatctgtgtgtgtacctgcatgtgtgtgcatgtgggtgtgtgcctgcatgtacccgtgct

SEQ ID NO: 11313 - DNA, 120 bp, synthetic construct
  source 1..120: mol_type = other DNA
cgaggaggcattttaggtcctgattggagttggtcactgataactgtaacttttattcccacatccttctgcccccatatgctgccctttgtgttgaataaacaacatgaatgtttagaa

SEQ ID NO: 11314 - DNA, 120 bp, synthetic construct
  source 1..120: mol_type = other DNA
tgagccacctagctaccctgcctcttggtcttaagtaggtctcctatttcccaagagagtgttaggagtttttgttttgtctttattcgagtgtccataaaacataacaacttttccaca

SEQ ID NO: 11315 - DNA, 120 bp, synthetic construct
  source 1..120: mol_type = other DNA
tccttggttgttaatgagaatgtgaccacttgcttgaatttttgtgtctcttctagtcttagggtttgccttcgtgctccagtagggtgcttgagtttatgtactaataacccctactag

SEQ ID NO: 11316 - DNA, 120 bp, synthetic construct
  source 1..120: mol_type = other DNA
taaatgaacctaataggattcttcctgaaaacaggccaatgacttagacagcaaaggtggaggatgagtaatttgatctcatgtcaagggtgtggattcactccaaactctcttagcagg

SEQ ID NO: 11317 - DNA, 120 bp, synthetic construct
  source 1..120: mol_type = other DNA
gatgccattcacttaggcacttgcttgttctagaaatatttattaagcactaggtgtggcaggtgtagaatggatttgcccccaggaaaccctggatctggggctccgagtcatctgtct

SEQ ID NO: 11318 - DNA, 120 bp, synthetic construct
  source 1..120: mol_type = other DNA
tatacacatatgtgcacacatacacacacatgcacatgctatgactttctccttagtgtactaatggtttggccatgatgctttgcaggagacctgggagaagcccaagtactagggagt

SEQ ID NO: 11319 - DNA, 120 bp, synthetic construct
  source 1..120: mol_type = other DNA
tcggtgatgttgttttcatttgtgctttggataaatcccattataatctcatttttcatttcccgggcttagcaaggataagtcacgtttgctcctcaggatctgtctatgcacgtgcct

SEQ ID NO: 11320 - DNA, 120 bp, synthetic construct
  source 1..120: mol_type = other DNA
ccactccatttttttaaatagctttttaagagtggttttaggctcacagcaacatggaacagtgagtacagccaggtcccagacaccccctgcccacacacatacacaggcacggggctt

SEQ ID NO: 11321 - DNA, 120 bp, synthetic construct
  source 1..120: mol_type = other DNA
gtctctttctgtccagttaaagcaccgagcaagaggcaactgtatctcttgctgcctgctttagtcttttcaaggtctttctttgcaaaactacaaatgtcctggcctaaagaaaaaatg

SEQ ID NO: 11322 - DNA, 120 bp, synthetic construct
  source 1..120: mol_type = other DNA
tctcctatgtgatctgagcatgagttacacgggcagcgactcctatgtgatctcagcagcgtctcctgcatgacacaggtagtagctcctctatgacccgggcagcgactcctgtgtgac

SEQ ID NO: 11323 - DNA, 120 bp, synthetic construct
  source 1..120: mol_type = other DNA
atcctcccagaagtgcaccacattgggaatctgtgttcgtctgttttgtgttactgcaaaggaataactgagcctgcgtcatttatgaagaggttgatttggctcatggttctgcaggct

SEQ ID NO: 11324 - DNA, 120 bp, synthetic construct
  source 1..120: mol_type = other DNA
gatctgagacagttggcattgggtcctgtgtaaggaaggtcttgctaatggttggaactgctggtggtgggagggagaagcactgcgtgggcagaaagcgcccttgggataccagctccc

SEQ ID NO: 11325 - DNA, 120 bp, synthetic construct
  source 1..120: mol_type = other DNA
cttcttagggatggtatctttgtgaaggacaaggagcccccagtcactgggaagaggaattttttggcctctgtactccttagaggacctaagtgccccagtcagatgccctgagtcttt

SEQ ID NO: 11326 - DNA, 120 bp, synthetic construct
  source 1..120: mol_type = other DNA
ggtctggattgaattttctctttccaggcccctaccgaagtcctgtggtttccctaaacctcgatttccctaatgggcatgataatcctgatttgagatttaatgaagtcatatcaaaga

SEQ ID NO: 11327 - DNA, 120 bp, synthetic construct
  source 1..120: mol_type = other DNA
taaggtgatattcttgtccttcatgtgttagaatatctatttgctttgaagagagagtcagactccctgccttttgggacatggctttgagatctgcctttcagtaagtaagacgctatc

SEQ ID NO: 11328 - DNA, 120 bp, synthetic construct
  source 1..120: mol_type = other DNA
ccccaatcaattactctgtaatttactcaagtatattaaaagtattgtggcagtgtgcaataccagatttttaaaaacagtgtgtgcctctgtgggcagagctgcctgtcgtagaagggc

SEQ ID NO: 11329 - DNA, 120 bp, synthetic construct
  source 1..120: mol_type = other DNA
gcaatacaattaaatatacttaaccttaaaattacccagaatgtgattgaatctgtgattcacaggccccttctggttctcccgtgcctcggtgtgatcattaggaggatggatcaacct

SEQ ID NO: 11330 - DNA, 120 bp, synthetic construct
  source 1..120: mol_type = other DNA
tcttcctcctcctcctgcccttcttttcctctgtcttcctgttttcttccctttcccctgctgtattccttcctcacacgcccccctcagcctcttttctggggactggctcttctagga

SEQ ID NO: 11331 - DNA, 120 bp, synthetic construct
  source 1..120: mol_type = other DNA
tttgagctatttgatggaaaaactgggtaaatcccaaacaggaatcattctgctcttgggtcattcatccaagctagtggtcatttccattagccgccaaattcttctctggctggtttt

SEQ ID NO: 11332 - DNA, 120 bp, synthetic construct
  source 1..120: mol_type = other DNA
ttgatccagcctgatctccactatctgtttgaagagtattcaggactatttgcatcattttatcgctaatgtataatatatggctctaaagtgagcccaagcgctgtcttgttaccgagc

SEQ ID NO: 11333 - DNA, 120 bp, synthetic construct
  source 1..120: mol_type = other DNA
agtgccaggtttcagggatttaaaaataacactggactggggtttgatggctaagcagatgagcaggtctcactatatgtaaaccaagagtctccttcctggtggcccccatgtctctgc

SEQ ID NO: 11334 - DNA, 120 bp, synthetic construct
  source 1..120: mol_type = other DNA
agcatggacaccactgatgggatagaatttcaaccagcctttctggaacctgactcattttatagaagaaaaaggaacgaatagaaaggaagacatgactccagtggtaaaaccccgaag

SEQ ID NO: 11335 - DNA, 120 bp, synthetic construct
  source 1..120: mol_type = other DNA
ccagggtctccagcttgcaggcaatctgtcatgggacttctcagcctcataatcctgtgagccaattcccttaacaaatccccctctcatatatctatatctatatctgtctatatctat

SEQ ID NO: 11336 - DNA, 120 bp, synthetic construct
  source 1..120: mol_type = other DNA
caggatagcacttaaagagaagcagaaaagcaattgagaacccaatgtcttggggatactttttggtgtaagtgcattgtagacacagccctttaaggggtctaacatttttctgggatc

SEQ ID NO: 11337 - DNA, 120 bp, synthetic construct
  source 1..120: mol_type = other DNA
ataaattagcattagatggaacctaatgagtttactaaacatttgggatttgtgctaataaactggctggctgtgaactagcagaagcggtgcaggatcccggagctctctcttatctct

SEQ ID NO: 11338 - DNA, 120 bp, synthetic construct
  source 1..120: mol_type = other DNA
agccacagttcacagtgaagacataatgctcatgaacacctatgagccgaataatacaaccataacctttatcaaacaaagactacaggagatgtgagcaaacacggttagaaacatact

SEQ ID NO: 11339 - DNA, 120 bp, synthetic construct
  source 1..120: mol_type = other DNA
agagacagaaacgaagacagggattgagatagaggtgcagacaggaagcggggaggaaggcagtagagattcatgtgaacttgtagccatcatttaaaacattttcctgaaacttttttt

SEQ ID NO: 11340 - DNA, 120 bp, synthetic construct
  source 1..120: mol_type = other DNA
tgtacacacagagacacatgaacacacaccaagacaggtgtacacacagacacatgcacacacagatacgtgtatacagacacatgcacacacacagacgtatacacacacagacacata

SEQ ID NO: 11341 - DNA, 120 bp, synthetic construct
  source 1..120: mol_type = other DNA
gagccagctgccccactgaaaagatgaatgagttacggacatgagcaaagaacccaagatacacgtcttgattacaaaactgatcacaggcacattcattacaatattgatcacttatga

SEQ ID NO: 11342 - DNA, 120 bp, synthetic construct
  source 1..120: mol_type = other DNA
ggcctccggagtcttccctccagacaggcattcctcaaggtctctggagtctccactccagaaaggcatttcctcaaggcctcacgagtctcccctccagacaggcatttcctcaaggcc

SEQ ID NO: 11343 - DNA, 120 bp, synthetic construct
  source 1..120: mol_type = other DNA
ttcggaacagatggacaagacagcgttatcttcatttcgtgagcgtcacgtgacggagaagagtctaacagcaggtgatactctccttttcaacagcataaagaaaaaaagatgcatttt

SEQ ID NO: 11344 - DNA, 120 bp, synthetic construct
  source 1..120: mol_type = other DNA
tgaggtgtgcactgcctccatctcctatcggtgtgtgtgagagtgtatgtgtgcactgctgtgtgcgagcaggtgtgtacatgttcacacggatatactgttctccaaatttggatccta

SEQ ID NO: 11345 - DNA, 120 bp, synthetic construct
  source 1..120: mol_type = other DNA
atcattttagccgttcataagtgtacagttgcgtggtggtaaatgcacttacagtgttgtgtagctatcaccactacctgttcccaaaacaacttcctcattaccaacacaactttgtcc

SEQ ID NO: 11346 - DNA, 120 bp, synthetic construct
  source 1..120: mol_type = other DNA
gggtggaatgacagtgtttgtagggacctcagtcgggtggaatgacagtgtttgtagggacctcaggcgggtggaatgacagtgtttgtagggacctcacacggatggaatgacacagtg

SEQ ID NO: 11347 - DNA, 120 bp, synthetic construct
  source 1..120: mol_type = other DNA
tgacacagtgtttgtagggacctcaggcgggtggaatgacacaatgtagggatctcacatgggtggaatgacacagtgtttttagggacctcacacgggtggagtgacacagtgtttgta

SEQ ID NO: 11348 - DNA, 120 bp, synthetic construct
  source 1..120: mol_type = other DNA
tttgtagggacctcaggcgggtggaatgacagtgtagggacctcacgtgggtggaatggcacagcgtttgtagggacctcaggcaggtggaatgacacagtctttgtagggacctcaggc

SEQ ID NO: 11349 - DNA, 120 bp, synthetic construct
  source 1..120: mol_type = other DNA
gtggagtgacacagtgtagggacctcacgcgggtggaatgacacagtgtttgtggggacctcacgtgggtggaaggacataatgacatagtgtttgtccacttgtgtctggcatatttca

SEQ ID NO: 11350 - DNA, 120 bp, synthetic construct
  source 1..120: mol_type = other DNA
aaacatttttgcctctatagctcatgcggccttttcacaaccactcacctctacccagatggtgcagaagcagccagagacagtatgtgcacacatgggcctgactgtgttccactaaca

SEQ ID NO: 11351 - DNA, 120 bp, synthetic construct
  source 1..120: mol_type = other DNA
cagcaaggctgcattcggcagacctgctccagatgcatacctagaagtggagtcgaagagtcggaaatcaagttcgttcttttttttttttttttccctgagtttcatctgagatttttt

SEQ ID NO: 11352 - DNA, 120 bp, synthetic construct
  source 1..120: mol_type = other DNA
aggtctctctggatttcgtcacattaaaatcatctaaacatgagctcacaggtgaaaattaccaagcacatacaggaaaagccaccgtgagcaagtcagcagaaccacagcagaactgaa

SEQ ID NO: 11353 - DNA, 120 bp, synthetic construct
  source 1..120: mol_type = other DNA
tgagactcggctttgccacggccacagtgggagccagaagccgtgtgacagatccagcaagtgtgactccttactctccaccgccagcttagaatcaagccttgaagtagatgctcgttc

SEQ ID NO: 11354 - DNA, 120 bp, synthetic construct
  source 1..120: mol_type = other DNA
aaaaaaaatctgtatacaaaatataaatgtgtgtggggatgacacatatgtactctagcaagtgaggaccccaactggggatgggataggagaccatctttctttccagagtggcaacac

SEQ ID NO: 11355 - DNA, 120 bp, synthetic construct
  source 1..120: mol_type = other DNA
tcactgtcttagtgacttgcgggtgtgcgggggggttcacttagtgactttcgggtgtgtgggggttcactgtcttagtgacttgcgggtgtgcggggttcactgtcttagtgacttgcg

SEQ ID NO: 11356 - DNA, 120 bp, synthetic construct
  source 1..120: mol_type = other DNA
cactgtcttagtgacttgcgagtgtgcggggggttcactgtcttagcagtgacttgcgggtacatggatagtcactgtattttttattcctcttgatatatttcaaatattgcaaaatac

SEQ ID NO: 11357 - DNA, 120 bp, synthetic construct
  source 1..120: mol_type = other DNA
cgatgccaccagtacgttggtttattttcaaagtaggatctttgataccagaaatcaagattttccaagacaaataatacagagctgtaccaatgctgagtgaccagagcttgcttccgt

SEQ ID NO: 11358 - DNA, 120 bp, synthetic construct
  source 1..120: mol_type = other DNA
tggagatggaggcgtgtgctgatccccatccccctgtggagatgaaggtgtgtgctgatcccccatccccatgtggagatgaaggggtgtgttgatcccctgtccccctgtggagatggt

SEQ ID NO: 11359 - DNA, 120 bp, synthetic construct
  source 1..120: mol_type = other DNA
gatgaaggcgtgtgctgatcccccatccccctgtggagataaaggtgtgtgctgatcccccatccccctgtggagatgaaggcgtgtgctgatccgccatcccactgtggagatgaaggc

SEQ ID NO: 11360 - DNA, 120 bp, synthetic construct
  source 1..120: mol_type = other DNA
tagggatgtaaatacttgctgctgccgttgattttgttgttcacagtgtgggagaaccagtcacaaaacggttttctcattccaagccaagcctggagtagtagacttgagagtcctctc

SEQ ID NO: 11361 - DNA, 120 bp, synthetic construct
  source 1..120: mol_type = other DNA
tgtggactgtgggcttccgtgtggactggactgtgggcttctgtgtggactctgggcttctgtgtggactgtgggcttccgtgtggactctgggtttctgtgtggtctggactgtgagct

SEQ ID NO: 11362 - DNA, 120 bp, synthetic construct
  source 1..120: mol_type = other DNA
tgccagtcagatccacttggttaatggtggtgttgaaatcttctgtgtccttacaaattttctcttgctgctttttcagtcctaggaagtgaatatccttaccaattttctctgcactgc

SEQ ID NO: 11363 - DNA, 120 bp, synthetic construct
  source 1..120: mol_type = other DNA
caacttctggaacgtatttttgattcagataccaacaattctcatgaataacaactgataaaacctttcagcgcgttacagattccggtgggtgacctcaggtttgcctgaacagtacct

SEQ ID NO: 11364 - DNA, 120 bp, synthetic construct
  source 1..120: mol_type = other DNA
aagacaaagctgcacgaggagaagatgaaggagctacaggctgtgcgtgagacgctgctgcggcagcatgaggctgagctgctcagggtcatcaagatcaaggacaacgagaaccagcgg

SEQ ID NO: 11365 - DNA, 120 bp, synthetic construct
  source 1..120: mol_type = other DNA
gatcgtgatcatgatgacggtggtggtagtgggatggtgatgatggtgattatgatggtgataatggttatcatgatggtgatcatgatggggatgatggtgattatgatgatgatgata

SEQ ID NO: 11366 - DNA, 120 bp, synthetic construct
  source 1..120: mol_type = other DNA
aatgttactgggtgatttgcacaaaatctcagaaactgaacgactgacttgaaaccatgagtccccctccccgctttattgctctattgtctaatttattcttttcagccagcagcttac

SEQ ID NO: 11367 - DNA, 120 bp, synthetic construct
  source 1..120: mol_type = other DNA
caaaaggaaggctggtgtttgccatgaatcacattgtttgcacagtctaggcaggaacctcctcactaaaggaatgcttcgaagccaagttcccagacgccagccaatggccaccgttgc

SEQ ID NO: 11368 - DNA, 120 bp, synthetic construct
  source 1..120: mol_type = other DNA
gtatgtgtattttgcattgtgtgtacacatgtacagtgcatttgtgcgtattgtgtgggcatgtgtgtgtagtgtattgtgtgtacatgcatgtgcagtgtgtatgtgctgtttgcacat

SEQ ID NO: 11369 - DNA, 120 bp, synthetic construct
  source 1..120: mol_type = other DNA
ttgcctgaatgtttcagtcataatttcagaggaaggagttgcaccaagagtgttactgagtaactcagtttggagaaaaattaccctttgttgttcccgatagagtgaccgccttctgat

SEQ ID NO: 11370 - DNA, 120 bp, synthetic construct
  source 1..120: mol_type = other DNA
gaaagtatgttcccagctcgtgtgtacacgctggtcacgtggtatccaggcaggtgaaaatagttcccagctcttgtgtacacactggtcacgtggtatccaggcattgacttttgggtg

SEQ ID NO: 11371 - DNA, 120 bp, synthetic construct
  source 1..120: mol_type = other DNA
ggctggaccctgcagtgaccgtcctgagctgcgctgagtgatgctttgctccctggcactcccgaggagctagtccagtgagtggccggccgtgctggccttttcctcggggtctggagc

SEQ ID NO: 11372 - DNA, 120 bp, synthetic construct
  source 1..120: mol_type = other DNA
atcccatttccagtgggggtgggtgtggggagaatggaatgatgaggagggtctccaagagagaattccagttccaacaaggaggccctccctacattgctatttgctgtgtccagagcc

SEQ ID NO: 11373 - DNA, 120 bp, synthetic construct
  source 1..120: mol_type = other DNA
ctccctttcccagaaggacccccagggccaaccacgtctgcccgcgacccaggcctctgccccacttcctgcccagggccagggactctagactgggcacaagctgtcccaggcaaggaa

SEQ ID NO: 11374 - DNA, 120 bp, synthetic construct
  source 1..120: mol_type = other DNA
cctcaatgttagctcacattctggtgagaccccgaagcagggaacagagctgcaccatgcctggacttccgatttacagaaactgagatcatcacataactgcccaaggggttcacctta

SEQ ID NO: 11375 - DNA, 120 bp, synthetic construct
  source 1..120: mol_type = other DNA
gcacacactcacaactgacatcaacgcacctgggtgagtgtgagggcttcacgtggccatccctgcacacacaactaatatcaacgcacctgggcaagtgtgagggcttcacgtggccat

SEQ ID NO: 11376 - DNA, 120 bp, synthetic construct
  source 1..120: mol_type = other DNA
tctcattccagcactcagcggaggagataaggaaaaggaagtccaccagccggaatctgtcaaaacagcttcctgtgggctttgaggggagcaatatgtaatcagcctggtgtcccaaga

SEQ ID NO: 11377 - DNA, 120 bp, synthetic construct
  source 1..120: mol_type = other DNA
caaaaccaatccctgcctcatggtgggctccatgcaggccacctccacgcccacctccttggggcctcagtttcctcctctgccagtgggagggtacagtggcggtctgcatagcagagg

SEQ ID NO: 11378 - DNA, 120 bp, synthetic construct
  source 1..120: mol_type = other DNA
agcctgggcaaaaagggcgaaactccatcaggggagaaaaaaacaacaaaaaaaaatagccttttcataagccagggcttgtatcaaaactggtaagaaaatactcccaatgaggacagc

SEQ ID NO: 11379 - DNA, 120 bp, synthetic construct
  source 1..120: mol_type = other DNA
acttgtattctggaggcctggaatacacctcagatcacacctatgtgtgcgtgtgcctgtgggtgtagctctgcacatgtgaatgtgcatgtgtgtctgtatgcatgtgcatgtatgttt

SEQ ID NO: 11380 - DNA, 120 bp, synthetic construct
  source 1..120: mol_type = other DNA
gcgtcacattgtgtgtgtgtgtgtgtgtgtgcctgcgtgtgtacatgcatgtgtatgcaggttcagctctatgcctgtgtgcatgcatgtcccacattgtgtgtgtgtgtgtcggtgtgt

SEQ ID NO: 11381 - DNA, 120 bp, synthetic construct
  source 1..120: mol_type = other DNA
atgtgtgtgcacacggtggtatgcacagggtgctgcacagggtctcttcaagtgagctgattacgtgcctggcctcatctgaccgacacatggtgcctggagcctggaaaatctgctgct

SEQ ID NO: 11382 - DNA, 120 bp, synthetic construct
  source 1..120: mol_type = other DNA
ctgcactctgtaatcatgccactccactccctgatcatgccactcctccatgatcaagccactgcactccgtgatcacgacactccactccgtgatcacgacactccactccctgatcac

SEQ ID NO: 11383 - DNA, 120 bp, synthetic construct
  source 1..120: mol_type = other DNA
actccactctgtgaccacgcccctgcactccgtgatcacgacactccactccatgatcaccacactccactccgtgatcacgcacctccactccgtgatcatgaacctccactccctgat

SEQ ID NO: 11384 - DNA, 120 bp, synthetic construct
  source 1..120: mol_type = other DNA
atggtcagaggcaagtacacagatggcacagaatcaaaacctgtctggccacggaatgtgcccttctctgtcacagactctccaaattccaggacttgctgctgaggcttttaagcgcat

SEQ ID NO: 11385 - DNA, 120 bp, synthetic construct
  source 1..120: mol_type = other DNA
gaccaggcatgaacccggaacacattcccacgtctgcccaaagaccaggcatgaacccggaacacattcccacgtctgcccaaagaccaggcatgaacccagaacacattcccacacctg

SEQ ID NO: 11386 - DNA, 120 bp, synthetic construct
  source 1..120: mol_type = other DNA
cacatgttgtatgaattaccgtcacagggttttgttaaacattcagctaaaaacactctgtaattttagaaggaagacagcctcctccaggagcatcttacccgacctcttgtcaccgta

SEQ ID NO: 11387 - DNA, 120 bp, synthetic construct
  source 1..120: mol_type = other DNA
caggcgcaggtgcagcgctccgtgtggggcaggcgctgaggcctccgtgtggggcaggtgcagcgctcgtggtctgcagggcgttgcgtgcatgggctcccttgtttgtagccccgaggc

SEQ ID NO: 11388 - DNA, 120 bp, synthetic construct
  source 1..120: mol_type = other DNA
ggcttgcctcttggctcactgacttttggctcctgtctggggaattagaagctcaaagagggaaggcggaagaggagatgaggggaaaagattcaaaagataaaaagcagctgaggtcga

SEQ ID NO: 11389 - DNA, 120 bp, synthetic construct
  source 1..120: mol_type = other DNA
ggccacgtgggcctgcaggcgtggactgcttggacagttcaggagtgtttcctttgtctaactttgtattgaactagtttttgacttacaggaaagttgcaaaaatagtgtttccgtctc

SEQ ID NO: 11390 - DNA, 120 bp, synthetic construct
  source 1..120: mol_type = other DNA
attttaaaaatctgagaatccagtagaagaaatgggcaaaaagtatggcaggcagtccacagaagaggaaatccaagccaccgtaaatacatgaaaagatgctcagcctgtgagggacac

SEQ ID NO: 11391 - DNA, 120 bp, synthetic construct
  source 1..120: mol_type = other DNA
gtgggaaggagccgaggtggtggagcagcgtggggaggtgctgaggtggtggagcgtgggatagagcatggaggctgctgccaccagctgctcggaaggcatccttccaagttaagagcg

SEQ ID NO: 11392 - DNA, 120 bp, synthetic construct
  source 1..120: mol_type = other DNA
ttgtcatccccgggaaaggcaggcagccacaggcccatcagggatagctggtgagccacagaggatcctggagttcaggagagcagggagggatatttgggaagcctggtgctaacctgg

SEQ ID NO: 11393 - DNA, 120 bp, synthetic construct
  source 1..120: mol_type = other DNA
agcagcattcctttgattttctgcgttcacagcttctatagctgggttagtggctgcaccctggggatgatcactgggctccctagtcgcctccacctcctctgagccgtgtataaggac

SEQ ID NO: 11394 - DNA, 120 bp, synthetic construct
  source 1..120: mol_type = other DNA
aaatctcgaaggccaactaggttgtattaactccccaacctcgtgaaaatggcttagactaaaaccatttcgtctcaaacatttgaatgttctcttacatcctccagggagtttacctgc

SEQ ID NO: 11395 - DNA, 120 bp, synthetic construct
  source 1..120: mol_type = other DNA
ctgcagcagatccccagctctttctaccaccctgagtcattgtctttaaaattaaaggaaccccaaacccctgagccccagtgctaacagaaaatatgtttaaaatcataattgaataca

SEQ ID NO: 11396 - DNA, 120 bp, synthetic construct
  source 1..120: mol_type = other DNA
ttatggctgtgtggtggcatcttgcggtttaacttgcatttctggtcctacttccaaataataattccccacaaggatggttatcttgccgtgttggtaatggctttgacagctggatga

SEQ ID NO: 11397 - DNA, 120 bp, synthetic construct
  source 1..120: mol_type = other DNA
agagagagcttaggagaccacattgccactgtttagggtcagagtggtcccgcaggttaattcacttcacccagcctctcagggatgtaatgaggctgctcggggggctgtctcaggcct

SEQ ID NO: 11398 - DNA, 120 bp, synthetic construct
  source 1..120: mol_type = other DNA
tccttgtctcccattcactcgggagcatttatgggcgcattctcagagccttggtgaagttggagtgggatagggagggaggattggtggcgccttctcagagccttggtggcatattga

SEQ ID NO: 11399 - DNA, 120 bp, synthetic construct
  source 1..120: mol_type = other DNA
gagggaggattggtgaacgccttctcagagccttgggggaatattgggtaggatagggagggaggactggtgaacgccttctcagagccttggtggcatattgagtaggacagggaggga

SEQ ID NO: 11400 - DNA, 120 bp, synthetic construct
  source 1..120: mol_type = other DNA
taggatagggagggaggattggtgaacaccttctcagagccttggtggaatattgagtgggatagggagagaggattggtgaacgccttctcagagccttggtggcatattgagtaggac

SEQ ID NO: 11401 - DNA, 120 bp, synthetic construct
  source 1..120: mol_type = other DNA
ttggagtgtttcccttgctctgctgattgctgaaatgcaagacctgggcctctggaatcccattgaaagaacttgtttaaagaaacatcagctcggtttatttcatacacagctactttt

SEQ ID NO: 11402 - DNA, 120 bp, synthetic construct
  source 1..120: mol_type = other DNA
gtgtgaggttttgttgatgttgaggtgtgtgtgctgtgtgaggttttgttgatgttggggtgtgtgtgctgtgtgaggttttgttgagatgttggggtgtgtgtgctgtgtgaggttttg

SEQ ID NO: 11403 - DNA, 120 bp, synthetic construct
  source 1..120: mol_type = other DNA
tttgctcactaactgaagaagctcttgttctccagggtttatggttgggtttgggatgaggatgtaggcagatcgcttggagaacagctgaggcctgaacaggaaaaaacatctggaaag

SEQ ID NO: 11404 - DNA, 120 bp, synthetic construct
  source 1..120: mol_type = other DNA
aggccctgtcagaggagggtgtgggaggtgaggagggcaggggagaggccctgtcagaggaaggtgtgggaggtgaggagggtaggggagaggccctgtcaagaggagggtgtgggaggt

SEQ ID NO: 11405 - DNA, 120 bp, synthetic construct
  source 1..120: mol_type = other DNA
ataggaggcaggtttgcctcacgcaattcctagcttaacttttcccactggcttagtgattctgtgttcccaaggtttattttcctttcacaaaaggaaacaaaagtcatacagatttga

SEQ ID NO: 11406 - DNA, 120 bp, synthetic construct
  source 1..120: mol_type = other DNA
cggtgacgtgttagaacttgagaaatataccgtccgtgttcgtggattggaagactcagttacgctgacatgttaattccccactaaccaatctactgagttagtgcagttgcaaccaaa

SEQ ID NO: 11407 - DNA, 120 bp, synthetic construct
  source 1..120: mol_type = other DNA
acctccatacatgctcaggactccccacctttctgttcaaacccaaacccctcctttccttccagactcttggttccagctgcctggatgccctgtggcctgccggacttagaatgtcca

SEQ ID NO: 11408 - DNA, 120 bp, synthetic construct
  source 1..120: mol_type = other DNA
agctctagggaaaggcatacatgaagagaggccatccttgaggaaaaggcatccatgagggaaaggctttcatgagggaaagatgtccatgaggggaagacatccatgagaggaagacgt

SEQ ID NO: 11409 - DNA, 120 bp, synthetic construct
  source 1..120: mol_type = other DNA
agatacaggcaccaggtgtctgggaaggggcaggaagctcctcagaggaggggacactctgcaggtcgtgaataacttgctgttggttcagagacccacgtcttaaatcccgtctttatg

SEQ ID NO: 11410 - DNA, 120 bp, synthetic construct
  source 1..120: mol_type = other DNA
gacaaaggaaaagtgatattaagattcggggtatttgtttcattgtgtaatttcttccttggttaaaagggaagaatgggctgggtgtagtgcttcacacctgtaatcccagcactctgg

SEQ ID NO: 11411 - DNA, 120 bp, synthetic construct
  source 1..120: mol_type = other DNA
tctgtcctcagggtgcagccctgcacagcccttctagccctctcaggtctttcttttgtccaaactcttatcttctcttgggtccccagggtcaccaacctctttgcagaaaatccctct

SEQ ID NO: 11412 - DNA, 120 bp, synthetic construct
  source 1..120: mol_type = other DNA
ggtcgcttggtgattgcatcagcgaggacagatccgggctcttgtgattgtcatcagctggcgaggacatggatctgggctcttgcggtcgttgtcatacgtgcctcctgcacaaccctg

SEQ ID NO: 11413 - DNA, 120 bp, synthetic construct
  source 1..120: mol_type = other DNA
agggacggtaccttttctcctggaaagacgcctgcctcccactgtcactagtagaggggcctcacccagttactgtagatttgtcaccagtcacacgtccagccttctcccatgacagcc

SEQ ID NO: 11414 - DNA, 120 bp, synthetic construct
  source 1..120: mol_type = other DNA
tcattttcttttcatggattttccaaaacttggctgcttgattatctgctgccatgtaacagaccgccctaaacttagcagctttaaaaacacatacgaggtcatagctgtgagtgtctc

SEQ ID NO: 11415 - DNA, 120 bp, synthetic construct
  source 1..120: mol_type = other DNA
caggcactttgggggctctgctagccctgaggctgaccctgctgcttcagaacatcccgccatctgcctgggttctgcctggaggagccttagacgactgtcttcagggttctgtggtac

SEQ ID NO: 11416 - DNA, 120 bp, synthetic construct
  source 1..120: mol_type = other DNA
gtcctttggccctttatttaaccgctgaaggcattgtttttaagaccatttcttttagaagagtttcttttcagatgttcctacgaacatctgtttgtggctgaaattcgacccagccgg

SEQ ID NO: 11417 - DNA, 120 bp, synthetic construct
  source 1..120: mol_type = other DNA
tccgcagaggtgcacgctttttcttctttagaccttgtttttactgttccctctctacgtttaggtatgttcagatgcgcaggtacttacagtgtgttacgccacctgcggtggtcggtg

SEQ ID NO: 11418 - DNA, 120 bp, synthetic construct
  source 1..120: mol_type = other DNA
cacagtgccgtggtgtgggtccttggctgaccccacaggccagtgcgatgtcgtgggtccttggctgaccccacagcccagcaccatggcgtgggtgcccggccgaccccacagcccagt

SEQ ID NO: 11419 - DNA, 120 bp, synthetic construct
  source 1..120: mol_type = other DNA
gtaatgactgtgtgcatgaggctgctgattgcccatttcagggataatggacgaggtcacaggaagagctgggatatggtgtggttttgagggagctctagctcaatgccatgccctgca

SEQ ID NO: 11420 - DNA, 120 bp, synthetic construct
  source 1..120: mol_type = other DNA
gtgagaatgaacattttgcccccgaactgctgccagaatctcaccagtgtgcaccttggggccattttccctgacctgttctcacaaagctgacattgctcactctgcaggttacttgac

SEQ ID NO: 11421 - DNA, 120 bp, synthetic construct
  source 1..120: mol_type = other DNA
tgcgtcacacagttgtggatgtgtgtgcataaggtgtgctcgcgtacatggttgcatatgtgagcatgagtgagagcatgagtgagaacatgtgtgacgtgtgtagggctcatgcatgtg

SEQ ID NO: 11422 - DNA, 120 bp, synthetic construct
  source 1..120: mol_type = other DNA
agtgacggagcactttggtgtccaggggaagtttttggacaggttggaggagcctccagaaggcagtggtggcccaggcctctcgtcctcctcacgagcttcttcctgttctgcaaagac

SEQ ID NO: 11423 - DNA, 120 bp, synthetic construct
  source 1..120: mol_type = other DNA
ggcattccagaaagatccatggaccccgaccctcagtgttcccaggtgctcacacaggcctggcttcctcttcggcatttggctgggtgagatcagcttccgctttcccgctgcgtctgc

SEQ ID NO: 11424 - DNA, 120 bp, synthetic construct
  source 1..120: mol_type = other DNA
ggcagttttaccaccttgggcagcttttgccacatccgtgcaatgccagctccatgaaatcagtgaatatcaccttagtgtgctcgtcaatgtagatctcccctctcagactgccgcagg

SEQ ID NO: 11425 - DNA, 120 bp, synthetic construct
  source 1..120: mol_type = other DNA
catgaagagtgggacagacactcagcactgacacagaggccacagcagccaccccatgaagagtgggacggacactcagcactgacacggaggcccaggcagccgccccgtgaagagtgg

SEQ ID NO: 11426 - DNA, 120 bp, synthetic construct
  source 1..120: mol_type = other DNA
actgactctcagaggtgggagagggatgttttcattgaacaattactgagcaagatcgagttttagcttctgaaaaacacaaaaatatacgcaacacaggaatgaactgcgcagacaagt

SEQ ID NO: 11427 - DNA, 120 bp, synthetic construct
  source 1..120: mol_type = other DNA
ttctctgtagtgtgctgcaccctcctgctccgtgtacacaagagcggcgtggtaattggttaatattttaaccaggcgggagtcagaggaggggctttcaccctgacgcccacctggaga

SEQ ID NO: 11428 - DNA, 120 bp, synthetic construct
  source 1..120: mol_type = other DNA
ctagcacaggagtacgattgttcgccctatcacagccgctcccacgctgtaggcgcaggtgcgcccctgtcctgtgtgcctccccccccacccagcaggtatgctttcagataagcccac

SEQ ID NO: 11429 - DNA, 120 bp, synthetic construct
  source 1..120: mol_type = other DNA
aaactgaactttctttcatgttcctaatgcccacgcctccctcctctgtgctctgatcacaggggtcacggcggagcctagtcaaggggacccacggtgagcatggacttctacgctgga

SEQ ID NO: 11430 - DNA, 120 bp, synthetic construct
  source 1..120: mol_type = other DNA
accatgtgctatcagtgaccctgggggccccaggtcgccatctgtaaagcagggtaacagtgcccctcgcccagtctctgtgaggattcaaggagctgggtctgtctcagcattgcatgc

SEQ ID NO: 11431 - DNA, 120 bp, synthetic construct
  source 1..120: mol_type = other DNA
caatagtaaaaaaccaaacaacccaatcgaagaacgggccaaggacctgaagggacatttctctaaagaagacataaaaatggctaacaggttgatgaaaaggtgacatctaaaggtgac

SEQ ID NO: 11432 - DNA, 120 bp, synthetic construct
  source 1..120: mol_type = other DNA
tgctgtgtgtgtgctgatgtgtgctgtgtgtgctgtgtgctgtgtgtgtgctgatgtgtgctgtgtgtgctgtgtgctgtgagtgctgatgtgtgctgtgtgtgctgatgtgtgctttgt

SEQ ID NO: 11433 - DNA, 120 bp, synthetic construct
  source 1..120: mol_type = other DNA
tgtgctgtgtgtgctgatgtgtgctgtgtgagtgctgatgtgtgctgatgtgtgctgtgtgtgcagtgatgtgtgctgtgtgagtgctgatgtgtgctgtgtgtgcacttgtgtgtgctg

SEQ ID NO: 11434 - DNA, 120 bp, synthetic construct
  source 1..120: mol_type = other DNA
ctgatgtgtgctctgtgtgctgatgtgtgctgtgtgagtgatgtgtgctgtctgtgcgctgtgtgctgatgtgtgctgtgtgtgtgctgatgtgtgctgtgtgtgtgctgtgtgctgtgt

SEQ ID NO: 11435 - DNA, 120 bp, synthetic construct
  source 1..120: mol_type = other DNA
tgttgtgtgtgctgtgtgagtgctgatgtgtgcggtgtgctgatgtgtgctgtgtgtgctgagtgctgatgtgtgctgtgtgctgtgtgtgcactgatgtgtgctgtgtgtgtgctgtgt

SEQ ID NO: 11436 - DNA, 120 bp, synthetic construct
  source 1..120: mol_type = other DNA
gtgcgctgtgtgctgtgtgtgtgccctgatgtgtgctgtgtgtgtgccctgatgtgtgctgtgtgagtgctgatgtgtgctgtgtgtgtgctgatgtgtgctgtgtgtactgatgtgtgc

SEQ ID NO: 11437 - DNA, 120 bp, synthetic construct
  source 1..120: mol_type = other DNA
agccacggagaccagccacggagccaggcaggagccggagccgcagagacccaccacagagccaggcaggagtcggagccacggagccaggcaggaactggagccacagagaccagccac

SEQ ID NO: 11438 - DNA, 120 bp, synthetic construct
  source 1..120: mol_type = other DNA
cttcagtctgtttctcagtcacagattcaaccttgggctgcattcacttttcccagaaacccccacattgagcccttcatttaggagagcacatatgggatgctgcagaggacactatgt

SEQ ID NO: 11439 - DNA, 120 bp, synthetic construct
  source 1..120: mol_type = other DNA
gggtgttcccagggtgctgtggggctctggtctcggtgggtgttcccagggtgctgtggggctgtggtctcggtgggtgttcccagggtgctgtggggctctggtctcggtgggtgttct

SEQ ID NO: 11440 - DNA, 120 bp, synthetic construct
  source 1..120: mol_type = other DNA
ttcaaatattttatttccagttctggggctactaccaataaagctgctgccaacattcatgtgcaaggtatccacagatcctgatccacagacgtggtatgttcctccatttacttagga

SEQ ID NO: 11441 - DNA, 120 bp, synthetic construct
  source 1..120: mol_type = other DNA
ttacttagctattctcagatcctgatccacagacgcggtctgtttctccatttacttagacattctcagatcctgatccacacacatggtatgtttctccagttacttaggcattctcaa

SEQ ID NO: 11442 - DNA, 120 bp, synthetic construct
  source 1..120: mol_type = other DNA
cctgctatcaaagacctgcatacacctctcctcactgcctgagacatgcacaaacctgtccctgctatcagagacgtgcatacacttgtccctcttcctgagacgtgcacacacctgttc

SEQ ID NO: 11443 - DNA, 120 bp, synthetic construct
  source 1..120: mol_type = other DNA
gacctgcaaacatctgtccccctgcctgagacctgcacacacctgccctcagtgcccgagacttgcacacacctgtccccctgcctgagacctgcacacacctgtccccagtgcccgaga

SEQ ID NO: 11444 - DNA, 120 bp, synthetic construct
  source 1..120: mol_type = other DNA
aaatttctcctaagaatggtcagaaaggaacacttgtaactgactaaaaggccagcgtaacttttaccacatcctgaggaggacacacatgaaaggaaaatcaaacatcgtcctcctcac

SEQ ID NO: 11445 - DNA, 120 bp, synthetic construct
  source 1..120: mol_type = other DNA
tatatttacaacagcatcaaaaatatcaaatacacagaaataaatctgacatgcataactgccaagcagaaaactctggtctattgttaagagatgctgaagaagacctacgtcaatgga

SEQ ID NO: 11446 - DNA, 120 bp, synthetic construct
  source 1..120: mol_type = other DNA
attcccacaccctcccagctctttcagaggtcagtgaaggatctgtcttctctcttttctcttctctctctctcgcctctctctctgctctcttctctcttctttctcctctcatcttct

SEQ ID NO: 11447 - DNA, 120 bp, synthetic construct
  source 1..120: mol_type = other DNA
ctctcccctcttctctctctcctctcccctcctctctctctcctcttctctccctctcccctctccctctctcatcccaggaataagcttcagtgaagcctcgtctggaaaactctttgg

SEQ ID NO: 11448 - DNA, 120 bp, synthetic construct
  source 1..120: mol_type = other DNA
caccctctggagccttctcagactacgcagcccctcacgccctttctcttttcagaagtctggtgcttttctgtaattttaaagataaacagtatgaccccaaggaaagacaaacccctt

SEQ ID NO: 11449 - DNA, 120 bp, synthetic construct
  source 1..120: mol_type = other DNA
ttcaccaggaatgaaaactccaaaaatgaaattagaaagaaagttctatagactgagctgtgtgcccccaaaattcatatcctgagactctaaccctcactgtggtggtatttggcgaca

SEQ ID NO: 11450 - DNA, 120 bp, synthetic construct
  source 1..120: mol_type = other DNA
gcatggaatcctgtccatactgttttggaagaaagatcatttgcagtgaaaagcccgtcgatgttggcaaagagaaaacagcgggactgggctccagaccaactctgctccggccctttg

SEQ ID NO: 11451 - DNA, 120 bp, synthetic construct
  source 1..120: mol_type = other DNA
atggtatccagtcctgagcactggcctgcttgtgcctctgagcacccaggagaccccggacacgtggaagttgccgacgtgaaaggcatcttggcacgttcctatgttggcctcgcatcc

SEQ ID NO: 11452 - DNA, 120 bp, synthetic construct
  source 1..120: mol_type = other DNA
ccacgggtcttgttttcctctctccagccctggccttatttcccagtaactggagcccctgacgttttacttcctagattgttctcacgtctgtcgcctccactgaaggcagtttgctct

SEQ ID NO: 11453 - DNA, 120 bp, synthetic construct
  source 1..120: mol_type = other DNA
atggtgtctaagtgtgagacggtctttccccacccgccctcgctaaagagagtgtggactcttcctatgagactctcttgtttccggaagtctgtggagccctgggctcagaaaggggct

SEQ ID NO: 11454 - DNA, 120 bp, synthetic construct
  source 1..120: mol_type = other DNA
cagccacactgcaccccggcccgaggctgtgtccagccacactgcaccccggcccgaggctgtgtccagccacactgcaccccgccccgaggctgtgtccagccacactgcaccccgccc

SEQ ID NO: 11455 - DNA, 120 bp, synthetic construct
  source 1..120: mol_type = other DNA
tagaaaatctcccaagaatccaggaagttttccctccctcatattcattttgtttgaagcacagaaggttctatgacaataaatatctgcagtgggttaacaggccacgtggacaccaac

SEQ ID NO: 11456 - DNA, 120 bp, synthetic construct
  source 1..120: mol_type = other DNA
agggcttgctcttggccacatccctgcagatgctcttggcacctgtggctctcccaactcctcctgcatcccctgccttcttggggggtgccctccctgactcctgcaggactcccagac

SEQ ID NO: 11457 - DNA, 120 bp, synthetic construct
  source 1..120: mol_type = other DNA
agtgtagggcaggcttggtgcccggtgcccctggctttctgccatccttccagtgatgtccctacctggccctggggactcacaaatggggacaaggagagaagcccctgcagaccgcag

SEQ ID NO: 11458 - DNA, 120 bp, synthetic construct
  source 1..120: mol_type = other DNA
ctggcctgacacagactgtgctaagttaagggtgcatgttcttagccccagagaaatcttccattcctccaaaaggtatagtcgagaaaccaagaagccaatagagaaaactaaatagaa

SEQ ID NO: 11459 - DNA, 120 bp, synthetic construct
  source 1..120: mol_type = other DNA
gctcaatagggggcacaggaaacatggctgcaggcgagaatccatgtcccccgttcaagcagaagcaggaaataaaggtaggataagaaataaataaaattaagttaattagaacagaag

SEQ ID NO: 11460 - DNA, 120 bp, synthetic construct
  source 1..120: mol_type = other DNA
ctcacacagagcctgggccttccccacactccccacgcagagcctgggccttccccacactcctcacacagagcctgggccttccccacacagaggctaggcctccccacacttctcaca

SEQ ID NO: 11461 - DNA, 120 bp, synthetic construct
  source 1..120: mol_type = other DNA
ttcctcctccccacacagagcctgggccttcctcttccccacacagagcctgggcctccttacactccccacacagagcctgggccttccccacattccccacatagagcctgggctttc

SEQ ID NO: 11462 - DNA, 120 bp, synthetic construct
  source 1..120: mol_type = other DNA
gaaactgacaggctgaggctaaaatttgtatccacatgcaaggacccacagtgctccagacaacttcaagaaagagcacagcgggtgctctcagctctccactctaaggcttcctgttga

SEQ ID NO: 11463 - DNA, 120 bp, synthetic construct
  source 1..120: mol_type = other DNA
aattcttctaagagaaactctgcgtgtatgaaattgtgtttctcactgaagaggagactgaaaataacccctcctgccttctttcctcaaattcctgagatgacttttcaccccttctgg

SEQ ID NO: 11464 - DNA, 120 bp, synthetic construct
  source 1..120: mol_type = other DNA
actgagatctcctcactcccctcacatccaaacacactgtgatctcctcactcccctcggcacccaaacacactgtgatctcctcacagccctcagcacccaaacacactgtgatctcct

SEQ ID NO: 11465 - DNA, 120 bp, synthetic construct
  source 1..120: mol_type = other DNA
ttggcatccaaacacaccatgatctcctcactcccctcggcatccaaacacaccatgatctcctcctacaggctctttctgcacttggcttaaagccgccctctcccttctgtggcctca

SEQ ID NO: 11466 - DNA, 120 bp, synthetic construct
  source 1..120: mol_type = other DNA
gaccctttgtacacaaaacaaaagccagtggtctgatgcccatgtctgaacaattagcctgcttcctctatacccatatctcacaatccagatttattttccggaattctgttttgacct

SEQ ID NO: 11467 - DNA, 120 bp, synthetic construct
  source 1..120: mol_type = other DNA
acctccctcctaatcccaccagacaacctgcccccccgggaaccatccctcctaatcccaccagaccacctgcccgccacgggcacctccctcctaatcccaccagacaacctgcccgcc

SEQ ID NO: 11468 - DNA, 120 bp, synthetic construct
  source 1..120: mol_type = other DNA
tttgaggtctgcgggccgcgtcggttatttggggtctgtaagctatgtcggttatttggggtctgcgggccgtgttggttcggttatttggggtctgtaagctgtgttggttattggagg

SEQ ID NO: 11469 - DNA, 120 bp, synthetic construct
  source 1..120: mol_type = other DNA
tccgaccccgttctcccaaggtgagctgcccctggtcacatggggccacctactagccaggggtccaggctgaccctcggacctagttctcagcctcctcaactgcaagacagacacagc

SEQ ID NO: 11470 - DNA, 120 bp, synthetic construct
  source 1..120: mol_type = other DNA
ttcagcagcaggaggcacaaaacctcccagcggctgtcagggccgtgaaagcttaagaccccgcaggtgtgagccaagtccaaccatccaggaacattcgggactggaagctaattcaga

SEQ ID NO: 11471 - DNA, 120 bp, synthetic construct
  source 1..120: mol_type = other DNA
gggcgcgcgcccaggtcaggaggggctcaggtggccgcgcatccagcagaggaggggctcagatgggcgcatgcccaggtggggcacgctcaggtggcacctctcctcctgtccttgctt

SEQ ID NO: 11472 - DNA, 120 bp, synthetic construct
  source 1..120: mol_type = other DNA
aaaaaaaaaaaaaacttaaggtgatgctcaatcaggaaagaaaacaagccaagagtggcacttgctctccacagcgtccacgtgcgtatgtgagcgcctccagatctgcccttctcagca

SEQ ID NO: 11473 - DNA, 120 bp, synthetic construct
  source 1..120: mol_type = other DNA
tgtgtgtgtgtgtgtgtgagagcccatccaggcatgctgttcccggcgtgtgtgtgtgtgtgtgagagcccatccaggcatgctcttctcggcgtgtgtgtgtctgtgagagcccatcca

SEQ ID NO: 11474 - DNA, 120 bp, synthetic construct
  source 1..120: mol_type = other DNA
cggcagactgggcttgactcttcttgggacgctcagcagggacgagcctgagcctgcagggtttccataagcgtgtgtggactgaaatgtggatggatggacagtcagacagacggaaag

SEQ ID NO: 11475 - DNA, 120 bp, synthetic construct
  source 1..120: mol_type = other DNA
gattacaggcatgagccaatgcgcctggcctgaagagctctacagattgccggaatgtggggttttggaagctcaaaggccaataattagctactaaaacacgtgtttctttgcatttca

SEQ ID NO: 11476 - DNA, 120 bp, synthetic construct
  source 1..120: mol_type = other DNA
acatatttttatccatttaaatatatcgcactgaagagaagccgacagaccccaccagatcaggaaatccaagcaccaaagaggttgaaggacctaattggaggcaatttaatgtcctgc

SEQ ID NO: 11477 - DNA, 120 bp, synthetic construct
  source 1..120: mol_type = other DNA
cgtgtcccccatgtccctctgtgtccctccgtgtccctccgtgtcccccatgtccctccgtgtcccccgtgtccctccgtgtccctccgtgtccctccgtgtcccccatgtcccccatgt

SEQ ID NO: 11478 - DNA, 120 bp, synthetic construct
  source 1..120: mol_type = other DNA
catggagcaacatgagctttggccacacgcccctgccctgggcagctgctccacggcccctgcagagtctctcctcacactgggtgccatgttcaacacctgccacccaccactgcccca

SEQ ID NO: 11479 - DNA, 120 bp, synthetic construct
  source 1..120: mol_type = other DNA
cacaccactgcgaggccccaaagctcaagcagcgtgaatccagcgaatacaacaaggtaacatatcatgacagtttgggtgtattctggaaatgaagtttggcttaacatttgacaagca

SEQ ID NO: 11480 - DNA, 120 bp, synthetic construct
  source 1..120: mol_type = other DNA
aacaccttcattttggacttcttgactccagaactgtgaaagaatttgttattttaagccacctgcttgtaatttgtgacagcagcgcgaggatgtccaattaactgccagagccagcag

SEQ ID NO: 11481 - DNA, 120 bp, synthetic construct
  source 1..120: mol_type = other DNA
ctgagcggggaaggctctgaggggggaagactctgaaggggaggctctgaaggggaaggacatgaggggaaggatctgaggggcgaaggatctgagcggggaaggctctgaggggggaag

SEQ ID NO: 11482 - DNA, 120 bp, synthetic construct
  source 1..120: mol_type = other DNA
gggcaatgggcactcggcgggcgaggtttcacggtgcagccagcgtccgtgtgtgtgcaggcggagacggacgaggcgccacggggctcagatacaggagcgatcggtggaagcagagtc

SEQ ID NO: 11483 - DNA, 120 bp, synthetic construct
  source 1..120: mol_type = other DNA
ctggtcatggctggcactgtgatgagtgaacccaagaagacatcacagctgtgcagccagcaaattccaaggggcttaagataggccctgagactaggtccaggggtcagaggccaggca

SEQ ID NO: 11484 - DNA, 120 bp, synthetic construct
  source 1..120: mol_type = other DNA
cttcgtgaaatcaaggaaatgagcgttcccgtcacccccagtccctgtgctccttcgtgatcacaccttcctgcccctccctgagcccaggcagccgtctactgtccctgtaggttgctt

SEQ ID NO: 11485 - DNA, 120 bp, synthetic construct
  source 1..120: mol_type = other DNA
attgtctacaacttttgggagaggttgctttagggtgtatagtatgtctttaagtgatgaccttacaataatgcatttctgtttttcttatcctgattcttgtgccatcatcatcatgat

SEQ ID NO: 11486 - DNA, 120 bp, synthetic construct
  source 1..120: mol_type = other DNA
gttgtgtttggaggacgcggtagccgggaccaagagctggctcagatcagggtctggaacggggacgggccgtgcctgggcctggtccccacctttggggccaaagcctgggtgcgggcc

SEQ ID NO: 11487 - DNA, 120 bp, synthetic construct
  source 1..120: mol_type = other DNA
tggctcctcctgggctggctgtcttcctcctgtgggttctgatgccacctgggccgacggcgtcttctcagcccagggcggccgcgcctccggtgagtttcagctgagggcgcacggcca

SEQ ID NO: 11488 - DNA, 120 bp, synthetic construct
  source 1..120: mol_type = other DNA
actgcctttcatggaagcacgtcttcctgtcacccatcggcttcattttaaaggatgaaaatgtatcagacattcaaggagagctgcatcacataaaagaaagaccaggcaaagaaacgg

SEQ ID NO: 11489 - DNA, 120 bp, synthetic construct
  source 1..120: mol_type = other DNA
gcttttaaatgtatttttaaaaatacgaaccaatgagaagattgcctactttcaccgcttctgtttaacacagcattggcagagctgccaccaagaagaacacagcacgttgaaggcacg

SEQ ID NO: 11490 - DNA, 120 bp, synthetic construct
  source 1..120: mol_type = other DNA
taatgaaattacaataaaaatctttacataatttttaaaagactctgttatgagctgaaccgtgtctccctcaaattcatgcattgaagtcccaacccctaatactgtgggggtgggtgc

SEQ ID NO: 11491 - DNA, 120 bp, synthetic construct
  source 1..120: mol_type = other DNA
taaataacctcatagagcttagctctcactaagtttttggagcattttccagtaattcaaaggacctggggaaccttaagcactgcttaggatgctccataaacatcttctgcgtgggta

SEQ ID NO: 11492 - DNA, 120 bp, synthetic construct
  source 1..120: mol_type = other DNA
gtcccattcatatcttggcagagaagctccatgaagaaattgacagggtgattgggccaagccgaatccctgccatcaaggataggcaagagatgccctacatggatgctgtggtgcatg

SEQ ID NO: 11493 - DNA, 120 bp, synthetic construct
  source 1..120: mol_type = other DNA
ttcacagccatcctcatcgggtcaatccaggtgttctaagctgttctctctgggtgcaggccaggtgttcacaaccttcctcattggggaaaacccagttgttaaattttttttagtggg

SEQ ID NO: 11494 - DNA, 120 bp, synthetic construct
  source 1..120: mol_type = other DNA
catttggactgaaaagctttcccaaagctttgcactaattcaaatgtcaatctcacccagagccccctcttgcatacccagcataatgtttggccaaatgtctgtcctctgtgggcccgt

SEQ ID NO: 11495 - DNA, 120 bp, synthetic construct
  source 1..120: mol_type = other DNA
tgttactgcaggctgtgtccccaccacctgtcctgtggcagcatcggcatagctcagagcaggtgctgaataaatgctcgtgaactttggaaacttgtcaccatgcaggatgagaaaggg

SEQ ID NO: 11496 - DNA, 120 bp, synthetic construct
  source 1..120: mol_type = other DNA
aacggacaatcacccgcgtctcggctcattgctctcattccttgggaggcggaattcgtccgaattgctccgggatgaagtgacccgggccggcgatccggagggctggtgagctggtgg

SEQ ID NO: 11497 - DNA, 120 bp, synthetic construct
  source 1..120: mol_type = other DNA
ttgtagtacgtgatgaaatctccatatcctgcaatatagtacaatcaattgaaatgtataaaatataataaaatataaatttaggatgtttaaaatgaaatgaaacatgaggcaggtcaa

SEQ ID NO: 11498 - DNA, 120 bp, synthetic construct
  source 1..120: mol_type = other DNA
ggtgctcacagcttagcctcatctgatccactgacagtctcagttatctcctgcccagggaagggatgggcttctctatccagggctgattccccaggacctggcagtgtggctgggaca

SEQ ID NO: 11499 - DNA, 120 bp, synthetic construct
  source 1..120: mol_type = other DNA
attttcaggatcctgtcatggtgtccagaaaacaaagaaccgggagcacagggaccggaaaatcggggaagcatttcttcctatttctgtcccagttcctacctggaaggatttatgatc

SEQ ID NO: 11500 - DNA, 120 bp, synthetic construct
  source 1..120: mol_type = other DNA
atagtggaacgaaaaaagaattagtggtagacagacactgcctagtgaaattgtctgaaagtaaatggaacttatcataatatgatatcgttatatattataatattatgatatgaaatt

SEQ ID NO: 11501 - DNA, 120 bp, synthetic construct
  source 1..120: mol_type = other DNA
caaagttgatctacactgttagctcttaagatcttagtgactttgggggagcaaaagagagaaagtggttaccaggacatctgtgaagctggttctatttctaggttacacacgtgtgtt

SEQ ID NO: 11502 - DNA, 120 bp, synthetic construct
  source 1..120: mol_type = other DNA
aaaaaactacttcaagacacactcagctgtttgactaaaatgcagcaggagaaaatatcttctcaaaagatgtatctggatggcacttgctttcagagtaaaaggtggtttcaagcacaa

SEQ ID NO: 11503 - DNA, 120 bp, synthetic construct
  source 1..120: mol_type = other DNA
acagttgtgccctacaaaagacattaagctgaaattaattaaaaatcatttacggtcatgattaggtcataaaaaattgtcaaacataacaattcttcaaaaaaagctaaaaagtatatt

SEQ ID NO: 11504 - DNA, 120 bp, synthetic construct
  source 1..120: mol_type = other DNA
ttaatcttggcaaaataagctttctaaattgacagagacgcggcgcgccggcgcaggcgcacagaggcgcggcgcgcgggcgccggcgcacagtggcgcgtcccctggggggcgggggga

SEQ ID NO: 11505 - DNA, 120 bp, synthetic construct
  source 1..120: mol_type = other DNA
ttggggagagctgatgtcccagttcttgtttaacttggaagaaacattttcaccaagaggcaatacaaagatggcagataacttcattgaaaagaaacacagtgtaaagagtttattgta

SEQ ID NO: 11506 - DNA, 120 bp, synthetic construct
  source 1..120: mol_type = other DNA
aagaaaagctatctgcctttgggtttggtaatgaattttaacaaatgacacaaaaggtagatatacacaaaagaagtgacagtgtggatttcttaatatttaaagtttatactctggaag

SEQ ID NO: 11507 - DNA, 120 bp, synthetic construct
  source 1..120: mol_type = other DNA
tccattgtaatatgtcctgggaccatctcccccagggccttcaacctggggggttgaaccccaggatagcaaccccaagccctccttgctatcctggctactgatggaagatgtacctca

SEQ ID NO: 11508 - DNA, 120 bp, synthetic construct
  source 1..120: mol_type = other DNA
cctctggtcataatagcctctcatcaggggaaatttcccccacaccaggagcttaactttccttccctggtgatcccagggaatgctgagtggaaattggagcagctaagattaaggggg

SEQ ID NO: 11509 - DNA, 120 bp, synthetic construct
  source 1..120: mol_type = other DNA
ctaagtggacctcagacatggctcagccataggacctgccacacaagcagccgtggacacaacgcccactaccacctcccacatggaaatgtatcctcaaaccgtttaatcaataaagcc

SEQ ID NO: 11510 - DNA, 120 bp, synthetic construct
  source 1..120: mol_type = other DNA
cacccaccacaaccagcacagaccctgatcctgaccctggatcccagactctcccacagccagaaccttccagcatttcagctgcccaatctatggtctcttctgggggcacagctgagt

SEQ ID NO: 11511 - DNA, 120 bp, synthetic construct
  source 1..120: mol_type = other DNA
catggtgagggggcctggtgaggggtggtctggtgagggaacttagggaaacctggtgaggaggacctggtgaggggacatgggggggaccttggtgaggggacctggtgaggggacata

SEQ ID NO: 11512 - DNA, 120 bp, synthetic construct
  source 1..120: mol_type = other DNA
aggcaaaatccgcacccccctccacacacacacatgcattttttaaccaatttgatttgtgtgattttggttttggtgaggatgtgataaaatggctacataaaaacacagtttgtggca

SEQ ID NO: 11513 - DNA, 120 bp, synthetic construct
  source 1..120: mol_type = other DNA
tgaatggggaagggggatttatgccccccacggcgcccacatgctgagagaactctgcccttcccggtcttcccagtatcctgtaggcctggagagactcctccacccacatcacttctg

SEQ ID NO: 11514 - DNA, 120 bp, synthetic construct
  source 1..120: mol_type = other DNA
ggctccgactgcggaatttctatcaccactaccactccaagaggggcatgtggagcgtccgcagcaggaagggctctcgcacgggggcgtcttgaggacgggcagcccctcccagccccg

SEQ ID NO: 11515 - DNA, 120 bp, synthetic construct
  source 1..120: mol_type = other DNA
ccatccccagggaacaagttaaacaggaacaggatgagttaaccagtaactgccggccacagacagcactggccctgaccagatgcgaccctgagcagccgcatggatgctggcagagtt

SEQ ID NO: 11516 - DNA, 120 bp, synthetic construct
  source 1..120: mol_type = other DNA
tctgaccatgtctggatgcagtcggggggtgcccagctctgaccatgtctggatgcagtcgggcggggggggtgctcagctctgaccatgtctggatgcagtcggggaggggggtgccca

SEQ ID NO: 11517 - DNA, 120 bp, synthetic construct
  source 1..120: mol_type = other DNA
tacagtcggggggggggggtgctcagctctgaccatgtctggatgcagtcggggaggggggtgcccagctctgaccatgtctggatacagtggggggggggggtgcccagctctgaccat

SEQ ID NO: 11518 - DNA, 120 bp, synthetic construct
  source 1..120: mol_type = other DNA
ggtggggatggaggtctcgggtcccatgtcctttcccagcccgtagcagcagccacacacacctcaagtctcccaaagctcctcagtgaggtggctgcagggagaagcccagagcctctt

SEQ ID NO: 11519 - DNA, 120 bp, synthetic construct
  source 1..120: mol_type = other DNA
accttcccctgcaccctctcttctgcctgcctcctcctgcaccttctctcctccctacctttccctgtactctcgtctgcctaccttcccctgcaccctctcccctccccacctttccct

SEQ ID NO: 11520 - DNA, 120 bp, synthetic construct
  source 1..120: mol_type = other DNA
cagaagcgggtaggaaagacacagaacaggcggggcaggccctgcaggtgagcggggcacaggtgctcacacccagatgaaccgcacccgcacgtgggcacgcacacacacacacacaca

SEQ ID NO: 11521 - DNA, 120 bp, synthetic construct
  source 1..120: mol_type = other DNA
tttaattgttaaacgtaaaacaaagaaatcaatcgatggagaaaaaggcacaaagtgaaggaaatctctccagatgttacaaggaggagacatggacacgggacgcgcgggaggaaaagg

SEQ ID NO: 11522 - DNA, 120 bp, synthetic construct
  source 1..120: mol_type = other DNA
ttcaggagctgggctcactgcaggctttgctcacatgtctctagattggatttccacttgctctcagcagaaattacttttaaaattaaaagaatggacattgccactttaaaggcagtg

SEQ ID NO: 11523 - DNA, 120 bp, synthetic construct
  source 1..120: mol_type = other DNA
gtggacagacacgggacactcaccccacacatggggagacagacacgggacacgcaccccacacgtggggagacagacacagggacacgcctcacgggtggacagacacgggacactcac

SEQ ID NO: 11524 - DNA, 120 bp, synthetic construct
  source 1..120: mol_type = other DNA
cacacagccagataggtgtagcccccctgacacacacagccagacaggtgtagccaccccctgacacacacagccaggcaggtgtagcccccccaacacacacagccagacaggcctcag

SEQ ID NO: 11525 - DNA, 120 bp, synthetic construct
  source 1..120: mol_type = other DNA
ttgtctcagcctcccaaagcgttgggactacagacgcgtgcagcctacaaagttttatcagatatatgtattgtgaatattttctcccagtttgtgacttgccttttcatttctttaggg

SEQ ID NO: 11526 - DNA, 120 bp, synthetic construct
  source 1..120: mol_type = other DNA
ggcctctgctcaggccccttctcagctcttggtgtcttgggctgctgcactgaatctcagatgttatttcatgaacccaaagagttgttgtctcggcttgtcttgcgcagtgaaaagcgc

SEQ ID NO: 11527 - DNA, 120 bp, synthetic construct
  source 1..120: mol_type = other DNA
acaagaatcttaactactgcagatgcattccgtgaccttcctgaagggtgttcagaggaaggtgctgagtaactttggaaatgagcagtgtctataaggccagaggcaaaaggaatggca

SEQ ID NO: 11528 - DNA, 120 bp, synthetic construct
  source 1..120: mol_type = other DNA
tggattaccattgcacgtttagcccagaagagacaaagatggttaaacagtgtgtgcgcagtggttaatggatacacacagatcttgttgctgtacaagctgagggggcctagaaccagc

SEQ ID NO: 11529 - DNA, 120 bp, synthetic construct
  source 1..120: mol_type = other DNA
cggacatattcacacgttcgtgtacggacatattcacgcgtttatgatacggacataatcatgtctttgtgtatatggacatgttcacgcgtttgtgatacggacatattcacgagtttg

SEQ ID NO: 11530 - DNA, 120 bp, synthetic construct
  source 1..120: mol_type = other DNA
cttttctgaggcagtgtacattctgtgaattttagcatttgtgtagacttctagaaacacaattaggacgcacaagaattccactggccctaaaactcctttgtgttaccccttggtagt

SEQ ID NO: 11531 - DNA, 120 bp, synthetic construct
  source 1..120: mol_type = other DNA
atggacattcttatctgattcctgatcttaggggaaaagcatccagtctttatcccactgagtgtgttagctgtgagtttttcatagatctccttaccgagtggagaaagttctgtgagt

SEQ ID NO: 11532 - DNA, 120 bp, synthetic construct
  source 1..120: mol_type = other DNA
tccccctttgttaatatgatgaattacattgattgattttcttatcctgaaccaaccttacattcctgggataaatcctgctgggtcccagggtgtgcctttttacatactgctggactt

SEQ ID NO: 11533 - DNA, 120 bp, synthetic construct
  source 1..120: mol_type = other DNA
gtaaactgcacgggcacgtgtgcttactgtgcacaggcgagtgtaaacagtgcacgggcgcgtgtgctcactgtgtgcgcaggcgagtgtaagtgcacgggcgtgtgtgctcactgcgca

SEQ ID NO: 11534 - DNA, 120 bp, synthetic construct
  source 1..120: mol_type = other DNA
gcgagtgtaaacacagctggtgccctggtgcgtgtgtgctgtgagcacaggtgtctgtaaatgatgtaaacctcccttgacgtcaggcccaaaagcctgccttgccctaaggtcaagagg

SEQ ID NO: 11535 - DNA, 120 bp, synthetic construct
  source 1..120: mol_type = other DNA
accccaaaaattacctcctgcaaaaccttttcttagaaagctgcaaaagaacgtgctttaacaaagaaaacaaatctggaaaaacatcctgacacaggcggggttcccgcaagggagaaa

SEQ ID NO: 11536 - DNA, 120 bp, synthetic construct
  source 1..120: mol_type = other DNA
tgctcactcacgtgctcacacggacacgtgctcactctcacatgctcacggacacccatgctcacactcatatgctcacacacgtgctcacactcgcctcacccatgtgtgctcacatac

SEQ ID NO: 11537 - DNA, 120 bp, synthetic construct
  source 1..120: mol_type = other DNA
cccgttccctcctcttggcgcaggacgccccggaacccaaaccaacatttccagctctcaggtgtacagaaatgcggtttactttgtaggccacgttggttcaataaatgatgcagcgga

SEQ ID NO: 11538 - DNA, 120 bp, synthetic construct
  source 1..120: mol_type = other DNA
tttaaacatgaagaagtagccagtgggtccctaactggtgggaaacatgttgaggagggagttattccacgagcaacacccacgttgctggggcttgggagctttcgttctcattgcttt

SEQ ID NO: 11539 - DNA, 120 bp, synthetic construct
  source 1..120: mol_type = other DNA
acagtgactaaaaatccaattaaaacacaatccaaatctgacttacagtgatccaggcctcacaaatgaaaataatgatgcgtggggcttgctttaaaatgctcagccctcagcccaaag

SEQ ID NO: 11540 - DNA, 120 bp, synthetic construct
  source 1..120: mol_type = other DNA
caataatggaactgtggacagtctctcttgcgtggctgtgcaggggtgtggagggctgggaagcactgaccagcagccctcagggtttccggccaccaactgtggggcctcacatgagag

SEQ ID NO: 11541 - DNA, 120 bp, synthetic construct
  source 1..120: mol_type = other DNA
gaaaaaaagttcacttttgtagccaccagagaaaagaaaaaaaaaaaggaaaatgaaacctactgtgtctgggccaccctgaaggagtgtgaagcagtatccaccccaagccatggcact

SEQ ID NO: 11542 - DNA, 120 bp, synthetic construct
  source 1..120: mol_type = other DNA
gggtgtcacactcggtcactctaagtaagtcctggctcagctattcacactgagaggaggaggacagggtgtcacactcggtcactctaactaagtcctggctcagctattcacactgag

SEQ ID NO: 11543 - DNA, 120 bp, synthetic construct
  source 1..120: mol_type = other DNA
tttcatggcctgctgaaatatgtgtgtgaagaattatttattttcgccaaagcacatgtaataaatgctgcagcccagcctctgcccactttgtgtgtatgtgaccgcctgcttacttgc

SEQ ID NO: 11544 - DNA, 120 bp, synthetic construct
  source 1..120: mol_type = other DNA
gtgaggacagattctcttaattagggatgtcccctggcacttctgccacggagctggcctctggtcctgcacactccagacacatccaccctggctcacacacaccctggctcacatgca

SEQ ID NO: 11545 - DNA, 120 bp, synthetic construct
  source 1..120: mol_type = other DNA
catgcacccaggctcacacacccacccccagcccacactcatccccgctcacacacacccccactcacacacaccctggcccacacgcaccttggctcacgtgcaccccggctcacacgc

SEQ ID NO: 11546 - DNA, 120 bp, synthetic construct
  source 1..120: mol_type = other DNA
cagcacccccagcctccaccccagacacgaaactgtctcagggcccccagcctccaccccagacatgaggctgtctcagcacccccagcctccaccccagacacaacgaggctgtctcag

SEQ ID NO: 11547 - DNA, 120 bp, synthetic construct
  source 1..120: mol_type = other DNA
ccccagacaagaggctatctcctgaggagcctctggtgccatctcactgcctacctaatgctctgaaacggaaatgagtgtggcaaatctctggttaatagacccactctcccaggatta

SEQ ID NO: 11548 - DNA, 120 bp, synthetic construct
  source 1..120: mol_type = other DNA
aaacactgagtatccttgagtagctcaggcctttgtaatgcagagtggtgaatggtgtgaggggtgaacagcttcggagaggtcaggcatggaatgcaggggtgatgcttggctcaggtc

SEQ ID NO: 11549 - DNA, 120 bp, synthetic construct
  source 1..120: mol_type = other DNA
tgcacctttgttcttaactgtagaatggggaaaccagtgatctcaagttgggttctccaggatgtggactctgaaatgggctgtgtacagaagatttattcagagtgacaccagtgaaaa

SEQ ID NO: 11550 - DNA, 120 bp, synthetic construct
  source 1..120: mol_type = other DNA
gtgaaaagtaaagggcggaagcagatggagatgtgggtctgacagtcgccgccacctgcccatcagggagctcgggagcccagattgccggctggaggtggtggcactgggttgaaaggg

SEQ ID NO: 11551 - DNA, 120 bp, synthetic construct
  source 1..120: mol_type = other DNA
gacagaaatggaaagaatttcctaccagaaggcctgtgttaaaggaaatgccaaaggaaataatcccagatggaagcgtggaaatggaaagcatggaacgggcaggaaattaaaggaaat

SEQ ID NO: 11552 - DNA, 120 bp, synthetic construct
  source 1..120: mol_type = other DNA
agaaatcagtgcttatgtgcacctgccatgctagtgggagcccaggggagttactgggatgttcacaggtgtgccttccatctttaagcctttagaaaacaactgttgtgttctcatact

SEQ ID NO: 11553 - DNA, 120 bp, synthetic construct
  source 1..120: mol_type = other DNA
gaaagagcgagactctgtctcaaaaacaaaaacaaaaacatgctcgggaaggaggtgctgtcattggaggactgctggtgtgtgtgtcacctagaaatggaaggacagagtaggtgctga

SEQ ID NO: 11554 - DNA, 120 bp, synthetic construct
  source 1..120: mol_type = other DNA
gatttagactgtgttcttctgcctaaaagaggaggcggatcctcctcctctctgaggagtgtggcatgctgggcgccctcgtgtgtcggcatttgtagccacaagcatggaacctggttg

SEQ ID NO: 11555 - DNA, 120 bp, synthetic construct
  source 1..120: mol_type = other DNA
tccagttgctcttttctatagtctcacttctgggttgtaaagattcagatcagtgtaaaggtagcgtctccctctacagtgaacatgcgttattaaaccagaggcagcaagtgcagatga

SEQ ID NO: 11556 - DNA, 120 bp, synthetic construct
  source 1..120: mol_type = other DNA
agaaggactgggagaaaatgaggaggacagctgattagttgtggaaacaggagtggttgcagaactcaagtgggggagttgtgtggtgataggtgatgacggtggccttgagctagagtt

SEQ ID NO: 11557 - DNA, 120 bp, synthetic construct
  source 1..120: mol_type = other DNA
gtgtgtgaatgtagggatgtagaggttttggccgtgctaaatgagcttcgggattggctggtcccactggtggtcactgtcattggtggggttcctgtactggtggggttgggggtgatg

SEQ ID NO: 11558 - DNA, 120 bp, synthetic construct
  source 1..120: mol_type = other DNA
tggcatggaaagatgttgcagtgacaggacctgtggaagggacgggactccccgccgtaggcggggagtgtgtggtgtgtggggtttggggcgttgtgtattcagtagtcgttcttgttt

SEQ ID NO: 11559 - DNA, 120 bp, synthetic construct
  source 1..120: mol_type = other DNA
tcaggagaacagccttgaggtttgggttcaggtcactaattcattcaacaaacactgatgagcccccaccattccccccataggcaaggggtttcagttatccctttgcctgtgtgtccc

SEQ ID NO: 11560 - DNA, 120 bp, synthetic construct
  source 1..120: mol_type = other DNA
aggctttcaggcatgggcaggcaggtagaggcccttgaggaccgaggcacagaggctggggtgagtgcctctacctggaccagcaaggggcactggcaggaggtggggtagggcccctga

SEQ ID NO: 11561 - DNA, 120 bp, synthetic construct
  source 1..120: mol_type = other DNA
tgtgtgccatggcacctgctccatttacgggagtggccactacatcacctttgacgggaagtactacgactttgacggacactgctcctacgtggctgttcaggtgtggtcacgggcact

SEQ ID NO: 11562 - DNA, 120 bp, synthetic construct
  source 1..120: mol_type = other DNA
ccaggactactgcggccagaactcctcactgggctcattcagcatcatcaccgagaacgtcccctgtggcactacgggcgtcacctgctccaaggccatcaagatcttcatgggggtgag

SEQ ID NO: 11563 - DNA, 120 bp, synthetic construct
  source 1..120: mol_type = other DNA
tgtgatgtctctgttgggttcatttgcaagaatgaagaccagtttggaaatggaccatttggactgtgttacgactacaagatacgtgtcaattgttgctggcccatggataagtgtatc

SEQ ID NO: 11564 - DNA, 120 bp, synthetic construct
  source 1..120: mol_type = other DNA
agctaacatctcttgcagagccaccatgtatcctgatgttcccattggacagcttggacaaacagtggtgtgtgatgtctctgtggggctgatatgcaaaaatgaagaccaaaagccagg

SEQ ID NO: 11565 - DNA, 120 bp, synthetic construct
  source 1..120: mol_type = other DNA
ggctcaaggcacgttctgggcgcctctctgcccacgaagcttggtcactgtgtgggcagaagccactgacactggccagtgctgggcagtgaagccaaaggccattccgcttgcccatag

SEQ ID NO: 11566 - DNA, 120 bp, synthetic construct
  source 1..120: mol_type = other DNA
gatccttccacaaattctgaattctggggagtgagggatggacatgaaaacctggagcctcaaagattgaggaatgaggtcatctaagtcctggatggctgagttggcatggacaccacc

SEQ ID NO: 11567 - DNA, 120 bp, synthetic construct
  source 1..120: mol_type = other DNA
tgtggatgattccttagctaaattctgtacaaacctgagaggcctgagtggagaatttgccacgtgccaagcccctgcttgtcgatgctggtgagcaggtaatggctttgtgatatcagt

SEQ ID NO: 11568 - DNA, 120 bp, synthetic construct
  source 1..120: mol_type = other DNA
aaggtgggggcaggcctgggctgggactagataagtgaggctcaggccgtcatctccgtctcccccacggggcttgcagatgctaacacccctccgcccactgacggatttgatgcagtg

SEQ ID NO: 11569 - DNA, 120 bp, synthetic construct
  source 1..120: mol_type = other DNA
ctatgctggctctgtgcagggctgtgcggggctgggccgggctgaaatctggtgacattctgcacattagcacagtctctatggaccctgaagatcagcctcctgcagggtctgctgctt

SEQ ID NO: 11570 - DNA, 120 bp, synthetic construct
  source 1..120: mol_type = other DNA
gcagcccagaagtgccccaacaacatgcagtaccacgagtgccgctccccctgcgcagacacctgctccaaccaggagcactcccgggcctgtgaggaccactgtgtggccggctgcttc

SEQ ID NO: 11571 - DNA, 120 bp, synthetic construct
  source 1..120: mol_type = other DNA
acagactgcaccaactggtaggtcccagcccccctccaggccaccaaggatgtgctatgggacagacctgctgggggttgcaacccaggccggcaggctccctcgtctgggctacggtgt

SEQ ID NO: 11572 - DNA, 120 bp, synthetic construct
  source 1..120: mol_type = other DNA
cacgatgagaccctgcacccaacacacagtttctccacgatgagaccctgcacccaacacacagtctccccaagatgagaccctgcacccgacacacagtctctgcacgatgagaccctg

SEQ ID NO: 11573 - DNA, 120 bp, synthetic construct
  source 1..120: mol_type = other DNA
gttgacatcagcgaccctcgtggtggtgaaattccacgtttaagacagatgtgcagtgtcttgttcctgccaggaagtttcacgcagacagctccactgccctgaaaccccttggagctc

SEQ ID NO: 11574 - DNA, 120 bp, synthetic construct
  source 1..120: mol_type = other DNA
ccattcacccactcactcacctcactcactgactcaactattcactcacccattcgctcactcactcacctcactcactcgcccactcacccactcacgctttcacccactcacctactc

SEQ ID NO: 11575 - DNA, 120 bp, synthetic construct
  source 1..120: mol_type = other DNA
tcactcacccactcaccgactcaaccattcactcacccattcacccattcactcactcgcccactcacccactcacccattcacccactcacctactcactcacccactcacccattcac

SEQ ID NO: 11576 - DNA, 120 bp, synthetic construct
  source 1..120: mol_type = other DNA
cattcacccactcacccactcactcacccattcacccactcacccactcactcacccactcatccattcactaactcacccattcacccactcacccactcaacactcactcacccactc

SEQ ID NO: 11577 - DNA, 120 bp, synthetic construct
  source 1..120: mol_type = other DNA
tcagactgcccagagaagctggccacccaaaccccacaccagaggccaagctgggtgggatgagtgtgctgcctgatcttaatcctaaccctatccctcctctgtccacagagaagtatg

SEQ ID NO: 11578 - DNA, 120 bp, synthetic construct
  source 1..120: mol_type = other DNA
ttcatgcacacactcacactcatgcacatgctcacacacccactcatgcacacgcattcacaccctcatgcacacgcactcacacccacttatgcaacactcacacacccactcatacac

SEQ ID NO: 11579 - DNA, 120 bp, synthetic construct
  source 1..120: mol_type = other DNA
gtgggcagtggtgagcctctgacacattaggccatgggctgccccacgtcccagaggacccctgcccatgcgctcccggactccctggtcctgtggtccctccactgtggtgtgggtgag

SEQ ID NO: 11580 - DNA, 120 bp, synthetic construct
  source 1..120: mol_type = other DNA
catcggggctctgctacaactaccagatcagggtccagtgctgcacgcccctaccctgctccacctctagcagtccagcccagaccactcctccaactacctccaagaccactgaaaccc

SEQ ID NO: 11581 - DNA, 120 bp, synthetic construct
  source 1..120: mol_type = other DNA
ccggtgcacctggacaaagtggttcgacgtggacttcccgtcccccggaccccatggtggagacaaggaaacctacaacaacatcatcaggagtggggaaaaaatctgccgccgacctga

SEQ ID NO: 11582 - DNA, 120 bp, synthetic construct
  source 1..120: mol_type = other DNA
gactccacatccaaccggagctcagacccagaccaccttcaccacacacatgccctcggcctccacagagcaacccacggcaacctccaggggtgggcccacagcaaccagcgtcacaca

SEQ ID NO: 11583 - DNA, 120 bp, synthetic construct
  source 1..120: mol_type = other DNA
tcctggaactactcccagtgctgttcccaccaccagcataacctctgcacctacaaccagcacaaactctgcccctataagcagcacaacctctgccactacaaccagcagaatctctgg

SEQ ID NO: 11584 - DNA, 120 bp, synthetic construct
  source 1..120: mol_type = other DNA
ctacaactagcacaacctctggtcctggaactactcccagccctgttcctaccaccagcacaatctctgttcctaccaccagcacaacttctgcttctacaaccagcacaacctctgctt

SEQ ID NO: 11585 - DNA, 120 bp, synthetic construct
  source 1..120: mol_type = other DNA
cagcacaacctcggctcctacaagcagcacaatctctgctcgtacaaccagcataatctctgcccctacaaccagcacaacctcttcccctacaaccagcacaacctctgctactacaac

SEQ ID NO: 11586 - DNA, 120 bp, synthetic construct
  source 1..120: mol_type = other DNA
aatccctgcttctacacccagcacaacctctgcccctacaaccagcacaacctctgcccctacaaccagcacgacctcagctcctacacacagaacgacttctggtcctacaaccagcac

SEQ ID NO: 11587 - DNA, 120 bp, synthetic construct
  source 1..120: mol_type = other DNA
aacctctggtcctggaactactcccagccctgttcccaccacaagcacaacctctgcttctacaaccagcacaatctctctccctacaaccagcacaacctctgctcctataaccagcat

SEQ ID NO: 11588 - DNA, 120 bp, synthetic construct
  source 1..120: mol_type = other DNA
gaccagcagggacccttcaagatgtgcctcaactacgaggtgcgcgtgctctgctgcgagacccccagaggctgcccggtgacctctgtgaccccatatgggacttctcctaccaatgct

SEQ ID NO: 11589 - DNA, 120 bp, synthetic construct
  source 1..120: mol_type = other DNA
aagaagaacttgcagaaataaatggatgatgccatctggacccccaccccccgcccccaagcacacagaatgtgtggaaggagcccgtccggggatacaggagggcggccacacaccagt

SEQ ID NO: 11590 - DNA, 120 bp, synthetic construct
  source 1..120: mol_type = other DNA
cctcacaaagccgaccacaacagccactacgactgcgtccactggatccacggccaccccgacctccaccctgagaacagctccccctcccaaagtgctgaccaccacggccaccacacc

SEQ ID NO: 11591 - DNA, 120 bp, synthetic construct
  source 1..120: mol_type = other DNA
cctggacttcggccacctcgggcatcttgggcaccacccacatcacagagccttccacggtgacttcccacaccctagcagcaaccaccggtaccacccagcactcgactccagcccttt

SEQ ID NO: 11592 - DNA, 120 bp, synthetic construct
  source 1..120: mol_type = other DNA
ctgtccacacctccacagtgcttaccaccacggccaccacaaccggggccaccggctctgtggccaccccctcctccaccccaggaacagctcacactaccaaagtgctgactaccacaa

SEQ ID NO: 11593 - DNA, 120 bp, synthetic construct
  source 1..120: mol_type = other DNA
ttgggccaggtcgtggaatgcagcctggactttggcctggtctgcaggaaccgtgagcaggtggggaagttcaagatgtgcttcaactatgaaatccgtgtgttctgctgcaactacggc

SEQ ID NO: 11594 - DNA, 120 bp, synthetic construct
  source 1..120: mol_type = other DNA
accggctccaccaccaacccctcctcaactccagggacaacacccatcaccccagtgctgaccagcacggccaccacacccgcagccaccagctccaaagccacttcctcctccagtcca

SEQ ID NO: 11595 - DNA, 120 bp, synthetic construct
  source 1..120: mol_type = other DNA
tccgtcctgatcgctttgccccacagggtctttgctgagtgccacaaccttgtgcccccgggcccattcttcaacgcctgcatcagcgaccactgcaggggccgccttgaggtgccctgc

SEQ ID NO: 11596 - DNA, 120 bp, synthetic construct
  source 1..120: mol_type = other DNA
tggaaaacatcccctgctgctcccagatgccttagagacagagtcaggcagggggcgcatccctggccacgcctggccccgcatccccacctggccccgccaccgagccccacccatccc

SEQ ID NO: 11597 - DNA, 120 bp, synthetic construct
  source 1..120: mol_type = other DNA
tgaagcccctgaaagcaagtcttatttgtgaggtccacggcgattcttctgcctgctgtatttgtgcatttctatgaaagccgcgtggctcacagtgtgtctcctttccctgcatttcta

SEQ ID NO: 11598 - DNA, 120 bp, synthetic construct
  source 1..120: mol_type = other DNA
tctacgaaagcctgcgtggctcacagtgtgtctcctttccctgcatttctacgaaagcctgcgtggctcacagtgtgtttccttttcctgcagtcttacagacggttttcgtgtgatcaa

SEQ ID NO: 11599 - DNA, 120 bp, synthetic construct
  source 1..120: mol_type = other DNA
gaaaaccctctgctgatatacttcaaatgtttccacatgaaacagctgaaattcaaaagtatcccagaagaacgcaggaagtaaatcgattccaaacaaccacgaaagacctccccactc

SEQ ID NO: 11600 - DNA, 120 bp, synthetic construct
  source 1..120: mol_type = other DNA
ctgggcagttgttttcaggaaataccgagtggaacctggaaccctcggtgtgtcggacgtgagcttaggcaaagtgcacgtgctgaggccgccagaacgcctctgccatgcacaccagaa

SEQ ID NO: 11601 - DNA, 120 bp, synthetic construct
  source 1..120: mol_type = other DNA
agctggaggcagatgtggaggggaaggaagctggtctgagatggggtctgtttagaaagttgagcaggacgggcagcgatgggctgtggtgtgcaggtccctggagatgggccatggaga

SEQ ID NO: 11602 - DNA, 120 bp, synthetic construct
  source 1..120: mol_type = other DNA
tttagaaagttgagcaggacgggcagcgatgggctgtggtgtgcaggtccctggagatgggccatggagatgggtcctggagatgggtcctggagatgggcccctggagatgggccatgg

SEQ ID NO: 11603 - DNA, 120 bp, synthetic construct
  source 1..120: mol_type = other DNA
tgtatgaagggcacaaggacgctttgggggtgtcaggtatgatggccctcaggtcatggtttcacacgcgtgtgctttaaatgcgtgctggctgtcacgtgtcagtcgtgcctccacaga

SEQ ID NO: 11604 - DNA, 120 bp, synthetic construct
  source 1..120: mol_type = other DNA
cgtgaaagcacccagcgtagtcatgctgctgtgtgcgatgggtgctgggcccgcagacttcggtgcttcaaaggcctcactgctgagcacgagacgccgcttttgatgtcgtcaggctct

SEQ ID NO: 11605 - DNA, 120 bp, synthetic construct
  source 1..120: mol_type = other DNA
ctggcatccgggccctcatcttgccctcccaaaaagagctctgccccctgtgctgccccatcctgtggggaacgtggccttggtcaccagccttaacagcagtcctgcggtgggtggagt

SEQ ID NO: 11606 - DNA, 120 bp, synthetic construct
  source 1..120: mol_type = other DNA
tgcttgtcaggatagtttctgctggctggtcattgaggtcactgttcttctattgtacccacgctgctgttcagccaatccactgaattaatttcgttcatctttttctccaatgaaata

SEQ ID NO: 11607 - DNA, 120 bp, synthetic construct
  source 1..120: mol_type = other DNA
ctgcttctctgttggctgtttcttctcttgagagtgggtcacctgtgtcctgcttctgttgtctgtttcttctcttgagagtgggtcacctgtatcctgcttctgttggctgtttcttct

SEQ ID NO: 11608 - DNA, 120 bp, synthetic construct
  source 1..120: mol_type = other DNA
ccaggcttcagaaacggcagaaccagggaccctccccactgtcctgtccttagcgtcttgaggctaggggtgagttcgagacctcgtaaatacttcagtgcagagccttcagttaggagc

SEQ ID NO: 11609 - DNA, 120 bp, synthetic construct
  source 1..120: mol_type = other DNA
gtgcatgtgcactcggtgtgtgggtgtgtgcacatgggtgtgtgtgcactgagtgtaggcacaggggtgtgcacgcatggaggtatgcacacacctaggggtgtacacaggtgcatgtct

SEQ ID NO: 11610 - DNA, 120 bp, synthetic construct
  source 1..120: mol_type = other DNA
ggtgtctgggcgcacctaggattggggtcccctgtgataacctgatccccccatggttccaacatgccccaacatggaatggcacatgagtgcgcctgaggacctttgatggtaggaaag

SEQ ID NO: 11611 - DNA, 120 bp, synthetic construct
  source 1..120: mol_type = other DNA
gtggctgaaggctgaagggaggggatttgggtgccttgggatggggagagggcgaggggggccacagagacctgagaagcccaaagggccggcgtggagggaagacacagctttgcaggg

SEQ ID NO: 11612 - DNA, 120 bp, synthetic construct
  source 1..120: mol_type = other DNA
gtctcctgcaggtacctggtgctagaacacgtgtcaggtggtgagctcttcgactacctggtgaagaaggggaggctgacgcctaaggaggctcggaagttcttccggcagatcatctct

SEQ ID NO: 11613 - DNA, 120 bp, synthetic construct
  source 1..120: mol_type = other DNA
accccattagctacccctcaagtgcaccgtccccccattagctacccctcaagtgcaccatccccctcattagctacccctcaggtgcatcatcccctcctcattagctgcccctcaagt

SEQ ID NO: 11614 - DNA, 120 bp, synthetic construct
  source 1..120: mol_type = other DNA
aagagtcacagagggatgaggggatggaggggatggagggcatggagggatggacagaagggatggtgggtcatggagagtcacagaggcatggaggaaatggagggatggagggataga

SEQ ID NO: 11615 - DNA, 120 bp, synthetic construct
  source 1..120: mol_type = other DNA
acagagcacatcaaaagaggtagggcacccagcgcaagggaggtgatgggctggtcagcaggacatcaagccggttctggaccctgctctgaggacggtccctgacccagcctctgagga

SEQ ID NO: 11616 - DNA, 120 bp, synthetic construct
  source 1..120: mol_type = other DNA
tggcgtgggcacctttgggacggggtgtgtgtggcgggcaggcctgggctgcagtcatcctggtgcgtgctggtagagttggggtctgtccgctggcgtgggcacctttgggatggggtg

SEQ ID NO: 11617 - DNA, 120 bp, synthetic construct
  source 1..120: mol_type = other DNA
cgctggtttcttggcaactgctaagatttgtaagggcagggaggagatctcactcctccgtctttgggtccctagcacctgacaaaataaactgctggctaaggaaagatggagggaggg

SEQ ID NO: 11618 - DNA, 120 bp, synthetic construct
  source 1..120: mol_type = other DNA
atctggtctcccgacaccccttcccgggagcgagacctcaggcccagtcttcactccccagctgtgaaatgggtgagaacagagggtggctgagactcagggctgttcagggtggggtgg

SEQ ID NO: 11619 - DNA, 120 bp, synthetic construct
  source 1..120: mol_type = other DNA
actcaagtccaggccaatttgactcaaagtccaagggagaagagaaagaggggggtggggagtgccaaattcctttattttgccaattgtttctcagccaattcgtttttaatacttttt

SEQ ID NO: 11620 - DNA, 120 bp, synthetic construct
  source 1..120: mol_type = other DNA
agagaaagagagaaagagagaaagagagagagaggccgtggatgctctttctcctgaggaatgaaatggtttctggaaaatgctggtctcctgagctggctcagggcctcaagcctggga

SEQ ID NO: 11621 - DNA, 120 bp, synthetic construct
  source 1..120: mol_type = other DNA
tttgaagggcccagacccaacctgctccagcctgtggaccacccaggcgggcacagtgctgcctgagggggctggcgtttcaccggggcctcaggactcctgggggagctgcccggtcgg

SEQ ID NO: 11622 - DNA, 120 bp, synthetic construct
  source 1..120: mol_type = other DNA
cctctcaggcagtggggagcgggactcagacccacacctcgaccaagcatcctgctgggggcgcagcctgagggcactgccctgcccaggcctgccaggccccaccaggccccgcagtga

SEQ ID NO: 11623 - DNA, 120 bp, synthetic construct
  source 1..120: mol_type = other DNA
tggcaggtggggctagttctggagggaaagcggcctcgtgcctcccagagtcaccccgaaatcattaacggggagacaagcacacagagcagctggccgattgcagctctgaaggtcaga

SEQ ID NO: 11624 - DNA, 120 bp, synthetic construct
  source 1..120: mol_type = other DNA
aagtacagcacccacaaggcaggtgcctgggagggagacacacctgtcccctgcctgaagtttctcagcaggattttgggcacaaggtgggtagtgagctggtctcagcactgagcttgc

SEQ ID NO: 11625 - DNA, 120 bp, synthetic construct
  source 1..120: mol_type = other DNA
aaaggagaagccagtgaatcaatgtgttacttgaacaaatatagggtctagggctggccaaaagggacagtgaagttggcttctcaggccacagtaggccttcacggtactcagcaggag

SEQ ID NO: 11626 - DNA, 120 bp, synthetic construct
  source 1..120: mol_type = other DNA
gtgtgggctcaggaagggaaggaatgtgaccaaggctgggtgtggctggggagagcacagccagttgtgggtttttcttggggcccagatagatgtgagcagagctggaggcccctctct

SEQ ID NO: 11627 - DNA, 120 bp, synthetic construct
  source 1..120: mol_type = other DNA
aggacgatgcttggtcttgcctcaggagcattgctggcacctctcatgtgctcctgggcctctccccaaccctcaccttggcatcccccaatatccaaacaatagtccacaaaacaagct

SEQ ID NO: 11628 - DNA, 120 bp, synthetic construct
  source 1..120: mol_type = other DNA
tcagtttccccctctgtaaaataggaggcatcacccagccttgcacgtctccagtgtccctcagaacggctctggccccgcagctggggtctgaagagcagagccctgagctctgagatc

SEQ ID NO: 11629 - DNA, 120 bp, synthetic construct
  source 1..120: mol_type = other DNA
ccgaaacatgcacacgctctcctcttccctgcttaatcctcttgagtcttcaggcctcaacccacgcttcccctgaacatcctcctcagagcagttgcgcgctctaaatcaggaccacct

SEQ ID NO: 11630 - DNA, 120 bp, synthetic construct
  source 1..120: mol_type = other DNA
ggtgttaaaatcccaaaaaaccctaagataaagcaagtgtgaaagtaagatttttaaaccatttatggttccggttggaagcagtttctgttctgcctggcaggaatttgggagggtgac

SEQ ID NO: 11631 - DNA, 120 bp, synthetic construct
  source 1..120: mol_type = other DNA
gcgtgctggtcttcatcgtggtgggcctggccatggtgagggctccccgctttgggcccactcacctgaccctctcactgggcaaggccacctgggcggtaccatctgtgcttaagccct

SEQ ID NO: 11632 - DNA, 120 bp, synthetic construct
  source 1..120: mol_type = other DNA
ttgggccacgtcatgcgcagacaccacccctggcctggtaggagccagcatctggttcccagcagcagcttggaaacccagcgacagaaggggcaggaactgcaccctgagtctgcagaa

SEQ ID NO: 11633 - DNA, 120 bp, synthetic construct
  source 1..120: mol_type = other DNA
gacatgatatttgggatttacttccaattaattcaggggagagcatgaaggtgggtgcattgctgtgctgtgggtatatggggtgtactgtactttgatatatgtttgaactttgccata

SEQ ID NO: 11634 - DNA, 120 bp, synthetic construct
  source 1..120: mol_type = other DNA
caaggttttactaaatacagccattctttgaataattatcgagcaccttcaagggcaacactatggtcagtgaggacacagcagcaaacaaaacagaatatgagagtgaccagctagaga

SEQ ID NO: 11635 - DNA, 120 bp, synthetic construct
  source 1..120: mol_type = other DNA
ttcttagtctgtgagtgccaccatccactcatctatacaccagtctcatctatacaccagtctcccgctcccttgtatccctccatctatacatacatacatctcccttccaggcatcca

SEQ ID NO: 11636 - DNA, 120 bp, synthetic construct
  source 1..120: mol_type = other DNA
acactcagacacatctgaggtggtattcaaataatgtctgaaacactgatatggaacagacactcaccaatccaaatgcaatacaggtgtgtaccagggactatcactctgtgtgccaac

SEQ ID NO: 11637 - DNA, 120 bp, synthetic construct
  source 1..120: mol_type = other DNA
catcctacaggtctgagagtcaccgtctcgcgggtggagagcctgggtggtgcgtttatcaacaggaccgctggtttcatgtctctgtctctcctcatagacccactcaggtggagacct

SEQ ID NO: 11638 - DNA, 120 bp, synthetic construct
  source 1..120: mol_type = other DNA
caccaagtcaaagaagccagataccaaaggccacatcttgtccgcttccacgcccacgcagtgtccaggacgggcaggtctggacacggaacgcagactggtgcttgccagggcccggcc

SEQ ID NO: 11639 - DNA, 120 bp, synthetic construct
  source 1..120: mol_type = other DNA
tcctgtgggaggggaagggaacggtctgatcagggtgaccctaacagaagagtattattctaaacacctatctcataaatcacttacaagtatataaaacaaccacaaagagcctctcta

SEQ ID NO: 11640 - DNA, 120 bp, synthetic construct
  source 1..120: mol_type = other DNA
tttaaatctactccgcttctcctctgtgtttctagtttaaagaatggaaacctgggtgtcatccttgatttttccctctctcacgtcccctatagcccatcagacatcaagtcttgtaaa

SEQ ID NO: 11641 - DNA, 120 bp, synthetic construct
  source 1..120: mol_type = other DNA
gtcctcactgccattctcccatcagacatcaagtcttgtaaattccacctcctacctctgtctgtactcactgccattctcccatcagacatcaagttttgtaaattccaactcctacct

SEQ ID NO: 11642 - DNA, 120 bp, synthetic construct
  source 1..120: mol_type = other DNA
caacggtcctgtgagttgtaaatgaagagattaaagcccagaaaggagatgcacttaaccaagtttatatagctaattcggctctgggttccgggaatagtgttctttctttctctctct

SEQ ID NO: 11643 - DNA, 120 bp, synthetic construct
  source 1..120: mol_type = other DNA
aagtaaaaactactaagttaattgtttccaggagggcagctgtcaagttactttgtatcttgtggcaaccaaatctggcttgagttccataaagccagctctggtgagttgctggaaatg

SEQ ID NO: 11644 - DNA, 120 bp, synthetic construct
  source 1..120: mol_type = other DNA
ctccttgcctgtaggcaggcagtctattctactgttactctcctatcatactttatatgtctcagttatcttgctgcattgtggttgctttgtatgtgattgccacacaagattggaagt

SEQ ID NO: 11645 - DNA, 120 bp, synthetic construct
  source 1..120: mol_type = other DNA
taaggacaagaccagcggctaatccaatccagttcactctaaataaggagaagctaaaagataaagaaaaggtatcaaaagaggaagaagagaaggagaggaacacagcagccatggtgt

SEQ ID NO: 11646 - DNA, 120 bp, synthetic construct
  source 1..120: mol_type = other DNA
ttctgtacacaaaaaagggttaattattgtatgtataattttatctcagcaaacctgccttaaaaactgattgcagggaggccgaggtgggtggatcatgaggtcaggagatcgagacca

SEQ ID NO: 11647 - DNA, 120 bp, synthetic construct
  source 1..120: mol_type = other DNA
ctatgggctactcgatgtgctcgcaaccggtatgaagtagtaaaaaggcggacaatcactagtctcctgggattcatattctaacatcaaataattgtttaaggtcctataaacacaggt

SEQ ID NO: 11648 - DNA, 120 bp, synthetic construct
  source 1..120: mol_type = other DNA
aagtctaccataaggcagagtgctccaaaaaagccatagataacatcaattctgttgtcagaacaggccaacttcatgacatcctggtggagacagtaggaatgggataattggtttttc

SEQ ID NO: 11649 - DNA, 120 bp, synthetic construct
  source 1..120: mol_type = other DNA
tacgcatctgatttcattttttcctgtaaaatattagtaaacgctggtcaattaactggaatcttctatttcttgctctcagatctatgttctgaccttcagttctatgtgattaattgc

SEQ ID NO: 11650 - DNA, 120 bp, synthetic construct
  source 1..120: mol_type = other DNA
tttctgtaatgttagtttgattattctgtcttaagaaaggtcatgatgccccactccacctcaactgtcaaacatctttattgacatgcaaagacctgctctctgcccagtcaggctaga

SEQ ID NO: 11651 - DNA, 120 bp, synthetic construct
  source 1..120: mol_type = other DNA
tgcaagcataaatgcaaaggcatatattaacaacaatcacaggggtataatagttactgagcaaacaaacagtatacataaaaagataagtcaaaaagggaaatgtataaatgcatgaag

SEQ ID NO: 11652 - DNA, 120 bp, synthetic construct
  source 1..120: mol_type = other DNA
aaaatagaattgctacacctgactaaaccttgaattcctaaagcttggaacactttcccttccttaagaaccatccttgctactcagctgcaatcaatccagcccccaggtcttcactga

SEQ ID NO: 11653 - DNA, 120 bp, synthetic construct
  source 1..120: mol_type = other DNA
gtaatgaagcattagcagcattttatatgtgtccagctgatataggaatagccttagcaatgtatgtttggccaccaaagttccccactttgactgagccaatatatgccttctgcctgc

SEQ ID NO: 11654 - DNA, 120 bp, synthetic construct
  source 1..120: mol_type = other DNA
atactctaagactattggtcaagtttgccttgtcaaggctattggtcaaggcaaggctggccaacccatgggtggagtttagccagggaccgtttcagacagatatttgcattgagatag

SEQ ID NO: 11655 - DNA, 120 bp, synthetic construct
  source 1..120: mol_type = other DNA
gttttgcttttggttagtttgtttttgtttttctctgaaagtgatccatgatctctaaccttgctagattataatgccagaagctctggaattctggcttatcggaggcaagctgtatct

SEQ ID NO: 11656 - DNA, 120 bp, synthetic construct
  source 1..120: mol_type = other DNA
tagaggtctttcttccaaccagatttctcctgcaccttttactcccacttgcagaactcccatgtacaagtttctttattgcctagttcttttatttgctcatcaaaacccacatctaac

SEQ ID NO: 11657 - DNA, 120 bp, synthetic construct
  source 1..120: mol_type = other DNA
ctcttaagaggcagggactgttttattgactaatagtccacacactgtgacagctgggatgtcactgtagtttagacatctttatctgtaactcagtgctgtttctgacatattggccac

SEQ ID NO: 11658 - DNA, 120 bp, synthetic construct
  source 1..120: mol_type = other DNA
aaaagagcccttcagacaagatgggccacaatattccagagtcccactcagcacgcaccaccaccaccaccctcggccgcagcgttcagcaccctccgccaacacacacaagctcccaaa

SEQ ID NO: 11659 - DNA, 120 bp, synthetic construct
  source 1..120: mol_type = other DNA
gctatctgcccccacacacccagtgtacactggtgaggcggagacaggaaattttataaaataatagaaccaaagcacagatttgatatgggagacgaaggacaatggttattgtttttt

SEQ ID NO: 11660 - DNA, 120 bp, synthetic construct
  source 1..120: mol_type = other DNA
aattttctggggccctgttttagttagtgtaggctcttataacaaaataccataaactagatggttgacaatgacagaaactcacagttctgggggttggaagtccaagatcaaggcacc

SEQ ID NO: 11661 - DNA, 120 bp, synthetic construct
  source 1..120: mol_type = other DNA
agcttcagatactctatgcccagagatagtgcacttggcagctgtcagataccattcatctacttctctgtaaaatgtctgttctacttcacacagtggtcgagaggctaaaataaaatg

SEQ ID NO: 11662 - DNA, 120 bp, synthetic construct
  source 1..120: mol_type = other DNA
taacttacaaatttcctacatccttatattttaagtgtaaatgttgtaagcaaagtatagctggattttttttaaatccattctgaaaatcattgacttctaacaagtgagattagtata

SEQ ID NO: 11663 - DNA, 120 bp, synthetic construct
  source 1..120: mol_type = other DNA
attgaggaccaataccagtcaactggtggtagctgactaatgtattgtgttaggaaggatttacaagcaatatcaaggatcaggaaatgagaagactaggatctagtggcaatgtctgcc

SEQ ID NO: 11664 - DNA, 120 bp, synthetic construct
  source 1..120: mol_type = other DNA
ttgaaaccatttagttcatttattggctcataggttatttcctacctccctatctgtaatgtcagctctatgagagcttggaaccccagtttcatgttcaatgctgtgtctccagtgcct

SEQ ID NO: 11665 - DNA, 120 bp, synthetic construct
  source 1..120: mol_type = other DNA
attataatgaagaatatactgcacaccatttgaataaggcatagttggtacagtggcttgctggagtctctggaagaagtcttgcctttggtcttctctccttcatttcctgccagagaa

SEQ ID NO: 11666 - DNA, 120 bp, synthetic construct
  source 1..120: mol_type = other DNA
taaactgagttccaaccaaggaatgtgactaggactgtgctagctcaaggcctggtctataaaatctcccttgttattcaactccgtgatcatttcttttctgcagcatggatgctaaca

SEQ ID NO: 11667 - DNA, 120 bp, synthetic construct
  source 1..120: mol_type = other DNA
aaagtataataaaaaaaaattaaaaaaaaattaaaaaaaaaaaagaaagaaaatacaatgtggtctcaggagaaaagagaactagaaactggaaagccatcaggatccaggacaggtact

SEQ ID NO: 11668 - DNA, 120 bp, synthetic construct
  source 1..120: mol_type = other DNA
atacatgtatctgtatattttcacatctcagagagattaagactcagtgggacacaacttacttagggagaacatcgtgacaaagggtctgtgctattccacaggaacagggccactgga

SEQ ID NO: 11669 - DNA, 120 bp, synthetic construct
  source 1..120: mol_type = other DNA
catcaggaaatgcagtttgagagaaaacatgaagacgaagggaaaggcacatggatatccaaaagaagagcatttcaaacaagggaaacagcaaatgcaaaggcactgaagtgggaacat

SEQ ID NO: 11670 - DNA, 120 bp, synthetic construct
  source 1..120: mol_type = other DNA
ggattcatcagtatattctttctacccacagcaccacaagttaacttaattcaagccattaacgtgaacggatatgtttgctggaacttctgggaaagaatcttgggagtgaggctggaa

SEQ ID NO: 11671 - DNA, 120 bp, synthetic construct
  source 1..120: mol_type = other DNA
ccaggccatagttttcttcacaaagagccaagcctcttagttcctggagtgggcaaggcaaattccagcttccaagctttatctagaaacatgaacaaatcttaatttttcagggcttta

SEQ ID NO: 11672 - DNA, 120 bp, synthetic construct
  source 1..120: mol_type = other DNA
tcttgacaacagagataaattatccctagactaaagactgctccagacctgccctacttaagcttaaaagcaagtctcaaaaggcttcatctgatttcaagcaacttaactgcatgccag

SEQ ID NO: 11673 - DNA, 120 bp, synthetic construct
  source 1..120: mol_type = other DNA
accaaagaagagctgcatttgatataccaaccagagtggaagtgtggcaagaacacatgcttggaatcaaacagccttagatttagattttaagcaagttagctactccacatccctgca

SEQ ID NO: 11674 - DNA, 120 bp, synthetic construct
  source 1..120: mol_type = other DNA
ttgtatgattccacttacgtgaaatgtccagaaaaggcaaatatacagatacagaaagtagattactggttgcttgaggctgggactgggaatgaggattagctgtacaagaacacgggg

SEQ ID NO: 11675 - DNA, 120 bp, synthetic construct
  source 1..120: mol_type = other DNA
cttgatttacttacatggaccaataagctccctttcagcaagggttccagtgggttttctgtcgtagaccaaaaaaattctgatacataatacctgggttgagactgacatcagcaaacc

SEQ ID NO: 11676 - DNA, 120 bp, synthetic construct
  source 1..120: mol_type = other DNA
gagactacgtatgtcttattttatgtgggactcctcccataccagatgttgactgacctgtagtagacaggtaacaaatatttgcatatccacagatacacggtgaaagacaggatctag

SEQ ID NO: 11677 - DNA, 120 bp, synthetic construct
  source 1..120: mol_type = other DNA
tcatacaaacagcaaagatgatctgttctctcccctttgtacacaaatggttgatctgtatacactggtgatctgtatacacttggtgatctgtatacactggtgatctgtatacactgg

SEQ ID NO: 11678 - DNA, 120 bp, synthetic construct
  source 1..120: mol_type = other DNA
tcagtaatgttgcctcaacctctttgctcttctcttttgtcatttccctgcctcctcccgagaggaagccaccatcctgaattttatgtgcattttcctctcacattagaaaaaagtttt

SEQ ID NO: 11679 - DNA, 120 bp, synthetic construct
  source 1..120: mol_type = other DNA
ctttttctttgcatgtctcataatttcttgtagaaaactagacattttagataatgtgtggtagcaactctggattctgattccacccctctccccagaggcctgctgttgtttgctcct

SEQ ID NO: 11680 - DNA, 120 bp, synthetic construct
  source 1..120: mol_type = other DNA
aaaatcaagggaagtcatcctggagttgggttggaaaactggcactaatgaaatgcacataatcttacgccaagggcctgtgtaaaaggctgctcagttaactcttctcactcctttttt

SEQ ID NO: 11681 - DNA, 120 bp, synthetic construct
  source 1..120: mol_type = other DNA
ccaagggcattctcctccctgatccccaacccctaccttctctcctaatccctacttttgtagaaagttggttataatcttttaagaaacatttccaccacaaagggaaatcctaaccta

SEQ ID NO: 11682 - DNA, 120 bp, synthetic construct
  source 1..120: mol_type = other DNA
ttccttctccctgctcatacctgtctgtctttgtctttcatcttgaccctcctgtccccagccaaaaataatttttcttctatcaccagttatactgtacacatggaagactctttcaca

SEQ ID NO: 11683 - DNA, 120 bp, synthetic construct
  source 1..120: mol_type = other DNA
atttaataagcttccccaaatcaaatttcagcttccaaatagtctcttctgacttctaactttggaatgctatgggggagtccatagcattggaatgctatgggggagtccatagcattg

SEQ ID NO: 11684 - DNA, 120 bp, synthetic construct
  source 1..120: mol_type = other DNA
ctttttgatggggttgtttttttcttgtaaatttaacagtttctatctttaaaagctcacagtcaagtgcagaaatcggggggggggagaggtgggggggtatcaacacagggtatcttt

SEQ ID NO: 11685 - DNA, 120 bp, synthetic construct
  source 1..120: mol_type = other DNA
tctggaaatacatatgttaaaatgtcagcagtatgccacttcttacccactggagtggttatgatcaaaaagacagaataacaagggagtagcaattgcaaaaccaaggacagcaatctt

SEQ ID NO: 11686 - DNA, 120 bp, synthetic construct
  source 1..120: mol_type = other DNA
agcacaggatctaggctcccggaaggggttacttccagctggaacacccaccagcagggcatccttgcaggcattctgcatacagtactgttgaagctctgcagctgcctgagagacctt

SEQ ID NO: 11687 - DNA, 120 bp, synthetic construct
  source 1..120: mol_type = other DNA
tatatgtctatatttagaaatgcttggaatatatctagaagttacactaaaacatagtgacagtggttgcctctgctactgggggacagagatgtaatgagacttactttttcctatgtc

SEQ ID NO: 11688 - DNA, 120 bp, synthetic construct
  source 1..120: mol_type = other DNA
tgaaaggatataatgtttcccaaatttatttgaccatgaaacgtttttccaaggagtatctcaaagtgtcctctttaaaactccactctgggccaggcacagtggctcgcacctctaatc

SEQ ID NO: 11689 - DNA, 120 bp, synthetic construct
  source 1..120: mol_type = other DNA
ataacaatcttgtgaattatgtaatataaacttcttagaacaatgccttttgtgacatagggctcacaaacattctaataaggtccttggggccgggcgggttagagggggcagtgagag

SEQ ID NO: 11690 - DNA, 120 bp, synthetic construct
  source 1..120: mol_type = other DNA
aaaaggctttctcttagagaagccctgtcttatattgagaaggaagctctccatcatgcttccccttatgtataattgtccaaaacagggatacctgggtttctcagcctcagtactatt

SEQ ID NO: 11691 - DNA, 120 bp, synthetic construct
  source 1..120: mol_type = other DNA
aatggacaaactatggtatataagtaacataggcaaatgtacctcatctgcattaagctgtcctttcttagaaaaccgaggtggcatatccttcgactgtccttgcagctgggataagag

SEQ ID NO: 11692 - DNA, 120 bp, synthetic construct
  source 1..120: mol_type = other DNA
ccattttccactagagataaaaaaaacaaggcatttctgagaggggagggatatggttgtctaataagccggaattgatggtcatgacagactccattctattgagctctgcacacagaa

SEQ ID NO: 11693 - DNA, 120 bp, synthetic construct
  source 1..120: mol_type = other DNA
ctgtatgcatgggactagcttgattatcctctggccttactcagatacatctagcttcttccagatctttccagattagattcccaggcctgtcagctcccagatggcaggacataataa

SEQ ID NO: 11694 - DNA, 120 bp, synthetic construct
  source 1..120: mol_type = other DNA
tacaatgtgatgggatagaatagaatgggatatgatgggatgcgatggaacagaatgagatatgatgggatggtgtggaatagaatgggatatgatggaatgggataggataggatggga

SEQ ID NO: 11695 - DNA, 120 bp, synthetic construct
  source 1..120: mol_type = other DNA
tactattctattaccatccctgttttacagataagacatatgagtacagagaagtgacataacttgcccaaggcatatagctagtaggtgagagagctggaatttgcacctgggaggcct

SEQ ID NO: 11696 - DNA, 120 bp, synthetic construct
  source 1..120: mol_type = other DNA
agtttgcagatggggtgtacctggtgctgctcatggggctcctggagggctactttgtgcccctgcacagcttcttcctgaccccggacagctttgaacagaaggtaaggagaagggaca

SEQ ID NO: 11697 - DNA, 120 bp, synthetic construct
  source 1..120: mol_type = other DNA
caagaatgtctcgcagttaaccatcttacaggaggttatggtcttctctaagaaaattctaaatgaacaaatgaatagctgaaagaaacagatcatatcgcttgctttcttgatgtgaga

SEQ ID NO: 11698 - DNA, 120 bp, synthetic construct
  source 1..120: mol_type = other DNA
aaggggactgatgttactctttgtcgtgtcataaggatctctccatatagctctttgcaaggattaatgatagccttaggggaattagacttcttatatagcagctgatggcttcaaggg

SEQ ID NO: 11699 - DNA, 120 bp, synthetic construct
  source 1..120: mol_type = other DNA
ctgttctccttcgcttcttagccctagacactcatcaatcaaccagatttcctgagtgcacctactatgtgcaggtctttggaaagcaagtcacctcctatgtactttttaaattttttt

SEQ ID NO: 11700 - DNA, 120 bp, synthetic construct
  source 1..120: mol_type = other DNA
ggaaatatacaatcatggcggcaggtgaaggggaaactgacatgtcctacatggctggagcaggaggaaggcaggggaggtgccacacacatctatttttttatttatttttattttatt

SEQ ID NO: 11701 - DNA, 120 bp, synthetic construct
  source 1..120: mol_type = other DNA
tgcctgtctctaaatatagaaagagaagtagaaaaaggatttctgaagctgccccgtcaatgtgcgtagagatggatcaatctcttacaggggtacaaaaggtgaatttaagcagaaagg

SEQ ID NO: 11702 - DNA, 120 bp, synthetic construct
  source 1..120: mol_type = other DNA
acagcaacactgcaggtatgtattgctagatgaagatattgagacttgaagagggtgagcaacttgcccaagatctaaagctagaagtggaggagttcaagtcatcatacgcatatttgt

SEQ ID NO: 11703 - DNA, 120 bp, synthetic construct
  source 1..120: mol_type = other DNA
atatagggtggggctcaagaatctgtatttctaacaagttcctagaggttgctgatgctgctggtccaaggaccacacttttccaatcactgaagagcttgcccaatagatgcaagtaca

SEQ ID NO: 11704 - DNA, 120 bp, synthetic construct
  source 1..120: mol_type = other DNA
gttctatatctttataccagctgacttgacaaaattaagagttccagtaagagcaaaatgttgtcctctatttgggagggggaggggacagggcactgagcaatcaagcagttaaaactc

SEQ ID NO: 11705 - DNA, 120 bp, synthetic construct
  source 1..120: mol_type = other DNA
gaatgagagatgacagccaaatacccaaacaggccaattttagctggcacaataaggaagtcccatctgctttaacctttacaaggaaaataactttaaaaatatcagctggcccgggct

SEQ ID NO: 11706 - DNA, 120 bp, synthetic construct
  source 1..120: mol_type = other DNA
aaagtataattaaaaaaaaaagaaaaggggaaaaatctaggaaagtctagtcgagggtagcaaaaaatccatctgtgtcaactggcagatagagtaaaaaaaataaatccaataaaaaaa

SEQ ID NO: 11707 - DNA, 120 bp, synthetic construct
  source 1..120: mol_type = other DNA
tccttctttttagccatgctacttttgaggtatctatatccaaatccaagtgattaataggggctgctgcatgctagtaaatagcaccaccattcacccaaattggcaggctcaaacttc

SEQ ID NO: 11708 - DNA, 120 bp, synthetic construct
  source 1..120: mol_type = other DNA
cactgcatccggccacaggctgccttctttaatcaaacttgtagctccgtgaaatgaaacagctaatgtgcaaagattgtagcagctcttctttaaaaaaattgaggtgaaatttgcata

SEQ ID NO: 11709 - DNA, 120 bp, synthetic construct
  source 1..120: mol_type = other DNA
atatccacctcagagagcaggattacttgtatggtaatagcacatggtaacatattctaagtgcatgagcaatctggactacatatacttaatagcatactgacacacaagatatcattt

SEQ ID NO: 11710 - DNA, 120 bp, synthetic construct
  source 1..120: mol_type = other DNA
cagacatcaagactgctggcaccttggtcttggacttcccagcctccaaaaactgtgagcagccaagttctattgtttacaaattgcccagactaaagtattttttttttttaggtggta

SEQ ID NO: 11711 - DNA, 120 bp, synthetic construct
  source 1..120: mol_type = other DNA
gagattaacatttaaattgatggactttaagtaaagcagataaccctccataaggtcggtgggcctcatccagtcagttgaaggccttaatagaaacaaagagtgacctcctctgagcaa

SEQ ID NO: 11712 - DNA, 120 bp, synthetic construct
  source 1..120: mol_type = other DNA
gtagatttcttgggatttcctacatatacgagattaggccatctgtgaataaagatagttttgcatcttcatttccaatctggatgtcttttactgaggcgtccttttaaatgtgtcagc

SEQ ID NO: 11713 - DNA, 120 bp, synthetic construct
  source 1..120: mol_type = other DNA
tctgctcctcctatttaggcccattgtatggctagaaagctataatggttgagaactattaatcttttttgttgttctcttttttcccttaagatttgccttaataccagagctaaaatc

SEQ ID NO: 11714 - DNA, 120 bp, synthetic construct
  source 1..120: mol_type = other DNA
ctggcctgagaattcagtcttttacaatttgtgctttctctgcattagttcatttcctttgtgatgtaatataggattttaatttttgccttttcaaccaatgtctttagtttttgccta

SEQ ID NO: 11715 - DNA, 120 bp, synthetic construct
  source 1..120: mol_type = other DNA
ctttcccccttccctgccagcaagtcccatgatttcctccatgcccttttaagggctgagcttaccatgctcataatatatttttggctgatctttggcttctttttatattagaaagtt

SEQ ID NO: 11716 - DNA, 120 bp, synthetic construct
  source 1..120: mol_type = other DNA
tggagcctttgtttctacatatttatacaagccggggtcagggaagttctggaaggtccttccactttttgtactcatgacttcaggtcaattatcacttggacaattcttactcaccct

SEQ ID NO: 11717 - DNA, 120 bp, synthetic construct
  source 1..120: mol_type = other DNA
atatcaatgaataggcccagggtttcaatgggggatgctaactgcagaggacacaaggaaactcttcgggactaaaagttacatatggctctatacaacttccagaattcatcaaacact

SEQ ID NO: 11718 - DNA, 120 bp, synthetic construct
  source 1..120: mol_type = other DNA
gaagtgtttaatttatttaagacaggaatcacctccactttacagctgaggaagatgaggctctagaaggttaagtccaatcagccaaaactcaggccttagtctctgaaggctgtgctt

SEQ ID NO: 11719 - DNA, 120 bp, synthetic construct
  source 1..120: mol_type = other DNA
ctccttttacagacaggaaaacagattggtaagtaggttgacctgctctaagtctaataagaagcagacctaggactagaactcaggtcctctcatatctggccaagtggacttttttat

SEQ ID NO: 11720 - DNA, 120 bp, synthetic construct
  source 1..120: mol_type = other DNA
ttcattccaatgtctgtctgcccactatatgcctatcctaggtacttggaggaataaagaagagaatcaagaattggatcttaccctgagagtctatctagcacaggagttaagacatgg

SEQ ID NO: 11721 - DNA, 120 bp, synthetic construct
  source 1..120: mol_type = other DNA
taagcatggtccgcaggccttccacaatctaatgctcaagtactatccagcctgatctgctcgccattgtggccccacagatatcttagcctcacatgcctacccttagccacattccct

SEQ ID NO: 11722 - DNA, 120 bp, synthetic construct
  source 1..120: mol_type = other DNA
cgtgaaccacctcacctggctgaacatgtgttttaacaagagggagtgagggctattggacagtcttaaagaaggcatttctaatggcacaagagtatggatatatggtaggaaaaataa

SEQ ID NO: 11723 - DNA, 120 bp, synthetic construct
  source 1..120: mol_type = other DNA
tctagcacttctcccctccctaaccctctaatcatgttttggtctttcaggcaaccaacacccatcctgaagttatctaagagcccccagtcaccaatcatctgatttttttttttatta

SEQ ID NO: 11724 - DNA, 120 bp, synthetic construct
  source 1..120: mol_type = other DNA
acaggctgactccagtgagactgtgcttcattatttagtggttgtttccccctccatcccacctggttctgtggcttctttctactttctgtggtattgcccttcatcttgtgttgtctg

SEQ ID NO: 11725 - DNA, 120 bp, synthetic construct
  source 1..120: mol_type = other DNA
gcacagcagaggcaggaagatccttacaaggtgattgtccaggaagcccatgctctgtgccaacctatactgacaaccacaggaattctaaagactcaacagtgacacgtgtttgaaata

SEQ ID NO: 11726 - DNA, 120 bp, synthetic construct
  source 1..120: mol_type = other DNA
tctgacccttgtcctgtgtctgtctctctgccctgtcactgcctctttggaactcgataaaaactggcctcccctcagctcccagggaaggaaatttacctggtggcgggaaataaagcg

SEQ ID NO: 11727 - DNA, 120 bp, synthetic construct
  source 1..120: mol_type = other DNA
gagaatgaattcagtgaggtgagccgttgtctctttggacgtctgcgccgggacgctgccttttctggctctggctctcccccttctcagattgaatcctgggatggaaagtgtcactgt

SEQ ID NO: 11728 - DNA, 120 bp, synthetic construct
  source 1..120: mol_type = other DNA
caaaccacatatagccctatatacacacacacaacacaaaccacacatagccccatagacacacacatacacaccacacatcacacaccacacatagtcccatacacacacacacaccac

SEQ ID NO: 11729 - DNA, 120 bp, synthetic construct
  source 1..120: mol_type = other DNA
caggctgagtgattagatggggggtgggggtggtgtgaaccaggtgatcagatgagatccaaatgggagatggggtagagtagatgagatggtctgtatggagctagggaagcccgagca

SEQ ID NO: 11730 - DNA, 120 bp, synthetic construct
  source 1..120: mol_type = other DNA
ctcgctccacagcctgcccgcttttccgtcctcagggacgctcaagctgccctctgccaataccccgcttctggcctgtccccccctgccccccactaaacagttttcagtgtctcaata

SEQ ID NO: 11731 - DNA, 120 bp, synthetic construct
  source 1..120: mol_type = other DNA
agagagtacacttaatgctatgctacaacgtatcacataaaaaataaagggaaaaaaatgagtgttttcagtctggagaacagaagacttggaaggggaagggaaggggaagggaaggga

SEQ ID NO: 11732 - DNA, 120 bp, synthetic construct
  source 1..120: mol_type = other DNA
taaacactttctcagtaggctgtactgatactgtgggttgcttgaggaagcaatagagcagcggttctccgccgtggttgcactttctttttcttttttatttttttagacggagtctca

SEQ ID NO: 11733 - DNA, 120 bp, synthetic construct
  source 1..120: mol_type = other DNA
ttctttctctgagtaactgacaacaatcctcgactctctaatctgtttagcagctccccaggcacattgggcagcacaacctaaggcagcggctcaaatcttaaggaagcccaaaaatac

SEQ ID NO: 11734 - DNA, 120 bp, synthetic construct
  source 1..120: mol_type = other DNA
tccaagtactaccaggcccgaccctgcttacctctctagatcagaggagataagacaccttcagaatggtatggctgtatgccccaggataactattttttttaaaggaaatgataatct

SEQ ID NO: 11735 - DNA, 120 bp, synthetic construct
  source 1..120: mol_type = other DNA
ctttgaagctttagatatgaactcagagggacttcatttcagaggcatctgccatgtggcccagcagagcccatcctgaggaaatgactggtagagtcaggagctggcttcaaagctgcc

SEQ ID NO: 11736 - DNA, 120 bp, synthetic construct
  source 1..120: mol_type = other DNA
caaggaccacagcattttctcatttagtttcagaatgactctgtgacgcaatcttcctctcttggaaggtgagaaagctgatcttggaaggtgagaaagctgagacttagagcagctgaa

SEQ ID NO: 11737 - DNA, 120 bp, synthetic construct
  source 1..120: mol_type = other DNA
ttattaatctccttcttgcctgccttgattacagcgatgccagagagaatatccagagattctttggccatggtgcggaggactcgctggctgatcaggctgccaatgaatggggcagga

SEQ ID NO: 11738 - DNA, 120 bp, synthetic construct
  source 1..120: mol_type = other DNA
acttacaatgttcttaatctagccacctctcaaggatcagaagttctacttccctctgaaatcctcccttacagcccacaacactcaccctatttcttgcactcaacctatttcttatac

SEQ ID NO: 11739 - DNA, 120 bp, synthetic construct
  source 1..120: mol_type = other DNA
atgctgggatgcatactcataatacagtaagacagtggcaatgataaaggaatgaatatggtttgacaacagtacatgcacagaaataggttgtctaacgtaagcctctttgaggaatca

SEQ ID NO: 11740 - DNA, 120 bp, synthetic construct
  source 1..120: mol_type = other DNA
ctgagaagaaaatcctgcatcatcaacactatcactgcttcacttcattcaaacaattctgcccaaccagccaccataattcagggctaagccccttcggcagttaaattctttaaaaat

SEQ ID NO: 11741 - DNA, 120 bp, synthetic construct
  source 1..120: mol_type = other DNA
tctgttcccaagggaacatccaaattctttaacaaagaatactaccataattaccataattcaatctcctggacttgctttggtttccatttttggcagggaggggaaaactgatttata

SEQ ID NO: 11742 - DNA, 120 bp, synthetic construct
  source 1..120: mol_type = other DNA
tatttgtgcttttaggaaacagaaactttgatcatcccacatctttagctgaaggagtccttctctcaagtaaaactaagtctttgtttaggggtattaaagtgatttagtgagcatcat

SEQ ID NO: 11743 - DNA, 120 bp, synthetic construct
  source 1..120: mol_type = other DNA
cttataaaattgaaaatactcttgctttactggatcgttggtctctgacaactggagagtcacggggaaggagactagcatggatttaaggattggatccttgggctgtgttgtgaaata

SEQ ID NO: 11744 - DNA, 120 bp, synthetic construct
  source 1..120: mol_type = other DNA
gagctctgggtatgtgaagttccagatcattgacatatatccacccacccaatcctctcagtaatggtgggagatagatatcagcatttcatgttacagatgacaaatctaaggcttgaa

SEQ ID NO: 11745 - DNA, 120 bp, synthetic construct
  source 1..120: mol_type = other DNA
gggccaacccaagacacagctttggaatgtcctgtccttagaactgttgcccagggccactcatgcctaaaattacaacacagtaataaaaactaccggttgttgggcacatattaaaca

SEQ ID NO: 11746 - DNA, 120 bp, synthetic construct
  source 1..120: mol_type = other DNA
caggagccggagaatattccaaatattacttagatttcagagtgacagattgcagtgtgtgatcttcccctaatttttctttttatctccatgtctcccctgtaccaggccttaagagct

SEQ ID NO: 11747 - DNA, 120 bp, synthetic construct
  source 1..120: mol_type = other DNA
tcactaaagagctcccacctcaaggttcccccaagctgaagctaccctctgggattggctttgcttgaaaaataaaattttatcagcatttctgaaagctggacatttagaacagagaaa

SEQ ID NO: 11748 - DNA, 120 bp, synthetic construct
  source 1..120: mol_type = other DNA
cacaactgcaggccaagaccattgggagaatactgatggcagaagcttctcttccccgaatcgttttcattaaatggacatgaaaagctatttataaagctcgggttgtttttgttagag

SEQ ID NO: 11749 - DNA, 120 bp, synthetic construct
  source 1..120: mol_type = other DNA
ggcaaacgccctcaggtatgaaagcagctgtttttgctcagctaggaagaatttattcccctctggagacagttatttagacctatttgcaagtaagactcctctgtggttttaatgaga

SEQ ID NO: 11750 - DNA, 120 bp, synthetic construct
  source 1..120: mol_type = other DNA
gcaagtaaataccagattgaagcagcaccttgtcattttctcactttgaagttgcaagtgatatggaaataaaaccttgatggtgtcattttctctgtctgcagaaagcttcagcacagc

SEQ ID NO: 11751 - DNA, 120 bp, synthetic construct
  source 1..120: mol_type = other DNA
gttgaaaagacttgcctaaaggtgcctagcaggtcaggtgcagagctaggactcatgcaaaggtctttggagaacatttcctatggcacatttcccattatatcagttcctatatatata

SEQ ID NO: 11752 - DNA, 120 bp, synthetic construct
  source 1..120: mol_type = other DNA
gggaccactctgtgtctcactcagccagcattagaggaagctccgggatgtgggccattcctcattccagaagaaagcaaagtagattcaattttttaaaagtaaaaatacataaacgga

SEQ ID NO: 11753 - DNA, 120 bp, synthetic construct
  source 1..120: mol_type = other DNA
cctcctgtagctcggagtagtttgatcatctgaagcctaggtcctccttgttaatttttgtttttcttgtgattgcttttgaggtactagccataaattctttgtcaaagctgttgtcca

SEQ ID NO: 11754 - DNA, 120 bp, synthetic construct
  source 1..120: mol_type = other DNA
gattaagtccctgatgagggactcactctctggtcctgctccaggtgatttcagacctatgatgacatgacctaaacatgacctttttttcccctctctctttcttctcttctctctctc

SEQ ID NO: 11755 - DNA, 120 bp, synthetic construct
  source 1..120: mol_type = other DNA
tttagcatgctggcatttatgttgttaattaaaggaggaggtcagttcagaaatcatggtttggattaggtactcttcaaattgtacctaaaagaaatagcagaggggccgggcgcggtg

SEQ ID NO: 11756 - DNA, 120 bp, synthetic construct
  source 1..120: mol_type = other DNA
tccatgtaccccattcacccttcccagtctctgttatctgtctttccgctctctatctttccactctctagctgtgtattcaaattttttagctcccacatataagtgagaacatgtgat

SEQ ID NO: 11757 - DNA, 120 bp, synthetic construct
  source 1..120: mol_type = other DNA
cagcaggaggtacagggtggcaacaggtggattaaacaaaaggaaaaaaaatccatttttctgccgtccatccgtactaaatagtaagcttattaattttgggctctgcaccttagggat

SEQ ID NO: 11758 - DNA, 120 bp, synthetic construct
  source 1..120: mol_type = other DNA
caattcagtaatttacagtaactgtcaggcaggtcagacatttatctcagactaggatattctcaccttgaagggaaggaaaaaatggtcagaagcttccttaacgagcgtgtgctcaga

SEQ ID NO: 11759 - DNA, 120 bp, synthetic construct
  source 1..120: mol_type = other DNA
aggcacaagctccagagtctgctttccaaggtttaaatccccactgtcacctactgtcttagtccattttctctttctatgactggatacctgatactaggtagtttataaaggaaacca

SEQ ID NO: 11760 - DNA, 120 bp, synthetic construct
  source 1..120: mol_type = other DNA
cttcttgctcttcatctgtgaaatgtgaatactattagtaatgatgccatagaactgtggtgagagtataatgagatagtagaaataaggcactttagcataacatctgagacacagtaa

SEQ ID NO: 11761 - DNA, 120 bp, synthetic construct
  source 1..120: mol_type = other DNA
aaattttgctatttacttttcaggtttgtgtaattcacactgccaccagggattggtgagagtttctgccttacatattttatctctctgtggcactcacactaagcattctaggtggaa

SEQ ID NO: 11762 - DNA, 120 bp, synthetic construct
  source 1..120: mol_type = other DNA
tcttccattttatagctatgccaaatggaaaatatgtcttccaagatcactgcaacaacagaaaagaaggctagacagcatacaggagctcttacatggcccctgtcacttctgctcata

SEQ ID NO: 11763 - DNA, 120 bp, synthetic construct
  source 1..120: mol_type = other DNA
tggaaagtcaagaatgttatcagaaaaaaaaggaagaatggatgttgggcatgcagaaacaacagcatctacctggacacagaaagtgggagtctttacaaagctgggatccccatttct

SEQ ID NO: 11764 - DNA, 120 bp, synthetic construct
  source 1..120: mol_type = other DNA
tttcttaggccagggcactgcttcagactacaaagaaaaggaggccaattgctttagggctttgagttcttttgctatagttttcctagaagctctacttacagacatatagatactgga

SEQ ID NO: 11765 - DNA, 120 bp, synthetic construct
  source 1..120: mol_type = other DNA
accatctgttcttcatttctttttcccttttttcccaccttctttagagttgtattttatgattccattttatcttcactattagcttgttagctataactcttttgtgttttctttccc

SEQ ID NO: 11766 - DNA, 120 bp, synthetic construct
  source 1..120: mol_type = other DNA
aaataaagagaatttgatcctccaaagtctagagcagtggactcaagtctcctactctgtgcttccttttcccttgtccccagaaaagccttacagatcttttcagagaatcttcctttc

SEQ ID NO: 11767 - DNA, 120 bp, synthetic construct
  source 1..120: mol_type = other DNA
tgagccccttcttgctgtgtcataacatggtggaaggcatcacttggtgagagagcatgcacacatgagatggcctaactttctttcataacaaatccattcttgctattacaaatctat

SEQ ID NO: 11768 - DNA, 120 bp, synthetic construct
  source 1..120: mol_type = other DNA
gcatttatttctcacagttctgggtgctatgaagtctaagatcatggtactgaactcagtgtctggtaagggcttgtttcctggctcattaatgccatcttcttactgtgtcttcacatg

SEQ ID NO: 11769 - DNA, 120 bp, synthetic construct
  source 1..120: mol_type = other DNA
attttagattcagtggtatacatgcatgttttttgtgtgggtatattgcacgatgctgaggtttggggtgcagatcctgccacccaagtagtgagcatagtaacaaatagggagtttttt

SEQ ID NO: 11770 - DNA, 120 bp, synthetic construct
  source 1..120: mol_type = other DNA
cttttgtgtctgtattcatcagggatattggcctgacattgtctttttgttgttgtgtctctatcagattttggtatcagcctggtgctggtttcatagaacgagttatggagaagcctt

SEQ ID NO: 11771 - DNA, 120 bp, synthetic construct
  source 1..120: mol_type = other DNA
ccatttggatgtaatctgactcttctttctagctgcctttaaatttttttgttcgtgttgaacttggtgaatctgatgactatgtgccttggggatatagtgtctcatcagggttctcca

SEQ ID NO: 11772 - DNA, 120 bp, synthetic construct
  source 1..120: mol_type = other DNA
tgtgtgtgtttgatttttgctttggtgcctgcagagtttttgtcctttactacacaggatttatcttctttacagttaagaaatggccagcccctgctcaaacagcgtttcttttggtgc

SEQ ID NO: 11773 - DNA, 120 bp, synthetic construct
  source 1..120: mol_type = other DNA
tctgagaccaggatctggcaaggggacaggattttagcaaaggacaggagccaatagcaaatgcaagtcatattattctgtaaattccatatatcacagctattcagtggaaaattcttc

SEQ ID NO: 11774 - DNA, 120 bp, synthetic construct
  source 1..120: mol_type = other DNA
gtgtgccaaatacagtaaattgcacacgtgaaagccctcagatgtaaaggtgcatgatgactttgaggaagtaaaggaaagcaagtatgtctggagactagcacataactcaagagaatc

SEQ ID NO: 11775 - DNA, 120 bp, synthetic construct
  source 1..120: mol_type = other DNA
aattaaaccacctttgtaaaactaatgaaaggccacaaggttaggaggatgagagtggcctgaattctgctaagatgcaggcatagtcaagtgattaccagccattattctggaggtcac

SEQ ID NO: 11776 - DNA, 120 bp, synthetic construct
  source 1..120: mol_type = other DNA
acaagacacactaaagggcagaaacaatctgaagtgaaaaagtaagcaccaatcagatccagactcagataatagcagatattttagaattatcagacttggaacttacaataattatga

SEQ ID NO: 11777 - DNA, 120 bp, synthetic construct
  source 1..120: mol_type = other DNA
atcagggcttcccaaagttttcatgaggattaccttttaaaaaatgcatttaaagcacttactatagaaagaatactgcaaatgggtcctcagcagctattattattatctggcagttgc

SEQ ID NO: 11778 - DNA, 120 bp, synthetic construct
  source 1..120: mol_type = other DNA
aataaattccatttactgctagcatttaccagcaaccaagacacaatacctcagaatctcttagaatttctgacttaaccaagtatattaattcttatccatggcagcaatacaagactg

SEQ ID NO: 11779 - DNA, 120 bp, synthetic construct
  source 1..120: mol_type = other DNA
cagcaccacacaccctgggccttctgcaacagaggatggatagcatttagcctattttctcaagtaacaaattcctgtatccacatattgcacagatcatgtctgaatagtaaagcctaa

SEQ ID NO: 11780 - DNA, 120 bp, synthetic construct
  source 1..120: mol_type = other DNA
ctctttgctcctcagcctgtgcagatggcctattatggggccctgtgattgtgtgagttaatgagttaatacttagtaaacttctctctctctctctctctctctctctctctatatata

SEQ ID NO: 11781 - DNA, 120 bp, synthetic construct
  source 1..120: mol_type = other DNA
catcctttgaagcttgctggggccatgttcctaagttctggctactggtatataaacagaggagacgctagcccctttcaatttgtatccattaaggaaaagtatttacactcctctttt

SEQ ID NO: 11782 - DNA, 120 bp, synthetic construct
  source 1..120: mol_type = other DNA
caacacctgactttatgtcagaaattcagaaaaagaaagaaattcctttttagtgtaacactctgctatttggggtttctatctcacatagctaaatccaatttattctaactaataaaa

SEQ ID NO: 11783 - DNA, 120 bp, synthetic construct
  source 1..120: mol_type = other DNA
taaaggtgacgggcttccctctttgataagtcctatgtgtcctatctatctcgacagaattctatcaggaataacactgtacttgttccacagaaattgtttgataagcttgtctggaat

SEQ ID NO: 11784 - DNA, 120 bp, synthetic construct
  source 1..120: mol_type = other DNA
tagcataatgctcttcaattccatccatgttgttacaaatgacaaaatttatttcttttcaaaggctgaataatatttccttgtttatatataacacattttctttgatggtgaacacag

SEQ ID NO: 11785 - DNA, 120 bp, synthetic construct
  source 1..120: mol_type = other DNA
gtggatgaccactcttattccattccatgtactcaccaatacttgttactttaagccttaaattttgctgatctgctatagcattgtagctcactgggtcttaagttgcattttcttaat

SEQ ID NO: 11786 - DNA, 120 bp, synthetic construct
  source 1..120: mol_type = other DNA
gctgaaccccatttggatttcctctcagtgcacaatgtcctggaaactaaaggcaataaactgacagaatcatagggatggcctcatttgttacccatctctcacagattattatctgtt

SEQ ID NO: 11787 - DNA, 120 bp, synthetic construct
  source 1..120: mol_type = other DNA
ccatagccccatctttgtcccctaccccactcccctttgccttctgctctactttccaggaaattataccaaacttttctctcacatacagatgttactacatgttataacttatctgta

SEQ ID NO: 11788 - DNA, 120 bp, synthetic construct
  source 1..120: mol_type = other DNA
tatgtgtttgagtaactgtgtatagattcttgcatttaatccttggaaatattctatgggaatattttattctaaagtctaacgttaaaaaactgtaacggactcactgccacccagcta

SEQ ID NO: 11789 - DNA, 120 bp, synthetic construct
  source 1..120: mol_type = other DNA
cattgaggagtcagacaaacctggggcagagtcgagttcacttttgaacagcattattaccagtaaaagagcaatagaacagtttcttacacatgaagctggtatgaggatgtaatgagt

SEQ ID NO: 11790 - DNA, 120 bp, synthetic construct
  source 1..120: mol_type = other DNA
atgtgaaatgaaaaacagtaaggcaattattccagttttctttctctggaactactgtttctctctcccttgtcttcttccctcttctctcgtctcctttcctctcctctcctctcctct

SEQ ID NO: 11791 - DNA, 120 bp, synthetic construct
  source 1..120: mol_type = other DNA
gactttcatgaatgcaatttgccacattatctggccagtttgagaagcctggactcagagggaatgagccagtatggggagatattgatgataatcagaaaagggctactaaaaatgaag

SEQ ID NO: 11792 - DNA, 120 bp, synthetic construct
  source 1..120: mol_type = other DNA
tcccacctcccaggccctggcacccactgttctactcatgacttctatgagtttggcatttttagattccatgtataagtgatatcatattgcatttgtctttctgtgcctgacttattt

SEQ ID NO: 11793 - DNA, 120 bp, synthetic construct
  source 1..120: mol_type = other DNA
gctgcatagtattccatggtgtatatgtgccacataagttatttggggggggggaacttctgtactgttttctataatgactaaaataatttacattcccactaacggtgtacaagggtt

SEQ ID NO: 11794 - DNA, 120 bp, synthetic construct
  source 1..120: mol_type = other DNA
gacaatctgtctatgtccttcaaattattcaacatttaagagtatgttacatgcaaggcacaaatataaccaagggaagaactaaaaagatgctgagtgagagttgattcctgcctatag

SEQ ID NO: 11795 - DNA, 120 bp, synthetic construct
  source 1..120: mol_type = other DNA
tataacatacacatgtcacttcttacctgatcctgctaaaatacattagcaaaaccagagaagaaataaggtggcggtgttgtaagtgagctaattcttcatctctcatgattagaagtt

SEQ ID NO: 11796 - DNA, 120 bp, synthetic construct
  source 1..120: mol_type = other DNA
agatttggatgatgtgctccttagtttgtatggggcaaaaagtgacaagatgttttttgaattaaaaagtaagaggaaacctgccttactagatataagattacactataaaatcactgt

SEQ ID NO: 11797 - DNA, 120 bp, synthetic construct
  source 1..120: mol_type = other DNA
aacttctagttactagtagtaaatcccatattgttagtttaaagacttatcagcaaattgtagtttgtgaatcagggtccctgtggttttcccaagagcttgaaaataacactgacactg

SEQ ID NO: 11798 - DNA, 120 bp, synthetic construct
  source 1..120: mol_type = other DNA
gtcttgttgccctctccttccattcactagaggatcgcatcgtcaaaagatttttgcttggaataagcatgacagaaagatttaacctaagtgttagacaacaagtgatgaaaacatctc

SEQ ID NO: 11799 - DNA, 120 bp, synthetic construct
  source 1..120: mol_type = other DNA
aattcagccaagtctatttgaaatagaaaactgtctatttaatatagtaaaatcaatgctcccttaatgttgttacaaagatatggtaactgtaatatgggtaaaagtttattcaagaaa

SEQ ID NO: 11800 - DNA, 120 bp, synthetic construct
  source 1..120: mol_type = other DNA
accttatttggaaatactgtggttgtggttgtaagtagctaagatgaggtcatactggagcagggcaggcccttaatccaatatgactggtgttccttataagagaagatagggcgggca

SEQ ID NO: 11801 - DNA, 120 bp, synthetic construct
  source 1..120: mol_type = other DNA
ggagaatggttttgggaagttcctacagtacacagaaataaaagctaatgttactatgaatgcgcattacttttctaataaaatgtttctgaatctctgtcttgactgccttctatgaat

SEQ ID NO: 11802 - DNA, 120 bp, synthetic construct
  source 1..120: mol_type = other DNA
ctggagttcagcacaggagggattgcctgggaaaggaagtcaaggttcccccgaaaagaaacaaaatcctagacagcagcgatcacttgttaagcccgaattcctcctccaacatccatc

SEQ ID NO: 11803 - DNA, 120 bp, synthetic construct
  source 1..120: mol_type = other DNA
acccctcagtcatgctgtacaccctggaatcagacttgtcaggttcaaatcagacctcttattatctgtggcgattcttgagcaattacttaacttttctgcacctggattttcttatct

SEQ ID NO: 11804 - DNA, 120 bp, synthetic construct
  source 1..120: mol_type = other DNA
gtttgtcctctgcaaacctcatattgaaatttgatctccaatgatggagatgaggcctaatgagaggtgtttgagtcatgatagaagatccctcataaatagattaatgcccccccttgg

SEQ ID NO: 11805 - DNA, 120 bp, synthetic construct
  source 1..120: mol_type = other DNA
ccattcattcgttcagtagtcactaatttaaggcctatgtaggcccttaatcatgtggctaacaaagtgactccctagtaccttaatacttgattcatcagaacacaatgatctatgatc

SEQ ID NO: 11806 - DNA, 120 bp, synthetic construct
  source 1..120: mol_type = other DNA
caatgagtagaggatcagagagggccttgaagggaaataatggggatgggacccacaccatcccagtctggacttaaagcattcttgtcaccagagatatcttagaaaatttcttttttt

SEQ ID NO: 11807 - DNA, 120 bp, synthetic construct
  source 1..120: mol_type = other DNA
ggatacctggagagtatttgtgaatttttttcactcttttgagcaccatacttaattttattttcttgattgcttactgtatttgttaaaccaactgaaaaatatgtctgattccttggc

SEQ ID NO: 11808 - DNA, 120 bp, synthetic construct
  source 1..120: mol_type = other DNA
aggcatgttgaaatggatgcttaataacaatgtaggtgtctagaatcctagcctcagaggttttgattctgaaggtgtggacccaccccccacccaaaaaatatacattaacaggtgttt

SEQ ID NO: 11809 - DNA, 120 bp, synthetic construct
  source 1..120: mol_type = other DNA
agaccggagctgttcctattcggccatcttggctcctccccgccctgcatacctttttaccaattgtgttcactcagctaatctatacctattactgtactcccttcaaaaaataaatat

SEQ ID NO: 11810 - DNA, 120 bp, synthetic construct
  source 1..120: mol_type = other DNA
ttctctcagctctctcaaaacaagtgagtcacactcttttcttcccctcttaccttaggtcattccagaatgtttagaggagatagctacagtataaaaaagctatgccagataaaactg

SEQ ID NO: 11811 - DNA, 120 bp, synthetic construct
  source 1..120: mol_type = other DNA
gccccttcactttgcaaaaagaaatatcaaagttaatggatggaggtaagcaggctagagaggttgctattttttctgtgtgatttctttcctgtagtgttacaactcccgcttcagaga

SEQ ID NO: 11812 - DNA, 120 bp, synthetic construct
  source 1..120: mol_type = other DNA
gcctgggttaggggaaagacagagggcgatggagggaaaaagagggcgatggaggggaaaagaaggctcaaaaaacatagaggctagaaaggtatttttaaaaaaggacagaaaagaatg

SEQ ID NO: 11813 - DNA, 120 bp, synthetic construct
  source 1..120: mol_type = other DNA
acgagtctccatctttatcaaaccctggagtcccattcttcgttctggttggcagggttaacagacctcaggccaagtccaatgcaaggcaataataaagaaaaaaaactctttaaatgg

SEQ ID NO: 11814 - DNA, 120 bp, synthetic construct
  source 1..120: mol_type = other DNA
atagaaggcttcaaaatggtggactcatactcagaaagattccccagcaacgttttctcccagggacccactttaaaaatctaatttcatttgtttgggggtgagggagaagaaagtact

SEQ ID NO: 11815 - DNA, 120 bp, synthetic construct
  source 1..120: mol_type = other DNA
ctgttcatgagtttggaggagacagccaaggtgtcaccatgtttgaatgctaaaagtgaggcaaactgtgggtcatgacacatcagtgggttgtaaaatcaatctagtacatcacaatca

SEQ ID NO: 11816 - DNA, 120 bp, synthetic construct
  source 1..120: mol_type = other DNA
caatttatttatgccgcagtcttctacggtctctgccgcttctgcagcgaacccctggcaaattaagtataaaactcgttgcctgatcgacagagaaggttgttcaccccccaaaaataa

SEQ ID NO: 11817 - DNA, 120 bp, synthetic construct
  source 1..120: mol_type = other DNA
tcgttacctccattttcgaaacacacacggacgctcatgcacacacaccaccaccccccgcccagaaaaaaaaaaaaagaaaaagaaaaaaaaaaagcttctctggggcaacagaggcat

SEQ ID NO: 11818 - DNA, 120 bp, synthetic construct
  source 1..120: mol_type = other DNA
tatatatgtatatatgtatatatatatattccccaggctggactcttaactcttcccacctcagcctccctagtagctgcaactccaggtgtgcacccacttcacctggctctttatttt

SEQ ID NO: 11819 - DNA, 120 bp, synthetic construct
  source 1..120: mol_type = other DNA
acttaactgaagaatatctgtagttggtcagtatctttatatcttccgaacgatacaaggacctaagaatcagtcccatccaggcttaacagtaactgtggttcagtgttttaattccac

SEQ ID NO: 11820 - DNA, 120 bp, synthetic construct
  source 1..120: mol_type = other DNA
cagctcactgtgacctccaattcctgggctcaagtgatccaagtatctgagactacaggcatacgccaccacacctagctaaaaaaccaacttttatactacatctttttttgttaagaa

SEQ ID NO: 11821 - DNA, 120 bp, synthetic construct
  source 1..120: mol_type = other DNA
tagttcataagcatcccaaggtgactccaaggcacacatgtgataaaacaaccactgccctgtgtattccttccccaatacattgtattcttagtttctagggcatgtcttgtactttct

SEQ ID NO: 11822 - DNA, 120 bp, synthetic construct
  source 1..120: mol_type = other DNA
gagggcatgctagttataagctccatccatttttggatagtggatccattttgcataaatgttttaatatcacccttgtcctgatagatacttttactggatgtattattctaggttgac

SEQ ID NO: 11823 - DNA, 120 bp, synthetic construct
  source 1..120: mol_type = other DNA
atcttgataggagagaaatgcgttctttgttaagtgctaagacaggagaagtataccttgttgtaaacaagattcacacacgtctaggccttgggaattgtcaagtgccttaggccactt

SEQ ID NO: 11824 - DNA, 120 bp, synthetic construct
  source 1..120: mol_type = other DNA
aaaagtaacgtgatgcatctgttggtagcaagaacactattagagggaatcctctagttctggtgctagacctttggcaagtcactcaagcattattggtcctagcttcatctgaaattg

SEQ ID NO: 11825 - DNA, 120 bp, synthetic construct
  source 1..120: mol_type = other DNA
tagcaaaggtatggaatcagccacatttgtctaagctccccagaattagactggctcactttgcaactgtgtggtggcaggcaacagtgagagttattttactttttgaaaatatgtttt

SEQ ID NO: 11826 - DNA, 120 bp, synthetic construct
  source 1..120: mol_type = other DNA
tgcccaattctctaggcccctattactgctttccttttaaaggtatggtattttctgtatcctcaaagtctttcctgcctaatggatttaagtggacttgactcccctttgggccattag

SEQ ID NO: 11827 - DNA, 120 bp, synthetic construct
  source 1..120: mol_type = other DNA
tgatgggttgagggatagcatgactttaacttctgcatggttacctgttctgcaggtactaacagcatctccttttccaagtcagggaaattgagtcattcatttcttcactcacaacca

SEQ ID NO: 11828 - DNA, 120 bp, synthetic construct
  source 1..120: mol_type = other DNA
ggaggccagtggacaaatgtaaacaccccttgggaattgccattccttttctttcttctagcaaacattaattgagtgcattggaaccatggcagcatatgtgcacttaatgtatgtaaa

SEQ ID NO: 11829 - DNA, 120 bp, synthetic construct
  source 1..120: mol_type = other DNA
tcttctcctccttcaggtctgaaaacatggcatctcctcagagaagctttccctgaccatccccatcaagctagctatgtcaatctgttttgtttcttttagtatgggaaaattgacata

SEQ ID NO: 11830 - DNA, 120 bp, synthetic construct
  source 1..120: mol_type = other DNA
tacaggcgtgagccatcatggctggccgaatcagaacattattaaacgcagtcttttgttattaaggtttccttctttatcaacaacctgtgaggtccgtattttcaggaaaggagaaaa

SEQ ID NO: 11831 - DNA, 120 bp, synthetic construct
  source 1..120: mol_type = other DNA
aatgttttggtcacctttgcagttcattctgaatctagacttgctcagcctaatcaagttcctgtacaaccagaagcgacacaggtaagagtgataaaactattttcttcagggccaggt

SEQ ID NO: 11832 - DNA, 120 bp, synthetic construct
  source 1..120: mol_type = other DNA
tcaggctaatttcaaaagtccaggccaggagtagtgcagccgctatcttttgttcctgctggatgtggcttggcaagagatgcctgttccttcatcagtgattcccgaaatggctttttt

SEQ ID NO: 11833 - DNA, 120 bp, synthetic construct
  source 1..120: mol_type = other DNA
ccacagtgacttcaccattttacgttcctaccagtggtgtatgaaggctccaatttctccacatcctcaccaacacttattatctgtctgtttggttatagtcctaagaaagtggtatct

SEQ ID NO: 11834 - DNA, 120 bp, synthetic construct
  source 1..120: mol_type = other DNA
gaaatttgaagttgtagaggcttcaaatgattcttctgtctagaccgtgatatttttaattgagaaaatagcctctcagagctcagagcagttctattaaatggaagatattctcaactc

SEQ ID NO: 11835 - DNA, 120 bp, synthetic construct
  source 1..120: mol_type = other DNA
ttaaaagtgccattggtggtttagctttactgccacgtttgagaaccactgtgtattctagaaggttgtgggcaaggctaataaaaatatgcccatggacaactcaaagacacatttccc

SEQ ID NO: 11836 - DNA, 120 bp, synthetic construct
  source 1..120: mol_type = other DNA
actgggtgggaagaagcaaagctccgaatatacctgagccacagtcttagacgctaggtgggctgctacggactgaatgtttgtgtccctccaaacttcttttttttttttttttaatta

SEQ ID NO: 11837 - DNA, 120 bp, synthetic construct
  source 1..120: mol_type = other DNA
aggactggctacataatgtgtgggtctgcacgtaatttgggcaaaatgaaatcttgagaccccttgttcaaattaaacatttcaagatgataagagcagagcattaaaccgtggactgcc

SEQ ID NO: 11838 - DNA, 120 bp, synthetic construct
  source 1..120: mol_type = other DNA
ttaatgggaaattattggcgaaatcctcacatgagtaaacagggaatcatctcggatttcttgcaggatgcagggaaacattctggatgtagtacaaaatggatagccagtgtccatgct

SEQ ID NO: 11839 - DNA, 120 bp, synthetic construct
  source 1..120: mol_type = other DNA
ctcccaccaaccggcaatcctttttgaagtcttatatttaaggctggccttgaggaaaattacataggagcagcattgtatttaccctttgtatgactgcaggggatgtgagtaaaatca

SEQ ID NO: 11840 - DNA, 120 bp, synthetic construct
  source 1..120: mol_type = other DNA
gctctctcagcacttttaaaggatcacttgattgattcactttaacagcctcatatcctccctttccacctgccctgaccccaattcctgcttgtaattaatttttcttctgaagggaaa

SEQ ID NO: 11841 - DNA, 120 bp, synthetic construct
  source 1..120: mol_type = other DNA
caggtctggtttctcccagcaccccttttttttggcttgtagatggcatctccttgctatgtcttcacattagattagagcccaccctacaaacaaaacaaaacaaaaacctcattttag

SEQ ID NO: 11842 - DNA, 120 bp, synthetic construct
  source 1..120: mol_type = other DNA
gtgttggaggttaggacttcaacacaggaatttaggagagaacaaaattcagcccataacaccaggtaaatagccaaatgaatgggtgctggtgagaagcaccaagacctaaattcttat

SEQ ID NO: 11843 - DNA, 120 bp, synthetic construct
  source 1..120: mol_type = other DNA
gtgcatgctgaaaactacacagtacaacactgttggacaatcattacatggaataccactcagcaataaaaaggaaagaactattgatacacacaacatggatgaaaattaggctgagtg

SEQ ID NO: 11844 - DNA, 120 bp, synthetic construct
  source 1..120: mol_type = other DNA
gttccgcagaatcctgcagaactgagggaaactgagtaaaggataaatgggatctctctatattatttcttacaactacatatggatttataattatctcataataaaaagtctaagtat

SEQ ID NO: 11845 - DNA, 120 bp, synthetic construct
  source 1..120: mol_type = other DNA
catcaatacgcaaatgtagaataatgtagaagaaagagcactagacatggtgaggttttggaccacagctgtgtactagtttagctcacgtctagtctgtggcttcaggcatgtcattta

SEQ ID NO: 11846 - DNA, 120 bp, synthetic construct
  source 1..120: mol_type = other DNA
tattagagcagaacaatttaccatcctgacctggaagcctgttgtgtcctctcaaaagaacacatcatcattccgtggcttgacataatgctgggcttctttactcatatgtgctacaaa

SEQ ID NO: 11847 - DNA, 120 bp, synthetic construct
  source 1..120: mol_type = other DNA
tttggttccatatgaactttaaagtagatactggatactttctacagggtctgtggactagactgggttctggtgatgtggtgtttgtgggacagcatcttcctcaaacttcagggaatc

SEQ ID NO: 11848 - DNA, 120 bp, synthetic construct
  source 1..120: mol_type = other DNA
ttaaaaggaactccactgtgggaatgcagtgtgacacataaaagtgagcatgttcaaaatctatttgccttcaagtttcacattactttccacgctttaagatgcaatccagaagctttc

SEQ ID NO: 11849 - DNA, 120 bp, synthetic construct
  source 1..120: mol_type = other DNA
gcctccattggtgatggttctttgggtcacggttgcattgattttagtactgatatatctctatctcctttaaacactacgtcttcaagacgaatatgtagccttgttttagtaaagttt

SEQ ID NO: 11850 - DNA, 120 bp, synthetic construct
  source 1..120: mol_type = other DNA
cgtctgcaaagagggacaatttgacttccttttttcctaatagagttacttctaaactgctgaaagaaaaaggcaatttcttttaattgccttccacaccaggattaccacatgatccca

SEQ ID NO: 11851 - DNA, 120 bp, synthetic construct
  source 1..120: mol_type = other DNA
ttgtaacaactctctgagtttcatctaattgttatccctattttgcaaatgaggtagtcaagacaaagtatgctgacttgcccaaagactcacagctactagtggagtgttggggccaga

SEQ ID NO: 11852 - DNA, 120 bp, synthetic construct
  source 1..120: mol_type = other DNA
ttattattccaaagtattttaacaaatggcaccctgcttcatcttggctttgccttcacattcaagaccaaacaaagcttgctaccacctccttctcttcgatgctgagccaaaaagcag

SEQ ID NO: 11853 - DNA, 120 bp, synthetic construct
  source 1..120: mol_type = other DNA
aatgcttatagacagaattttaagaaataaataactcacagggacagcaggggagctagaatgaaggagcacagtgtagtggagaatatgagcatttcagcctctccctctgtaacccaa

SEQ ID NO: 11854 - DNA, 120 bp, synthetic construct
  source 1..120: mol_type = other DNA
atatcaggaaaatgaagatctctatttcctataaccgttctgctattgggtatacaacttacagcataatttttcaaagtgctaataactgccccttattagattagccagtcaatttag

SEQ ID NO: 11855 - DNA, 120 bp, synthetic construct
  source 1..120: mol_type = other DNA
caagggggaaaagttggaagccttatctctaagaattggaacaagacaagaatgaccacttttaccactctgattctacatcgtacttgatgtcctagccagataaatcaggctagagaa

SEQ ID NO: 11856 - DNA, 120 bp, synthetic construct
  source 1..120: mol_type = other DNA
ggacaaactagctgttttacctggactcatattcattgaagaaatgctactatgaaatcctaagaacatagagttcgtgggttttactaattatttctgtaagaggaaaattttctttgt

SEQ ID NO: 11857 - DNA, 120 bp, synthetic construct
  source 1..120: mol_type = other DNA
ataaaggttgtatcagatctgtaactttccagtaatagaggtagagaaataaaaacatctctgggtggaactatagtgaggtgtccaaggtcccacccacccctcctcagaatcataaga

SEQ ID NO: 11858 - DNA, 120 bp, synthetic construct
  source 1..120: mol_type = other DNA
ttcttcatctatcaaaccagcataacaatagtatgaacctcatagaaaggttgtgaggatccatagagattatacaggtgaaacccttgcaacagagcctgatgcatggccaagacacct

SEQ ID NO: 11859 - DNA, 120 bp, synthetic construct
  source 1..120: mol_type = other DNA
acaagcagggggaggagacccaagagttctgtgtggcttgttcatacttctcaggattcttacctaatgggcttagtttagcatgaaaacagtaacattcagtttcatcactattgtctt

SEQ ID NO: 11860 - DNA, 120 bp, synthetic construct
  source 1..120: mol_type = other DNA
atgaaagttttccacattatatttgcaacatttctgtgaatttgaaattgtttcaaaataaaaataaagccaaagtgatatgatataaaagaagtttgattcagaaggctctggacatgg

SEQ ID NO: 11861 - DNA, 120 bp, synthetic construct
  source 1..120: mol_type = other DNA
gatctccatatgttgagcagagcttggtgagagatttattgaataatgggggtggacttcccccttgctgttcctgtgacagagttcttatgagatatggttgtttaatagtctatagca

SEQ ID NO: 11862 - DNA, 120 bp, synthetic construct
  source 1..120: mol_type = other DNA
gttcttaagctcacagaaagctagtagtatctttgtctcaccttcagtactttgcactctaatacagttaatgctgtaatacaaagggaagaagcaatgcattttaatggtaaaattgag

SEQ ID NO: 11863 - DNA, 120 bp, synthetic construct
  source 1..120: mol_type = other DNA
ctcttaaggataaaccatccacatgcactggcagatgaagagtaagattctgttgccttcatgtgaggtctcagcattttagaaacctatttacaagtgattcttactcctggggtgaag

SEQ ID NO: 11864 - DNA, 120 bp, synthetic construct
  source 1..120: mol_type = other DNA
agcttctgaggctgtgtcatgggtgcgtccttaacgttggcaaaattaactttctaaactgactgagacctctctcagattttgagttcacaacgtttacaaaaggtctgtgttatagtg

SEQ ID NO: 11865 - DNA, 120 bp, synthetic construct
  source 1..120: mol_type = other DNA
tgcaggttttggatccaggtgcccaactacagagcgtgctgtcggggatcatttggtggctcctgatccagagaactctttgaacaaataattttaagaattttttttttaagtttcaac

SEQ ID NO: 11866 - DNA, 120 bp, synthetic construct
  source 1..120: mol_type = other DNA
atcattattcctgtattttctctgaaactgattataaaaaccaatgtccagctactcttttgtttttgacacttgaagaaatggagatcgatttgatttgtttataagcagacacactgc

SEQ ID NO: 11867 - DNA, 120 bp, synthetic construct
  source 1..120: mol_type = other DNA
agcatcctcacgggctccagtcacttggatttactgagtcctgggccaagtgctatatatgctctcattctttatagccttatgaaacgggcactcttgtcatcttgcagataagggaat

SEQ ID NO: 11868 - DNA, 120 bp, synthetic construct
  source 1..120: mol_type = other DNA
ctgattccttgtggtccctcagcctaaacaggttgagtatcccttatccaaaatgctcaggaccagaagtgttttggactcctgattttttcagattttggagtatttgcgttatactct

SEQ ID NO: 11869 - DNA, 120 bp, synthetic construct
  source 1..120: mol_type = other DNA
agtcaacaacagctgctgcaaatcaacggctgtgggacgtgtcagtgcccacctgctggggctgggaagagtgggcactacagtgtcctggacagaattactcatgggtgggacaatctt

SEQ ID NO: 11870 - DNA, 120 bp, synthetic construct
  source 1..120: mol_type = other DNA
tatatggagcacccatgagacagctttatcccaggcacttagaatacagtgaacataacagacaactctccttcaaaatgtatctcatttctgtaatccctgctaagtgaggtcaaggct

SEQ ID NO: 11871 - DNA, 120 bp, synthetic construct
  source 1..120: mol_type = other DNA
gcttggcaaccctgattttcgaggcgaaccctctgaatgtggtaaggctgctatgttaaaattctggtgtgacagctattgacctccttagctagttggatgtttctatactattaaatt

SEQ ID NO: 11872 - DNA, 120 bp, synthetic construct
  source 1..120: mol_type = other DNA
tttttcctgctgtaccacactccctaagggcagaataactgcactgcacatgtggctgtgttatcaagtcacttcaaactttgacataatttccagactggcagttatgtaatttagcca

SEQ ID NO: 11873 - DNA, 120 bp, synthetic construct
  source 1..120: mol_type = other DNA
gaatgactgaaaaatacacactctgctataatcactagaaagaattttttttttaatttttctgagacagggtcttgccatgatgatgcccaggatggagtgcagtggtgtgatcttggc

SEQ ID NO: 11874 - DNA, 120 bp, synthetic construct
  source 1..120: mol_type = other DNA
ttggtgtggagtcgcagaaagaggaaggagacagtgccaggaggaagaaggaaggagtcccttagctctcttcattgtcccctttacttcctgctatcttcttctcctcttcttctctct

SEQ ID NO: 11875 - DNA, 120 bp, synthetic construct
  source 1..120: mol_type = other DNA
cactcttgacaccgggatcacagctggtctatatagtgtctttgtgtgaatcagaaaaaagtatcctttcctcaagacactttactgccatctgctggaaaactgccatgatgagtatat

SEQ ID NO: 11876 - DNA, 120 bp, synthetic construct
  source 1..120: mol_type = other DNA
ataaaatgcatctacttcaagccatagcaaatttgaagtttcagatcctctgtccacaagattgagtacttaacgatagcccttttggctccttccagatctcctaataaagcagggagc

SEQ ID NO: 11877 - DNA, 120 bp, synthetic construct
  source 1..120: mol_type = other DNA
tggggagaaggcctcttcatcttgtctagagcagggcttcagatatctgtgccagaggcttaggaaagacctaccacttggaatgtagaacaaaagaaatgattgttttcttttttcttt

SEQ ID NO: 11878 - DNA, 120 bp, synthetic construct
  source 1..120: mol_type = other DNA
cactcaataaatatttgccaataaataatgctctaagtctctattccacatcttcatttgtacatttacatagcactggaatagaaagactggaggccgggcacggtggctcacgcctgt

SEQ ID NO: 11879 - DNA, 120 bp, synthetic construct
  source 1..120: mol_type = other DNA
tcaaatgaaagcagccccccatgtagacactccgcattacatctgcagaaaatggtctctttgtctgattcttttttttttttttttgctggagtctcgctttgtctgtcaccaggttgg

SEQ ID NO: 11880 - DNA, 120 bp, synthetic construct
  source 1..120: mol_type = other DNA
gaaactactgacccttcgaaattaaaagtataacagtacaaaattacacagcccaggaatcaaaaaacttcattttgcataatccccaaactaaagacattcccccccaaaacacagttt

SEQ ID NO: 11881 - DNA, 120 bp, synthetic construct
  source 1..120: mol_type = other DNA
ttctgtgcatctgggactacagaaatgtcactgtccctgccccacatcttcaaattaacattttcaggtcacaacaataagtcttcccaaaggggaccttccggaaaaataagctatttc

SEQ ID NO: 11882 - DNA, 120 bp, synthetic construct
  source 1..120: mol_type = other DNA
aaggccatcattttaccaggataataatctacctggatcgtatttgtaagttgaatgtgggcactcaaatggcttctaggtctcatctagggattctttcttcttcattactcctgctca

SEQ ID NO: 11883 - DNA, 120 bp, synthetic construct
  source 1..120: mol_type = other DNA
taattttctcagccctgcatagatccttcttcttgactgtacaagcagctttggatgctaagtgtagtaccaaccctgtaatatttcactggactacatttggaacatattcagggtacc

SEQ ID NO: 11884 - DNA, 120 bp, synthetic construct
  source 1..120: mol_type = other DNA
caaaggcacttaccataactaaagagaccaggaagctgacacacttgccgcccaaaaatatttcgtcctattgttggaggaagaggctcatatcccacctttaaaaacaatggaatatat

SEQ ID NO: 11885 - DNA, 120 bp, synthetic construct
  source 1..120: mol_type = other DNA
atccgtttaccttgtaactgtttataagccaattaggcagaggcactccatgagacaagagcttgttgattacacagtggtgatacaagttattctggactttgtacctctccaggtaag

SEQ ID NO: 11886 - DNA, 120 bp, synthetic construct
  source 1..120: mol_type = other DNA
ctaacctcgtgtcctttagatctcagggtaactgtgaattccttaaagcctttccctgccccactaattatatttggtcctcttattagcctctcataacccgtatatttttcctctagg

SEQ ID NO: 11887 - DNA, 120 bp, synthetic construct
  source 1..120: mol_type = other DNA
gtttctcagatgagaagtctcaccagagttgactgtggcttctgagcattatgaggcacatgtaggatttaaagctgaaaggctttatccctgagactcagggaaatatgacaatctttt

SEQ ID NO: 11888 - DNA, 120 bp, synthetic construct
  source 1..120: mol_type = other DNA
accaatgggctttttcattttggggcaatcaaggtaaagattttctggtgctcctgtgtgacagggaaagcatgtcttgtattttctctctctttcccttctgtcttttgagtttggaaa

SEQ ID NO: 11889 - DNA, 120 bp, synthetic construct
  source 1..120: mol_type = other DNA
ctttgagaaggcagctgtggtcccacagccttgaccaccaggcaccatcctctgttgccagtggacccacatttcaaatcattttatctctttttttttttttttttttttgagacggag

SEQ ID NO: 11890 - DNA, 120 bp, synthetic construct
  source 1..120: mol_type = other DNA
ttgctagtgggaatttgcagagtatctccttagctgagagaagaggtggattaaaagctgcttttccttaaagggctctgttacattcttttgtggtaggaaaggaatcattcgagagtc

SEQ ID NO: 11891 - DNA, 120 bp, synthetic construct
  source 1..120: mol_type = other DNA
ctttttctcctgaagctgattctaactcagccaggatattggtatctccaggacactagcttaatgacagcctgtgttcaacttctcagactccataatcaagggaacaaattctcctag

SEQ ID NO: 11892 - DNA, 120 bp, synthetic construct
  source 1..120: mol_type = other DNA
atgtctaaaagcttaatgttatgaaagcacatttacagtattcaataattatccttttttacttaactgtaccaatattagtacatgcagtacacatatataggttttaatgtgaattcc

SEQ ID NO: 11893 - DNA, 120 bp, synthetic construct
  source 1..120: mol_type = other DNA
aagtgaacaatataaccatgcaaccctttggtatccgtgtctgtatttacagtcagatttatagcattaagtttgaaagatagtgaaaaagaaatactttctggcataatatgtactgag

SEQ ID NO: 11894 - DNA, 120 bp, synthetic construct
  source 1..120: mol_type = other DNA
atagttcatataatattatggttgagtaatctttccccattaatttttgctgtatcatttattactaatatttccttatagatcaccaagcctatttctacatcatctactgtaatcttt

SEQ ID NO: 11895 - DNA, 120 bp, synthetic construct
  source 1..120: mol_type = other DNA
tcctgcagatttaactacaaaacacatagtaatattttatttgtgaaccaaagtaatgcttttctttatcagattttagaccattttgaaacttaatttttcacttaatgattgaaagaa

SEQ ID NO: 11896 - DNA, 120 bp, synthetic construct
  source 1..120: mol_type = other DNA
aaatggaataatgtttagaaagcactgagtaggtgctttcaaaattgcgagtagtcatcatcttagtaaatattcatgtgtgcttaagaatgtgtatactatagctgttaactcgagtct

SEQ ID NO: 11897 - DNA, 120 bp, synthetic construct
  source 1..120: mol_type = other DNA
gctgaagaaagagcttgatgtctaactctctgaaattttccattcttatttgtctcactggtatatagttattttttacaaagtactttcatacacacctactaagaagacaggaggatc

SEQ ID NO: 11898 - DNA, 120 bp, synthetic construct
  source 1..120: mol_type = other DNA
ctacatacggtagctctaaaactgaggtatgttaagtaaggatgaatgtatgttatattttgtgatctttcatattgaacatacatcataataaatatatcaatttatctgcattgtctt

SEQ ID NO: 11899 - DNA, 120 bp, synthetic construct
  source 1..120: mol_type = other DNA
gagttccagcatatgggtgtcagtgcaggcgaggttgagcaaagggttcagatcacacataaagtgatctatgacattaggaccacagaaaggtaattggaagatgaagaggatctgtat

SEQ ID NO: 11900 - DNA, 120 bp, synthetic construct
  source 1..120: mol_type = other DNA
tggtatcttgactgatctcaaggctgaaagcctcagaaccagcttcaggagaaagaaagaggaaattgcctttcctctggccttttccttttatctgagctacaagctgattgaatggta

SEQ ID NO: 11901 - DNA, 120 bp, synthetic construct
  source 1..120: mol_type = other DNA
gttgtgctttaatgaacactgtcaagagaagaaactatagctatcacttatctccacatgttcagaagcttttcatcaacccagaccccaaaatgacatgctgctctttcttcctcagaa

SEQ ID NO: 11902 - DNA, 120 bp, synthetic construct
  source 1..120: mol_type = other DNA
ttaaaatatgacttagacttaactcttttctctacttccacatttagatggccagaaaagatatggctcacatcaattgcacccaggcgacagagtttattcttgtgggcctcacagacc

SEQ ID NO: 11903 - DNA, 120 bp, synthetic construct
  source 1..120: mol_type = other DNA
gccctggacacagacaagatggcctctgtcttctacacagtgatcattcccatgttgaatcccttaatctatagcctccagaataaggaggtgaaagaagctctgaagaaaatcattatc

SEQ ID NO: 11904 - DNA, 120 bp, synthetic construct
  source 1..120: mol_type = other DNA
aaataagccaggcacagaagaaaacatattgaatcatcccacttatgagtgggttctaaaagttagaactcctacaagtagagaatacaatagtagttgccagtgactggggcagggtgg

SEQ ID NO: 11905 - DNA, 120 bp, synthetic construct
  source 1..120: mol_type = other DNA
cagagggaagcatcaattgcagaaagtaaaactgatgtgacacatctaatcttaaaacaccgtggtatcataaaccctgacatgtaactatagaagagagtctcaaactacttgacggct

SEQ ID NO: 11906 - DNA, 120 bp, synthetic construct
  source 1..120: mol_type = other DNA
tggtagactgaaggttttgttagtgtgcttcttccacttgcaaagaccaaatagtgcagagacatgctatgagccttcttccaagaagcaacacaggaacttaacaggaaaactgaatga

SEQ ID NO: 11907 - DNA, 120 bp, synthetic construct
  source 1..120: mol_type = other DNA
gtacagctctgtggaatgaatgaggcacatcccagaactcaccaattcataaaaatcagatgcagatgggatcttaaagatcacctatcctaagtcccttgtttcacagatgaaaagacc

SEQ ID NO: 11908 - DNA, 120 bp, synthetic construct
  source 1..120: mol_type = other DNA
gtgtgtcctactcttgctgacacttcataaaaagaggaaccccatttaggtgttttgagtggcagggattccaagcctaccccctggatgggcctggaagagaacaagagcaccaggcca

SEQ ID NO: 11909 - DNA, 120 bp, synthetic construct
  source 1..120: mol_type = other DNA
ccagtcccattgctccttactgaaagactctggacaagcaagttatttcctctgtgcctcaatttcctcatttgtaaaatgcgggtatatattacttatctcacagaactgctgtgcgaa

SEQ ID NO: 11910 - DNA, 120 bp, synthetic construct
  source 1..120: mol_type = other DNA
accaccagcagtagcagaatgcctggcaccaagatgccaaggacttttcctgcactggagatgcacccagttgttatcacaagtttcaggcaggaaaagcgaaattgaaaccagttttgg

SEQ ID NO: 11911 - DNA, 120 bp, synthetic construct
  source 1..120: mol_type = other DNA
aggggagaggggagaggggagagggagaggcagaggcagaggcagaggccagaatttgttttcattctttattttctttccctagctttttattgttgttgttatttagtttttatttca

SEQ ID NO: 11912 - DNA, 120 bp, synthetic construct
  source 1..120: mol_type = other DNA
catggctgagacactcttggattatgtgactatcaaaaccctgtcaacattctttttcggaacagcttaaaaagcagaaaagggagtttgcaccaatatttccccatctccttcatcctc

SEQ ID NO: 11913 - DNA, 120 bp, synthetic construct
  source 1..120: mol_type = other DNA
attattttgtcctggaagagactaggactcggaatagttaagtaccttgtccaaggtcacatgactagtcaatgaaaaagcctggagtctaatccaggtctgtcttattccaaagccaga

SEQ ID NO: 11914 - DNA, 120 bp, synthetic construct
  source 1..120: mol_type = other DNA
caccaaacagagcagatacagagcttgagttcttgaaagagttgcgtatcagtccacgacttaccacctgggaatcactggttctaatctaattcccttaaacatcacattttcttctgt

SEQ ID NO: 11915 - DNA, 120 bp, synthetic construct
  source 1..120: mol_type = other DNA
ctccagttacacaggtaagaggtcagcagtagcttataggtctcacttatattatccacgtgcccaactgcagccatcgtgggctagtgctaaaactttcttttgaattttcatttttct

SEQ ID NO: 11916 - DNA, 120 bp, synthetic construct
  source 1..120: mol_type = other DNA
aatggtgggtcttttaacaagaagagggcctgggatctctagaatggaagggcacctagaaattacaggagtggggatgaaagttgttgtctttctttttgttttctacagcgagactcc

SEQ ID NO: 11917 - DNA, 120 bp, synthetic construct
  source 1..120: mol_type = other DNA
gcccttctagtcactacctgggtgacaaaatcatttgtacaccaaaccccagcaacacacaatttactcatgtaacaagcctacacatgcacccgttgaacctaaaataaaagttaaaca

SEQ ID NO: 11918 - DNA, 120 bp, synthetic construct
  source 1..120: mol_type = other DNA
gtgtttgcagatatgatctcatatgtgaacatgctaagaattccaccaaaaaaagaaatcctgatagaattcataaatgaggctcaatggtgcccaggctggagtgcagtggcgtgatct

SEQ ID NO: 11919 - DNA, 120 bp, synthetic construct
  source 1..120: mol_type = other DNA
gtcacttagcaggttctgctatcctctgtttccctcctaaacagatagttagaataacaggtttatttgattcaggttcagtaggatgtgggagggacatgtgagaaaacgtcatggata

SEQ ID NO: 11920 - DNA, 120 bp, synthetic construct
  source 1..120: mol_type = other DNA
tcttgaagttggtttgtgtatcctttagacaggactctagtaatctattaacttccttgctttctggcactagatattccaggatatcttgtacatttcatgattcagacctagaaccag

SEQ ID NO: 11921 - DNA, 120 bp, synthetic construct
  source 1..120: mol_type = other DNA
ccttctctttcgctctgacctgctgttgctaattttcagagtgccccagcaaacttctgtttggcttcttgacgcttccatccctgcataaacaatccctttattatattactttgatta

SEQ ID NO: 11922 - DNA, 120 bp, synthetic construct
  source 1..120: mol_type = other DNA
cgggctggcgtgcagagagcaacatttgttttctaaagcaaagaagcaaacaaattaaagaggacttgactgagcagctctaatatgaagactgcttgggattctgtcattttttgggga

SEQ ID NO: 11923 - DNA, 120 bp, synthetic construct
  source 1..120: mol_type = other DNA
ggtaacacagaaagcaaaagcaaaatttgaggtagagttgagtgtgcggaatatttattaagaagtgtttttgggagaaagaagattgggcaaagggcaaagctgagctgtgatgcaggc

SEQ ID NO: 11924 - DNA, 120 bp, synthetic construct
  source 1..120: mol_type = other DNA
taaacacggtttccaaggattcatgatgaatagaggcagctccaagattccaaatgtgattcatatgatctcaaagcccatgctcgctttgaataagcaatgtatcactacaactgtgtg

SEQ ID NO: 11925 - DNA, 120 bp, synthetic construct
  source 1..120: mol_type = other DNA
ctatttgatatataggatgagtgaagagaaattagattttagaggataaaggggacagaaatatatgatacacaaatttagcttagtgggaagtcttcattttgcttcagtaagtctaag

SEQ ID NO: 11926 - DNA, 120 bp, synthetic construct
  source 1..120: mol_type = other DNA
accttctcttattatctgtcagtctgaaatactcctcaataataaaaatgtcaagacttgaaaaaaaaaaagaaagaaatgataaactttaaaatacctcagggaatataaaataaaaga

SEQ ID NO: 11927 - DNA, 120 bp, synthetic construct
  source 1..120: mol_type = other DNA
gctatgctatcctatgctatgctatgctatcctatgctatgctatgctatcctatactatgctatgctatcctatggtatcctatgctatgctatgctatgctatcctatgctgtgctat

SEQ ID NO: 11928 - DNA, 120 bp, synthetic construct
  source 1..120: mol_type = other DNA
gaattcttgacttgctgaattaaagtgagtaaaaatttgaaagcttcagtggcaagtgtctatgtattaggcacagagccacttaatgattctcttaatacaagaaaagtataatcctgg

SEQ ID NO: 11929 - DNA, 120 bp, synthetic construct
  source 1..120: mol_type = other DNA
agtcacattccaaggtactgggagttaggacttccagtattccaagatactaaccactggtattgctaaccaccactcctgggaaatgaggcaatcagaatctaaaattgctaccatata

SEQ ID NO: 11930 - DNA, 120 bp, synthetic construct
  source 1..120: mol_type = other DNA
aaagaaaagtagtaagtatatgaggttatgaatttgttaattagcctgatttaatcattccaccctgtaaacatatcaaaacatcacattgtaccccataaatatatctgcaatgattat

SEQ ID NO: 11931 - DNA, 120 bp, synthetic construct
  source 1..120: mol_type = other DNA
tattgcccagtccgaagaacaggaaaaaaagaaaatgaagaaaactgtacagaacctcaaaatcctttgagataccatcacatgtataatgggagtcccataaaaatggggagtaccaga

SEQ ID NO: 11932 - DNA, 120 bp, synthetic construct
  source 1..120: mol_type = other DNA
cgcagggacatggcaaatttcatctgcagatttgtttttatttctgctgtgcaattaaaaaaaaaaaaaaagggtaagagctgtgaaaggaaaggaagatgggcttcccggaagccagtg

SEQ ID NO: 11933 - DNA, 120 bp, synthetic construct
  source 1..120: mol_type = other DNA
atttttcactggtgggatgaatgaataaagcaatgccagcccccccttctcacctgagctttctgggcaactgcagttcggctaggtttagttgaaaaacctcagagctcagcttgttta

SEQ ID NO: 11934 - DNA, 120 bp, synthetic construct
  source 1..120: mol_type = other DNA
agccctgtggcagggagaaggcagaaatgaagtcactgtgtcctcggagtcagatgcaaagccaagcgtgactctgttcattttacagaaggacagactgaagcccaagagcttaagtaa

SEQ ID NO: 11935 - DNA, 120 bp, synthetic construct
  source 1..120: mol_type = other DNA
ctatgatacaatacagtctgtttatttccagctgatggatggttagagtacttctaattttcttctgttacaaacagttccgcagaaagtatccctgcacacatctgcatgtgaacaatt

SEQ ID NO: 11936 - DNA, 120 bp, synthetic construct
  source 1..120: mol_type = other DNA
gaatgcatgtgtgtgtgtctgtgtgcatgtgtgtgagaactgtgtgtgggggaatgtgtgagtctatgtgtgtctgtgtgagtctgtgtgtacgtgtgtgagaactgtgttggggggtaa

SEQ ID NO: 11937 - DNA, 120 bp, synthetic construct
  source 1..120: mol_type = other DNA
cccttaaaccccccacctgctcctcacctctggcctcagacttcattgagatagggcggctcccagctgagtatgggaacccgtgtcctgctctagggccctcccaactgaatcccatca

SEQ ID NO: 11938 - DNA, 120 bp, synthetic construct
  source 1..120: mol_type = other DNA
cccgtggttcccgaccagggaaaacctccccctcagaatcacctgggagagcctttcacatttctaaaaatttcttgaatcagtgacacattcatccagctcaaaaatttaaaaaaatat

SEQ ID NO: 11939 - DNA, 120 bp, synthetic construct
  source 1..120: mol_type = other DNA
taggcaaaacccggaaacaaatcaaatggtgaatggaaaacaaattggcatgtccgtgtagtgaactatcattcggcaataaaaaggaatgaactacttatgcgtccagtgacatagcta

SEQ ID NO: 11940 - DNA, 120 bp, synthetic construct
  source 1..120: mol_type = other DNA
aaggtggaagccagaaaatcaaatggtagatagcacatatttgctacatgaatggtaactaaacgggaagtaaaagagagaaatggatggatggatggatggatggattggtgggtgggt

SEQ ID NO: 11941 - DNA, 120 bp, synthetic construct
  source 1..120: mol_type = other DNA
actctctgagtgcatcatgtacaagtgagtccgggtggtgtgggtgtgaagacgctgcctcccacatcacctttctttcctcccgtgtcttccttcttcccttttttctccctctctatt

SEQ ID NO: 11942 - DNA, 120 bp, synthetic construct
  source 1..120: mol_type = other DNA
gtcagagttcattcattcattcgttcactcgttcatgcaatgttaatttctctgagcgcctcattctatttcagggcctgtgctgggctcagggggagacagcagtgagcaaactcatag

SEQ ID NO: 11943 - DNA, 120 bp, synthetic construct
  source 1..120: mol_type = other DNA
gtggtcacggaaggcctgttggcagaggggacatttgactagagagctgaatgattgatttttgataaaaggatcagccaaggaaagatctagaataaacattttcctagcacaaggaat

SEQ ID NO: 11944 - DNA, 120 bp, synthetic construct
  source 1..120: mol_type = other DNA
tgaagacagtggctgggaagagaaagataagaactgtgaggaatgaaggaaaagatggagaggcagactgaggagatgacccagagacagcccctagggaggccctgacagagagacccc

SEQ ID NO: 11945 - DNA, 120 bp, synthetic construct
  source 1..120: mol_type = other DNA
ccatcccaggaagacatccagcccatgaccttcacccagctctcagagaataacactcaccgcttgtccttgcagccaaccacaaccgcttcaaccctgaggattcttccacctaccagt

SEQ ID NO: 11946 - DNA, 120 bp, synthetic construct
  source 1..120: mol_type = other DNA
aagcaagggatttgaaagtcaatgtctgaggctggagaagtgtgtctttggagagtaatagtgccaagtctgtctctgacgggccatgtgcactccatcttattttaccagcatctttgt

SEQ ID NO: 11947 - DNA, 120 bp, synthetic construct
  source 1..120: mol_type = other DNA
cactcccccgctgtatgaccttgggcaggtggcctcacctccctcaggctcagtgtcctcatggtaagtggaaataacagtgacagtgcccactgcataggcactggcctaagaggaaaa

SEQ ID NO: 11948 - DNA, 120 bp, synthetic construct
  source 1..120: mol_type = other DNA
tgggttttcccaagaatgaacaatttcccaggacagagactttcagtactaaaactgggaccagcccaggcaaaccaggacacatggatcacctcatgtctgcccagccatgctagaatt

SEQ ID NO: 11949 - DNA, 120 bp, synthetic construct
  source 1..120: mol_type = other DNA
cagtgcctacatcctgcaggtgaggaggctctggaccatccactagaggggttcacacagaatgtggacacagagttcccctctgcagacggaaagtacacttccacgagctgaagccaa

SEQ ID NO: 11950 - DNA, 120 bp, synthetic construct
  source 1..120: mol_type = other DNA
cctccaccctggcctcccacggccacaatagcccaagtgttttcccacctccagactttgcacatgctgttccctttgccagggttgcttttccctctttcttgactagctaacacctag

SEQ ID NO: 11951 - DNA, 120 bp, synthetic construct
  source 1..120: mol_type = other DNA
aacacttatcatgcttaagtgctccatctcagccttgccatgattgggttccttagatctcattccattgcttgatttgattggttcatggaacatttatgaacacctgtgccattggca

SEQ ID NO: 11952 - DNA, 120 bp, synthetic construct
  source 1..120: mol_type = other DNA
ttatagagcagctttctttatcagagtcagcaaggggaagagtctatacagagagtgtgctagcaagacacaagctacaagcctgtataatgtcatcacaaaactgacatcccatctact

SEQ ID NO: 11953 - DNA, 120 bp, synthetic construct
  source 1..120: mol_type = other DNA
gttgaggctgcagtaagccatgttcatgccactacgctctaccctgagtgacagaataagaccctgtctcaaaaaaaaagaaagggagagagagagagagaagcttgagaggaagagaag

SEQ ID NO: 11954 - DNA, 120 bp, synthetic construct
  source 1..120: mol_type = other DNA
cctggggctccttcacatctctccaatgctgtgttaaacgcacttttaaccaactttgtcaaaatgctcagctggtaaagttttaacgtaggcccttgtcaatgcttcagaaataagcct

SEQ ID NO: 11955 - DNA, 120 bp, synthetic construct
  source 1..120: mol_type = other DNA
ttctttgcattatggggcagaagtgggagcttctcccttccttccatcttcctctcttagatcagctggttaagagtccagcctgggtttggctcccagctccagcactagtcaacttaa

SEQ ID NO: 11956 - DNA, 120 bp, synthetic construct
  source 1..120: mol_type = other DNA
ccctctgtgactggcacagggcacaaagcagtgatgcctgtggttcagagactggcctctgccatccagcagacctggtgcaaatatgggtcctagtgcctctaagccacaggaccttgg

SEQ ID NO: 11957 - DNA, 120 bp, synthetic construct
  source 1..120: mol_type = other DNA
agaatagcccaccaggaaagagtccagtgtgagaaaatggcttcaaagcctggctaggacaggctagaggtcagtgctgagctcatttaaaaaaaaaaaaagaatcattggtttgctaat

SEQ ID NO: 11958 - DNA, 120 bp, synthetic construct
  source 1..120: mol_type = other DNA
gggtctgctttgcgtttgttcatcagaaacacaaacacacagtgaccatctgttctccagcaaaatctcaccctgagtcatagactgtagccatctggagatcagctgccatggttacct

SEQ ID NO: 11959 - DNA, 120 bp, synthetic construct
  source 1..120: mol_type = other DNA
ccctggatgactaatttcttcttgctgtctacatttgcttcctcatctaacctgaaactgcagaaatttagaacatgaatattgcaataacaaggactcctgcaatttaccacaggaagg

SEQ ID NO: 11960 - DNA, 120 bp, synthetic construct
  source 1..120: mol_type = other DNA
atttccttatggattcatagccaatcagctttccagaatccccccaggaacagctggcacaggggaacacactccagggggaaggtggaagttggccaagccagagacccctagaaagac

SEQ ID NO: 11961 - DNA, 120 bp, synthetic construct
  source 1..120: mol_type = other DNA
atttcccatgcctggcagagagtaggcacttgggaaatatttgttgggcaaatgaatgcgggacgaatgagtgcgtgaacgagaggaacagaaatttcacgcattggccaatggatgggt

SEQ ID NO: 11962 - DNA, 120 bp, synthetic construct
  source 1..120: mol_type = other DNA
gttactcaacaagaagcactgatgcctgggctcccccactgattctgattacattaggagagggcaaggcctgagcaatgggatggggctgcgggggttcaaagctccccaggtgatgtg

SEQ ID NO: 11963 - DNA, 120 bp, synthetic construct
  source 1..120: mol_type = other DNA
tttctcagactgggcttggtagcaaaatgttcaatggaaaacacagtttcagaataagtatagaacatgctacattctaggcccttccccagggttcaccagctacagttcccaatcaaa

SEQ ID NO: 11964 - DNA, 120 bp, synthetic construct
  source 1..120: mol_type = other DNA
tgtttaagattcacaaggacagggatggtgatggttttaattaggtttgaagcccaagcagcaagagccgggcttggcacatactaggaggtcaataaatatttgctgaatgagtgatta

SEQ ID NO: 11965 - DNA, 120 bp, synthetic construct
  source 1..120: mol_type = other DNA
caggttgcagatagagtagcgcagcagaagtgagctgggcccatcaaagcgggttgcttgcaaaacaacatgtgccatatcttgtggtcctatatttgtaagtaaatcaatatattcatt

SEQ ID NO: 11966 - DNA, 120 bp, synthetic construct
  source 1..120: mol_type = other DNA
ttgagctacatcacttgcgaaaaagtgggggttatagtataataattcttttttaaaataattcaaagcattcagaaaagcacaaataggcacacaaatgtaagcactgctgtgtggtgg

SEQ ID NO: 11967 - DNA, 120 bp, synthetic construct
  source 1..120: mol_type = other DNA
tgaatgtgtaaaggggcttgcacgtttctgcctggggaatcttccttctgcttcccaaatatacttctctgctcaaaattcccatgtgggccccagacaaactgtgcccccaaaatcagt

SEQ ID NO: 11968 - DNA, 120 bp, synthetic construct
  source 1..120: mol_type = other DNA
ccacaatcttatcaggagcttctctgtttgggatcaggggaaccggtgactttcagaggccgataaggcgggacccaacttgtatataaggggcagctcatgctgctgctctgcaccttc

SEQ ID NO: 11969 - DNA, 120 bp, synthetic construct
  source 1..120: mol_type = other DNA
tagatgtcagtggcccagggcaggcaggaaagctcacagtcagagttcattcattcattcgttcactcgttcatgcaatgttaatttctctgagcgcctcattctatttcagggcctgtg

SEQ ID NO: 11970 - DNA, 120 bp, synthetic construct
  source 1..120: mol_type = other DNA
cactgaaagccttcttgggtgcctacaatcaatacaagccctcaccatagctccctgactccccaccttcatctcccatcatccctgccttcctcttttttttattttcttttatttatt

SEQ ID NO: 11971 - DNA, 120 bp, synthetic construct
  source 1..120: mol_type = other DNA
gatctccatctccccactaccctgagctggttggcagccagtcctagtgtggactccatcactgtaattaccacctcacataaattttcaatttatgggtatctgcttccctagcctctc

SEQ ID NO: 11972 - DNA, 120 bp, synthetic construct
  source 1..120: mol_type = other DNA
gctgccaaggtgagtgggcgccagagtgaggggctctgttactccaggaatgcccctgggacgttggtgctggtcacatccagctgaatgaccccatatcacccccaattctgtgtccaa

SEQ ID NO: 11973 - DNA, 120 bp, synthetic construct
  source 1..120: mol_type = other DNA
aaatttgcctagttttgtcctacactcattttttcctttgaattattttttccctttcttatcagtctcattgttttttcttttacttttttaacattctttatagatagatgggatttc

SEQ ID NO: 11974 - DNA, 120 bp, synthetic construct
  source 1..120: mol_type = other DNA
gatgttcatctctggcatcttgaatttagggcccttcagtttcgcatctggaccttcaatattcacatctggaacatcaacgtccaccttgggtcctgagacgtcaaggtcagccttggg

SEQ ID NO: 11975 - DNA, 120 bp, synthetic construct
  source 1..120: mol_type = other DNA
tgcaaatcaaagtcaggcatggggatcttgggggctttgatattcatctctggcatcttgaacttgggccctttcaactttccctctggtccttcaatgttaacatcagggccttcaacg

SEQ ID NO: 11976 - DNA, 120 bp, synthetic construct
  source 1..120: mol_type = other DNA
aggtagacaccctgatccgtgttcttagacccgtagcgtttccgcgggatcattgagacgcataacctcggactgttgtggaggggagagtgtcattccccaggcaacttctttacccaa

SEQ ID NO: 11977 - DNA, 120 bp, synthetic construct
  source 1..120: mol_type = other DNA
ccacccccagtgacgagggggcggtcccacgcgtttcaagcccagcgacccgaaagacacgccccacacccaaacgcaagagcgatcccgccctcccattggctaaggcgccaccgtgac

SEQ ID NO: 11978 - DNA, 120 bp, synthetic construct
  source 1..120: mol_type = other DNA
aaaacaaaatcctgcatatttttatttacaagtgggagttaaatgatgagaacacatcatcacatagaggggaacaatagacactggggcctacctaattggggaaggtgggaggaggga

SEQ ID NO: 11979 - DNA, 120 bp, synthetic construct
  source 1..120: mol_type = other DNA
ccctccctatttgtcagtatgagagtgttgtcaaagctctcaccaaaccatcactggaaggactctttcgccatatgaagccatataaaagaagatgaaatatgggaagttgtcccatat

SEQ ID NO: 11980 - DNA, 120 bp, synthetic construct
  source 1..120: mol_type = other DNA
aggtaaggcagagaatgagaaacaaagaaggggaagataaacaaatagaaaagagcagtatgtgtgtcacagactggcaggaagggcaggcaccctttctagagttaactttgaccaaat

SEQ ID NO: 11981 - DNA, 120 bp, synthetic construct
  source 1..120: mol_type = other DNA
aaacacatgagaaagccctttatggtgaaagatgggaatagaaacaaatggggtagacatgaagagttatacaagtatgaaagaggccttgcccaaattaacgaagatattacctcatca

SEQ ID NO: 11982 - DNA, 120 bp, synthetic construct
  source 1..120: mol_type = other DNA
cagatcttgaggcttttgcaccacctagtgacaattgtgtgctattacaatacattgatgatttgttattcactgtccccatgagggaggaatgcctccaaggaatagagaggcttcttc

SEQ ID NO: 11983 - DNA, 120 bp, synthetic construct
  source 1..120: mol_type = other DNA
gtgaaaactgtgagaatggctgctttctagatatcagcactgtgctgggaactctccaggcccagtattttttttaatctgcctgacaactctaggaggtagtgattctaattcctactt

SEQ ID NO: 11984 - DNA, 120 bp, synthetic construct
  source 1..120: mol_type = other DNA
acacttgaggccaggagttggagaccagcttgcacaatatgctaaaactcctgtctctaaaaataaaaattaaaaaagtagctgggcatggcagcacatacctgtaattctagctactcc

SEQ ID NO: 11985 - DNA, 120 bp, synthetic construct
  source 1..120: mol_type = other DNA
atctagcaggaaaaagcacaattcattcagcattatgtattgagtgcctactctgctagaccctgaagtgaggacaagcacgtaactgtgcatctcttcacattcttgatcttaaccctt

SEQ ID NO: 11986 - DNA, 120 bp, synthetic construct
  source 1..120: mol_type = other DNA
aatctccccagaatgacagtaaagggagattccaggataacaacttagtaccaggtgtaaagaataactggtaggcagaatgataagccccaaaaggtgtccatgtcctaatttcaggaa

SEQ ID NO: 11987 - DNA, 120 bp, synthetic construct
  source 1..120: mol_type = other DNA
gagaccctctctaaaaacaaaacaaaacccaaatttattattttacagttctggaggtcagaggtccaaaatgggtctcactgagctaaaatcaagctgttggcagggctgtgttccttc

SEQ ID NO: 11988 - DNA, 120 bp, synthetic construct
  source 1..120: mol_type = other DNA
gtctggagctgcaggcagggaaggggagacagccagctcataatacagtgtgggcaaaaatccagaaaccatgtggatctaatttgatatcaattttacatgtatatgtgtatataccta

SEQ ID NO: 11989 - DNA, 120 bp, synthetic construct
  source 1..120: mol_type = other DNA
ctgcaggcttttgagaggcagccagtggaggctgatggtagcagttggtgagaaagaggaagtatgtagtggccattcctccggccactcctgacaaatatttctgtcactaaacagcac

SEQ ID NO: 11990 - DNA, 120 bp, synthetic construct
  source 1..120: mol_type = other DNA
gtctgccaggtctgtccaaggccaccctgttctctaatagcttgggaaatggaaagcacttctaaatacccctgctcttcagaagagctggctgggtggtttggggagtttcttctttga

SEQ ID NO: 11991 - DNA, 120 bp, synthetic construct
  source 1..120: mol_type = other DNA
tttgtacaggttgaacatccgtaatccaaaagccaaaatgctccaaaatctaaactttttgagtgccagcatgatgccacaagtggaaaattctacacgtaaccccatatgacaggttat

SEQ ID NO: 11992 - DNA, 120 bp, synthetic construct
  source 1..120: mol_type = other DNA
tatgttgtttggggtgttggttggggtgttggttggagtgttggttggagtgttggctgggatgttggctggggtgttgaccggggtgttggctggagtgttggttgagatgttggctga

SEQ ID NO: 11993 - DNA, 120 bp, synthetic construct
  source 1..120: mol_type = other DNA
gtgtattgtttggggtgttggctggcatgctggttggggtgttggctggcatgttgttggggtgttggctggcatgttggttgggctgttggctaggatgctgattggggtgttggccag

SEQ ID NO: 11994 - DNA, 120 bp, synthetic construct
  source 1..120: mol_type = other DNA
acacggatggggcagccctgctggcacgtgcatcatctggctgggagaccatcaggaaagacagcacgagaatcaacttgcacaagaatccctgtgagtgccagaggccgagaaggaaat

SEQ ID NO: 11995 - DNA, 120 bp, synthetic construct
  source 1..120: mol_type = other DNA
gcagcactgacctctgacctctgggtcagttggttactgactgctgactgtgcctaggagaagggggaggagggaggggagaaagaagacagaggaggaggagggaagagaagatgagga

SEQ ID NO: 11996 - DNA, 120 bp, synthetic construct
  source 1..120: mol_type = other DNA
ccggggcttatctgatgcctttctccacctgttttcagatattccaggaagaccaaggggaatcttctatgtccaggctgagccaagagcagaaattctttaattagctttctcctggat

SEQ ID NO: 11997 - DNA, 120 bp, synthetic construct
  source 1..120: mol_type = other DNA
acccaagtagtgactgcacagttgcatacactgtgcactgaagatctctacacttgcagcacttgactgtcaaatgtaacttggctgaaagtgtgatttgaatgtaacgatgaaaagtgt

SEQ ID NO: 11998 - DNA, 120 bp, synthetic construct
  source 1..120: mol_type = other DNA
agcacaaataccagcatgcctggtcttccaagaattcggggaacccaggagctttggcctggagtgggatctagactacagatcccagcatgccctgtgagacacacacacacacacaca

SEQ ID NO: 11999 - DNA, 120 bp, synthetic construct
  source 1..120: mol_type = other DNA
ggggtaggagctgtggcgactccggatctccacagccccagcgcctgcagagggtcagtgggtaggggggcgacgttaatctcagctcctctaagcccctggccctgcctgaaccctccc

SEQ ID NO: 12000 - DNA, 120 bp, synthetic construct
  source 1..120: mol_type = other DNA
ctctgactctctctccctacccactctggtcccatgaagccctcaagtactctggggatggatccttcccccttcaaaagattccttcttttgttctacacctcctgggtgtaggggcct

SEQ ID NO: 12001 - DNA, 120 bp, synthetic construct
  source 1..120: mol_type = other DNA
tcacaggtggagaaatgggtgaggacaaattcagggaggtggcgtctgggaaagggcctccagaggatggggcaggtgtaggggagtgggggggctgtgtaagtgatgcagccttggaag

SEQ ID NO: 12002 - DNA, 120 bp, synthetic construct
  source 1..120: mol_type = other DNA
ctgggaggtgcagtggactctagggagaggtcattgttcctagactgcagatgaggagactgaggccccgggaggggaagcttttgcccaaggtcatgcagtgagttagtatgaaggcca

SEQ ID NO: 12003 - DNA, 120 bp, synthetic construct
  source 1..120: mol_type = other DNA
gtaggtaggtaggtaggtaggtagatagatagagacagataaataaatgggttgacagatgtgtggattggatgagtggatgggtgagttggtggatagatggattggattgtatagatg

SEQ ID NO: 12004 - DNA, 120 bp, synthetic construct
  source 1..120: mol_type = other DNA
acactaagaagaaggctgagtccacaaatctctcccacccaacagcttggagtggagtaacaatttgcagccactcctcagagcaggagaaaattacatctcatacagtggctccacaag

SEQ ID NO: 12005 - DNA, 120 bp, synthetic construct
  source 1..120: mol_type = other DNA
accgttggaatttggaaagtttttgttttctttttcccacacatttccggggttggggtgttttccaagactcagacacatttgttaacaaagagagaaaaaaaactgggggagcaggga

SEQ ID NO: 12006 - DNA, 120 bp, synthetic construct
  source 1..120: mol_type = other DNA
cacataatatttcttgtgcttgaaatactcttcacctacagctggctaagaaaatctactctttctttaagacccaagtcaagggctagctacaatggttcgcgcctataatcccagcac

SEQ ID NO: 12007 - DNA, 120 bp, synthetic construct
  source 1..120: mol_type = other DNA
caatttgtttctccctgtctcaggctttggggcccagcggttaaggttctggtcccagcattcctctgactttggacaaatcactctctttggcctcagtctcctcatctgggaaatagc

SEQ ID NO: 12008 - DNA, 120 bp, synthetic construct
  source 1..120: mol_type = other DNA
cgagacagcccagaagtgtcaggcaggcagctggatgtaggcactgaggtccagtgtgtgggaggtgcacatttgggtgttatcaggatagagatggtatttgaagctgtgatcctggat

SEQ ID NO: 12009 - DNA, 120 bp, synthetic construct
  source 1..120: mol_type = other DNA
caagaccagtgctgttgtgaccctattcacagtcacctgcggtgggcgtggaaacgttgggcctctccaagcctgtgtttgattttccccttcattcgtcgtgttttactcagcaccgag

SEQ ID NO: 12010 - DNA, 120 bp, synthetic construct
  source 1..120: mol_type = other DNA
tgtctttttagttttttgttgtaagcagcatccaatcaagtttcccacccgcaaaggagccttttctgactaccggagattctagagtatgtgggagacacatttatgacggaagaagaa

SEQ ID NO: 12011 - DNA, 120 bp, synthetic construct
  source 1..120: mol_type = other DNA
gagctgaggagggggatggtgggattcatgagctgaggagggggatggtgggattcatgagctgaggagggggatggtgggattcatgagctgctgaagagggggatggtgggattcagg

SEQ ID NO: 12012 - DNA, 120 bp, synthetic construct
  source 1..120: mol_type = other DNA
gataatagcagctcttgccaattaagcacttgttatgagacaagcctgtgttcattctcttcatgctcacaatcagcccttctaggaggtactgtttatagaaatgaggaaactgaggct

SEQ ID NO: 12013 - DNA, 120 bp, synthetic construct
  source 1..120: mol_type = other DNA
aggattaaggcctgagtatttactactgcttaaaaaccacatcaatagtccgtccatcttgtttcctctagctatttttgcagatgtcaccagaaggctccaatgatgggtacacaaacc

SEQ ID NO: 12014 - DNA, 120 bp, synthetic construct
  source 1..120: mol_type = other DNA
ctcttcatttcttcctttatagctgggtttccatcttcagcctgaagaaaatcctttagcaaatcttctagcagcagattatttcatcttctatcttaaaatgcctttaccttaacctca

SEQ ID NO: 12015 - DNA, 120 bp, synthetic construct
  source 1..120: mol_type = other DNA
cgagatctcaggaatttttgtaggggattgaagccagagctagttgcgtcccagggaccaagagaaagaagcagatatccaaagggtgcagccccttttgaaaggggtgtttacgagcag

SEQ ID NO: 12016 - DNA, 120 bp, synthetic construct
  source 1..120: mol_type = other DNA
atttctttttatttgttaagagtaacaaaagtacagttcaggcacaggggctcatacctgtaattccaaccctttgagagcccaaagtgggaggattatgtgaagcaaggagtttgagac

SEQ ID NO: 12017 - DNA, 120 bp, synthetic construct
  source 1..120: mol_type = other DNA
caaagtgctgggattacgggcatgagcctccacacccaaccttgagctatctaaactggaggaaattattttaagtctttcctcctaagtaacaattaatgtgaagaccaagaattgtaa

SEQ ID NO: 12018 - DNA, 120 bp, synthetic construct
  source 1..120: mol_type = other DNA
taaatattaagcagagtcagcaagaagagaggggagttaagaagagacatctaaagaggaggcttagcattatgaaaagtgtccggagatagcttgcttgtgtttatcagggaccactga

SEQ ID NO: 12019 - DNA, 120 bp, synthetic construct
  source 1..120: mol_type = other DNA
tttctttgtgtctgtgtgtctttgtatagctttgtgtctttgtgtgtctatgtgtgtgtgtgtgtatggctgtctgtctttgtgtgtgtatgggtgtctgtgtgtgtctgtgtatgtatg

SEQ ID NO: 12020 - DNA, 120 bp, synthetic construct
  source 1..120: mol_type = other DNA
tgtgtatgggtgctgtgtccatgtgtatctgtgtatgggtgttatatgtgtatgggtgtgtgtgtccatgtgtgtctatgtgtgtatgggtgtgtctgtatgtgtatgggtgtctgtgtg

SEQ ID NO: 12021 - DNA, 120 bp, synthetic construct
  source 1..120: mol_type = other DNA
catctgcacttgcaccgcaccaggcattcttgtcatatgtgatgcagggacagtgctcgcccatggacagagccagctgaaccaatggcagaagtccgtgtcttgtgaatgacaagatga

SEQ ID NO: 12022 - DNA, 120 bp, synthetic construct
  source 1..120: mol_type = other DNA
ctgtgacctggaagctgccccaaccctcacccccaccccctgcttcaagctgtccctgcctttctggatggaaccgatgtacttcatatatatatatatatatatatatatatatatata

SEQ ID NO: 12023 - DNA, 120 bp, synthetic construct
  source 1..120: mol_type = other DNA
acttgtgcctgttcccgagggaggcattgtgagtgatgtttaggccaagaggattcaggatggaagacatggcttggtttgtagttgggagccggccaaggagtggtgttgagaaagtgc

SEQ ID NO: 12024 - DNA, 120 bp, synthetic construct
  source 1..120: mol_type = other DNA
cacaatacaaaattaagacaaaaagttaatcacatatccactgccctgcttaagacagaaaacatgggtgttgttgaagccagaggcagctgctggcctgagtttggtgattggttccta

SEQ ID NO: 12025 - DNA, 120 bp, synthetic construct
  source 1..120: mol_type = other DNA
ctcaaagtaagtaaataggaggagagacaagtgggcagttcagactgatggtatgggcacagtagagactggtgcagacaggctggcctgtgatgtcaagcaacttctgtaattgtttcc

SEQ ID NO: 12026 - DNA, 120 bp, synthetic construct
  source 1..120: mol_type = other DNA
acactctctttcttaacgtcctcctcctttcgttttacgttcacatctttaattcttctgggatgtaattagatttgatgagcaaggtgggcatccagcttgtttcttggctgatggctt

SEQ ID NO: 12027 - DNA, 120 bp, synthetic construct
  source 1..120: mol_type = other DNA
tgaagcatcttccccagtgcccccagtctcatgccctctcaacgttggggtcaaatcctgaggaatacccagactggctctctgggccaaagaggaccctctccagaaagagcagggccc

SEQ ID NO: 12028 - DNA, 120 bp, synthetic construct
  source 1..120: mol_type = other DNA
tcattgtggtctgagagtacattgtatgatttctgttatgtgttttaaggctcatagtgtgggctctcttggtgaatgttctgtatgaacttgagaactgtaatctgctgttgttgaaat

SEQ ID NO: 12029 - DNA, 120 bp, synthetic construct
  source 1..120: mol_type = other DNA
tgaaaacgttggtttcaagaattgatcctaagttatggtcctttttttgtgttgtttttgtgagtccccctcctccccacccaccactagaaggtttagatacttcatctctgctaccat

SEQ ID NO: 12030 - DNA, 120 bp, synthetic construct
  source 1..120: mol_type = other DNA
tatattgactctagtaggcacctgatatttgatttaatttgtgtgtgtgggggggggggctgcacctttatgaaattgacacttcactaagaatggagaaacagctactgcgtgaacttt

SEQ ID NO: 12031 - DNA, 120 bp, synthetic construct
  source 1..120: mol_type = other DNA
ctccacctcctcccaagctgcctgccacaaagtactaaatggataaaagagaagctaagaggaaaaaactttcaaggaccataataaaaatccaaaaactcgtgtgtgtgtgtgtgtgtg

SEQ ID NO: 12032 - DNA, 120 bp, synthetic construct
  source 1..120: mol_type = other DNA
atgactctaaggtgacagccaataccagtattctgggtatatttaactatgcccactgttggtggtttaggccggcaactgcagttatagcaagagctgtgagggacagaattctgcagc

SEQ ID NO: 12033 - DNA, 120 bp, synthetic construct
  source 1..120: mol_type = other DNA
ggttgagacctgcctgggcttcctgtcccgagacccacgtgccccacaccctccgtccgcatgcgcctgggcaaccagcaccgtgcaacagggcccagcggtactttctctaacttactt

SEQ ID NO: 12034 - DNA, 120 bp, synthetic construct
  source 1..120: mol_type = other DNA
ttttttgtcttggttttcttctccctctctcttgtcccttctctttccttctttccttttctgtctcattcctttgctttctcactccctcctccctttttcttttcatctcctcttcct

SEQ ID NO: 12035 - DNA, 120 bp, synthetic construct
  source 1..120: mol_type = other DNA
accgcagtgggagcaggaccgtctgagtcctaggaagtgaccacagggggagcaggaccgtctgagtcctaggaagtgaccgcagtgggagcaggaccgtctgagtcctaggaagtgacc

SEQ ID NO: 12036 - DNA, 120 bp, synthetic construct
  source 1..120: mol_type = other DNA
gtgaccgcactgggagcaggaccgtctgagtcctaggaagtgaccgcactgggagcaggaccgtctgagtcctaggaagtgactgcagggggagcaggactgactgtggggagggctgca

SEQ ID NO: 12037 - DNA, 120 bp, synthetic construct
  source 1..120: mol_type = other DNA
ggaccgatacaccctgctgcctccacgacctgaaacttcacatccgtgtttttcactccagagatcaccccagggatcccctgccaacagcttttaaccccagagatcccccaccaacag

SEQ ID NO: 12038 - DNA, 120 bp, synthetic construct
  source 1..120: mol_type = other DNA
gcactggtttccacattgaggactgtgggaagctgggaaattttcaggaggtcaggctgtggctgtaggtcccctggggactatgtgtctcggacagagcgtgtccagatgtgcttaaca

SEQ ID NO: 12039 - DNA, 120 bp, synthetic construct
  source 1..120: mol_type = other DNA
cctccacttgccctcctgccctcctgccatgtccctccacttgccctcctgccatgcccctccacctgccctcctgctgtgtccctccacctgccctcctgccatgtccctccacctgcc

SEQ ID NO: 12040 - DNA, 120 bp, synthetic construct
  source 1..120: mol_type = other DNA
catgtttggatacaatacacatcatcatgcacatacacacgtacattaatacgcacgcccgcatcaccgtatgcacagataatcacatgcaaatatccatgtgaactcatgtccgtgtaa

SEQ ID NO: 12041 - DNA, 120 bp, synthetic construct
  source 1..120: mol_type = other DNA
agatatccatgtgaacttgtgcccgtgtaagatgcatgatcgtgtgtgcacacatccacagtaaggcctcagtgctatccacaggttcttggaaactgtgactttaagggaaatggcgca

SEQ ID NO: 12042 - DNA, 120 bp, synthetic construct
  source 1..120: mol_type = other DNA
aagccatgaactgggctgatttgcttttttaggaagcccctttaacatgcactagcagagtgcaacacatggtaagtgcccaggacactgactggtgaacgaaggactgaatgtcagatg

SEQ ID NO: 12043 - DNA, 120 bp, synthetic construct
  source 1..120: mol_type = other DNA
accctccaaaggcccatcacgagcagctcgatggtgaatgggtgtcttttcttccacccttagctgctgaactccttatctgtggaccctgatgccgagtgcaagtatggcctgtacttc

SEQ ID NO: 12044 - DNA, 120 bp, synthetic construct
  source 1..120: mol_type = other DNA
agacaaaaacactgttcttgttaaggtggggtagaaattgcttttgaacagagttagggagccctgacctgctcctctggccatgtctgctctgggagagggtctggccttcacagccat

SEQ ID NO: 12045 - DNA, 120 bp, synthetic construct
  source 1..120: mol_type = other DNA
tgatagatgatgggtgggtggatggatgatggaaggatgaatgatggatgatgggtgggtgagcgggtaggtgaattgatggatgctggagggatgaataatcaatgatggatggatgat

SEQ ID NO: 12046 - DNA, 120 bp, synthetic construct
  source 1..120: mol_type = other DNA
gattccttccagcacttcagttggatttctttgccttgacagtgcagagtgactgatgtcgcctcttggcagaaagaaaagtccaccgaggtcaagcggtatatgtagaaagctgggagt

SEQ ID NO: 12047 - DNA, 120 bp, synthetic construct
  source 1..120: mol_type = other DNA
aggtttgctggccgaggcttccctatgtacacagtaaaactgtggccttttcatcgttatctgcctaaggaaacgcactgatgcagaaacaccctgtacctttcgcacatcactaactcg

SEQ ID NO: 12048 - DNA, 120 bp, synthetic construct
  source 1..120: mol_type = other DNA
attttcattctttaaaagttgttatggttggcttgttctttttcactgttggtcattagtgacaagaaagttttctgtttccttgtgtggccgggaggtgaggcatgaatgctaggggct

SEQ ID NO: 12049 - DNA, 120 bp, synthetic construct
  source 1..120: mol_type = other DNA
agaaattctgcaggaactgttccataagggaggattgcatcccacagcataggcaggcatctgaatgtagatccgatgtgccttctgctgttcaccaagggtatgtcagacgtcagggag

SEQ ID NO: 12050 - DNA, 120 bp, synthetic construct
  source 1..120: mol_type = other DNA
ctttagacatgggacagaaagcaggattttggtgtctttgaatgggggatgtaaatcctaccttgagtgtaacgaggctttgtgacaaaggcaaaaagtcaaaagggaaatggtgagaat

SEQ ID NO: 12051 - DNA, 120 bp, synthetic construct
  source 1..120: mol_type = other DNA
cgggaggtcaacgctatggtgagctctatgattgcaccactgcgctccagcttggtcaacagagtaagaccctgtttctacaaaataaaagaagtaattgaatacatatattcgtcattt

SEQ ID NO: 12052 - DNA, 120 bp, synthetic construct
  source 1..120: mol_type = other DNA
gctgtccaggggaggtggcaggttggctgttgaatatcacagtctggaacccaagagacatctagaactagagatgaaaattggggcattttgcgcatatggatggtattaagaaacatg

SEQ ID NO: 12053 - DNA, 120 bp, synthetic construct
  source 1..120: mol_type = other DNA
gccgcatgtgcagcctcctgcacagaagaggctgtgtgtagtgacgtttaaaagtgtagaacgtttaccttcttactttggtctgttcagcagcgtttgtttcaatacacgcaagtataa

SEQ ID NO: 12054 - DNA, 120 bp, synthetic construct
  source 1..120: mol_type = other DNA
caggtgtgagccactgcaccaggctagtttaagtttttaaaagcagactcttggatcactgattttcgaggtctttctcattgataatcctttgtcgtgatttttgctctcacggtattg

SEQ ID NO: 12055 - DNA, 120 bp, synthetic construct
  source 1..120: mol_type = other DNA
ctgttgttgggtggcgtgttctacattccattgttgggtggagtgttctatattctgttgttgggtggtgtgttctatgaaacgtcaggtcaagtttgttaagggttgttagtttaggtt

SEQ ID NO: 12056 - DNA, 120 bp, synthetic construct
  source 1..120: mol_type = other DNA
aaagagacatggatgttgctgcgtcactaccacagagatgccctgacaccgagaagagcaatgtgtgcagaatcatcatctttggagtctaaaaaaagtctggtagcttttaggagtgta

SEQ ID NO: 12057 - DNA, 120 bp, synthetic construct
  source 1..120: mol_type = other DNA
tggtggatttttttttttctgccttctgctaggagcatgagacagactaagagagaggtgagagaaaagggcatttggaaacgagcttcgaggtaggggagaaaacaggctctttctttt

SEQ ID NO: 12058 - DNA, 120 bp, synthetic construct
  source 1..120: mol_type = other DNA
caaacttacacatccatctatcacgtgacccaggctttcctcttctgagtatccaagagaaatgaaggcacctaactaccccaagtctagtgcatggacattcacagcaactttatgcgt

SEQ ID NO: 12059 - DNA, 120 bp, synthetic construct
  source 1..120: mol_type = other DNA
aaccccacacctcacttcagccaacggccacttttatgttctgtctgacttagagtatgcaaagtacttctcacaccgaagacttcaaggcacacttaccatcctggtgacagcggaacc

SEQ ID NO: 12060 - DNA, 120 bp, synthetic construct
  source 1..120: mol_type = other DNA
cttaagttaaggagcctgtctgggaaagggaccattgcttggtcatcctcaaagctgcagggcagagttttccaaacacagtcattcctacacatttatttctaaaagcagcttgcaatt

SEQ ID NO: 12061 - DNA, 120 bp, synthetic construct
  source 1..120: mol_type = other DNA
tgggacaaaacacacactgctatttagaaaactctgtcattctttcacgctgccatgcactcactcactcaccacctatccaactacccacctatccactcattcacccacctatcaaac

SEQ ID NO: 12062 - DNA, 120 bp, synthetic construct
  source 1..120: mol_type = other DNA
catctgacaaactgcaaggcaagagaaaacacgtgtcctccctgggattgggtctgggggaaccttcatgcctcagaggagaagaacgtcacaagtagtttaggacacaggtggcagtga

SEQ ID NO: 12063 - DNA, 120 bp, synthetic construct
  source 1..120: mol_type = other DNA
acagaggtggcggtggcagagttaatgggggacagaggtggtgttggcagaactcatgggggacagaggtggcactggcagagttcataggggacagaggtggcgttggcagaactcggg

SEQ ID NO: 12064 - DNA, 120 bp, synthetic construct
  source 1..120: mol_type = other DNA
cccataaataagtgaactttgtcttcatagatgtcatgaagttaacgatcttcagatgcagagactatcctggatcatccaggtgggccctaaatgtatcccaagtgtccttctaagagg

SEQ ID NO: 12065 - DNA, 120 bp, synthetic construct
  source 1..120: mol_type = other DNA
agcgcacaaggaatggctctcctaattattggatctacagcccttggtgggaatgaacgtgacctcaagtcctctctttcacagcctccctctccactaaccaaaccttcccagttcaac

SEQ ID NO: 12066 - DNA, 120 bp, synthetic construct
  source 1..120: mol_type = other DNA
actaaccaacccttcccaggctcaacctctctctccactaaccaacccttcccagactcaccctccctctccactaaccaacccttcccaggctcatcctccctctccactaactaaccc

SEQ ID NO: 12067 - DNA, 120 bp, synthetic construct
  source 1..120: mol_type = other DNA
tcagtgagacaacagccatgagaaggtggaagccacgtgtgcagaactctcccggggagataagcagtgagtggggaagttaggggtctgtgtgcagaactcttccagggagataaacag

SEQ ID NO: 12068 - DNA, 120 bp, synthetic construct
  source 1..120: mol_type = other DNA
ggtacagaactctcccacgaagatgagcagagagtggggaagttgtggggggtgcagaagtctcccagggagatgagcagtgagtggggaagttgggggggtgcagaagtctcccaggga

SEQ ID NO: 12069 - DNA, 120 bp, synthetic construct
  source 1..120: mol_type = other DNA
gaaggggagggaaggagaggagagggaagtggggaaggagggaaagaaggaaagaaagaacgaactcgcttgacacaaagatactgaaagctaccaaagtgttaaaagaaggaattcatc

SEQ ID NO: 12070 - DNA, 120 bp, synthetic construct
  source 1..120: mol_type = other DNA
aagaattcacctgctgcttccacattcaggatatatcagtcagggttctacagagacacagaacgtgtgtgtgtgtgtgtgtgtgtgtgtatcctgctgcttctacattcagggtgtatc

SEQ ID NO: 12071 - DNA, 120 bp, synthetic construct
  source 1..120: mol_type = other DNA
acaccttctcagcaacaactagaatattgtttgatcaaatatctaggagctagagcctagccaagttgacacataaaattaatgatcacaggggaaaattattttcctttttcataaaga

SEQ ID NO: 12072 - DNA, 120 bp, synthetic construct
  source 1..120: mol_type = other DNA
tgcatccaaaaccaggagaaaacaacattgactgagctgccgtagttgatgctgatgacaggaacattctggaactctattaaaggtgacgcataccccatacgcttaaccactgatatg

SEQ ID NO: 12073 - DNA, 120 bp, synthetic construct
  source 1..120: mol_type = other DNA
gtgatgatggagatgttggtaatggcgatgatagtgatcatgatggtgatgatggtgatggtgattgatggtgataatggtgatgatggtattatgatagcgatgatggtgatggtgatg

SEQ ID NO: 12074 - DNA, 120 bp, synthetic construct
  source 1..120: mol_type = other DNA
cacacgactattcaagtgagggctccggttgtgcctgaagggttgtgagcactgctagaggctctcactcaatgacttaaagcttcagttccactggagggtgaggctcagaaacagcac

SEQ ID NO: 12075 - DNA, 120 bp, synthetic construct
  source 1..120: mol_type = other DNA
cataatttgccctctagaaactcacagtcctttccctttgtcttgtcgcttctctacaaatgtactgttcctgctctgaggcaccaacccagcccaagctgtaggcactttttcagacac

SEQ ID NO: 12076 - DNA, 120 bp, synthetic construct
  source 1..120: mol_type = other DNA
gggacaaggagggagggagagggagggacagggagggacagggagggaggaagggagggaaaggaaggaaatgataagaaggaaagctgagaagacttcctaatgcaggacctaagtctg

SEQ ID NO: 12077 - DNA, 120 bp, synthetic construct
  source 1..120: mol_type = other DNA
tccatcggatgttagaaaattgccgttctaagagctgacatagacatagggctgagagcaagtgcgagggtgtgggctttggggaagggtgggctgccagccagtccagagttggccaga

SEQ ID NO: 12078 - DNA, 120 bp, synthetic construct
  source 1..120: mol_type = other DNA
cgctcccagaggaggggtggacctacccctgcccacgctcccagaggagggatggacctgcccctcccatgcccccagccacaccctcaacatggagacaccaccagcccccagtaactg

SEQ ID NO: 12079 - DNA, 120 bp, synthetic construct
  source 1..120: mol_type = other DNA
agtgcacttgccccagacattcttttcccctggggctcataaacaatctcccacaacaggaagagaagctatggtctgagttgcccatagtcccttccttgctacactcaagatcttaga

SEQ ID NO: 12080 - DNA, 120 bp, synthetic construct
  source 1..120: mol_type = other DNA
gagagggagagggcccacacttctaaaagtaatcaatattcacaacagtggcaggtagcatctagggaccatttgacaacactgataaaaggtcaactgaggcagaataagatgcataaa

SEQ ID NO: 12081 - DNA, 120 bp, synthetic construct
  source 1..120: mol_type = other DNA
atgttagtaccctcatttcaaggataagaaaaccaaggcccagagaggccaactggcctgtccaaggtcacacagcaacacagcagagctgctctgcaccgcaacgtaccacttactgaa

SEQ ID NO: 12082 - DNA, 120 bp, synthetic construct
  source 1..120: mol_type = other DNA
aggagaaagtggggtgattaattcttagcagggcaagtaaagtctgggaagtgttcactaacaaaatgtctggtcattaatgaaaccaactggtttctcaacacagtctaatttattgta

SEQ ID NO: 12083 - DNA, 120 bp, synthetic construct
  source 1..120: mol_type = other DNA
tatagtaacatagtacacatgattcaaagacctgtgaaccgagagtaacaacaaatttctgcacaaacatattgcaagttagaaaacagctgtattttaatcaattattccacaatcatt

SEQ ID NO: 12084 - DNA, 120 bp, synthetic construct
  source 1..120: mol_type = other DNA
agaaaaggaaataaatggcatccaaactgttggggggtgggaatgagtaaaattatctatttccaaatgacataatttttttgtaaaaaaccctaaacttcactcccccaaaattattaa

SEQ ID NO: 12085 - DNA, 120 bp, synthetic construct
  source 1..120: mol_type = other DNA
actgaagataaggacagatgggcacagagtggagagaggaacaggcgtggactttatggcagttccgtccctttaacaactatttgtttaatggaaaaagaatcgagggaaaggttctct

SEQ ID NO: 12086 - DNA, 120 bp, synthetic construct
  source 1..120: mol_type = other DNA
gacatggctgggtccccattcatgtgaacatgatatgaggttgagggtcttaaaagaccacagttcagcatgagcccacagtgtaagcatgactggcaagaaataaaaatgctcaaattg

SEQ ID NO: 12087 - DNA, 120 bp, synthetic construct
  source 1..120: mol_type = other DNA
gaagtgaggagcacctctgcccggctgcccatcatctgagatgtgaggagtacctctgcccagctgcccattgtctgggaggtgaggagcacctctgcccggccgccccatctaggaagt

SEQ ID NO: 12088 - DNA, 120 bp, synthetic construct
  source 1..120: mol_type = other DNA
ggaaactgagtcccaagatgttaagtataatgcctagggaaatttttcaagcttaagtaaacattcatattcacaagactactcacaaggatgtaggacaaaaatgactgcctgccaaca

SEQ ID NO: 12089 - DNA, 120 bp, synthetic construct
  source 1..120: mol_type = other DNA
agaccccacctcctaatattatccccttgggggtcaggacctcaacatatgaattttggggaaacttcagaccatagcactattgcataggggaaaaatgatgatttcatagtggaaaaa

SEQ ID NO: 12090 - DNA, 120 bp, synthetic construct
  source 1..120: mol_type = other DNA
tggcggatataaattctggagtattgagaggtgaggaggcattatgttcacgatttgctctcaaatggatcagaaaaagaataatgataatggatatagatatttatatatacacaagca

SEQ ID NO: 12091 - DNA, 120 bp, synthetic construct
  source 1..120: mol_type = other DNA
ataatcaaatataaccaagtggttactgggaaaaatgaccagcagagttgataacagacaggtaagggcggggggcgggatggaagaaaacaaagttttggtccattttctgttgctata

SEQ ID NO: 12092 - DNA, 120 bp, synthetic construct
  source 1..120: mol_type = other DNA
cctatgagagccaagggagtctgaatgcttattacttctaaaaagaccccttgtgggcactgcacaggtgctatgtttcgtactttacaggtattatcacatttagtccttgaaacgact

SEQ ID NO: 12093 - DNA, 120 bp, synthetic construct
  source 1..120: mol_type = other DNA
cactgaatgaattcaggtagaagttgccaggcctctctatataagaagtcagtaaacttttctgtaaaaggccagagagtaaatatttttggctctgcaggccataagatctccagggca

SEQ ID NO: 12094 - DNA, 120 bp, synthetic construct
  source 1..120: mol_type = other DNA
taactcaggctgattctgactggggcctatggaaacccatctccttacttagtcactgtattatgttcatactagcagaccaagaacagagaagaaagatgcctaagtatgttcttatag

SEQ ID NO: 12095 - DNA, 120 bp, synthetic construct
  source 1..120: mol_type = other DNA
acacactgaaaatttaggttgatgttccacttaggaaaaatttcatccacattactgaaatgctgtaaacagaatcaattttcaggtaagagataatctgaataagcctccataaaatta

SEQ ID NO: 12096 - DNA, 120 bp, synthetic construct
  source 1..120: mol_type = other DNA
attaagcagaatggcaaaaagcaaaaaactaaaaggtaaagtgtggatagcagtacagtgtagtagttaacagcctgggcttgggccctaggtaggccacttaagtgacagatcatgtaa

SEQ ID NO: 12097 - DNA, 120 bp, synthetic construct
  source 1..120: mol_type = other DNA
taactctatcagagataaatgaactcatgggcctgcaggcttggggaacagagaattttgccaaatgttatacaattctgcagtgaattctaggactagaacaaaacacccacaggctca

SEQ ID NO: 12098 - DNA, 120 bp, synthetic construct
  source 1..120: mol_type = other DNA
ttatgtgatgtgcattataatctagtaaatgaggaaatggggaagaggaatccagttagattagcagaaagctaggaaacaactctgtatatggaaaagtagaactacatggtacctata

SEQ ID NO: 12099 - DNA, 120 bp, synthetic construct
  source 1..120: mol_type = other DNA
acaggcgtgagccaccacgcccagccatattggctatcttaatatattttttggacaaatgtttattcagatccattgcccatatttttaattggattatttgttccttaattattaagt

SEQ ID NO: 12100 - DNA, 120 bp, synthetic construct
  source 1..120: mol_type = other DNA
ctaactcttttccatcaattttgatggtatgtatgtcgcgaggccttgatggaacctgaaactgggtactgctgggttcagtattctctctgaatccctgcttagataaaagcacatttt

SEQ ID NO: 12101 - DNA, 120 bp, synthetic construct
  source 1..120: mol_type = other DNA
gagtgctagcatcacaggtgtgagccactgcgcccagctcgatttgggcattttgaaggaagtcctagcttctagtctttacaaatgtatgtgtgtgtatatatattaaagttttatgta

SEQ ID NO: 12102 - DNA, 120 bp, synthetic construct
  source 1..120: mol_type = other DNA
acagaaagagaaatattatttatttatatgagggtaaacatgtctacttctgcctctgtcatcagaatgtcagctcatgagggcaaggacttggccttttttcagtgctgtatccccagg

SEQ ID NO: 12103 - DNA, 120 bp, synthetic construct
  source 1..120: mol_type = other DNA
tgcagaatagaaaaagtcctgcccactattacagagatcatgaggaagcatgtctcttcttgagttctgggtaattaaaaaaattttcaaatccaaggtctgcacttcagttattttagg

SEQ ID NO: 12104 - DNA, 120 bp, synthetic construct
  source 1..120: mol_type = other DNA
ctcacgtgaaaatttataaaacataagaaaaaaaatcctattctttctctctgtccccttctccttgccttgtctgtggatgtgatgcctggaggtacagcaaccaccatgtgatgacca

SEQ ID NO: 12105 - DNA, 120 bp, synthetic construct
  source 1..120: mol_type = other DNA
agaaattggcagttgctgaataatagtggactttgagtgccatgctaaggaatgaggatccactgaggagtttcaaagaggaattcatctttgaactttagagagatcactcccatggga

SEQ ID NO: 12106 - DNA, 120 bp, synthetic construct
  source 1..120: mol_type = other DNA
tctggtaaagtacagcgacatctggtggaggcaactagtattacaacccatcaaatggctatcaggtatcaaactctactgtcatggttatagcctatagtactcccactaataatggga

SEQ ID NO: 12107 - DNA, 120 bp, synthetic construct
  source 1..120: mol_type = other DNA
gtcaacacctaagaatcagaactagtatcttgaaaagttaggagccctggggttttgtttttgcttttgcttttaaaggatgtgtttgttccctgtatcaccgtgcccagcttactcctt

SEQ ID NO: 12108 - DNA, 120 bp, synthetic construct
  source 1..120: mol_type = other DNA
agctttccttcacacactatttttgtgggtgtgtatatatctgatttgggaagaatttaaaaaacacatagctttttaatttgtttgaaacagactttctgcctgttacatttttgcttt

SEQ ID NO: 12109 - DNA, 120 bp, synthetic construct
  source 1..120: mol_type = other DNA
acccatgtgtccactctcctcagggcctttgcatgtgtcagcccctctcttaggagtgactgccccaacaacacctccttttcctacagtctggctcaagtcttctcatctgtcactcag

SEQ ID NO: 12110 - DNA, 120 bp, synthetic construct
  source 1..120: mol_type = other DNA
aaggaagtctcttgccagtaaagtgacacattcaagagtcaaagtgaactacaaacagggttttctcagtgggtgtgttaagcagaaggggatactgacaggttgaaaaagacatgctac

SEQ ID NO: 12111 - DNA, 120 bp, synthetic construct
  source 1..120: mol_type = other DNA
cttccagcgccaggcttctttctgagcgcatttcaagttagacttggacaaagtagcattcaatgaatgcctgattaattgaatctccaatactgagtacccactataaacagatgttcc

SEQ ID NO: 12112 - DNA, 120 bp, synthetic construct
  source 1..120: mol_type = other DNA
ataaaaaaaaaaagaaattccaatttagaaggtctggggtagaacccaggagcctgagtggggcccaggatctgcactgtaaacaaccacttcgtgtgattccaatgtaagtggtctgga

SEQ ID NO: 12113 - DNA, 120 bp, synthetic construct
  source 1..120: mol_type = other DNA
aagaaatccagccgttgttattatatcagaatcttggagttgccctaatatcttaaaattcattagggttggaaggaatggagtaagagcacttttctgcagggatgaaccatgggggtg

SEQ ID NO: 12114 - DNA, 120 bp, synthetic construct
  source 1..120: mol_type = other DNA
agattcaaggagtaaggaataggatccccctctggatgggaggagcagcaatgtcatattacaaaagggtgtggacacatgcagggattcttactgccgtctttgcaaacaatccaccaa

SEQ ID NO: 12115 - DNA, 120 bp, synthetic construct
  source 1..120: mol_type = other DNA
atcatcatgttatttgtggtagtatttcagtgtcctctcccaccttacactttggtcaggaaaaaaaaaaaaactgccacaaagccaagaacagttagttacccttatctgaagaccctt

SEQ ID NO: 12116 - DNA, 120 bp, synthetic construct
  source 1..120: mol_type = other DNA
acgcaagtcaaatgatctgtgtgtgcctccctctgcctctggacccaatctgttcatatggttgtattgaagctaatttcatccacatacaagaatgtctagagctagcatagtgtataa

SEQ ID NO: 12117 - DNA, 120 bp, synthetic construct
  source 1..120: mol_type = other DNA
acagggtttctgttccctgccctgccttgggccctcttctctaaatatattgcagtgtgtctgtatcctgctggaaggaagctcccaaagttggacccacatacctcatgttgttttttg

SEQ ID NO: 12118 - DNA, 120 bp, synthetic construct
  source 1..120: mol_type = other DNA
cggccagctatatagttattccatctaatatttgtgtcactatttataccatctaaacataaaacaagtgcttgcaggagttccactaaaatttcaaaagcatcatgcctgcctgtccac

SEQ ID NO: 12119 - DNA, 120 bp, synthetic construct
  source 1..120: mol_type = other DNA
caggctcatgaaaaaccatacacaacaaaaaatattacatctttggttaaatatttaaaatccacaaactcattcattcaatattcatagggtatttactagaccacagactaggacaga

SEQ ID NO: 12120 - DNA, 120 bp, synthetic construct
  source 1..120: mol_type = other DNA
ctcacagtggcaagccttggcattaggcaagccaccctggggcaatcaagacttaggctttttttttttttttttacttaaaccgtgtcactgacctaagctgggttgattatttcactt

SEQ ID NO: 12121 - DNA, 120 bp, synthetic construct
  source 1..120: mol_type = other DNA
cttacggtatatcccccaaatcacagatggatgtggtttctaagcccttgtcctcctgttcttgtgttttataatctggtcaatcagtggatatcttgtatctgcaggtcaagatttgga

SEQ ID NO: 12122 - DNA, 120 bp, synthetic construct
  source 1..120: mol_type = other DNA
acctggacagttcaaacctgtgttgttccagagtcaactatatgtgttatctctgccctgaatactcctctcctatgcatcctttaaagcaccttcaaatattgtctcttcagtgaaacc

SEQ ID NO: 12123 - DNA, 120 bp, synthetic construct
  source 1..120: mol_type = other DNA
gaggtgccctttggagatgcgttagtgaaaggaaagaagaacattaaggggaattaagatcctacctaaaacaaagaattacaaaacacatcaacctcttctcccttcactgcttcccca

SEQ ID NO: 12124 - DNA, 120 bp, synthetic construct
  source 1..120: mol_type = other DNA
ttattggcacagtctgttttgtcagtcttatgatctctattttaaccttaatcatgggcagttgtgcctaaactccaaaagggtgaggattataacgaggcatgtcggacctcctttccc

SEQ ID NO: 12125 - DNA, 120 bp, synthetic construct
  source 1..120: mol_type = other DNA
ttattagagagggggaactgagcaaagggaactgagaaacatggtcaaaaagaaaggaggaaaggcaggagagcgtagagtctgttttaaggagggagaaggaacggggcacagtggctc

SEQ ID NO: 12126 - DNA, 120 bp, synthetic construct
  source 1..120: mol_type = other DNA
accatagtaggtactggggacgaaaggcttgaaaaagtacaaggatgtacaaagtcacttaaggctttcattcatcagacacgatcagtgttaaggggtttcctgtgtttccttctagtt

SEQ ID NO: 12127 - DNA, 120 bp, synthetic construct
  source 1..120: mol_type = other DNA
ctacagaggacgtgccgcaggacctgctgcaccattctgagtatatctagtaagcgctgcattaaatgagaaatacagccattccttgagatcagaatttgcaaatgtgtattctttttt

SEQ ID NO: 12128 - DNA, 120 bp, synthetic construct
  source 1..120: mol_type = other DNA
gcaaatattcaggcggagtgcattagtatagccacatcagttgctaaaattctgaaatatttcaaactggttggaaaatatctattgcctccaaggcccccaagagcctttctctatgcc

SEQ ID NO: 12129 - DNA, 120 bp, synthetic construct
  source 1..120: mol_type = other DNA
attcagtcccataggtccgtgtgggttacacagtggcaccccaaacagcaacaggattgggtgctctacaaaaacacatgtcaataataaaaaagacaaataattggcatttcaccaaag

SEQ ID NO: 12130 - DNA, 120 bp, synthetic construct
  source 1..120: mol_type = other DNA
atatttaagagaatgatgtcaaggtttagtctttttattaaaatatagtctccatgagtagactttgtattcttcatcatatatttcctagcacaggcagcagtcaataagtatttgctg

SEQ ID NO: 12131 - DNA, 120 bp, synthetic construct
  source 1..120: mol_type = other DNA
gacctggtaataaaatcatcttagttgatgatgtgaagataagaaagtttaatcactaagcaaactgcaaagcactgaaagcactgcttcttaccctaaatgaagcccactctgctgtgg

SEQ ID NO: 12132 - DNA, 120 bp, synthetic construct
  source 1..120: mol_type = other DNA
taatgtaacaataacagtcaccatcattagcttcctcctgggtcatttacagactccctatctggaagacttgacctgcaagagatcaccaagtctcaatactcaggtgcaaaggggaat

SEQ ID NO: 12133 - DNA, 120 bp, synthetic construct
  source 1..120: mol_type = other DNA
cacaaacgagctcccttaggcctcttttaaaggttattaatctcattcatgacctaatcacctcccaaagacctcacttcctcataacatcaccttggggttaggattgcagtatatgaa

SEQ ID NO: 12134 - DNA, 120 bp, synthetic construct
  source 1..120: mol_type = other DNA
ctgtggactgcccagagcttacagcagggtcagcaaattttttctgtaaaaggtcaaatagtaaatatgttagcttttacaggccgtatggtctctgtggcaactactcaactctgtgat

SEQ ID NO: 12135 - DNA, 120 bp, synthetic construct
  source 1..120: mol_type = other DNA
agagaaagagaatgaacaaacaagttttcagagaatatatggactgctttctactatttaataaccacaaagcacaaaaaataaaaagccaaaaacaagctgcacacagtggtgctcacc

SEQ ID NO: 12136 - DNA, 120 bp, synthetic construct
  source 1..120: mol_type = other DNA
agccatttcccccatctttcttcctgagagagccctgattttactcaggtatcaggcaggcagcaaagtgctcggaaaaggcaggtccagcccaagagctgaaccactattggtctaaac

SEQ ID NO: 12137 - DNA, 120 bp, synthetic construct
  source 1..120: mol_type = other DNA
aattataaacatattatctgttgacaaagctagaggaaagattaagtatgttaagaaagacatggtagatactaaaaagacccaaattctttcttcttttttttgagacagggtcttgct

SEQ ID NO: 12138 - DNA, 120 bp, synthetic construct
  source 1..120: mol_type = other DNA
agtcacttaaagagtgctattgctattatacagtcatacttaccatacatctcatcttccaacccatgaacaaaagctccacaagctcctgactcaatcaagttcacagccccggtatct

SEQ ID NO: 12139 - DNA, 120 bp, synthetic construct
  source 1..120: mol_type = other DNA
gtaaaagtatttttctatttggcaacattgcgttctatttcagctacagtacagtcactaaataatctagtaaactcactttacacagagattgcctaaggtggaatatactggttagtg

SEQ ID NO: 12140 - DNA, 120 bp, synthetic construct
  source 1..120: mol_type = other DNA
attaaatgtatgtgaaatttagatacaagatatttaacaattatcacacctgctttaagaacaaaaactgctcaactggtgtaaataacataagtctatgcaactaggtgataagtacat

SEQ ID NO: 12141 - DNA, 120 bp, synthetic construct
  source 1..120: mol_type = other DNA
ttcagatttgggatgcccaacaagtaagtataatacaaataaactattccaaaatccaaaagcaaaacaaaacaaaacaaaatccaaaacacttctggtctcaagcattttggatagggg

SEQ ID NO: 12142 - DNA, 120 bp, synthetic construct
  source 1..120: mol_type = other DNA
tcctcagcctgatgaagggtacacagagattctctcagatatggaagtaagacctaagtccctttcattggggatcagtcccattaaaactttacacccaagtgtcctggttaacttgaa

SEQ ID NO: 12143 - DNA, 120 bp, synthetic construct
  source 1..120: mol_type = other DNA
ttaataatgtcctgaggctactggaggcagcagcctctaatccattctggtagaataaatgtttaacctaggcctcaaatagcttccacaggtaaagtcctaaggaacacttgctgttaa

SEQ ID NO: 12144 - DNA, 120 bp, synthetic construct
  source 1..120: mol_type = other DNA
attacaggcatccgccactgcacttggcctgatgtaactgtttttgaaacttgcagtctatggaatacccgcaacttccagagaaaggcttatacagtaaattgtagttagttttggtca

SEQ ID NO: 12145 - DNA, 120 bp, synthetic construct
  source 1..120: mol_type = other DNA
ggctcaagcaatccttccaccttagcctccaaaagcaatgggattacaagtgtgagccaccatacctggcaggttgaacatttttaaggctcttgatacactctaaggtaacaatgtttt

SEQ ID NO: 12146 - DNA, 120 bp, synthetic construct
  source 1..120: mol_type = other DNA
atgatgtaaggatgtaatttttgaatcctctctttgtctaagagtagaggtgttgaaggctagagttcagagaaagaggaaaagcactcagaggcacggggaatgcattgctacgtgatt

SEQ ID NO: 12147 - DNA, 120 bp, synthetic construct
  source 1..120: mol_type = other DNA
aacagagctgttcacgccttgtgacccaggaatcctgctctggggaatacaccctttctaaaataatccagatatgaaataagaaaacagagcagaggcacaaagatgtttacagaagtg

SEQ ID NO: 12148 - DNA, 120 bp, synthetic construct
  source 1..120: mol_type = other DNA
cttatgactgctttgactaacagaatatggaggaaatgacactatagcattttcaggccaagccttaaaagcatcaatagctcctgtctcagtgccttggagccgcaagccactgagtat

SEQ ID NO: 12149 - DNA, 120 bp, synthetic construct
  source 1..120: mol_type = other DNA
caggatgaacaatgcaagggagcacctgcgaaccacaaagacaaacacagacagaaaaaataatgaaaattgattttgaggcacacggggagggggagggagcaaaataaaacactcatc

SEQ ID NO: 12150 - DNA, 120 bp, synthetic construct
  source 1..120: mol_type = other DNA
agtcaaaaataatacaacactatcccctattccctcaagaagcatcatgaagaccctaatacaggcagcccattcaaacagacatacaggttctggccgaataaatgtggaaggaatcac

SEQ ID NO: 12151 - DNA, 120 bp, synthetic construct
  source 1..120: mol_type = other DNA
cgcgcccggcccctttaccatttcttataagatggttctggtgatcgtaaattgtctcggcttttgtttgtctgggaaaggctttctgtcttctttatttatgttttggtgtaaggcata

SEQ ID NO: 12152 - DNA, 120 bp, synthetic construct
  source 1..120: mol_type = other DNA
aatcactggggccctgtaattgggtcaggtcagatggtacttgaggagctcagtatgtgacaaataatctaattttgggatagtgtctatgctgaatcagttgattcaaggtaaggtcat

SEQ ID NO: 12153 - DNA, 120 bp, synthetic construct
  source 1..120: mol_type = other DNA
ttctgcccacgtgaaattaggggctagttcaataaagttctgccatgatgtctataagtttccttttctctcctaccaaggaaagatatactggaatgcaagcaattgaaagggctgtcc

SEQ ID NO: 12154 - DNA, 120 bp, synthetic construct
  source 1..120: mol_type = other DNA
aatcatgtggaaatccagtcctggcaagtatgaagttgatatttgtaaaaacacgaacataaaattgcctagctgataaggataaaattataatattctccaagtcacaatattctcact

SEQ ID NO: 12155 - DNA, 120 bp, synthetic construct
  source 1..120: mol_type = other DNA
ggccctagataagtcacttcattttccttgttttgatttttccttccattccttttcagttgttactgtcctctcctactttattgagtgtagatgggagacaccactgtgatggggaag

SEQ ID NO: 12156 - DNA, 120 bp, synthetic construct
  source 1..120: mol_type = other DNA
aagtgatgagccaaaggggaaaaaccccttataaaaccattagatcttgtaagaactcactcaatatcactggaacagcatggaggtaacttccctcatgattcaattacctcccaccag

SEQ ID NO: 12157 - DNA, 120 bp, synthetic construct
  source 1..120: mol_type = other DNA
cacttcagaagacaaggcccccttctagaatcataatacatgagagatacttttgaacaataaacaggctttaatttgcaatagcaatagaaaaggcatgcaatagtgcagcagcatgga

SEQ ID NO: 12158 - DNA, 120 bp, synthetic construct
  source 1..120: mol_type = other DNA
tctagtttcacatcctgctttttcccccaagcaatgctgtgaaccttgggctgtacaccccactttgcagtttcatctgtaaaatgaggacatacaattactccatttcagattcctttt

SEQ ID NO: 12159 - DNA, 120 bp, synthetic construct
  source 1..120: mol_type = other DNA
cagattatccagccctttaaggatcttactttttaaaatggaaggcatagaagtaggcaaatatgcaaggggagaaaaagaaaacaaaaatcaaaactaataaaaatctggacaataaag

SEQ ID NO: 12160 - DNA, 120 bp, synthetic construct
  source 1..120: mol_type = other DNA
actccaatatgcaaagtactctccttcacccttcatacttgtagcattaaactgggtcaggaggaagaagcttgtatccaagatttaaatgcaggatgctctgactgaagcctgcataaa

SEQ ID NO: 12161 - DNA, 120 bp, synthetic construct
  source 1..120: mol_type = other DNA
ttctgacccagtgccagctcttgccatttagatctttactatggctgtcctttccatcttaaattccctatttgaggaagtttgacaattttcctggataaacctctgtattatcttctt

SEQ ID NO: 12162 - DNA, 120 bp, synthetic construct
  source 1..120: mol_type = other DNA
catttgtcatgtgcaaggcaatgtgtacaaaaatacatataagagacacagttcctgccctcaagtagcttatagttgactcatttaagaactagggcagcatcccctgaggatcagaag

SEQ ID NO: 12163 - DNA, 120 bp, synthetic construct
  source 1..120: mol_type = other DNA
tgtagccctcttaaattcattttgaaacttaatccccagtgcaatgcattaagaggtagggcctttagaggtgattacatcacaaaggcaaagccctcatgaatgagattagtgccccta

SEQ ID NO: 12164 - DNA, 120 bp, synthetic construct
  source 1..120: mol_type = other DNA
tgggtcctaacgcctgtcagacaaacttcctcttgcctctcttctctcatctcccagggtagttccacttctaaaaaccacttcctgtctctggtgcttttttagtttctcctataagaa

SEQ ID NO: 12165 - DNA, 120 bp, synthetic construct
  source 1..120: mol_type = other DNA
tctcaccgaattcttaaaacaacgctgtgagataggtaccctttcatggatgagaaaactgcagtgctgagaaggtcatccagctagtaaaaggggaaaccattattttactgaacaggt

SEQ ID NO: 12166 - DNA, 120 bp, synthetic construct
  source 1..120: mol_type = other DNA
ttcttttccagagtctgctcaaattctcatacataaacccttacttccacctggtggtttcccacaatgtggaaagtgattattgggatttcccatgtatactgagtattactacacttg

SEQ ID NO: 12167 - DNA, 120 bp, synthetic construct
  source 1..120: mol_type = other DNA
atatggctgttggaagtcttttggagtacactgaaacaggctgatctgagggatatgggtcaggcaccgacagcaactgctatatatctagacaaaaaaaaaagactgacagtctataac

SEQ ID NO: 12168 - DNA, 120 bp, synthetic construct
  source 1..120: mol_type = other DNA
gaaaattgagtcattgagaaatcgaatggattgctccaagttgcatcagcagttattggttaagacagcttgtgtagatgtcatgattccattaccttttaccattcatagtctcaccac

SEQ ID NO: 12169 - DNA, 120 bp, synthetic construct
  source 1..120: mol_type = other DNA
cctcgttctgtctttcctggcccaggaaacatatgccaagaatagtggaaatctagttagatgaagtcagacagaatgctacccgaacagataataaagtcttcatacttctgttgtgga

SEQ ID NO: 12170 - DNA, 120 bp, synthetic construct
  source 1..120: mol_type = other DNA
catgtgatctgcaaataaggacagttttatttcttcctttgtgatctatatgccttttctttttttgccttattgcgctggtgaactttcagtcctgtgttgaatagcagtgttaggaac

SEQ ID NO: 12171 - DNA, 120 bp, synthetic construct
  source 1..120: mol_type = other DNA
ccttgttcggtgtctactgttttatcaactattgagagacaggtgttgaaatcttcagttacaatgtggatttttctctttctcctttcagttctgtcacgttttgcagttctattgttc

SEQ ID NO: 12172 - DNA, 120 bp, synthetic construct
  source 1..120: mol_type = other DNA
catttgaaaaatagtgaaagacttcctgggctcctcttgttgttcattttgtgtagtataaccttcataaaaatattttttttggccgggcgcggcggctcattcctgtatcccagcact

SEQ ID NO: 12173 - DNA, 120 bp, synthetic construct
  source 1..120: mol_type = other DNA
aagggtgagatagactgcaatacaataatagcagaagacctcaatctccaactttcaataatagacagatcagacagaaaataaataacattcgacttgaattacactttgaacaaaatg

SEQ ID NO: 12174 - DNA, 120 bp, synthetic construct
  source 1..120: mol_type = other DNA
gaccactggaagtttatagcttagtagcagaaagagtcctggaggcaaatagaaactccaaccctagattcagctatatctctatttgtacaggtttggggagtcagtgaatttcctgaa

SEQ ID NO: 12175 - DNA, 120 bp, synthetic construct
  source 1..120: mol_type = other DNA
tgtggaggcttcctcttgtaatctgagagaagactcagtacgtcaactttctcgtagtcgctcttaaaaggaaggggcgggaaagtttttaaagtcaaaaaactctgtaaaacagctgct

SEQ ID NO: 12176 - DNA, 120 bp, synthetic construct
  source 1..120: mol_type = other DNA
aaaaaaaagttaaaaaaaaaaagttgtcaatagataggagtgtctgggttgtgataagaagttgtagagaccaaagtttcatcatgcagatgaagcctccagacttcagagagaacaggc

SEQ ID NO: 12177 - DNA, 120 bp, synthetic construct
  source 1..120: mol_type = other DNA
gagatgggaagagcatggacttgaatctcagtcctgccacttactggcattgtgaccttgagcaaggttcttaacatttgtgaacctcagtgtcctcatctataaaatgaggataaaata

SEQ ID NO: 12178 - DNA, 120 bp, synthetic construct
  source 1..120: mol_type = other DNA
taagaccttgacaatagattgatcgtttatttattatcatattagttattgagtacttacttaggtggtaggcaggtggtaggtggtaattagggaaggggagttgaagtgatggcttaa

SEQ ID NO: 12179 - DNA, 120 bp, synthetic construct
  source 1..120: mol_type = other DNA
gaccttataattttgtatcactcttcagtctgtgcccatcgtattagtcaggttggtctccatacttgcgtttaatcaactctgcttattgctgcctgtcttttgactcatgcctggaat

SEQ ID NO: 12180 - DNA, 120 bp, synthetic construct
  source 1..120: mol_type = other DNA
aagtagaaaaaatgaacagttttgttatttaatttaacctctttatttagtaaatgaggagattgaaatctaaacagcacgtttctaaacaaggatttttcatagaaataattgtggggt

SEQ ID NO: 12181 - DNA, 120 bp, synthetic construct
  source 1..120: mol_type = other DNA
cctccaccctgccccaccactattttttccagcctctggtaacccgtattctactgtctatctccatgagttcaattgtcttaatttttagctttcataaatgagggagagaacatgtga

SEQ ID NO: 12182 - DNA, 120 bp, synthetic construct
  source 1..120: mol_type = other DNA
tcctctgaaactaagtaagactttttgtagctctcctgtactccagagcacactgttcttgtggagaaataagaatattgatcatgacatcaagtttctataaactattgcttttttatt

SEQ ID NO: 12183 - DNA, 120 bp, synthetic construct
  source 1..120: mol_type = other DNA
cttcttcctttcctgggtgtgatgttaggttgttaatttgagatgattccaactttttgatgtaggcatttagtgctataaactttcctcctaatactgctttagctatgtcccacagat

SEQ ID NO: 12184 - DNA, 120 bp, synthetic construct
  source 1..120: mol_type = other DNA
aagtcattcaggagcacattgtttaatttccatgtaactgtacggttttgatagattttcttagtaatgatttttaatttgtattgtgctgtggtctgagggtgtgttgggtatgatgtc

SEQ ID NO: 12185 - DNA, 120 bp, synthetic construct
  source 1..120: mol_type = other DNA
attgaattaggaagtatttctacttctttacttttctggtagagtttacatagaattgatgtctgtttttccttaaatgtttggcagcagttcaccagtgaaaccaatctgggcctggag

SEQ ID NO: 12186 - DNA, 120 bp, synthetic construct
  source 1..120: mol_type = other DNA
ttggttattaagatgacgctttataaattccaggagccccaaaagtatggtaaccattttctcccatgattcacttgctgattctgggggctacaagagaggctcaagaatcaattcacg

SEQ ID NO: 12187 - DNA, 120 bp, synthetic construct
  source 1..120: mol_type = other DNA
ttcatttggctatttcctccccaaagccttccttcatcctaccccaccatctaaattaggctctggtacaactctagattcacattctctgacagtaggaaaatcattcagaagttcatc

SEQ ID NO: 12188 - DNA, 120 bp, synthetic construct
  source 1..120: mol_type = other DNA
agactcttcagacattttaattaagattatgagatagtgatagtactgagaatcaaatttagaactctgttacaattgcaatcttccttccgccctaacacagctttttctgaagtccca

SEQ ID NO: 12189 - DNA, 120 bp, synthetic construct
  source 1..120: mol_type = other DNA
ttcttctggtgtaggctttaagactctgagatccagctcagctcacaaaaatcagaagttctacatagcaaagacatagaatcaacctaagtatccatcaacagataattgaataaagaa

SEQ ID NO: 12190 - DNA, 120 bp, synthetic construct
  source 1..120: mol_type = other DNA
aggctatgtttccttattcgtaaattgagcaagttgaaccagatcactggtttacacattgtgttgcctcagaagctaaaattggagatgagggggaagtaaattagtagggctctgtgc

SEQ ID NO: 12191 - DNA, 120 bp, synthetic construct
  source 1..120: mol_type = other DNA
ggagatatttgatggtcagaatcttaaccaaataatggcacatatatacctactgatgcgatgatgtgggagacatacaacatcaccaatagcatattcttgcttgaaatcttaggtgta

SEQ ID NO: 12192 - DNA, 120 bp, synthetic construct
  source 1..120: mol_type = other DNA
acggaactagactagctaaacaattttgaaaaggaaaaataagtcagtctccctggtttcaagttttattatataattacaatagtccacaatatgttatactggcagaggaacagacac

SEQ ID NO: 12193 - DNA, 120 bp, synthetic construct
  source 1..120: mol_type = other DNA
tagttccacaacttcccatcctttgacaattcctgcttagtagaggaggagcaagaggactacccatgtcctgatgtctcttttacagcctggttagttggccacatattattaaataaa

SEQ ID NO: 12194 - DNA, 120 bp, synthetic construct
  source 1..120: mol_type = other DNA
ccttcccttcctttcccttcctttcttgacagagtctcactctgttaccaggctccagtgttgttttcttttttcgtttgtttgtttgtttttttcctctctgtgcattctttcttcctt

SEQ ID NO: 12195 - DNA, 120 bp, synthetic construct
  source 1..120: mol_type = other DNA
aagttacaggaaattccaattttaaaaaatcgagttactttaattcattattgattcaccaaatgaaaaaaaattaaaatacatggtagaatgaagcctgaaactgtaattatcatagtc

SEQ ID NO: 12196 - DNA, 120 bp, synthetic construct
  source 1..120: mol_type = other DNA
cccaaagaagtctgtttttgccttacagctggattttcataaaaatatagttacaattaaggtcgagattattcagtttgaacactcagtctcttaagtttgtctggaaacacatttgtc

SEQ ID NO: 12197 - DNA, 120 bp, synthetic construct
  source 1..120: mol_type = other DNA
caaaattagtcagtatctccccattgtcattcaaaattaatgagtgtatttggatttccatctcttactgtatctccaattattaaacaaataacaagtcattaaacaaatgaaaaatgt

SEQ ID NO: 12198 - DNA, 120 bp, synthetic construct
  source 1..120: mol_type = other DNA
tctctctgaggtcctccatgctagctctgggctgaagctggattttagacttaacatgtagctcttcatattgcaattaaactgaacttattttcatttgtaattttacttatatccaca

SEQ ID NO: 12199 - DNA, 120 bp, synthetic construct
  source 1..120: mol_type = other DNA
ccatctcctattaaatctcactgattccttttgtctctcgaacgtccaatagttcaaacttctgtcttgccagttcttagaatctacaaattttgttcctttccttttttctgcataaag

SEQ ID NO: 12200 - DNA, 120 bp, synthetic construct
  source 1..120: mol_type = other DNA
tcttagctatcataccctcaaaatatacatccacgaagagaaaattattttaatgtttttctgaagtcctcagagttctccttatgtttagatactagttcccatatttctggcatgttt

SEQ ID NO: 12201 - DNA, 120 bp, synthetic construct
  source 1..120: mol_type = other DNA
gccacagtgcccagcccggcggtttcattgttttaatatgatagaatataccacacaaatctagatggtatagcctactacacctatggtatacactatagcctattgttcctacaatag

SEQ ID NO: 12202 - DNA, 120 bp, synthetic construct
  source 1..120: mol_type = other DNA
ctctaagagaaatcactgattaaccaaataaacccactaacctggggtctctcattgaatttacaaaacttcaccagtctcatgggtgaaagatgagttatgattttaacgtttttctcc

SEQ ID NO: 12203 - DNA, 120 bp, synthetic construct
  source 1..120: mol_type = other DNA
agtttactatccaagaccaccaactgactgaccaccctgtatgcacattctgtacctcaataaatctaagtaattaaccaaagtgtccacacagaagtaagatctgcgctggttgtgtgt

SEQ ID NO: 12204 - DNA, 120 bp, synthetic construct
  source 1..120: mol_type = other DNA
tttttccttttctattcttttttcttttcttagagacagggtctcactctgtcatccagactatagagcagttgctggatcatagctactgcagcttcaacctcctaggctcaagtgatc

SEQ ID NO: 12205 - DNA, 120 bp, synthetic construct
  source 1..120: mol_type = other DNA
atctaggtggacacagaaagatatattgcaactgaaggggctgggagagtcttttgttcactgagaatatgttttgactgtaacttctcatatgaggtcacgtgtgggatatttcacttt

SEQ ID NO: 12206 - DNA, 120 bp, synthetic construct
  source 1..120: mol_type = other DNA
taggaaagtcttttcacataataaagtctaagtaattaactattatttattctctctatctcaaatacgtactttaaccttttagaacactttatgttttgagactcttgttacttatgt

SEQ ID NO: 12207 - DNA, 120 bp, synthetic construct
  source 1..120: mol_type = other DNA
gtattaaagaaactgtaaccaggctattgataaataacttcctttagggataaaaatctcaggaagttcaagatttatgtattaatgattgacgatgttcttagtggtctctctttgatt

SEQ ID NO: 12208 - DNA, 120 bp, synthetic construct
  source 1..120: mol_type = other DNA
agcaacccagcactgaaaaactgttgtatgagctgaaatgtgattaataactaggttgttgagacataataaagtctgtgaggtcaacctaacttgctcagacttaaaaagaaaaaaagc

SEQ ID NO: 12209 - DNA, 120 bp, synthetic construct
  source 1..120: mol_type = other DNA
tgaaaactttccagaccaaagagaagaagacctcaggccctcttttgaaacaaaattggaaatagccaccgacaacgatgttagtactcaaaatgatacatccccttcattcgcaagaga

SEQ ID NO: 12210 - DNA, 120 bp, synthetic construct
  source 1..120: mol_type = other DNA
ttggaaaagctcttctgcttctctttccagtgcctgcagatgccgttgctcctcctcatcgagaaatataggcatcttttgatattgaatagtgattatcctcttccttactgacacata

SEQ ID NO: 12211 - DNA, 120 bp, synthetic construct
  source 1..120: mol_type = other DNA
tatcatcaatattctgagaaactggctttcagataacctgactttgaaaagtgttcttggtgctggccaccagctccacagctccattctacacgtttgaacaatgtttctaaggagacc

SEQ ID NO: 12212 - DNA, 120 bp, synthetic construct
  source 1..120: mol_type = other DNA
agattcggtcaaggactccctgagaaccaagatcctaagatgttcaagtctcttattagtaaatggtgtgaatttgtatgtaacctaaacctatcctcctgaatactttatgtctagatt

SEQ ID NO: 12213 - DNA, 120 bp, synthetic construct
  source 1..120: mol_type = other DNA
gtttctgtcattctatctctctcaataattccatgatgataatatatgaaagacacttagtatctatggtattattctatactccctgcctccaaactcacctatgaagtttgctcagac

SEQ ID NO: 12214 - DNA, 120 bp, synthetic construct
  source 1..120: mol_type = other DNA
gtgaggggactcttcactggcgactccaacttcaccctggaaacaatggcaattccttttatgtgctcatcacgtattatttagacttctccttacattctactagacaatatttccttg

SEQ ID NO: 12215 - DNA, 120 bp, synthetic construct
  source 1..120: mol_type = other DNA
cctctcgccctccgggtattaagaacaatatcacagaaggggcgtacactccctgtgatattgggagtaatatcattttctccttccatgaatattaggagcaatatccctgggtggatg

SEQ ID NO: 12216 - DNA, 120 bp, synthetic construct
  source 1..120: mol_type = other DNA
cagagtgggtgtacacctcctgcgatatggggagtaatatcatcttctcttcttctggaaataggaagaatatcacacgggtttgtgcactttctgtgatattgggagtaatatcaactt

SEQ ID NO: 12217 - DNA, 120 bp, synthetic construct
  source 1..120: mol_type = other DNA
ctgtccataataaaaatactagtggaaaagtaggaattatagtcacgtaagagataaaagaaaatctgttagtatcaatatattaacacatataggtggtgttggttcttacagggttta

SEQ ID NO: 12218 - DNA, 120 bp, synthetic construct
  source 1..120: mol_type = other DNA
cgagtttattctaggccactctggaagaatctggaaaaatacttagaatacattttaagtattcatcatgcacatgtattgtattttattttatatatgttcgggtgaatatctttctcc

SEQ ID NO: 12219 - DNA, 120 bp, synthetic construct
  source 1..120: mol_type = other DNA
tgcactgaatgtcattcttaacacacccaagactaaagagtccctcctctccatgtatattgccattctgattcgtccctttccaatacttattacagacaccaaaggcccaattccaag

SEQ ID NO: 12220 - DNA, 120 bp, synthetic construct
  source 1..120: mol_type = other DNA
ctttttatttttacccattaactaattttcttggaaatacataatatatatccattaaaaaaattaaaaaaccccaagaatctccagtgaactatattccccaaaagaacagttcttagc

SEQ ID NO: 12221 - DNA, 120 bp, synthetic construct
  source 1..120: mol_type = other DNA
cagttctaacactccacagttttttcaatctatttttcagaactgttaactgatatgtgtataggtatgaacaacaaatcatcaactttttcactgctgaaatacttctcccacttctct

SEQ ID NO: 12222 - DNA, 120 bp, synthetic construct
  source 1..120: mol_type = other DNA
gtacctgaagtagctccacatctggtttatggcacattttcatcagctccgcatacgttcctcttaaaatctccctcctgtgagccattttggctttacttaaatgaagtcgatgaaaaa

SEQ ID NO: 12223 - DNA, 120 bp, synthetic construct
  source 1..120: mol_type = other DNA
aggtttgtatgaaaacaaaccagcatgctttgggtaacatcaacggttttgttagaaatcccatctaacagtcacactattctacataagaaatgaggccactttttctcaatgttttct

SEQ ID NO: 12224 - DNA, 120 bp, synthetic construct
  source 1..120: mol_type = other DNA
gtctttaggcattcaaagcactgagtaagaattgggatgtcttgccagttgaggtagaaacagggcctgcaaaagctgtgcccacagtctatggtgaccgggtctatgaagtagttcagg

SEQ ID NO: 12225 - DNA, 120 bp, synthetic construct
  source 1..120: mol_type = other DNA
caggagctcattcgccgcagtactgagtttcagaggtcaccaaaacacagcttcctctaagtgcgctccttctcctttggagaaaactgagcttgtctcttctatgtccttttataagaa

SEQ ID NO: 12226 - DNA, 120 bp, synthetic construct
  source 1..120: mol_type = other DNA
aagggttcctcagacatacagagaccaggagacaaaagagaaatgttctcttagcagagaagaataactctgaagatgttctctgttgggagaaatccagcagccaacacattagcaatc

SEQ ID NO: 12227 - DNA, 120 bp, synthetic construct
  source 1..120: mol_type = other DNA
tatgcatctcataagttgcttattgtttgtttctgtctaatacggggcagtctacaaaatgtagaattgaatttttactgagaagtgagaataccagaaagtctttcttctctacactta

SEQ ID NO: 12228 - DNA, 120 bp, synthetic construct
  source 1..120: mol_type = other DNA
aaccaaacatctctgcaggactatgtgtcagtaaggaagaggataatcactattcaatatcaaaagatgcctatatttctcgatgaggaggagcaacggcatctgcaggcactggaaaga

SEQ ID NO: 12229 - DNA, 120 bp, synthetic construct
  source 1..120: mol_type = other DNA
ctttaaggaaagcacctggtgttcctcacaatgcttttgttcccgtcctatagctacaaaattaggcagatgggacaccaagttgtaatgtatctgggaatgctgtttacactctaaacc

SEQ ID NO: 12230 - DNA, 120 bp, synthetic construct
  source 1..120: mol_type = other DNA
tagacgctggctctcagccttgcgcttcctgcgtcagcatcacctgggctggttcatttgagctttaacacagatctggtggaaacacaggctgccaagccctgccctggagtctttctt

SEQ ID NO: 12231 - DNA, 120 bp, synthetic construct
  source 1..120: mol_type = other DNA
acttgatataacacaaaccagtatattataaatgctctaattacagatattttaaataatgatgttacttcaaataactgggtaagctacttgtttgcttagacaagatgtaaatgtcct

SEQ ID NO: 12232 - DNA, 120 bp, synthetic construct
  source 1..120: mol_type = other DNA
taggaatacattaacttggcaaagagagatagagagaaactttctttgcagtgacagcagcagacgcaaaagcttcctggatggaggaagcctggtacagttgagctccaggccaccgga

SEQ ID NO: 12233 - DNA, 120 bp, synthetic construct
  source 1..120: mol_type = other DNA
ccactcaaatagataagaggtttcaagagaaaatgactggggtttgtagaaaaatagacaataaacgggtaaaacaattgagaagaaatgcaaaaaaaaaaaaagcgttaaagaaaagat

SEQ ID NO: 12234 - DNA, 120 bp, synthetic construct
  source 1..120: mol_type = other DNA
cccgccacggagctccagaatttaagcagagaatgtccacaggatcaagtccatgacccagggtttcacaagtttcccactctggagtccaggactgagccaagagggcccccacacaca

SEQ ID NO: 12235 - DNA, 120 bp, synthetic construct
  source 1..120: mol_type = other DNA
cttaaaatatctagtgtttgctgcaacagatatgtattcataatgaatatatggagttgatacatatatgtacacataggtgtgtgtgtatatgtatgtaatgagtgtattaatattgtc

SEQ ID NO: 12236 - DNA, 120 bp, synthetic construct
  source 1..120: mol_type = other DNA
aaacttgattggtttaattgcagtctttttctttgtttatttggttggttggctttttttaaattttgttttgatttgggtctttgtttttaatttaatttaattttaagtcctgggata

SEQ ID NO: 12237 - DNA, 120 bp, synthetic construct
  source 1..120: mol_type = other DNA
gacaccgtcccattgagtgggctgctgaggaacaccgggtaagtgatggctctgaagatcgatttctgtaaaggaagcataaaattcctgtgggtctattttcttggagattaggtaaag

SEQ ID NO: 12238 - DNA, 120 bp, synthetic construct
  source 1..120: mol_type = other DNA
tctttttttttttttcaggcttttggagacatattacacaggtgagtgtgtacctagattttagcatatgttctttaagattccacgactatcaaagcaggctctattaaagtcatggca

SEQ ID NO: 12239 - DNA, 120 bp, synthetic construct
  source 1..120: mol_type = other DNA
aaccttacacatttggagcaaaaaaaaaagaaggatcagattggattctggcttagattcttccatcatgctttaaaatttagaaactgtaaagaattaatttgcaaaaggaaggattaa

SEQ ID NO: 12240 - DNA, 120 bp, synthetic construct
  source 1..120: mol_type = other DNA
agtaggattattcctggattgtgaggctaagactgtgagctttgttgatgttaatcaaagctccctaatatacaccatccctaattgctctttctcacctcctctcaggcctatcttttg

SEQ ID NO: 12241 - DNA, 120 bp, synthetic construct
  source 1..120: mol_type = other DNA
gttgtaccacaggccctcataaaaaaataccaaaatttaaagacacaatattgtgtgttgtcaaagatacagaataaatgaaatttattcatggctggagagatgtaaatggaaatccct

SEQ ID NO: 12242 - DNA, 120 bp, synthetic construct
  source 1..120: mol_type = other DNA
tattaccaatgtgatacacaccagaatctgctatgaatagtctcatgtctagaggatttgtggatatctaggtaagcagtaattattgggtgcctgaagcctagcagatgcatattcagt

SEQ ID NO: 12243 - DNA, 120 bp, synthetic construct
  source 1..120: mol_type = other DNA
atgatatctagaatttaattggaaacctttattgtagaatatgaaaagttccatgttgtctttaacttcaggttgaatgcagccttggtcgtctgcaaagtttttaagtgctcaaaggca

SEQ ID NO: 12244 - DNA, 120 bp, synthetic construct
  source 1..120: mol_type = other DNA
acccagactaatcttgttgggagattaccaaggtagttacatctgcaaagatcctattttcaaaagtccatattcacaggtttcagtggttaggacttagacatatatttcggggggcca

SEQ ID NO: 12245 - DNA, 120 bp, synthetic construct
  source 1..120: mol_type = other DNA
gtttatttatagttaagggtcaaatgaattatacaagggacatatgacaaataggatgtaatttgcttcattaatccaaatgaaggagagtaactttctttctcctcagaaatacagaat

SEQ ID NO: 12246 - DNA, 120 bp, synthetic construct
  source 1..120: mol_type = other DNA
gaggagctgcagaagcaatacaaggtgaaattggatctctggctcaagactttgtcacctgaaaattatgctgcatacaaagaatcgacctatgctaagggtaagaatatggccatgaca

SEQ ID NO: 12247 - DNA, 120 bp, synthetic construct
  source 1..120: mol_type = other DNA
tcctcccctccctgaagtaaggagttggccattcccatgcctgggagtagggagtaatatttctacatgtatatctgactcagttctcaattagacttttcttgcttatttcaaaaaaaa

SEQ ID NO: 12248 - DNA, 120 bp, synthetic construct
  source 1..120: mol_type = other DNA
tagaatagtagagaggagagagacaaagagactaattttattatgaagaattggctcacaaaattgtggaggcaaaaaatatcatgatctgcaatctgcaagctggacacttaggaaagc

SEQ ID NO: 12249 - DNA, 120 bp, synthetic construct
  source 1..120: mol_type = other DNA
caggagataatgtaagtcacatttgccactaactagtagtaaggcccatagcccaggctagatggtgagatgtacaaattcaattggggctttagtagtgattttaaatgaaatgttttt

SEQ ID NO: 12250 - DNA, 120 bp, synthetic construct
  source 1..120: mol_type = other DNA
atattattatgttttagtctactgcagtagtatggaaataagttcttccttcatgatcataaggattactttatggattgatatgacatattgcatatgcacactttttccaataactgc

SEQ ID NO: 12251 - DNA, 120 bp, synthetic construct
  source 1..120: mol_type = other DNA
tttgatcctaatgttggaggtgaggcttaataggaaacctttgggtcatgggggtgggtccttcttgaaaagattaatgccctccctccgagatgagtgagtgtttgctctgtttgtttc

SEQ ID NO: 12252 - DNA, 120 bp, synthetic construct
  source 1..120: mol_type = other DNA
gtgtgtttctagattttatgattgcagaatttggcattaatccatggaagctgccctatccccctctctgctttattcatgtcctaacagtttgtctgcctgttggagaatctagcagag

SEQ ID NO: 12253 - DNA, 120 bp, synthetic construct
  source 1..120: mol_type = other DNA
gggagcccgggaatcttcatttaggcttttcaagcatttcctcctcatgtggtttgcaaacactaccctaaatttacttgagctcctcagacagtggctaccagattatatatatctttt

SEQ ID NO: 12254 - DNA, 120 bp, synthetic construct
  source 1..120: mol_type = other DNA
aagtgatggttgtccttaagctcaggtgagaactattctccttaaacttaggagaggacaatagcagtagatatagaaggtgctttacccctaaaccagcaggtgcttaatgaattcctg

SEQ ID NO: 12255 - DNA, 120 bp, synthetic construct
  source 1..120: mol_type = other DNA
tggtttttatgggcatatcttgctgggaattgccttggtgctgttggtaaataacaaagagagagccctgtccttacaatgcttgcagtctttccaaaacaaaattgtgcctatgatagc

SEQ ID NO: 12256 - DNA, 120 bp, synthetic construct
  source 1..120: mol_type = other DNA
ttagatattgagttattagagttttatgtcttgttttcgaagccatgcttcaaatctatcacttatgcactcagcatccccattgtctctgtccactcgcctggccaggtagccaaaact

SEQ ID NO: 12257 - DNA, 120 bp, synthetic construct
  source 1..120: mol_type = other DNA
aatagcaaaggtgatggggtgtcacccttacgattacaatagcttatataagactctgacttgctagcagatttatttcagagagtctttgctggatggatggagtaagtagccatgctg

SEQ ID NO: 12258 - DNA, 120 bp, synthetic construct
  source 1..120: mol_type = other DNA
aaattcatgccattcagtcaatccgcaaatatttattgaatgtctcctaggccacctgacagtattctaggcactgagaatataccaaggaacaaatcaataaggtgtctgtcattatgc

SEQ ID NO: 12259 - DNA, 120 bp, synthetic construct
  source 1..120: mol_type = other DNA
acattccaagtctagctaaacaaggagtggtgatggtggtggtgtgatgatggtggtgatggtggtggtgtgatggtggtggtgatgatggtagtgtgatggtgttggtgatggtgttgg

SEQ ID NO: 12260 - DNA, 120 bp, synthetic construct
  source 1..120: mol_type = other DNA
aaaacaaacctttcagagcaaatattaattctcagagctagtacattcaaaacagagattacaagatgccatgggtctgggtaggtcagtaattcagagaagcagcatgtgtgggagcgg

SEQ ID NO: 12261 - DNA, 120 bp, synthetic construct
  source 1..120: mol_type = other DNA
tagtatacgctcttgaacaaacagcttaacctctccagcagccccaggagttgagatgttaatgagacctcttctttttccttcataggatcactgtgatccttcagagaatgaaagtga

SEQ ID NO: 12262 - DNA, 120 bp, synthetic construct
  source 1..120: mol_type = other DNA
gacttaggcactcagtcgatgtggatatgttaatcagccaagctagctgctgcatcaagtagtgctagatactccacaaaagatgatgaaaacggcaaaattcagaaggaactgtgtata

SEQ ID NO: 12263 - DNA, 120 bp, synthetic construct
  source 1..120: mol_type = other DNA
tgagagcttcactctcatgacttaattacctcccaaaggccccatttcataatgctgtcactttggggtttaggcttgacatatgtatttgttgtgggggacacaaacattcagtcctta

SEQ ID NO: 12264 - DNA, 120 bp, synthetic construct
  source 1..120: mol_type = other DNA
gcagaagttaaatattggtatctttaccattcaccagtaatctatttacaaacagacatgccaactaagaaaaaacgagagtaggtccaaaggtgggtacagtcacaagtgcatagaata

SEQ ID NO: 12265 - DNA, 120 bp, synthetic construct
  source 1..120: mol_type = other DNA
tccactgggtatgcatacctaaaatggaataccgaggtcataggatatgaatatggtcagctttagtaggtaccgccaaactattttcctgtaggagccaatgaatatctcaagtagcgt

SEQ ID NO: 12266 - DNA, 120 bp, synthetic construct
  source 1..120: mol_type = other DNA
tagttccttgaggatttcattagtggtaactgaattacactagtagtgggaattcagcccaggatgtattctttcattaagagctgcggtgtttgacagtatgtcagggatgaagcatgc

SEQ ID NO: 12267 - DNA, 120 bp, synthetic construct
  source 1..120: mol_type = other DNA
gctaaataatgtttactgttagaaccagtgtaattagttgcgttgtcacttaaaatatgtgccagacctgactgtgattaagggttttgtttatgctcagcctgacaggacacagcaccc

SEQ ID NO: 12268 - DNA, 120 bp, synthetic construct
  source 1..120: mol_type = other DNA
gctacacatccgttgtgtagaccaactgctgtcgccttttgaatcaagcagtgccttgggagtcctgctctggatactgagagttcctgtctgaatattctgagagatcccttcccaaaa

SEQ ID NO: 12269 - DNA, 120 bp, synthetic construct
  source 1..120: mol_type = other DNA
aaggctgggataggtttcctttggaaaggattgggaaagaaaagaaaaacagaaaaaattattagggccacagaaaagtagaacagagaagtgctccatgatacctgacacgtgcttaac

SEQ ID NO: 12270 - DNA, 120 bp, synthetic construct
  source 1..120: mol_type = other DNA
tggactgaatgtttgtgtctcccaaccgcaaaattcatatgtcgaagtcctgatccccaatgtgatgctaattggagatccctttgggaggtaattaggtttggatgagattatgagagt

SEQ ID NO: 12271 - DNA, 120 bp, synthetic construct
  source 1..120: mol_type = other DNA
ttaggaccttcatggactctaggtttggattagcaacatccctttaaaaaaccatgcaaacaccttttttctgcagctggttgctttcttggattgcttccttgtcaaacccctaactga

SEQ ID NO: 12272 - DNA, 120 bp, synthetic construct
  source 1..120: mol_type = other DNA
ggtgaacaaaggtgtgccattgttttaagtcgcatttattcagttacggcattgaatgttttttcgtatgtattttttccatttatataattctgtgaattgtctgttcttatcttttgc

SEQ ID NO: 12273 - DNA, 120 bp, synthetic construct
  source 1..120: mol_type = other DNA
ttttggcggggttggggggggggtgcggtgtgtggctatctgcattttaaatgcataaggaagctcaggtcagaaaattctgcagtgttttgaataatttttctcctatttttcattaat

SEQ ID NO: 12274 - DNA, 120 bp, synthetic construct
  source 1..120: mol_type = other DNA
tagatgaagaagacatcggggaactacaagtctttttcacaggtatttgcacaaggttggtgccaaggataggtagggcaatgtacatgagttactataattccaggcagatagtgctaa

SEQ ID NO: 12275 - DNA, 120 bp, synthetic construct
  source 1..120: mol_type = other DNA
agaagaaaaatccatagtcccatcacttgcagtaatagctccttccggtctttttttccttttgtaatagttccttccagtcttttttctctgcattattttttacaaaggcaaaagcct

SEQ ID NO: 12276 - DNA, 120 bp, synthetic construct
  source 1..120: mol_type = other DNA
atattagcctaatagcccaattataaaggaacatagagtttaatatattgagtgtggcttgctgatcaccattcatgcttgagaatctggggaccccagagtgggaacagctagtctgtt

SEQ ID NO: 12277 - DNA, 120 bp, synthetic construct
  source 1..120: mol_type = other DNA
cactcagaatcccttcaggtttccaatttgtgaaccccaaagtatctgagacagatctcaggaagtttattttgtcaagcttaagaatgcacccatgacacagccaatgaatgtaaggtg

SEQ ID NO: 12278 - DNA, 120 bp, synthetic construct
  source 1..120: mol_type = other DNA
attttgtaagtatttctcatagccaggtttcctctgaatgccaactcctaacagctgaatgtcaaactctagaagacaatttgacaaggatcacttcagccctccctacatggatacgca

SEQ ID NO: 12279 - DNA, 120 bp, synthetic construct
  source 1..120: mol_type = other DNA
tgagggagctgaggcacagagaggttaaatatctcacctgaggcctcataattgtaaagtagtgagcctaggatttgaatccaggtctttctcatgctaaaaatcctttgtttagctaca

SEQ ID NO: 12280 - DNA, 120 bp, synthetic construct
  source 1..120: mol_type = other DNA
atgaatggatggagggtggatttgagtgattaaaagcaaaaacaaaccaaacaggtaccaaagacatctccaccctctctgtcctggaaaaccaagaagtgtgttgtcagaaaacagtga

SEQ ID NO: 12281 - DNA, 120 bp, synthetic construct
  source 1..120: mol_type = other DNA
taataatctaacaaactcccagttgatactgatgctgctggttctagaaccacactgcagaaccatcgtcctagacatgaaacaaactgatttgcctacggaattgttattctttgctgg

SEQ ID NO: 12282 - DNA, 120 bp, synthetic construct
  source 1..120: mol_type = other DNA
attcaagagttttcattgagctttcattacataaatacataattgagtaaattattgtccgctggtcactgggctcaatctgtcccttacctcccctaaggtcagggcctagggctgaaa

SEQ ID NO: 12283 - DNA, 120 bp, synthetic construct
  source 1..120: mol_type = other DNA
ttcacgccttgcagagtgcttcacacattgtatgtggtctatatgtttgagggactgaggtttacatcagaagtaagtctaaactgaagcaacaagacagaacaggagactgattaagga

SEQ ID NO: 12284 - DNA, 120 bp, synthetic construct
  source 1..120: mol_type = other DNA
cccttgtggatcagttagccagatttgtcaaaggatagtaaagttgtaggtatagccatgttgaggtaaggggaaactcccagaaaaagaggtatataagtcagggaaacagttccaaag

SEQ ID NO: 12285 - DNA, 120 bp, synthetic construct
  source 1..120: mol_type = other DNA
ataccagaatgcaaaatttttttcactaggttttgatgaaatacttcacctttgagttgtgataatattaagaaccatttagctttaaaatgaatcccatttattcattacaaacctgcc

SEQ ID NO: 12286 - DNA, 120 bp, synthetic construct
  source 1..120: mol_type = other DNA
tatgggtgtgccaccttagaaggacctttggcaaatagaatgtcttaggaaagaaaagttagtggtgaatgatgatggagatcatgatgacaatgacgatgatgatggggctgatgaaga

SEQ ID NO: 12287 - DNA, 120 bp, synthetic construct
  source 1..120: mol_type = other DNA
gctaagaaggcaaaaaaaaaaaaaaagggggggggggcaattcatgaagacatattagtgatgacccatgtgtaccaaaatgtgtagaagatcctttatgccatggggaagaccaaagtg

SEQ ID NO: 12288 - DNA, 120 bp, synthetic construct
  source 1..120: mol_type = other DNA
aggagaggtatgtattagagataatacatgcatggctggccctagggaatgtacataaaagacgtatttggggcatcatcaggtcgcttctaaagtccttttgttcaaaacttaatcttt

SEQ ID NO: 12289 - DNA, 120 bp, synthetic construct
  source 1..120: mol_type = other DNA
ctccaaatcccccaccctacccatgactttggtcatcggtaacagagatttagctgttctggaatgagaacagacatttgtactgtctattatagatggaagagttaaaactactctgag

SEQ ID NO: 12290 - DNA, 120 bp, synthetic construct
  source 1..120: mol_type = other DNA
ggagattttcttttcactcctattgataggtgaggaaataggcttagagaagttcagtgagtcccttgaggtgacacagctaagactgtcagagtaagaatttgaacctacattcatcca

SEQ ID NO: 12291 - DNA, 120 bp, synthetic construct
  source 1..120: mol_type = other DNA
gggcagtcttttgggacaagggtaccttcttcacatccctcaaattttataataaaagcagctccatcttcatctacttatgcattggactctagggatcaaatatcaagaaaggctggg

SEQ ID NO: 12292 - DNA, 120 bp, synthetic construct
  source 1..120: mol_type = other DNA
aaacttgatgatttctaacaaaatgatcacaatagctccaaggcacagaagatgctgacaagaccaccttcttccctggaaatgtcggaatcaacatttcacacagactggccaaagtag

SEQ ID NO: 12293 - DNA, 120 bp, synthetic construct
  source 1..120: mol_type = other DNA
tgaatgaatgaatgtggatgagcatagacgcagtctgggacaggtgtttaacgtacagctccagtaactgaagaattcacgttttcattgatctctgtagcatgctactttaactcctag

SEQ ID NO: 12294 - DNA, 120 bp, synthetic construct
  source 1..120: mol_type = other DNA
gactacagggagcttcctattcgaaaaagtggcttatgtgttagcatttacttctgtagtgccattaacttaaaaaatgctaaacttcctttatagatattgagtgaatcatcataattt

SEQ ID NO: 12295 - DNA, 120 bp, synthetic construct
  source 1..120: mol_type = other DNA
gaactcagagttaatggcctattcttttttagaagataattgcctttaggtacaaaacaatatacagtgaaatcctcaaaagttttttttccctatgaccttaattaagatctgcattga

SEQ ID NO: 12296 - DNA, 120 bp, synthetic construct
  source 1..120: mol_type = other DNA
tcgaatggcttggagtttcctcaacacagctattttgaattctcggtgtggaagctcacatatctctgtttctctaggattggtccctagtcctttatttagttcacttggtgaggttat

SEQ ID NO: 12297 - DNA, 120 bp, synthetic construct
  source 1..120: mol_type = other DNA
cttcgtgcatcttattaccactaaagacctttcagtggaacaagatgtaaaggggcaagacagtgatactgatgatcctgaccctttgcaggcctcggctgatgtgtttgtttatgtttt

SEQ ID NO: 12298 - DNA, 120 bp, synthetic construct
  source 1..120: mol_type = other DNA
gtaagcgagtgctaaaacaaacaaaccaaaaccaaaacaaaaccagaaagaatatgagagtctggtgtgtcaaagagatgtaggagccaactgggatagttcccagtaaccaaaactggg

SEQ ID NO: 12299 - DNA, 120 bp, synthetic construct
  source 1..120: mol_type = other DNA
gtaagagtgtctctctctctctgcaccatgaagaggacaactaaattactagagactcataatcaataaagcaggcattgactaaaatctgcatatcaaatcttacctttgtttaagctg

SEQ ID NO: 12300 - DNA, 120 bp, synthetic construct
  source 1..120: mol_type = other DNA
gaatatgataccagtttccttcacttgcaaatattcctacatattgtggggaggtatgtcaagaataacaatttttgctccctaaaactgtatccatgctacccccattcctcaggcggg

SEQ ID NO: 12301 - DNA, 120 bp, synthetic construct
  source 1..120: mol_type = other DNA
agcgcagtgtttacattcatatgaactcaagtgttaggtgagccaagaacacagcagaagagccaataaaaggagcaaaaggttcattgacaattgtattgatcaggcacatttctggct

SEQ ID NO: 12302 - DNA, 120 bp, synthetic construct
  source 1..120: mol_type = other DNA
gactaggtagtaagggcaatgcatgggttgaattttgtcttacaaggaaaacaatgttgaccttctaacctccctggtcagaatgtgactttatttggagattgggcctttacagaggta

SEQ ID NO: 12303 - DNA, 120 bp, synthetic construct
  source 1..120: mol_type = other DNA
taccctctcctgaccctatttgcaagttcttgtaatcttactgagttggaacgctgaccatagctcctacacccagcaggtactcaatgaacaattatgggtttcaattcgatcaacata

SEQ ID NO: 12304 - DNA, 120 bp, synthetic construct
  source 1..120: mol_type = other DNA
tgctagacttaaacccaaccacaggtaattatattaaatgtaaattcacaaactaaaccaaagaaaaacattgtcagactaggttgaaaacaccaaaagcaacggcaacaaaagccagaa

SEQ ID NO: 12305 - DNA, 120 bp, synthetic construct
  source 1..120: mol_type = other DNA
ttcctacactgtattccgtcccttcattctcttctgactcaaatggaaaattatacacatatttctggccacaaaaggaaaaatactgaggagccaagatggccgaataggaacagctcc

SEQ ID NO: 12306 - DNA, 120 bp, synthetic construct
  source 1..120: mol_type = other DNA
tttgttatgcagcatccaagatactttatagtatgatgctatcctcacttctccctcttcttctccgtgtgttcatactgcagtcaaatctgtctccttcgtgcctctactttttcagga

SEQ ID NO: 12307 - DNA, 120 bp, synthetic construct
  source 1..120: mol_type = other DNA
gatatttttagtcactttcaatcttcctttttcagaagaaacagccagctccttcagtcctccctcatatgacactttatccatatgtgttccattctggtcctcctcctctggatacac

SEQ ID NO: 12308 - DNA, 120 bp, synthetic construct
  source 1..120: mol_type = other DNA
aaagtatctcaaacaggcaaggcagaaaagcttagtgagagtgattcttttaaatgtgacttggaatggtttgcagaactcaaaatttttacaggaaaatggtcaaagcccatggatgaa

SEQ ID NO: 12309 - DNA, 120 bp, synthetic construct
  source 1..120: mol_type = other DNA
catatggaactgcaaaaatcctcaaatagccaaggcaattcataagcaaaaagaataaaactgaagttatcatactacctgacctcaaaatctagcgcataagagcaaagtactggcaaa

SEQ ID NO: 12310 - DNA, 120 bp, synthetic construct
  source 1..120: mol_type = other DNA
ccacatctttttcacgtctaagggcccagctttcgagtgtgtaaaagttatttggggtgaaaatgtgtattatccattctcaccaatctagaggttgtcatgagtttgggggattggaat

SEQ ID NO: 12311 - DNA, 120 bp, synthetic construct
  source 1..120: mol_type = other DNA
catacacaaaatagaacttacaatgaaattctggggcttgatgagaaccacctgcccaatccaaggataacaggaaaactgatttttgtattcgtccagatagtattaagtctcggcctc

SEQ ID NO: 12312 - DNA, 120 bp, synthetic construct
  source 1..120: mol_type = other DNA
actgttctgaatgcttacctacattaactcatttaatcctcacaacaactttaggaagcagtaatagaagggagccgatgcagacagcacttttacgcccgcatcacaattcatttccct

SEQ ID NO: 12313 - DNA, 120 bp, synthetic construct
  source 1..120: mol_type = other DNA
tagttctgccttgtcttctttcttaccagtaggacagagtacaagagctcacaaattatttaatttatgctgagagctaacagcgtcctgaatgctagaagacaaaaagcatgcagggcc

SEQ ID NO: 12314 - DNA, 120 bp, synthetic construct
  source 1..120: mol_type = other DNA
ttgaatttcatcaaaatgaaaacttctgctctttgaaataaattccgaaatgaaaaggcaagtcacagactgggagaaaatatttacaaaacatatatttgataaagaacttctattcag

SEQ ID NO: 12315 - DNA, 120 bp, synthetic construct
  source 1..120: mol_type = other DNA
aaacagttaaaatagcacttagtaaatagtaggtccctttatgacaacgctattctcttcatctccttcatgtccctcctcctcttgtactgaaactggccggtcacagtacttttatct

SEQ ID NO: 12316 - DNA, 120 bp, synthetic construct
  source 1..120: mol_type = other DNA
agcttcttgacattttattttaaccttagcccctagctcatgagaagtaccttggctattactggtgggtcatacactgctatccaattgtcaggagagtgagggaacacaaaacatgta

SEQ ID NO: 12317 - DNA, 120 bp, synthetic construct
  source 1..120: mol_type = other DNA
aataattgtcatttttgttagtaatgtatttccacatatacttacaactttaattttaaaagccatctctacatatgagatttaagataactcgacagaacttttcctctctctggtcca

SEQ ID NO: 12318 - DNA, 120 bp, synthetic construct
  source 1..120: mol_type = other DNA
agtcatttttttttcattttgtctagatgtctaagtgattctagatgctataaatgtgccagaatcagagataggtataggcttgtgccattcaacaaggtagtcacggccttgtgtggt

SEQ ID NO: 12319 - DNA, 120 bp, synthetic construct
  source 1..120: mol_type = other DNA
ttggtgaacacactatcattctagaaagtcaagttctcctggaataagaaaaagaacagatcttacttatattgtttatctccataaatcacctctccgttaatgtccagtcagggctga

SEQ ID NO: 12320 - DNA, 120 bp, synthetic construct
  source 1..120: mol_type = other DNA
ggcctgtgtcctgggattactctacagggagatccttttgaataaaggcttttgatgcttcagtacctgattttctggcatgcagacccaacaatgtttgtggaaatgatattacactaa

SEQ ID NO: 12321 - DNA, 120 bp, synthetic construct
  source 1..120: mol_type = other DNA
ctttcttactgactcccttaccctaccactctctccctctttccttgattcaggctttcttttaatgacacgttatatctcataggggctcacccatatttgcctccttatattttttcg

SEQ ID NO: 12322 - DNA, 120 bp, synthetic construct
  source 1..120: mol_type = other DNA
ggaatcaactgcatatttccctgattcataaagaaaactcttccctagaaaccagcattaacactgcagacagtgacaacaccttgggttcttgtcatgtcttaataaataacggccggg

SEQ ID NO: 12323 - DNA, 120 bp, synthetic construct
  source 1..120: mol_type = other DNA
ttgctttaataaggtcctaattaaagaaaaattactttagcacaaaatgcaaagaaacagcagattcacacataaacattccagcagagacaagttaaagagattgagctcacatgcaat

SEQ ID NO: 12324 - DNA, 120 bp, synthetic construct
  source 1..120: mol_type = other DNA
taaaggttaataaatgcctacagtctgttaaagattgagctattcagggttgggaatgcagtggtaatctgatttttaaatatgactgcagggggaggcgccaagatggccgaataggaa

SEQ ID NO: 12325 - DNA, 120 bp, synthetic construct
  source 1..120: mol_type = other DNA
aaatccaactgctggggtttgaatcccagcctcttcacttactagctttgttgtattaggcaagttgcttatcctctcaaagctgcaatttcctcatctttaatggggaaatattgatag

SEQ ID NO: 12326 - DNA, 120 bp, synthetic construct
  source 1..120: mol_type = other DNA
aagagagagagtgctcacgcactctagcttggcataatgctgagcacgtagtaagcactaggtgagaagtaactcttgttattaagtactcaggtaataaaattctactctgggcattct

SEQ ID NO: 12327 - DNA, 120 bp, synthetic construct
  source 1..120: mol_type = other DNA
attaaccatccccacttcgccatgaccaccctactaccattcccagtgtctagtaaccacccttctgctgtctatctccatgaattcaattttttacattttagtttccacaagtgagaa

SEQ ID NO: 12328 - DNA, 120 bp, synthetic construct
  source 1..120: mol_type = other DNA
tgctccagattttctccagtatttattattacctgtctcttgggataaaagccattttaactgaggtgagatgctattgtattgtacttttgatttgcatttctctgatgatcaaagata

SEQ ID NO: 12329 - DNA, 120 bp, synthetic construct
  source 1..120: mol_type = other DNA
cattctgactggtgtatgatgatgtcttagtgtggttttaatttgcatttctccaaagattagggatactgatcattatatcatgtgtttgttggctgcttctatttcttcttttgagaa

SEQ ID NO: 12330 - DNA, 120 bp, synthetic construct
  source 1..120: mol_type = other DNA
tttttgtaggctgaatcgtctcaaacttgtcattctgaacaaggtgataaaaagatggaggaaaaaaattcaggcaacttccagaagaaggctgcaaacatgcttcagcaatctggttct

SEQ ID NO: 12331 - DNA, 120 bp, synthetic construct
  source 1..120: mol_type = other DNA
ttgttgttgttacttgtttgtttcccttcctttgaaagagcttgctacacatctaaagtttgtaggggtgggaattattataatggctgcgtatgaccttcagaaagaaatccaagatct

SEQ ID NO: 12332 - DNA, 120 bp, synthetic construct
  source 1..120: mol_type = other DNA
atggtacagagtgacaagacaaggggttggaggtaaacagcagccagatagatcaggcaatgctcttagaaattagcaaagccatcccattactgggtatatacccaaaggattataaat

SEQ ID NO: 12333 - DNA, 120 bp, synthetic construct
  source 1..120: mol_type = other DNA
agtgacactgcagagccccacattgaatgcagcacttggcaactgtccaatttgccttccctttaattctgctctttgaaagcaaatattttacccaacacaccattttttaaaaaatcc

SEQ ID NO: 12334 - DNA, 120 bp, synthetic construct
  source 1..120: mol_type = other DNA
cgtttcttgtttagttgacttctatatatgctctaccagtttattttcatgcctgttaccaacactggaggttctccctccattccatcaatgagtcatgtcttctgtggggacctacac

SEQ ID NO: 12335 - DNA, 120 bp, synthetic construct
  source 1..120: mol_type = other DNA
agatccgggcagaataaattgagacccccccccacacaaaaatacaaaagatcagtaagataaaaagttgactctgaaaagataaacaaaattgacaaactgctagctaaattacccaag

SEQ ID NO: 12336 - DNA, 120 bp, synthetic construct
  source 1..120: mol_type = other DNA
agaagtgaaagaggataagaaggaatgctagaaaactagttagaaggctatttggtagaccagataagaaacaaagatagcgggttgaggagccaagatggccaaataggaactgctccg

SEQ ID NO: 12337 - DNA, 120 bp, synthetic construct
  source 1..120: mol_type = other DNA
aagggtcagacagagatacagtataaggctttagggacataaggggaaagtgccacttcttatcaacaatcaaaagcatgaaagcctctaaggaacgagaatagagaggaacactcactt

SEQ ID NO: 12338 - DNA, 120 bp, synthetic construct
  source 1..120: mol_type = other DNA
tcagagtgctggcagtcaagccttcacccttcaagcaatacactggtaaaattgtttctggggattctgaccaagccaagaggaaagaattaaatataccaacatttgagtttgctgaat

SEQ ID NO: 12339 - DNA, 120 bp, synthetic construct
  source 1..120: mol_type = other DNA
ctgttctatgcattgtagatgtttagcagaatccttagtctttacccagtggcatctgaactattctgacaaccaaaaacatctctaggtggtgccaatgttcctagaggcaaatacccc

SEQ ID NO: 12340 - DNA, 120 bp, synthetic construct
  source 1..120: mol_type = other DNA
ttatgtagacatattacaggttatatatccattttactattgttggacatttagtagaaaaagtactgtagttttcatacttacacatgaaccttgaattgtttgattaggtaaattttt

SEQ ID NO: 12341 - DNA, 120 bp, synthetic construct
  source 1..120: mol_type = other DNA
aaatgagagaagtgacagtggccagatcctttgccattgtaaggactttggatttcctttgagtgagggttttgagtctgaaaagtgatttgcatctccacctacaataactgtcacctt

SEQ ID NO: 12342 - DNA, 120 bp, synthetic construct
  source 1..120: mol_type = other DNA
aatccaactgtattttgtttacaagagacacaatttaaatataagggcacaaaaagatgaaaagtaaaagaataggaaaagatgtcatgtaggtactcaccaaaagaacactagggtagc

SEQ ID NO: 12343 - DNA, 120 bp, synthetic construct
  source 1..120: mol_type = other DNA
atataaaaaaacacaactttttgttggggtgcagagaatttggtcactgtcatctcccatttcctctttcatctagaaagcctaacacaccatggaatgaggaagctggctcctgtgatc

SEQ ID NO: 12344 - DNA, 120 bp, synthetic construct
  source 1..120: mol_type = other DNA
tgaggtacagttcttacaggaaagccagaatattagaatgtatgctgtaacaccaatgagttggttccctagtattttctgaaggttagcagtatttgtttttggtggggggtggaggtt

SEQ ID NO: 12345 - DNA, 120 bp, synthetic construct
  source 1..120: mol_type = other DNA
tccttctagcaggatctggtatataaagaccatagtctaagtgctaacaggcatggtcattgtgttaagctttacagtggacaggcctttttaaaagagttcatgctgataattacaaat

SEQ ID NO: 12346 - DNA, 120 bp, synthetic construct
  source 1..120: mol_type = other DNA
ctattgagcctttatgcagagtgggttagcctgagtatttgggagtgttagttgaccttaaataccctctgccatgtcccctcttaaccctcaatagttaaccaagtattcttttactca

SEQ ID NO: 12347 - DNA, 120 bp, synthetic construct
  source 1..120: mol_type = other DNA
atttaaatctttgatccattttgggttaatttttgtgtatggtgaaaggtagggagtccaagttcagacttctgcctatggctagccaggcatcccagcaccattattgaatacggagtc

SEQ ID NO: 12348 - DNA, 120 bp, synthetic construct
  source 1..120: mol_type = other DNA
ttggaggcatcttagaagtctcctgtattctagttctaccttacaaaaacagcagttccagtaaagaagaaaatctgatttcctaccagcttggcaaaatgggggtttaagatgagtttt

SEQ ID NO: 12349 - DNA, 120 bp, synthetic construct
  source 1..120: mol_type = other DNA
cagtgatagagtatatgcagtgatagcatatatgtagagtgtatgcagtgatagggtatatgcagtgatagagtatatgtagtgatagcatatatgtagagtatatgcagtgatagagta

SEQ ID NO: 12350 - DNA, 120 bp, synthetic construct
  source 1..120: mol_type = other DNA
atcgcctgaaactcattccctgggctatcccctcctcactctgcttaatcacttctaagtaatttaacctagaaaataccctaggttccaagtctttgctattgtgaataatgccgcaat

SEQ ID NO: 12351 - DNA, 120 bp, synthetic construct
  source 1..120: mol_type = other DNA
ggctagtctgtgcaatttcgtgagcattaaagtatttcttgtcttccctacatgcctgtagcatttacttgtggagacgtatccaagccactgaacaattatacttcaaagacactggct

SEQ ID NO: 12352 - DNA, 120 bp, synthetic construct
  source 1..120: mol_type = other DNA
agagaaatgggatagcaatcaaggcattgtacactgtcttttgtttctctgcctaagatggcctaactactttgattctgatgggtttagttggaacagcggaactcttagtactgctga

SEQ ID NO: 12353 - DNA, 120 bp, synthetic construct
  source 1..120: mol_type = other DNA
gccagtcacaaaagaccacatatcatatgtttccatgtataggaaatgttcagaataggcaaatctataagaacagaaagtagattaatggttacttagggctggtgagagatgagaaag

SEQ ID NO: 12354 - DNA, 120 bp, synthetic construct
  source 1..120: mol_type = other DNA
aatttaaaaaaagagaaaagaatgaagtaacttggatctggacagaatgccaaatagcctcagcaccttagtctctaacactctctagacaggacttcaggatccacagtctagcctccc

SEQ ID NO: 12355 - DNA, 120 bp, synthetic construct
  source 1..120: mol_type = other DNA
tatatgtataagggatgtagcaaagtgcttagcacaatacctggcatgtagtaagtgcttggtagatggcacttatctcactggcaaacttatctagatactctcaaacatggatctccc

SEQ ID NO: 12356 - DNA, 120 bp, synthetic construct
  source 1..120: mol_type = other DNA
ggaggagaaagcctgtcactggaaattactaacttctcatggacaggaactcccttggcatccctagttcccaatgtgcaatggaactgtatacactttgcatgaaattgaattgaatga

SEQ ID NO: 12357 - DNA, 120 bp, synthetic construct
  source 1..120: mol_type = other DNA
agtaaaaagaataaagttacatgaatctgggcagaatactaaatagcgtcagcacctttagtctctaccattctctagacaggatttcaggatccatagtctaggctcccagttcctgga

SEQ ID NO: 12358 - DNA, 120 bp, synthetic construct
  source 1..120: mol_type = other DNA
ttctgtcactgagcagccctgcaactgtgggcatattcctctgaaccttggtttccacatctgtaaaatgggaaaaatatttcctcgcagggtcaatgtgaagggaaaatatatgtataa

SEQ ID NO: 12359 - DNA, 120 bp, synthetic construct
  source 1..120: mol_type = other DNA
agggagacaacctgagtccattgtcctatacttcagccagtgctgtgaaacaggctgatggaacggtatgctatgaacagacattagactaagactttgaactttaatggtgttacttta

SEQ ID NO: 12360 - DNA, 120 bp, synthetic construct
  source 1..120: mol_type = other DNA
tatgtatgtgtgtggtatgtgtgtgtgtgtggtgtatatgtgatgtgcgtgtggtatgtatgtgtggcatgagtgcgtatggcatgtgtgtatggtgtgtgtggtatgagtgtgtgtggt

SEQ ID NO: 12361 - DNA, 120 bp, synthetic construct
  source 1..120: mol_type = other DNA
ttcttactgtatctccacttcagttatgttctcaggttcaggagcttgccactgtgcctctaagaccgtcatgtattgatctttcacgtaatacgtggagttgctgtagcaatttttatc

SEQ ID NO: 12362 - DNA, 120 bp, synthetic construct
  source 1..120: mol_type = other DNA
gctgctcaactgtgcctttatagccctgaagtaaccgtgggcgatatgcaaatgaaggggcaggggtgtgttccaataaactttcatttagaggcactaaaattagatttttatgtgatt

SEQ ID NO: 12363 - DNA, 120 bp, synthetic construct
  source 1..120: mol_type = other DNA
agaaatgtttacagtggcaagtaagtctccattttcagttcacctgtctccctcagaactgccactctgagaatccactgcatagctgggtgaaacttactagatattgtgaagaaaatg

SEQ ID NO: 12364 - DNA, 120 bp, synthetic construct
  source 1..120: mol_type = other DNA
tatgcccattacccaggtcatgctggttaaggacaccccttcagtgtggacccctcatacaacatgactgtagcaaaactgacaaacagttctggaagccttattagatttgctatctca

SEQ ID NO: 12365 - DNA, 120 bp, synthetic construct
  source 1..120: mol_type = other DNA
ttgttgatagagatatttcaaataaatgacttaggagaacttagtattttaaaacaaaggaccggttacgtagcagccagaagcccaggcctcttggttctccacagccacgaagatccc

SEQ ID NO: 12366 - DNA, 120 bp, synthetic construct
  source 1..120: mol_type = other DNA
gcctcattcatagccatgtgtgactggtggctgccgtcttgggtggtgccttcattgtcccagaaagttctgttggagcaagcccagctggaggaacccagcttccctggcacgcctgag

SEQ ID NO: 12367 - DNA, 120 bp, synthetic construct
  source 1..120: mol_type = other DNA
gagctttcttaacctctgtatctctttttcggttggggcttggaggaatggggagggtgttcttttctgtttcttgtgtaaattaatagttgtttttatagacttcagctggtcaagacc

SEQ ID NO: 12368 - DNA, 120 bp, synthetic construct
  source 1..120: mol_type = other DNA
aatctgaaggccttaaaattgtgtgttgggaggatgtgaattgggaggacggtgtcactagactgtggattagggatggtaaagtagggaggatgctattttgcaactatagtaacgact

SEQ ID NO: 12369 - DNA, 120 bp, synthetic construct
  source 1..120: mol_type = other DNA
gaacagaggaaaatgagctctttccttaagaaattgtagaagctgcattacttaacctatggttcctggaacttggaatgcatagcttaggcttgtggtccctggactagtagtttgaca

SEQ ID NO: 12370 - DNA, 120 bp, synthetic construct
  source 1..120: mol_type = other DNA
acctactacaacagcagacttgtttccaagaaagctacttagtcgtcacacatgaacacagtagatatcctaacaagatactaagagctatttctgacatgaagactaagaataaaactg

SEQ ID NO: 12371 - DNA, 120 bp, synthetic construct
  source 1..120: mol_type = other DNA
tagtgcctaccatgcaccatgacaggtgaatcacatactttttgcaaaaagacaaggcaataccttatgtgctaaattcccttgtctgcctacatcacagagttgtttgaaaggaatgtt

SEQ ID NO: 12372 - DNA, 120 bp, synthetic construct
  source 1..120: mol_type = other DNA
aactggttatagcatccctactgtggtgtgtgctatggctcaactctccttcagtattgggcaattacatctcacactgctttgtctccaaatattcaaatttcttaatccttcctggca

SEQ ID NO: 12373 - DNA, 120 bp, synthetic construct
  source 1..120: mol_type = other DNA
gtgtaattaaaaaaatcaaacaaatgtaatcataacttcatggagcttttctcatacctgcttcatagaggccacccctaccttctgcctcttcactaattttacttatgcagagtttag

SEQ ID NO: 12374 - DNA, 120 bp, synthetic construct
  source 1..120: mol_type = other DNA
caagatagattctggtatcttgagccaacatatcaggagaatggtacagaaaaactgaacattaccagcccctctaccttagctaactgcaaaatgaacaacttccaaggacttgctgct

SEQ ID NO: 12375 - DNA, 120 bp, synthetic construct
  source 1..120: mol_type = other DNA
ctagaaatccctcatgccccagggacaccatgctccctgaaatcacagcatctgaaaatgttaagcacccacctactctctgaaacccgtccctctcttttccagttttactcttgttga

SEQ ID NO: 12376 - DNA, 120 bp, synthetic construct
  source 1..120: mol_type = other DNA
actgctgggaaaatagcagggcttgttctctcagtgatgctgcactacagatagattgaaacttaaggggatggaaatctaaactgcattcccatttggaaacatcagcatgaatctatg

SEQ ID NO: 12377 - DNA, 120 bp, synthetic construct
  source 1..120: mol_type = other DNA
gtatcccagctgtgccggcagcatcataccaatcgtgggggtggtgaaggagccaggggttcattcatggttggtttctgatcaggcatcttgggaatggataatggaggcagccgcttt

SEQ ID NO: 12378 - DNA, 120 bp, synthetic construct
  source 1..120: mol_type = other DNA
ctcagaaagtctttttccttctagggactgcctttttcacccaaactgttccctctgccccctcccccgacaaggcctgtcctgtaagagttaggctagcagggtaggagcaatgctatg

SEQ ID NO: 12379 - DNA, 120 bp, synthetic construct
  source 1..120: mol_type = other DNA
tgggattagaaaaaaatgtctttccaccaaattaaagaaagctttgaaaaccactggcctagagaatacctaactgactggaggatgggagggtggagctcaatttccagtctataggct

SEQ ID NO: 12380 - DNA, 120 bp, synthetic construct
  source 1..120: mol_type = other DNA
gtagcttcgagtgcagttgggaagacgacacatacccaagacacaatataagaatccagcagagcaacttcaatcattcattcatccaaaacattatttactgggtacctcctccatttc

SEQ ID NO: 12381 - DNA, 120 bp, synthetic construct
  source 1..120: mol_type = other DNA
gcaaaagtccaggctagagaatgactaccctctcccaccaattaaggaacagaagcttgcccaatatctgaggctatagaattgctaggctgctaccgattcattcttcgaatgtgtatt

SEQ ID NO: 12382 - DNA, 120 bp, synthetic construct
  source 1..120: mol_type = other DNA
ttcaaaataatgttgggtaaaagaagctggacaaatggtatgattccatttacacaaagtacaaaaagaagcagcactaatctatgctattgaggtcaggatgatggttacctgggagga

SEQ ID NO: 12383 - DNA, 120 bp, synthetic construct
  source 1..120: mol_type = other DNA
atgtgccgttttgtctccatgttgtgacatcccaaagtcaaacgcggaagctctcttgtaatttattatgtaactgggactggaatgcagaactactggagggcgttgctgccaatcaga

SEQ ID NO: 12384 - DNA, 120 bp, synthetic construct
  source 1..120: mol_type = other DNA
ccttgtttttgtagagatgggatttttgtatttcatagagatgggatttttgtattttgtgtagaggtgggatttcgtcttgttgcccaggtctcaaactcttgatcctcccaccttggc

SEQ ID NO: 12385 - DNA, 120 bp, synthetic construct
  source 1..120: mol_type = other DNA
gaatcacctggaacatatcttagaaagtatggatgccctggccctgctctcagtgttcaattcaacacaacatgggcatctacatttttaaaaagctctacagtgattttactgcatggc

SEQ ID NO: 12386 - DNA, 120 bp, synthetic construct
  source 1..120: mol_type = other DNA
gctttggatatttgaaatccagcaagagtattctgagggtgagggggctgtgcagcagtagacaatgaaagtttcctccttggtagaattaatcaatggaattaggagattcctgatatc

SEQ ID NO: 12387 - DNA, 120 bp, synthetic construct
  source 1..120: mol_type = other DNA
caccagtgccctgcccacttggccaggcacatccacccttgttgttgctataccaagaggaatctgttctgccaaaacaagacacttaagctaagtggccattgttacatcagttgtcct

SEQ ID NO: 12388 - DNA, 120 bp, synthetic construct
  source 1..120: mol_type = other DNA
tcagcaaagtaaaattcacaatatcctcattcagtcaaatattaccaggcactcagagaggcagagcaaaatgacccataatgaacagaacaaccaacagagcacaggccttggaatcct

SEQ ID NO: 12389 - DNA, 120 bp, synthetic construct
  source 1..120: mol_type = other DNA
aagtcaaatatagagtttgttagaggtgatgcgtgctttggaagaaaaaaaaagcaagaaaggaggataggaaaggttggaaggctgcattttaaatagggagatccaggaaggcctcac

SEQ ID NO: 12390 - DNA, 120 bp, synthetic construct
  source 1..120: mol_type = other DNA
tttgatgcataggctaaaggaagtggaaactctgtgtacaaaagtgaagatttgctgcacaatgaagagaatgacccacaattccctgagccgtatcagtgataagtagagagaagccat

SEQ ID NO: 12391 - DNA, 120 bp, synthetic construct
  source 1..120: mol_type = other DNA
gtagataagggacagttatactttagtgtggtggcggtggttgctttgggatgggagaaaaaggattatcaagcaaagttattccttagaaaggacttggggttgtctctgattcttgta

SEQ ID NO: 12392 - DNA, 120 bp, synthetic construct
  source 1..120: mol_type = other DNA
atttgggaggttcagtgggagcccgtggaggtttcaggcatctaaggcaaaaagaaagaggggagagtttgggggagggagaacggattgtcaaaaacaccctctcaaaagcgtgttaaa

SEQ ID NO: 12393 - DNA, 120 bp, synthetic construct
  source 1..120: mol_type = other DNA
ccaagcctattaacagctcagtctttatctgaatcaggttaattggttcacccagaaactacccatcgaaagtccgaaagcagtttacagattgaccctgggctgtatcactctccttga

SEQ ID NO: 12394 - DNA, 120 bp, synthetic construct
  source 1..120: mol_type = other DNA
ttgttacaaagtacttagaataatgcctggttcacagaaaacaggacatggtatttgattaaaagaaaattagagccatgcaccgtggcatatgcctgtagtcccagctattcaggaggc

SEQ ID NO: 12395 - DNA, 120 bp, synthetic construct
  source 1..120: mol_type = other DNA
cacgcgggagcagtgcgggaaggtcaggcagagtcattgcacagacacattcctctaacaccgtacaaagaaaatgctttggaaaaccaagcaagcaatttattctcatttatttaataa

SEQ ID NO: 12396 - DNA, 120 bp, synthetic construct
  source 1..120: mol_type = other DNA
aacagggaattctcttagaccccattcattcatctctcaggtgtttcttgagcctcttatccatgttaggaactgtggtcattttgtggccactgaggacaaaaaaaaaatgggtgtcac

SEQ ID NO: 12397 - DNA, 120 bp, synthetic construct
  source 1..120: mol_type = other DNA
attaattggttggggctgccataacacagtaccacagagtgggtggcttaaccagatgttcattttcttaaaattctagaggctagaagtcggagttcaagttgttagcaggtttggttt

SEQ ID NO: 12398 - DNA, 120 bp, synthetic construct
  source 1..120: mol_type = other DNA
tgagcacacactaacttttggggccctctccagaatctactttcaggatgggttaagaccactgagtgttcaataacgtaacccattaagctgagaaaaaaatctgacattcaggaaaca

SEQ ID NO: 12399 - DNA, 120 bp, synthetic construct
  source 1..120: mol_type = other DNA
tgtcacttgtcctataaatgacaatagagctaacaatatctaattgactattaaaggagaaagcagccctgtagatgctgcaggctaattaaccctgggagtgcagagcgagaggaagaa

SEQ ID NO: 12400 - DNA, 120 bp, synthetic construct
  source 1..120: mol_type = other DNA
ggcaaagatatgactgttgtggggcagccccatgtctggaaccctggcagccagcccttattcagtgtcctcgttgccacaccccatgacgtttgttatgtttcttcttatgaatggatc

SEQ ID NO: 12401 - DNA, 120 bp, synthetic construct
  source 1..120: mol_type = other DNA
ttttctgagatcttcctccatcagaagaaacagagatctgaaagggatctgacttttgaagtgtctcttgaagatctcccaccctcgccatcaccctaatattcaactccctattatttg

SEQ ID NO: 12402 - DNA, 120 bp, synthetic construct
  source 1..120: mol_type = other DNA
taggcctatgacaggccccgggaactgatgcagttgtcaagcacccaaggtgattctaatgaagccctacggccgtggaggccctgtcatgtctgcctcctgcttctgggtcccagcatc

SEQ ID NO: 12403 - DNA, 120 bp, synthetic construct
  source 1..120: mol_type = other DNA
ctggaggcaggggagccgggaagaaggctttcactgttgcaagagatggtgagaaccaaaagtagcttgggagttagaagaaggtacagattccaaaattctcttttttttttttttttg

SEQ ID NO: 12404 - DNA, 120 bp, synthetic construct
  source 1..120: mol_type = other DNA
ttcacattgggcacccaaagtttggagccttttctgaactatcgaacccctttagatgtgcaaactcaccatggactttcagagaaacatcctggtttatgaattcctgcttttttgtgt

SEQ ID NO: 12405 - DNA, 120 bp, synthetic construct
  source 1..120: mol_type = other DNA
ttactatggtagaggagacagagccatgggaacaatgatgacacagcataagacatattatggtagacacttgtgtagggtactgtggaaacacagaggaagaccatgggaaaagtgttt

SEQ ID NO: 12406 - DNA, 120 bp, synthetic construct
  source 1..120: mol_type = other DNA
ctgtgaattatgggactcagagctgtgaaaattcttgggcaatatcttgtccaatctcttcctttcctaggtaaaacagagactaagacagtgaatgacttacatgaggaggccccatat

SEQ ID NO: 12407 - DNA, 120 bp, synthetic construct
  source 1..120: mol_type = other DNA
gcatgttcataaatctcagcttaccccagtgtctgtctgaataaacgtcttcaaattaaactgtggttgggtgggaagtgacttctttatgtaggtgaatccatcagtcctcctaacctt

SEQ ID NO: 12408 - DNA, 120 bp, synthetic construct
  source 1..120: mol_type = other DNA
aatgcttaatgaatgagtagggaaagcagatgttcaatgcttaatgaatgagctgcaaaatgggtccactaaagtattttggggtcagttgtttctctccagctgtgtggagggcagaga

SEQ ID NO: 12409 - DNA, 120 bp, synthetic construct
  source 1..120: mol_type = other DNA
tttctcaatttattaagttgtacttacctgatgctgatgatgattactgtatttacacattgtctcagagctcactcttgcggaggttgtggcctcgaaaatgccttgttgtccctctgg

SEQ ID NO: 12410 - DNA, 120 bp, synthetic construct
  source 1..120: mol_type = other DNA
gcaggcttcatctcctcctccccagctcctcccctagtacacagatacctgtaggcagactccatctcttcttccccagcttcttccgtagtgcacagatacctataggcaggctccatc

SEQ ID NO: 12411 - DNA, 120 bp, synthetic construct
  source 1..120: mol_type = other DNA
cttccatagtacacagatgcctataggtgggttctgacttcctttctgcttgttgtgggttgtggtgaacaactgctaaggccacaagtctgaagagtcagaagacaggacagatgatgt

SEQ ID NO: 12412 - DNA, 120 bp, synthetic construct
  source 1..120: mol_type = other DNA
gagcaggaaggaagaaagcagggttgggggcgatggtgggattagatcgaacttcagtgaaagttattgtttagttgaaatatgttctattaattgaccagttgttttgaatcggccact

SEQ ID NO: 12413 - DNA, 120 bp, synthetic construct
  source 1..120: mol_type = other DNA
agactcctagagtgttaaaccaacagggacaggttgatcccacactcaccaaaatgacagtaggaacatctgaggcgaataagcaaccacataataagatgaacattggagataattaag

SEQ ID NO: 12414 - DNA, 120 bp, synthetic construct
  source 1..120: mol_type = other DNA
tattggagcttcttttctgccagagacagatcagggcaattaaaaacctggacctcgatctgtatgcaactaaatgatggtatgcagataaatggactaacccagacttccacttttctc

SEQ ID NO: 12415 - DNA, 120 bp, synthetic construct
  source 1..120: mol_type = other DNA
ctacagtgctgagattaagagcaagagccaccacacctggccttatatgcatttttaagctaaagcaagactttaaagaaatgcaatttgttctgggctatgtcccaaatctccaaggtc

SEQ ID NO: 12416 - DNA, 120 bp, synthetic construct
  source 1..120: mol_type = other DNA
cttctccagctctgtccctaattccctcggatgagacagcaaggagggatgaagttgatttgtgaggggtgaggcaaattcattaaactagtataagatacacatggactgtttttaaat

SEQ ID NO: 12417 - DNA, 120 bp, synthetic construct
  source 1..120: mol_type = other DNA
cccctcccctagcacagtgctgggtacttgagagtggtaaatggaaaatggaaatgaaaatggaaacggtaagtggtaaatggaattgtcactggactagctgtcttgagcgaatggcaa

SEQ ID NO: 12418 - DNA, 120 bp, synthetic construct
  source 1..120: mol_type = other DNA
cctgactaattctaccttctctttcattttctcttttcagaaaagccagagttggtataatgtaagtattcctgtttcccttcttgttgggtacctgagaaatgggagggggaatggagg

SEQ ID NO: 12419 - DNA, 120 bp, synthetic construct
  source 1..120: mol_type = other DNA
catgtgtgtgagagaggctgaaataatttcatcatcatctctgtgagggaagctttgtaacaagcgaagtgcaggataactccagaattatctacctggttgatgcagtttccacataga

SEQ ID NO: 12420 - DNA, 120 bp, synthetic construct
  source 1..120: mol_type = other DNA
gggagcaccgagtgtttcctctacacagtcatgtcctatgatcgctacttggccatcagttacccgctcaggtacaccagcatgatgagtgggagcagatgtgccctcctggccaccagc

SEQ ID NO: 12421 - DNA, 120 bp, synthetic construct
  source 1..120: mol_type = other DNA
aaggtgtaagggagggatccagtttctttaatttctctcagaaatatttggaagtttcattctataaacattgcatgtattttgttaattttattcctaggtatttgatgctagcttatt

SEQ ID NO: 12422 - DNA, 120 bp, synthetic construct
  source 1..120: mol_type = other DNA
tggcaaactcttttccaaaacagttgaacaatttcacactccctgccagctttgtatgacaagtagagatgctcctgacacttgatatattcaggtgtttttgttttgttttgttttttc

SEQ ID NO: 12423 - DNA, 120 bp, synthetic construct
  source 1..120: mol_type = other DNA
gaatggaatagctacatcatctattcactgtttaacagaaaggggatcacacttgtaattctgttttttaattgtgtgtctctactttttactcccttctaattcacaaaagttgaagaa

SEQ ID NO: 12424 - DNA, 120 bp, synthetic construct
  source 1..120: mol_type = other DNA
caggagagaggaaaggtagaaaatgatgaagaaaaatatcagtgcatatgttccctttacaaatatgccatgacctctttagtaatattgcgagaagtgccagagatgcaaaaacaaaaa

SEQ ID NO: 12425 - DNA, 120 bp, synthetic construct
  source 1..120: mol_type = other DNA
cattgaagtcaacatgtaacattcagagatgacgaaaaagagaaagaaaaacagccgagtcatgcacccaacattggagataatattcttttttgacacaaagttcattagcattttggg

SEQ ID NO: 12426 - DNA, 120 bp, synthetic construct
  source 1..120: mol_type = other DNA
ccatatatgtccaattaagaacagcccaggagagaggaaggatataaaatgataatgaaaaatatcagtgcatatgttccttttacaaagatgccatgacctatttagtaaaattgtgag

SEQ ID NO: 12427 - DNA, 120 bp, synthetic construct
  source 1..120: mol_type = other DNA
tagcgatcatatgccattgaggtcaacatgtaacattcagagatgacaaaaaagagaaagaaaaacagctgagtcatgcacccaacataggagataatattcttttttgatacaaagttc

SEQ ID NO: 12428 - DNA, 120 bp, synthetic construct
  source 1..120: mol_type = other DNA
agatcctgctgccccaagccaggcatcataaattagaatctccaggggtgggattttataacttatatttctcaccctattgatctggatatttagacaggtttcaccctattgatctgg

SEQ ID NO: 12429 - DNA, 120 bp, synthetic construct
  source 1..120: mol_type = other DNA
aatgggatggaatcccctggcatagactgctgttgagaaagcgactatatagatacaaacagatctggtccatgcctttctgtgcaaacagggaactgcaattacagcattaagaaaaat

SEQ ID NO: 12430 - DNA, 120 bp, synthetic construct
  source 1..120: mol_type = other DNA
catgcagtcttcagcaacacacttaacttccaaaaggacaagtgtttttccaaacaatttgaatgttgctattggaagttctaggttacctccttccctgatgcctggggatggaataga

SEQ ID NO: 12431 - DNA, 120 bp, synthetic construct
  source 1..120: mol_type = other DNA
accactgtgagtagatttcatccattcacattgcttgactctgtccatttagcccccaccttagtatacctgagcttttgtccagttgatacagtcttcaactctgcttcagtaattgtt

SEQ ID NO: 12432 - DNA, 120 bp, synthetic construct
  source 1..120: mol_type = other DNA
gacttacttctgccattttgttacttttttttctggttgtttcatggtcttctttcttcttctttcctgtcttttagtgaaggtgattttctctgatgacatgttttaatttattgcttt

SEQ ID NO: 12433 - DNA, 120 bp, synthetic construct
  source 1..120: mol_type = other DNA
tagcctgtcttcaagctcactaattctttcttctgcttgattaattccactattaacagactgtgatgcattctttagtatttcagttgcagtttttaactccagaatttctacttgatt

SEQ ID NO: 12434 - DNA, 120 bp, synthetic construct
  source 1..120: mol_type = other DNA
ttcaagtcagaacatctcagaactagaaaggacacgtgaaaccatccctccatccatccatcccaaccactgtattttatatatggggaaactgaagctcagagaaggacagtaacttac

SEQ ID NO: 12435 - DNA, 120 bp, synthetic construct
  source 1..120: mol_type = other DNA
gaaccaaccagtgaaccctgtgtttgtcccaccgtgtgtcccctgggctcaatgaacagaaggcctgaggatttattcattctttcattcacttattcctcaagtatttattaggtatcc

SEQ ID NO: 12436 - DNA, 120 bp, synthetic construct
  source 1..120: mol_type = other DNA
gctgagctgttgctgccgcgactttgatagtacgttggcttccaaccagtccatggaattataaatgattaaccgttatcagcgcacatcttcacctctgtgtaaaaatagattgactgt

SEQ ID NO: 12437 - DNA, 120 bp, synthetic construct
  source 1..120: mol_type = other DNA
gtctaaaagtctgaagtttcagagacaaggccagtgagggctggatttgagagggaaacagcaaatattccaagttaattccaatggtgtcccatttctaggctatgtaaaaaatcaccc

SEQ ID NO: 12438 - DNA, 120 bp, synthetic construct
  source 1..120: mol_type = other DNA
actccttctaggcaaatacctctcattcatgtactctcagaaatgtcactcgagaccttcctgtaacacccatatgcaacatcacccgccaagcgaagttctcacttctatagctccatc

SEQ ID NO: 12439 - DNA, 120 bp, synthetic construct
  source 1..120: mol_type = other DNA
ggtacttcttaggaggagaccttgtgactgagccctgcatgacgacacacaatcgctgctttctgtctttgagtgacacttggtctaatttagtactccaaaaacccttaattagttgag

SEQ ID NO: 12440 - DNA, 120 bp, synthetic construct
  source 1..120: mol_type = other DNA
acatagggggtgtatgtgtttatggagcacatgagatgtttggatgcagacatgcaatgcataataatcacatcatggagaatgaggtatccactccctaaggcatttttcctttatgtc

SEQ ID NO: 12441 - DNA, 120 bp, synthetic construct
  source 1..120: mol_type = other DNA
tctgatttgaaatgacacagtctatatgattaaccagcaacaagaggccaatccaaccagaatctaggactaagactgagttttgagtgttggcaacaggaagagtgtgctgaaagcact

SEQ ID NO: 12442 - DNA, 120 bp, synthetic construct
  source 1..120: mol_type = other DNA
ccagtttgtcatggttggtcagtttgaatcctcttctctgagttgctgttcattgtttccagcttagttttccatgaggttggagtgaagtaagattactaaagacctgtaatcccagca

SEQ ID NO: 12443 - DNA, 120 bp, synthetic construct
  source 1..120: mol_type = other DNA
atcacccccaaatctactagtctactctctttctctttaaaaggaaatgcaactacctcttttggcctccagttctgttgccattttaaataggaaggtcaagaacccagcattggccag

SEQ ID NO: 12444 - DNA, 120 bp, synthetic construct
  source 1..120: mol_type = other DNA
cttgagctctttctcccaggggaagctgctcgaatgaggggagttggccaacacagttttctactctcagaccccattgaggtgagcacacaacagtgttctgtgtgagggtctggatac

SEQ ID NO: 12445 - DNA, 120 bp, synthetic construct
  source 1..120: mol_type = other DNA
gcctgtaactgaataaatgccattaaaaggggaatccatttcctccctcactcctggcttccattgccttcccccaggccccagccctggttccagaatccctctgaccactcctcttgt

SEQ ID NO: 12446 - DNA, 120 bp, synthetic construct
  source 1..120: mol_type = other DNA
tgagcaggctggtggggcagctggaggaaggccttgcaggttcctggatttgggtgccgggtgggctgagaggacagtccctgtcactgggactgggcacaggtgcagagaggctgagac

SEQ ID NO: 12447 - DNA, 120 bp, synthetic construct
  source 1..120: mol_type = other DNA
caacagccttttgggcttgggctgatgcgtgcatttctgtctgtacatgcgtgcctggaagtgtgcagatgagtgtgtgagagagggtaatggccatgcatccttgcatagacaagaaca

SEQ ID NO: 12448 - DNA, 120 bp, synthetic construct
  source 1..120: mol_type = other DNA
atggacacacatacaaatgagtaggagaaccacagcatgaatgagaaaaagtgacacagagtgagagagcaaaaaaagatacaaggagacaaagagtgagagaaaccaaaaggggcagga

SEQ ID NO: 12449 - DNA, 120 bp, synthetic construct
  source 1..120: mol_type = other DNA
tcgtaagtaattgtgactgacacattggcaataacacagattgccttcttaccttcccctctctctactctcagcacggagcgtttactttcttgtctctattattttcttgctcatcct

SEQ ID NO: 12450 - DNA, 120 bp, synthetic construct
  source 1..120: mol_type = other DNA
gtttttattaacttccagtagaataatggaaggcttgccctgagtgatttcttatggagacactaaaaggagctaagtctgctttccagggattggggaagtaactgagcaaatacacct

SEQ ID NO: 12451 - DNA, 120 bp, synthetic construct
  source 1..120: mol_type = other DNA
aggatgtgctggtaatatttccaggtgaaagaaatgaaggcacagcctctcttggatacttatttaaagctacattcagctaggatgtaagttggccagaatctgaacccagactttctg

SEQ ID NO: 12452 - DNA, 120 bp, synthetic construct
  source 1..120: mol_type = other DNA
tgttctgtcaagtttaccatctccccttcttctcagtagggaaagtctctaaattatgtgcaagtctctcccaccctaaaaacaaataaaaagcagcaggagcagcagcaacaacaacaa

SEQ ID NO: 12453 - DNA, 120 bp, synthetic construct
  source 1..120: mol_type = other DNA
cggagatacgttctgagaaatgcattgttaggggactttgtctttgtgtaagcatcatagagtacacttacaccaacttagatggtgtagcctattacacacctaggctacatggtatag

SEQ ID NO: 12454 - DNA, 120 bp, synthetic construct
  source 1..120: mol_type = other DNA
gtccctgcaaagcacctagcaaggatgttggaacataccaagtgctcagtaaacgttagggctgagtattcctccttaggtgaaatgaagaagaatggatatgataactagaaaatcatc

SEQ ID NO: 12455 - DNA, 120 bp, synthetic construct
  source 1..120: mol_type = other DNA
ggaaggaagggtcccagctcgtgggacgtaatcattcccttctgctgtttgatgtgaacagttgggaattttgaactggtaattagaaaatgatagtcactatggaaaacagatctattc

SEQ ID NO: 12456 - DNA, 120 bp, synthetic construct
  source 1..120: mol_type = other DNA
gagagagagagagagataggacttcctccccgattcgcaaagtgaagtcacttcccaaaattagctgaaaaaaaagtttcatccggttaactgtctctttcgctccgctacaacaacaaa

SEQ ID NO: 12457 - DNA, 120 bp, synthetic construct
  source 1..120: mol_type = other DNA
gaaattgaaacgttagctttcttttgaaaacaagctctttgtgctagctggggaggccactgttcctaaatacatctcaagagaaaacgagaaaacctgcccagcctataatccgaatga

SEQ ID NO: 12458 - DNA, 120 bp, synthetic construct
  source 1..120: mol_type = other DNA
tggccttattggccctggtaaggactttggatttacagagccatgataatgaaactaatgatttcaacaaacgagtataatgcaactgctatgaaaatagcagggtggggaagagggaga

SEQ ID NO: 12459 - DNA, 120 bp, synthetic construct
  source 1..120: mol_type = other DNA
tgagaagaaacaggatggggttcattttcaactcccgagttatatactggataccttccacgagcaaaatactaacttggcctggcatatatatggtctgaggtggggaacaattaaaca

SEQ ID NO: 12460 - DNA, 120 bp, synthetic construct
  source 1..120: mol_type = other DNA
caatatttggctagatcaaggacagggagggaggtggaggcagcagacagcagaaagatgcaaaggacggcaagcattttaggtagttgtgacttttatccctaaggacaatggagaccc

SEQ ID NO: 12461 - DNA, 120 bp, synthetic construct
  source 1..120: mol_type = other DNA
gggactttccttcaggctgtaaccaggtgtggggacttgtggtttacttccttcagtgggagttcttggccgtgggtcagctttgtgttcccctgatgggctggggttacagatctacag

SEQ ID NO: 12462 - DNA, 120 bp, synthetic construct
  source 1..120: mol_type = other DNA
aaagcttaccataaatacttccaaaaacaacaggctttacaaaatattatacaacatcctgtgtacagcagtaagtatctactcaggccatttgtcaagctgtttagtaattagtttctc

SEQ ID NO: 12463 - DNA, 120 bp, synthetic construct
  source 1..120: mol_type = other DNA
cttccccaccaccaatacatcaggttaattatcactttcattataactctggacaccttaacagcctttcttgttctatgtagaggagtttctatatacaaaacaaatgtagcatgctca

SEQ ID NO: 12464 - DNA, 120 bp, synthetic construct
  source 1..120: mol_type = other DNA
ctgagaagtacgcggactcaagctcagagcagcttccactccttcctttctctctttgaacaggttgtacattttactggcacagattagaactttattcccagaatcattaggatctaa

SEQ ID NO: 12465 - DNA, 120 bp, synthetic construct
  source 1..120: mol_type = other DNA
gggcaagattattttctttccacttcagggatgaaaaataacatggcaggccttaaacaacttgttgcagggaacctaagttgaaatttgctcagtttttaatccatcttgaattgattt

SEQ ID NO: 12466 - DNA, 120 bp, synthetic construct
  source 1..120: mol_type = other DNA
aagaaatttgctcagttaatactcaaccccaaaattttgtaatttttaaaccccatttgtccccttgcctctacaccatgtcaaatcttccaggaggatgccagctgatgctcctttcct

SEQ ID NO: 12467 - DNA, 120 bp, synthetic construct
  source 1..120: mol_type = other DNA
atgaatagaaatgagttttacctggtgatgtcttgaagtagtgctagataaatagattatgcctcacctgctcttctgaacaagaatcagatgcgctctcctcagggccacttcatgagg

SEQ ID NO: 12468 - DNA, 120 bp, synthetic construct
  source 1..120: mol_type = other DNA
ccaactcttctttactttcaggtcttcataggaggctgcacctttagttttatttctgggttagtacctaaaaggtggtgaatagagtcttcaacttctatcgtcgtcaacagttgcatt

SEQ ID NO: 12469 - DNA, 120 bp, synthetic construct
  source 1..120: mol_type = other DNA
cagatgccctgtctacccagtctccggcagatgccctgtctacccagtctccggcagatgccctgtctacccagtctccggcagatgccctgtctacccagtctccggcagagctagtca

SEQ ID NO: 12470 - DNA, 120 bp, synthetic construct
  source 1..120: mol_type = other DNA
ggctgacattgagaaccactgtttgttaggagaattttgaggcatgggctttccgatggagaaggctagtgctgatgtttgactaactccttttttgtttttaacaaagtcatgcaaagg

SEQ ID NO: 12471 - DNA, 120 bp, synthetic construct
  source 1..120: mol_type = other DNA
ccctgtgtgtgtgagcgtgtgtgtttctgtgtatgtatgtttccctgtgtgtgtgagcatgtgtgtttctgtgtctgtatgtctccctgtgtatgtgagtgtgtgtttctgtgtctgtgt

SEQ ID NO: 12472 - DNA, 120 bp, synthetic construct
  source 1..120: mol_type = other DNA
tgtgtgttctcaccctcaccctgtggctagagaacccggctaagtgaaaagcaattggtaggctgagctgaccagtccttccaatctcaagtgctgtctctggaaaaagtacaccgagga

SEQ ID NO: 12473 - DNA, 120 bp, synthetic construct
  source 1..120: mol_type = other DNA
caaggagtatttctggctactgcactggtttgcttctctccaaggcctcctttttacccccttcttctctctccttattctctcaaaaaaccctagaagaaaacctaggcattaccattc

SEQ ID NO: 12474 - DNA, 120 bp, synthetic construct
  source 1..120: mol_type = other DNA
acttctgctcgatcccattttgctagaacttagtaaaggctataccaatgtataagagacaggtgaagttgtctctgggcagctgcttctcatcaacaacagtgcatatactacaaaagg

SEQ ID NO: 12475 - DNA, 120 bp, synthetic construct
  source 1..120: mol_type = other DNA
gaccgaatacaggagtctagtattgcagtccttttctctcagtcatcgctggatgttatgtttcttctagcttcctgtgttgccgatgattctatttctttttcctttgtaagtgactgg

SEQ ID NO: 12476 - DNA, 120 bp, synthetic construct
  source 1..120: mol_type = other DNA
gttaaatgaaaacagaaagtgtcactgttgagactcaaattagtggcctacaataaaaagtgtaaattatatttcaaagtacagattaaaaggataagaagatggcaattatgaatatgg

SEQ ID NO: 12477 - DNA, 120 bp, synthetic construct
  source 1..120: mol_type = other DNA
ggagctattccaaaggcaatcactgtattgtgctcacccagcctaacaattcccttgtgctctgcacttgatagctggtttaaaaatcaaaacccaaaacaagcaaacagaacaatgcta

SEQ ID NO: 12478 - DNA, 120 bp, synthetic construct
  source 1..120: mol_type = other DNA
ctcatataagctggtctttctcagtgctggctgatgctgcactcatgagtaatatctctttaacgatgactctctcttaaaataaagtgagaggggaagatctttgcctaagaggagttc

SEQ ID NO: 12479 - DNA, 120 bp, synthetic construct
  source 1..120: mol_type = other DNA
cctaagacttgtgcacactgaacctccagcaactcatcagttccattttagtttttctatcctgatactggctcccgtagagggttgtatggttggttggtgtgggtttttttttttgtt

SEQ ID NO: 12480 - DNA, 120 bp, synthetic construct
  source 1..120: mol_type = other DNA
gttagttaacacgtcacccagccaagttaacacgtcaaactgaccgtcacaggttagttaacacgtcacacagacaagttaacacatcacactgaccgtcacaggttagttaacaggtca

SEQ ID NO: 12481 - DNA, 120 bp, synthetic construct
  source 1..120: mol_type = other DNA
tagttaacacgtcacacagccaagttaacacgtcacacagccaagttaacacgtcaaactgaccgtcacaggttagttaacacgtcacacagccaagttaacacgtcaaactgaccgtca

SEQ ID NO: 12482 - DNA, 120 bp, synthetic construct
  source 1..120: mol_type = other DNA
cacactgaccaccaccgtgcttgcctgtattaagcccttgatgcctgtgtatctgttaaaatgaaagactgtgatagtagaatgttcccttcctatcagtgaggagatcatttgattcaa

SEQ ID NO: 12483 - DNA, 120 bp, synthetic construct
  source 1..120: mol_type = other DNA
atacaaacagctccgagccagaggatccttagtccatcaattctttgcagaagaaaagtctgatggattgaaattgtcacacaagaacgctgtgaacaatagcagggagatactgtttct

SEQ ID NO: 12484 - DNA, 120 bp, synthetic construct
  source 1..120: mol_type = other DNA
gctgatggtcatgaaatagaccatgtcagcatttagagtttgacattaaggaggagtagccagtaaggtaagtagagaataaggacagtgtgatagcatcaagccaaagatggaagggta

SEQ ID NO: 12485 - DNA, 120 bp, synthetic construct
  source 1..120: mol_type = other DNA
acatacaaccaaaagcacagaccttaagtgtttagtttgatgtgttttggcaagcgtgaacactcaagtagctacctcccagttaagaaatagcatgtttcctttctcccacagaactcc

SEQ ID NO: 12486 - DNA, 120 bp, synthetic construct
  source 1..120: mol_type = other DNA
gtgggtaccagcctctttcatcttccctgataggagagttctttctccctttcctatatttagaccttcatctcttcatacccagcttcagttttccccttctccataaaaattctgatt

SEQ ID NO: 12487 - DNA, 120 bp, synthetic construct
  source 1..120: mol_type = other DNA
gccaataataccctttcctgtgtgaaggacagctgacagagatggctacaacctgagtcagacctcagcaaagtatcaatgtgcttttcggaattctacatgtagtgaataaatattttt

SEQ ID NO: 12488 - DNA, 120 bp, synthetic construct
  source 1..120: mol_type = other DNA
tctgcctttactggttgggcacatcatcacaggggcatagacgaaacacttacaggaatttaaaatcaacaggcaaagatgatttcgatttaaccatcagaaatggggacacttctcagt

SEQ ID NO: 12489 - DNA, 120 bp, synthetic construct
  source 1..120: mol_type = other DNA
tccatgatacttccaagtggtgagaccccatgagggagacgcctctaccgtataatgctgcctctatgatacttccaagtggtgagacttcatgagggagccgcctctaccgtacaatgc

SEQ ID NO: 12490 - DNA, 120 bp, synthetic construct
  source 1..120: mol_type = other DNA
caagtcctctcctgaccagggcagccctagccttttcccactcttctcaacccttatctctatctgtcttcagcctgtctctctctctccttcattacctacagatgacggcagttcata

SEQ ID NO: 12491 - DNA, 120 bp, synthetic construct
  source 1..120: mol_type = other DNA
aacaaactcttgtccatcacaatagaacggaaggccttgctcttgtctgaagctgtgcactcccacttcctgcaatctctttacttagcagcaaattttccttcattaaaattaagcctc

SEQ ID NO: 12492 - DNA, 120 bp, synthetic construct
  source 1..120: mol_type = other DNA
gagtgtgtggatgtggatgtggggtgtgggtgtgtgtacatttgtgggtgggggttgtgggtgtatgattgtgtgtatattgtgtagtgacgtgtgggtgtggggggtgtataagtgagg

SEQ ID NO: 12493 - DNA, 120 bp, synthetic construct
  source 1..120: mol_type = other DNA
aacctcagttttcatcattatcattagaaaagcatacagcagttaccaagtgctgggcactttactaaatattgaggacacaaaggcaaataagaaacggcccctatcctcgactagctc

SEQ ID NO: 12494 - DNA, 120 bp, synthetic construct
  source 1..120: mol_type = other DNA
cagattcttcctagattgactttatcccagagcatcatggggatgtaagcttttggacgatgtagataaaacaaaatcagaggctttatgcctgctgttccatcaactttccaggaagga

SEQ ID NO: 12495 - DNA, 120 bp, synthetic construct
  source 1..120: mol_type = other DNA
gagaaagatgcttagtaaatactgaaaagttatttgatttcaacatattcttttaaatccaggatcagttgttgcaaagtaacacagcatgcatatttacagaaggaaaggtattcagtt

SEQ ID NO: 12496 - DNA, 120 bp, synthetic construct
  source 1..120: mol_type = other DNA
ggagcgtatactctccatgaaaatatctatgtgcatatatatgtaagcccacacctctacacacacgattatactcacatcctgccttctatcctggaacaagacaaattgcttcctact

SEQ ID NO: 12497 - DNA, 120 bp, synthetic construct
  source 1..120: mol_type = other DNA
cacatagatgcacgtgtgtgtgtatatacacatagatgcacgtgtgtgtgtatatacacatagatgcacgtgtgtgtgtatatatacacacacatacacacacatgtgtgtgtatatata

SEQ ID NO: 12498 - DNA, 120 bp, synthetic construct
  source 1..120: mol_type = other DNA
gacttcaaattatacttcaaggctatggtaaccaaagctgcattgtactgacataaaaatacacacatagatcaatgggacagaagagagaacccaccccccacccccaaaagccatgta

SEQ ID NO: 12499 - DNA, 120 bp, synthetic construct
  source 1..120: mol_type = other DNA
aatcacagggggcatgttgaggacacgcgctgggtctgcatagaggaagcgcaggtgagagagcagacagacagacacagggacagacagacagacacagggacagacagacagacacag

SEQ ID NO: 12500 - DNA, 120 bp, synthetic construct
  source 1..120: mol_type = other DNA
aacgaggtcctctcaatgtccatttctctctgttcctagacccctagcgtcaaagccagcatttgcccacacccttccccaacagctccttatcccaaagtctcctgagcaacaagcagt

SEQ ID NO: 12501 - DNA, 120 bp, synthetic construct
  source 1..120: mol_type = other DNA
atgtagtagccaagggctcagcaaacatttgttgaatgaacgaaagaatgaaacaaacaaatgagtggtgttcacacatacacagacctgcaggccgataccaaaacacttcttaagagc

SEQ ID NO: 12502 - DNA, 120 bp, synthetic construct
  source 1..120: mol_type = other DNA
acgcgtcatcacatgcaaaaacacacacctcgcatgtcctcgcacgcgtcatcacataaacatacaccttgcacgtcctcgcacgcgtcatcacacgcaaaaacatacacctcgcacgtc

SEQ ID NO: 12503 - DNA, 120 bp, synthetic construct
  source 1..120: mol_type = other DNA
ttagtagcctgaacatctggatcctggagtgctttcaagctctttgctgagaacatttctagatttcagtgttgtctggttagcagaatcttttctcggacagccatgtaacaaagttgt

SEQ ID NO: 12504 - DNA, 120 bp, synthetic construct
  source 1..120: mol_type = other DNA
gagttcgtactctaaatataattaagtatactactcttttcatcccctttcgcagaattctttaggggctttctgttgctcttggtgcaaagccgaaagccttgagcttcttatgactgc

SEQ ID NO: 12505 - DNA, 120 bp, synthetic construct
  source 1..120: mol_type = other DNA
ttccaccttacatcttattcgtcatgttccatcttacatgtcacttcctgagggaagcttctcctgagccctctttattcatcatgttctatcttacatgtcacttcctgagggaagctt

SEQ ID NO: 12506 - DNA, 120 bp, synthetic construct
  source 1..120: mol_type = other DNA
ttcatcatgttccaccttacatgtcacttcctgagggaagcttctcctgaaccctccttattcatcatgttccaccttaaatgtcacttcctgaggaaagcttctcctgaaccctcctta

SEQ ID NO: 12507 - DNA, 120 bp, synthetic construct
  source 1..120: mol_type = other DNA
cagcagtctgcttccttcatatgtaacacgtatgttaaaagatatgcttggtagtgaattctgaaagtctaatgtagtgaatgaaagtgtaatattgggttcttttcttcatgtgctgtg

SEQ ID NO: 12508 - DNA, 120 bp, synthetic construct
  source 1..120: mol_type = other DNA
ctagactataagctctcccattttcttatttctcttggcttcatacttcttaagagaaaagatgtgattgggttgtccagtcatcatccaggtgagcagtgctctcatgactcacctctc

SEQ ID NO: 12509 - DNA, 120 bp, synthetic construct
  source 1..120: mol_type = other DNA
tatcattctttactagtgcatcactgggcgctttcattttgaaggagaagtagaaggggctgcacatgcatggtatgtatttctggctcccagagggagtagccatggttatccaaacaa

SEQ ID NO: 12510 - DNA, 120 bp, synthetic construct
  source 1..120: mol_type = other DNA
ggaaggggcacacttctgagatgagcttaggggaagaagcacactcgtgagatgagcttaggggagtggcacactcatgagatgagcttgggggagtggcacacttgtgagatgagctta

SEQ ID NO: 12511 - DNA, 120 bp, synthetic construct
  source 1..120: mol_type = other DNA
ctagtgagatgagcttggagaggcacactcactagtgagatgagcttgggggagcagcacactcacttgtgagatgagcttgggggaggggcacactgagtgagatgagcttagggagag

SEQ ID NO: 12512 - DNA, 120 bp, synthetic construct
  source 1..120: mol_type = other DNA
acttgtgagatgagcttgggggaggcgcacactcgtgagatgagcttgggggaggcgcacactcgtgagaggagcttaggggagctgcacactcacttgtgagatgagcttgggggaggc

SEQ ID NO: 12513 - DNA, 120 bp, synthetic construct
  source 1..120: mol_type = other DNA
gtctggggcacagctgatgccagagaaggacaagatgacaggggtcttcctgcagtgccagggtctcccttactagaggcctgctgggccattatcaacacagcatttcatttgcaaaca

SEQ ID NO: 12514 - DNA, 120 bp, synthetic construct
  source 1..120: mol_type = other DNA
ttgagtatcgtaacaaaaaaaggcccacaaaattcaagtgagcagagcactctcctttccttaactaaaaaacttacgggagaaatcatctccactgggcacaatggctcatgcctgtaa

SEQ ID NO: 12515 - DNA, 120 bp, synthetic construct
  source 1..120: mol_type = other DNA
aactgtttctccatttgaccttgctctttttcccttattccccaccttggttaacaatatcatcatcttcctagttttgaaaccctggggatcactgacttctttctttttctaattccc

SEQ ID NO: 12516 - DNA, 120 bp, synthetic construct
  source 1..120: mol_type = other DNA
tagtgaagtatttgctttaaaaaaagtgaatttcaagctagtaacaaggaaagtaacctttattcacggagccgatgggaggtgtgctgccccacgccacgcaccgtgcctgtgttgtct

SEQ ID NO: 12517 - DNA, 120 bp, synthetic construct
  source 1..120: mol_type = other DNA
tgttaaggtttgtttcatggatcataatatggtcattcttggtgaatgttccatgtatgtttgaaaataatgtgtagtcatgaaaaaatgctcaccatcactggccatcagagaaatgca

SEQ ID NO: 12518 - DNA, 120 bp, synthetic construct
  source 1..120: mol_type = other DNA
ttttacgcctattagtttttgcctgttttgaggtgcattcacatttaggattatgatattttgttggaagcttggccgctgtatcattacgtaatatccctctcccttgttctgaactct

SEQ ID NO: 12519 - DNA, 120 bp, synthetic construct
  source 1..120: mol_type = other DNA
gtgaggatcaagtgctgccacttagagcaatgcctggcagtcgtttacttaataggcatttgtgtctacagaagatatttcgaaagagctgttatgaaaacaaggccacttgtatctgaa

SEQ ID NO: 12520 - DNA, 120 bp, synthetic construct
  source 1..120: mol_type = other DNA
tcatttaacagatcaggaagcagtggcgttgagaaagaaaataggttgccccaggtcatacaaatagtaacgagcacagccagaattgactcccactctaaatgacttttaaccttcttc

SEQ ID NO: 12521 - DNA, 120 bp, synthetic construct
  source 1..120: mol_type = other DNA
cccattttatccccgaaatcctgggtgtgtcaccagtgtagagggtggggaaggggtgtctcacctgagctgactttgttcttccttcacaaccttctgagccttctttgggattctgga

SEQ ID NO: 12522 - DNA, 120 bp, synthetic construct
  source 1..120: mol_type = other DNA
ttcaaatgtctctggattggaagtgccctggagaggacagttcaaatgcaaattcattctcatgctggtgggcgggggtaagaatctgccaggcagtcaagggcgctccatatgagttaa

SEQ ID NO: 12523 - DNA, 120 bp, synthetic construct
  source 1..120: mol_type = other DNA
gaccatttgctgataaattggaaggattacatttaacaataattagacacgaaagtattattttgtgtttggcaaggacgaactctgagccaaggcgggctctgggttctttgggttggg

SEQ ID NO: 12524 - DNA, 120 bp, synthetic construct
  source 1..120: mol_type = other DNA
ggattggctccagggctggcctgacgctgctactccaaattctagagccatcctcatcctggaagcaagggggtgagggtgtataaaataaatagattaaattaaaattcatctagtatt

SEQ ID NO: 12525 - DNA, 120 bp, synthetic construct
  source 1..120: mol_type = other DNA
ctgtcagaacttatcagatcaacacagtcaaatgaatcctctccctcccctgaactctatggcacttggcttgaagagctcttacagaaatcttgagttgtgttttacttattcatgtgc

SEQ ID NO: 12526 - DNA, 120 bp, synthetic construct
  source 1..120: mol_type = other DNA
catttctctttcttggccccaccttccctttttctgcttcctctctgctggcctctccccttctcttcctttcttttctgtttctcttctcctacaggtcccaccgcaccttcccagtat

SEQ ID NO: 12527 - DNA, 120 bp, synthetic construct
  source 1..120: mol_type = other DNA
atctggggacacaaggggccgtgactgacaaggagaaggagcgtcccccgagttgctgcgctgctgccggagccctccttcagcacaaatccccctccgccctcggcaagggcgtcctga

SEQ ID NO: 12528 - DNA, 120 bp, synthetic construct
  source 1..120: mol_type = other DNA
cagtctggttacagctttttcctccaactcaaggagggtttttcatacagggtgtttggccgttgttgaaagggagcaatgacatgggggacagttggcagatggagttggtattcagat

SEQ ID NO: 12529 - DNA, 120 bp, synthetic construct
  source 1..120: mol_type = other DNA
tccaagatactaagtggtcttttcccccacatgaggggatgaatttttccagtccccttccctgagggcagccacagctacctggtcattatgatttctctcctcatgacttttggtgtc

SEQ ID NO: 12530 - DNA, 120 bp, synthetic construct
  source 1..120: mol_type = other DNA
gaagggctgggacaaacatcagggctcacaatctggaaagagactcaactgctgaatttacaccccatgtaaagatttttggacaagctgccttgttgggaagcctgaacattttttttc

SEQ ID NO: 12531 - DNA, 120 bp, synthetic construct
  source 1..120: mol_type = other DNA
ctcttaaggatatcaaagagatctgagttatcacccgatgccccatggtgagaacaatcacccctatttcctaattaggaaaattacagtctcatctaggagaaggtacactgacttgtc

SEQ ID NO: 12532 - DNA, 120 bp, synthetic construct
  source 1..120: mol_type = other DNA
gatggaccaaaagagcccatcagggctgcttcacaggtgtgcaaggccaaacttacagctagtcccataaccccagggaggtccccgtgccttccaggatatctcaactatgttaataat

SEQ ID NO: 12533 - DNA, 120 bp, synthetic construct
  source 1..120: mol_type = other DNA
ggctggttggggtgtgagacggatgaggggtgaggagaagactgcccccggcaataaacagaaccgaccccaatcctagctatgagcagggagagccctctactccctctgcccccagcc

SEQ ID NO: 12534 - DNA, 120 bp, synthetic construct
  source 1..120: mol_type = other DNA
gcaactgtgtgttactgacttgggctgggggagttggaggacaacccacactatactaaagatgcataggcttcacagcaaagatcagcatagctttatctcagtatctcccaatgaccc

SEQ ID NO: 12535 - DNA, 120 bp, synthetic construct
  source 1..120: mol_type = other DNA
gcagcaggagggaccgagcttagatacgaaaaaagacttctacacggcaagagccacagaaaggacgctccagctggctcagcagaggggcatctctccctttcaagaacaaaaggtggc

SEQ ID NO: 12536 - DNA, 120 bp, synthetic construct
  source 1..120: mol_type = other DNA
cagtaaagcgtcaggcaagccgagtgcctggcacgcagtgagggctcgacgcggggtggttgctgtcactttgggacccttccagtggcagaaggtgctctttgaaggtgagaggcctca

SEQ ID NO: 12537 - DNA, 120 bp, synthetic construct
  source 1..120: mol_type = other DNA
caggcttttctgctttgagagcctttattgctgaggtctcagcatctgtcgggttgcaagcgactggtttgtcttacacgctggagtagatgccaggtgtctctgtgatcccttcgctct

SEQ ID NO: 12538 - DNA, 120 bp, synthetic construct
  source 1..120: mol_type = other DNA
agccggctcttcgaggtgacggatgtgaacaagctgcagaagcaggcagcgcatcagagggaggtgttcctcttcaatgacctgctggtggtgagtggcctccgctccgggactgggctg

SEQ ID NO: 12539 - DNA, 120 bp, synthetic construct
  source 1..120: mol_type = other DNA
tctaagcactgtgtgtgtgtgtacctgtgcacacactttaagaggaaagggtgattccatccactgttcttctctttccaggcctgggaagcataccattcatccatccatccatccatc

SEQ ID NO: 12540 - DNA, 120 bp, synthetic construct
  source 1..120: mol_type = other DNA
gaatgagaagccaatgatgacacagtaaagagctggaggtcatgctccccctacaacatgcacacatttgtgctgcgaaatttttaaaaagagagcctatactagaaggggctgggtaat

SEQ ID NO: 12541 - DNA, 120 bp, synthetic construct
  source 1..120: mol_type = other DNA
aacttatactagcttactaggagaaaaagggcatataaaaaaaaaatcagtgttagcataatatattaacagtctgtagcatctctgttagagatgaaaacatacacaaaaagcaaactg

SEQ ID NO: 12542 - DNA, 120 bp, synthetic construct
  source 1..120: mol_type = other DNA
tgtgtgtgctgggagtgagagggtaaaacacacatagcaaaaagttcaccattttagccatctgaagtgtacggttcagtggcattaagtatattcacgttgttgcacaactgtcaacat

SEQ ID NO: 12543 - DNA, 120 bp, synthetic construct
  source 1..120: mol_type = other DNA
gtgtatttaatttagggcagtcaaaaacttaagatccatgcaggtagcttcagtcaaagaagcagatataagtgtgaacacatactctgtgtgaggtatgaggactgtggtgcaagggga

SEQ ID NO: 12544 - DNA, 120 bp, synthetic construct
  source 1..120: mol_type = other DNA
ctagaaaggaacctcacccattatcagtcactcccaattctccccacctccagcactggaaccacgactctccttttggtctctatggatttgcctattctttttttttttttttttttt

SEQ ID NO: 12545 - DNA, 120 bp, synthetic construct
  source 1..120: mol_type = other DNA
ttccgccttccaccttctaccttctgccttccaccttcgaccttcttccaccttcaaccttccaccttcgaccttccaccttccaccttccaccttcttccaccttcgagcttccacctt

SEQ ID NO: 12546 - DNA, 120 bp, synthetic construct
  source 1..120: mol_type = other DNA
acctttcaccttccaccttccgccttccaccttctgccttccttccaccttccgccttccaccttccaccttcgaccttccaccttccaccttccaccttccaccttcttccaccttcca

SEQ ID NO: 12547 - DNA, 120 bp, synthetic construct
  source 1..120: mol_type = other DNA
ttggaacagattctggagatatatatcgggctcccttgccatttaccatgaagtgatgtgtgtgcacgtggcacattatctgcaattttactcagtgaaataaaactcttagcatagtgc

SEQ ID NO: 12548 - DNA, 120 bp, synthetic construct
  source 1..120: mol_type = other DNA
ggacgggcatggggtgctcatcctcctggaactgaggagctgggacgggcatggggtgctcatcctcctggaactgaggagctgggatgggcatggggtgctcatcctcctggagctgag

SEQ ID NO: 12549 - DNA, 120 bp, synthetic construct
  source 1..120: mol_type = other DNA
cctcctctgcccacttctgtctctcatctttccttacatcttttctggtccatattttctcctttatctcttgagctctctttttgtctgcccataatagttcccttgtttccttcctag

SEQ ID NO: 12550 - DNA, 120 bp, synthetic construct
  source 1..120: mol_type = other DNA
tttacagagagggaagccacagcatcaagcactgaagggaatttaatcgctaagacactcacaaaagcctccagcttttatgctgatgccctccttgccctcatctggaaactctccccg

SEQ ID NO: 12551 - DNA, 120 bp, synthetic construct
  source 1..120: mol_type = other DNA
gttgtgggaaagtggggagtgagaaggagggaaaagcgggaaggagtcgggaagagggaagaggaggggggaatgagaaagagggagcagtgagaagtgggcagggggtgtgagaggagg

SEQ ID NO: 12552 - DNA, 120 bp, synthetic construct
  source 1..120: mol_type = other DNA
tcactcgtctgtagaaagaggagacaccccttcctcctcgtggtgagaagctagtatctggtgaaataggtgagctgctgccaaactcagcaaaaccctcagcaaaagtcaatgtaagtc

SEQ ID NO: 12553 - DNA, 120 bp, synthetic construct
  source 1..120: mol_type = other DNA
aatgggcgcaggcaggcaggcatgctagagtgaatgaatgaatggacgcaggcaggcatgctagagtgaatgaatgaatggacgcaggcaggcatgctagagtgaatgaatgaatggacg

SEQ ID NO: 12554 - DNA, 120 bp, synthetic construct
  source 1..120: mol_type = other DNA
tggcaactttgtgccttcatagtctaaaaacgcaccctcagcgttgcagccccaataggactcagttgatgaacaactttccaggaacgtggctcttgtgtgaaaggggcacctgcggga

SEQ ID NO: 12555 - DNA, 120 bp, synthetic construct
  source 1..120: mol_type = other DNA
tgacactcaagtccatccaacaccaggtgcctctttctctgggcacttggtgcccaggtaaaattttcagatattattgctgtttttaacattattcagtgaataacgtactctggtggt

SEQ ID NO: 12556 - DNA, 120 bp, synthetic construct
  source 1..120: mol_type = other DNA
tctattacatcttcaaaatctgctgtgtgttttacacttaacatatctcggttcacaccagcaacatttcagtgaagtactcaataaccatacttggggctgggcgtggtgacacataca

SEQ ID NO: 12557 - DNA, 120 bp, synthetic construct
  source 1..120: mol_type = other DNA
agcccaggagttttgagaccacagtgagccatgattgtgcccctgtgctccaacctgggtatcagagcaagactcccatctctaaagaaattgtattttatttattttatttttacaacc

SEQ ID NO: 12558 - DNA, 120 bp, synthetic construct
  source 1..120: mol_type = other DNA
cctccagtgaggccactactgcacagccagtgagtcagcctcaagctccacaagtcttgcctcaagtatcagctggaaaacaggtaaactttttttttttttttaaacaggtaaactctt

SEQ ID NO: 12559 - DNA, 120 bp, synthetic construct
  source 1..120: mol_type = other DNA
ctttagtgatagcattatggtatataaaatatattccaataaagctgttaaaaaaaaaagccaaccccttgtctatggaagggtcctcttctattgccaaatgctgaagcattagcaaat

SEQ ID NO: 12560 - DNA, 120 bp, synthetic construct
  source 1..120: mol_type = other DNA
tgacccaacccaagagttaaatgctagtttccaaaaacttaagttttaaatgtctgtgcctcagactgcgagttctgtggaggactagacctagaaagcctagaaaatcaccagtatcca

SEQ ID NO: 12561 - DNA, 120 bp, synthetic construct
  source 1..120: mol_type = other DNA
aagtcgatatacaaagatacagatagaaatgatttgtaatatgataaaagtcgatatacaaagatacagatagaaatgatttgtaatatgacaaaagtcaatatacaaagatacagatag

SEQ ID NO: 12562 - DNA, 120 bp, synthetic construct
  source 1..120: mol_type = other DNA
gtatcagaattacaattgtacatactttgtgatccagcaattccatctttgagagttcccaagaaaaatgtggattcatgtgtaaagatacatatgtgaaggtgcatcttacaatagtga

SEQ ID NO: 12563 - DNA, 120 bp, synthetic construct
  source 1..120: mol_type = other DNA
cctccctgtgcagagagaatatagtgacatgctgaaggcctatacaactacttggtattagttttgggactggaattcatcatttctgacttcgctaattatgatgtgcatagacgacca

SEQ ID NO: 12564 - DNA, 120 bp, synthetic construct
  source 1..120: mol_type = other DNA
gtagatactgataagcttaagaagttacattaagttacttaagaagataatgataagcttaagaaaatacagttacttaagaagataatgataagcttaagaaaatacaagcataagtat

SEQ ID NO: 12565 - DNA, 120 bp, synthetic construct
  source 1..120: mol_type = other DNA
catgctggtaccatagtgtttagatttgtaacatagtttgaaatccgaaagtgtgatgactccagctttgttcttcttactcacaattggctattcacggtcttttatggttccatacga

SEQ ID NO: 12566 - DNA, 120 bp, synthetic construct
  source 1..120: mol_type = other DNA
ttcttcttttacactatttgatgaccttcagtgtttgattgtggtataaggtggattcagccaactgactgtttctggaagactttagggggccaacactcagctctgatcttctagact

SEQ ID NO: 12567 - DNA, 120 bp, synthetic construct
  source 1..120: mol_type = other DNA
cccatgtaggcattcactgcagtggcagaggcagctcagcctggggggccagagagcccttgctggtgactgtgcatgtgatatcactggtggttgtgttaatacggatgtgggttactg

SEQ ID NO: 12568 - DNA, 120 bp, synthetic construct
  source 1..120: mol_type = other DNA
ctccgtctcaaaaaaaagaaaaaaaaaaaaaagagtgaaatggttgtgtgtgaccagaataagaggctgcgattcaggaggatgagaactggcaggagatgtagcttggggtgtaattgg

SEQ ID NO: 12569 - DNA, 120 bp, synthetic construct
  source 1..120: mol_type = other DNA
tcagtttccatatagtttgtttttgattcagaaaatttggtcagaattagtgtctacacaatgggcctgttttcatgtccaccaggcattatggctgagtgaaaagccagaagggcccga

SEQ ID NO: 12570 - DNA, 120 bp, synthetic construct
  source 1..120: mol_type = other DNA
gtgaactcactagctagctagtcactgagcaacagagtctggagtctgggtcccctgatgcccagtcttgagctctttcatgtcctccattcctcactcagttgacacgaaggcactggg

SEQ ID NO: 12571 - DNA, 120 bp, synthetic construct
  source 1..120: mol_type = other DNA
gaagccacccatgggcaggagagcatttcaggcccagggaagaacacgctttcatggagatggagaagcaggaagtatgtttatggggaggtgggagcctcttttgcttgacagtgggat

SEQ ID NO: 12572 - DNA, 120 bp, synthetic construct
  source 1..120: mol_type = other DNA
cgccggacagcgttatggacatccccacgccaactcccacgccggactgcgtcacggacatccccacgccaactcccacgccggactgcgtcacggacatccccacgccaactcccacgc

SEQ ID NO: 12573 - DNA, 120 bp, synthetic construct
  source 1..120: mol_type = other DNA
atttttcctacttccacttcttgggatgttcacaaatttaagaattctagagagacttaagcgtaaggcctgagactataaacctcctggaaggaaacaggggaaaagctccccaacgtc

SEQ ID NO: 12574 - DNA, 120 bp, synthetic construct
  source 1..120: mol_type = other DNA
tttctataaacctcccggaaggaaacaggggaaaagctccccaacgtcgctctgggcaatggctttttctataaacctcctggaaggaaacaggggaaaagctccccaacgtcgctttgg

SEQ ID NO: 12575 - DNA, 120 bp, synthetic construct
  source 1..120: mol_type = other DNA
gactgcaatataatgatgcagtggagtactacacagaataaaaagcaagaaactacggctacatgcattcacttcaaagtacctgaggaatcatgttaagaatcttttcatgtgactatt

SEQ ID NO: 12576 - DNA, 120 bp, synthetic construct
  source 1..120: mol_type = other DNA
ctcccaaagagctctgttaggggtcttctggaactgtcaagttcagaaatcaccagtgggtgtctctatgaactctctattacagaaaggaaggcatgggaggaaataaatgatttttta

SEQ ID NO: 12577 - DNA, 120 bp, synthetic construct
  source 1..120: mol_type = other DNA
ttacgaggcttccttttcctttctttaccttctttcagccagctgccccataaataacagagagcaagtgtggtttactggatcactagcaggtgtgaatgctgtagcttttccgctttt

SEQ ID NO: 12578 - DNA, 120 bp, synthetic construct
  source 1..120: mol_type = other DNA
acctcagctggggcgtcctgaagccactgggcgcccaccccggggagggtttccacctcagctggggtgtcctgaagccactgggtgcccaccccggggaggttttccacctcagctggg

SEQ ID NO: 12579 - DNA, 120 bp, synthetic construct
  source 1..120: mol_type = other DNA
ctgggtgcccaccccggggaggttttccacctcagctggggtgtcctgaaaccactgggtgctcaccccagggagggtttccacttcagctggggtgtcctgaagccactgggtgcccac

SEQ ID NO: 12580 - DNA, 120 bp, synthetic construct
  source 1..120: mol_type = other DNA
ctagtttctgtatgattgaagttgttggattggcgccttctaactaataataatagcagcaataacttcagcccttacgctgctggcattgctctatggtccgtgtgttaactcatttag

SEQ ID NO: 12581 - DNA, 120 bp, synthetic construct
  source 1..120: mol_type = other DNA
aattaattaaaaaaaacaaaaacaaaaaaaaaacctcttagatactcattccctcatgctcacgttcctccccaaagaacctcctcccttcccagggagagggtcttggccacatgtgtg

SEQ ID NO: 12582 - DNA, 120 bp, synthetic construct
  source 1..120: mol_type = other DNA
tcgacccctctgtgactccacttctcacttgtaaataaggatagtaatagtacctacctcagagtgtcattgcaggactccaaccagatacatatgtgtccggggcttataataaaatca

SEQ ID NO: 12583 - DNA, 120 bp, synthetic construct
  source 1..120: mol_type = other DNA
gtgggtgttctgttgcattcagtggggcttcagtcttcattttccttgtcctttgcacttcctcatcattccctttctgcgagcttgcccacttgctaggatggatcctggtcagtggat

SEQ ID NO: 12584 - DNA, 120 bp, synthetic construct
  source 1..120: mol_type = other DNA
aatatggatacagacccgtgctccctcctggttttactgaggtactgtgagagccagtgaaatcacggttatgggatgctcagcattctgctgcagaaaaaaaaaaaaaaaaaacctagt

SEQ ID NO: 12585 - DNA, 120 bp, synthetic construct
  source 1..120: mol_type = other DNA
actactttacaatcacacgatcctgaccttactagtttacaatcacacctcctgtttcttgccacttgcacacaactcagggatggggtaggaggaggaatatcataaatgcaaattcct

SEQ ID NO: 12586 - DNA, 120 bp, synthetic construct
  source 1..120: mol_type = other DNA
ggggcaggaggaggtgtgtcctagaatcaatcccctacagttactgagggacagctgcatatctttttctgttcctttactcttaacctatttgtgtctttatatttacagtggatttct

SEQ ID NO: 12587 - DNA, 120 bp, synthetic construct
  source 1..120: mol_type = other DNA
gttcaagggaagaattaggaacaaagacaacttggggactggagagaacttggagagcatttagagaaaagcggggaaatgattgatgggttggaaaataggagcatggatgaatggtga

SEQ ID NO: 12588 - DNA, 120 bp, synthetic construct
  source 1..120: mol_type = other DNA
tgaagaacccctgcgtctctccctaatgacaagggtgctgggaaaaatgctcattccatgtttttatctggacttcaccagcagtcactgaagtcttaggtcacagttctgtggagtttt

SEQ ID NO: 12589 - DNA, 120 bp, synthetic construct
  source 1..120: mol_type = other DNA
gttggtgctttcctgttcttggtatgaggaatgatttccaattggaacctggatgttctgggtattatgcagctccggatgttatctgaagccttcccttacagctgctttcctttgcca

SEQ ID NO: 12590 - DNA, 120 bp, synthetic construct
  source 1..120: mol_type = other DNA
ggctttgtggaagattatctaagccctctgatctgtttgctcatctctatattggagatagtttttacccatcatgcagagttactgttaggattagaacagaaatgtccaggctccgac

SEQ ID NO: 12591 - DNA, 120 bp, synthetic construct
  source 1..120: mol_type = other DNA
taaggaacataacatttcaaactgaggtgcactctccagaggatagaaaatagttccaagaagacataaaggaaacgtttctggtctgggagttgcgtgatgatccctggggaaacagat

SEQ ID NO: 12592 - DNA, 120 bp, synthetic construct
  source 1..120: mol_type = other DNA
cttaagcaacgagattttgctgttccctgaagaccatggtggctagtggggctgtgtactggggctctgcagtgaaaccactgatggatatttctggttctggtagtcatgaatacccat

SEQ ID NO: 12593 - DNA, 120 bp, synthetic construct
  source 1..120: mol_type = other DNA
ttctcattgaccaatggccgtgtgcttcataggagggaagccatgacagtcttctcattgaccaatggccgtgtgcttcataggagggaagccatgacagtcttctcattgcccaatggc

SEQ ID NO: 12594 - DNA, 120 bp, synthetic construct
  source 1..120: mol_type = other DNA
ctcacagtattagagactcctaagactccaaactgggcaaacacatatgaagagttccttcatctatccacttgacaatacatatggccacgtgcttgatctatccaacggtagaaaagt

SEQ ID NO: 12595 - DNA, 120 bp, synthetic construct
  source 1..120: mol_type = other DNA
tgcaggcagggtttaaggacttaaggagggcttcataaagatgcaggcagggtttaaggacttaaggagggtttcataaagatgcaggcagggtttaaggacttaaggagggcttcataa

SEQ ID NO: 12596 - DNA, 120 bp, synthetic construct
  source 1..120: mol_type = other DNA
tcagctgaaccttgaaatgggtcatctgtgcatggtcctgccatcagacaagtgcatgccttcttcttttaaaatatcttggaaagtactttgcaatgtcttgctgctactcatatgtag

SEQ ID NO: 12597 - DNA, 120 bp, synthetic construct
  source 1..120: mol_type = other DNA
tcgctttcctggtcaccaagggaggcatttggagaaagacgagtgttctctgtcaaggatgtgctcctctctgggccttacggaagaatccatggcaccctgggttgatcaatggagaga

SEQ ID NO: 12598 - DNA, 120 bp, synthetic construct
  source 1..120: mol_type = other DNA
cagatgtgttcagagatggcagagcagggaagatcttggaggttctcctgagtcctcctgactgcccacggagaggtgggcggccctctgggggtttggttcaaggaaggtcttgctgag

SEQ ID NO: 12599 - DNA, 120 bp, synthetic construct
  source 1..120: mol_type = other DNA
tgcttgtgtttgtgcacgtgtgtacacctgcatgtgtgtgcgtgtgtgatgctttacttgctgaaggaagtggaggaaggttggcagtttctgatgtttttcttcatcttggatattgta

SEQ ID NO: 12600 - DNA, 120 bp, synthetic construct
  source 1..120: mol_type = other DNA
cttgcttaattgccaacagatgtggctatctgggggtctccttgagaaacatctttatgactctgagtcacatccacagaagtttgagacacagagtgacatccacagaagtttgagaca

SEQ ID NO: 12601 - DNA, 120 bp, synthetic construct
  source 1..120: mol_type = other DNA
cgggcggcggcggctgccgcttgtgtagttttaaatgttcaaaatcaataatctttaatacagtcttgattcaagtcaggaactaaaacatagatactgccacatcctaaacccagtgct

SEQ ID NO: 12602 - DNA, 120 bp, synthetic construct
  source 1..120: mol_type = other DNA
ctaaaaagagctcaaagtgaaaaacaggtctcttgactcttggtccagctggtaaatgatctatccctgcatcaaagaagtaatgttgtgagaatgaagcggcagccgtgggcccctcag

SEQ ID NO: 12603 - DNA, 120 bp, synthetic construct
  source 1..120: mol_type = other DNA
aggtcaccatcagcacaggccaccaccagcacaggtcaccaccagcacaggccaccaccagcacaggtcaccagcacaggccaccaccagcacaggtcaccaccagcacaggtcacacca

SEQ ID NO: 12604 - DNA, 120 bp, synthetic construct
  source 1..120: mol_type = other DNA
tgtcttcctaactggattgtggctccctgaagggcagggagccccacttctcatatctgtttcttcgagggcctggcccagggtttagcacacagttctaggtgtgacatgaatacctgc

SEQ ID NO: 12605 - DNA, 120 bp, synthetic construct
  source 1..120: mol_type = other DNA
ctgtgttgtatctggccctctgtatgctggcagtaaacaccacagtgggcaaatccaaatgattgtttagtggtaaaaaattaaatgcaagagctgaagccaacagcagtttcattgaac

SEQ ID NO: 12606 - DNA, 120 bp, synthetic construct
  source 1..120: mol_type = other DNA
ctacaggaaagaagaaaaatatcatctcagtatcccaggttttctcaggcagcagaaggcagtagtaaacaacccagagggtcctgagttgtcgctgtttaggaaaaaaatataggtaag

SEQ ID NO: 12607 - DNA, 120 bp, synthetic construct
  source 1..120: mol_type = other DNA
ttctcagacccgtctgacaagctattctgagttcttggtgccttcccttccactttacagtgaccttgggagttgagacagtgccgtgtgccggggcctcaggctgcctcctcgtggttc

SEQ ID NO: 12608 - DNA, 120 bp, synthetic construct
  source 1..120: mol_type = other DNA
tccgtgcgtttctgcagcctgccctctctgtgttcctgcagcctgccctctctgtgttcctgcaacctgccctccgtgcattcctgcagcctgccctccgtgcattcctgcagcctgccc

SEQ ID NO: 12609 - DNA, 120 bp, synthetic construct
  source 1..120: mol_type = other DNA
tgtgttcctgcatagggatgggagacagctgtgccctcttgctcacttgatctgcccagggtctgcagcagaggcttgcagtctagaggccacatccttccatgcccaaagtgagcagga

SEQ ID NO: 12610 - DNA, 120 bp, synthetic construct
  source 1..120: mol_type = other DNA
ttatctttgtagtttcatcacctgtattaccctcctaggtctgctgtaataaagtaccacaaactgggtggctttaaaacaacgagatgtcttcttccacagttctggaagccagaagtc

SEQ ID NO: 12611 - DNA, 120 bp, synthetic construct
  source 1..120: mol_type = other DNA
aatacagacctttctggcacccgaaacctctgtttcgggaagcctggctcttctttggggttttcacgccaaaagggcttttctaggatatttcctcgatttttaattattttttgaaac

SEQ ID NO: 12612 - DNA, 120 bp, synthetic construct
  source 1..120: mol_type = other DNA
taatgtactttacaacgtgaattgacatgacttgaggacctacgactacataccagggcctgtgctagattcaaaagtgggttccacaacccaaatgtccaacaatgatagactggatta

SEQ ID NO: 12613 - DNA, 120 bp, synthetic construct
  source 1..120: mol_type = other DNA
tgcaaaaggggttaatccaactgtagtgactgaaagactaagtacccacattcatttcttatcaatgcagtctataaccaaacatccatctcttcaaacccccttgccctcttgcaacct

SEQ ID NO: 12614 - DNA, 120 bp, synthetic construct
  source 1..120: mol_type = other DNA
tctaggattagaattttgcctggtggctagagtaaaggacaaagggacaaggtagtttacaatattggcaagagagtgatgagaagatggtctatggaacctaatctggaattcagaggg

SEQ ID NO: 12615 - DNA, 120 bp, synthetic construct
  source 1..120: mol_type = other DNA
cctgtgtgactgcacaggttgcataccataaagctggccctcccaatgtaatatatattctcacattgggattttctaagggaaattatgtggctggcataatttgccttagaaaatccc

SEQ ID NO: 12616 - DNA, 120 bp, synthetic construct
  source 1..120: mol_type = other DNA
tagctactagtcacatatggctacttaaatgtaaattaattaaaattcaattaagcatttaggttttggttacattagccgtattataagtgcttgataggcacatgtggctagtagcta

SEQ ID NO: 12617 - DNA, 120 bp, synthetic construct
  source 1..120: mol_type = other DNA
ccaaacagatgcacacagaataacaacaccacacctacatgcacacatacacagacatacatgcagcacagacacacacagaataacaccacacatacatgcacaccacagatacacaga

SEQ ID NO: 12618 - DNA, 120 bp, synthetic construct
  source 1..120: mol_type = other DNA
tgcacttgctgatggtgaaaagagaggtagacatgaagtatgaacacctctacatcgcaattctcattgctgcaatcggcacagaagacttcgaagaaagttgtagtaaaaacagttggt

SEQ ID NO: 12619 - DNA, 120 bp, synthetic construct
  source 1..120: mol_type = other DNA
accctggtcaaagaactgccagctcattgggccttaccttctctacctgtagcaccaactgggtcataggtgtttgtgataaaccagaattagtctattgcttgtttagaaaatgtatat

SEQ ID NO: 12620 - DNA, 120 bp, synthetic construct
  source 1..120: mol_type = other DNA
ggtctggagggtatacggtagagctgagatgttaatggtgataacatcatcaataccagctgaaccatttgtgccttctagatgtctttattcgatgcatatcttcactagcactgtttc

SEQ ID NO: 12621 - DNA, 120 bp, synthetic construct
  source 1..120: mol_type = other DNA
cgccaccctccggaacttgcattctgaagcaaagttgagaaaatcattgcacacatacaacaaagatgatcctagtagcagctggatggagtcacaggcctccgttcacgagcttctggt

SEQ ID NO: 12622 - DNA, 120 bp, synthetic construct
  source 1..120: mol_type = other DNA
agaggccagcctaaagctatcagcaacctccattagtactgcagaaggtccctgacttaatgatggttcgacttacaatttttcgactttacaacaggtttatcaggccattaaatgcat

SEQ ID NO: 12623 - DNA, 120 bp, synthetic construct
  source 1..120: mol_type = other DNA
gacacccggaagctctgcgtttgctgctttctgggaccccaccctatgcatttcttcccttggttgaagaagggacctgcatcccttccctgtaataaaccataaccttaagtacaacag

SEQ ID NO: 12624 - DNA, 120 bp, synthetic construct
  source 1..120: mol_type = other DNA
ccaaaccataatcccatgaggacaggatactgtccaaaatgttccctattgttttatgaatgaatgaatgagaaatctctggagaaccagcattgatgacagcagttgctgtcactggag

SEQ ID NO: 12625 - DNA, 120 bp, synthetic construct
  source 1..120: mol_type = other DNA
tctgatttacagaagagataagtgaaacccaccaaacacaatatttagtggcagaatcataaccagaataggtttctccacagcaaattggtgttgtttcccctgcccactgctgacaca

SEQ ID NO: 12626 - DNA, 120 bp, synthetic construct
  source 1..120: mol_type = other DNA
atgtgcagcgagccaaacaagatctctgccttcatggagctagtgggagcacagataaaaaacaaacaaaaaaagtctatcattgttattccaggtggcaatgctgagtgtgatgaagaa

SEQ ID NO: 12627 - DNA, 120 bp, synthetic construct
  source 1..120: mol_type = other DNA
ctgcactagtctactttccttcctcactagtctactttccttcctcactagtctactttccttcctccgtagtctactttccttcgtcactagtctactttccttcctcactggtctact

SEQ ID NO: 12628 - DNA, 120 bp, synthetic construct
  source 1..120: mol_type = other DNA
ctgggctcacaccacagctactattaccattttgaaacaatctcaccaagttagtcccactctgtggttgcctactcttcttaggatgaagaccaaattgtcatatatgacatacagggt

SEQ ID NO: 12629 - DNA, 120 bp, synthetic construct
  source 1..120: mol_type = other DNA
gtgagatttgaggggcacagaaagggccctatctggtgtatagtgcacacttcttaacatggcctacaaggccctttaccatctttcttgtcaaccttcccactgtcatctcctgctagt

SEQ ID NO: 12630 - DNA, 120 bp, synthetic construct
  source 1..120: mol_type = other DNA
ctttcgctgtccttgacagttgctagagcatcaactcatggctatgaaaactggaaaagaaaaaatcaagcacttattctactttgtctaaagtaattttatttcagggtaactgaaagc

SEQ ID NO: 12631 - DNA, 120 bp, synthetic construct
  source 1..120: mol_type = other DNA
cagttctcactccgccactttcgcgcccttcactttcccactccatcaattaaatctttaatgatagctaatcttggtggctctttcacctataagactgctgtttgtaatgaaaatctg

SEQ ID NO: 12632 - DNA, 120 bp, synthetic construct
  source 1..120: mol_type = other DNA
gaggagaatctgggaatgtctaaggggaacttcatatgcacttatcttttgacccaagaatctcacttctaggaatctaccctgaagacacacctccaaccatatgaaaattcgttcgta

SEQ ID NO: 12633 - DNA, 120 bp, synthetic construct
  source 1..120: mol_type = other DNA
cataatctggggaagtgccttccaaagacagagaaagagggcagtgatccctgagactggctgcatgcatgtccaaagagcacaggaggaaaggaaggtgagtgaaggtagcactgtgca

SEQ ID NO: 12634 - DNA, 120 bp, synthetic construct
  source 1..120: mol_type = other DNA
aataattatgatgccaacaacagcgataatatggcaataactacagcttacgctgtcattatcttggttcacatgtagatcacgccagggatggggaaggtggggagatgaagcaagatc

SEQ ID NO: 12635 - DNA, 120 bp, synthetic construct
  source 1..120: mol_type = other DNA
ggtttattttggaacttttttttgagggaagtaagaaaggtattataagactcaccagagcacagtttgtggaggaaggaattgcccaaggtgaccatggtagggaggtcttcgattcgc

SEQ ID NO: 12636 - DNA, 120 bp, synthetic construct
  source 1..120: mol_type = other DNA
cgccatctggagataatgttggggaactaggggactatgggcgtcaccaatattagagacttctggattgttgaagcacctaaaccagaatctattggttctgaattcatttcttttttt

SEQ ID NO: 12637 - DNA, 120 bp, synthetic construct
  source 1..120: mol_type = other DNA
tgcaaatgttctgatggtcaatttaaggataagggggtccaggtagaaggagaaatgtagctcaatggtctcaaagagggaatgagtgggaaggcaagattcttagtttctaatctgcat

SEQ ID NO: 12638 - DNA, 120 bp, synthetic construct
  source 1..120: mol_type = other DNA
ggaagcaaaagtttgttaacctagtctaagttctggataagtgaggaaaaacgtctccctcaatatctgtacttgtgggaaagccctcatatggatttgagattcctatttatacttctt

SEQ ID NO: 12639 - DNA, 120 bp, synthetic construct
  source 1..120: mol_type = other DNA
tgatttgtagcatttgctggtttccatcgtgtaaatactcctaccatggccagtttcaagctaccaatgtgatatcagtgaatgtggagctgggaagagatacacacaatcaattctcac

SEQ ID NO: 12640 - DNA, 120 bp, synthetic construct
  source 1..120: mol_type = other DNA
aaatgattttatgcaagagagccccaaatctcagggaagcaggaaaggaaaagagaaaaaatgagtcttcccttttctacagcaggaactccctcggccacagtctccctccgatctgga

SEQ ID NO: 12641 - DNA, 120 bp, synthetic construct
  source 1..120: mol_type = other DNA
tcttcctcctcttcctctgcctcccccttcccagcttcccaggcattgcccagctacccccactctttccctcccccaacaagcctctctgtctccaatcagccccccaagtatactcag

SEQ ID NO: 12642 - DNA, 120 bp, synthetic construct
  source 1..120: mol_type = other DNA
ccacgcagatcaaacaggagccggctgaggagtatgagacccccgagagcccggtgcccccagcccgcagcccctcgccccctcccaaggtggtagatgtacccagccatgccagtcagt

SEQ ID NO: 12643 - DNA, 120 bp, synthetic construct
  source 1..120: mol_type = other DNA
ttatcctcattttgtggatgaggaaactgagtttaaataatttgcacagggtcacataacttctaagtgccagaaccaaggtgcaagaggttttctgactccaaagcccagctcttaatg

SEQ ID NO: 12644 - DNA, 120 bp, synthetic construct
  source 1..120: mol_type = other DNA
gtgatggtagtgttggtgttggtaatcatgatggtgataatgagagtggtgatagtggtgttggtaatggtgttggtaatagtggtggtgatggtgttggtaatggtggtagtgatcatg

SEQ ID NO: 12645 - DNA, 120 bp, synthetic construct
  source 1..120: mol_type = other DNA
atggagaacacagttgtttctggggagggcagccaggagttaagagccagagatcagaggaagacttactttttagcatacttaaaaaaatgatattttatcatgtgcacccttccttcc

SEQ ID NO: 12646 - DNA, 120 bp, synthetic construct
  source 1..120: mol_type = other DNA
cagcctgagctctaggattgtgggttttccatcctccgaagacatcacctttgctcatctcccaggagagtctcgtccaaaggaggggggtgctttctgcttcagcagatcccaccccac

SEQ ID NO: 12647 - DNA, 120 bp, synthetic construct
  source 1..120: mol_type = other DNA
aattaggtgtattctgagagtcttgatctttgtttttcacattttgacatttcatgctcagattttgagactactttgttgacattattcaggcaaagtttcagttaaaatggagtagaa

SEQ ID NO: 12648 - DNA, 120 bp, synthetic construct
  source 1..120: mol_type = other DNA
tcagtaaatttctgccccaggctccttgagaatgggttggatattgaggatgttgaaaatttagtactatattcttttgaccaggggtttctgagggagtcagcagagttttgtctgctt

SEQ ID NO: 12649 - DNA, 120 bp, synthetic construct
  source 1..120: mol_type = other DNA
gccatttgcattttaaaaaacttattcagatgattcttaaacatattgaaattcaagaactgctgccttagagaatcccagcagagctgagtgtggggtggggtggtcatgatggatctc

SEQ ID NO: 12650 - DNA, 120 bp, synthetic construct
  source 1..120: mol_type = other DNA
aaatgctcaccgaagaaaattcccgggacgattcaggtaagccagataatgcccttcttgactatctgactataggggggttgggaggtcaaaaggctgccgtctttttttttttttttt

SEQ ID NO: 12651 - DNA, 120 bp, synthetic construct
  source 1..120: mol_type = other DNA
tgagcaatgatggaccattactataaagaagtgttattatcaactaatcctctggaaacccctttttccattataacttggtggcacctgccctttgaactatgtcccaggtctcaggag

SEQ ID NO: 12652 - DNA, 120 bp, synthetic construct
  source 1..120: mol_type = other DNA
ccagcctttactcttcctaccaccagggatgcctggtgaacccgactgggaaccttccaatgtggagcaaccagacctggaacaattcaacctggagcaaccagacccagaacatccagt

SEQ ID NO: 12653 - DNA, 120 bp, synthetic construct
  source 1..120: mol_type = other DNA
agctggaagaagaatatgacatgaaacttcagttttcctttccatgaaaacagcatctgagctacttgaaatctgccttaccaacagcaggacacttgttatggatacccctcctgtgat

SEQ ID NO: 12654 - DNA, 120 bp, synthetic construct
  source 1..120: mol_type = other DNA
tctgatgctatctccaggtagtgtcagaattaaatcacaggacacctagatagtgtccactacggaactgattgcttacttgatggggacaaatccttatatattttgggggtcacagaa

SEQ ID NO: 12655 - DNA, 120 bp, synthetic construct
  source 1..120: mol_type = other DNA
ttaatcccattgatcaaagactaatggaaaaccctcaggggatgaagtacaagggtgctcttcatatccgtattttatccacaattgactagaaggcacaggagtactctcttcccacaa

SEQ ID NO: 12656 - DNA, 120 bp, synthetic construct
  source 1..120: mol_type = other DNA
atatgttgaagccctaacccctagtaacttagaatggaactgtatttggagatggagcctttaaggaggtaattaagattacatgaagtcactagggtggggctctagtccaataggaca

SEQ ID NO: 12657 - DNA, 120 bp, synthetic construct
  source 1..120: mol_type = other DNA
ttaaatgtgtgttccctccaaaattaatgcagaaacttaatcctaattgtagtgatattaagaggcaggaccttttgggaagtgactgagtcatgagggctctgcctccatggagggagt

SEQ ID NO: 12658 - DNA, 120 bp, synthetic construct
  source 1..120: mol_type = other DNA
catggagaatggggtatccatctcctcaagcatttatgctttgagttaccccctcatctttttagaccctcagacaacttagtcagctgaccaatccttcctgagaaataaatgttcttt

SEQ ID NO: 12659 - DNA, 120 bp, synthetic construct
  source 1..120: mol_type = other DNA
tgtattcacaggcataaccattaaccagatcaagatctagattctttaacatttcttgctcctcaaaaagtttcctagtgctggttccagtctatagcctccttctccagaagaaattgc

SEQ ID NO: 12660 - DNA, 120 bp, synthetic construct
  source 1..120: mol_type = other DNA
tttcttgttctttgtttttctttttccatttaccccaggtagccactaacttaatgctccttacgtctattccattctcttttccagtctctattacctagtcatccttgtccccgccca

SEQ ID NO: 12661 - DNA, 120 bp, synthetic construct
  source 1..120: mol_type = other DNA
gctacttgaaatctgccttaccaacagcaggacacttgttatggatacccctcctgtgatttatgattttatatacatacatattgtgtgccattcacaggtcctggctcaaaatcccca

SEQ ID NO: 12662 - DNA, 120 bp, synthetic construct
  source 1..120: mol_type = other DNA
agagcttgagagtttttccaagcacctttcctccaattccaagttcaaagcatactatatagtcccttctatactccctcctttcccatccatcccatatttgcttgaagagtgaagact

SEQ ID NO: 12663 - DNA, 120 bp, synthetic construct
  source 1..120: mol_type = other DNA
gtctcttaaccatttgattggtgagaaacctgtggttcattagagaaatagtttatttcatcacagtcatgtttaaaaagtagtaaatcatggttatttgccttgtgacaaatccgtaat

SEQ ID NO: 12664 - DNA, 120 bp, synthetic construct
  source 1..120: mol_type = other DNA
tgcattgtgtcttggaacttaggcatggactcagcattcataggtcctgactgttttgaatttccttttcctgatggcccttttgtttagatttattttccagtctcatgttgggtcaga

SEQ ID NO: 12665 - DNA, 120 bp, synthetic construct
  source 1..120: mol_type = other DNA
gtcaatgtactagtcttaaatagcatcagaaaattcacgctggagagaaaattataaacttcttcagaacatattctgactttagatgacactgtgttaggaatgacgaaggtaaggaat

SEQ ID NO: 12666 - DNA, 120 bp, synthetic construct
  source 1..120: mol_type = other DNA
agctagagttccttcaatccacctgcactcgacctaggccagttttgactgttttgcttgtcaacccccaaaaaggattttgaaaacatatatgccctccaatacagtttaattttgtgg

SEQ ID NO: 12667 - DNA, 120 bp, synthetic construct
  source 1..120: mol_type = other DNA
tatatgggtatattgcacaatgctgaggtttggggtacaactgatcctgttacccaggtcctaagtgtagtactcaatagttagtatttcaaccattaccccattccattccctctccct

SEQ ID NO: 12668 - DNA, 120 bp, synthetic construct
  source 1..120: mol_type = other DNA
agtgagctgcctttgagatgtgaaggctatctggggttttggcaatattctgtttcttgagctgagtagttgttacctggagtgttcaccttacaataatttgctaaactgttttccact

SEQ ID NO: 12669 - DNA, 120 bp, synthetic construct
  source 1..120: mol_type = other DNA
tagaaaattggaagtgacagagggcagaagatttatttggaggcttttatagtagtccaagtgttgaatatactggagataagagtaaagtgggccaggcatggtggctcatacctgtaa

SEQ ID NO: 12670 - DNA, 120 bp, synthetic construct
  source 1..120: mol_type = other DNA
aatcatctgcaaacggatgagtttcaagagccgagtgtcaggccaaggcacggacatagcttcagagtgttggaagtcagtgacagagtcttttaatcactactgattacaaactttttt

SEQ ID NO: 12671 - DNA, 120 bp, synthetic construct
  source 1..120: mol_type = other DNA
cttaaagtatatggtaaaggcagagatacgagctgaggtattctgtggaatacgacacaatagcagtcctggctgcttttgaatctttaaccttaatgcctccagtcctccttttctcaa

SEQ ID NO: 12672 - DNA, 120 bp, synthetic construct
  source 1..120: mol_type = other DNA
cctgggctgtgttttagggatgtgaaaatgaataaaacatggattcagcctttgagaaactccaagtctaatggaggaggggctaaccattcttctttgctgagtacagagtaaaagaat

SEQ ID NO: 12673 - DNA, 120 bp, synthetic construct
  source 1..120: mol_type = other DNA
tgccggtgagtgatgtctgatggttttgagggcactattatgcatgagagtggacctgggctaagtggaaatagagcttaattgaataggggaataaagagttaagagggttaatattgg

SEQ ID NO: 12674 - DNA, 120 bp, synthetic construct
  source 1..120: mol_type = other DNA
acaggtactttggaattaatcattgctagacctcagtttcatttagcttcccttctcctatcatctggcattacctacatgttctcaccatttcttctaggctgccaagagattgcagag

SEQ ID NO: 12675 - DNA, 120 bp, synthetic construct
  source 1..120: mol_type = other DNA
ccaatttatgttattttctaccctgtttttcagttccatctctgctctgtcctatagctttataaaaccagagtgtgtggggctgaggtcaggagtataagtacctgccttaggcactat

SEQ ID NO: 12676 - DNA, 120 bp, synthetic construct
  source 1..120: mol_type = other DNA
agaccacagtccttagcccaatcccagctatacagtcaccccaatttccacaaatgatgtgatggtaccgtataatcctgtaattgggaaatttcacatttttcctgtcctaatctcaga

SEQ ID NO: 12677 - DNA, 120 bp, synthetic construct
  source 1..120: mol_type = other DNA
aaaagttcttgggccacatatataataccccgtgatgactctcagggcagttaggaagacaaatatgaaaggctggtatccaaagtggatatggactgactgttagaaacattgtttcat

SEQ ID NO: 12678 - DNA, 120 bp, synthetic construct
  source 1..120: mol_type = other DNA
ctctaagatacgtaatggaagtagagtaagtattatgaaacagatgatggtgccccacttacctgaaacactcaacccagtaacaaccaagacaaggagaataatcccagcacagctaag

SEQ ID NO: 12679 - DNA, 120 bp, synthetic construct
  source 1..120: mol_type = other DNA
attgaaagaatgcacagatcctttgaaagaagcaactcaatactgaaaattctggaagacagccaaaaatgtgtgaagtggggaaaacccacctctgaacacacatccctaatggggaac

SEQ ID NO: 12680 - DNA, 120 bp, synthetic construct
  source 1..120: mol_type = other DNA
cagtcatacacacatacacagaaaagggttagcctctctcccctaattgtgttcccatataaagcaaaccaacaaacaaaaatacactccacacatgtcttgaacctcactgatacacaa

SEQ ID NO: 12681 - DNA, 120 bp, synthetic construct
  source 1..120: mol_type = other DNA
ctattcttcaacagtatgaaatattttgaggcacttccaagcattaaagtaaaacgttcccttctaatctttcaagaatatgcttacaaggaataagaactattgtttttaacacagtgg

SEQ ID NO: 12682 - DNA, 120 bp, synthetic construct
  source 1..120: mol_type = other DNA
gaaaaccactatttgcagtgccaaaaactttcataaatgtttgaattttttatttaaatgaactcttcaacgtttatacttagtactttcattcttattctcatgttaataaagacattt

SEQ ID NO: 12683 - DNA, 120 bp, synthetic construct
  source 1..120: mol_type = other DNA
tgctaccaatatggagctagagaaagtgcttccttctcataccaagagacaccaggatggctgtggatgaggaggatcagcaaagggaccccatgactaacagtgcaccgtaaaccacct

SEQ ID NO: 12684 - DNA, 120 bp, synthetic construct
  source 1..120: mol_type = other DNA
ctggagaaaaggaaatgctgcctcataatctttctttataaatatttatggctgaatttatggcttattttctgcaaaaatgccactattcttttacatgccttaaaacagacacaaaat

SEQ ID NO: 12685 - DNA, 120 bp, synthetic construct
  source 1..120: mol_type = other DNA
cagggagagaaatagaggcactgagagaggggagatagagagttgattaggattacatactagagaattacatactagagaacccacatgcacagggaaacataatgataaactctggcc

SEQ ID NO: 12686 - DNA, 120 bp, synthetic construct
  source 1..120: mol_type = other DNA
ggtatcaaagaataaagtaaaatgaggaaacaacctcagaatcctagtacaagtaacatccattgtgaaaaaatctgttttaacagcctcaataggcaaagatgagctagggaacctagg

SEQ ID NO: 12687 - DNA, 120 bp, synthetic construct
  source 1..120: mol_type = other DNA
agattaacagcagaaaagatatcagggtcagagtgaggggtacaaagtttgctagcatggttagagtcatatttgaatggtacattgcactcctcaatttgatcttccaagtcacgtttc

SEQ ID NO: 12688 - DNA, 120 bp, synthetic construct
  source 1..120: mol_type = other DNA
aatacaatgtcaatgggtttttagttgattcattggcacaataaagttggagaactgtaacacttagagcacttggtgaagaataaactggaatcatacctgtcattgaaccttgattac

SEQ ID NO: 12689 - DNA, 120 bp, synthetic construct
  source 1..120: mol_type = other DNA
tccttgtgaaggtggtccttctggctttcctggacgaggtgggggaccttgggactggtttcctccttgtgggggtggtccttctggctttcctggacgaggtgggggaccttgaggttt

SEQ ID NO: 12690 - DNA, 120 bp, synthetic construct
  source 1..120: mol_type = other DNA
tggtccttgtggctttcctggaggagatcgggcacttcgggacttgtttccttcctgtgggggtggtccttctggctttcctggatgaggtgggggaccttgggactggttacctccttg

SEQ ID NO: 12691 - DNA, 120 bp, synthetic construct
  source 1..120: mol_type = other DNA
ggtgaaaaaagctccatcttggaggaaaaaaaatagaagtcagggaagtagagaaacagtaaaacctttttgcatggcagctggctaaattaggattaaggaggagggaaacttcccgga

SEQ ID NO: 12692 - DNA, 120 bp, synthetic construct
  source 1..120: mol_type = other DNA
caaacagtgctcaggtgaaaactttaaatgggaggtctctcagtttgtgcacagaaaacagagcgccagagagaacatggtactacttccttgttgccaacacaacttaagacagattat

SEQ ID NO: 12693 - DNA, 120 bp, synthetic construct
  source 1..120: mol_type = other DNA
gggaccttggggctggttgcctccttgtgggggtggtccttgtggctttcctggaggagatcgggcactttgggacttgttgtctccttgtgggggtggtccttgtggctttcctggagg

SEQ ID NO: 12694 - DNA, 120 bp, synthetic construct
  source 1..120: mol_type = other DNA
atttaagttctgagctgagctcagggccagcaaggccactgacagcagaatcaacagcatcttgcaggaggctctggagtcactcccaactctgtgctgggaggaacgtggcaactccct

SEQ ID NO: 12695 - DNA, 120 bp, synthetic construct
  source 1..120: mol_type = other DNA
taggaattatatcgaattcttaccactgataattaagtggccacaattctacattcaaataagataatcagataccaccatcaaaccctcaattgcattctattggttttattggtttag

SEQ ID NO: 12696 - DNA, 120 bp, synthetic construct
  source 1..120: mol_type = other DNA
ttctggttccaacatttaactccctagctttttttaaaagaaaaaataagctggcatcaactgaaatttcaggttaggggcttggtttgaggatgtttggggaagcgggagctttctgcc

SEQ ID NO: 12697 - DNA, 120 bp, synthetic construct
  source 1..120: mol_type = other DNA
aagatacatgcaaatttatgtctgttaggtatttaccatatggaaaaactaaaataatcaagaaaggaaattcagtaggtggttgacagtttaaatacaaatcacaaatgacatcttttt

SEQ ID NO: 12698 - DNA, 120 bp, synthetic construct
  source 1..120: mol_type = other DNA
ggccaatatacgacgttttcgatctctgaattatctccaaagtctgtgctttttcctatcatgccacactgcccctctgcactctcatgaattgcaggaatttattccaagttacaaaga

SEQ ID NO: 12699 - DNA, 120 bp, synthetic construct
  source 1..120: mol_type = other DNA
tgtaccctagtttaaaaatctcttcttaaacatgacacccagaatactctcgcaggtgtacagtaaccattgccaggtgcctgggactactgcttccactttctgaacttgagatcaaaa

SEQ ID NO: 12700 - DNA, 120 bp, synthetic construct
  source 1..120: mol_type = other DNA
ctgagtgattgtgtaagccttgaagatagttaatgtaaccgagatgaggcgtccacataagctcctgccttcacaatagatatgttgtgtctatttggatatcacaaaatgtcattcggt

SEQ ID NO: 12701 - DNA, 120 bp, synthetic construct
  source 1..120: mol_type = other DNA
tttaagctagttctctctctgtgacctgtaatttgagggtgacaaaaaagaacttcccatgaaagaacaaacaaacatgacaccacctgggaccattgaagttggatttcccctggtaag

SEQ ID NO: 12702 - DNA, 120 bp, synthetic construct
  source 1..120: mol_type = other DNA
aaaattaagtccataatccacttcggaggaataaagcctaatcttctttagatagacttccagggaaatgaaattcttaatcccctttgctgatctgtttctgtctaccaactcttattt

SEQ ID NO: 12703 - DNA, 120 bp, synthetic construct
  source 1..120: mol_type = other DNA
cttggaaaatcctgtgattagatctgagtgagctgttttttcaacagtagcataaaatattcagtgaacatcaaataatggtaattaagaatcttgacaccatttttattacaacttgta

SEQ ID NO: 12704 - DNA, 120 bp, synthetic construct
  source 1..120: mol_type = other DNA
cccgtttttgccatcccccaaatgtgtggtatggtgaaactaatcccctgaatgtgaattgctatccttattgccctattaaagaagagccagctggtatattgtcaggaagcactattt

SEQ ID NO: 12705 - DNA, 120 bp, synthetic construct
  source 1..120: mol_type = other DNA
ttagtaaaactttttctcgactttaatgtaagaaaacacaccgacaaatctccttttcccctgcagggctgtgcattcttgtgggggtgtccatctacactagtcattatgcgaatcgtg

SEQ ID NO: 12706 - DNA, 120 bp, synthetic construct
  source 1..120: mol_type = other DNA
acctttattctcaaatgacagttgtgagggtagagcaaaagtgtgtaatgttggacaattctgaactgtgactctctggatttgagcactgacttggcaaggtcttcattagtactcagg

SEQ ID NO: 12707 - DNA, 120 bp, synthetic construct
  source 1..120: mol_type = other DNA
tctcccagatatcttgctcattcgagaacttccagaaaagaaatagctgaaagagatggagaatgggtttgaggaaagtcatactctgttctgtgaaggattcattttgctgccgaaagg

SEQ ID NO: 12708 - DNA, 120 bp, synthetic construct
  source 1..120: mol_type = other DNA
agatgtctttcatttttcttcttcatcatgttcatgtcttcctttatatctctgaacatatttataacacgtctttctttgggtggggggtggggacagagtttcactctgtcgcccagg

SEQ ID NO: 12709 - DNA, 120 bp, synthetic construct
  source 1..120: mol_type = other DNA
tattcatttcctttggtcactgtctatttttgtgccagcacctcacttttttcgattattgtagctttgtaatatattttgtgtggttcccccaccccccgcccccttggctaacttagc

SEQ ID NO: 12710 - DNA, 120 bp, synthetic construct
  source 1..120: mol_type = other DNA
ggggagaggtaaaaatgacccactcatgccctgcagagtctggccataaaactcatctggcagtgtctttgtaaatggaaggaaaatgtttctatttttatcccacaaggaacaaaagat

SEQ ID NO: 12711 - DNA, 120 bp, synthetic construct
  source 1..120: mol_type = other DNA
ctactcattaaaattttacccattcttcaacatgcaaacaatcgcatctccttcataagagttttttcctccattgaagcttagtcccctcaagcagaggtgacccttcccttctgtgca

SEQ ID NO: 12712 - DNA, 120 bp, synthetic construct
  source 1..120: mol_type = other DNA
tcagacaaattgagacctcagttctgatctcagtcctgcaatggcctaagtcatataacatttttgagcctccatttctttgtgtatatgatggactttaaggatcttctatctacaaac

SEQ ID NO: 12713 - DNA, 120 bp, synthetic construct
  source 1..120: mol_type = other DNA
tttcctttaaacttatcttggttactcttctcctttacgagtgataatattgaatccaaaaagctgactgctgaacgttagcagctgatgcagtctaaacgaggtcccctgagcattggc

SEQ ID NO: 12714 - DNA, 120 bp, synthetic construct
  source 1..120: mol_type = other DNA
tctccccttcctaggtttccattgaccttataaggccccacctgggcataccctggagtcttccttcatctcttattatctacatttacttgttttgtgttaaaacattgaggagaaatc

SEQ ID NO: 12715 - DNA, 120 bp, synthetic construct
  source 1..120: mol_type = other DNA
tagttgaaattatgcctctccatctctaattactgcatgccaaagtattctgactgctactgtcatttcccagcaactgatggctgcaggtgattgtttcagattgtgctcaagggactt

SEQ ID NO: 12716 - DNA, 120 bp, synthetic construct
  source 1..120: mol_type = other DNA
agggatctccttactccacagaacttctaatttcccagacaatcagttgttcaagaacacaatgccattcctcatgctttctttgcctataagctgttctcacccacttggtgaaatcta

SEQ ID NO: 12717 - DNA, 120 bp, synthetic construct
  source 1..120: mol_type = other DNA
acttcactagacagtcaagtgctcccgctgcactttgggtctgtccatcataagcacacattgtgctgatatcctccatggcaccatcagagggatgagagggcatcccatctacctttg

SEQ ID NO: 12718 - DNA, 120 bp, synthetic construct
  source 1..120: mol_type = other DNA
aatgtggtagtgatctccgtgctggccatccttagcacacttttaattggactgttgcttgttaccctcattattcttaggaaaaagcatctgcagatggctaggtaagttaagttttac

SEQ ID NO: 12719 - DNA, 120 bp, synthetic construct
  source 1..120: mol_type = other DNA
acatataaatatataaatatatatatatataaaaaatagtgaccaaaatatttggtccaaattaccaacagggtgggaaaactcagggacttttattcttccacagccaacaaagtaatc

SEQ ID NO: 12720 - DNA, 120 bp, synthetic construct
  source 1..120: mol_type = other DNA
tgcagtatttccgtagataattttaaccgtaaccttgaagtggccgtgctcgtggaaaagttgtcagccgtctgtgctcaaaatgtaacactgcagattcatgggattttagagttacaa

SEQ ID NO: 12721 - DNA, 120 bp, synthetic construct
  source 1..120: mol_type = other DNA
gacttcccatctcacatgggaaaacctttctgtgctgaaaaaagttctccttaaggaccttttaaaccctgttggccatggctcaccatatgcattgtattttatattgccacacagtac

SEQ ID NO: 12722 - DNA, 120 bp, synthetic construct
  source 1..120: mol_type = other DNA
gacacataattgatgcagtcttttagaagtcaattttgctttaattctcgatagtctttaaaatatttatcctcactgaaggaataatcccatttccaggattctagtctaaggcgggaa

SEQ ID NO: 12723 - DNA, 120 bp, synthetic construct
  source 1..120: mol_type = other DNA
aagtgtctaacagctcagtgtgacagccctctgtatcctgagctcttgtttgatgtccaggaagaattaggtcacatgaacaaattgaagatggtaaatgtgggggatttcactgccaat

SEQ ID NO: 12724 - DNA, 120 bp, synthetic construct
  source 1..120: mol_type = other DNA
aacatgttttacatttaagttaaaaatattcaaacacagtatgtactttccagaactgctgcgaaatattagcactattgttagttatcctatgaattcattaaatgtttaaaaatctaa

SEQ ID NO: 12725 - DNA, 120 bp, synthetic construct
  source 1..120: mol_type = other DNA
atcacctactgctctaataatttaacatcaaagttcaactgggaatgacaaggccagtagattctgtgtatttccctcacatctcatggccatcaggtatcatcccataaagatgctcgg

SEQ ID NO: 12726 - DNA, 120 bp, synthetic construct
  source 1..120: mol_type = other DNA
tgccagatcacaatctcaactttctgtcaaaagccccttctcaaacaatcatgccacctacgtataccccatccagtcttacagtagtatttatgaccttctggacacttccttacatat

SEQ ID NO: 12727 - DNA, 120 bp, synthetic construct
  source 1..120: mol_type = other DNA
cccttatccccaccagggaaactctggaaactctccctctcgaaaatctttagatatttccagatcccatctcacctacagagaaaccaaagaaggcccacaaaagctaaactcacgagt

SEQ ID NO: 12728 - DNA, 120 bp, synthetic construct
  source 1..120: mol_type = other DNA
ccaaattggaacaaaaatgcaaatcataactctatgtgaaaacacacctatattttattgaggatttttgtatcaatcaccactcctattcaacatagtgttggaagttctggccagggc

SEQ ID NO: 12729 - DNA, 120 bp, synthetic construct
  source 1..120: mol_type = other DNA
aaaaacatacaaaaaacatgagtaactaatcataggaaaactcaaattactaacacgtgtttgaaaaatagttcaaagttactgggaagagaggagcccctctgcccggccagccgcccc

SEQ ID NO: 12730 - DNA, 120 bp, synthetic construct
  source 1..120: mol_type = other DNA
ccatttatggtatatggaactgaaaggaataaatctatccatttaccaatcagtctgagagattctctggtttcttacaaatacagattggcaacaccgatgtggttaaacatgacaggc

SEQ ID NO: 12731 - DNA, 120 bp, synthetic construct
  source 1..120: mol_type = other DNA
cattcctattgtctctgccttgactcaagacctccttatctcttgcctggattatagaactgtgtcataacaggtctttctgcttggagttacccaccttcacttgaccacaatctgtga

SEQ ID NO: 12732 - DNA, 120 bp, synthetic construct
  source 1..120: mol_type = other DNA
gcgccggacatccaagaaaaccaaggtggagccctacagtctcacggcccagcagagcagcctcatcagagaggacaagagcaacgccaagctgtggaatgaggtcctggcgtcactcaa

SEQ ID NO: 12733 - DNA, 120 bp, synthetic construct
  source 1..120: mol_type = other DNA
ctgtctgttgaagttgttgcaaggaaaagaggaaacatctcgggcctagttcaaacctttgcctcaaagccatcccccaccagactgcttagcgtctgagatccgcgtgaaaagtcctct

SEQ ID NO: 12734 - DNA, 120 bp, synthetic construct
  source 1..120: mol_type = other DNA
agctactaattgataggcttagcaaagtttcctgccaaacattttggattgtttttcctcactactcgtttacccaaaccattactaatgcttggtgttataaatcttttactgttttgc

SEQ ID NO: 12735 - DNA, 120 bp, synthetic construct
  source 1..120: mol_type = other DNA
cagaatcccagaactgaaatttctattccaaccaacaacaggaagagagacagattgtgaactagcacacaaatggagtttttttgtgtctatctcgaataacattcattgaataactac

SEQ ID NO: 12736 - DNA, 120 bp, synthetic construct
  source 1..120: mol_type = other DNA
caggtcaatgtcagaaagaaatttatattgctaaaggtatccaaaaaataggctgagacaccatattaatggtaataaattgactgtcattggacatgtttaaacaagagattagaatga

SEQ ID NO: 12737 - DNA, 120 bp, synthetic construct
  source 1..120: mol_type = other DNA
ccatacattgcttgggtagaatggtcattttaacaatattaatacttcagatccatgatcatgggatgtctttgcattcgtgtgtgttgtcttcaacgtgtttcatcagatttttgtagt

SEQ ID NO: 12738 - DNA, 120 bp, synthetic construct
  source 1..120: mol_type = other DNA
tcatttactttcttaccaatgaatgtctcaccatacactgactcttcaatgtaagactcctttgagtgcccctctggagcagagtggaagaagacaaaagataattcaatacacatttcg

SEQ ID NO: 12739 - DNA, 120 bp, synthetic construct
  source 1..120: mol_type = other DNA
ctttttcagtggggttcatgaacccattgaggtgcagattgcacaaaacagatttaaggtaacctgtttatcaacttgaatatttcagtaatgcaatacatcttttccttaccatgctga

SEQ ID NO: 12740 - DNA, 120 bp, synthetic construct
  source 1..120: mol_type = other DNA
ctaccaatccatgagagtagaatgtttttccacttgtttgtgtcacctataatttctttcatcagggtttgtatttatcctagtagagatctttcacttccttggtttaaatgtattcct

SEQ ID NO: 12741 - DNA, 120 bp, synthetic construct
  source 1..120: mol_type = other DNA
tagtacagtgggtactcactcttttttgtatttccagtagaatttggctatgaatgcatttggtctagggcttttattgataggcaggttttttcagtactgattcaaatttggaactct

SEQ ID NO: 12742 - DNA, 120 bp, synthetic construct
  source 1..120: mol_type = other DNA
gtgctggcattgcaggtgtgagtcaccatgcccagccctctgtagtattcttttcttgtaatgtctttgtctgattttgttattaggataatgctagcctcacagaatgaaataggaagt

SEQ ID NO: 12743 - DNA, 120 bp, synthetic construct
  source 1..120: mol_type = other DNA
cacaaacgtatatgtgtgtctgtaaagagagagggagagcgagagagagtatgggagagcacttggatatccatttttaattaagctgacttttagctatagtgccctttaaaaaaaatc

SEQ ID NO: 12744 - DNA, 120 bp, synthetic construct
  source 1..120: mol_type = other DNA
aagaatgagaccctttcatttgcaacaacatgaatggaactggaggtcataacgttaagtaaagtagggcaggcaccaaaagacaaactttgcatgtcctcacttacttgtgggagctaa

SEQ ID NO: 12745 - DNA, 120 bp, synthetic construct
  source 1..120: mol_type = other DNA
gaaccagattgctgaagcatgtttgcagccttcttctggaagttgcctgaatttttttcctccatctttttatcaccttgttcagaatgacaagtttgagacgattcagcctacaaaaaa

SEQ ID NO: 12746 - DNA, 120 bp, synthetic construct
  source 1..120: mol_type = other DNA
agtgattaaagtttgagtgttttaggtaaattactttctatagcatttaaaagttcacacaaaataactgcaaaaccgtttattctgttgcaatttttaaaaaaaaaccataaagacaac

SEQ ID NO: 12747 - DNA, 120 bp, synthetic construct
  source 1..120: mol_type = other DNA
atcatatgccaaggattaaagtaaaaaaaaaagtctgaagtctttgttttattggagagatttaccccttggatcctcaaggacattacaaacattaattatatctcagcagatccataa

SEQ ID NO: 12748 - DNA, 120 bp, synthetic construct
  source 1..120: mol_type = other DNA
gacatttactcaacttaagtaactaaaagttatgaggggaccagcaaccacttggctgtaagaatggtgaatgtgatctttagtttagtgtaactagataggcttctactgatgttgcct

SEQ ID NO: 12749 - DNA, 120 bp, synthetic construct
  source 1..120: mol_type = other DNA
taaaaaaaaaattaaaaaaaaaaaagaaaaaaaaaagattacttccatgggtaaaaacccatttctctatgagaatgaattattacttgctaacaggcaatatgcatattctgccctaca

SEQ ID NO: 12750 - DNA, 120 bp, synthetic construct
  source 1..120: mol_type = other DNA
acacacctttggttctcttacttgcaaacgcacgcacgcttcttcggccccgtcggccccaaaggtcagcgcaaggattttttcaaatgcaacttttccaaggatttctttctaggggaa

SEQ ID NO: 12751 - DNA, 120 bp, synthetic construct
  source 1..120: mol_type = other DNA
ttggggagagagagagagatgcttaaggttcatttaatttgctgttataggacgcaacctaaaaacattagcagaaatctcggagactttgcaaatcagttcagtttggtccgggcaatc

SEQ ID NO: 12752 - DNA, 120 bp, synthetic construct
  source 1..120: mol_type = other DNA
ttctctccatgcttggcctacgggcttcttcaggataagaactgtgtgtttatatataatctttagcccttgtccctgttcctagcacaaagtgggctttggatgaaagtttgttgaatt

SEQ ID NO: 12753 - DNA, 120 bp, synthetic construct
  source 1..120: mol_type = other DNA
aggaagccaagtctttctgaaaagaaaaataatccatcaaagtgggatgtctcttcagtgtaagttatctacttgataaattctaccattttagtggaatgggaaagggtgaggcagggc

SEQ ID NO: 12754 - DNA, 120 bp, synthetic construct
  source 1..120: mol_type = other DNA
gagccactgcgcctggcccagcattgtttgtaataagaaacatttggtaaggaatttaaataccccctaggtgaatgggtgagtacattatgagagaattgacccaatagccatttcttt

SEQ ID NO: 12755 - DNA, 120 bp, synthetic construct
  source 1..120: mol_type = other DNA
ctaaagttcacacacatgcacagagtttattgctaaagagaccttcaatttcagaaccatatctttacagatgaggaaactcagacatagagctacatggtacacaattttatgaaaaag

SEQ ID NO: 12756 - DNA, 120 bp, synthetic construct
  source 1..120: mol_type = other DNA
ataataaaagaattctaagcaggaaaaaagaaaaagaaatatattcagtgatttacaaaatttccatcattccacttctaaaaggtactgttttgggggtgccatttcccagtgatgtgc

SEQ ID NO: 12757 - DNA, 120 bp, synthetic construct
  source 1..120: mol_type = other DNA
aaccaatataaccaaacacatgttctttgaggagctcaataaaactaaatctctagtgatatgatcaggaaaaagagaagatacagatgaccatatgagaaatgagaaaggtgataccaa

SEQ ID NO: 12758 - DNA, 120 bp, synthetic construct
  source 1..120: mol_type = other DNA
cagcttagcctagtggttctcaaaaggttcatcccagcaccggcagcatcagcatttcctgggaatttgttagaaatgcgaattgtcagtgatgatgagcattttttcatgtgttttttg

SEQ ID NO: 12759 - DNA, 120 bp, synthetic construct
  source 1..120: mol_type = other DNA
gaagatcaatagagtggtggttgatgtgatgcatgttaatgtgtgaactggtaggaaggagggaggagaacagacctgtgctaaatgctctttaagcacttattcctttcaacaattctg

SEQ ID NO: 12760 - DNA, 120 bp, synthetic construct
  source 1..120: mol_type = other DNA
acagaagctagaatacacccagaaacctgcagctatgtacatatttaggatatgatcatgcaaggcagaaaagatttatctggggtctatggataaagaataaagtcgttcggccgggcg

SEQ ID NO: 12761 - DNA, 120 bp, synthetic construct
  source 1..120: mol_type = other DNA
ctaagctgaggaactactgttatgaaagataccatcagagtggccatatttttaggatgtgctccagctttgtgatagcagaaaagaaaagggctttggggtcttcaaagacttcccata

SEQ ID NO: 12762 - DNA, 120 bp, synthetic construct
  source 1..120: mol_type = other DNA
gaaattctctgaagcttaaagatactcaaaaacttgtttgaaaatagacaatttgctggatgcaatggtagcctcagctattcaggaggctgagtcaggtggatcacttgagtccaggag

SEQ ID NO: 12763 - DNA, 120 bp, synthetic construct
  source 1..120: mol_type = other DNA
aggaagaggaggaagaggaggaggagaggaaagaagagaggagaaggataaggaggagaggagaggaaaaggaaaggaaaaagaaaggaagaaagaaaatagataattttcactagccac

SEQ ID NO: 12764 - DNA, 120 bp, synthetic construct
  source 1..120: mol_type = other DNA
gttcagaatgaggcgaatgtagccatctttgcttctgtgccagtcaaatcagtgataaattagattgagtcataagaggaactgctacaggaattgcataggactatacagagaggaggg

SEQ ID NO: 12765 - DNA, 120 bp, synthetic construct
  source 1..120: mol_type = other DNA
tcctttgggtatatacccagtaatgggattgctgagtcaaatgggtctatgccagcattcgataagtttgtgttgggttctaacaataagccttatcataggtcaccagagattgtgaga

SEQ ID NO: 12766 - DNA, 120 bp, synthetic construct
  source 1..120: mol_type = other DNA
gggattctttattcctttatcatctatgctctaactctatgctccaaagaaacccagaaggcaggtccctaaagtgcataaacatgtacctgaaaggagtgatatgactaggtaggggtg

SEQ ID NO: 12767 - DNA, 120 bp, synthetic construct
  source 1..120: mol_type = other DNA
acagcaacaagagatgctagaaaataattaaattttagctttaaaatacagatagaaagtaattatcaatctaacatctctataaagtatcacttaagagtaatggcaagagtgcagtgg

SEQ ID NO: 12768 - DNA, 120 bp, synthetic construct
  source 1..120: mol_type = other DNA
cctcctgtttcctgactgttcctctagcaagcatttctcaaactttttggtcacaggaccccttcacactcttaaaaattattaaggacccacatctgggtccttaattatgcagatata

SEQ ID NO: 12769 - DNA, 120 bp, synthetic construct
  source 1..120: mol_type = other DNA
tcaggatcatggatgggttcaggaacaggaaaaggactttagtggaaaagctggtgaaatatgactgaagtctggaatgcagtcaaaaggactttagtggaaaagctggtgaaatatgac

SEQ ID NO: 12770 - DNA, 120 bp, synthetic construct
  source 1..120: mol_type = other DNA
taaaagtaagacttccatccacccaaggacaatataaagagacagaagagtcacaaggccactgctatgcttgtgcatttgtagaagcatattataaaaagggtggtagcatccaggcat

SEQ ID NO: 12771 - DNA, 120 bp, synthetic construct
  source 1..120: mol_type = other DNA
cattccacaaatatttactgaccagctactttgtgccaggcttgatctaagagcaaacaaaactaatactcttccaggagggaatggggaggagacaaatcacaagcaataagcatagta

SEQ ID NO: 12772 - DNA, 120 bp, synthetic construct
  source 1..120: mol_type = other DNA
catagatttccaacagcttataaaactctttaaaaagcgtacagagctgtttgggcaagaagggcagtttgaatcaggcacagcaacacagccttgtctttgttagaaggttagacgagt

SEQ ID NO: 12773 - DNA, 120 bp, synthetic construct
  source 1..120: mol_type = other DNA
aaatctgaagtgccaaaaaatcctaaactttttgagtactggcatgacaccacaagtggaaaattccacacctgtcctcatgtgacgggtcacagttagaatgcagtcaacctcaacaaa

SEQ ID NO: 12774 - DNA, 120 bp, synthetic construct
  source 1..120: mol_type = other DNA
aattatggtgtcctgccaatgctttagccaccacatccatgcccggaactttccttgatattttaccccattcaaatctgctctaaatgggtcctgaccaaacttgaaatataccctgaa

SEQ ID NO: 12775 - DNA, 120 bp, synthetic construct
  source 1..120: mol_type = other DNA
actgaacaatgaggccgctttctaggcatccttctcaaaaattgaagatgtggcagagctaccctttgtctgggcacggttggaaatactgtggttttaatctgtgatgaatacataaaa

SEQ ID NO: 12776 - DNA, 120 bp, synthetic construct
  source 1..120: mol_type = other DNA
ccatgactttctgacttcatctcttgtcacacatctccttattcgctccacgccaagcacagtggctttttcactgattcttaaacatgccaggtacactggcctcagagcctttgcact

SEQ ID NO: 12777 - DNA, 120 bp, synthetic construct
  source 1..120: mol_type = other DNA
actccaatttcgacttagctggattgaatgcggtcaataaggggttgcaccatgagctaaagtagaaaggtaaagtgatttaggcttctctaatatgctgtggaagtcagatcgactcaa

SEQ ID NO: 12778 - DNA, 120 bp, synthetic construct
  source 1..120: mol_type = other DNA
gcagagtctattagaagagagagacatgtatgcagtcaagtctaaccttagtgcattcagagtaatgcctgctgtaatgaaggttcatgtagatactgtcgctggcatatagcaaacagt

SEQ ID NO: 12779 - DNA, 120 bp, synthetic construct
  source 1..120: mol_type = other DNA
cacaattctcagcctcccgaagtgctggaattacaggtatgcaccaccacccttggccagttttactttttgtcctcactaaacagcagtttttttctacttactgaaatgtatctgttt

SEQ ID NO: 12780 - DNA, 120 bp, synthetic construct
  source 1..120: mol_type = other DNA
aggagctggcgtgagtctaatcaataggcggatcctacctgtgctacttcctgttatatctctaatttactctcctcatactaccaactatctagttcaggtgaccatctcatttctaca

SEQ ID NO: 12781 - DNA, 120 bp, synthetic construct
  source 1..120: mol_type = other DNA
gcagaaacctcctatttctttcagccctaggtctggatttgattaggccactgtctaattttcactagacctactttaacttaggggtagttccaggcgtaagaattgacgagtgttaat

SEQ ID NO: 12782 - DNA, 120 bp, synthetic construct
  source 1..120: mol_type = other DNA
taggtctttgatgctctgtttatttttcttcattcttttttcattctgttccttagcctggataatctcaattgacctatcttcaagttcactgatttttgtgccagctcaaatgtgcag

SEQ ID NO: 12783 - DNA, 120 bp, synthetic construct
  source 1..120: mol_type = other DNA
gtctcgtttgcagacactgggatgtcataaccaagtgagaagtttttcagagtttctctgaaggggctttcgagatgaacagttattttcttgttgaatttgctcctgttcgaggttgga

SEQ ID NO: 12784 - DNA, 120 bp, synthetic construct
  source 1..120: mol_type = other DNA
ccctggagtactgagctctaatgtagaactgggatgtgaatctagttctcaaatccaagttctttttctacagtatgctttctaattggaagtggcttgagtcaagggaacacaaagagc

SEQ ID NO: 12785 - DNA, 120 bp, synthetic construct
  source 1..120: mol_type = other DNA
cccctcatttgttctctgtgccattatatacatgatgctgagattctgcttagaagtaagacacaagtccacatttgttccactacaattgtgagacattgctgtggctcaaactacggt

SEQ ID NO: 12786 - DNA, 120 bp, synthetic construct
  source 1..120: mol_type = other DNA
ttctgtgtgtgtgggaggggggcgggagggggtgtttctttttgttttttctgttgtcatttctgataattttgttttggaagctggacatcatatgtgaaaaactggaaagattgtagg

SEQ ID NO: 12787 - DNA, 120 bp, synthetic construct
  source 1..120: mol_type = other DNA
tatttgtgatgactgggggaagaaaacaaaaatccaaggaacaaaaggggaaaagaacaagtgtctgtcccacttttaaggagcactgttgatgatttcgcccaataactgccactctca

SEQ ID NO: 12788 - DNA, 120 bp, synthetic construct
  source 1..120: mol_type = other DNA
cctgagcagcataagggttatctacgtatctcttcattttcccattcacacctattccttccagagctattgctcatctctgccccttcaggaggaattttcagagggaattatctttac

SEQ ID NO: 12789 - DNA, 120 bp, synthetic construct
  source 1..120: mol_type = other DNA
aaaagcctttaattctaagcaaagcataaaaaaatgtgttggcttactatccattcagttgaactcctgttctcattgggttttaatagatcaaccaatcttttatttgtaagctgatcc

SEQ ID NO: 12790 - DNA, 120 bp, synthetic construct
  source 1..120: mol_type = other DNA
acactgctcttccttctcttggtgggtcacaccagccttctagtcaattttgatgagagaacctggataactctgttgctggcgaaggattcacacggttattgtgtttgtttttctttt

SEQ ID NO: 12791 - DNA, 120 bp, synthetic construct
  source 1..120: mol_type = other DNA
caaagacagagctaggcaggttgcactggatccttcaaaccagtttctctggaaaaatctgaattactcagtaaaccctcagttgcccctgaggtaaatcaactttgaaatacagtagag

SEQ ID NO: 12792 - DNA, 120 bp, synthetic construct
  source 1..120: mol_type = other DNA
cttctaggatggtattgtaaatctgaagaataaaaaagacagcagtttagcaattggattttttacccactctgagaggaccctacctgcatggagagtgacacttgtatctgggccctt

SEQ ID NO: 12793 - DNA, 120 bp, synthetic construct
  source 1..120: mol_type = other DNA
agtaaccaggcttctaactcctaccaattgataaactcatgtaatgccttttgctgtgattattttgccttattaattttatagtcttaattttcttgtgtttttgtctaaaactgcttc

SEQ ID NO: 12794 - DNA, 120 bp, synthetic construct
  source 1..120: mol_type = other DNA
tctgtgcccttaatcacaaaagctctgctacctctcacggcatttccaacaaaatctctgtctttaccgtcccaggaggatgcttgaaattcaaatactattctcacagatgtttgtaca

SEQ ID NO: 12795 - DNA, 120 bp, synthetic construct
  source 1..120: mol_type = other DNA
ctactacaactttatcactacaaaaaaagtcaaactattgaaacagcaatattcaatttgacaaccaaaatgttgaacaccgagttaagtcttagaagcaatatagaaaaagcatacatg

SEQ ID NO: 12796 - DNA, 120 bp, synthetic construct
  source 1..120: mol_type = other DNA
actctaacagggcagcaaaaaaaaaaaatggtcttaaaagcaagggaaaacttcagggtcatggttacaggaaggagaaggtaccacatgagaaaggagcctcaacactgttggaaacat

SEQ ID NO: 12797 - DNA, 120 bp, synthetic construct
  source 1..120: mol_type = other DNA
cattaggattcctaatttccgctctccatgcttcctttggctttcttgtgtgactatggaaaagccacttctctctaggccttggtttctccatccagaatataaaaggggttgaaatca

SEQ ID NO: 12798 - DNA, 120 bp, synthetic construct
  source 1..120: mol_type = other DNA
cagtacggaggccaggaatgagtgcacttgaccagattgttgacggaagtgtcataaaaatggacttaaatgctgataagcagctgtttgggttccacacagggtgcgagctcaggatgc

SEQ ID NO: 12799 - DNA, 120 bp, synthetic construct
  source 1..120: mol_type = other DNA
ttataaaaataccacacagggtttttgtggggttatctgaaaacggtttgaaaccattaaagaactggccatttaactaataggtattcaagtcatgggacctccgttacccagcctcgg

SEQ ID NO: 12800 - DNA, 120 bp, synthetic construct
  source 1..120: mol_type = other DNA
ctcccttcacttatgctggatatctcttgcaaccggatgagcttcactaaagcagagtcatttggacctggattcgaatccctggttttccactttttagctgtgactttgagcaattat

SEQ ID NO: 12801 - DNA, 120 bp, synthetic construct
  source 1..120: mol_type = other DNA
tcataggtctagaggccagaaaagttagtaggtggtggctctgttcggtgctggaaatggaggccaggatgaactaagaagcaaactaaagatacttgtaagataaggacgtgtaggccg

SEQ ID NO: 12802 - DNA, 120 bp, synthetic construct
  source 1..120: mol_type = other DNA
gagactgctcttaaataatgctccagatttcaagccacttcttcctggaccatgagagagctccctaatgttgtatttatttttcctaggtccatggctaatgaaacacagaaggttggt

SEQ ID NO: 12803 - DNA, 120 bp, synthetic construct
  source 1..120: mol_type = other DNA
atacagataactcctgtcttagtcggccaggactgccatagtaaaataccatagactgggtgacttaacaggaatttattttctcaccattctggaggctggaaagttgaagatccagat

SEQ ID NO: 12804 - DNA, 120 bp, synthetic construct
  source 1..120: mol_type = other DNA
tctgccggttgcctccagggctctcctagctcagcttccacttagagcccacttcctgtcttctgcaaggagcaggagcagggattgcaacctgagaatctaattgttcttaaaaagaat

SEQ ID NO: 12805 - DNA, 120 bp, synthetic construct
  source 1..120: mol_type = other DNA
ttgtgttacctgttgtgcctaccatgcccttccccgccgtggatgcacaggtgccccaccttagctgccccagatgctgtttatccttgatagtcaccttttaagccttatacaggtcta

SEQ ID NO: 12806 - DNA, 120 bp, synthetic construct
  source 1..120: mol_type = other DNA
accagctctatgaggaaggtgccgctgttgtcatttccatttctgcactcgtggaaacaagcgtagtgaggccagcctgagccacagagctgcaggtgggggagacagctggaaccctgg

SEQ ID NO: 12807 - DNA, 120 bp, synthetic construct
  source 1..120: mol_type = other DNA
gattagtttgcttaaaaaaaaaaaaacaaaacaaaacacaaaccgtaagcactggcgctcatgactgatcatcctgtatccacgcacgagctgcacgaaggccgcgcggtcactctggct

SEQ ID NO: 12808 - DNA, 120 bp, synthetic construct
  source 1..120: mol_type = other DNA
aaggacctgatcattgccattggcagcatggttcaatggctgcaaatggatctgatggagagcgtgtggctttgggaggagtgtgccgccttccgcagtgagcagcgaggctgggaccgg

SEQ ID NO: 12809 - DNA, 120 bp, synthetic construct
  source 1..120: mol_type = other DNA
ggccaggggacacccttgaagacagctctttccctcatgccacagatgccatgaagcacctggcaagaggcatggtggcctctgccctctgctctaagccgggtccttcctagggtccat

SEQ ID NO: 12810 - DNA, 120 bp, synthetic construct
  source 1..120: mol_type = other DNA
cacctccagccgccatccaccagacgccagcttccccgctgccctgaacttcctccagcgcaccaggccttcctctgtcctgtctgaggatttgctcatgcaacgtgctgtggccaaaca

SEQ ID NO: 12811 - DNA, 120 bp, synthetic construct
  source 1..120: mol_type = other DNA
ttgtccagcatgcgacataagattgaatccaagccttttaagatagagccgcctgctctttagtgaccatgaagccaagcctgtaataattactcttctgatagcccaagacaattgtat

SEQ ID NO: 12812 - DNA, 120 bp, synthetic construct
  source 1..120: mol_type = other DNA
taaggtaacacaagtgtcctcagctggtgctgtgctgggggtataggctgggctgtgcacccctggggaggaggctggagtcacttggctacttctcaccctcctctccacaaaggagga

SEQ ID NO: 12813 - DNA, 120 bp, synthetic construct
  source 1..120: mol_type = other DNA
cctgacatgggacattgctgtcctgcctcggctttgtgcattgggagccactccctttccctcagcctctcaggccctggcgtgccttgatgttagagaatgctgtgggatgttttggtt

SEQ ID NO: 12814 - DNA, 120 bp, synthetic construct
  source 1..120: mol_type = other DNA
ggtcttatagaccctaccccatggaagtgggtctcaacattacacaaccccctcttgggcccgtggacagttgctgtcctctctgttttctctctttgtgcctgtgccaccctcagagaa

SEQ ID NO: 12815 - DNA, 120 bp, synthetic construct
  source 1..120: mol_type = other DNA
aagtaaccatttgcacagcagctaaatgctcaccagcatacctgctgagctgtgtgggcactggcagagaaactgaggaaagctgccaggccccatggtgtcccaggccttccctcccgt

SEQ ID NO: 12816 - DNA, 120 bp, synthetic construct
  source 1..120: mol_type = other DNA
aggcgcacaacctgatcgacaccatcacgggcatgcacagcgtggaggtcagcggctcccaggtgtgtgggcctcccctccccgggccagggcctgctgtgacgtaaagggacttggatg

SEQ ID NO: 12817 - DNA, 120 bp, synthetic construct
  source 1..120: mol_type = other DNA
tggtggccccctgcgtgggcctctgagaggcaggcagcactttggttcccacctctggcccgggctgtggcggggtggagctgcatgccattcatgtcctaggcacatcatggtgtgtgc

SEQ ID NO: 12818 - DNA, 120 bp, synthetic construct
  source 1..120: mol_type = other DNA
tccgtgataggcatagttctgtgggttgttcgaagcacttgcatatgcggttttgtgtgccctgtgagaacgcagtgctggtatttgaatccttgttgatagacgcataaactagagctc

SEQ ID NO: 12819 - DNA, 120 bp, synthetic construct
  source 1..120: mol_type = other DNA
tgtgtttgttctcagggacggagctgaagaccatcaacgactttctcttccagagccagatcgacaacatcaacctgttcaaggtagaggtttccacctttccacattccacatccaatt

SEQ ID NO: 12820 - DNA, 120 bp, synthetic construct
  source 1..120: mol_type = other DNA
ctctgttgtaggcggcatgccatgtgctgtgctctgagctaggatatccttttgccccagcaaggaaagcaaacaggcccgtggaggtgacttcaggagggtggcgagcacaggcttccc

SEQ ID NO: 12821 - DNA, 120 bp, synthetic construct
  source 1..120: mol_type = other DNA
cagaaggtagcactgcgttgtgctgcctgggtggtagaagtggtgttttttgttttgtttttaagattatagcttgctcagtttgcactcatgcctacagctgggcttggtttttgcagg

SEQ ID NO: 12822 - DNA, 120 bp, synthetic construct
  source 1..120: mol_type = other DNA
ggcaagcagtggaggtggatgggaggagatcgaagggctgggatgggggtcccgtgaccagggtaagcagtggaggtggacgggaggagatcgaggagctgggatgggggtcctctaggg

SEQ ID NO: 12823 - DNA, 120 bp, synthetic construct
  source 1..120: mol_type = other DNA
gagatgggggcttgggagagatgcattatcagtcctgttctctcctggggccccaagccagaaagggtcagctcgagcaggcccagtggtgtccgctgggtgacactgctattctctcac

SEQ ID NO: 12824 - DNA, 120 bp, synthetic construct
  source 1..120: mol_type = other DNA
tcctttccccacactggattgattcatttctccaagctgctctggtttcttgtaatggggaatgacatttagaagtcaagctgtgggtgctagggtgtttgtcgtgctcctggggcgttt

SEQ ID NO: 12825 - DNA, 120 bp, synthetic construct
  source 1..120: mol_type = other DNA
taaataagcaaaaacgtgtcttcatttttccctttcctgttttatttacacagaaggcatcttagtcagttgtctgaccatcgctcctctagtgggctgcgtggttctctgttggacaga

SEQ ID NO: 12826 - DNA, 120 bp, synthetic construct
  source 1..120: mol_type = other DNA
ccgcttagagccacacagaatgagcggcgtcgatctagatgcttatggaggaaggtctgagcttccccgcccctcacgccttaggctgcgaaatatgtattcataaaacctccaggcatc

SEQ ID NO: 12827 - DNA, 120 bp, synthetic construct
  source 1..120: mol_type = other DNA
catattccaggtgcatccaggtgcgggcgtcatgctgggcttgggtctgagatcgtgtgggggtggcagctggaaacgttgtgggtgtcatccaagttttggctcagcaactcagcgtct

SEQ ID NO: 12828 - DNA, 120 bp, synthetic construct
  source 1..120: mol_type = other DNA
agcacttaaactgagtatatgtgaaagccaaaaacattattcttactgaagacctgtcaaacaaagccacaaaacagctccttttattttctagtaagactagatttattcaatacccta

SEQ ID NO: 12829 - DNA, 120 bp, synthetic construct
  source 1..120: mol_type = other DNA
ttcaatgaagtcacagaagtcatgtaacacaaacaaaagtcgattatatttacacactcagcaagccctctaagaaatgtgccccaagaagcattaacctttgttttgtgccatcctgaa

SEQ ID NO: 12830 - DNA, 120 bp, synthetic construct
  source 1..120: mol_type = other DNA
tgtctttgtttttaaaaagctccccaagtgattctaatgggttcgtaaggttgagaaccactgcttgagagactcttgcacatgtgacttaggataatgctactcaaattgtacctgggg

SEQ ID NO: 12831 - DNA, 120 bp, synthetic construct
  source 1..120: mol_type = other DNA
ctatgaacatttgtgtgtaaatctttatgtgatcacgtgctttcatttgtcttggataaataaatacctaggagtggaatggttggattgcatggtaggaatatgcatatagtaatttat

SEQ ID NO: 12832 - DNA, 120 bp, synthetic construct
  source 1..120: mol_type = other DNA
ttctcttgtgatatgaatcaggcagtagaattacacatttttatttctgccttgactgttaagaagctctgcggctatgcttaagtataaaaaaactaacctagatttttttcatctaat

SEQ ID NO: 12833 - DNA, 120 bp, synthetic construct
  source 1..120: mol_type = other DNA
gggtgacagaacaagaccctgccccctaccccctcctccaaaaaaagcatatttaaatattcccagaatccaaatgttgaacatcatttggacacagcttcaaaatggtaccaattcttt

SEQ ID NO: 12834 - DNA, 120 bp, synthetic construct
  source 1..120: mol_type = other DNA
tgaaattcagtattatgcacttacagcatatcttgatttgaactagccacatttcaaatgctcaacagcctaatttcgctaagggctactgtgttggacggtgcagttctagaacttctt

SEQ ID NO: 12835 - DNA, 120 bp, synthetic construct
  source 1..120: mol_type = other DNA
accccctaaggagacattcactgtcttcattgttaacgttgcattcattcatcagatatttcttgcacatttactctatgccattcctattgcgatgtggaggatatggcattgagcaca

SEQ ID NO: 12836 - DNA, 120 bp, synthetic construct
  source 1..120: mol_type = other DNA
taaagcacatggaatgagatagttcccaggaaaactctttgtcaaggccagcccatgtgggaaaagtgtttctatgcttagtcttgtaactatgactgtttttgttttatggggtcaggg

SEQ ID NO: 12837 - DNA, 120 bp, synthetic construct
  source 1..120: mol_type = other DNA
aatggcaacagcatatagagcatcctcaggctaaactccttttgaacactttctcacacccacacctctgcacactgctggtagctagcatgctatttaagaaaagtgtttttttaatct

SEQ ID NO: 12838 - DNA, 120 bp, synthetic construct
  source 1..120: mol_type = other DNA
ttctgcaaccagactattgattattcacagttccttttaattttcagttcatcattggcctttgtttcatggtcagcataccactatgtgccatgtgttcactgtgacgtggacagatcc

SEQ ID NO: 12839 - DNA, 120 bp, synthetic construct
  source 1..120: mol_type = other DNA
ggcaaaccacctcacaggaaaaaatgggcaaagttataaacaaatattttatagaatatgataaacaagcaataaatatgtagatttcaagcacgctagtaaacaggtaaatgctaatta

SEQ ID NO: 12840 - DNA, 120 bp, synthetic construct
  source 1..120: mol_type = other DNA
cagtactggaaagaacactcagtaacttcatctatttatggcaccaagcagatgaactatgttttgataaaaatgttcagaaagttttaatatattatgaaggcccagcacaaccaccca

SEQ ID NO: 12841 - DNA, 120 bp, synthetic construct
  source 1..120: mol_type = other DNA
aagcccacagctaacatcatactgaaagcttttcttccaattcaggaacaagacaaggatgcccactctcacacttctacttaacataggactacaagttctagccagagcagttagaca

SEQ ID NO: 12842 - DNA, 120 bp, synthetic construct
  source 1..120: mol_type = other DNA
caagcaccctattccacaatgatcctttccctcctcatgcatgagcctcatctttgaatttagccccgttaccgtgtcttatgtagtgtttatctctcaatcagattttacattttcaga

SEQ ID NO: 12843 - DNA, 120 bp, synthetic construct
  source 1..120: mol_type = other DNA
tttggctacaacaaggggtacataaaaaaaaagaaatttgtaaaatgtatcagaagacacagtgttatgggagagaatgatagaaaaatatggcagtactaaattgggggtggggaagaa

SEQ ID NO: 12844 - DNA, 120 bp, synthetic construct
  source 1..120: mol_type = other DNA
cattgagactttttatcatgaattttgtcaagtgctccttccatgtctcttgaaattatgatttttttaaagtatgatgttagctataggtgtttttgtaagtgtcctttatcaggttgt

SEQ ID NO: 12845 - DNA, 120 bp, synthetic construct
  source 1..120: mol_type = other DNA
gcccccatttcacatatttattggccatttgggtatctgcttttatagagtgtctattctttcccattttccaattggacagtttgcctatttctgattggttcataggaacgtccagat

SEQ ID NO: 12846 - DNA, 120 bp, synthetic construct
  source 1..120: mol_type = other DNA
tgtttggttgtagatttagaacccactgatatggagggctggctgtatttaatgaaaaaaaaaaaccccacataaaagtggaccacgcagttcaaaccgatattgttctagggtcaactg

SEQ ID NO: 12847 - DNA, 120 bp, synthetic construct
  source 1..120: mol_type = other DNA
agaactgaagttgctgtaggtagcaaaggcataaacaaaacataaagcaaacagccataaacaaaagagagttttcccagagaaaatgacaatctgcttgagagggctgacctcatgaca

SEQ ID NO: 12848 - DNA, 120 bp, synthetic construct
  source 1..120: mol_type = other DNA
tctattttaggacatggtgaactataccgaagagggaaaagaggacgtggcaaatccttgtttaaaactccatgccttaaagctttggctcagaaatgacagggattggttccactctaa

SEQ ID NO: 12849 - DNA, 120 bp, synthetic construct
  source 1..120: mol_type = other DNA
tctgatctaaactcatatttactgtattggcaccagccacgcattttcctttctcttgttctcattactttctcagccccctttttaataaattccaagctccccagacttcatctctgc

SEQ ID NO: 12850 - DNA, 120 bp, synthetic construct
  source 1..120: mol_type = other DNA
aagtacctgggactacaggtgcatatcactgtgcccagccagaaccctgagtaacaagtagtgggtctgttactcctaaatgtacctcaggatgtaactaaactgaataagtcatttaaa

SEQ ID NO: 12851 - DNA, 120 bp, synthetic construct
  source 1..120: mol_type = other DNA
tatatacgcatgtatatatgcatacatatatgtatacacgtgtacatatatgtatacacgtgtatacatatatgaatgcatacatatatgtatacacgtgtacctatatatgtatacacg

SEQ ID NO: 12852 - DNA, 120 bp, synthetic construct
  source 1..120: mol_type = other DNA
gaaagaaaaaagaaaacaaaggaaagaaagaaagagaaaaagaatgaatgaaaaaaagaggaagaagaagaagactaggaggaggaggggaaggaggaggagggggaggagagggagaaa

SEQ ID NO: 12853 - DNA, 120 bp, synthetic construct
  source 1..120: mol_type = other DNA
ctgtctttttaaaaccgattcatagattctggataataatgttttggtggtaggttatacgtattgaaaataccttcccttgaacatcacactctggggactgttgtggggtggggggag

SEQ ID NO: 12854 - DNA, 120 bp, synthetic construct
  source 1..120: mol_type = other DNA
ttgacatgtctccattgtagcaacttgtattttcacttctagtatcatgattatatcccctgtgtaatttggaaattgattttagcattaggaaatttcctagtttcagttaaaatgaat

SEQ ID NO: 12855 - DNA, 120 bp, synthetic construct
  source 1..120: mol_type = other DNA
attgacagtaagattgccacagttgccgcgtcctgaggacatggttacttccttttaatacctatcctgtctcattgtgagaggattaacaactgtgcataaaaccagttgttctacatg

SEQ ID NO: 12856 - DNA, 120 bp, synthetic construct
  source 1..120: mol_type = other DNA
ttttgtcggtgccattcacagtgacatgagttgctgttggccaaagttgtgtaacactggtctttctttccttctctcttccctcctgaaccatgtaaacatatatctatctgattgttc

SEQ ID NO: 12857 - DNA, 120 bp, synthetic construct
  source 1..120: mol_type = other DNA
ttctaagtccacattaaggaaacaacatacctaaaagcacctgatacaactgtactacattccccacaggaaatcatttctactattctttcaatttatccaaatctttctacccaacag

SEQ ID NO: 12858 - DNA, 120 bp, synthetic construct
  source 1..120: mol_type = other DNA
cactcagggtagctggggatggcgtacctgatggataaaggagatctggacatggctcctaaaagtggatcaatacattgtgttggcaaatataagataagtttctagacttcaaagaca

SEQ ID NO: 12859 - DNA, 120 bp, synthetic construct
  source 1..120: mol_type = other DNA
tagtcactttattgtactattgaacattagaacttattcctcctatctaactgtatgtttgtacccgttaaccagcctcccttcatcctccccttctcccacacacccatatcctcccaa

SEQ ID NO: 12860 - DNA, 120 bp, synthetic construct
  source 1..120: mol_type = other DNA
gcttctatataccagatgtgaaatgatttcatattcagaagatgctctctagctgtctctcagtagtcatcattcaacaaacactcattaagtgtctgcagtgtgccaggccttgtgctg

SEQ ID NO: 12861 - DNA, 120 bp, synthetic construct
  source 1..120: mol_type = other DNA
actggacaatcagctgaagtgacagggacaactgaaccatcagctgggttgacagagacaactggatcatcaactggggtgacaggggcaactggaccattagctggagtgacagggaca

SEQ ID NO: 12862 - DNA, 120 bp, synthetic construct
  source 1..120: mol_type = other DNA
ggactatcagctggggtgacagggacagctggactatcagctagggtgacagagagtacaggactatcagctggggtgacagggacaactggactatcagcaggagtgacagggacaact

SEQ ID NO: 12863 - DNA, 120 bp, synthetic construct
  source 1..120: mol_type = other DNA
ctggggtgacagggacaactggactatcagctagggtgacagagagtactggactatcagctggggtgacagggacaattggatcatcagctgtggtgacagagacaactagactttcat

SEQ ID NO: 12864 - DNA, 120 bp, synthetic construct
  source 1..120: mol_type = other DNA
aataagtatacagcctgtgtctatttatttgcttaatactcatttcccacttcatggtaatgaggtaatgacccaccactgccccatccctttcttaatagctaccagtggggcattctc

SEQ ID NO: 12865 - DNA, 120 bp, synthetic construct
  source 1..120: mol_type = other DNA
attgtccccacttgctcatgatgattctgcaaagtactatcacctgctgccatctctcaaacgtatttattacacttcctgtttacttcctgtgtttcctctcccacaaatgtaaatcac

SEQ ID NO: 12866 - DNA, 120 bp, synthetic construct
  source 1..120: mol_type = other DNA
tctggagaggagagctgtagtagctacagctctgaaatgatttccttttgagaagagcgtagtctgcatatcatcatagtgttgacttgtattcagcacagaacccattaggttgtcatg

SEQ ID NO: 12867 - DNA, 120 bp, synthetic construct
  source 1..120: mol_type = other DNA
atctgtgctgtgtgagcagcaggaagctacagagacttccgaaaacaaaacaaaacagtgttagctttatgatagtgctcagcattcttcactttaaacaatgtttttctgacctctgac

SEQ ID NO: 12868 - DNA, 120 bp, synthetic construct
  source 1..120: mol_type = other DNA
tggttgaaagattctgcagatgtgttaggaatcacacagaccctataatgtccaagaaagaagagggtctgtctcttttgaagcttcatcttcaaaggaagcccagcttttaacagaagc

SEQ ID NO: 12869 - DNA, 120 bp, synthetic construct
  source 1..120: mol_type = other DNA
ctttagctttctaagaagtcatttaggcacagatgacgacatctgaaaattaggcatcattttctttatccataagcacaatgtcaatggcaagttttcttttttctttttattttttta

SEQ ID NO: 12870 - DNA, 120 bp, synthetic construct
  source 1..120: mol_type = other DNA
gttgaaagccattataaatgacttttttttcacattgtcttactgtggagattagggcttagagaaattaagcaatttacataagatcctatgacacagatcaaagctactcaaaatagt

SEQ ID NO: 12871 - DNA, 120 bp, synthetic construct
  source 1..120: mol_type = other DNA
gttattcaaatcaaagcctttttcttctcggttcgtaataaaatgatttgctttcacccagtgttgcttcgttcatgtcttaaaatgagatattaaggccgggcgcggtggctcacgcct

SEQ ID NO: 12872 - DNA, 120 bp, synthetic construct
  source 1..120: mol_type = other DNA
ttgaggtcagcataaaagcaccctatggatgtggcgctccctcaccacacttgtaacttcttcccactcctcccacccctggagcaggaaaagaaaaaaaaaaagaaatatatatatata

SEQ ID NO: 12873 - DNA, 120 bp, synthetic construct
  source 1..120: mol_type = other DNA
atttgagggcagcgtcagcgtcttatgtcttatttgtccacacagcacctggcacagtgttttgtgtgtaacgtgagctaaattgcaaagagaagctaatatcgtggtatcaaatttagg

SEQ ID NO: 12874 - DNA, 120 bp, synthetic construct
  source 1..120: mol_type = other DNA
tgtctggagattgattttgctgagtgctaataccaaatcatgtagcaacatagtttcacctactaaatattgccagaccatattgttgaagtctgtgctgccacggtcacctcatcagga

SEQ ID NO: 12875 - DNA, 120 bp, synthetic construct
  source 1..120: mol_type = other DNA
agatgataacatagttcagcatgtcccacagaaccctaactgcacagaaggatcccaacaataaacacatttgaaaactgctaaatattaggcactcttcatggggattcagactagcac

SEQ ID NO: 12876 - DNA, 120 bp, synthetic construct
  source 1..120: mol_type = other DNA
gagattaaagtggctttagtaagtaattcaactttctttactgttcactgactcaactctcttcttcaaacataactgcagaaaaaaggggggaaaagggctgggcacggtggctaatgc

SEQ ID NO: 12877 - DNA, 120 bp, synthetic construct
  source 1..120: mol_type = other DNA
ttttgagcacttagtgtgtgcctgaacacggtactaaacactttgcattccatttctcatttagtcctcacagtgccatgaggtaggtgttagtattaatttcattttacaggctcaggg

SEQ ID NO: 12878 - DNA, 120 bp, synthetic construct
  source 1..120: mol_type = other DNA
aatacaggcaactgacctaccccttggctctggtattgatgctccctgatttgattgattaaacatgtctttatcaagttctcacaatgggggaacttacattccaggtgtgaagtttgg

SEQ ID NO: 12879 - DNA, 120 bp, synthetic construct
  source 1..120: mol_type = other DNA
taactgactggcagacatggtgtcaagtaccatgaaagttcagacagatctcactctaaatctgttaagtgaaatagcatatgtacctaaaaaaagtaattcggacgggcgcggtggctc

SEQ ID NO: 12880 - DNA, 120 bp, synthetic construct
  source 1..120: mol_type = other DNA
caggagtggcagaaagctataaaaccataattggggactagaagaccaacaatttctataggaatagtccagaatgtctagcattcaagcactaaaaaaatagtaagaaatgacagatac

SEQ ID NO: 12881 - DNA, 120 bp, synthetic construct
  source 1..120: mol_type = other DNA
agcttaacacaaaggacagacactttgggggagctttatggccccatacatcacccaagaaaccagagtacctcccctgggtaacataaggcaagcacaaatcccaccactgctactgta

SEQ ID NO: 12882 - DNA, 120 bp, synthetic construct
  source 1..120: mol_type = other DNA
attgaggaaaacttcccaggccttactagagatttagatgtcaaaatacaagaagctcaaagcactcctgggagacttattgcaaaaaggtcatcatcagtgcatatagtcatcaggctg

SEQ ID NO: 12883 - DNA, 120 bp, synthetic construct
  source 1..120: mol_type = other DNA
tcacttttctctctccactcctatacataaagtcatgaagactggatagtgttccaacaggccaagctaagtgacgggcattccaggtgcaaagaacagcatagataaaagcatcaaaat

SEQ ID NO: 12884 - DNA, 120 bp, synthetic construct
  source 1..120: mol_type = other DNA
gggtagatattggaattcaggaaggctgagtgggctggaattcacagggagagtacctgataagacaaagctttgtagagaagaagttccagaaatctacataaatcgttccttgagttt

SEQ ID NO: 12885 - DNA, 120 bp, synthetic construct
  source 1..120: mol_type = other DNA
aagcactctatagtcacaattattcttgcctaggtttaaagctacttaaaatcctttttggacttaggcagactaattaacaaataaatgaatgggattcctaacctaacaccaggtact

SEQ ID NO: 12886 - DNA, 120 bp, synthetic construct
  source 1..120: mol_type = other DNA
tggatccccacagttcatttagaaaatgcctcaaagttatggctcttgcagcaggtttaacagattaaacattaagtgttctagctccctctatttcaagtatcaaagaaatatgaggct

SEQ ID NO: 12887 - DNA, 120 bp, synthetic construct
  source 1..120: mol_type = other DNA
tatcctaggctttgaaacattccaaaggaaaagttcaaaaaaatattttgagcatctggaactgttttgagaagtggaatactttataagcctcaaggcagtcattcttaacttcattag

SEQ ID NO: 12888 - DNA, 120 bp, synthetic construct
  source 1..120: mol_type = other DNA
atgcccgttgattagtatttctctatttccccgtccagaaccagacaaccacccttgtactctctgttctgtgcatttgactgttgtagatacttcatataagtggaatcatgctgtctt

SEQ ID NO: 12889 - DNA, 120 bp, synthetic construct
  source 1..120: mol_type = other DNA
aacatgatgccgagtgcttttattcatgttacacagatgaacccagccctcttaacagaaaaaagcaaagactgcccttgcatgaaaacaaggtgacttagttccctaaaatccagtggg

SEQ ID NO: 12890 - DNA, 120 bp, synthetic construct
  source 1..120: mol_type = other DNA
catggtaacgtgagatcagaaaagacaatgaactgtagacatttgctccttgtgagcctaagcgtaatattgctaagtgcagcactaaggagatgtgtatagtttgtcttgtgcactgca

SEQ ID NO: 12891 - DNA, 120 bp, synthetic construct
  source 1..120: mol_type = other DNA
tcatattctggaaaagtagtatgcagtcattgtggaacagggcttttaaaagttgctcatgtcctgcactgaaccaattgaataacacagcaaaagagccaccagtatctgacctggctt

SEQ ID NO: 12892 - DNA, 120 bp, synthetic construct
  source 1..120: mol_type = other DNA
tcagtagcctctgaaaaagtaatttattctctctgtgctttgttttctccatctagtcagtgaggccaatcatacttaccaccaacctccatcaagacaaacttctgagagaaaagaatc

SEQ ID NO: 12893 - DNA, 120 bp, synthetic construct
  source 1..120: mol_type = other DNA
aacagttgcaaaaatgatgcggagtaccttgtacccttcaacaagtttcccttaatattaatgctttacataatcacaattcaattatgcaatcaggaaactgacatttgtgcaaagaca

SEQ ID NO: 12894 - DNA, 120 bp, synthetic construct
  source 1..120: mol_type = other DNA
tttcccctaattattaaaatgatgaattatttatttctaaatataaaacaaatggttaatgtctaagaaagttcagaaaagctcaaagagaaatcaattctccatacattcatgacccac

SEQ ID NO: 12895 - DNA, 120 bp, synthetic construct
  source 1..120: mol_type = other DNA
agttcccagtgttaacagttggtgagagcacacatttatggtagacagtgtatcgctgctgtgatcaccatcaccatcatcatcatcatcatcgtcatcatcatcatcattaatattccc

SEQ ID NO: 12896 - DNA, 120 bp, synthetic construct
  source 1..120: mol_type = other DNA
ataatgtatattctgtaataagagccatctatggcaaacccacagctaacttcatgcttaaggggcaaaatatggatgcatttcccctgagaaccggaacaagacaaggatacccactct

SEQ ID NO: 12897 - DNA, 120 bp, synthetic construct
  source 1..120: mol_type = other DNA
tgaatgccaagaaagatcttttgttttaatgaatagggtggtgggtgtagatgcaaactggagaagctcaggaacctaggtgagtattcctgcctatgcagaaggttgagaagacttgtt

SEQ ID NO: 12898 - DNA, 120 bp, synthetic construct
  source 1..120: mol_type = other DNA
tttgaggaaactatcccaaagccccacattaataatagcactctctctttcaatgtcttaaagttgttgctgtgactttcaaattttatttttccataggccaaggatcccaactgtgcc

SEQ ID NO: 12899 - DNA, 120 bp, synthetic construct
  source 1..120: mol_type = other DNA
gactaccttgatttctcagcagaaaattagaggcctggagagaagggagtgatgtattcaaagtgctgaaagagaaaaacaacaacaactggtagccaagaatactatacccagaaaagc

SEQ ID NO: 12900 - DNA, 120 bp, synthetic construct
  source 1..120: mol_type = other DNA
tcctctaccgatacatggaaagttctccaggatagaacacgttaggccacaaaacaggtctccaaaagttttaaaaattgaaaccatatcaagtgtctgctcagaacacaatggaattaa

SEQ ID NO: 12901 - DNA, 120 bp, synthetic construct
  source 1..120: mol_type = other DNA
ttttgctataagtccctcatgtctagctgctaaataaccattttcttggtcatgcataattgatcagaataaagcagtattgccattgtattcattgggacaaacagtctcaacatgcac

SEQ ID NO: 12902 - DNA, 120 bp, synthetic construct
  source 1..120: mol_type = other DNA
ctacactttacatcaaatggacctaacagacatataaagaacatttcatccaacagcagcagcatactcattcttctcaagtgcacatggaacacactccaggatacatcacctgttaga

SEQ ID NO: 12903 - DNA, 120 bp, synthetic construct
  source 1..120: mol_type = other DNA
atttaaaaataatgaaatcatatcaagtaccttttctaaccacaatggtattgctatggtttaagtgtatacgtctttccgagattcaaatgttggaacctaatgcataatgtgatatta

SEQ ID NO: 12904 - DNA, 120 bp, synthetic construct
  source 1..120: mol_type = other DNA
gattctccccagagcctacacaaagaacacacccctgcttgattttagccctatgagacccatttcagggtctgacctctataactataaaataataagtacctgttgctttaagacact

SEQ ID NO: 12905 - DNA, 120 bp, synthetic construct
  source 1..120: mol_type = other DNA
actgcgcccagccttattttagtttttttaattctacctctgtcccattattttcatcagacagcttagcctggctctgcacagagatggagacctgccactacttaagctttggtttta

SEQ ID NO: 12906 - DNA, 120 bp, synthetic construct
  source 1..120: mol_type = other DNA
gaatcaggctttttataggagagtatctgttaggtatctttgaggagacttgtagaagcctcaggcatagtggataacctttttgagaaaccgaacaggtagatgctggttgtcccatta

SEQ ID NO: 12907 - DNA, 120 bp, synthetic construct
  source 1..120: mol_type = other DNA
gaagaatgattggatgacagacaatttaggattatgcttgctttctcatcacaatcaatgtggacgattgagggggccttgaaaattagatggatgagaatgtcgctattcttttatgaa

SEQ ID NO: 12908 - DNA, 120 bp, synthetic construct
  source 1..120: mol_type = other DNA
atggaaattattttgtaacccctgcttctagccttggccagggaaaacgtatctggtgtgtatatttttctaaaagttctgtgggtgattctcatgtgaagtcaagattgagctccctgc

SEQ ID NO: 12909 - DNA, 120 bp, synthetic construct
  source 1..120: mol_type = other DNA
cccagggctgtatttcaccaactgcctgtaagatatggataggtttgtaggtgggagtttaaggaaggatttgtgaatctgacaaaagctgcttattgtatcctatagattcacaatgca

SEQ ID NO: 12910 - DNA, 120 bp, synthetic construct
  source 1..120: mol_type = other DNA
cggtgaaacacttataaccttacatatatgcaaaaaggggattatgaaagacaatgtctagggctgcaaggaagttactagaaaatatatattgaggctgggcacggtggctcacacctg

SEQ ID NO: 12911 - DNA, 120 bp, synthetic construct
  source 1..120: mol_type = other DNA
tcaacaactgcattcccttagccagaagtagcagaacctgtttttgtacccatccactccctctagacaactcattagatgagtgacatgaagaccatctttgcagttgggataattaat

SEQ ID NO: 12912 - DNA, 120 bp, synthetic construct
  source 1..120: mol_type = other DNA
tggttccttttaaacaaactcgggcttaagtttgcagctctagcttccctttactcacgtcaggtccctgtctgtgtaccttcaccacccactttcttctttttttttctttcactattt

SEQ ID NO: 12913 - DNA, 120 bp, synthetic construct
  source 1..120: mol_type = other DNA
agggcgctttaaaaaagggaaccatttcatccgttgttacgaaggaccaaccttgctgtacaggatacacacaacacaaaataaagtcttcacgggattcacacttgtcagcgatttatt

SEQ ID NO: 12914 - DNA, 120 bp, synthetic construct
  source 1..120: mol_type = other DNA
aatgaatgcaggaaccagaattcaaatccagatcagagtctagctccacactcactaaagctggactgttccttctatacaaagcttcataaagatgctccctgccacccacctctccta

SEQ ID NO: 12915 - DNA, 120 bp, synthetic construct
  source 1..120: mol_type = other DNA
gaccccgtcctccttccgcagcttctttcgggagctcaccaacctgtcgcttgccttctgtacccgcttgggcttcggtgtcaaaggcttccttgctgctgcatcctaagccaaataagc

SEQ ID NO: 12916 - DNA, 120 bp, synthetic construct
  source 1..120: mol_type = other DNA
ttctagtctgttgagctcccttttccctagaggtgcctgcacagtaagtgggatccttgacaccagactctctatactccaagtatagatgaatctaaaaaccaaggcacttttagaaaa

SEQ ID NO: 12917 - DNA, 120 bp, synthetic construct
  source 1..120: mol_type = other DNA
acacagctctctgtaccttggccaggtctccaccaggcaccacagtgggaggctggtagttgatgccaaccttgaagccagtggggcaccaatccacaaactggatggtacgcttggtct

SEQ ID NO: 12918 - DNA, 120 bp, synthetic construct
  source 1..120: mol_type = other DNA
aacccagaaccagttcccccaccaaagctgtggaaaaccaagaagccctggagacccgtgcactggtcggcctataacaaaagagaggaacagaggaaaggttaagtttttattctttgt

SEQ ID NO: 12919 - DNA, 120 bp, synthetic construct
  source 1..120: mol_type = other DNA
agtgttgattacaggcgtgagccactgcgcctggcccagaagagttttaaaattgcaattggagtagccatagatttatagaagtcctctgtaggtttcaccaaatgtgaacactaaatg

SEQ ID NO: 12920 - DNA, 120 bp, synthetic construct
  source 1..120: mol_type = other DNA
attaccacccagatcaagatgtagaacatttccccaccaagacagttccctgatgtcttttctcagaggaacactgtccctccagaggtaaccaatattctaacttctatcactgatatt

SEQ ID NO: 12921 - DNA, 120 bp, synthetic construct
  source 1..120: mol_type = other DNA
gcgtatgtgtatgtgtgtctatgtgcgtatatgtgtgtaggtgtgtgcatgtgtgtgtgagtgtatacatatatgtgtatgtgggtatgtgtgtgtatatgtgtccatgtgagtgtatgc

SEQ ID NO: 12922 - DNA, 120 bp, synthetic construct
  source 1..120: mol_type = other DNA
atgtgaatgtgtgtatatgtgagtgtatgtgtgtgcatgtgtgtatgtgtgtgtctgtgcatgtgagtgtgtatgcatgtgtatatgtgcatgtgtatgcgtgtgagtgcatgtgtgtat

SEQ ID NO: 12923 - DNA, 120 bp, synthetic construct
  source 1..120: mol_type = other DNA
atgtatgttcatgtgtatatgtacgtgtatgtgtatgtgtgcatgtgtatgtgcatgtgtatatgtgtgcatatgtgtatgtatgtgcccttgtatatatgtgcgcttgtatgtgcatgt

SEQ ID NO: 12924 - DNA, 120 bp, synthetic construct
  source 1..120: mol_type = other DNA
ttgtgcatgtggctatgtgtgtatatgtgagtttatgtgagtgtatgtatatggatatgcatgtgtgtatatgcgtgaatgtgagtgtgtgtgtgtgtgtgtgtctctctggatgtgctg

SEQ ID NO: 12925 - DNA, 120 bp, synthetic construct
  source 1..120: mol_type = other DNA
caaggtatgggctttatctaaggtgagaggaacccctaacttcaataactgttcttgagcctgttctaagttcataggggactccaaagcgtgggtttgctcagaggtaagagtgacagc

SEQ ID NO: 12926 - DNA, 120 bp, synthetic construct
  source 1..120: mol_type = other DNA
tccccagagcctgtgcctgcttaggggtgagagggatccccagggtctgggcctgctgagggttgagagggatccccaattcctgagcctgcttaggggtgagagtgatccccagggcct

SEQ ID NO: 12927 - DNA, 120 bp, synthetic construct
  source 1..120: mol_type = other DNA
gtctgcagtctgacatctgggtcatcttggagtccttattttccctccctttttttgattctttttcacctgcagttccatgccctgaaatatttctttcattgccgttttctttttttc

SEQ ID NO: 12928 - DNA, 120 bp, synthetic construct
  source 1..120: mol_type = other DNA
aatgtatgacattacttaggtaaaagcaatagccatagttattttttaggtcttgttaaaatcagtttgtcaaggttggccataattgatttcttattgtttgactgattgcaattttag

SEQ ID NO: 12929 - DNA, 120 bp, synthetic construct
  source 1..120: mol_type = other DNA
gactcaactgtatttccttctcacttcccttatttcttctctttgcctttacttttgatgagattggcctggtaggtgtgctgatctggtatggatacaattcctggtcagatctccact

SEQ ID NO: 12930 - DNA, 120 bp, synthetic construct
  source 1..120: mol_type = other DNA
cagtactaactcgctttgccaccctaattgtgaacttttctgtctgtccaaatctaatctctgatctggtgatggctggcactggcacaccaagatcattttatttctgatatattcctc

SEQ ID NO: 12931 - DNA, 120 bp, synthetic construct
  source 1..120: mol_type = other DNA
tttaactttctctcttgctctggacctgcagaatttgacttctagattagatgagtcttttgtggttcaggttcccattgtgaggtgccagcagttttccagccccattggttatgtatt

SEQ ID NO: 12932 - DNA, 120 bp, synthetic construct
  source 1..120: mol_type = other DNA
cgttatctggcgtatcttaaaagaatcactcagactgctttgtggaatagaaacaggaaactagttagaaggcattacagtaatgtacatgggagatgacaatggcttggaccagtgtgg

SEQ ID NO: 12933 - DNA, 120 bp, synthetic construct
  source 1..120: mol_type = other DNA
tccataaatgaaaactcccacgtaatgtgagcacctccaggacagggtggtggctacacccctgcccagcttcagcatcggcagaaagccgccgcagaggagataggaacaacagcttga

SEQ ID NO: 12934 - DNA, 120 bp, synthetic construct
  source 1..120: mol_type = other DNA
atgtgatcctagtcatatctaacgcctcccactgccaagccaggagctacactggacagacaccagcatagagctgtaagctctgactgcaccgtagggacagctcacaagttttcaacc

SEQ ID NO: 12935 - DNA, 120 bp, synthetic construct
  source 1..120: mol_type = other DNA
taatttatataggagcatagtacaaacaacaaacatcatcacgcacatgcacataagggacaggtcaggattctggactggagatgaggatgttgaatacattcacacacaggacaagcg

SEQ ID NO: 12936 - DNA, 120 bp, synthetic construct
  source 1..120: mol_type = other DNA
catctagggcagatattcaggaacttgagccaaagtgcccctacctcttcagtaagatgtgaaggggagatatctgattgttcttcctgatgtgattgagtgttaagttattatgtttgg

SEQ ID NO: 12937 - DNA, 120 bp, synthetic construct
  source 1..120: mol_type = other DNA
acaccaaaatgtttattgtgttgctctatgtctctctagttggtaagattatacattttttgattaattttcttcctccatatttattgaatccttactctgttggtcactgttccagat

SEQ ID NO: 12938 - DNA, 120 bp, synthetic construct
  source 1..120: mol_type = other DNA
attagaactgtgtctagcaggtagttagtggtccatattaaaaacaattattggaagtattattaagacctacttcagacggagtctcgttcactcagtgctcaatggtgcccaggctgg

SEQ ID NO: 12939 - DNA, 120 bp, synthetic construct
  source 1..120: mol_type = other DNA
ttgtgggccacacagccttttgcaactactcagctctgctgttgtaacacagaagcagccacagacaatacttacataaatatggctgcattctagtaaaacttgacttacagtgtttca

SEQ ID NO: 12940 - DNA, 120 bp, synthetic construct
  source 1..120: mol_type = other DNA
tcaggagattgttgcccttgcaatacatactaatacatttattaacagtgaaaaatgggatcatgctttttcaaatgaaaataaatctaatttagccaattgctctgacattgaggactg

SEQ ID NO: 12941 - DNA, 120 bp, synthetic construct
  source 1..120: mol_type = other DNA
tttttgtataatttgttggaatcatagccaacaaaaagataagggcagaaatgttaaagaggagccccatggcccttccagtgttaacatcaaaagtgttaacaggctgggcgtggtgcc

SEQ ID NO: 12942 - DNA, 120 bp, synthetic construct
  source 1..120: mol_type = other DNA
aaaaggaaaagtaaataaatacataaataaaatggggtgggagggggcatatataattttcaactgaactaaaaggcttgaaggccactgttggagtagtagttgaccaggacatgtact

SEQ ID NO: 12943 - DNA, 120 bp, synthetic construct
  source 1..120: mol_type = other DNA
ggcagttcctcaaaaaattaaacagttaccatatgactcagcaattccattcctgggcatatgccctagagaatgaaagcatgtctacctaaaaacccatacacagatgttcacagcagc

SEQ ID NO: 12944 - DNA, 120 bp, synthetic construct
  source 1..120: mol_type = other DNA
atccattccatgtagccaggggaaagcagtccctggtgtcccattcccatgcctttcctccccttctgcccttcctgggatgagctggcatcctctgtccctctgatgacaaaccctgtt

SEQ ID NO: 12945 - DNA, 120 bp, synthetic construct
  source 1..120: mol_type = other DNA
gacacccagagcccaagacctgtcactcatgagagaccctgggctcacatctgacaggtgctacaagtataggggctgagggtcaggagagaaggcctggaccctgcagaggcttcctcc

SEQ ID NO: 12946 - DNA, 120 bp, synthetic construct
  source 1..120: mol_type = other DNA
actatgaaactaggtgatcagcaacccacacaggcagagtactcaggttcagatcacagatgaggtttctggggatggtgccaggaagagggtgtcacaggccatctggaagggagctca

SEQ ID NO: 12947 - DNA, 120 bp, synthetic construct
  source 1..120: mol_type = other DNA
cctatttatgcgcagattctgaaggggcttggctgtgaagatgatgttggggcaatttgcgctttatgggcttgggtggttagccgggtctaacgcctctccagaatgtgctttaatggg

SEQ ID NO: 12948 - DNA, 120 bp, synthetic construct
  source 1..120: mol_type = other DNA
aagaaaactgcagtttagggcaagagatcataacatctggctgcttctgggcaccaattaagtacattaagtggggagcgacagcagctaaacaacccaagcccataaagccttctaatt

SEQ ID NO: 12949 - DNA, 120 bp, synthetic construct
  source 1..120: mol_type = other DNA
cagacacacacacacaggcactcaagatgcagactcagctgacagttcagatagagggagcttgtgaaggaaaagtgtggccaggctgctctggggcacaagctagacatcagggagttg

SEQ ID NO: 12950 - DNA, 120 bp, synthetic construct
  source 1..120: mol_type = other DNA
ctgggtggggaggaagcctctgcagggtccaggccttctctcctgaccctcagcccctatacttgtagcacctgtcagatgtgagcccagggtctctcatgagtgacaggtcttgggctc

SEQ ID NO: 12951 - DNA, 120 bp, synthetic construct
  source 1..120: mol_type = other DNA
tcctggagcaggagaggggagaaaggagagataagagggtaaggagcagtgaaaggctggtgagccgtgcccaagacaaacagggtttgtcctcagaatggcagaggatgccaggtcacc

SEQ ID NO: 12952 - DNA, 120 bp, synthetic construct
  source 1..120: mol_type = other DNA
ctatgtccctttttttcttaatccagccagattatcttttccttttctttctaaatctttttcctcttacccagaccccagagtgtaatttaccagcccatatactcctggcatttgctt

SEQ ID NO: 12953 - DNA, 120 bp, synthetic construct
  source 1..120: mol_type = other DNA
agaggctggaggcgagagggaggagaagcaggacgaggaatcggactccagtagcagcttatatatggagagcatgggctgggcccagtcctggaaggtgagcttgcaggttgggaaggg

SEQ ID NO: 12954 - DNA, 120 bp, synthetic construct
  source 1..120: mol_type = other DNA
tccatgttttacagttgtttctatgtccctttttttcttaatccagccagattatcttttccttttctttctaaatctttttcctcttacccagaccccagagtgtaatttaccagccca

SEQ ID NO: 12955 - DNA, 120 bp, synthetic construct
  source 1..120: mol_type = other DNA
gttggaggctggaggcgagaggcaggagaagcaggacaaggaatcgggctccagcagtagcttatatattatgagagagcatgggctgggcccagtcctggaaggtgagcttgcaggttg

SEQ ID NO: 12956 - DNA, 120 bp, synthetic construct
  source 1..120: mol_type = other DNA
gctaggggtgtacagccacaatactaagaacttattaagcatcatttcattcaaaccagcagttctcaaagtgtggtccccaatccacaagcatcagcatcacttggaaacatgttagaa

SEQ ID NO: 12957 - DNA, 120 bp, synthetic construct
  source 1..120: mol_type = other DNA
cttaaataagattgatgtcaccccttctgacctcagatcccatattctttccactgcgccacactccccctggcttccttaaggtgggggctcttttttttttttttttttttgaccatt

SEQ ID NO: 12958 - DNA, 120 bp, synthetic construct
  source 1..120: mol_type = other DNA
ggtagccatgctgggtgtgttcctggtctccgcagtggcccatgagtatatcttctgcttcgtcctggggttcttctatcccgtcatgctgatactcttccttgtcattggaggtgagct

SEQ ID NO: 12959 - DNA, 120 bp, synthetic construct
  source 1..120: mol_type = other DNA
acgctctgcaaacgatatttttaacactgccagcttcccacatgggctttacaaacgccacccacggtcctgagtgtcatatccttccagggccacggacgtgaaggcgcaaactaccca

SEQ ID NO: 12960 - DNA, 120 bp, synthetic construct
  source 1..120: mol_type = other DNA
tgcatttatcttatcaggcaccaagaatttgcaaatatgcaagagtgaacatacatgtgagcacgcatataaaatcataggtgcacacacgtttgtgcaaacacaccttgctcgggagaa

SEQ ID NO: 12961 - DNA, 120 bp, synthetic construct
  source 1..120: mol_type = other DNA
cctccagtttctcactgccaagggctccctcggcaataggggcgcttctggtcactgactgttctcagggtctttaaataccctctagcctaggcataactgccctcccttcggttagtg

SEQ ID NO: 12962 - DNA, 120 bp, synthetic construct
  source 1..120: mol_type = other DNA
tgtcacctggggagaacttcagagcccagaacttgaagaatatatgggaatggatatttaaagatacgcagaaaaaaaacgacttaaacccaactatcagcttcccagcagaaagatacg

SEQ ID NO: 12963 - DNA, 120 bp, synthetic construct
  source 1..120: mol_type = other DNA
atgaactaaatgttgaagacaagtttgagatctgtaaaatgtgattttttacttccacttataatacttgtgattggggaggtttgtggaaattcaattatgatgaaaaacctatctttt

SEQ ID NO: 12964 - DNA, 120 bp, synthetic construct
  source 1..120: mol_type = other DNA
ctagctgctggctaatgccgctccataaatccgcagatttgaagtgtctgggaggccttttaaaaataactaatatcagaaagcattttaatgaacgtaaagataggcttacattaaagg

SEQ ID NO: 12965 - DNA, 120 bp, synthetic construct
  source 1..120: mol_type = other DNA
gcacgcctccgtgcattccttttcctgcttttgcaagggcttgttctgttagtaagatacttttctccactatggattctaattttggagcagaacaatcacatcagcagaaaaatcacc

SEQ ID NO: 12966 - DNA, 120 bp, synthetic construct
  source 1..120: mol_type = other DNA
ctttctttcttacctaattcccaaagggaccagagagattacctaatcctgttcactcattttgtagttgaggaaactgaagagagagagaaaggagggagaaagagagagagagaggga

SEQ ID NO: 12967 - DNA, 120 bp, synthetic construct
  source 1..120: mol_type = other DNA
agccagattcagaaagataaatactgcattatctcacttatatgtggaatctgaaagttgaactcatagaagtagagagtagaatagttgttacctagggctggagtggaggcggggtgt

SEQ ID NO: 12968 - DNA, 120 bp, synthetic construct
  source 1..120: mol_type = other DNA
actgaaggtaccttacaactggctcatattatcagaggaccttggtcctttctaaatctctagtctctcttcatatccttcatcaggtgttttaagatgtctctgagaagccatcaaggc

SEQ ID NO: 12969 - DNA, 120 bp, synthetic construct
  source 1..120: mol_type = other DNA
tattatttttgctatttgtcaggtactaggaatttggaagaaaggatacccagtaatgttctactgaatcagaaacacacctttccctgcatcttgatacatctttattccctttaatct

SEQ ID NO: 12970 - DNA, 120 bp, synthetic construct
  source 1..120: mol_type = other DNA
agctcagggcatcctattgaggatgtacgtgatgttgatttgtcccagcactcacaatgatgtctctggtcacttagttaaggtgatatctgtcaggtttttctactgtaaagttactat

SEQ ID NO: 12971 - DNA, 120 bp, synthetic construct
  source 1..120: mol_type = other DNA
gtgagatctcctttggatggggtggctgcgccttctctggtgactggagttgctggagcctttttgggggagagaggaatcactgctggggaagtggggtcccctttgggagatgggata

SEQ ID NO: 12972 - DNA, 120 bp, synthetic construct
  source 1..120: mol_type = other DNA
tagacctccttttggggagggaggagttgcagctgggggcatgggggcccctttgggggatggggtagctgggcctccttttggggagggaggagtcgcagctgggggagtgggggcccc

SEQ ID NO: 12973 - DNA, 120 bp, synthetic construct
  source 1..120: mol_type = other DNA
atactataaacaccccacaccccacacaccacaccccacacacacttgcctggtcctgctctccctgggcctccattacacagacacacacagctgtacacacctttggaaccgcaaaac

SEQ ID NO: 12974 - DNA, 120 bp, synthetic construct
  source 1..120: mol_type = other DNA
aatgacagtcggagaatgtctactatgtttatcctaccctgtatggtacctgcagcatgaatgttaccttaatatttcattttgccttccacctcactctagagactgctctatctgctc

SEQ ID NO: 12975 - DNA, 120 bp, synthetic construct
  source 1..120: mol_type = other DNA
caaaataaggaagagaagggggaaaaataactaggccaggagagagacacatgttgaatcttgccatcccagtcatgaaaagaaactggctgtagctttattgtcttgtctctcttggta

SEQ ID NO: 12976 - DNA, 120 bp, synthetic construct
  source 1..120: mol_type = other DNA
gcattctcacttcctgtacttgtttggaagctattagaatttaggctttaagcccatggagtagcttcaatcagtttttgttgtaaagttctgcctgtgtccctttgactacagtgctct

SEQ ID NO: 12977 - DNA, 120 bp, synthetic construct
  source 1..120: mol_type = other DNA
tgaacttctgcttcattgactacttccagtcccacattccagcaggctcattgtttcaccatgctgtgttttccttctgtttctgggcaatggagatgcttcttcttcttgttgatatta

SEQ ID NO: 12978 - DNA, 120 bp, synthetic construct
  source 1..120: mol_type = other DNA
aacaagggtttatggcagggaatagtattgacccacagatgagctttgcctcagagaaagaaaatgctaatgactgctcataggtgaaagactatgagcacacagattagctctcaggaa

SEQ ID NO: 12979 - DNA, 120 bp, synthetic construct
  source 1..120: mol_type = other DNA
ttagataatctgacagagggttctaattattcaagactgcttttgatttttttcatgacttgcactcttctatgatacaggcactggaactaaagcaaaatggtggaagaagattagtcc

SEQ ID NO: 12980 - DNA, 120 bp, synthetic construct
  source 1..120: mol_type = other DNA
acagctgccgtacataatgactcctctgatgaatctgggaaaaggagatggaaaatcttctggaaaggatttgctattctagataacatcacgatcattcactgttatgggaggaggtca

SEQ ID NO: 12981 - DNA, 120 bp, synthetic construct
  source 1..120: mol_type = other DNA
tatcgctagaactgctggcccatagtaggcactgagttaatatttttgaatgattgaatattattgctgttacgtcttacatagttgcagcacagcagtgaaaagtagggagtgtgtggt

SEQ ID NO: 12982 - DNA, 120 bp, synthetic construct
  source 1..120: mol_type = other DNA
ttaactctgatgggccatggacctaatgcttttatatttagaagtataataatcattgtagaaatagaaatatttgactcaagttaagaaggcaaattaaaattatgccatttttgttat

SEQ ID NO: 12983 - DNA, 120 bp, synthetic construct
  source 1..120: mol_type = other DNA
ctggtaagttacctgatgcttttgcttcacagctcttaagatggcttctttcatcttgattttagataacctgatgactatgtgactaggcaataatctttttgctatgaatttcccact

SEQ ID NO: 12984 - DNA, 120 bp, synthetic construct
  source 1..120: mol_type = other DNA
gttcagattttttatcccatggggtgatccctcgatgtggcactcttccccttctcctagggataggacttcctgagagaaagactgcagtgactgttattgctcttctggatctagcca

SEQ ID NO: 12985 - DNA, 120 bp, synthetic construct
  source 1..120: mol_type = other DNA
gcatacccccatctcttatacactcaatctattcagctgctcttgggttaatgaaatccaagagaaattgagctcagtcatgagaaaacatgccatgtcttggcttttagggggttctga

SEQ ID NO: 12986 - DNA, 120 bp, synthetic construct
  source 1..120: mol_type = other DNA
aggttgcaacacataaacaggtgataacagcaatttatgaggttgagatcatcagaaggaaggaaaggaggaagggagggagggagagagggagggaagataataaaatcaaaacattat

SEQ ID NO: 12987 - DNA, 120 bp, synthetic construct
  source 1..120: mol_type = other DNA
aggtccattgtaatcctaactgacaccaaaagcccagcagcaatgttgtagaatattataagcagccactaaaagtcctacagaaatgcaaaggacataaaatgcccccaaaaattgaca

SEQ ID NO: 12988 - DNA, 120 bp, synthetic construct
  source 1..120: mol_type = other DNA
aatcacagagaagaccaagtagggaaatcagtcccatattgaaattcactgttaattctttcaagaagacttctctgcccctccccaggacaagctgaatttgactccaatacatcagta

SEQ ID NO: 12989 - DNA, 120 bp, synthetic construct
  source 1..120: mol_type = other DNA
aattggccaatccatgtggagttttgagctgtgtctgtgattacctgttttggtctactttattacaggtatgttggaatctcttttaagaagctagacacttttccatgaactttacca

SEQ ID NO: 12990 - DNA, 120 bp, synthetic construct
  source 1..120: mol_type = other DNA
ataccatgccagttactggttattacaatacaaatagatatacatcctgcctctgatctgtcattatataatttctaagaatgggttctgtttctttgaatattttcatgcatacacatc

SEQ ID NO: 12991 - DNA, 120 bp, synthetic construct
  source 1..120: mol_type = other DNA
ctttaagttagtagggctgtttgggaagaaatggtgaatgcctgctggtgtggtcttcttgctgcactctcactccttcttgatgccaggtattaagtctttgtaagttttatattgaac

SEQ ID NO: 12992 - DNA, 120 bp, synthetic construct
  source 1..120: mol_type = other DNA
gggtggggggtggggggtgggcatgggatatccaaaaatccagaatctaaaatgctgcaaaatctaaaacttgttgagcaccaacatgacaaaggaaaggctcattggataagtatataa

SEQ ID NO: 12993 - DNA, 120 bp, synthetic construct
  source 1..120: mol_type = other DNA
cagtctgaaatagacagttattggagcctttgattaagacaatacaatgtctacaatgacctatcaagcaggtgtccataccctgtaagaaccttgtccacacttcagcctctgatgaag

SEQ ID NO: 12994 - DNA, 120 bp, synthetic construct
  source 1..120: mol_type = other DNA
ggctaaatgagacactattcctccctagagagtaatcctgcatggcagtcattaaagggaaggagtcagacaaaattgatttctaattttttaatatctatattgaagtataagttatat

SEQ ID NO: 12995 - DNA, 120 bp, synthetic construct
  source 1..120: mol_type = other DNA
gctgtatcaatagtttattcatttttattagtgagtaatatttacattgtttggatattctaatagtgtgtttatacattcatctgctgataaataagtggattgtttccagtttggggc

SEQ ID NO: 12996 - DNA, 120 bp, synthetic construct
  source 1..120: mol_type = other DNA
atggtaacattttgaacatttgtataatatcacagccagataattcacattgacagaatggtgaaagagagcatttccatcaccacagagatcccttgtatagccacacatactatactc

SEQ ID NO: 12997 - DNA, 120 bp, synthetic construct
  source 1..120: mol_type = other DNA
gtgactataatgttccttgctttggttttctttgggcttcactcagttggatttgttgagcttagcggatctctaagttagtagcttttatcaaacttgagaaatttttggccaacattt

SEQ ID NO: 12998 - DNA, 120 bp, synthetic construct
  source 1..120: mol_type = other DNA
taaaaaattttaattaggaatgttttccttatgtcattttgggttttgtcacttttcttttaagtcttacaaatccaatataattcagctataatacagaatgccaatatctcactttgt

SEQ ID NO: 12999 - DNA, 120 bp, synthetic construct
  source 1..120: mol_type = other DNA
ggtttccacgccagttcaccgcagtagaacagagagagcatcaggtacatttctaaggtgtctgactccaagccctggctcctagacagcagacctaaaacttttaaataatttaaacat

SEQ ID NO: 13000 - DNA, 120 bp, synthetic construct
  source 1..120: mol_type = other DNA
tggatgattcacaatgggatgaagtgtagacagcttgatgcttgccattgtaggcatggcacctgcaaagacagcatctgaaaaaaaaaaaaggatatattcttcaattaaatgttttaa

SEQ ID NO: 13001 - DNA, 120 bp, synthetic construct
  source 1..120: mol_type = other DNA
agtttttatagtattgttatacaagaatgaatcccttacctgtcgagagcatatcaaggaagccataacacacatgtgcggtgtcaaaaacatctttagcctcataattaaaatggcaag

SEQ ID NO: 13002 - DNA, 120 bp, synthetic construct
  source 1..120: mol_type = other DNA
cttttctgacttaataatggccccaaagttcaagagcagtgatgctggcagttgagatatgccaaagagaagctgtaaagtgctttctttaagagaaaaggtgaaagttctcaaaagaaa

SEQ ID NO: 13003 - DNA, 120 bp, synthetic construct
  source 1..120: mol_type = other DNA
attcctgtagtgagctgcatgcaaggaagaagcctggtaggtgagtaattattataatcaccaagaaccctgaaagtaactactgatactttatttaaatcaagtagctaattaaaaatg

SEQ ID NO: 13004 - DNA, 120 bp, synthetic construct
  source 1..120: mol_type = other DNA
ggaatactgtatgttttaaaaacaatgatgatataattaccttagataaatgtttgtagctaaaacatatgaaatatcacgaacagtctgtgaatagaatcaaatcaatgaaacttttgt

SEQ ID NO: 13005 - DNA, 120 bp, synthetic construct
  source 1..120: mol_type = other DNA
gggagcacaggtatatattaaagtatcaaaatctgtataccttaagattctggctgctataagatcactcaggcgaatctgggagaaaataaagtaaaatgaattaaaattacacaagtg

SEQ ID NO: 13006 - DNA, 120 bp, synthetic construct
  source 1..120: mol_type = other DNA
tatttttttactaaaagggcaagtcagcattcatgaatattttttctttttagtgggttgcaaagatcactgaactgcaagactttattattgactctgccaataactcgtctagagacc

SEQ ID NO: 13007 - DNA, 120 bp, synthetic construct
  source 1..120: mol_type = other DNA
aggaaaaagaaaacagctccccgtacagagacagaggaaggggggatttgaacaaagaaaaaaacccgtgtgcatcggaaaagtggctgcttatacatatcctaaatctaaaggaagttt

SEQ ID NO: 13008 - DNA, 120 bp, synthetic construct
  source 1..120: mol_type = other DNA
tccatcctatgtgtaaaaagagctctgggagattggtaaatgggagtacagagcagggcctaagagtgagtaggaacaaaagcactgatgttagaaaggcattatttctggaaaggaagg

SEQ ID NO: 13009 - DNA, 120 bp, synthetic construct
  source 1..120: mol_type = other DNA
gaaccaacaaagaataataaaaagacaaaaaaagcatcatgccattcattcaacaacttagtggacaaatctttctatattttcaccataaaggatgggagaatgcctccaacaaggaga

SEQ ID NO: 13010 - DNA, 120 bp, synthetic construct
  source 1..120: mol_type = other DNA
ttgaagggaaggttaattgaagctagagagagaaactcaagacaaacaaattttaaaaagcaaggctgtatggatatagcagaatgaaacataaaggaagagtggcctgaaagttagttg

SEQ ID NO: 13011 - DNA, 120 bp, synthetic construct
  source 1..120: mol_type = other DNA
agtgagagtccctaaatgaaagtgaagtggggaggcagaaaaatatttgaagaaataatgaccaaaatttttccaaatttgataaaaattgtaaacctaaagatctaagaatttcaatta

SEQ ID NO: 13012 - DNA, 120 bp, synthetic construct
  source 1..120: mol_type = other DNA
agattagaatgtgaccactttgcaatccctaatgaattaacagagccagcataaggcactgaaggctagtaccataaagagagacattatgtgccttttaatgaaagaacaatactaaag

SEQ ID NO: 13013 - DNA, 120 bp, synthetic construct
  source 1..120: mol_type = other DNA
attttatataagaaacttgaacatctgcagattttagtatccacaggggttgggggtgtcctggaatcaatccctgcagacacgaaggggacattgtactcatcagtattagccagcact

SEQ ID NO: 13014 - DNA, 120 bp, synthetic construct
  source 1..120: mol_type = other DNA
aagacagataaaaagctttgcttgggaagaattttgtcatgttgagtgataatcaggaaagggcctatttattctcttatacctgttttagacaggaaaacatgctatttggcaggttaa

SEQ ID NO: 13015 - DNA, 120 bp, synthetic construct
  source 1..120: mol_type = other DNA
tctgagaacctatcttaatatttgacttatatatattaaaaatgttaccatgttcatataaatgatcttctgaaatttgcttggttcaatgtatcccacaacatacatgggaaataatga

SEQ ID NO: 13016 - DNA, 120 bp, synthetic construct
  source 1..120: mol_type = other DNA
ggtcagaaaataggatgcagcactgcccctgcacacctcaacatgcttctcctgtatgtgtagcaacaacttttatatgccacaacttttgtgcttcaaaaaactttgaagagaaatata

SEQ ID NO: 13017 - DNA, 120 bp, synthetic construct
  source 1..120: mol_type = other DNA
gagttctcattagtattctatcaaacttatttctctgataaggttatttatactattctaccacttatggggttttttgttcatttctcagacctcttaaatatctaaaatgcttataaa

SEQ ID NO: 13018 - DNA, 120 bp, synthetic construct
  source 1..120: mol_type = other DNA
cagcactatttattaaaatgcctgtccttactcaccaatctgcgatacccactcttccatatatcaaatgcctttaaatgtacatttctgcttctgggctctactctattgcagttatct

SEQ ID NO: 13019 - DNA, 120 bp, synthetic construct
  source 1..120: mol_type = other DNA
taaatatttgttgaaagactaaagctatcaattaattttaattttaattttaaatgttttgcatgacaagaataacattgtaaagaaacctgatgattcagctaggaatgcgctccactg

SEQ ID NO: 13020 - DNA, 120 bp, synthetic construct
  source 1..120: mol_type = other DNA
gtaaccaaaactgactcaacttagttttcattggcaaaaactagctgatatggctatctcagggagcaattaagtgtgggggcaaaacacacgaccgttgaaattaatttcaacttatca

SEQ ID NO: 13021 - DNA, 120 bp, synthetic construct
  source 1..120: mol_type = other DNA
atacacatacacgtatgtaagctcacccttaatgagtgattatatagttacacttatactttatactttttataattgcatttatactttcctccaatgaattactattatactgtaatg

SEQ ID NO: 13022 - DNA, 120 bp, synthetic construct
  source 1..120: mol_type = other DNA
tgagacacaaaacaccatacaaaagatcaacaaaaccacaagttggttctttgaaagaacaaataaatttaatagaccactagctagactaataaagaaaaagagagagaagacccaaat

SEQ ID NO: 13023 - DNA, 120 bp, synthetic construct
  source 1..120: mol_type = other DNA
ataattttatacctagaaagccccatagtctcttactaaaagctcctagatatgtctttttaaaacttcagcaaactttccggatgtaaaatcaatgtaccaaagtcagtagtatgtcta

SEQ ID NO: 13024 - DNA, 120 bp, synthetic construct
  source 1..120: mol_type = other DNA
tctcccacagtccagtgtcagggacacagtcatctctgtcttgggatatcccattcctacctttcttcttgatacagtggaaatatggtcacttctcctatgtttttgtaacttaggaca

SEQ ID NO: 13025 - DNA, 120 bp, synthetic construct
  source 1..120: mol_type = other DNA
gttcagagttttcttagtttgacttttcccccatataacggtattaagatttgtccatggaaacctgtcccattgtagtactgtattccccattagacatgaactcctattaggaagatt

SEQ ID NO: 13026 - DNA, 120 bp, synthetic construct
  source 1..120: mol_type = other DNA
gacattcaaaagttgaacaaggtgcaggaaaattcactacatgtaaactcaccaaggcaagatacctaatatgtctgaccctgcccatcagctgccaataatgcagccttgttattgtga

SEQ ID NO: 13027 - DNA, 120 bp, synthetic construct
  source 1..120: mol_type = other DNA
agagcatttatcagacagcccttattcaatcctggttcccaaattcccttcatattaattatagttaaaaacaaaatggtgtggggagggaggagccaagatggccgaataggaacagct

SEQ ID NO: 13028 - DNA, 120 bp, synthetic construct
  source 1..120: mol_type = other DNA
gcttcaacagtgcttagcacataacacatagcacataacaagtgtctaataagtatcactgttattatgacctcccatctgctcactgattcatgaattttcacttataaaatatcatgc

SEQ ID NO: 13029 - DNA, 120 bp, synthetic construct
  source 1..120: mol_type = other DNA
ctttatttttgctatcactaccccagttcacattctaatgactttccaccaatctcaggtctttccctacttcaatccattttaagcacaatcgtcggattatttttctgtagtaatggt

SEQ ID NO: 13030 - DNA, 120 bp, synthetic construct
  source 1..120: mol_type = other DNA
gaaatcttaaagtgaattctgaaagcccttttgttgcagttcgggagtagtggaaacttaattcagtttggtggtgagaagaatgactgtctgccaaccccaattgctcagttgtctatc

SEQ ID NO: 13031 - DNA, 120 bp, synthetic construct
  source 1..120: mol_type = other DNA
tcattcttcagcttcccagcacctcccaaaccataaaaggtcttggcttctctgttggcagtattaagagattttagaggatgtcactgggaaactactagctaaagcgagattacattt

SEQ ID NO: 13032 - DNA, 120 bp, synthetic construct
  source 1..120: mol_type = other DNA
agtactgctttcactgtgaccccataggttttagtatgttgtatttttattattattagtttcaagaacattttcagtttcctttttagtttcttcattgacccactggtcactcaagag

SEQ ID NO: 13033 - DNA, 120 bp, synthetic construct
  source 1..120: mol_type = other DNA
tcatagggttaattctgcttgacagcacatcagcagcatcttgagagtaattacctaacagaagttttcccacagccgaactgagagcttcaaaggcttctgaatttacaaccagtatta

SEQ ID NO: 13034 - DNA, 120 bp, synthetic construct
  source 1..120: mol_type = other DNA
ttgctcaaagtagattattattttctcagtggacaaagcatcctgagtgatttgaaaattctctttaggttgtcaccaaatgtgggagatggatgcatttaattcagcaaactatagaga

SEQ ID NO: 13035 - DNA, 120 bp, synthetic construct
  source 1..120: mol_type = other DNA
ctcttgtaggcagaatatagttgggtcttgtgtttttattcatttagccaatctgtcttttgattggagaagttggttcatttacattcaaggtaattattgataggtttggcctcatta

SEQ ID NO: 13036 - DNA, 120 bp, synthetic construct
  source 1..120: mol_type = other DNA
tgctcttccctttcgttatactctcctctacatcagttcactatttcctggcacttatggagcctagggttgaacacaatgttgagaatttgaaataattgtctttattcatccccctgc

SEQ ID NO: 13037 - DNA, 120 bp, synthetic construct
  source 1..120: mol_type = other DNA
atctacttttgcttatacagaatctttagtcacaatcagtccattccacctttgaactgaaaatggtattaatagcgtgcaaaaatgtaagggggcctctccctctccctctccctctcc

SEQ ID NO: 13038 - DNA, 120 bp, synthetic construct
  source 1..120: mol_type = other DNA
gatgactaatgcctttaatatataaatagttaatacaagccaataaacaaaaaactaaaagcacctccaactgaaaaatgaataaaggacataaatgacaacagaaaatgaaaatgacca

SEQ ID NO: 13039 - DNA, 120 bp, synthetic construct
  source 1..120: mol_type = other DNA
ttctgaaccctcaagggaagaaacatgattaagaaaagtacacatttaaattcataaaactgtccactatctggctgggacataaagtacaataaaaatttggatcggctgaaaaacaac

SEQ ID NO: 13040 - DNA, 120 bp, synthetic construct
  source 1..120: mol_type = other DNA
tagcagtaaatgatgtagacttagtccctgacctcaaggaatttatattctattaaaaaatacagaccttgggaggcagagcaagatggctgaatagaagcctccactgatcatcctccc

SEQ ID NO: 13041 - DNA, 120 bp, synthetic construct
  source 1..120: mol_type = other DNA
gcctctatgcccttccacactgccttccctcccgctgacccgttggtgcacactggatgcacccctgcctcttttgtttttttatatttgattattttattattttatcaattatgatat

SEQ ID NO: 13042 - DNA, 120 bp, synthetic construct
  source 1..120: mol_type = other DNA
cgaacatgctgcatcctctcttatgtatatattttaaagttctccatagaccacatgctccctctggccactctcccatttttctgctccctttgatagagaaactctgtttagagttgt

SEQ ID NO: 13043 - DNA, 120 bp, synthetic construct
  source 1..120: mol_type = other DNA
agaaagtggaagttccagggatgatctgaatatcccactttactacccacagtggacatattccaagagtctggccacagagagactggctttgattagagctcagtttttaagatattc

SEQ ID NO: 13044 - DNA, 120 bp, synthetic construct
  source 1..120: mol_type = other DNA
tatgcattgtgtctttttcatctactcttccatttagggcttttggccaagcaggacaaaagtggtaactcagcagtaattgagccatactacccgaactcctactcttaggtttccatg

SEQ ID NO: 13045 - DNA, 120 bp, synthetic construct
  source 1..120: mol_type = other DNA
gagcactgcttactacgagtgacccctagtaaagatctgatctacagagttctcattttctttatactgttgtaaatgtgtccacaggtccagtaggatggcagattttactgccgtaat

SEQ ID NO: 13046 - DNA, 120 bp, synthetic construct
  source 1..120: mol_type = other DNA
ggcagaagcaaaagaggtggaggaagtggaaggggaggcaggagaggcaggcacttggtgtaactttaaggaaatacatagtaatttctgtctgacttttttaatttctctaaaaatatt

SEQ ID NO: 13047 - DNA, 120 bp, synthetic construct
  source 1..120: mol_type = other DNA
ctggtcttacaggattttggggaattaggaagttccatggttggcaaactttcaaagacaggagcaggttaatgttagctatagaagcactgtcactcaagtgaagacagttgttgattg

SEQ ID NO: 13048 - DNA, 120 bp, synthetic construct
  source 1..120: mol_type = other DNA
aagattttcatttaactgactttcaagagggcagcagaatagacttcatctttttggaatgaaaaggtctgccgtgaattgtggtatgttgccactaatgtaatgcctagaacaagagcc

SEQ ID NO: 13049 - DNA, 120 bp, synthetic construct
  source 1..120: mol_type = other DNA
agctgtagattctcactgtgaatcccttgcttgctcatgcataagtgtatttgcaataccaaatatacaggtttagtatttttgcctgttagtgattgtttcacatgtgtaacgttttgg

SEQ ID NO: 13050 - DNA, 120 bp, synthetic construct
  source 1..120: mol_type = other DNA
tttacatctggtgtacaaaccttacaaaagtatacttttatttttcccctcctagtttttgtgcaataattgttgtatgtttcacttctttgtgtgtttaaaccccacaaaacactattg

SEQ ID NO: 13051 - DNA, 120 bp, synthetic construct
  source 1..120: mol_type = other DNA
atattctcctacttcctcctgatctgcaaggttcttgctgagaagtttggtgccaggcatattggaattcttttgtatgttaacttgcttcttttctcttgctgctttcagaatcccctc

SEQ ID NO: 13052 - DNA, 120 bp, synthetic construct
  source 1..120: mol_type = other DNA
gtaagtgaattaggaacaaagattaaagagtcttatttagaagataaatggaattgaggaagtgtcctttttctcagtaactttacaaagaaaatgcatttgaaaatgtaagtattgctt

SEQ ID NO: 13053 - DNA, 120 bp, synthetic construct
  source 1..120: mol_type = other DNA
attctagtcacacagggtctgctcacataaggagtttcttgggttaaaatacgaagacttcataacagttttgtgatctcaagggcctttcatcccatcattacagaattgctacagctc

SEQ ID NO: 13054 - DNA, 120 bp, synthetic construct
  source 1..120: mol_type = other DNA
agttattcattcctgggaagtaatagctaacacaaccagagggaccgttttccctttgcaaggcatttcctgccctctagtggtaagaaataagcctaaaaacctatcttggaagtaaga

SEQ ID NO: 13055 - DNA, 120 bp, synthetic construct
  source 1..120: mol_type = other DNA
aggttaaattccagcttcagctctgcagccctggataagttacctatgggtaacctacttgagtctcagtttcctcatatataccatgaagataagggtaccttttctacagagttgtag

SEQ ID NO: 13056 - DNA, 120 bp, synthetic construct
  source 1..120: mol_type = other DNA
aatacagggtccaagcagttcaaacaaatgagtagaacataccagatataatatggcaagatctaaggtgattgagagagcacgtattctgtctaaagagagaagccatgacgcaaccac

SEQ ID NO: 13057 - DNA, 120 bp, synthetic construct
  source 1..120: mol_type = other DNA
gtggtttttaatgtatctgcctctcaactagattgtaatctcctagaggatccagaagcatgtctgatcctagcaagggtctgtctgacatgtagtaggcactgaagaataacagtaaat

SEQ ID NO: 13058 - DNA, 120 bp, synthetic construct
  source 1..120: mol_type = other DNA
caaagctctcctcattcaccctaattcataaaccagactgactaagttatgttcacggaacaaagctcttttcttacttcctttgctcctacgatcccattccctcactatgcttcttga

SEQ ID NO: 13059 - DNA, 120 bp, synthetic construct
  source 1..120: mol_type = other DNA
catatatgtacacactgcatatatacatatatacatatatgtacacacactgtatatagatacacatatatgtacacacacactgtgtatatatacacatatatgtgcacacactgtata

SEQ ID NO: 13060 - DNA, 120 bp, synthetic construct
  source 1..120: mol_type = other DNA
caagtgtacagtaggatgataaggtgttcatttctcgcctgccccccactgcctacactgaaacaaatttgctatggaagtaattttagggaagtactttagaaattgtactggtgctga

SEQ ID NO: 13061 - DNA, 120 bp, synthetic construct
  source 1..120: mol_type = other DNA
caagctgaataaaagattggattttatgcttggacatgcattatgtataaaatgccaatagtaatatttgatacatttgttggaaagatgcaataaagtgtaaaagataaaaaatatcca

SEQ ID NO: 13062 - DNA, 120 bp, synthetic construct
  source 1..120: mol_type = other DNA
caatttacagtcaaaaatcaccagtcacatgaagaaacaagtttccacgaatatgagacagcagaaacaattaagagaagaatcatttgtgcatatgactaagacactggatgcatgact

SEQ ID NO: 13063 - DNA, 120 bp, synthetic construct
  source 1..120: mol_type = other DNA
gcagtggttaagttcactgactctggaattaagtatgaacatagtcttagcttcaataaaatatgtgaccttgagcaagttactaacttctcttatgcttagattccccatctccaaaat

SEQ ID NO: 13064 - DNA, 120 bp, synthetic construct
  source 1..120: mol_type = other DNA
aattattatccccattttccagaaggggaaactgacacataggcacaaaaagttgcccattccttctaaacagcattaggttctattcacagtggcttcattagcagcagacaagaggct

SEQ ID NO: 13065 - DNA, 120 bp, synthetic construct
  source 1..120: mol_type = other DNA
ctcctctttctcatcttcctctcttccaataacctagaactttccaattcaaccagaggttgaaaattgattcatcaggcatgacgtcctttggctctgaagcattattctggatcaacc

SEQ ID NO: 13066 - DNA, 120 bp, synthetic construct
  source 1..120: mol_type = other DNA
atatgttattggtagaacctattgaagtatttatctaaatatagtgttgaaaatgctgcccgaactccttggtaactctctacatgtctctaaatgaaaatagtttatatttcttgaatt

SEQ ID NO: 13067 - DNA, 120 bp, synthetic construct
  source 1..120: mol_type = other DNA
gagggggagggtaagtatcctgaatctcttacttagggtaggaagtatattttgaaccacctaccttaaaaccatgccacccaacagccacacagagaaaaaaaaaagacagatatcaac

SEQ ID NO: 13068 - DNA, 120 bp, synthetic construct
  source 1..120: mol_type = other DNA
tttttgttccctataatcacaaccttattcgctccttctttcagtcaattgtccaaggtacccaagcaagcactgtgagtttcaaagactcatgtgatgcaggtctggtctcaaaggtaa

SEQ ID NO: 13069 - DNA, 120 bp, synthetic construct
  source 1..120: mol_type = other DNA
acttaagacacactttttgccataaatatgtagataacaacaatggtgagccattatttgtcctatgaaatattttttaagatgtgaagtgttattataatacagctgtgactcatgata

SEQ ID NO: 13070 - DNA, 120 bp, synthetic construct
  source 1..120: mol_type = other DNA
ccactcaattcatacataccttccctatctatgcttagaaggcagtgcaaaattagatagtagcaatattgattataaccacaaggtggagacagatgtcgtgtaatatgcagtctgctc

SEQ ID NO: 13071 - DNA, 120 bp, synthetic construct
  source 1..120: mol_type = other DNA
aaagatgtttgttttaactttttgaatatgaagatttctagttctagaataatgtttataaaaatatacaaatccatctggtgatgagttgacctctatcacaactagtttgcatatata

SEQ ID NO: 13072 - DNA, 120 bp, synthetic construct
  source 1..120: mol_type = other DNA
gctcttctaggatccctataaaactccaccccatgtttcttttgagtcactataaaattgatgactgaggcaatacacgagcaattatttatgcaaagcagtgtgaggaggtgcatgagg

SEQ ID NO: 13073 - DNA, 120 bp, synthetic construct
  source 1..120: mol_type = other DNA
ataacaaccttctaggtttgatactataatcaatgcctttttgcaaatgaggcatgcaatgcacaagagactgaaaaactttctcaaggttacaccactagtaaatgccagatgctggga

SEQ ID NO: 13074 - DNA, 120 bp, synthetic construct
  source 1..120: mol_type = other DNA
aaatggtaaatattgttgtagttgttggaaaattctccaggcattgtgcatcgatgatttaagaagttagatattcaagtcaggcgctgtggctcacgcgtgaaatcccagctacttggg

SEQ ID NO: 13075 - DNA, 120 bp, synthetic construct
  source 1..120: mol_type = other DNA
ttcagtgtagctgaaacatatacttagaggaaggtttttctttttaaacagttaaataatggtaaattggcaagtaccatgccaatcccccttcttgccatgtgtagtacagcagtggtg

SEQ ID NO: 13076 - DNA, 120 bp, synthetic construct
  source 1..120: mol_type = other DNA
cactttctcctctaaaataaagacaaggcatttatacatgcaagaaatagaaattagctaccagaaaaatgctgtgcccatccatattcagagcatagattaagaataaaatagtttttt

SEQ ID NO: 13077 - DNA, 120 bp, synthetic construct
  source 1..120: mol_type = other DNA
accctgtaaaccttagggtttacaaccctacgtagtttacaatactactacatacttcagtagtatctcctaagaacaaaaatactttcctgtataaccacaatgtcaatcacacatcca

SEQ ID NO: 13078 - DNA, 120 bp, synthetic construct
  source 1..120: mol_type = other DNA
tagatggattttaaagttttgcttcactgtgtgacaaaacaatgactgtttgaacacagtgtgataaaagagggctgtgagctgcaagctcagattttctgtcaagtgcctgcagctcag

SEQ ID NO: 13079 - DNA, 120 bp, synthetic construct
  source 1..120: mol_type = other DNA
caactagttttaatgttcatgggtacattttacctaaggtactgttaacattgtatagagaaagattcatcttaagcacagattggctatcaggaattagtttggggatggggttgtttg

SEQ ID NO: 13080 - DNA, 120 bp, synthetic construct
  source 1..120: mol_type = other DNA
aaagttacccatgtaaatttctacatgcttgcatccaaacaccctttgactctcttcagcttgctttcctctcgatgaaatttcattttccatattaaacatatctccaggctgtgccca

SEQ ID NO: 13081 - DNA, 120 bp, synthetic construct
  source 1..120: mol_type = other DNA
tggtgcttacaaaggccaaaaggtgatctattctcagtgaaggtgtgtgtggtgtagaagtaaagtggagaccaagaggggaaaagaactgttgttcaattattcaaaacacactgaagc

SEQ ID NO: 13082 - DNA, 120 bp, synthetic construct
  source 1..120: mol_type = other DNA
attatgattttgaatcaagcatctcctgtagaagaaatcattgaattgtggaacaaactaacatgcatttttaaaatttatataatccacctgtaatacattaaatgtggaaaactgtcc

SEQ ID NO: 13083 - DNA, 120 bp, synthetic construct
  source 1..120: mol_type = other DNA
tctcgcttttctttatatagtgtctggtgcaaaccaaaaaaatgaatgccaataattatagaaaggactttgctctctctcaaatagagtactgtgtgaccaaaggtcctgttccctgga

SEQ ID NO: 13084 - DNA, 120 bp, synthetic construct
  source 1..120: mol_type = other DNA
ttctctgagatggagccggtttacatttcctttagtctaaaggcttcaacattccaccagtacaaactaggcgcagaaatcctcccttcttcatcatggcacccaggaagagaattccaa

SEQ ID NO: 13085 - DNA, 120 bp, synthetic construct
  source 1..120: mol_type = other DNA
ttgaaaaaaattgtatcctatttactttactttttcttcgtatagattccactgccgttgtcattataggggcagtgtttatcaacctggagagctcatccccacaccctcgggcttatg

SEQ ID NO: 13086 - DNA, 120 bp, synthetic construct
  source 1..120: mol_type = other DNA
gggatggggtaaaacatttattccagtcagtaatttttgagtgtggtctaagcttaagagtatgaaagtgtaccttttaatatctaaaatatccactatattgagagagacaaaatcctt

SEQ ID NO: 13087 - DNA, 120 bp, synthetic construct
  source 1..120: mol_type = other DNA
ctttgccttaactctttatttcccttagaaaatgtagccaaggcacaacttgaaacaagaatgaaagagaatgtgagactgccttgtttctacctttctctagctgtggctcacttaggc

SEQ ID NO: 13088 - DNA, 120 bp, synthetic construct
  source 1..120: mol_type = other DNA
tggctaggccttccagtactgtgttcaataggattggtgagagtagacatcctacttttgttgcatttcttagggataatcctttaaacttttctccgtttaggattatgttggctgtgg

SEQ ID NO: 13089 - DNA, 120 bp, synthetic construct
  source 1..120: mol_type = other DNA
tctcccgactgctcctgaaaaaggatgtcaaatgaaactgtttcaaattgctgaatagcctggctaatcctgcctgtctccaatcacatactccgaatccatatttttctcactgtggta

SEQ ID NO: 13090 - DNA, 120 bp, synthetic construct
  source 1..120: mol_type = other DNA
gccagcatttgaaatgaacaaatgtttggacaatgaaaacatcagtatgaaagggaatactgtaattactttagtacatagtattccttaatatccattaaaattggtccaagcaaactc

SEQ ID NO: 13091 - DNA, 120 bp, synthetic construct
  source 1..120: mol_type = other DNA
ggtcagtccatattctcagctttgtagtagcactcaaaatcctgtttgtgtttcataacttgataaatactccaaaatttctctggattaagccaggctaccagagagagttgcacatga

SEQ ID NO: 13092 - DNA, 120 bp, synthetic construct
  source 1..120: mol_type = other DNA
cttgtaccagtcactcagtccttcttgttattctccaaatataccaggcatgcctccaactatacagtttcctctgcttcaaatttctctttctgaaatattgacatggctaggtcccct

SEQ ID NO: 13093 - DNA, 120 bp, synthetic construct
  source 1..120: mol_type = other DNA
tatctagttctaatatccatgtacatctatctggcctatggctaaactgttcagctacttaagacagaggattgctgaggccaagatcatgtaatgattgctacgctctcttagctccag

SEQ ID NO: 13094 - DNA, 120 bp, synthetic construct
  source 1..120: mol_type = other DNA
attaatgtctgcctggtcacagaatatttcattcatccagaggcatgtatctgtcaaactcagctaagtaggataggtctgagaagccagaaggatgcaaatattccctttgagttcaca

SEQ ID NO: 13095 - DNA, 120 bp, synthetic construct
  source 1..120: mol_type = other DNA
ggaatagtgagttctatggcaaaccactaggctgatcatctggttcaattgattgctgttattcaagaacacaggcctggtgctgctagacttcacaatttttctagagaaactggagat

SEQ ID NO: 13096 - DNA, 120 bp, synthetic construct
  source 1..120: mol_type = other DNA
ttgtctccataaataactgctagccacttaattacagcccgggtagtgtgaagcagatgtttttagaacatcctggaaatggggctttgggagttcataggatttcagttaaggattgca

SEQ ID NO: 13097 - DNA, 120 bp, synthetic construct
  source 1..120: mol_type = other DNA
tacttcttttaacttgttgtggtggttgccctaatgtttgcaatatatgtttacaactaaccaaatccagactcaaataatacatattacttcatgggcagagcaaataccttatgatag

SEQ ID NO: 13098 - DNA, 120 bp, synthetic construct
  source 1..120: mol_type = other DNA
tacacattggaaaaaataacagcattttgaacatagaaacatagatgaaggcaggtggggagatatgatgttcagagatgctgttttctcagagaaagaagcagagtcaataagaaaata

SEQ ID NO: 13099 - DNA, 120 bp, synthetic construct
  source 1..120: mol_type = other DNA
tagaaataacgttacttcattgggatccaaaccaaagcagaaccttttgtccaattattatcagtgagatgtttgtttagatgtgtagatggtgaaactctagattatgccccttctcag

SEQ ID NO: 13100 - DNA, 120 bp, synthetic construct
  source 1..120: mol_type = other DNA
gaccattaaaaggagattggtatggtgttgagcaccaagccactatactcaccaaataacacagaaacgttggttagttatgaaactctcttagttacctgatgcagcctcgactttagg

SEQ ID NO: 13101 - DNA, 120 bp, synthetic construct
  source 1..120: mol_type = other DNA
tagcagattagctccagttatagaacaacttctatgcagagttatgtaagattttatgcagttattttatctctctggccttagcttttacatctgtcagaaaacttatcaccctcctat

SEQ ID NO: 13102 - DNA, 120 bp, synthetic construct
  source 1..120: mol_type = other DNA
tatatcatagcagttacagtggtaaacatttagagaggacttgcgtttgccaggcaggtttggagcactctacattgctggctcattaaatagaaccatcttgtaaaagatcctgttttc

SEQ ID NO: 13103 - DNA, 120 bp, synthetic construct
  source 1..120: mol_type = other DNA
atattattagctaaataaatgtacagctgaccactaccatgataagttctttcagacatcaaacactgaattcctgaaacaccccaccccactcatggcccagtcaactgccttacttgc

SEQ ID NO: 13104 - DNA, 120 bp, synthetic construct
  source 1..120: mol_type = other DNA
atacatatccggaatatagatatgtaggaatgtatatacatatccggaatatagatatgtaggaatatatataggaatatatatagagaggaatatatataggaatatatatctctggaa

SEQ ID NO: 13105 - DNA, 120 bp, synthetic construct
  source 1..120: mol_type = other DNA
aagtaaaggattaagtttcaatctattgctttggctcaagatgttttcctgagggtgtctgtcttccccttttctacctagggtacacatttgccaaagtggtaatcactccactctctc

SEQ ID NO: 13106 - DNA, 120 bp, synthetic construct
  source 1..120: mol_type = other DNA
taaaagggaaaggacacagagatttgatggctcttgtacaaggacgtcacataaattcatgaagtgttccatatttgcacagttcccagaggctgttcaaccctttcttggttaacacct

SEQ ID NO: 13107 - DNA, 120 bp, synthetic construct
  source 1..120: mol_type = other DNA
agattatcagcaaagatagtaattgagccttgactttgctatttgttacaggtaaaatgggaaagcatatatctgaaatatctgatctaaatatctgaaaaagggagatagctcaatcaa

SEQ ID NO: 13108 - DNA, 120 bp, synthetic construct
  source 1..120: mol_type = other DNA
atcagtagctacctctgaagaatattgatatttggattgtgttgcagattgagcttaatagtatgacttttaattactctctgatagaggaagaaattgactgtgaattaacagtattta

SEQ ID NO: 13109 - DNA, 120 bp, synthetic construct
  source 1..120: mol_type = other DNA
catggctttcttttgctttttaagagttttgcttctgaaagacaaagcaagaagaattttatgttctgaaataatctctttgggtactggggattctgtagttataaaaatggcagttta

SEQ ID NO: 13110 - DNA, 120 bp, synthetic construct
  source 1..120: mol_type = other DNA
gttttggatgagtcttacatttctttctatttttgctatctatacagcagtggcggaataaaaatcatattcaccaacttggagttatgtaagacagagttttgactctagtccaaacct

SEQ ID NO: 13111 - DNA, 120 bp, synthetic construct
  source 1..120: mol_type = other DNA
aaaagaggatatatcttaaggcagatttgatccacatgtttttattatgcttaagtggatggcatgtttagacaatttttgttgttgtaggtggtggcatgtctaacaaatttaagcaac

SEQ ID NO: 13112 - DNA, 120 bp, synthetic construct
  source 1..120: mol_type = other DNA
aaaggatggtataagcatttatgtacaaccactagtatagtataaaaggcaataacatattgtctcaataatattgccacacatttttactgtacattttcatacagtaatagatcaggt

SEQ ID NO: 13113 - DNA, 120 bp, synthetic construct
  source 1..120: mol_type = other DNA
cggccacaatctttaacttcttttaattcctgttccaactttagcaaatcagtctacccctacaacataaagcacatgcactgtgtgaaaaatgcctgagacactctggaattgggatac

SEQ ID NO: 13114 - DNA, 120 bp, synthetic construct
  source 1..120: mol_type = other DNA
tcatattccaagggtgtttcaaagttataaacatctcaggggtgaagctattctctaagtaattcattttaccatttcaaagctaaggcatcagggatacaagtgagtttattaagacca

SEQ ID NO: 13115 - DNA, 120 bp, synthetic construct
  source 1..120: mol_type = other DNA
ctaatgagaagactagaagtaagtttagcacctctgaaggacaaataacacaatagggaatctgctctgcaacagcatgtgaaatgttacctgggtggcatcttaatacgtgagacagtg

SEQ ID NO: 13116 - DNA, 120 bp, synthetic construct
  source 1..120: mol_type = other DNA
aaaacccataaaaccttagaggctagaaagcagacagccaaatggtaagtaactcagcagacacaagaaagctgaatcctaatccaagtgtagagaaagtagaagtagccccctttcccc

SEQ ID NO: 13117 - DNA, 120 bp, synthetic construct
  source 1..120: mol_type = other DNA
agagttctcctggtatacttggtgtgttaggaacctgagtctacataaagcttaccagtcatctctgttaaaacagaaaggaccaaagttcagttaaaggaaatcaacctgaagagctaa

SEQ ID NO: 13118 - DNA, 120 bp, synthetic construct
  source 1..120: mol_type = other DNA
atcaacacctgacaatgacagaagactacatgtagaaggctacatttggctttcccaaaactctagtataaattcaatctgacaagtacagttctgatagacaatttcataaattccata

SEQ ID NO: 13119 - DNA, 120 bp, synthetic construct
  source 1..120: mol_type = other DNA
gttagaatctcccatcatatttctttttctctttaatcttcttcacagtcctccagagcactgtgatggccacacaccataacagagataacagaggcagatgatgatcatgacagcaga

SEQ ID NO: 13120 - DNA, 120 bp, synthetic construct
  source 1..120: mol_type = other DNA
tcaggttcttaaagtctccatctttgatttcggttattttgttgttttgcaggtctagcagagttgtgtcagggggaagatcctttggcactttgtccagacctagcataagagtaatag

SEQ ID NO: 13121 - DNA, 120 bp, synthetic construct
  source 1..120: mol_type = other DNA
cttaaactcacttaagggaacagggaaaggtactgacaataaaatttcttgaacagagatctgtggatcatgctcaaaatcatggactgtgaaacaaacttaaaaatctgggccgggcgc

SEQ ID NO: 13122 - DNA, 120 bp, synthetic construct
  source 1..120: mol_type = other DNA
cctgtttctattcccttacttcctagtcattcatttccccctgtgactctcttgaaactgaaataggtatgacccaattgtcacattcagcggccacttctcagtccttatttgactcaa

SEQ ID NO: 13123 - DNA, 120 bp, synthetic construct
  source 1..120: mol_type = other DNA
tgcaactttggtgacggtgtatgtagttacatcccctgtagtgcagctggtatttagggtcctcattggcaaagttgagggtataagcagggagggaggggaccttggcttctttccatt

SEQ ID NO: 13124 - DNA, 120 bp, synthetic construct
  source 1..120: mol_type = other DNA
ttcctccctccctcctttcctccctcactcctttcctccctcacttcttccttcctttctctgggctgatagatgagacaaagggggctcgcccagccccagtttctccatctgggcact

SEQ ID NO: 13125 - DNA, 120 bp, synthetic construct
  source 1..120: mol_type = other DNA
tcggggagtaagtggacattacttatatggcttactttttaaaatggactgtcttgtaaccaatgtcattcttttctctaggaaggaagagagagtggttcaaagtagaagatgctatca

SEQ ID NO: 13126 - DNA, 120 bp, synthetic construct
  source 1..120: mol_type = other DNA
gttggtgaatattttagggaaatattagcaaaatgcatgtagtaaagacatcttatgaaaactgtattcatggaatttgatttagcatgctcagttgccagttcccattatcgatactct

SEQ ID NO: 13127 - DNA, 120 bp, synthetic construct
  source 1..120: mol_type = other DNA
gagatcttgtgccataaatacagctgaactgaatataaatgttcacaaattaatgctgtcaaaggaatgagtaaagcagaaaaacttttaaccagcaacatttcaagtacgtagtgtgat

SEQ ID NO: 13128 - DNA, 120 bp, synthetic construct
  source 1..120: mol_type = other DNA
caaagtagaaactgtgctgcatgatgttattttgtaaacagatgacattttctgaccaggcacatgccatccaattttctgtcaatcacactgttgtataaagcagcagaactgaagggg

SEQ ID NO: 13129 - DNA, 120 bp, synthetic construct
  source 1..120: mol_type = other DNA
tcatgataatcttatggtaccactgtagtatacactgtccttcatcactgtacattgttgactaaaacattgttatttcaggcagaatcttgccctgtcacccagggtggaatgcggtgg

SEQ ID NO: 13130 - DNA, 120 bp, synthetic construct
  source 1..120: mol_type = other DNA
tttgagaagtgtctgttcatgttccctagcccactttttaatggaattacttatttttgcttgttgatttaagttccttacagattctggttctagaaggggtttgggaagtcattaacc

SEQ ID NO: 13131 - DNA, 120 bp, synthetic construct
  source 1..120: mol_type = other DNA
caggcaagaatgatgatttggactaggatagcggcagagggaatggtgacaaatggtcaaatctagatacattttggagatagagctaacaagattcgctaatagaccagatgttgggta

SEQ ID NO: 13132 - DNA, 120 bp, synthetic construct
  source 1..120: mol_type = other DNA
gcttttatacttgctgtttgtctgcatagaacactctttctcacagtatcagtaaagctagctctcttacttccttcaggtttttactcaatgaaggcttccctgaccagcttattcatc

SEQ ID NO: 13133 - DNA, 120 bp, synthetic construct
  source 1..120: mol_type = other DNA
aagagcaaatgctaacattcttcatcattcatgacatagctcctgagagcctacgctgtgatggggacagacagagaataaaacagacaaaaacatctgcctttatggaggttccctaaa

SEQ ID NO: 13134 - DNA, 120 bp, synthetic construct
  source 1..120: mol_type = other DNA
tttacataagaatcagagatctctgaaatcaactgtcatcaggtaggaatctctgccaaagaatactggcagattgaggccacaggacttcaccaggttctataacaaaagccttcagag

SEQ ID NO: 13135 - DNA, 120 bp, synthetic construct
  source 1..120: mol_type = other DNA
cttccacttggctaggggagaaaagttatttttactacctcgagcagaaacctgtctctctggtcattaataaattcatggacagtcctttttgtgtcggaacctgtgaagaaagttgaa

SEQ ID NO: 13136 - DNA, 120 bp, synthetic construct
  source 1..120: mol_type = other DNA
gagacaaaaaaataaaatcatacaaagaatcaatgaaacaaaaagttggttctttgaaagaaaaacaagattgacagaccactagctagattaacaaagaaaaaagagagaagatccaaa

SEQ ID NO: 13137 - DNA, 120 bp, synthetic construct
  source 1..120: mol_type = other DNA
agccaattactcatagtaaatctccttcttattggttctgtttttctggagagttctgcctaatacagtggtgtttacagagtccatggacctatgccttatataccatcactcccaggc

SEQ ID NO: 13138 - DNA, 120 bp, synthetic construct
  source 1..120: mol_type = other DNA
agctctacgagaccttcgactcattggttggtcaaatggtggactgtttatctgcaacttttcaagatatccatcaggtattctgatgtctgcaggcagtgataaccgcttatttaaatc

SEQ ID NO: 13139 - DNA, 120 bp, synthetic construct
  source 1..120: mol_type = other DNA
ctgtcctgttgcacaaggaattggacgacaaagaaagcttactaatctcagactatgaataaatacttgagtaccatctgacccaaacaagaaattactcacgtcattaacaaacaagtg

SEQ ID NO: 13140 - DNA, 120 bp, synthetic construct
  source 1..120: mol_type = other DNA
gtgtaaagaggatgtttatagctataaaagcttacattaaaagagctcaataacctaacggtacactttatagaattagaaaaagaacatcaaacaaaactcaaagctagcagaaagaag

SEQ ID NO: 13141 - DNA, 120 bp, synthetic construct
  source 1..120: mol_type = other DNA
atgaagtattttgacactttgatatgaaaccataatactggctccagagtctgccttagaagcatcagctgattccttggaagaggaaatttagaaagaagctactctaagacggggggg

SEQ ID NO: 13142 - DNA, 120 bp, synthetic construct
  source 1..120: mol_type = other DNA
aacttaaaacactcaaatgcactgattttttgctgtgagatgaaggcctgtattcatgaaaggaattctttacataaaccaacacagtctctaccatttctggttgatttctttaaaagt

SEQ ID NO: 13143 - DNA, 120 bp, synthetic construct
  source 1..120: mol_type = other DNA
taaaatgccacagagagggttgagtagaacacaaatgaagaagagttggcaattagcaggccattggtgaattcaagagagccacttttgtagcatgataggccggaaatcattttgcaa

SEQ ID NO: 13144 - DNA, 120 bp, synthetic construct
  source 1..120: mol_type = other DNA
cctaagggtctagaacagtgtcttgtacatagtaggcattcatcaattgttagttagcgtgaatgaaagaaagaatgagtgagcaaaatcagtaagtgatcgttgtcacagagatagaaa

SEQ ID NO: 13145 - DNA, 120 bp, synthetic construct
  source 1..120: mol_type = other DNA
ggcaaatgtctatttcatagaggcgtactttaagatcatatttactcacccaatgtcaattttctatcattaactcaacagacatttttaagcacttactgagtgtctttggctaagtgc

SEQ ID NO: 13146 - DNA, 120 bp, synthetic construct
  source 1..120: mol_type = other DNA
aatcagggacagcctgcattctgcagaatagaatgagagctcctgctggacaatggcacaacagtgagttttgtaaggtaggaacaaggaaacagaagaatagaaaataaaacctgattg

SEQ ID NO: 13147 - DNA, 120 bp, synthetic construct
  source 1..120: mol_type = other DNA
atacacattttcacgtactttgcaattgagaccagaaagacttgtaggtctttctgcagaatgagtgggtccttgcaaagtgagtgggaaacttactcctagatcagaaatgtttgcctc

SEQ ID NO: 13148 - DNA, 120 bp, synthetic construct
  source 1..120: mol_type = other DNA
cttgggatgatttttacaaattttattttattttattttattttgagacagagccccattctgatgcccaggctggggtgcaatgatctcagctcactgcaacctctgcctcttgacagt

SEQ ID NO: 13149 - DNA, 120 bp, synthetic construct
  source 1..120: mol_type = other DNA
ctatctctgtaattacagggttgcatgagacagctgagaagctaagcaacatgtcccccatttaggcttattctgctgcataggtaattaatgttaggcttttaggcagagatgcagttt

SEQ ID NO: 13150 - DNA, 120 bp, synthetic construct
  source 1..120: mol_type = other DNA
aaaaaaaaaaaaaaaaaaagaaatgaaggttccaaattgatcacctaaatcatacagtcctttatcaaaatgcctggaagcctgtctaggctggaggttggctaacagcatacactcagc

SEQ ID NO: 13151 - DNA, 120 bp, synthetic construct
  source 1..120: mol_type = other DNA
agccaccgcgcccggccaattctatctatccttaaaaggtcctgtttaaacgttacctcctgtgtgaatctttctctaatgttaccattattccaccgaaaaatcatatcttctgctata

SEQ ID NO: 13152 - DNA, 120 bp, synthetic construct
  source 1..120: mol_type = other DNA
gtcatggagtcaaaggagattattcctcacccttagatttaatgtctgccctcttgggtttcagacttgtttggggcctgttactcctttcttttggcctgtgtcttccttttctttcta

SEQ ID NO: 13153 - DNA, 120 bp, synthetic construct
  source 1..120: mol_type = other DNA
cctcttatcctattgcaatgttctcaatctcattgccattaagactcttcacacaataaccactcagttaagagaatgacagagggattttttttcatgtgttttttggctgcataaatg

SEQ ID NO: 13154 - DNA, 120 bp, synthetic construct
  source 1..120: mol_type = other DNA
taatccttgttttctggacttgagtctttgcacggtctggcctctaacataacctgactaatcctaatcatctatttctccctacaccccagggtgacaatatggtttgacagtgcacat

SEQ ID NO: 13155 - DNA, 120 bp, synthetic construct
  source 1..120: mol_type = other DNA
actaattacagtcagattattcctattttataatatctaaagaaaattgtaaaagaaataaaatccttcctcagaattgacagaactaatggtcttaaaataaaagtacatgggatgagg

SEQ ID NO: 13156 - DNA, 120 bp, synthetic construct
  source 1..120: mol_type = other DNA
tatcccaaagtagactggttttcccacacttatcctacactttcctgactctgtatttgttggtgctatttcctctggagtgttttctatcagcgtctctagtgtcacctattagaatcc

SEQ ID NO: 13157 - DNA, 120 bp, synthetic construct
  source 1..120: mol_type = other DNA
cagggccgacacctggtaggctctttatgagtgcttcctgaatgaatgctgcagaattacatgtcttatatctcataattacatttcaagtctcttgaggggagaaggactatcagttat

SEQ ID NO: 13158 - DNA, 120 bp, synthetic construct
  source 1..120: mol_type = other DNA
ggaagatccagggtgaacggtagtccaggcagagggaacagcaagtgtcaaagtcctgaggacaaatttggactgctagccttcatattagtttaaaatcattgtttgattttataagac

SEQ ID NO: 13159 - DNA, 120 bp, synthetic construct
  source 1..120: mol_type = other DNA
aaatcatgcggtttcagcctgcaaggagcatgttctccaaatgggatatgtataacagtatccataatagcagcataatgagataaacaccacaggagaagtgcaaagtggcaagaaaac

SEQ ID NO: 13160 - DNA, 120 bp, synthetic construct
  source 1..120: mol_type = other DNA
attattcactaggtatttaccctgtgcacaactctgacctaacccttcagagggattcagacatacctatcatgtacgtattgatagctaggtgcaagcatattgtaccagatgtagtgg

SEQ ID NO: 13161 - DNA, 120 bp, synthetic construct
  source 1..120: mol_type = other DNA
tgtgtatgtctctgcattaaacccagatttgcttttcttttgttaacgacagtggagaaggtcaagaggatgcaggagaacttgactttagtggtctcctgaaacgtaggtgagaacaaa

SEQ ID NO: 13162 - DNA, 120 bp, synthetic construct
  source 1..120: mol_type = other DNA
tgctatactcttcactaggattccctatatatatactatattatatgcctgttatagatatctagatatttactatagtgcagaagcaacaaaaagaaacactttttttctgagattatg

SEQ ID NO: 13163 - DNA, 120 bp, synthetic construct
  source 1..120: mol_type = other DNA
aagaaagaagtcaatgtttggataattgaaatcttcttgttaccagctgacctaatggttattggttatctaattcccttctgcatagatgtcaattcatccaaggccatttcaagcaaa

SEQ ID NO: 13164 - DNA, 120 bp, synthetic construct
  source 1..120: mol_type = other DNA
aatgctcagtaaatgctgaggtagatggttttcaaatgaagatcttctatactctgattcgattgggactagcttctttgtgtatcctccttctgggaaatatcttccgcttaagtgcaa

SEQ ID NO: 13165 - DNA, 120 bp, synthetic construct
  source 1..120: mol_type = other DNA
gcaggtacagcctttctgagatttttcataagacttttacctgccaggaacaatggtaacagacatcaagaacaagatgtacaatccctggaaagcagatgaaggttaagttgctgtcct

SEQ ID NO: 13166 - DNA, 120 bp, synthetic construct
  source 1..120: mol_type = other DNA
gagaatacactcaaaaagaatggcacctaaatcaagaaacagagtatttccaagactccaaaagttgtcttgcgctcccttctactcatacttccttactgtctcacaaaaggtacccac

SEQ ID NO: 13167 - DNA, 120 bp, synthetic construct
  source 1..120: mol_type = other DNA
aatctctggctcaaggttttacacttgatcttagccaaaaggccgagaagcaatggctcaaggttttagcactgatgttttgctttcctagtaatagtaatgaaacataattttattgct

SEQ ID NO: 13168 - DNA, 120 bp, synthetic construct
  source 1..120: mol_type = other DNA
aatgattaaactcaggaaactcttttacatatcactggattttcagggcatagcacactcagcatatccccaagtagaagctgttcaaaaattatgcaaaacaggccaggtgcagtggct

SEQ ID NO: 13169 - DNA, 120 bp, synthetic construct
  source 1..120: mol_type = other DNA
catgccacgctctgtgagtgttctatagttgttacacaaatgcattaatacatataaataacaattctaagtactttagaaagtttttttaaaaatttctggttggcctacaaaatggga

SEQ ID NO: 13170 - DNA, 120 bp, synthetic construct
  source 1..120: mol_type = other DNA
gaggagggatggagaaaaacgaatatgcatggagcacctactgtatgccaggcactatactaggtgttccatgtataaattctcatctaatccccaaatctggccaagtgtagtattatt

SEQ ID NO: 13171 - DNA, 120 bp, synthetic construct
  source 1..120: mol_type = other DNA
tagcacaaatccaaatggaataattcgttttcaaaatatcaatatttgctgccaatgggacttaacaaaatttaaaattctaacatttgcaagtgaaaacaaaccatttctacacccaag

SEQ ID NO: 13172 - DNA, 120 bp, synthetic construct
  source 1..120: mol_type = other DNA
atgcctcctcccttctcttgatcatctcatccactctcaagaattgcttatcacctcctgatgactccataactttttactctagctcagatcttaattctaagtcacaaacaaacagga

SEQ ID NO: 13173 - DNA, 120 bp, synthetic construct
  source 1..120: mol_type = other DNA
tgatctcttagtcagctacagtttgctacaacaaaatactatagactgagtggctgaaacaacagatgtttgttgaatgagagaaagagagacagagggcactctagtgctccggttttc

SEQ ID NO: 13174 - DNA, 120 bp, synthetic construct
  source 1..120: mol_type = other DNA
attgctaaaataacagcaacaacaataaagcaagggcagcacaaaagaggaaaaaaaaaagggggagtcaagaaacctttaaaggggctgggcgaggtggcttgcgccagtaatcccagc

SEQ ID NO: 13175 - DNA, 120 bp, synthetic construct
  source 1..120: mol_type = other DNA
cgctgccagttacaggctgtgtgatcttgagtgagatacttaacttctctgtgcttcagtttccttatctaaaatggggctaataacaggacctaccttatagggttgttgcattagaaa

SEQ ID NO: 13176 - DNA, 120 bp, synthetic construct
  source 1..120: mol_type = other DNA
taaatgctggctattattataacttatctcaatccccaactagaatataaggtccatgtcttactcatctttgctgcagcaatgcctgtcaccaattaacacagtgaaatgataggtaca

SEQ ID NO: 13177 - DNA, 120 bp, synthetic construct
  source 1..120: mol_type = other DNA
ttttccactttcaaagaccctccctcacatctcattacctgataatgcaacacagtctttaatcggggcgaatttcggggtggaaaggactagataatgctgataagcgtcatcatccca

SEQ ID NO: 13178 - DNA, 120 bp, synthetic construct
  source 1..120: mol_type = other DNA
cagtttgctaactgaagtgttttattagtattttactctagtggtgtaattgtaatgtagaacagttgtgtggtagtgtgaaccgtatgaacctaagtagtttggaagaaaaagtagggt

SEQ ID NO: 13179 - DNA, 120 bp, synthetic construct
  source 1..120: mol_type = other DNA
gcatcattgctgtttgttactataaattaaatgaacctcatggaaaggttgaggtgtatacctttgtgattttctaatgagttttccatggtgctacaaataatccagactaccaggtct

SEQ ID NO: 13180 - DNA, 120 bp, synthetic construct
  source 1..120: mol_type = other DNA
ttggcaacctgttaaggagatcttcatgtgaaaaatacatgtagaagttttaaaaatttgtggatataattgtcattcagaattaagcaggttgattgctgttatctagatgggtctctt

SEQ ID NO: 13181 - DNA, 120 bp, synthetic construct
  source 1..120: mol_type = other DNA
tccctggaagaaaggctggaggactgtcagggacagatttgcgatgagatatgcctgtttcacattgttatacacgattaaagtaattaaaatacacacctctacccaacttcaagtaac

SEQ ID NO: 13182 - DNA, 120 bp, synthetic construct
  source 1..120: mol_type = other DNA
aaatatataagaaactcatacaactcaatagcaaaaaaacaaataacttgatttaaaaataggcaaaggactccggaatctgctaatcccagtcggtgccgcatccccagcccgccgcca

SEQ ID NO: 13183 - DNA, 120 bp, synthetic construct
  source 1..120: mol_type = other DNA
gaagcctatcaagcccatgcagtttctgggggatgaggagacggtgcgcaaagccatggaagctgtggctgcccagggcaaggccaagaagtgaaggccggcggggaagatactgtcccc

SEQ ID NO: 13184 - DNA, 120 bp, synthetic construct
  source 1..120: mol_type = other DNA
tcagggatattcaaatccaaaccacaataggatatcacttcacatctgttagaatggctattatcaaaaagtcaaaagataacaagtgttggtgatgatgcagagaaaagggaacccttg

SEQ ID NO: 13185 - DNA, 120 bp, synthetic construct
  source 1..120: mol_type = other DNA
tgtagtatgtgtacaaaggctctgtggggagaaatattgttctagataccaaaaaggcctgattgaagtacaaaagtgaataagggtggaggtgggatgaggcccttatcatttccaaac

SEQ ID NO: 13186 - DNA, 120 bp, synthetic construct
  source 1..120: mol_type = other DNA
aggtttcaccaatcagcatatctcagatgttttcttggagactccattaggctttaacaattgccttaaaaattccccagcaaaagcattgtgggaatagggaacaactccaggttgcac

SEQ ID NO: 13187 - DNA, 120 bp, synthetic construct
  source 1..120: mol_type = other DNA
acatcatcatgtggttcagccctgccctgcttggttctttctttagcatttacacttgctctgtgattactatgttgcaaggggagagactcacagcacagggctgtccgtgaatttata

SEQ ID NO: 13188 - DNA, 120 bp, synthetic construct
  source 1..120: mol_type = other DNA
tcacagctgaatctctttttcctcatctgtaaacttgggatcataatgactactcacagggcggttctgagtattaacttagttcatcaacctaaagtgctttgcacagcatcgggtaca

SEQ ID NO: 13189 - DNA, 120 bp, synthetic construct
  source 1..120: mol_type = other DNA
gataatgttcatggttttggacaagttggcaagtatagcacagtggttaaaagcacttctttacagcccttctctattgtctactagctgactgaaggcaagttactcaacctttctgac

SEQ ID NO: 13190 - DNA, 120 bp, synthetic construct
  source 1..120: mol_type = other DNA
caggctttagaatagacccgatctggttttcaatcgtgactcaccacttacaagataagagaccttagacaatctactgatcttattgtgaggattatacgacacaacatgtataaaaaa

SEQ ID NO: 13191 - DNA, 120 bp, synthetic construct
  source 1..120: mol_type = other DNA
gagattggtaaagatcaaaaagttggaaaatacacttttgctaagagtataaggacataggcactcttttgcactgcttgtgaaaacgtaaatgtttaacttctttggtggaatctggta

SEQ ID NO: 13192 - DNA, 120 bp, synthetic construct
  source 1..120: mol_type = other DNA
gctgagattataggcgtaagccaccacgtgcagccataaatcataaatatttagaaagcctctctaaccccctcatgaaaagaaatacctgtttttcaacaagaagtttgagaaatcttt

SEQ ID NO: 13193 - DNA, 120 bp, synthetic construct
  source 1..120: mol_type = other DNA
tatcagcattttaaaaggagaactttaggtgattctaatgtacagccagtgtggagctctactgggctagattacctgtctcctcacttcactcaactagcttcttgctgtttaatgggt

SEQ ID NO: 13194 - DNA, 120 bp, synthetic construct
  source 1..120: mol_type = other DNA
tgagaggtaacaaattataaacttctagaataaagaccaagtttactccacgacttatgcacctcagaatgcctactacctagtaaagttacctgcagataacagaaacccaagtaagaa

SEQ ID NO: 13195 - DNA, 120 bp, synthetic construct
  source 1..120: mol_type = other DNA
aaatgcttaatacatgctgagtaaaggggagagtgaatcacagacctgcctcatgaccaaggaagaaccatgggaagcccagatttatctgtaatatctcttacaaaggtaataatcggg

SEQ ID NO: 13196 - DNA, 120 bp, synthetic construct
  source 1..120: mol_type = other DNA
agttcaattataaattgaattcctactatttgccaggacatgttggctctagggatggagcagtgaagaagacaaaggctgtactcatggatcttgaactctaggtgggggaagatgcag

SEQ ID NO: 13197 - DNA, 120 bp, synthetic construct
  source 1..120: mol_type = other DNA
tagtttttaaaaattcactagcagctctgtagatattatacaacactggggaatgtggcaggatgctaaaggtgaaagtagggaaatcaggaggccattgcatattgcagtgctccagcc

SEQ ID NO: 13198 - DNA, 120 bp, synthetic construct
  source 1..120: mol_type = other DNA
acaggcgtgagccaccgcgcctggcctatcagtgttaaggtgagaacttctttctttcttgtatatggaccatacttgtgtccagttaaattttggaccatagctaaattatgaactaga

SEQ ID NO: 13199 - DNA, 120 bp, synthetic construct
  source 1..120: mol_type = other DNA
gagggggcatgtaactagcatttgttgaatacctgctatgtgccatactatgataggcaatgttgtttgttagctccgcattcataaaaaagacctctagtcattagaatgcttatatgt

SEQ ID NO: 13200 - DNA, 120 bp, synthetic construct
  source 1..120: mol_type = other DNA
ctgcagcaggtataactaggagaggaactgttggggcacagggatgggtagataatggcaaactgtttcctaagtgattgtaccaatttatacctttaccaatgatacaggaaacatctt

SEQ ID NO: 13201 - DNA, 120 bp, synthetic construct
  source 1..120: mol_type = other DNA
tagtgccagcttgtgacttaagaaagttgttatcaagaaaatagggctttttagaaagattatgccttagtaagtaaagggaatcattggagaccatagtacagcaaaatgggataatag

SEQ ID NO: 13202 - DNA, 120 bp, synthetic construct
  source 1..120: mol_type = other DNA
tttggccatcttggatgcagtcagtctccactaaacttcttgaaggcagagaccatgtccttgtattctccataaagcccagtaagtcctttctcttagcagacacttaatagatagtag

SEQ ID NO: 13203 - DNA, 120 bp, synthetic construct
  source 1..120: mol_type = other DNA
aggatgtgtgtgaggacctcgttcgccatggttataactacttggggaaagactatgttacatccggcatcacagggtaagcatgcgattgagctattttaaagaaaaagaatggtttta

SEQ ID NO: 13204 - DNA, 120 bp, synthetic construct
  source 1..120: mol_type = other DNA
tgagtctctattgtgtgcctggcaatgttgtagtcactgggtataaagcactggtcaagacagaaaaatctctgcaagatagagcttacaatctagtggaggaggcatgcaataacaatt

SEQ ID NO: 13205 - DNA, 120 bp, synthetic construct
  source 1..120: mol_type = other DNA
tgtcaaactgatctgttcttgctattactcacactattcaatgtgcttgatgcattttagatacacgggaagctataactatgggagctatggcaaccagcatcctcaccccatgcagag

SEQ ID NO: 13206 - DNA, 120 bp, synthetic construct
  source 1..120: mol_type = other DNA
gcaggcagtgcccacctcatagggtggttgtgaagatttgactggttaatataaggacagtgcctggcacacacgagcacttattaggtaataatagcttgaatcatttgaagaagtgtc

SEQ ID NO: 13207 - DNA, 120 bp, synthetic construct
  source 1..120: mol_type = other DNA
atctaaggaggacaatgattttccacatagcatccaaagattccactgacatttcagtacatgtaaaaagaaaagcccagctttcatccagagcaaagattagttaaatttgttgcccag

SEQ ID NO: 13208 - DNA, 120 bp, synthetic construct
  source 1..120: mol_type = other DNA
cctactccagtttagcctcataacaaaattccatctgccatgaccctatttccaaataaggccacattctaaggaattggaagtcaagacttcaacatgtcattttgttggggtgtgggt

SEQ ID NO: 13209 - DNA, 120 bp, synthetic construct
  source 1..120: mol_type = other DNA
attactgctcaccaacaatgcaccttatcacccaagacctctgatgaaaatgtacaaggagattaacgttgttttcacctgctaacatcaattctgcagcccttggaacaaggaatcatt

SEQ ID NO: 13210 - DNA, 120 bp, synthetic construct
  source 1..120: mol_type = other DNA
agagcagcattcttgtcccaggtagtttctgtgagggtgaaatcagctatcattccaattcaccaaagttgcttcacagtatttcacaatactcaaggaaggaagggagaaagaaagcaa

SEQ ID NO: 13211 - DNA, 120 bp, synthetic construct
  source 1..120: mol_type = other DNA
ggtttcccttatatttcctttggaaaaaaaaaggaacaatgcaacagactaggctggtttcactctgtgatcacttacaaggccagctgttcctcctccatgttcctacactgataagaa

SEQ ID NO: 13212 - DNA, 120 bp, synthetic construct
  source 1..120: mol_type = other DNA
atcatcaccatcatcatgatctccatcatcatcttcatcaccataatcatcactatcaccatcattatcaccacaatcatcatcatcaccacactatcatcaccatcatcaccaccacca

SEQ ID NO: 13213 - DNA, 120 bp, synthetic construct
  source 1..120: mol_type = other DNA
accaccatcatcatcaccattgtcatcaccatcatcaccattgccatctttatcatcacagtcttcatcactatgatcatcaccatcaccataatcatcaccattatcaccatcatcctc

SEQ ID NO: 13214 - DNA, 120 bp, synthetic construct
  source 1..120: mol_type = other DNA
aaaaaagaaagaaagaaaaacttaagtgtggttctgaaccagaggccccagcaatcccttaggagcttgttagaaaggcagaatcttggccaggcatcgtggctcatacctataattcta

SEQ ID NO: 13215 - DNA, 120 bp, synthetic construct
  source 1..120: mol_type = other DNA
cacatttcaaaacagcagctaatgctttcttaaagctcacatctgaaaatccttttaggattgagagcaattaaaaggggaatcataacccccgtggttcccccataaggtcctgacaga

SEQ ID NO: 13216 - DNA, 120 bp, synthetic construct
  source 1..120: mol_type = other DNA
gaacatcagtattccttaggcctcattgcctaaaacccaagattctgaataggagtgagcagttgttgcagatggagtgagcatttcccaaaaaataaactggctgacatcattagagga

SEQ ID NO: 13217 - DNA, 120 bp, synthetic construct
  source 1..120: mol_type = other DNA
acgcacacacatgtgtatatatgtatatacacgcacatacatgtgtatatatgtatatatacgcacatacatgtgtatatgtgtatatatacatgtatgtgtatatacgcacatacatgt

SEQ ID NO: 13218 - DNA, 120 bp, synthetic construct
  source 1..120: mol_type = other DNA
ccatgaaatactattctcttgatttttttctcccaaccatttaaaaatgtaaaagccattcttagctcaagtgtcattctaaaacaggcggtgggctggactggggccatgggccatcat

SEQ ID NO: 13219 - DNA, 120 bp, synthetic construct
  source 1..120: mol_type = other DNA
gcataacacaagcccaagtctcttcttgtccttgaactttatctgaatataaagaaaatccctagtcctaagcaggcaagctaggttagacactgcaataaaccaagcttctggtgagtg

SEQ ID NO: 13220 - DNA, 120 bp, synthetic construct
  source 1..120: mol_type = other DNA
caaaagcatacgctttgatccacacagagagccagtccaagttaggcacggtttggatcacattcattgtcatggatgccacctctgccccttttacagaaagggacaacaagcctaaac

SEQ ID NO: 13221 - DNA, 120 bp, synthetic construct
  source 1..120: mol_type = other DNA
aagccttcatttctggcttcccaatttatctcttgtccttattgcactgccacatgtatatttccagtgaagtttcaataatgatttagagagtggaaacagtgccccttgtcctttcac

SEQ ID NO: 13222 - DNA, 120 bp, synthetic construct
  source 1..120: mol_type = other DNA
acaggtgtgtatgaatgtacaggaaaaaacatagcctatatagggtttcatactaaagagcttcaggcatccacaaaacatactaaccttgttattcaaagaccattgattgtttggtga

SEQ ID NO: 13223 - DNA, 120 bp, synthetic construct
  source 1..120: mol_type = other DNA
tctggtgggaaaccaccgtactcaaaaagtcgcagcaaatcatagtattgtccatggatgtcacctggaagcaagaattttgttacacagtgttcccatacttaaagctcaatccactaa

SEQ ID NO: 13224 - DNA, 120 bp, synthetic construct
  source 1..120: mol_type = other DNA
ttttaaaaatctgaagtacatctaagtaaactaagtccattagaggtatttattctaaagctactatttaacttacttttaagtagttccaagctattcgcaaacaggataatcattctg

SEQ ID NO: 13225 - DNA, 120 bp, synthetic construct
  source 1..120: mol_type = other DNA
ttcctcatctagaacttctcaattccagaacaggaactgagctttagactatcctcatcaagccaccatctcgacacaaacaggaacaaaccaagttgctttgaatgtcattgtcctctt

SEQ ID NO: 13226 - DNA, 120 bp, synthetic construct
  source 1..120: mol_type = other DNA
ttttaactctcacaactgccctaggaattattatccccattttacagactggaatgtgcaggcttagagatgctaaaatgcctacctgagatccaggtaagtggtgattgtggtgaagtt

SEQ ID NO: 13227 - DNA, 120 bp, synthetic construct
  source 1..120: mol_type = other DNA
atatcctcactgatggcatttttgttggaagtggattaggagcctaagcactttggcctgggatcctctcttgtacataatgccagtgactcctacgacacacttttattttcatttttt

SEQ ID NO: 13228 - DNA, 120 bp, synthetic construct
  source 1..120: mol_type = other DNA
ttttctgtttttaaccacctggctgaaaagagctatgtggctagaacaggcttgactcgcccctggcagaagcagttctacacctgctgcgttcatcctcgggggactaaacacattgtc

SEQ ID NO: 13229 - DNA, 120 bp, synthetic construct
  source 1..120: mol_type = other DNA
catgagacagaaacacacagccttttattgaacatggccttttatgccaagctcacttgttctcagcatgtgggtgaaatgcattgagtttcagcccttggaaaagatatcctatgtgat

SEQ ID NO: 13230 - DNA, 120 bp, synthetic construct
  source 1..120: mol_type = other DNA
atccctctcaccagcctgagcccctttaggggcaggaaactcactcaccgtcaccagttctgactgagagaaagatctccctcactacccgagctctcattctgcctgctgggcttcgca

SEQ ID NO: 13231 - DNA, 120 bp, synthetic construct
  source 1..120: mol_type = other DNA
ctccagtacttgcctcctccttctgatcctccaggacttacatcctccctctgtccctccagacatgtctcttccctctgacctctcagacatgcctcctctttctgactcttctccttc

SEQ ID NO: 13232 - DNA, 120 bp, synthetic construct
  source 1..120: mol_type = other DNA
aagggctggaggcaaatgtggaacgactgctaaactgggcacggggtttcttttgggggtgaagagtatgttttaaaatcaactgagaagacggttgtacaacattgtgaatattttaaa

SEQ ID NO: 13233 - DNA, 120 bp, synthetic construct
  source 1..120: mol_type = other DNA
caacttattttctaactcctccactgtgctgagtaattcctccaccctgaatcttcagggtgacatttggttagtatgccctgtatgtgtgtgactgcctgtgggaatagatgataaaaa

SEQ ID NO: 13234 - DNA, 120 bp, synthetic construct
  source 1..120: mol_type = other DNA
ggcgtgagccaccgtgcgcgacctgaatacttttcatgatggcaaaatctcaccggcaacagaagaaaaaccaatgtttttaaatttactgaccagaaaacttgactgagagttgaatta

SEQ ID NO: 13235 - DNA, 120 bp, synthetic construct
  source 1..120: mol_type = other DNA
aggtgcattggacgtaggtgcaaagggtgtaagtacagtggatgtaggtgcagatggtgtaggtgcagaggaagtaggtgcattggatgtaggtgcaaagggtgtgagtacagtggatgt

SEQ ID NO: 13236 - DNA, 120 bp, synthetic construct
  source 1..120: mol_type = other DNA
ggggaggtagggtctgactacacagggatagtatgagggagtttttttgggggggttgaaggaattgttcccagttgtggtggtggttacatgaattaataacatgttaaaattcataga

SEQ ID NO: 13237 - DNA, 120 bp, synthetic construct
  source 1..120: mol_type = other DNA
aaacaaaattcagaagggcagtttcctatgtggaagagagggagtgttggtcttgtacagctgaccaggagctttaaaggtactagtaagggtctatatcttaactggatggtaggatca

SEQ ID NO: 13238 - DNA, 120 bp, synthetic construct
  source 1..120: mol_type = other DNA
tgttttgcaagcatcaacttgcaaggaaaaatataatgccctgccattatacagggacaatggataaaatgaaggcttccgcttggtggggaggggctggggggtttacaacaagtttct

SEQ ID NO: 13239 - DNA, 120 bp, synthetic construct
  source 1..120: mol_type = other DNA
acgaattagaccagggatgcacacattttttctataaagggtcagacagtcaataattttagctttgcgactactctactctgctctgtagcgtgaaagcggcccctgatgatatgtaaa

SEQ ID NO: 13240 - DNA, 120 bp, synthetic construct
  source 1..120: mol_type = other DNA
cataaactgaattacaaaaacaggtactgggaggtagttgctattattccatttcacagataaggtaactcaggctaagagaggtgaagttagcttgtccaaggtcacaaagcccgtagg

SEQ ID NO: 13241 - DNA, 120 bp, synthetic construct
  source 1..120: mol_type = other DNA
cgcagtaagatatcccttcactccaattaaaatggacatcatcaaaaagataacagataacaagtgttggcaaggatgcaaagaaaagaggacctttatacactgttggtgggaatgtaa

SEQ ID NO: 13242 - DNA, 120 bp, synthetic construct
  source 1..120: mol_type = other DNA
caaagactacaacaaatggttgtacaggtatccaacattttggcttccctgtgtctcatcggaagaactgtcgtgggccacacataaaatagactctaacattaacaatagctgagcttt

SEQ ID NO: 13243 - DNA, 120 bp, synthetic construct
  source 1..120: mol_type = other DNA
tgggcaacacagccagtccccatctctacaaaaaaaaaaaaaattatatatatatataaaattagccaggtgtagttgtgcacgcctgttgtcccaactactctggacgctgaggcgaga

SEQ ID NO: 13244 - DNA, 120 bp, synthetic construct
  source 1..120: mol_type = other DNA
ctccctctaattattctcaaatactttgtcaactgaaatactgaggtgttaacagctctccaggcatgcgctgtggaacactgaacaattaatgagcatgcacaggcaatgccagcttta

SEQ ID NO: 13245 - DNA, 120 bp, synthetic construct
  source 1..120: mol_type = other DNA
gctctgtgactctggacaagttactttctctctctgagcctccatttctttatctgtaaagcgggaatatcagtaggacctaattccagggttgatgggaggatttagtaagttaatcaa

SEQ ID NO: 13246 - DNA, 120 bp, synthetic construct
  source 1..120: mol_type = other DNA
tctgtcccctcctagttgtgtgatgctaggtgcattatttaacctctctgtgcctcagtttcctcatctatcaagtgggggtatgattttatagtcttcatgggatcacagtgatgttaa

SEQ ID NO: 13247 - DNA, 120 bp, synthetic construct
  source 1..120: mol_type = other DNA
gatggatggatggatggatgggtagataaatgagaggagagtagatggatggatgggtggatgggtaaatgggaggagagtagatggatggatggatgggtggatgggtaaatgggagga

SEQ ID NO: 13248 - DNA, 120 bp, synthetic construct
  source 1..120: mol_type = other DNA
gatggatggatggatggatagtctaatcagttgtaataactcactacctcctcttacagcaacagcaagagcttggatttcattttcagctcagctcaaacctcttatatttggtaggtg

SEQ ID NO: 13249 - DNA, 120 bp, synthetic construct
  source 1..120: mol_type = other DNA
ccatccaggtcctcagggatggctgccagcccccaactccagtagatctcatttttctctcagcaaagcttcactccctgggacaggccactgagatgaagcctagctaaggaaggcctt

SEQ ID NO: 13250 - DNA, 120 bp, synthetic construct
  source 1..120: mol_type = other DNA
ctcccagcacttaactctgggtcacacattctttgtagcttgtaacatcgctcgtgctacagaaacaatggtcatgttttctgggactgcatcttaccttcttcactagctagggctctc

SEQ ID NO: 13251 - DNA, 120 bp, synthetic construct
  source 1..120: mol_type = other DNA
aaaaaaaaaaagaaaagaaaaagaaaaggaagagacaccagagtgctctctctctctcctctctctctagctccctctctctctctccctctttcctttctctttctctctctggacata

SEQ ID NO: 13252 - DNA, 120 bp, synthetic construct
  source 1..120: mol_type = other DNA
tagttccttaattgaaatatgccccagcagagggattccaagctctgagatacatcaagtgtggtctgggaggagtgcttctgactcagacagtcctggaatcaatactgccattggtca

SEQ ID NO: 13253 - DNA, 120 bp, synthetic construct
  source 1..120: mol_type = other DNA
tctctccctctctccctgttttcctcaatgaagaaaacgatgacggctgtgaagatacagtcacaaataaacacaggactgggaagagggagaaaaagattccctggcttaggagagaag

SEQ ID NO: 13254 - DNA, 120 bp, synthetic construct
  source 1..120: mol_type = other DNA
agtgaaaatgtgtccacatagctgtgcaagagcttaatgcaattatacttatgatgacctttatccctgtcttaatttaggttcccccaaaagcagaccctaaagcaaggtttggggtcc

SEQ ID NO: 13255 - DNA, 120 bp, synthetic construct
  source 1..120: mol_type = other DNA
gatgaagaaactgtaatgttatcaacaagtaatggataagtgacaggtcatggctaaagtcttatagttggtagtaacctacaccctcactttccccttaatcacatggcatcctgcagc

SEQ ID NO: 13256 - DNA, 120 bp, synthetic construct
  source 1..120: mol_type = other DNA
acacacaccattcccccaaagacgcacacacacacatacacaccattctcccaaagacgcacacacacacatacacaccattctcccaaagatgcacacacactcacacatacacaccat

SEQ ID NO: 13257 - DNA, 120 bp, synthetic construct
  source 1..120: mol_type = other DNA
atccctaaaaataactgagaactgtggaagtgaagacaccaaggcaaatattggtttgcattgtgtgcacacacaccaacatgcacacacacacaacatgcagaccctcacaccaacatg

SEQ ID NO: 13258 - DNA, 120 bp, synthetic construct
  source 1..120: mol_type = other DNA
acatgcaacatgcacacaccaacatgcacactcacaccaacatgcacacactcataccatgcgcatatacaccaatatgcacacatacaacatgcacacaccaacatgcacactcacacc

SEQ ID NO: 13259 - DNA, 120 bp, synthetic construct
  source 1..120: mol_type = other DNA
cacagaatagtcactttaaataggacggggaaatataccaactttaatcaagggggagaaaagcctcgctacgacccatcactcttagccagttgatgatagtgacagctgattagaggg

SEQ ID NO: 13260 - DNA, 120 bp, synthetic construct
  source 1..120: mol_type = other DNA
catgatccgaagttaaaaggagtttcaggtaaattctgcttccaccctctggtcagtggtacaaagatcaaaggaaagtggatgtagttgagtacaactctgtccttctttccaaaatcc

SEQ ID NO: 13261 - DNA, 120 bp, synthetic construct
  source 1..120: mol_type = other DNA
tttcatccttaagctatcagatagtccttctgctaatagtaccctctcctttctactaatggtaccctttgaaccacaatggctaggaaaagcatatctgaagttgaggtgctcagagag

SEQ ID NO: 13262 - DNA, 120 bp, synthetic construct
  source 1..120: mol_type = other DNA
ttactcacccaattcaatacaagtgatgccaagtgaccaaatatcaactttcccatcatactgtccttcatccatagctaagatcacctctggagccatcctaccaaacataaggtacaa

SEQ ID NO: 13263 - DNA, 120 bp, synthetic construct
  source 1..120: mol_type = other DNA
tttttgcaaaatagtaataatgtgagtatacgtgtagaaaaaattataaaagaattgcttcttttccgagaaaacaacaaatggcggatgacgccggtgcagcgggggggcacggaggcc

SEQ ID NO: 13264 - DNA, 120 bp, synthetic construct
  source 1..120: mol_type = other DNA
ttaagcgtgaaaaaaaaattataaaagaatttataccagaatatatatcagtgataatccctggagcagtgctatctgatagaactttctttgatgatgggacagttctatttctagatt

SEQ ID NO: 13265 - DNA, 120 bp, synthetic construct
  source 1..120: mol_type = other DNA
acttgctcaagagcattttccccttcagccttcggtcgacacaaaagacttaaaacagtgaatatttaccagtagaattgggactccttgaggttctgtagctataacgtggactcactt

SEQ ID NO: 13266 - DNA, 120 bp, synthetic construct
  source 1..120: mol_type = other DNA
tctgatgcagccagtgatgactttgaacagcaatatcagaagattggctgggtccctccatgtgttatggacaagcatgaaatttacagtccctttgattgtgaacaatcacatcaggaa

SEQ ID NO: 13267 - DNA, 120 bp, synthetic construct
  source 1..120: mol_type = other DNA
ttaaactgcttctctaagaaatgaaaccattgcccagcccaacatcccctttcctgctattttatttgaggagtagggctctgtggttattgatcacttgagaggtagaaggaggatgtt

SEQ ID NO: 13268 - DNA, 120 bp, synthetic construct
  source 1..120: mol_type = other DNA
ggataagcagtgatagaggccagtgtcccttctgtaaggtctgatggatcaggtgaaagtcaaaaaccagtggtcaccatccctaagctccaattgaaataaatgttaattggttcaaaa

SEQ ID NO: 13269 - DNA, 120 bp, synthetic construct
  source 1..120: mol_type = other DNA
gctgtgtgactttagacaggtgaattgcttagcctctctgaggctttatttccttgtgtctatgaatttagaacaggaacatcaactaggcagaagcagtgtgaggactaaatcgaataa

SEQ ID NO: 13270 - DNA, 120 bp, synthetic construct
  source 1..120: mol_type = other DNA
gccagttcaagtctcttgttcatttttccgttgttatacacatctcagatctacttccagatgtggggaaacaagcactggtgtaggtgagagtgaaaatctgtacattcttggaacatg

SEQ ID NO: 13271 - DNA, 120 bp, synthetic construct
  source 1..120: mol_type = other DNA
attgtgtgtgaattatatgtcaataaatctgtttttctgaagaaaaaaagaagaacaagaagaaggaggagggggaggaggagggaagggggaggaggagaaggaaagaaggaagaagga

SEQ ID NO: 13272 - DNA, 120 bp, synthetic construct
  source 1..120: mol_type = other DNA
cctagcacatagcatttactcaataaataatctgtgattcttttggtggtgcttaagagaacactgattgacctaaagaaaagctggctccaatcactctaaaccccaccggcagctatg

SEQ ID NO: 13273 - DNA, 120 bp, synthetic construct
  source 1..120: mol_type = other DNA
gaagaggcagttttctgtgctggttaggtacacagactttgaaattccaaaagctctgggttctaatcccagctctgccacttaatggctgttagactttcatctagagacttaagatct

SEQ ID NO: 13274 - DNA, 120 bp, synthetic construct
  source 1..120: mol_type = other DNA
aacggatggaagccacttgggggcttaaccaccaacacacatccttcttatcaggacattggcaatatgaaaggatactttcttaggtcactctttgtttcatttatccaggatgaattg

SEQ ID NO: 13275 - DNA, 120 bp, synthetic construct
  source 1..120: mol_type = other DNA
agggggctgggaaaggtcccaagccccgaaaagctgttttctgaacagaagaagtagtatctgagatgggaagaaactaagatagaccatcagcagatatgcgattcttatatatatata

SEQ ID NO: 13276 - DNA, 120 bp, synthetic construct
  source 1..120: mol_type = other DNA
ctggtcttccacacccatccctctcctcgatcgcaaacctaaaattacacagatcattcatgcacatgatttaaacatttccaaaagttcaaagttcttctggaaggcaaccactgtgaa

SEQ ID NO: 13277 - DNA, 120 bp, synthetic construct
  source 1..120: mol_type = other DNA
caggagttcgaagcctcattgagctatgatcacactaccacattctaccctgggtgatggagcaagaacctgtctcaaaacaataaacagataaataaaagaacatacggatctctctta

SEQ ID NO: 13278 - DNA, 120 bp, synthetic construct
  source 1..120: mol_type = other DNA
ggtggggaagtatgaaaaacactaaaattttctttctttattaggattagacgtgactgctctttcctgagagaatcctgaatgtgtccctgtgtcaccacttgtctccagtgaagggct

SEQ ID NO: 13279 - DNA, 120 bp, synthetic construct
  source 1..120: mol_type = other DNA
acaatcataattcactataaccttgaattcctggactcaagcaatcctattgcctcggtctcctgagtagctaggaacacaggcatggcctccacctctggctaatttttaaagtttttg

SEQ ID NO: 13280 - DNA, 120 bp, synthetic construct
  source 1..120: mol_type = other DNA
agtagaaaaaaatgaaactatctgggaggtctactagaacaaagtaacaaagaaactccctctccaggagtgttcctgactataaaccaggctctcccctgcgagagggggtgaatcctt

SEQ ID NO: 13281 - DNA, 120 bp, synthetic construct
  source 1..120: mol_type = other DNA
ttttctattatgaaaggaatgagggaagatgacaatgtagcgtatcatatagtaagtttgcattcgaaaaacagaagagggagttcaaatccattgatcccggcctggcgtggtggctca

SEQ ID NO: 13282 - DNA, 120 bp, synthetic construct
  source 1..120: mol_type = other DNA
tttgaggcaaatgaggagatactagggatgagctgtcagagtcgactcttcagccatcaacgcctcgcggtgcttcctgcctgcccttcctcagatgctccccttgccctatcaatacgt

SEQ ID NO: 13283 - DNA, 120 bp, synthetic construct
  source 1..120: mol_type = other DNA
agctattgtgggaaagaagcagaaagggaattggtctcgttctttttctgttcaccactgccccgcccttcctttcttttacccactttccaggtggatgtttttggtacttaatataat

SEQ ID NO: 13284 - DNA, 120 bp, synthetic construct
  source 1..120: mol_type = other DNA
gatacagactgtaaaacagtgcagtcactttggaaaacagttcagctcctcaaattgttaaacacagagttaccatatgacccagcaatcccactcctaggtatagtcaagagaattgaa

SEQ ID NO: 13285 - DNA, 120 bp, synthetic construct
  source 1..120: mol_type = other DNA
tagtttgtatgatatctaacagatgtcattgtgtttcactgaaggttaaaaatactctgtgatacccacgagtttgaacctgcaggcctgcgctcctcacattactgcttgtacactcct

SEQ ID NO: 13286 - DNA, 120 bp, synthetic construct
  source 1..120: mol_type = other DNA
ccctttgagtctctctggtgggagaatctcaacccacagagtaggattccagtgttcacatgcatttttggtactatgaggcctctgaatgtcaaccctgtcacctgagactctgttgaa

SEQ ID NO: 13287 - DNA, 120 bp, synthetic construct
  source 1..120: mol_type = other DNA
atttctttccttgttttcagatttaatgctttcctttttccagcaggtctccttcgtccatccatccatcatccatctacccacccacccaccaatccatccatccattcatccaaccat

SEQ ID NO: 13288 - DNA, 120 bp, synthetic construct
  source 1..120: mol_type = other DNA
tttattacctattctgcgccaggcactctgtgggacgggagtagacttggtcctgaacatccaaagatgaatgaaatgggtccctgctttctttttctttttttagatagagttttgctc

SEQ ID NO: 13289 - DNA, 120 bp, synthetic construct
  source 1..120: mol_type = other DNA
gtggctccccaaaaagttaaacgtagagttgccatataaccagcaattcctctcctaggtatagacccaaaagaattgaaggtagggattcaaacggatacttgtacactaatgttcata

SEQ ID NO: 13290 - DNA, 120 bp, synthetic construct
  source 1..120: mol_type = other DNA
ggagatttccagagcaggaagtatcctggaaaaagtggtggcatttattcctgtgactttttcatcaagctccatgacacatgccaaccgttcctttcttctcacttttttttttcccag

SEQ ID NO: 13291 - DNA, 120 bp, synthetic construct
  source 1..120: mol_type = other DNA
gtcagtaattatcccttgagctcatactatcaagtattattctagatgctctatgctgtacttactcatttaatcctcaccaggctattgtctgtgaggtaggcttgaggttatcccggc

SEQ ID NO: 13292 - DNA, 120 bp, synthetic construct
  source 1..120: mol_type = other DNA
ctggggtagaaggtgggaggcactggggtagaaggtgggaggctggggtagaaggtgggaggctggggtagaaggtgggaggctggggtagaaggtgggaggcactggggtagaaggtgg

SEQ ID NO: 13293 - DNA, 120 bp, synthetic construct
  source 1..120: mol_type = other DNA
ttctaacatcagtgcttgggatgtgctcattaagtgtgttgagtttgaatgttgttgattcgcacccacctgctaaggatcatgcccctcacaggtgtttccttccaggctctacttgaa

SEQ ID NO: 13294 - DNA, 120 bp, synthetic construct
  source 1..120: mol_type = other DNA
catacctataccccaaacccacaccccacacctaacaccccataccccacacccacacctatactcacaccccacacccaacaccccacacccccattcacaccccacacctaataccca

SEQ ID NO: 13295 - DNA, 120 bp, synthetic construct
  source 1..120: mol_type = other DNA
cctagctccacgctgtggccaccatggaggaggacggcccagccccgcgctgtggtcaccatggaggaggatggcctagctccacgctgtggccaccatggaggaggacggcccagcccc

SEQ ID NO: 13296 - DNA, 120 bp, synthetic construct
  source 1..120: mol_type = other DNA
cactttacgtacatagtctcaataagcttcagaaaagcccaatgcatacgtattactgtattccctgctttttcaagatgaggaaactgaggagaaggaatgtgagtaactcactcaagg

SEQ ID NO: 13297 - DNA, 120 bp, synthetic construct
  source 1..120: mol_type = other DNA
atgtgtttgcagtgtctgtgtattgtgtgtgttggtgtgtggtgtgtgttggtgtgtgtggtgtgtgggtggttatgtgtgtggtgtgtgttggtgtgttatatgtggggtgtgtgtgtt

SEQ ID NO: 13298 - DNA, 120 bp, synthetic construct
  source 1..120: mol_type = other DNA
tgtgggatgtgtatgtttgcagtgtctgtgtgtggtgttggtgtgtgttgtgtgtgttggtgtgtggagtgtgtgggtgtgtgtatgtggtgtctggtgtggtattggtgtgtgtgttgg

SEQ ID NO: 13299 - DNA, 120 bp, synthetic construct
  source 1..120: mol_type = other DNA
tgtgtggtgtggtgttggtgtgttgtgtgtgtggggtgtgtgggaatgtgtgtggtgtctgtggggtggtgttggtgtatgttgtgtgtggtgtgttggtatgtgttggtgtgtgtgggg

SEQ ID NO: 13300 - DNA, 120 bp, synthetic construct
  source 1..120: mol_type = other DNA
ccaggcagaaggaactgtgtgggctttgtcgagctggctttccctatccactaggcctttgcttaaacgccacttcctccagaaagcctcccctcactgctctggtcaggttggctatcc

SEQ ID NO: 13301 - DNA, 120 bp, synthetic construct
  source 1..120: mol_type = other DNA
acaggcttaatttaagtaaacctgctaagcaactgtcatcagaaatttgcagaaagttcttttcctccgtggtataactgcggagttaagaacatgggcgctacactcaaattgcctggt

SEQ ID NO: 13302 - DNA, 120 bp, synthetic construct
  source 1..120: mol_type = other DNA
gagaaacacagcgacatctgctggactctgtgcaaactactagtttgaggcaattcagtctcattagattgtcctacagtcctttcaataacatcatgtactttcaaagctgggttttgg

SEQ ID NO: 13303 - DNA, 120 bp, synthetic construct
  source 1..120: mol_type = other DNA
cacttgcactgatggtacaaaagcaatggtggataagaactgtacatgctgtttcaaggcaatggaaccaaactgcactattcttttctgtattttacatcacaagtgcttgtggaggcg

SEQ ID NO: 13304 - DNA, 120 bp, synthetic construct
  source 1..120: mol_type = other DNA
aaaatgaggtaagcacaaaataatgtggatccgtcagaattgggtatcttatacacacgcaggcttattgttcagaatagataatttacgaactgtagctcctctggggtcaacgaagag

SEQ ID NO: 13305 - DNA, 120 bp, synthetic construct
  source 1..120: mol_type = other DNA
agattactataaacaagagaggaatggattgcattagtcgctggttgaaagcagcaatgccatttcctttcccataataacactgtttagctcagtcccttctggggctaatcccctatt

SEQ ID NO: 13306 - DNA, 120 bp, synthetic construct
  source 1..120: mol_type = other DNA
cttcctctggaggcagcggttgatcaaagtggagaagaagttgggaaaggatgggctggagaagtagtacaccacggggtccagcatgctgttcatgtaggtgaagctgagagtgataaa

SEQ ID NO: 13307 - DNA, 120 bp, synthetic construct
  source 1..120: mol_type = other DNA
aagctcggagtgaggcatgaaacattttcccttagcctccagatggaaccaaccctgccaacaccttgattctgcacttctagcttctagatctgtgggagaatacatttctattgttcc

SEQ ID NO: 13308 - DNA, 120 bp, synthetic construct
  source 1..120: mol_type = other DNA
ttaaggtgatccttgcttttggctttttacctgtacattgcttggtgatacagacaagccaactgctctgaaagcacagaggtaattccagagcatccacctttcttcatttactgtcat

SEQ ID NO: 13309 - DNA, 120 bp, synthetic construct
  source 1..120: mol_type = other DNA
tctgtgaaccataacccagatatagcaacgccagactgtctcctatcaaaatttattgaaatggtagatttttggtaagtacagaaacacaagcgaaggaaccaggaggaacgtgcaccc

SEQ ID NO: 13310 - DNA, 120 bp, synthetic construct
  source 1..120: mol_type = other DNA
atctgtcctctccatgagtctttccattcaccttcttgtcccaactatgactaaaggggagacggggaagccagggcatcacgaagctcctagaacacttcaggcatttccgtggacgtg

SEQ ID NO: 13311 - DNA, 120 bp, synthetic construct
  source 1..120: mol_type = other DNA
ctggaggtgacagatgaggtactggagaaggcagctgggaccgatgtcaacaacatgtgagtcactctgcatggctacatagccagttcccctcggcttccccattccttcctaccgcgt

SEQ ID NO: 13312 - DNA, 120 bp, synthetic construct
  source 1..120: mol_type = other DNA
tggccgggaagatctagaaaacattctactgtgtgaaatcaagcagattgccgaacagcatggacatacgtgttgaagatccaagcagtactttatgtgtgctgtaattttttgcaagga

SEQ ID NO: 13313 - DNA, 120 bp, synthetic construct
  source 1..120: mol_type = other DNA
accctagtgccgtgttacttggcagaagccctgcctgttcccacatctgtaaagttaggcatttggggtgctccatcgtgagcctccttcctgctctaacattcagcgtgggtttgaggc

SEQ ID NO: 13314 - DNA, 120 bp, synthetic construct
  source 1..120: mol_type = other DNA
gccagtagcactattgttctcctggttcccattcaaaacctcagctacagtttgctgcactgtctccaattccatattctagaaccaagtcccaaaattcttttggtatcgttatgtaca

SEQ ID NO: 13315 - DNA, 120 bp, synthetic construct
  source 1..120: mol_type = other DNA
gactctcttcaggttgaaaagcctctttatccatttaatcctctctggccctccttcccctccagcgtggatgcaactagagagacaaatcgcctaggaagactgatcaatcacagcaaa

SEQ ID NO: 13316 - DNA, 120 bp, synthetic construct
  source 1..120: mol_type = other DNA
gaaatcaaactagatgtgggcagggagagggttgcttacctgccctgctggggcagggtttcctgaaactgggttaattctttatagaaatgtgaacactgaatttattttaaaaaataa

SEQ ID NO: 13317 - DNA, 120 bp, synthetic construct
  source 1..120: mol_type = other DNA
acagagaagataaaaacgggaggcatgaaaaagaaacaaactccacagacaccagtggaagggtttgattagggtctaagttagcggttgaattgtgtcacctgcctctaaattcactta

SEQ ID NO: 13318 - DNA, 120 bp, synthetic construct
  source 1..120: mol_type = other DNA
ttctggcctccggaagtgggagacaatacctgactgttattgaagcccctgagtctgcagtattttgttacagcagttctagaaactgatgcagtatatgacagccaacgagggatgaca

SEQ ID NO: 13319 - DNA, 120 bp, synthetic construct
  source 1..120: mol_type = other DNA
tgtgtgcagtgtgtgtgtgaggtctgtgtgtgtgtgtattgtgtgaggtctgtgtgtgtgtggtgtgtgtaaggtttgtgtgtatgtgatgtgtgaggtctgtgtgtgtgtggtgtgtgt

SEQ ID NO: 13320 - DNA, 120 bp, synthetic construct
  source 1..120: mol_type = other DNA
gtgtgtggtgtgtgtgaggtctgtgtgtggtgtgtgaggtctgtgtgtgtgagatctgtatgtgtgaggtctgtgtgtgtggtgtgtggtgtgtgtgtgtggtgtgagatctgtgtgtgt

SEQ ID NO: 13321 - DNA, 120 bp, synthetic construct
  source 1..120: mol_type = other DNA
gtgtatgtgtgtggtgacatctgtgtgtgtgtggtgtgtgaggtccgtgtgtgtgtggtgtgtgtgaggtctgtgtgtggtatgtgaggtttgtgtgtggtgtgagatctgtgtgtatga

SEQ ID NO: 13322 - DNA, 120 bp, synthetic construct
  source 1..120: mol_type = other DNA
cccgtagtaataagagctaatacttgctgagtgttttctacgaaccaggtaagattctaagcggtctgtacagattcattgattttaccctcatgacaagcttatgagggaggtatggtc

SEQ ID NO: 13323 - DNA, 120 bp, synthetic construct
  source 1..120: mol_type = other DNA
ctgcccatgtaggtgctctccagaatgagttcatcaaaccgttacgtggagcgggatttcgggggaaatgttactgtcatctttatactttaggtatcatttaacaatgataaatgggaa

SEQ ID NO: 13324 - DNA, 120 bp, synthetic construct
  source 1..120: mol_type = other DNA
tagtcaacatccagtgatgagaaactgaatgttcttctaatttttctcccctccccctttacgtaagcttttaagagcatctggttatccctagtgttttggtgttaggatgatgggcct

SEQ ID NO: 13325 - DNA, 120 bp, synthetic construct
  source 1..120: mol_type = other DNA
ggtgtgagccatcgtgcctggcctgttctccttttctttacattatttcaatttcccctgatgtcatttttcccctgatttatctttgactgactgtttcaggctggtggttatctaaaa

SEQ ID NO: 13326 - DNA, 120 bp, synthetic construct
  source 1..120: mol_type = other DNA
ttgcccaagtcctgggaaccatacagcgtgctgtcttttgcatataaatggaatcagacactatgtgacttttatcactgacttctttcacttagcagcatgttttcaaggttcatccac

SEQ ID NO: 13327 - DNA, 120 bp, synthetic construct
  source 1..120: mol_type = other DNA
ttcaaaggacagactcaaatccaggattctgttggctgatggaagaagcagagcccatatgttagtggcttgctgtcaaagagaaagaaccatttaaatgtgatccagaatttagtgggt

SEQ ID NO: 13328 - DNA, 120 bp, synthetic construct
  source 1..120: mol_type = other DNA
tgcgtgccacgggaaactcaggttacctcttgggcctcagttttcccatctgcagaacgggagaacaatagttcccatctcacagggcggagaagctggcaattgtgagggcaagggcaa

SEQ ID NO: 13329 - DNA, 120 bp, synthetic construct
  source 1..120: mol_type = other DNA
tcctggctctctagcccccaaacccacacccggctcttctttgagtctcaatgtctcccattttctgtaaaatggggatacttgaaaacccctgcatttgctatcagggaaatcaaaccc

SEQ ID NO: 13330 - DNA, 120 bp, synthetic construct
  source 1..120: mol_type = other DNA
aggcacatacaagtcacacaggcacacacaaatgcagtcacacaaacacacatatactcagacacagtcacagacatgcacatacaggcacacacatacagtcagacagatatacacagg

SEQ ID NO: 13331 - DNA, 120 bp, synthetic construct
  source 1..120: mol_type = other DNA
gacagacagtcatataggcagatacacagagagacacacacacacacatatatacacaggcacataagtcacacagccagccagccagacacacagatggtcacacaggcagacagacac

SEQ ID NO: 13332 - DNA, 120 bp, synthetic construct
  source 1..120: mol_type = other DNA
ggagtttcagagagagagagggagacagagacccagaaagagagggagacagagacccagagagacagggaaacagagaaccagagagagagagagagacagagacccagagagacagag

SEQ ID NO: 13333 - DNA, 120 bp, synthetic construct
  source 1..120: mol_type = other DNA
gatagatagacagatgagatccaagaaaggacagagacctggagatggacaggagatgagactgagaggtgagactggagtgagagagatgagaaagagaggatcagagagagagagaga

SEQ ID NO: 13334 - DNA, 120 bp, synthetic construct
  source 1..120: mol_type = other DNA
acttactgcgtagccttgagaagctcctggacctctctaagccttaccttcctcttctggaaaatggggataaaagagttactactctagagagccgttgtgaaggtgaaatgagctcat

SEQ ID NO: 13335 - DNA, 120 bp, synthetic construct
  source 1..120: mol_type = other DNA
cttcatcctcattacccccctcatcttcatcatcttcaccccatcatccttatcttcatcaccccatcacccttatcatcctcatgacctccatcatccttatcaccctcatcatcctca

SEQ ID NO: 13336 - DNA, 120 bp, synthetic construct
  source 1..120: mol_type = other DNA
catccttatcacccccctcatcctcatcacccccctcatcctcatcacccccctcatcctcatcctcatcacccccatcatcctcatcaccctcatcctcatcacgcccatcaccctcat

SEQ ID NO: 13337 - DNA, 120 bp, synthetic construct
  source 1..120: mol_type = other DNA
attcctcttcaagttcccacttccatttctttgatacccagaagtggggttgccccaccatatggtaattctatgttaaattttgggggggcctccacacagcagctgcaccatcctaca

SEQ ID NO: 13338 - DNA, 120 bp, synthetic construct
  source 1..120: mol_type = other DNA
tctacagttcatactatattaaggccacccccttcactgacatttcaccgttaccacaggaacatttgtagaccgaaaaccttgacccccttcacccagtctaatgcaaaataaacttaa

SEQ ID NO: 13339 - DNA, 120 bp, synthetic construct
  source 1..120: mol_type = other DNA
tccagctgtttcccagcaaagatcaacctctgctggtcaggagggatgccttccttgtcttggatctttgccttgacattctcaatggtgtcactcggctccacttcgagagtgatggtc

SEQ ID NO: 13340 - DNA, 120 bp, synthetic construct
  source 1..120: mol_type = other DNA
cagtcagggtcttcacgaagatctgcatcccacctctgagacggagcaccaggtgcagggtagactctttctggatgttgtagtcagacagggtgcgcccatcttccagctgctttccgg

SEQ ID NO: 13341 - DNA, 120 bp, synthetic construct
  source 1..120: mol_type = other DNA
gtggtggaaacatcctgaatgccaggtcgagaaactagtacttttttcccttgctccttggtcgtagttgcatggaatacaatttcatgtagttctgaaggttaagaaactaactccact

SEQ ID NO: 13342 - DNA, 120 bp, synthetic construct
  source 1..120: mol_type = other DNA
cactttccagtcctttttcccctaccaacattttaacagcttttttgaggtgtaattgcactacacctcaatagactgtgcgtatttaaagtgtacaggttgacaccttttgacatacac

SEQ ID NO: 13343 - DNA, 120 bp, synthetic construct
  source 1..120: mol_type = other DNA
tccatttatctatcctccacccatcatctacccattcatccatgcatcctccattcatcatccctcatagatcatccatccaactatccatccatccatctgtctatacattcttctctc

SEQ ID NO: 13344 - DNA, 120 bp, synthetic construct
  source 1..120: mol_type = other DNA
taactcctcacctatgactttctaaccctgtacctgggagctcttctggtagaggagttctaccatacagtcctttagggaactgtgactccatacaaggatcccaaggtcatgagaatg

SEQ ID NO: 13345 - DNA, 120 bp, synthetic construct
  source 1..120: mol_type = other DNA
cgatggtgatggggaaggggtggtggtgatggtgacagtgacgggaaaggggtggtgatggtgacagggaaggggtggtggtggtgatggtgacagtgacggggaaggggtggtgatggt

SEQ ID NO: 13346 - DNA, 120 bp, synthetic construct
  source 1..120: mol_type = other DNA
gcaaaaccctggtgcatgctgtagccatatctgctgacctgtgagaaattccagtatatatgctgacctccacagagtactttgaacagggaaactttaatataaagaactatcaactcc

SEQ ID NO: 13347 - DNA, 120 bp, synthetic construct
  source 1..120: mol_type = other DNA
ctttatgtggagtatctcatgaatcctttcaatgagggctccatgtgccaggcagggtgctcagccctttgtgtggagtatctcatgaatcctttcaatgagggctccgtgtaccaggca

SEQ ID NO: 13348 - DNA, 120 bp, synthetic construct
  source 1..120: mol_type = other DNA
cagggattctgtccggcacatagagagggctcatttttgaataagtgaatgaatggtgtagacactcaggaaggtttcgtgcagtatcatgacaaacccatggatttaaatacgactaat

SEQ ID NO: 13349 - DNA, 120 bp, synthetic construct
  source 1..120: mol_type = other DNA
tttacataatatttttgcaacttgcctattttccctcaacaatgcatcctgaagatggtttcacaccacttcatagatgtcatccactctgttctttgctgctgctgtatattgttctgg

SEQ ID NO: 13350 - DNA, 120 bp, synthetic construct
  source 1..120: mol_type = other DNA
atcccttagaacagtggctgacacctagcaagggtcagtaaaccttggttttgagaatgatttgaatctgtgtccagtcagatagacgcaattcctagatggttagttatatgatgcaca

SEQ ID NO: 13351 - DNA, 120 bp, synthetic construct
  source 1..120: mol_type = other DNA
ctgcccctgccctgattctaagcagcatctcttcgcactctttctctttctctatgtcaggcattctaaccttgcttttcctcaatacatcaagctaaagggttcttttctttccttttt

SEQ ID NO: 13352 - DNA, 120 bp, synthetic construct
  source 1..120: mol_type = other DNA
aactgttatggagagaattactttgggacttatgtgctcacaggtactctcctcagtttgtgtagaagcctgctgcctttactgcagttttgagggcacttttgcagcttgaaagtccac

SEQ ID NO: 13353 - DNA, 120 bp, synthetic construct
  source 1..120: mol_type = other DNA
ttgtggccaaccctaacgagaaacacacatgaaaggggatatggggaaatgtagttcagaggagccaagtggttccctgcagagtggagacagaggatgcagggggtgaatctggaaggt

SEQ ID NO: 13354 - DNA, 120 bp, synthetic construct
  source 1..120: mol_type = other DNA
tcctcactggaaaaggatgcgtccctccgccccctcctccctggaaatgggcacctccctcctcccctaaaatggatgcatgcctcctccccctcctccctggaaatggccgtgtccctc

SEQ ID NO: 13355 - DNA, 120 bp, synthetic construct
  source 1..120: mol_type = other DNA
cctcaagggacttttgtgaccctatttcttccccttgacccttccaactcagggtgatagcagctttttgttgttgctcatctctgagttctttgacatcccttattatttctcttattc

SEQ ID NO: 13356 - DNA, 120 bp, synthetic construct
  source 1..120: mol_type = other DNA
acttatgatttaggactttgctgccacaggtgtgtgatcctggattgtgttggttgctgttgacattttgggtagcaagtcagcctctacttcatgaagataaacacacagcttttggga

SEQ ID NO: 13357 - DNA, 120 bp, synthetic construct
  source 1..120: mol_type = other DNA
catccacccattcacccttccatccaccaatccaccttccatctacgcatctacttttccatccacccatccaacccagccacccaaacggtgaatagcaaacatttacttagcatcact

SEQ ID NO: 13358 - DNA, 120 bp, synthetic construct
  source 1..120: mol_type = other DNA
gcagtatctggtacctgttttgttttttaccactgtgagtggtgtaggggccaaggctaaacttccactttgccttctgaagacttgctgaaaaatcaactgacaaaaggcagattaata

SEQ ID NO: 13359 - DNA, 120 bp, synthetic construct
  source 1..120: mol_type = other DNA
ggaatgaaacgagaataaagacattcttaaatgaacaaaagttggagagtttgtttcaggagacctacctttaaagggtggctaatggaacagaaaaaattataatggaaaaggatttgg

SEQ ID NO: 13360 - DNA, 120 bp, synthetic construct
  source 1..120: mol_type = other DNA
ttaatgtcgttgccagggaagaacattagactcttaaacacaagtaacaggttaacaccagtgtaggcagcagaggaacttttacagacaggcaagccaaggaaagattgactaaaagag

SEQ ID NO: 13361 - DNA, 120 bp, synthetic construct
  source 1..120: mol_type = other DNA
ccctgatgatgtagccattcttgaggttcacatgaccaggagcccacatatatatgaagtctggcagtgcattaatttcctggagctactgtaacaaattatccaaaatgtagtggctta

SEQ ID NO: 13362 - DNA, 120 bp, synthetic construct
  source 1..120: mol_type = other DNA
tcacattgacagtttccaggatgttgaagtatcttttggggatcaccagtcacccactgcaggccatgttatcttgaaaatgcctgatgctcttgataacaaactaccttattgtcatct

SEQ ID NO: 13363 - DNA, 120 bp, synthetic construct
  source 1..120: mol_type = other DNA
ttggaaaatacagtttgctgcaatatctgtattcatcagctcaggctgccataagatgataccatagtctgggcagcttaaccatcaggaatttattcatttctggaggctggaagtccg

SEQ ID NO: 13364 - DNA, 120 bp, synthetic construct
  source 1..120: mol_type = other DNA
agattctgattctgttagtgtagggtagacacagctattgatagtttttcttttaatttccccacgtaattataatattcagccaggatggagagcccctgatttagaggagggggaggc

SEQ ID NO: 13365 - DNA, 120 bp, synthetic construct
  source 1..120: mol_type = other DNA
gctaagtgcttcatgttcattatttcgtttaatcctcatagcatctgtttcagcggtgtctgaacctatattatcttcattttacgggtgagggcattgaggcctgaaggcagagctaat

SEQ ID NO: 13366 - DNA, 120 bp, synthetic construct
  source 1..120: mol_type = other DNA
atgatggcaagaatgatggtgatgataatcatggtcatggtcatggtaatagtggtgacatcatgtttgagaatagccaaaaatcagatctgataaatgagaaaattggagaaagagaat

SEQ ID NO: 13367 - DNA, 120 bp, synthetic construct
  source 1..120: mol_type = other DNA
ctggagtccatcagcattggatatgagtgtttagctcagttcatcagcattggatgagtgtgtttactggaacctatcagcattggatgtgagtgtgtttagctcagtccatcagtattg

SEQ ID NO: 13368 - DNA, 120 bp, synthetic construct
  source 1..120: mol_type = other DNA
cgttggatgtgtgtttactagatcccatcagcgttggatgtgagtgtgtttactagatcccatcagtgttggatgtgagtgtgtttactggagcccatcagcattggatgtgagtgtgtt

SEQ ID NO: 13369 - DNA, 120 bp, synthetic construct
  source 1..120: mol_type = other DNA
tttactggagtccattggcgttggatgtgagtgtgtttagctcagtccatcagcgttggatgagtgtgtttactagagtccatcagcattggatgtgagtgtgtttactggagtccatca

SEQ ID NO: 13370 - DNA, 120 bp, synthetic construct
  source 1..120: mol_type = other DNA
attggatatgagtgtgtttactggagtctgtcagcgttggatgagtgtgtttactggagtccatcagcattggatgagtgtgtttactggagtccatcagcactggatgtgagtgtgttt

SEQ ID NO: 13371 - DNA, 120 bp, synthetic construct
  source 1..120: mol_type = other DNA
ccatggcaagtgaaaaacaactcacaactctgttacagaaaaatggaacctattggtctggtgcagctacagggagctcaaaagcaacttggtgaatcaggacattcaaatagtgtcaca

SEQ ID NO: 13372 - DNA, 120 bp, synthetic construct
  source 1..120: mol_type = other DNA
ttggtcacagggtttgtgcatttaaaattttctagctgctgttgcattgcccactagagaggttgtaccaatttgctctctcacagataatgtataggagtgtttatttcaggaggcctc

SEQ ID NO: 13373 - DNA, 120 bp, synthetic construct
  source 1..120: mol_type = other DNA
tcctacagcagatgtttaattcaagttcaactttccctttctatagtgtggtgacgtgtcatgcttttcactgcctgcttctcacagagtcgtaaacaaattccagcacaaacaagatga

SEQ ID NO: 13374 - DNA, 120 bp, synthetic construct
  source 1..120: mol_type = other DNA
cttgtactttaactgctctcatttctttttcttttcaaagtcgcagatgacagcagtcatcccgcccaatcattggcacctgtcggattttgtccccatgcctagcaagtagtctctgac

SEQ ID NO: 13375 - DNA, 120 bp, synthetic construct
  source 1..120: mol_type = other DNA
atcgttccgcattagtgagctcagccttcttttgagttttgccgggagaatccattgtttgcactttatacgggagaatggtctctgtggttttccctgactctctgtcgcacacgtcaa

SEQ ID NO: 13376 - DNA, 120 bp, synthetic construct
  source 1..120: mol_type = other DNA
cacttaggttgtttccaaatcttggctgttatcagtcattaaattaagggtcttgagatagatagggagagcatcctagattacttgggtgggccctaagtggagttgactgtccttata

SEQ ID NO: 13377 - DNA, 120 bp, synthetic construct
  source 1..120: mol_type = other DNA
ggtgtcctccctgaccggggtgtcctccatgaccgggtgtcctccatgaccgggtgtcctccatgaccggggtgtcctctatgactgggtgtcctccctgaccggggtgtcctctatgac

SEQ ID NO: 13378 - DNA, 120 bp, synthetic construct
  source 1..120: mol_type = other DNA
atgaccgggatgtcctccatgaccgggtgtcctccatgaccgggtgtcctccctgaccgggatgtcctccatgaccggggtgtcctctatgaccgggatgtcctccatgaccgggtgtcc

SEQ ID NO: 13379 - DNA, 120 bp, synthetic construct
  source 1..120: mol_type = other DNA
atatctctgtacaaatgactgatgcagattctgtctcttgattatactctgatgaatacaatggaaactgccattagcaggtgcagtcaccatacctgaaagacgtttgtgggcttggga

SEQ ID NO: 13380 - DNA, 120 bp, synthetic construct
  source 1..120: mol_type = other DNA
tttccctctcccattttgtcacctcaaaactgaagaagttagtccacaaggaagggttcaggtggcacaacaccatttaaatttcaagagaagcaagtctggtctgctgggatattatta

SEQ ID NO: 13381 - DNA, 120 bp, synthetic construct
  source 1..120: mol_type = other DNA
ctggcagctggaaagtcaaggagagatattcccctagaacatccagaaaacaaggcagccctgctgagaccttgattttagcccagcgcaactcaggtttgtttctaacctacagaactg

SEQ ID NO: 13382 - DNA, 120 bp, synthetic construct
  source 1..120: mol_type = other DNA
gtgcatttctagtctcgttttccttgctgtaaggctctcaatcccatgtctgctccaaaggcagaagaaccaaggagtagaaaccaatgtcttctactccacttacaagcacgggtcctt

SEQ ID NO: 13383 - DNA, 120 bp, synthetic construct
  source 1..120: mol_type = other DNA
ctgcctccacctttgtgttctgcttgcgccctcgatggcttagatggtgccagcccacactgcagagggtggatctttacttggtatactgatttaaattctagtctcttctaaggaaga

SEQ ID NO: 13384 - DNA, 120 bp, synthetic construct
  source 1..120: mol_type = other DNA
attcccgtcgtactttccctgagcatttactgggttctcctggaagcgcttccttcataaatcagttgcacacaaatcccaatctcacagtctgcttctagagaaactgaagggattttt

SEQ ID NO: 13385 - DNA, 120 bp, synthetic construct
  source 1..120: mol_type = other DNA
tgtgccaagactaacaccaacgccaacactaacactaatactaacatccatggcaatataacactaacactaatgccaccactaacaataatactaacgttaatgctaatgccatgtgcc

SEQ ID NO: 13386 - DNA, 120 bp, synthetic construct
  source 1..120: mol_type = other DNA
aacaccaacaccaatccagcactgataatattaacactaacactcatcctaatataaacactaacagcaacaccaatactaacaccaacaccaatccagcactgatgataatattaacac

SEQ ID NO: 13387 - DNA, 120 bp, synthetic construct
  source 1..120: mol_type = other DNA
actaagtggaacacccacatcaatactaacaacaataccaacactaacaccaatctaatactaacactaatgtcactgccaacaccaacactaacaccaacacaaatgctatgtcccaac

SEQ ID NO: 13388 - DNA, 120 bp, synthetic construct
  source 1..120: mol_type = other DNA
catacgtcctgagatcccaccatcgcaggcgtgaaactcaggacacaggagcatataaaagagcaaaatgcaaaatatgataaaaaccaatgcctgtcctcatggtgattacattttatg

SEQ ID NO: 13389 - DNA, 120 bp, synthetic construct
  source 1..120: mol_type = other DNA
ggtgagtgatgctctgtgaatgagcaaaatcatcaaagtgctccgggtagagctttgcagcaatgctgtcccacagacctttctgcagtaatagggacgttctctagcatatgaccatct

SEQ ID NO: 13390 - DNA, 120 bp, synthetic construct
  source 1..120: mol_type = other DNA
tgtgcacagtagctgtgatgacagtagtcccactctatccttggaggatacagtccaagacccccagtggatgtatgaaaccatggatagtactaaaccctatacatactatgttttttt

SEQ ID NO: 13391 - DNA, 120 bp, synthetic construct
  source 1..120: mol_type = other DNA
ccttgctaaaatccgtaaatgccagaaagctcagaccaattgctaccaaggagaaacgcgggcctagtggtcagattggactttttaatgaaagacaaaaattccgtttttctggaatga

SEQ ID NO: 13392 - DNA, 120 bp, synthetic construct
  source 1..120: mol_type = other DNA
aactgtttttgcttggtatgcacaagatttcaaacatttttgcaattactcacaaactcttaacgactggaagagttcacataaaaatatggatgtcggccggacgcagtggctcacgcc

SEQ ID NO: 13393 - DNA, 120 bp, synthetic construct
  source 1..120: mol_type = other DNA
actctctggatcgttgatactcatcagctcctcctaagtggatgaggtaggtgttgtgctagcacccattttaaagatatggaaatgagacacagttagataaaatcccagctcatcttc

SEQ ID NO: 13394 - DNA, 120 bp, synthetic construct
  source 1..120: mol_type = other DNA
ttggccagttacagaatggttttgaaggctggtttaggaagccacacaatacagatgctctcaactctaaatttcaagcctcaaatcaggtggaaacctcaaacttcgggaaattaatcc

SEQ ID NO: 13395 - DNA, 120 bp, synthetic construct
  source 1..120: mol_type = other DNA
ctgtggttttactccacaccccctgggtttaaaactgtatgcttattctcaaaagatggcacacaaatggccaagaagtatatgaaaaagggttcgacatgactattcaccagggaaatg

SEQ ID NO: 13396 - DNA, 120 bp, synthetic construct
  source 1..120: mol_type = other DNA
tgcaggagccgggtgcggggtcgaggtcccaggtgcgggagatgcaggagccgggtgcgggggcgaggtcccaggtgtgggagatgcaggagccgggtgcgggggcgaggtcccaggtgc

SEQ ID NO: 13397 - DNA, 120 bp, synthetic construct
  source 1..120: mol_type = other DNA
ttcagccccggcggcctccagggcaaagccggctgcacccctgcgcagcctgttctctgagcgcttttcttttcgtttttaagttgtggccagagagaccccgctcgcatagaatgtacc

SEQ ID NO: 13398 - DNA, 120 bp, synthetic construct
  source 1..120: mol_type = other DNA
tagatgatgtcatcgcctgcccctatgtagaaccttggatggtttctcatgtgttgagtatccaagctgtctgcaggaccctgagcagtctgctccctgcccacatgaaatcctccactc

SEQ ID NO: 13399 - DNA, 120 bp, synthetic construct
  source 1..120: mol_type = other DNA
taagtgtatgtatgtgtgtagatgtgtgggcatgcgtatgtgtgtatgtgggtgtgtgtatgtggatgcatgtgtatgtatatatgtgtatatgggtatatgtgtatgtgggtgtgtggg

SEQ ID NO: 13400 - DNA, 120 bp, synthetic construct
  source 1..120: mol_type = other DNA
gatacatggggtgtggttgaagcatgaattctgagaaatgctgacctacatgtgattgtcccaactacaccttcttcctccaacacagacacgtccctccagtttacttcccactctgag

SEQ ID NO: 13401 - DNA, 120 bp, synthetic construct
  source 1..120: mol_type = other DNA
atttctactccatttattcattcattgcttcttctggatattggttcatcggactggatttattgagcacctactaggtgccaagaagctggggacacagaacaggacaaacgtgtcttc

SEQ ID NO: 13402 - DNA, 120 bp, synthetic construct
  source 1..120: mol_type = other DNA
gtgtgtacatgtgtcagattctgcaggggagggggcagacctcatccaaatacgccgattgtgtgtgtacacgggtcagcagtcctaagcaccatggggtcaggcggtcctaagtccaca

SEQ ID NO: 13403 - DNA, 120 bp, synthetic construct
  source 1..120: mol_type = other DNA
atagattttgtcttctaaaagccaaatggtggtgctttcagagattctagtaggtgtcccttccatgagagtcaaaacccagatgcctctaggagttacgtctaatgagatgcgtatgtt

SEQ ID NO: 13404 - DNA, 120 bp, synthetic construct
  source 1..120: mol_type = other DNA
tgtgttcagcctctaggagttacgtctaatgagatgtgtgtgttcagcctctaggagttacatctaatgagatgcgtgtgttcagcctctaggagttacgtctaatgagatgcgtgtgtg

SEQ ID NO: 13405 - DNA, 120 bp, synthetic construct
  source 1..120: mol_type = other DNA
aatgggatgtaggaatatgaaggaggaaacaaatgtagagatttctagaaaatgtgatcaaagaaggtgatgtctgagcaaagatgtgaaggaagtaagagtgtgagtgctgtgggcacc

SEQ ID NO: 13406 - DNA, 120 bp, synthetic construct
  source 1..120: mol_type = other DNA
gaattaaggaatcgcacacaagaaaggaggtgagcagggaccagttttgaaatcaccccagttgtcctgtagaactgacgtttatggattctttgaaaaaacttagaaaatgatcctccc

SEQ ID NO: 13407 - DNA, 120 bp, synthetic construct
  source 1..120: mol_type = other DNA
gcttatttaaatcttgagccgggttggccatttcaagccagtagtcaagtcatcccaaatgtacattgactagaagtgggttcacaggtactctcatctcttctctgtgttactgtaata

SEQ ID NO: 13408 - DNA, 120 bp, synthetic construct
  source 1..120: mol_type = other DNA
gtctgtggttgccatcattttatcttttacataaaagctcccagtgtgtgtgagagacatggagatgcatcgctgaacctggtaggccgcaggcagcttcccctttctggtctgaggtct

SEQ ID NO: 13409 - DNA, 120 bp, synthetic construct
  source 1..120: mol_type = other DNA
gacatttccatcaaagtaaagccaagtccccatcagtgaacacatctctttctactttcaccaacgttacagtgtatgcattcacctataataactacgtgacccattcctgcctgcaac

SEQ ID NO: 13410 - DNA, 120 bp, synthetic construct
  source 1..120: mol_type = other DNA
ggattgtcaggaagattaaataagctaatgaaagaaaactgcctgaaaaggcccctggcacctaataaacactttgtaggtgctagttatcatcatcaccatgaccatcaccaccatcac

SEQ ID NO: 13411 - DNA, 120 bp, synthetic construct
  source 1..120: mol_type = other DNA
caccaccatcacatcaccaccatcacctccatcaccaccatcacctcatcaccaccatcacctcaccaccaccatcaccatcacctcaccaccatcaccaccatcacctcatcgccatca

SEQ ID NO: 13412 - DNA, 120 bp, synthetic construct
  source 1..120: mol_type = other DNA
acacactgttctgcacctgccagcacatatgatgtccctgtccttcctctgtccctccacacagtcctgccagcacccctcatccagcaagccggggtcctcgcctccctcagcatctca

SEQ ID NO: 13413 - DNA, 120 bp, synthetic construct
  source 1..120: mol_type = other DNA
aagaaataaaaacaatttttgaaaaatgcctttgaatcatgttttaggctactcagtgcggcccgagtgttcagtgtccataaagcctacagtcgtgcagtggaacatcctacgccttca

SEQ ID NO: 13414 - DNA, 120 bp, synthetic construct
  source 1..120: mol_type = other DNA
agcctaagtgggcctttggaaacattaaattgataactttaatactaggaaactactgggaacgccatcaaccaaagaaagggcagacatggccctattaaagctaactaatgtcggcgt

SEQ ID NO: 13415 - DNA, 120 bp, synthetic construct
  source 1..120: mol_type = other DNA
ttactaagtcactgaatagctttgtttgcactcctatgcttttaaagaaggaaagaaaaaacccagggaacaacactttgcgtttcacccaagcattgaaatctgtggtgcggcagccag

SEQ ID NO: 13416 - DNA, 120 bp, synthetic construct
  source 1..120: mol_type = other DNA
ccaatccaaggtcgcaagcacacgcatctccacaagaagaatgacaaccaatcttagaggtatagggagcttcaaatttaccccattgtcaggaaaagagaagccctatctaaaacttaa

SEQ ID NO: 13417 - DNA, 120 bp, synthetic construct
  source 1..120: mol_type = other DNA
agagccccttgaacccatgtgcaatttcacatggcggcacgcaccagggctctgaagtatcacagctggcgtgtcacgcaggccacctgcatcatggccaggcagacttgtattcagaca

SEQ ID NO: 13418 - DNA, 120 bp, synthetic construct
  source 1..120: mol_type = other DNA
atatcccaatttttaaaatgctagcaaccaattttaaccattttttccctaattctacgtaggccaaatagaaagcgtgtgtgggtggctctcagcccacagatgcccatctgctacccc

SEQ ID NO: 13419 - DNA, 120 bp, synthetic construct
  source 1..120: mol_type = other DNA
ttctactcagtgaaaatatccttcgagaataatactaaactgaggataatttcagataatagcgaatcttcactgaaggaggtaagaaggaaggggagaggaaccgcaagggcaggaagg

SEQ ID NO: 13420 - DNA, 120 bp, synthetic construct
  source 1..120: mol_type = other DNA
ctatgtaagtcaatataacacaggccagttttaccctcaagaagtgaaactgctggtgttgcatattttccataaacagtaaaaacactggccagccgcagtggctcacgcctgtaatcc

SEQ ID NO: 13421 - DNA, 120 bp, synthetic construct
  source 1..120: mol_type = other DNA
ttgctagcaactcaaggccacctgtctgtaaccgttagggtgactgattctgattttgcaagaaaaaccccagacctggatttttaaaatggaacatctcccaattttaagaaatgggca

SEQ ID NO: 13422 - DNA, 120 bp, synthetic construct
  source 1..120: mol_type = other DNA
ggaatgagcgaagcagagtcttgggaaatttcagaattagaataagcaccaaaaatacgtattgcaaagagcccagtgctgccagtttgatggctgttgtcaaacattttctcatcagac

SEQ ID NO: 13423 - DNA, 120 bp, synthetic construct
  source 1..120: mol_type = other DNA
cactggtgatctgaggagggaaacggaggcactgttggcaaaaggaggtctgtaagctgagtgctctgaaatgttggccatgcccacctggacatgggccaggtctgaacgaggcagttg

SEQ ID NO: 13424 - DNA, 120 bp, synthetic construct
  source 1..120: mol_type = other DNA
tgtcattcatagctgcgtagctttggttattggtgaggcttcctaagtgaactggccatctgcatttttctttatgttgtaaccaccttctttcctgatttctccagtggagtgtttgtt

SEQ ID NO: 13425 - DNA, 120 bp, synthetic construct
  source 1..120: mol_type = other DNA
ttaggttgtggacccctcatgtggtgacattcccaggctctggggttaggttgtggacccgtcgtaggtgacattcccaggctctggggttaggttatggacccctcgtatggtgacatt

SEQ ID NO: 13426 - DNA, 120 bp, synthetic construct
  source 1..120: mol_type = other DNA
cctctccctatggtggggcagtgacgattatgcttattagagaaatcaccaccccgtcacagagatgacatttattagagaaatcgccaccccatcacagagatgacgtttattagagaa

SEQ ID NO: 13427 - DNA, 120 bp, synthetic construct
  source 1..120: mol_type = other DNA
tactgcactaggtctcactcactgccccaggccttactcactgcatggggcctcactcactgcactgggtcttactcactgcaccagggtcttattgcatcaggtcttactgctccaggt

SEQ ID NO: 13428 - DNA, 120 bp, synthetic construct
  source 1..120: mol_type = other DNA
ggatcttactcaccgcactgagcctcactcaccacaccgggtctcactgcaccaggatcttactcactgcatggggcctcactcactgcaccgggccccactcactgcactgggtcttac

SEQ ID NO: 13429 - DNA, 120 bp, synthetic construct
  source 1..120: mol_type = other DNA
ccccatccacatagcccagtgtctccacagtgccgggagggcctgtgcgctgagccagggcaggtggcagatggcgcagggcagccatgtgttagaattcctctcaaccttcaaacctgc

SEQ ID NO: 13430 - DNA, 120 bp, synthetic construct
  source 1..120: mol_type = other DNA
cttacaacagctgagagggatgtggggatttacagttggggaaactgaggctcagggaagtcaccatgctgcccaaatccacagcggagttgggattagagttgagtctcattccgaaga

SEQ ID NO: 13431 - DNA, 120 bp, synthetic construct
  source 1..120: mol_type = other DNA
tccctggtcagcgctccctccctggtcagtgtcctccctggtcagtgccccctccctggtcaatgctccctccctgatcagtgccccctccctggccagtgtcctccctggtgagtgctc

SEQ ID NO: 13432 - DNA, 120 bp, synthetic construct
  source 1..120: mol_type = other DNA
agaatggaggacggagatgcagattttgcagttgtctagctgggcacgttgccaccccgagcaaaaaactgcttctgttagtgagaaagaactggagaaagaatactggtcaggcgtcat

SEQ ID NO: 13433 - DNA, 120 bp, synthetic construct
  source 1..120: mol_type = other DNA
ttgggtttttttctctgcctctggcccaacattagacagaccagaatctcagatattctactaggaatgaaagaatgttcatcttccccaccagacagaggggcggggagggaaggcgtg

SEQ ID NO: 13434 - DNA, 120 bp, synthetic construct
  source 1..120: mol_type = other DNA
cctgtggttaattctctggtttgtctctggagattcttcctcctggctcccaggacactcaggacctctttcccaaggatggaacctctccacacataccatggccacagtgcaggtgac

SEQ ID NO: 13435 - DNA, 120 bp, synthetic construct
  source 1..120: mol_type = other DNA
tcaaattaatcactcgtagtgtttcatgttggcaaaacattttgctgcaagttgatcatcctttcggtggccttgtcagaaaagtctgggaacagtcatgtgtgcatctttcagctttac

SEQ ID NO: 13436 - DNA, 120 bp, synthetic construct
  source 1..120: mol_type = other DNA
tctgcactcactcaagttgctcgagatcctctccagcatctccaggcatccctctcatgggtcccaggcttcacggtttctccatcccctgaatcactggaacactgcatggctgagttt

SEQ ID NO: 13437 - DNA, 120 bp, synthetic construct
  source 1..120: mol_type = other DNA
gggtgtgagtgacaggccggccctcctgtctgggtgtgagtggcagccccgccctgctgtctggtgtgagtgacaggcccgccctgctgtctggtgtgagtgacaggccggccctgctgt

SEQ ID NO: 13438 - DNA, 120 bp, synthetic construct
  source 1..120: mol_type = other DNA
ccatgcgtgtccgagaccagaggccttcaggaaacacatgccttccgcagcagcagcacagcaattaatcataatcagcaaaaactctacttttttttttgtcacatcaatttagaatct

SEQ ID NO: 13439 - DNA, 120 bp, synthetic construct
  source 1..120: mol_type = other DNA
cactggtcattactgtgtgtgcacccgtgtgtgtgcacagaccagtacagtgtgtgcactcgtgtgtgttcacggatcagtactgtgtgtgtgcacgtgtgtgttcacggatcattactg

SEQ ID NO: 13440 - DNA, 120 bp, synthetic construct
  source 1..120: mol_type = other DNA
aacctccttgacaaagagcaggatttcaagacttaccagaaagctacagtaaccaaggcagtgtggtgtcagcatgaggatacaatagagcagtgggatggaatagaaagtacagaaaaa

SEQ ID NO: 13441 - DNA, 120 bp, synthetic construct
  source 1..120: mol_type = other DNA
agaatcataagggaggccagacgcttgcagctgtgcaaatagcaaccccaggagagagtcagacaccagcagagaaccacggttcccccttcaggttggcacattgagcagtttgggtcc

SEQ ID NO: 13442 - DNA, 120 bp, synthetic construct
  source 1..120: mol_type = other DNA
tgagttgaggggacaggccttggacgggcttctgaggggcagcctctttcccctgcattgttctgctgggtacttctggggggtagaacaggaaaagcccagccttgcccttctgtgggt

SEQ ID NO: 13443 - DNA, 120 bp, synthetic construct
  source 1..120: mol_type = other DNA
ccccgcaccaggatgttctcaggtgagggctggctaggctgaagccctgtcccttttggggtggtggcagcgccctagcggacgggggcatcctttaactcgggtcactggactacagcc

SEQ ID NO: 13444 - DNA, 120 bp, synthetic construct
  source 1..120: mol_type = other DNA
gagtctgaagggagacaagccccttccaagcccgggcagcacttgccgccctgacggccgcttcctgcagcaagagcacacggagatcctgcgtggcctgcgcttcacgctgctgttcgt

SEQ ID NO: 13445 - DNA, 120 bp, synthetic construct
  source 1..120: mol_type = other DNA
aaagagggatccacaagttcactcctagtgggtgggggtgatgcatctgtggctcaaggtagagagttctgtgggtcttaactattttcattttctttttgattcttccatttacagctc

SEQ ID NO: 13446 - DNA, 120 bp, synthetic construct
  source 1..120: mol_type = other DNA
tgtcaataaaacagttatgtgtgccttcaagtgacttgattttaattttaatttttaggagaacgacacattggatacagaagggaggtgatcatgcaccatggcactggcccccagaac

SEQ ID NO: 13447 - DNA, 120 bp, synthetic construct
  source 1..120: mol_type = other DNA
aagccacatcaccacggctaacttgccaccgcagatcagcagcatcatccagggccagctggttcagcagcagcaggtgctgcaggggccgccgctgccccggcccctgggcttcgagag

SEQ ID NO: 13448 - DNA, 120 bp, synthetic construct
  source 1..120: mol_type = other DNA
gtctggttaggtaagttcttctgccttgctctgtgttaggaggatcttgtctatttggggactatttcagaaacatgctagaatcagctcatcaagtttcacagaaaaacctattgggag

SEQ ID NO: 13449 - DNA, 120 bp, synthetic construct
  source 1..120: mol_type = other DNA
caacattggcttgttcttgctttgaaagagagcactttcagtagaaaggcagattattagagttttgagtcataactgcatggttcaaacctaatgtttgttgcctactgaccccacggc

SEQ ID NO: 13450 - DNA, 120 bp, synthetic construct
  source 1..120: mol_type = other DNA
tggaaaatgagctcatgtcgagggatttctgtaatacactgcttagggaggacagcaaaatgcagagaagtgggaagtaaggcggacattttccccacacggttgtgcacgaagtgacgg

SEQ ID NO: 13451 - DNA, 120 bp, synthetic construct
  source 1..120: mol_type = other DNA
cggaatgtcgtggaagcacacacccaggttcatacggaacatcgtggaagggcacacacaggttcacatggaacatcgtggaaggacacacccgggttcacacggagcatcgtggaacaa

SEQ ID NO: 13452 - DNA, 120 bp, synthetic construct
  source 1..120: mol_type = other DNA
ccatgtgacggttttacatctgctcaggaggtgaaggtcccattattcagtggatgtgaggtgctgctgggaccatgtctgcagctgtgagtgatgcttgcgtcagtggacactccgcat

SEQ ID NO: 13453 - DNA, 120 bp, synthetic construct
  source 1..120: mol_type = other DNA
acatggaaaccccacccgggtctgcagccctcagaccgtgacatggaaaccccacccgggtctacagccttgagaccgtgacacggaaaccccacccgagtctacagccttgagacctcg

SEQ ID NO: 13454 - DNA, 120 bp, synthetic construct
  source 1..120: mol_type = other DNA
tcagacacacagaaacgatagatcagttgttttaaaagttaaaagtaacattaggaaacaaggtgaaattctccatagctcatgaggagcagaagccggctgcagtgagtggcatggaag

SEQ ID NO: 13455 - DNA, 120 bp, synthetic construct
  source 1..120: mol_type = other DNA
acatggtgaaaccccatctcctcacaaaaagtagatacagttcacagttactaattcctgtgtatcaaaaactcaacaccataaaatgaagccagaccaacagggaaagcgcttggtcac

SEQ ID NO: 13456 - DNA, 120 bp, synthetic construct
  source 1..120: mol_type = other DNA
ccccacatacaccctacacaacccgcaccccagacaccccacacaacccacaccccacatacaccccacacacccatcctacacaacccacaccccacacagacaccccacacaacccac

SEQ ID NO: 13457 - DNA, 120 bp, synthetic construct
  source 1..120: mol_type = other DNA
cacactgcacacactgtatatacacgtgccacatgcataaacacaacccacaccccacacactgtacatacacaccccacacacatacaccccatatacacaccctatacactatacgta

SEQ ID NO: 13458 - DNA, 120 bp, synthetic construct
  source 1..120: mol_type = other DNA
ccacatacaccccatacacactatacacacaccccacactgtacatacacatcccacacgcatacaccccaaatacacaccctacacacatacatcccacacaccccacactgtacatac

SEQ ID NO: 13459 - DNA, 120 bp, synthetic construct
  source 1..120: mol_type = other DNA
tgtgatagccacactggaggctgaggtatgtgttaacggggtaacagtccgggttaatggatcgatttattttgttggtgtttcagcctcccttgagctcattacaggcagaccacaccg

SEQ ID NO: 13460 - DNA, 120 bp, synthetic construct
  source 1..120: mol_type = other DNA
gggtcccccgggctggagtgagttcaaccctcgggacagggcaggagggtcccccgggctggagttcaaccctcgggacagggcaggagggtcccccgggctggagttcaaccctcggga

SEQ ID NO: 13461 - DNA, 120 bp, synthetic construct
  source 1..120: mol_type = other DNA
gctcctcttcactctctgccgtgtttttcttcctcttttattctgtttataatttaccttatcttgctggaacccttctgtttcctgggaagttaccagaacctgatcaccagcagaatt

SEQ ID NO: 13462 - DNA, 120 bp, synthetic construct
  source 1..120: mol_type = other DNA
gcctgcctggggactgggaatcagccgctgtcccagcccacccgtcaatcacccatcaatcaccggccaatcacccgtcaatcaccgtctcttgccagctttgcatcctaaatatttttt

SEQ ID NO: 13463 - DNA, 120 bp, synthetic construct
  source 1..120: mol_type = other DNA
gggctggacgggggcgtggtgatggggctggacgggggcgtggtgatggggctggacgggggcgtggtgatggggctggatgggggcgtggtgatggggctggatgggggcgtggtgatg

SEQ ID NO: 13464 - DNA, 120 bp, synthetic construct
  source 1..120: mol_type = other DNA
ccattcacctgctgacgcatatgaggctactgtgagtaacgccgctgtgaacgtttgtgtggaagcctttgcatgtacgcatgtctcatttattttgagaaaaacacctgggagtggaat

SEQ ID NO: 13465 - DNA, 120 bp, synthetic construct
  source 1..120: mol_type = other DNA
taaaattcacattctctaattcaggaggcagagagctgtgtgccttcaaaccagagtatctataaactgggtttctatcagtgagggtatagagcaaatgccggctctgtcaaggttcat

SEQ ID NO: 13466 - DNA, 120 bp, synthetic construct
  source 1..120: mol_type = other DNA
taatttattgcaaagtcaagtgggtctgttttgggaacagctggatctaggtgttcagacactggccccttcttgggtttcgtgagggaccctggaagctccaagctctcccctcttgat

SEQ ID NO: 13467 - DNA, 120 bp, synthetic construct
  source 1..120: mol_type = other DNA
ggagggatgaatgggtggtacatgaggcgttgaaggcagtggactctgtgtgatgctgcaatggtggatatctgttattattatgtattttttgattcagggtcttgctctgtcacccag

SEQ ID NO: 13468 - DNA, 120 bp, synthetic construct
  source 1..120: mol_type = other DNA
ttgccacccaacaggctgttctctgtgctgtcctctgcccagtccaggaatagacagcacaggaggaggaagcagaggcagaaacagccacaagctcatgtccacagcacccacatccag

SEQ ID NO: 13469 - DNA, 120 bp, synthetic construct
  source 1..120: mol_type = other DNA
tccacagcacccacgtccacagcacccacgtccacagcgcacacgtccacagcacccacaaccacagcgcccacgtccacatcacccacatccacagcacccacgtccacagcacccaca

SEQ ID NO: 13470 - DNA, 120 bp, synthetic construct
  source 1..120: mol_type = other DNA
caagtcattcccaagatacctagcccactcctgagataactaacccactctcatgataaccaacccattattctgataactaactcgttcccaaggaaacccactcccaagttaactaac

SEQ ID NO: 13471 - DNA, 120 bp, synthetic construct
  source 1..120: mol_type = other DNA
cactcccatgataactaacccactcccaccacacctaacccacccccaacacacctaacccatccctgagataaccaacccactcctgagataactcacacccataactaacccactctc

SEQ ID NO: 13472 - DNA, 120 bp, synthetic construct
  source 1..120: mol_type = other DNA
ccatgtaactgatgagactcctgaggctgaagtttgggcccatggccaggaggcagtgagccccagccacactccgtcacagtgctccgaactgcaaagctctcaaagagggtgtccaaa

SEQ ID NO: 13473 - DNA, 120 bp, synthetic construct
  source 1..120: mol_type = other DNA
cagagtctgatgctccgatcagccctggggtgagacggtgtgtggacatggaagacgcggtttcccaccctctgtctgtctctctctcgggaaagcctccctgtgtatttcaggactagc

SEQ ID NO: 13474 - DNA, 120 bp, synthetic construct
  source 1..120: mol_type = other DNA
caccctcacccagacacagcctcgcccagacacaccctcgcccgggcacaccctcacctgggcacagcctcaccggggcacaccctcacccagacacagcctcacctgggcacaccctct

SEQ ID NO: 13475 - DNA, 120 bp, synthetic construct
  source 1..120: mol_type = other DNA
ccggggcacaccctcacccagacacgccctcacccagacacgccctcacccgggcacaccctcacccgggcacaccctcacccgggcacatcctcaccggggcacaccctcacccgggca

SEQ ID NO: 13476 - DNA, 120 bp, synthetic construct
  source 1..120: mol_type = other DNA
gtttccctactggctcctcacagcactgggtgatggggaccagggagccctgggtggggcttgggtccaaaggagctgagtcagggctggcagcacagcctttaggacagtggctctcac

SEQ ID NO: 13477 - DNA, 120 bp, synthetic construct
  source 1..120: mol_type = other DNA
acccatctacccacccatccatacatccacccaagtacccagccatccacccatccacccagacatccactcacccacccatccatccacctacccacttatccatccatccacatatcc

SEQ ID NO: 13478 - DNA, 120 bp, synthetic construct
  source 1..120: mol_type = other DNA
atccctccatccatcctaccagtcaatcaatacttactaagcacatactatacatcaggcatcatgttatctgtctgtccaaatcctgccccacttgaactctctttctgtctccatctt

SEQ ID NO: 13479 - DNA, 120 bp, synthetic construct
  source 1..120: mol_type = other DNA
cacagattccagagcctggattcaggattcagaacccacccagtcacccccggtctgtgccctggtgggctcccatgcactcagtcctcagtttccccatccggcagcaggtgggtctgt

SEQ ID NO: 13480 - DNA, 120 bp, synthetic construct
  source 1..120: mol_type = other DNA
ccccacccacccagtcctgccctccagcccccatccacctagtcgtgtccttcagccccatgcccacacagcccagtctcccagccccgtgccccacccacccagtcctgccctccagcc

SEQ ID NO: 13481 - DNA, 120 bp, synthetic construct
  source 1..120: mol_type = other DNA
cctgtggtgtgtgtggcgcctgctctgggctcaacacatcagcacctggaaccaggctccagggcaagcccactgctcactgcacctgcctcacccgggggggcccctccccgatggcag

SEQ ID NO: 13482 - DNA, 120 bp, synthetic construct
  source 1..120: mol_type = other DNA
aattcgctaggatttgcatttccaggccggcagcctccagggatgctgagcagcatctgaacatccctataggtggttctggcttttgcttttctcccgacattccgggtggagatggtg

SEQ ID NO: 13483 - DNA, 120 bp, synthetic construct
  source 1..120: mol_type = other DNA
tgccttcccatgatggcaccccctggccacccgctgcgtaacgatggcagacgcagttacagtgttggtttctgaaccgtaagctctggataaatgtgcctctgaacaccaccgtcaagt

SEQ ID NO: 13484 - DNA, 120 bp, synthetic construct
  source 1..120: mol_type = other DNA
ctgcaccatgtctggggtttctcattcggttctgtggatctctgtccgtcgcggcatctgtgggaactctggggcttctcattgcgctcttggatctccttccgtctgtccgtttgcctg

SEQ ID NO: 13485 - DNA, 120 bp, synthetic construct
  source 1..120: mol_type = other DNA
agaatacagcagtcaacactgatctggggaggttcccagttcatcttcctccattctctcatgggtttaacctgagggtgtagatggcaaaaactgagagaaatcacattttcctagtca

SEQ ID NO: 13486 - DNA, 120 bp, synthetic construct
  source 1..120: mol_type = other DNA
tgagctgacattggaagctttgcacaaagaggcaaggaagagcttgggcactggaattaaccgtgttggttgttgctaaaacaaacaaacaaaaaaacctgacacgctaaaggattttta

SEQ ID NO: 13487 - DNA, 120 bp, synthetic construct
  source 1..120: mol_type = other DNA
cagaaaaactatattccaaatcttgctagagaacagcctcagttctgagtcccagatctttatcaaaatcaagagtgaatgaagtgctatttacgaggcatcacctcttaacaggggcgc

SEQ ID NO: 13488 - DNA, 120 bp, synthetic construct
  source 1..120: mol_type = other DNA
cattgactggttactatatcacaccgtcccagtactccacacaggctctcattcacagagctaccattgactggttactatatcacaccgtcccagtactccacacaggctctcattcac

SEQ ID NO: 13489 - DNA, 120 bp, synthetic construct
  source 1..120: mol_type = other DNA
cggcgacacccgcgtccgcagtcagcgattgtgaggcgccttgcggatcccgccctcccagcgcgtggagggcccgcccagacccgggggtcggcgctgaggttccacccaaggacccaa

SEQ ID NO: 13490 - DNA, 120 bp, synthetic construct
  source 1..120: mol_type = other DNA
tcatggagcgtgtggagacagggccaagggagcgagtctgcggggcgcgggtgaagacagcgccaggggagcgggtcttgggggcgcgggtaaagacagggccaggggagcgggtcctca

SEQ ID NO: 13491 - DNA, 120 bp, synthetic construct
  source 1..120: mol_type = other DNA
ttcctgaagatcatttttatacttccaagcttgctaacttgagtcatcatggatttttccatactgtatttaaagcagtaatccccccaagaggggcaggtgatgagatcacctagcagg

SEQ ID NO: 13492 - DNA, 120 bp, synthetic construct
  source 1..120: mol_type = other DNA
ttagttagtgagcgcccttgccagttagtgagcgcccttgccagttagtgagcgcccttgccagttagttagtgagcgcccttgccagttagtgagctcccttagccagttagttagtga

SEQ ID NO: 13493 - DNA, 120 bp, synthetic construct
  source 1..120: mol_type = other DNA
agttagtgagcgcccttagccagttagttagctcccttagccagttagtgagctcccttagccagttagttagtgagcgcccttgccagtcagttagtgagcgcccttgccagtcagtta

SEQ ID NO: 13494 - DNA, 120 bp, synthetic construct
  source 1..120: mol_type = other DNA
tgttagcctagtgagtgcccttgccagttaacctagtgagttcccttgccagttagcctagtgagtttaatgaaaagctccacaaccagggacatgtctgatgattcattattgagtgct

SEQ ID NO: 13495 - DNA, 120 bp, synthetic construct
  source 1..120: mol_type = other DNA
gaatcacttttagattttgtagattaacctcttccatcatgctctttccattcagtgcatctgtgctttggaagcactttgcatcgtggtgtctgatatgcaccgtgtgaagtgctttgc

SEQ ID NO: 13496 - DNA, 120 bp, synthetic construct
  source 1..120: mol_type = other DNA
tgcaccgtgtgaagctctctgcgtgctggtgtctgacatgcaccgtgtgaagctctctgagtgctggtgtctgatacgcaccgtgtgaagctctctgcatgctggtgtctgatatgcacc

SEQ ID NO: 13497 - DNA, 120 bp, synthetic construct
  source 1..120: mol_type = other DNA
ctgaaatgcaccgtgtgaagcactctgcatcctggtgtctgaaatgcaccgtgtgaagctctctgcgtcctggtgtctgaaatacactgtgtgaagcgctctgcgtcctggtgtctgata

SEQ ID NO: 13498 - DNA, 120 bp, synthetic construct
  source 1..120: mol_type = other DNA
cttttatttctaaagggctgctagacaagggacagctcacagctgtaatacacagaaaaatcaaactcatctttcagttctcagaaggtccagatacttcttgcactttgtgggcacaga

SEQ ID NO: 13499 - DNA, 120 bp, synthetic construct
  source 1..120: mol_type = other DNA
gaagtttatcgcaaattggcaaacttttcccacgcaccctcccatttgctgtagtccatgaaatcacgttcttggtccgtgacacacagcgcggccaagggatcggagccggcccaggct

SEQ ID NO: 13500 - DNA, 120 bp, synthetic construct
  source 1..120: mol_type = other DNA
catattcagaaaaccatcactgttgctccccaagcaggatggagtgaagtcacccagggcacccgtgagtccagccctgcaagtccagcccccgtgaaccgtcacctcttggtttcccac

SEQ ID NO: 13501 - DNA, 120 bp, synthetic construct
  source 1..120: mol_type = other DNA
cgcgcacatacacacacctcaggcacacacgtgtgtacagacatcacaactcttgcacgcacagccccccgcatgcacacaacccaggcacacacgcgtatacagacatcacaacccttc

SEQ ID NO: 13502 - DNA, 120 bp, synthetic construct
  source 1..120: mol_type = other DNA
cacaaaccactcattactgagaccaacaagcgtttccaaacactgtccagagcatcagaggcacaacaggacatgactggttcataggaaagcctgtggacccaggacctctcctccaaa

SEQ ID NO: 13503 - DNA, 120 bp, synthetic construct
  source 1..120: mol_type = other DNA
tcctaatgagccagacatgctgaccaatctgcctgctgggaccttggctcggtcctctccggcaacttcagaaacttcataagcaaaacgtagcacttggtctaacgtgccatcagacga

SEQ ID NO: 13504 - DNA, 120 bp, synthetic construct
  source 1..120: mol_type = other DNA
gaaatcaacaacagatttttaccttttgttggagaaactgttcctttattttttgcatttgctttttcagagcagcagtctcctgctgcaggtgttccacctgtgggagacatgtgcaca

SEQ ID NO: 13505 - DNA, 120 bp, synthetic construct
  source 1..120: mol_type = other DNA
gacacatctacacagatgttacactgagggctccaggagggggatgcaactacacagacattacactgatggctccaggagggcacacatctgcacagatgttataggaagaagcacttg

SEQ ID NO: 13506 - DNA, 120 bp, synthetic construct
  source 1..120: mol_type = other DNA
ggagggctccacacagacccaccacacgggatctgcactcggagggccccacacagacccaccccacgggacctgcactcggagggctccacacagacccaccacacgggatctgaactc

SEQ ID NO: 13507 - DNA, 120 bp, synthetic construct
  source 1..120: mol_type = other DNA
gaaatagggaagagcttgtttagggcctaggttttctgtctgaatacagaacacactgcatgcaaatcctagttatcactagagcatgactgaagaatgagcctttttccctacaatatg

SEQ ID NO: 13508 - DNA, 120 bp, synthetic construct
  source 1..120: mol_type = other DNA
aagagcaaaattccacctcaaaaaaaaaaaagatgcggctcagagaggtaagaaattgtccagcgccccacagctaaaggagaacagctatcaaggctgctgcatttctgtcctctggag

SEQ ID NO: 13509 - DNA, 120 bp, synthetic construct
  source 1..120: mol_type = other DNA
tacacgtcttcccatctcaaaatatgcgctgtctgggctctgcgtgcctgagtgggagggcgggcgggccatcagccagcgctcatcatgctgtttgtagctcatcagactgcggtttgt

SEQ ID NO: 13510 - DNA, 120 bp, synthetic construct
  source 1..120: mol_type = other DNA
tcagccttctctttaagtgcctgaaaagatcccaacaaccacaatgattttaagaaaacgagtcacttccatccagtgtattaacaggaacacaaccagcgagtcagtcagggcctgaca

SEQ ID NO: 13511 - DNA, 120 bp, synthetic construct
  source 1..120: mol_type = other DNA
cacagtcctgagtggccaccgcagtgctgtgtggtcccaggagcagcagagaatcgccagaggaaatcgccccaccacctgcccccacgctgaggcctacaggggcagggatccagttca

SEQ ID NO: 13512 - DNA, 120 bp, synthetic construct
  source 1..120: mol_type = other DNA
accaccatggctttaacaacaaggtgacgtcgcttttcagacatgcagctggagtaggagagaagaggatccagactcatgagcacggcactttctcatcccacaaaggcttcactctga

SEQ ID NO: 13513 - DNA, 120 bp, synthetic construct
  source 1..120: mol_type = other DNA
tctaaggtgaacccgcactccacacctccacactctaacgtgaacccgccctccactcctccacgctctaaggtgaactcaccctccacacctccacgctctaaggtgaacccccccccc

SEQ ID NO: 13514 - DNA, 120 bp, synthetic construct
  source 1..120: mol_type = other DNA
gacatggaacacgtcatgaatttgggtgtcatgcctgcacgtgggccatgctaatcttctctatatcgttccagttttagtaggtgtggtctttaaagaggtgattaagataaaatgagg

SEQ ID NO: 13515 - DNA, 120 bp, synthetic construct
  source 1..120: mol_type = other DNA
ctcccagcacggcgcacggcactcacagtgacaggctcccagcacggcgcacggcactcacagtgacaggctcccagcacggcgcacggcactcactcctggtctgactggccttcaaca

SEQ ID NO: 13516 - DNA, 120 bp, synthetic construct
  source 1..120: mol_type = other DNA
agctggtcctgaggaaagaccagcatcctctacagggcaagtgttcttgtttctactttttggagatgggaaggggaagagtgagtatcaaccgatctctctaagacacagacgcagggt

SEQ ID NO: 13517 - DNA, 120 bp, synthetic construct
  source 1..120: mol_type = other DNA
caaactcagggtctctgcattgtggcttcttctggtgctcagctgaagacaaagcctccacactggatgaacaggttgtggcttcccagcattggcagaatgaagagacctgagcaggtt

SEQ ID NO: 13518 - DNA, 120 bp, synthetic construct
  source 1..120: mol_type = other DNA
cttcttcatcagaaaaagaccgcctgactttgggctgcagcatgtcttgagtgattttatttctggcatccatactttgcacatcttcttcactgcgactcttgtctagaattgaaagga

SEQ ID NO: 13519 - DNA, 120 bp, synthetic construct
  source 1..120: mol_type = other DNA
cccaccacggaagggcctacaggggcccagccatcgttcaacctaaaaaccctttaagtcagtcttggttaatgaaaagaaatcagaggccacacggcctctgtgttttcaggaaagaca

SEQ ID NO: 13520 - DNA, 120 bp, synthetic construct
  source 1..120: mol_type = other DNA
cacaactggaggaacgctctcgccctgcaggagaaggctccgtggaagaggccgaggctgtggggaagaggtctgacgtcgatgttgatggctgtggttcctcaaagcacacctgagtgg

SEQ ID NO: 13521 - DNA, 120 bp, synthetic construct
  source 1..120: mol_type = other DNA
gcagttcaactctgtaacagggaaggatcccatttcttattgatctcttccaactttaagacttttgtatgattctttttctcactctgtcaccctggctggagtgcactgatgcgatct

SEQ ID NO: 13522 - DNA, 120 bp, synthetic construct
  source 1..120: mol_type = other DNA
ttttattttagatgatctaattaatttgggaacctaaatcttggtgttctcttgctgggagctcagattatttaaagtctcgaactagatgttgggtaggctcacaccagggctagcggg

SEQ ID NO: 13523 - DNA, 120 bp, synthetic construct
  source 1..120: mol_type = other DNA
gggtttgatagttaggatggcttcagtatccatgaactatgaaagtctaccaaaaaaatagtgacagtcaaacacaggagcaaatctgattctagggcacagagtaattattcactggcc

SEQ ID NO: 13524 - DNA, 120 bp, synthetic construct
  source 1..120: mol_type = other DNA
tgctatgcagtaaaacgtacctttgggtttttttttttttagcatcttggcttttactttttttgtgtttattttgtattttttgtatttgagaatacaggtaaatttagaaaaatttag

SEQ ID NO: 13525 - DNA, 120 bp, synthetic construct
  source 1..120: mol_type = other DNA
ggtttggtgaagagcagcttcctggacatgagagaatggtataagtgaaaactccagaggaatacctccaaacctcagtagcaggtttcccgtcactcttctcttgttcctgacagctag

SEQ ID NO: 13526 - DNA, 120 bp, synthetic construct
  source 1..120: mol_type = other DNA
ggtacacagggatatctcaatacttgcatacaatgtgtaatgatcaaatcaggatagtcagcatatctgtcacctcaaatatttatcattctttgtgttgggaacactcaacatcctctc

SEQ ID NO: 13527 - DNA, 120 bp, synthetic construct
  source 1..120: mol_type = other DNA
ttttccttcttgccttagcggaagccctgtttcactaaaggtaagagatccatcaatggctccctcctttcaaacttcaaactgacttactcatatgaagcaacattttcagcatcttca

SEQ ID NO: 13528 - DNA, 120 bp, synthetic construct
  source 1..120: mol_type = other DNA
gacacaggctagtagctgtgggtctaaggaaggtctgcatccaatgaggtgctgtgcttgtgtttgtgttttagcaccaacctcatatgttgacagagctctgaagtgtgagggacaagt

SEQ ID NO: 13529 - DNA, 120 bp, synthetic construct
  source 1..120: mol_type = other DNA
ggcttacgtcctagatttcagtgagactgactatataattcctgcccaaaccaggacacttttgaaaggaaaaagtgggtgctattaataattatgttgcaagaacagcagcagactttg

SEQ ID NO: 13530 - DNA, 120 bp, synthetic construct
  source 1..120: mol_type = other DNA
tatttatttttctgtcagtactttaaggctcttgttcccaggccataatctcatctaaaacaacaaacagatcctgttacctttcagttagcacatacctaataatctttacacttcccc

SEQ ID NO: 13531 - DNA, 120 bp, synthetic construct
  source 1..120: mol_type = other DNA
aattatctgtacaccaaacccccatgacactcaagttacccatgtaacaagcttgcacatgtacccctgaacctaaaagttggaaataaaaaaaaaataggaggaaaacaaaaattagag

SEQ ID NO: 13532 - DNA, 120 bp, synthetic construct
  source 1..120: mol_type = other DNA
gagatatctacaaagtgttttgaaattcatgtaagtatctacactctgaaagtgaatatctggcagaaataatttcagtcaataaattttataaccccctgaaattaacacttacctgct

SEQ ID NO: 13533 - DNA, 120 bp, synthetic construct
  source 1..120: mol_type = other DNA
tggcagctttctttgtaatagccaaatgtgggttgtaatctgggaaacaacccaaatgtccactaacaggtgaataagtacaaaaatgtgatacattcatacaatggtatactactcagt

SEQ ID NO: 13534 - DNA, 120 bp, synthetic construct
  source 1..120: mol_type = other DNA
agtactggcattacttgaaaaaatagaaataaaaaatacattgtcaatcatgcattccacaattttctttttgagctcgatagtatatatattttttctcattaaagattcaaaaccaaa

SEQ ID NO: 13535 - DNA, 120 bp, synthetic construct
  source 1..120: mol_type = other DNA
catactccagcagggcctcgtgcggagcttctggcagctgctccacagcctcggcatcttcgatgggcacagagtctgaattggcaagggccagggccttcagtagaacgtactcccctc

SEQ ID NO: 13536 - DNA, 120 bp, synthetic construct
  source 1..120: mol_type = other DNA
agaacatcagtggtttatacaaattaaactcccataccctcccacccccacatatactactctatctaccccttattgacattagctttcattaattaagcttctatctttagtgctact

SEQ ID NO: 13537 - DNA, 120 bp, synthetic construct
  source 1..120: mol_type = other DNA
ctctgattccttttttcaaaagtttatattgcatgaaactacgctatgtaagaaaaatacgttcttaaaaaaatcagagaaataaaactggggagcagcatcaattcggttttttaaaag

SEQ ID NO: 13538 - DNA, 120 bp, synthetic construct
  source 1..120: mol_type = other DNA
cgctccttaagaatgcgatatgcgttatctactctgtaatagggtattacctacactctagaattagaattttcatccccaagccaaacgtacataaaatcaaggaggaaactatcaatc

SEQ ID NO: 13539 - DNA, 120 bp, synthetic construct
  source 1..120: mol_type = other DNA
tcccatgtttattgctccacggggacccatatcacccattctcatttcctgttctctctgtaagtaaacatagttgtcacagtcaacctatcgatcttatgactttacatttcccatcta

SEQ ID NO: 13540 - DNA, 120 bp, synthetic construct
  source 1..120: mol_type = other DNA
ttccattttataatacgaaagactgttgaaaagcacctataaagctggaaataaaataaaagcctatgatggaaacgtaattgccattaagccacaagtggctccttaaaaaaactgcct

SEQ ID NO: 13541 - DNA, 120 bp, synthetic construct
  source 1..120: mol_type = other DNA
gggaatacaaacaggtgtaaccattttgcaagacagtctggcagtttctgataaaattaaacatactcttaccatctgatacagcaatatcactctttgcattttaccccaaggaggtgc

SEQ ID NO: 13542 - DNA, 120 bp, synthetic construct
  source 1..120: mol_type = other DNA
gggaaacttactgtgttcattaacttgacatgtgcctcttaaaccaaatacattcaacaatgtattttgaaagcctcggtcaggtaattgagtgaatagattgctctgatattactgtca

SEQ ID NO: 13543 - DNA, 120 bp, synthetic construct
  source 1..120: mol_type = other DNA
actgcaaaattactctacttcaaacatcaaaataccttcaggcaaagttttctaagagctcaagaaaaaactgaagtctaaggaaatgttctttgccatcaatatatcctcagtacctca

SEQ ID NO: 13544 - DNA, 120 bp, synthetic construct
  source 1..120: mol_type = other DNA
gccaccgcgcccggcccatgctatattcttgatactaaagctccagtctgaaatatctagctctaaaaataagtaaaccatggactttacttttgaggatccacacagcattgtgaagat

SEQ ID NO: 13545 - DNA, 120 bp, synthetic construct
  source 1..120: mol_type = other DNA
ccccgcaatatgtcccctgaataaactttgtgggtagtttttcttcattcccagaactgttatgaggtaagttcagaaattgccagcttcctgatgctctatgctttgaacacacaaaat

SEQ ID NO: 13546 - DNA, 120 bp, synthetic construct
  source 1..120: mol_type = other DNA
gcacacatacacaagaattacttaggcataaatctaaaaaaatgccttaaatatgcaggaaaccatgaaatgctgatgaaataagtcaaaggaggcctacataaagtggagagctacacc

SEQ ID NO: 13547 - DNA, 120 bp, synthetic construct
  source 1..120: mol_type = other DNA
ttggaaatcatgcaaaagtagtcaggtaaatgattgaatgaggtggagaaagctaaaacttaggcatggggttaaggaaaatgccaacgaaaagcaagtcgcaatagctcctgagagacg

SEQ ID NO: 13548 - DNA, 120 bp, synthetic construct
  source 1..120: mol_type = other DNA
gggcaggccaacacctcaacagcagtcaccaaaaaggtgcttttaactatcaatagcaagtattaacatgtttatagattgctgctaacagctggccaaagaaaggtacatacaaatgcc

SEQ ID NO: 13549 - DNA, 120 bp, synthetic construct
  source 1..120: mol_type = other DNA
catcctcggtactgttctgacagcctttccaaaaccacatctcacgtgtgtgcagctgcccggtgcccttcatgagtttccaggagcaagatcacatacagactaactgctgtggtctcc

SEQ ID NO: 13550 - DNA, 120 bp, synthetic construct
  source 1..120: mol_type = other DNA
catgctgacacacaactacccatgctcacacctgcccatgctcgcacacctgcccacactcatccacacacctatccacacttacgcacacctgcccatcacgcacgcctgcctacactc

SEQ ID NO: 13551 - DNA, 120 bp, synthetic construct
  source 1..120: mol_type = other DNA
tagcagaagcctgtcagttgtcattgctgcgtaatatccccttgtatgaatacaccataacttatgcatccattctacctaatggacgtttaggttactcctggtctgggctattacaaa

SEQ ID NO: 13552 - DNA, 120 bp, synthetic construct
  source 1..120: mol_type = other DNA
ttgatttatgctgccaagctaccctccagaaatgcactgtaaatacatccctaaaagctggattcatccatgtcttctaaacagactctttgagcctgcaagcagtagtgtatttgagtc

SEQ ID NO: 13553 - DNA, 120 bp, synthetic construct
  source 1..120: mol_type = other DNA
gagtgggtattactgtcttccccagaagcaatcaaaagagtattttaaaaggaagaatcttacagtactcccagactgctaacttggacatcatctgagaagacatctggtccacctaca

SEQ ID NO: 13554 - DNA, 120 bp, synthetic construct
  source 1..120: mol_type = other DNA
gcccacaagtgaggaaacagatgctcctctagctgacactaaagataagatgcctctagaaaaacaaactcctgttatacaggaacaggatgataaatgcgataagctccatgtttgtgg

SEQ ID NO: 13555 - DNA, 120 bp, synthetic construct
  source 1..120: mol_type = other DNA
ggccatggtaaggcttttagatatcttgctgagcaagaaaggacgccagtcaagatcttgagaataggagtaacaaactggtattaatttgaaaaagaccattctgactgcttcctggag

SEQ ID NO: 13556 - DNA, 120 bp, synthetic construct
  source 1..120: mol_type = other DNA
taaaaataaacaaccactgttcattatttcctgcaattgtgtgggccagcagtttgggctatgatcagctggaatgtttctctactaatagcagtcatcaggcagctcgaatggggtggg

SEQ ID NO: 13557 - DNA, 120 bp, synthetic construct
  source 1..120: mol_type = other DNA
atgctcttggctaattccaacactgcctagatccaactctctgcctattccataccagcacttttgcagctgaacacagtggagaaaaagaaccacaatcatgctaaacagacttatata

SEQ ID NO: 13558 - DNA, 120 bp, synthetic construct
  source 1..120: mol_type = other DNA
gctgaatctgtcaatcaatgacagaaggctcttgaaatctccaagtataatagtttctaagaacacatctgtttctccttgcagttctatcagtttttgcctcatgtgctttgatgccct

SEQ ID NO: 13559 - DNA, 120 bp, synthetic construct
  source 1..120: mol_type = other DNA
atgtacatccagtttgctgtctccaccacccagcggatccttgagagattgattctttgatttacactgagatgcctctgactgattatatgatggtcatatcttcttcttctgcaactt

SEQ ID NO: 13560 - DNA, 120 bp, synthetic construct
  source 1..120: mol_type = other DNA
agcaaccttgcattcacacatgatgtaattcattcttttttaaaaagtcagcaaaagtgtattaaagtgtttatgtgccagatataaaaggcatggtcgttgacctcaatgagtttacag

SEQ ID NO: 13561 - DNA, 120 bp, synthetic construct
  source 1..120: mol_type = other DNA
tgggtaggtcttcaaggagggataaggttgtaagaaccactcaccagtcgctactcagagactcaaggatactcctgttcctcagttggttcacaaaaaaacacttaagatttatatgaa

SEQ ID NO: 13562 - DNA, 120 bp, synthetic construct
  source 1..120: mol_type = other DNA
tgttgtaaatccacgctggcgagcccagggctctccctagctctatacactgcctggcatggtgccatgcagctaagtgtgttggaatacagcgctgtccaccattcagttattttaaca

SEQ ID NO: 13563 - DNA, 120 bp, synthetic construct
  source 1..120: mol_type = other DNA
atttataaactctcctctgtcactggctgctgaacagaaggaaccctgtgaaagttgtgtcatcgtcctcatcagcaaacaagccattgaacctctctcctcctgtcacctgcagccaca

SEQ ID NO: 13564 - DNA, 120 bp, synthetic construct
  source 1..120: mol_type = other DNA
agaccgcggcaggaggactgcctgaggccaagagttcaagaccatcccggccaacatagcaattccctgactctaaaaaaataaaaataataaaaaaataagaaaataaaattcaattac

SEQ ID NO: 13565 - DNA, 120 bp, synthetic construct
  source 1..120: mol_type = other DNA
gaacacaatcgtgacagtcagtccccattgcacacactccctcttcgtcctgtcttgctgtgcgctctaggcacgtcctagagatgggcgcttgggaagtcactcagttcatttcttagg

SEQ ID NO: 13566 - DNA, 120 bp, synthetic construct
  source 1..120: mol_type = other DNA
cagttcaagccgtgggcagatagatgggtactgtccttcagttcttcttacccattcacttgcttgctttattgcctcaaaagcccagggaatattcctagattaaaaaaaaaagtttca

SEQ ID NO: 13567 - DNA, 120 bp, synthetic construct
  source 1..120: mol_type = other DNA
tatgagaataacctgaggtcctatgggtttgtggtggaaatcaacaaagcttacaaacttaacatgcttactagtccctagtgcacagtaggcactcaataaatgttcgctgaatgtcat

SEQ ID NO: 13568 - DNA, 120 bp, synthetic construct
  source 1..120: mol_type = other DNA
gaaatgcctttaggtgacaagctggatacgtgtggagcccacctagttggctttctttctttcaaagattatgttcactctagcttctgcctgttttggattattctcctggccttcaaa

SEQ ID NO: 13569 - DNA, 120 bp, synthetic construct
  source 1..120: mol_type = other DNA
ccacataagtggaactttcttcctgaccaatacttgactgtgatacggacaaaaaagtaatctttgattaccatgttaagcttctgagattttttttacagcacttggtgctatttatgc

SEQ ID NO: 13570 - DNA, 120 bp, synthetic construct
  source 1..120: mol_type = other DNA
catgacctggtgttgggtctgatcaccccaacaactattatcacacccacactggagatgagaacatggaggcacagaaaggtaaagcaatttgtctaaagtctcacagctaacaagcag

SEQ ID NO: 13571 - DNA, 120 bp, synthetic construct
  source 1..120: mol_type = other DNA
ttgtagagaaacaccagccagcatcaagcacactgttttgttcagctgtctgttttgttttgtagcaagagttcctcaatgaaggaagcagtatgatttatacccagtgtacaacccctt

SEQ ID NO: 13572 - DNA, 120 bp, synthetic construct
  source 1..120: mol_type = other DNA
ttgaccattctagtaagtgcaaacatgatccttctagttattcagggcaaacactctgctgtcttcctgggccgctgtctttctcttgtgtcccgtccccaccagcaaatctgattggct

SEQ ID NO: 13573 - DNA, 120 bp, synthetic construct
  source 1..120: mol_type = other DNA
caggttcaaagcccctgtctttcacagctcctatctgtgaaagcagctcctcctgctttcctttttctctttagcacctgtcaccacctaacatgttatgtgtttcactctttcatcatg

SEQ ID NO: 13574 - DNA, 120 bp, synthetic construct
  source 1..120: mol_type = other DNA
actaaggacatcgtgaaaacagacaagggggatggcaaggagaagtataggggtctgaagaacaactgcctggaactcaaaaagaaaaatcacaaagaggagtttcagaaagaactccat

SEQ ID NO: 13575 - DNA, 120 bp, synthetic construct
  source 1..120: mol_type = other DNA
taagtaaccacttgccagttttcaattgattagtaaaactatttgagctggaacttctgaggaggaaaaccaaagcccctaggccatgctagattgcaggtgtgaaacctcatggaaaag

SEQ ID NO: 13576 - DNA, 120 bp, synthetic construct
  source 1..120: mol_type = other DNA
gcactgtatgatacagtttctgcttttggtaacatcctttcgtgtaacgtggtttgtgatgaaaatggttccaagggttatggatttgtacactttgagacacacgaagcagctgaaaga

SEQ ID NO: 13577 - DNA, 120 bp, synthetic construct
  source 1..120: mol_type = other DNA
ccaaattgctcgactaagaccaagtcctcgctggactgctcagggtgccagacctcatccattccaaaataagcccagtgctatccgcccaggtgctcctagagtaccatttagtactat

SEQ ID NO: 13578 - DNA, 120 bp, synthetic construct
  source 1..120: mol_type = other DNA
attttcagatgtttgaatggaacaagaaaagtgctattagcccaagcttcttacattcattaaaagagtgactatcaaaaacagcaacatgcacaatggtacatatgcacaaaatggaat

SEQ ID NO: 13579 - DNA, 120 bp, synthetic construct
  source 1..120: mol_type = other DNA
aaggaaatcctgccataagcaacaacatggctaaacttgggggtcgttatgctcaatgaaataagccagtcacagaaggacaaatactgcgcgtttccacttctataagggatctaaaat

SEQ ID NO: 13580 - DNA, 120 bp, synthetic construct
  source 1..120: mol_type = other DNA
caatgtttgcctactcagcatagcacagtggcagggttccctgtatatgattgtgagcaccatcatctcagacacaaaactaattttcagctgcgtggacatgggttagctctttctatt

SEQ ID NO: 13581 - DNA, 120 bp, synthetic construct
  source 1..120: mol_type = other DNA
aaagtatcaacactactcaagcaaataatttgtgtccacatcattcagtagagtttcaaatagcttctcagaaaaaattaaaaagtctactggcaagtagtttaaaagtggggaggggct

SEQ ID NO: 13582 - DNA, 120 bp, synthetic construct
  source 1..120: mol_type = other DNA
attcgcatttctcacaaattctcaggggatgctgctgctactgttgctggtctgtggcacactctgagaatcactggtgtatagtaagatcctgatttcttagtggttcttctttttttt

SEQ ID NO: 13583 - DNA, 120 bp, synthetic construct
  source 1..120: mol_type = other DNA
acatgcgagtgtttgttacctgcatagaatgtgtgatgatcaagtcagggcatttgggttcttcaacaccttgaatgtttgtcatttctatgtgttagtatcatttcaagtcctctctag

SEQ ID NO: 13584 - DNA, 120 bp, synthetic construct
  source 1..120: mol_type = other DNA
agtcttgagcacttttgctgcttggaattgccatgtggttgaaaacttgggctatctcggggggtggtttagaacactggattccagatcaagtaaagccatttatcagaactttaatta

SEQ ID NO: 13585 - DNA, 120 bp, synthetic construct
  source 1..120: mol_type = other DNA
agttgattggcactcaagtgtctgaaagtaaaattaactggtgctctgtgtaccatgatcccaggactccttgctaatgctgtaagcttcagattttacctcttacacttctcataccca

SEQ ID NO: 13586 - DNA, 120 bp, synthetic construct
  source 1..120: mol_type = other DNA
tagaaagaatttatctgaatcttggggacaggtgcggggtggtataactatttctacctaggaaaaaatcccaaggttttccctgttgtggtatagaaagctgtgttgacctgaagcatg

SEQ ID NO: 13587 - DNA, 120 bp, synthetic construct
  source 1..120: mol_type = other DNA
accttcaggatgaagttcaagcttctttgcttggcattgagtcatccacagtctggccacaggctattttttttggtgaactttttttctactttttcccagtttggaccctcagggttg

SEQ ID NO: 13588 - DNA, 120 bp, synthetic construct
  source 1..120: mol_type = other DNA
accgttctactttctgtccctgtgtatttgacttctccaggtccctcatgtaatagtcttattgctcgttgatatagtaattacaactttaccattacaaggagtcttgcctgggcatgg

SEQ ID NO: 13589 - DNA, 120 bp, synthetic construct
  source 1..120: mol_type = other DNA
ccactctcgttctattcccggcttaccgcaccatctccccaggctcctcttcctgtgtctggctgcagcctttaatcacggcactttccctggaacactgtctcctaatctactcaagtt

SEQ ID NO: 13590 - DNA, 120 bp, synthetic construct
  source 1..120: mol_type = other DNA
cttgcagtaagaggcttcctagaaaagcttatgtgaaaagtagatgtgagtgtctgatagcttggctgggtatagaaatctaaagtgtcagtttagaggtctgtgttgctattaagaggc

SEQ ID NO: 13591 - DNA, 120 bp, synthetic construct
  source 1..120: mol_type = other DNA
tcgccaaatgcatttctttctcaagttggtagaatgagatgtcaggtagcacttcagttttctgtttggaacaggtatctttgtgggtagagaccatctaggagctgttgaagttcttac

SEQ ID NO: 13592 - DNA, 120 bp, synthetic construct
  source 1..120: mol_type = other DNA
tgctgctggacttcacttctctttgatgctctccaggagggcaccatttcctggattccttgttttccttattcttagtttcctcactcacattcctgaagtatatgtatcaatagattc

SEQ ID NO: 13593 - DNA, 120 bp, synthetic construct
  source 1..120: mol_type = other DNA
cgaagcatccactgagtaaattggatgctttctgaactttgattagccagctgtcataagtgttggcattcctttggctaaagacaagaaagagaaatctaggtcgcttgtgtctgtgct

SEQ ID NO: 13594 - DNA, 120 bp, synthetic construct
  source 1..120: mol_type = other DNA
tccttcagacaaccctgtgacttgctttataaggtatgtcgaaacaaatgaacctagatcattttgagtaattccatgtcatccacacacattggcctcccagtgttacaggaaagaggt

SEQ ID NO: 13595 - DNA, 120 bp, synthetic construct
  source 1..120: mol_type = other DNA
cggaattggctgataaggggactttcctttttcttctgcgtcaagttcagaaaaagctaaaagcaaaaaaggaagcaaccaaatatgggcagtatgcagtaactaatgaagtgagtgatg

SEQ ID NO: 13596 - DNA, 120 bp, synthetic construct
  source 1..120: mol_type = other DNA
cccagggctgaaaacattaaaagttagcacaaagtgttaagtggttggtaatattagtattagataggctcaggtttgggactgtttctatcaaacataggacatatcaatcaaatgttg

SEQ ID NO: 13597 - DNA, 120 bp, synthetic construct
  source 1..120: mol_type = other DNA
ctatcaaaccataaatgagagaacttgccagaaagcctgaggccacggaaacattccacacactgtgttttccttcccaagtcttggttatttcctctttgttctttgtctatactcctc

SEQ ID NO: 13598 - DNA, 120 bp, synthetic construct
  source 1..120: mol_type = other DNA
ctttcatagaagaaaagttaattttagtgaagtccaaatatcaatttttctttgtgaattatgcttttggtgtcaagtctaagagaactctgcttagccctagatttcaaagatactctc

SEQ ID NO: 13599 - DNA, 120 bp, synthetic construct
  source 1..120: mol_type = other DNA
agttctttttttctgtgcatatatagttgttccagcaccatttgtcaaaaaggctttcttccactgaattgcttttgcacctttgtcaaaaatcagatgggtatgtttatgtgagcctgt

SEQ ID NO: 13600 - DNA, 120 bp, synthetic construct
  source 1..120: mol_type = other DNA
gctttgaagtagcattaattagagtcagtttaccattggattcacatagtttgagagtgggatcacgagtttgttttcggcagttttcactccgaaccccagtaagatcttggagatctc

SEQ ID NO: 13601 - DNA, 120 bp, synthetic construct
  source 1..120: mol_type = other DNA
tacacatcatgaaacaaaccagaggatgtcaagacacttcattttcaagctctcttctgtgaggcaaagagttggagaccagagttccaagtccctcttctgaaagttatcagctttgaa

SEQ ID NO: 13602 - DNA, 120 bp, synthetic construct
  source 1..120: mol_type = other DNA
ttctagttggtttactatggctgtactacatgttgggttatcttccgttcacttaaaatatcatgagcattccgaagtcattcgagacagttaacagaatgaaagtataggttggtgttc

SEQ ID NO: 13603 - DNA, 120 bp, synthetic construct
  source 1..120: mol_type = other DNA
acttcacaattgcaggattctgtgactttgctttttatgtctctcacagatcaaacaacagggccttgtgtggagtaggtatgtaatcaacatctgcagacagattcctgttggtggaaa

SEQ ID NO: 13604 - DNA, 120 bp, synthetic construct
  source 1..120: mol_type = other DNA
ttttctgctatggactgaattgtgtacccactccaccttcaccctacaattcatatattgaagttccagctcctaacatgatggtattggagatgaggcctttgggaagtaagtaggttt

SEQ ID NO: 13605 - DNA, 120 bp, synthetic construct
  source 1..120: mol_type = other DNA
ggtggaattctccagtgaaatcagctgggcttggagattcctttttgggaggtttttacctgatgaattaaactcttcagtagtttatagggctgttcaaatgatttctttcatatggat

SEQ ID NO: 13606 - DNA, 120 bp, synthetic construct
  source 1..120: mol_type = other DNA
aaaatgtaaattggattgtgtcattccttgcacagcttagaataaaattccgacccattaacaccaccagcagcaacgcatctctatttgtcaaaccggccagtcttgtcttgttcactg

SEQ ID NO: 13607 - DNA, 120 bp, synthetic construct
  source 1..120: mol_type = other DNA
gcctctctactgaggttggggaaatgttcatgggtgatatcctcaaatatgttttccaaattgcttgtttactctccctttctttcagggacaccagtgagttatagatttggtctcttt

SEQ ID NO: 13608 - DNA, 120 bp, synthetic construct
  source 1..120: mol_type = other DNA
gagcattctctctactttgcttagatttataagttccatcctccagagaagttcaaatcagtattgtcagggttaggggctcctccatgcaatggtctctttctctttttcctttcccct

SEQ ID NO: 13609 - DNA, 120 bp, synthetic construct
  source 1..120: mol_type = other DNA
agtagtagtaaatatagaacacaccattcagctcagtgaagtgcctgagggccaggcatttcaatgagtcttaagagctacagtagtcatggatactactgtagctcttaagcaacttca

SEQ ID NO: 13610 - DNA, 120 bp, synthetic construct
  source 1..120: mol_type = other DNA
cttggatattatagaaaggttatcaagaagaaaataaaaatggctaaaaaattctatttcctaaatgacagatgattaattttaacattttggtatattttcctccattttttctgtgca

SEQ ID NO: 13611 - DNA, 120 bp, synthetic construct
  source 1..120: mol_type = other DNA
ctccagactctgtccaggaaactgcacaaattgtttcaaagttcagctggaagtttccttctccctgtgatctttccccagttcctctggcacccctccccaagaactcctgagagacaa

SEQ ID NO: 13612 - DNA, 120 bp, synthetic construct
  source 1..120: mol_type = other DNA
aagactgcccctcactttaggtgccaactacaagtagtaggtgtgtatgtgacccacacttctgtctgacttggctacaaattggaggttctcacaatcttctccttaagtaataacagc

SEQ ID NO: 13613 - DNA, 120 bp, synthetic construct
  source 1..120: mol_type = other DNA
actgcttcccctacccctatattttgctcagctctctaaatttgtcttagctccctataaggtcaaatccttctcccgtgatctggttcttcaggctccccagtgaggatgtgtgtttgg

SEQ ID NO: 13614 - DNA, 120 bp, synthetic construct
  source 1..120: mol_type = other DNA
agtcaccaaggtgtgcttgggggagaaaaagcataaacataagtgcacatttttgagatgcacatatggacctcctggtatctatacatgggaggaagtaaaagtgctgtataaatgctc

SEQ ID NO: 13615 - DNA, 120 bp, synthetic construct
  source 1..120: mol_type = other DNA
ctagcagcaccaacagaccaaaatatcaatgcaaaatagcatcttgacctcatgctgagatgtctgacttgtgacaatgaagaacagcattcagtatctgcaatgataagccaagctcca

SEQ ID NO: 13616 - DNA, 120 bp, synthetic construct
  source 1..120: mol_type = other DNA
ggcaaaaaccgcaattacttacttttaatggcaaaaaccgcaattacttacttttaatggcaacaaccgcaattacttacttttaatggcaaaaaccgcaatcacctttgcaccagccta

SEQ ID NO: 13617 - DNA, 120 bp, synthetic construct
  source 1..120: mol_type = other DNA
tccatttgaactgaaaaaggcatatctatattttatgtctcattgtacgtatatagcttgccccaggctgttgtcttgcccccagcagtatttcctaatggaactgccattatatgggcc

SEQ ID NO: 13618 - DNA, 120 bp, synthetic construct
  source 1..120: mol_type = other DNA
atgtatgtatatgtgtatgtgtatatatctgtgtatatacacatacatgtatgtgtatgtatgtatgtgtatatatacacatacatgtatgtgtatgtatgtatgtgtatatatacacat

SEQ ID NO: 13619 - DNA, 120 bp, synthetic construct
  source 1..120: mol_type = other DNA
gttatgagggtgtgattagtgtgtgtgggtgtgttatgcgtgtgtggtaggtgtgtatatggtatatatgtgtgtggtgtgtgtagtatatatatgtgggggtgtggaggaatgtgtgtg

SEQ ID NO: 13620 - DNA, 120 bp, synthetic construct
  source 1..120: mol_type = other DNA
tttctctctcctgaatactaacctggtcatgacatacaatttcaaaccagtggaggagtccccttaggcttgaatctgctatacgggagtcatttatttacctgaagtcacaggtcttaa

SEQ ID NO: 13621 - DNA, 120 bp, synthetic construct
  source 1..120: mol_type = other DNA
agtgaatgtgaatgagggagagtgaatatgagtgggggggagtgaatgtgaatgaggaggagagtgaatgtgagtgaggaggagtgaatgtgagggaggagtgaatatgagtgagggagg

SEQ ID NO: 13622 - DNA, 120 bp, synthetic construct
  source 1..120: mol_type = other DNA
aggggggagtgaatgtgaatgagggggagagaatgtgagtgagcgggagagaatgtgagtgagggggagtgaatgtgagtgagggggagtgaatctgaatgaggggggagtgaatgtgag

SEQ ID NO: 13623 - DNA, 120 bp, synthetic construct
  source 1..120: mol_type = other DNA
gacggggagtgaatgtgaaggcctaggacatgactgcacactgctggagacttgaggaacactgtacactgaagctacactaaatgtgtaaaaaatatttttccttcttcagtcataaat

SEQ ID NO: 13624 - DNA, 120 bp, synthetic construct
  source 1..120: mol_type = other DNA
tttttaaaactaggagtctcagaattcatccagttcatagataaggaaaagacaaggacagagatgccctgagaggctggctagaacctgggttttcttcttcctaggtcaggacttgtt

SEQ ID NO: 13625 - DNA, 120 bp, synthetic construct
  source 1..120: mol_type = other DNA
cctcattatctaagcaaatcaatcacattcagaaatatattgagcaccacagacaacgttatgatacaagttgatatgagttgttttgtatcctcaagggtgctttttgtgcagagaata

SEQ ID NO: 13626 - DNA, 120 bp, synthetic construct
  source 1..120: mol_type = other DNA
agggagggaggatagtttgaggccaggagtttgagaaatagtttagcagtttaaataaagcagtggcttgtcctaagagtctttcagttgattctctctgtgtttcttattctggtcagg

SEQ ID NO: 13627 - DNA, 120 bp, synthetic construct
  source 1..120: mol_type = other DNA
gggaaaaactttgccatcccttatacttatttaaaaggtactgctaagaggtattattagaaacaagatttaaaaatatgtaacaaaatcttaagttcttaagtgaaagccatttaacta

SEQ ID NO: 13628 - DNA, 120 bp, synthetic construct
  source 1..120: mol_type = other DNA
cccatgctttgagtagattgattactcttcagtttgtaaatgtaagtgggctatgtgaaatttcttaactgatcaagattttggatgttcagttatggatgaaaactatctcaacttaac

SEQ ID NO: 13629 - DNA, 120 bp, synthetic construct
  source 1..120: mol_type = other DNA
caatctataactcatgaaatggcatagtctaatatttgcaaagttatgcctcattgaggtgcaattatgtaccacatcctaactctattaaaaccagaatgtagagactttgattaaagg

SEQ ID NO: 13630 - DNA, 120 bp, synthetic construct
  source 1..120: mol_type = other DNA
ctgtggaggttattttctggtggcttcaattttctcagggaaataggaagcaagatcatgggaaagagggacgatggcaagagggggtgaagatttcaagttttatcatcctaaaatctc

SEQ ID NO: 13631 - DNA, 120 bp, synthetic construct
  source 1..120: mol_type = other DNA
acaaatttgataaggcttctggaactgtcttggttttgcagcagtaagtttatatgaggtgcctatgcaaaatgggcccctttaacaacaacatgtaccatggcctggataacggtcata

SEQ ID NO: 13632 - DNA, 120 bp, synthetic construct
  source 1..120: mol_type = other DNA
accacaggtctcagaggtactttctgttgttcctgcataatttttcccttgtgccatggttctgaggctagtggctgaagcttagactcactgaaatctaagtttggtgtatgtagtgtc

SEQ ID NO: 13633 - DNA, 120 bp, synthetic construct
  source 1..120: mol_type = other DNA
cagcttaataatgggcatgaaattctttcgaattaagatgtatccagtggaggattttgaggcctctcttcagtttatgcaggtaatgtcttaggcaggagagctaaggtgctctcaact

SEQ ID NO: 13634 - DNA, 120 bp, synthetic construct
  source 1..120: mol_type = other DNA
agtgtaggaggagcagtaaccttaggaagcaatcgagattatggaaagattgtaaactttggagtcagacccgtccttactcattcacttactagttgcatgaccttaagcgagtcattt

SEQ ID NO: 13635 - DNA, 120 bp, synthetic construct
  source 1..120: mol_type = other DNA
aaatctggcaactcccaaagttcaaagcgttcatcttttccgaataatctatcacgaagataaaatttgcttccctttaggcctggcagagtggttcaagcctgtaatcccagcacttgg

SEQ ID NO: 13636 - DNA, 120 bp, synthetic construct
  source 1..120: mol_type = other DNA
gagcttacgtctacgtttacagctaatctaaacagtccagtcaagaagtgaaagcgaaaaacaccaccaccgccccaccctcacctaaaacggggtgtctactcaccttactctacccct

SEQ ID NO: 13637 - DNA, 120 bp, synthetic construct
  source 1..120: mol_type = other DNA
agatgaggaaagacaaaaacctaacagactctagttataaaaaaattgaaacattattcgctaataaaaccaccagtgtagctctccctctccctctccctatccctctccctctcccca

SEQ ID NO: 13638 - DNA, 120 bp, synthetic construct
  source 1..120: mol_type = other DNA
gtcagagaaacaaactatactaggtataaagtcatgtactgcataatggtgcgttggttaacgatagaccagatgtatatggtagtctcttaagattatgatggagctgcactgcacagg

SEQ ID NO: 13639 - DNA, 120 bp, synthetic construct
  source 1..120: mol_type = other DNA
tgcaaccaatcctttcatgactaaagtaccagcaaatgggctctattgtaagattttggtgatgctagttacacaattctggcatactgcaaggctggcaaatccgtcaaagtcaactca

SEQ ID NO: 13640 - DNA, 120 bp, synthetic construct
  source 1..120: mol_type = other DNA
acacacacacacatcccctgcaatggtagctaaaaccaaatattcccagtgctgtgcagtgtatgagtttctaaaacaaccagaatgtgcttcaaaacaccacagacattgtgagtttca

SEQ ID NO: 13641 - DNA, 120 bp, synthetic construct
  source 1..120: mol_type = other DNA
tggaaggtgggctctgtatagtcctgagggtagttcatccacaagagaagggaaggcagattattttggtaaccctacagggttaatagatagaacatatcaaagttgcctttcatcaat

SEQ ID NO: 13642 - DNA, 120 bp, synthetic construct
  source 1..120: mol_type = other DNA
gatgacagcctgccagtttttatggtcgttgagctattgtaatataatccaatttccatggttagccatagccatgtggatttctcaaactatatggtctgggggtatcccagatagctt

SEQ ID NO: 13643 - DNA, 120 bp, synthetic construct
  source 1..120: mol_type = other DNA
ggtttcaccatcctatttcagagtagcccagtattcattgtaggaggcggggagagggactagagaattatgcataggtttttcattgttgcaacccacaagagatttctgataacattt

SEQ ID NO: 13644 - DNA, 120 bp, synthetic construct
  source 1..120: mol_type = other DNA
tggccataggtgaggagaatttgaaattgcatgaacttttaggatatatgacaaaaatatgtatgttttcagatatgctttagctgactgatgttctattgctatgaagaaatttttaca

SEQ ID NO: 13645 - DNA, 120 bp, synthetic construct
  source 1..120: mol_type = other DNA
acctatttcagtccacaaaaagccaagaagatctgaaatgggataaatctttttgaccttaaacttgtgggtcggtgtgtaggaagattggagtgctatcatgctggctccaggggctca

SEQ ID NO: 13646 - DNA, 120 bp, synthetic construct
  source 1..120: mol_type = other DNA
tcgataagcattaaaattttaatgagaagaatagcatagaacttggaatgaacacgattggaggaaacagtcagaagggagtaaagattctaaataatgcagtaagagagatgatactgg

SEQ ID NO: 13647 - DNA, 120 bp, synthetic construct
  source 1..120: mol_type = other DNA
tcttgatgttttttagaaggagcctgggatgagtgctgagacctatgatgtgtgaggccctaagagagacttgacacatgatgttacatcaatttctcacaaggactctttggtaaaatc

SEQ ID NO: 13648 - DNA, 120 bp, synthetic construct
  source 1..120: mol_type = other DNA
ccactactataaccattaccaccatcactgccactataaccactataataaacaccactaccaccaccaccattataacaatcaccaccactactatgactatcactgccgtcaccacta

SEQ ID NO: 13649 - DNA, 120 bp, synthetic construct
  source 1..120: mol_type = other DNA
cattgatggatgaatggataaacaaaatatgacataaccataaaagagattattcagccttaaaaagaatgaaaattctggcctctccctctccctctccccctccccctccccctcccc

SEQ ID NO: 13650 - DNA, 120 bp, synthetic construct
  source 1..120: mol_type = other DNA
tgacttctaagaagttagggatcattattttgtgtgtcgtatacaaaccgtgaatcatccagactataaaggcaatcctaaggagtaattaatacaatttttagtctataaaactccaca

SEQ ID NO: 13651 - DNA, 120 bp, synthetic construct
  source 1..120: mol_type = other DNA
ttgaagtaatcactggtacatttctctctatggttttcattcacttagaggtgctgtaatgaacttagcatggcccaagtaaatcaggcacatacatcgtcttccatcatagtggggagg

SEQ ID NO: 13652 - DNA, 120 bp, synthetic construct
  source 1..120: mol_type = other DNA
tccctccaaggggattccaatggcagctaatgttacaaaagaaggttgtgtattacttctcttctccttatgtagggaaaacaggaagaaaatgtgaggggagactcttgagaatattga

SEQ ID NO: 13653 - DNA, 120 bp, synthetic construct
  source 1..120: mol_type = other DNA
taagaatcatgacagaagaaggggactggagagctaggcgcttaatcacagactgcctacctcttacagaaatgcataatctcctttggttaaaagagtaccttctgctgtcttaaactt

SEQ ID NO: 13654 - DNA, 120 bp, synthetic construct
  source 1..120: mol_type = other DNA
atccattcagcaggtgagaatactgaagcttaaggaaatctatctgtgaccccctaaagttacaagacttataaatagcagagccagaaatctcagtctggacatactaaaattcattag

SEQ ID NO: 13655 - DNA, 120 bp, synthetic construct
  source 1..120: mol_type = other DNA
agtcctcaccaatactcctggagctcccctaaatattagtacctcagatctgaagcttgtttgaaaattgaatcctggctgcagtgttgatctgtaatactcaaggtaatggacttagcc

SEQ ID NO: 13656 - DNA, 120 bp, synthetic construct
  source 1..120: mol_type = other DNA
aaattaaaaccaggaggtttaaactcagtgggattgttctacatgacgattctcactccctttgctgttctctgaatagcaattcagactaagtatttaacatcctgaaaacagtagcga

SEQ ID NO: 13657 - DNA, 120 bp, synthetic construct
  source 1..120: mol_type = other DNA
tttttgttccaatatatgcatcgatcagaaaagagaaattatttcagttttcagctgctaaatataatgctgatcatctgaattgctataaataatcctggcaattaaacatgcaggtat

SEQ ID NO: 13658 - DNA, 120 bp, synthetic construct
  source 1..120: mol_type = other DNA
tcataggacaggtctggcattgatgaaagccctcagctcttgtttgcctgggaaggtctttatttctccttcagttttgaaggataattgcgcaagatatactattctagggtaaaaggt

SEQ ID NO: 13659 - DNA, 120 bp, synthetic construct
  source 1..120: mol_type = other DNA
agttttaaatgtcatattaagaaatttggacttcatttgttgggtagcgaagagttctcacatggaagaatgatcagaggggttaaactggcaggttaacagggcagtcgtgtgtcagtg

SEQ ID NO: 13660 - DNA, 120 bp, synthetic construct
  source 1..120: mol_type = other DNA
tctctttccccacaaagtcactgctgagcacccataatgccttgtagccatagtgtctgagtcaggatatgataagctgactgacttcatttatccaggcagaatatcttttgtctgtga

SEQ ID NO: 13661 - DNA, 120 bp, synthetic construct
  source 1..120: mol_type = other DNA
cattcctctaggtaggaatatctatccagcatgaatggtgcattgtgtgcagtactaaacatggagaggaaaatgaatcgaatcagctcctgccctcatggagacaccaacaaataaaga

SEQ ID NO: 13662 - DNA, 120 bp, synthetic construct
  source 1..120: mol_type = other DNA
gggatgtatctgagggctacatggcaatctgggaaaaagcttgaaagataaagaatggaactataataggcaaagaaggtttatctgtgaagggcatatgctaagaagcagggggcagta

SEQ ID NO: 13663 - DNA, 120 bp, synthetic construct
  source 1..120: mol_type = other DNA
aaaccccaaataacaaaacaacaccccacacaattgtccatagtcatattagtgtaaacaatgaattcatgtcttacaaaaaattgtaatatatctacattggaaggatgaggagaagat

SEQ ID NO: 13664 - DNA, 120 bp, synthetic construct
  source 1..120: mol_type = other DNA
tccggaaagacattggtcctcaacttacaaagactgtagccttaccctaaggctttaaaagttatatcaggatacactgctaaacccccactaactacaagcccagatacatgcatagtg

SEQ ID NO: 13665 - DNA, 120 bp, synthetic construct
  source 1..120: mol_type = other DNA
actgtgcccagcctattacatgttttaaggtcataaaactgctacttctggaatatttcttaaacttgcttgatttgtgtaaggtctggctgctgggctccctgaaaccttgcacatatc

SEQ ID NO: 13666 - DNA, 120 bp, synthetic construct
  source 1..120: mol_type = other DNA
cttatttgttttgaaaaaaaaaaaaagacgttatagctttcagctctggaagttctatttgtttttcttttcaatagtttccatttctcttttcattatgttcatattttccctaaaatc

SEQ ID NO: 13667 - DNA, 120 bp, synthetic construct
  source 1..120: mol_type = other DNA
ataaaaaacaaattaacaatccaactcaatctttaagtatgactagaatttttattatgtaaaactcttcctccctgtcttcttcccccacaatcatgccatgttgtaacagtacatgat

SEQ ID NO: 13668 - DNA, 120 bp, synthetic construct
  source 1..120: mol_type = other DNA
tcttatcaacatcacagctggtcagaagaacaatagacatataattatttcaggttacttcctagcaagaagtagaaaataagagtttgttaacttaccactttctgagtatttcctatg

SEQ ID NO: 13669 - DNA, 120 bp, synthetic construct
  source 1..120: mol_type = other DNA
atatttccttactctctggcacaaaaagatggtccaggctcatcttctgcattccctgacctaatccttttagagagcatggtatttagaaaccaatgtccaggtacttggtatgatcac

SEQ ID NO: 13670 - DNA, 120 bp, synthetic construct
  source 1..120: mol_type = other DNA
ctcatccaacagtgagaagcataactcttattatccttaatatattcattcatttgctcaatctatttacttatttgctcaacataaccaatctcccaatcacaccagcccctgtgtgtt

SEQ ID NO: 13671 - DNA, 120 bp, synthetic construct
  source 1..120: mol_type = other DNA
atgaaggaaggaaaagcggggggaagggaggaaggaagaaaggaaaagaaaaaagaaagaaaaagaaaacagagtgaaaaagagtgaagacagcccatgggacttatgggacactactaa

SEQ ID NO: 13672 - DNA, 120 bp, synthetic construct
  source 1..120: mol_type = other DNA
ggagtggggagttgttccatgggtgtagagttttggttttgcaaggtgaagaattctggagattggttgcacaatactgtgaatgtacttaacagcactgaactgtacacttaaaaatgg

SEQ ID NO: 13673 - DNA, 120 bp, synthetic construct
  source 1..120: mol_type = other DNA
ctgttacatttttatgctaaatttacttggtcatgaaagctgattttccatgtcttcagctgaacttgattaggccagtccatgtgcacgtctgcactgtttcagcacctccttggaacc

SEQ ID NO: 13674 - DNA, 120 bp, synthetic construct
  source 1..120: mol_type = other DNA
tgggggattggctccaggacccccttggataccaatattcataggtactcaagtccctcatagaaaatgccatagtatttgcatataacctacacacatccttccacatactttaatcat

SEQ ID NO: 13675 - DNA, 120 bp, synthetic construct
  source 1..120: mol_type = other DNA
ctggttctggaaaggccttcaggtttagatgctgtgtttctattccaactaggaaccttgggataacccctctggaataaagctgaaaggaatatggctaaccctaaaacatcttagaaa

SEQ ID NO: 13676 - DNA, 120 bp, synthetic construct
  source 1..120: mol_type = other DNA
taaggtaacagattcacgggtttgggggattaggacatggacattttagggggcagagagggggcattattctgcctaccacaataccttttggtacttttactttttctttctttcttt

SEQ ID NO: 13677 - DNA, 120 bp, synthetic construct
  source 1..120: mol_type = other DNA
taggtttctataaacactataagtgatagtttcccccatcctttcattgacattatttgccaatgctgccagtcattctggcatgaaaggtgtgtgtgtgtgtgtgtgtgtgtgtgtgtg

SEQ ID NO: 13678 - DNA, 120 bp, synthetic construct
  source 1..120: mol_type = other DNA
tttgattttgctccattacgttttcattttttctgagcactgactgttctgaaagctgcacaaaacgtagaaagaagacatagcgcctgccagggaataggaaatgagggcacttacaca

SEQ ID NO: 13679 - DNA, 120 bp, synthetic construct
  source 1..120: mol_type = other DNA
gttatgagggtgcttctttctatggagagtggactcacagctttcttcatattccccaaagagctgatgaccaaataaaaggataaataccatggctctaatgagagagagaaattctat

SEQ ID NO: 13680 - DNA, 120 bp, synthetic construct
  source 1..120: mol_type = other DNA
catacctgactaaccctagataatgcatataacaggaagtcaaaatgagaatcctgctcattttctgctaaggcttcaagacaacagatgccgagcgcttcaaattccaaagggaggtaa

SEQ ID NO: 13681 - DNA, 120 bp, synthetic construct
  source 1..120: mol_type = other DNA
tttaagagtctgagggtcttattggattcatgcctagaacagttagagcctaaaggtataaggctgttgtccattggccactgagatgagtcctcaagaagaggtagctacattacaaat

SEQ ID NO: 13682 - DNA, 120 bp, synthetic construct
  source 1..120: mol_type = other DNA
tgcctttcaccctcaaagacatctgtttgaattttatgtgatgactgtacctataatctctacagagcaacagtgtcctcagtacctggcacagtgctctgtacacagatgcaacatata

SEQ ID NO: 13683 - DNA, 120 bp, synthetic construct
  source 1..120: mol_type = other DNA
tgagctagatgagtcttgagactaagacaaatgaggaaatacaagactctacgtatcctttagtggattccttcaggacgactaatagatactataagggtgcagcagctgcaccaacat

SEQ ID NO: 13684 - DNA, 120 bp, synthetic construct
  source 1..120: mol_type = other DNA
gggcttttccctctggtcatatacatgactggaaaaaactaaaataaagcgttaatggtggttatctctgagtaatgagataccaagattttttttccttacccctatattcttttcttt

SEQ ID NO: 13685 - DNA, 120 bp, synthetic construct
  source 1..120: mol_type = other DNA
taatttcagacttttggcccccagaactgcaagacaatatgtttctgttattttaattcacccagtgtgtggtactttgatacagcagccctacctagaaaacaaatggggttgagggtg

SEQ ID NO: 13686 - DNA, 120 bp, synthetic construct
  source 1..120: mol_type = other DNA
agaggcgctccccatctcccagacggggcggatgggcagagatgctccccacttcccagacggggtggccaggcagaggcgctcctcagttcccagatggggcagccggacagaagcgct

SEQ ID NO: 13687 - DNA, 120 bp, synthetic construct
  source 1..120: mol_type = other DNA
aagatggaaggcttataccatctgacttgaagacttactataaagctacagaaatcagtgtagtctggtacactgatatataaagagctacaaaaccaatggaacagagcagagagctca

SEQ ID NO: 13688 - DNA, 120 bp, synthetic construct
  source 1..120: mol_type = other DNA
cacagaaccctagatgtccctgatagatccttttttatggtctgggaggctaagtctattttcataatactaaaatgttttttgccttttttactgtgttgacatttgcaccgatggggc

SEQ ID NO: 13689 - DNA, 120 bp, synthetic construct
  source 1..120: mol_type = other DNA
tggaaatcagaaagtaacaagttataaggaagttataaggtgtcatgctttaccatatcttacttttttaaacatgccatgctctttcaatatgtcatgctatattgtcatgcttttccc

SEQ ID NO: 13690 - DNA, 120 bp, synthetic construct
  source 1..120: mol_type = other DNA
atgagggtaacttccttaataaggtaaaggttatatagcaaaatgtacagcaagcactcaattaattgaaaaactttagacacataatactacctgctatcactacttcaggccaacact

SEQ ID NO: 13691 - DNA, 120 bp, synthetic construct
  source 1..120: mol_type = other DNA
ctctcttttatctccagtgcctagtacttagtaaggatttgctcattaggggctatcccagaagcagttgagctgaaattggacaggcaggaacaagtctgcattatgcatgttacaaaa

SEQ ID NO: 13692 - DNA, 120 bp, synthetic construct
  source 1..120: mol_type = other DNA
gaaggagtaaggaagctctgttttttgcttactcctttgagtaacagccttgccactgaacatttggaatcataccagcttctgacaatcttatacttgtgaggaggaacaaacaggaac

SEQ ID NO: 13693 - DNA, 120 bp, synthetic construct
  source 1..120: mol_type = other DNA
gaacatttccattgccctaaaaagaaacttcatacccattactagtcactcctgtcttttccccatttcctttctctcccctacagggaaccactaatgttactttctgtctctgtagat

SEQ ID NO: 13694 - DNA, 120 bp, synthetic construct
  source 1..120: mol_type = other DNA
tgtatgtattcagtgtagtgcagcggaagctgttctctgggaagtctattttatcttaaatctattcttcatgcaataagtatttgcagcagccatgatggctcacgcctgtaatcccag

SEQ ID NO: 13695 - DNA, 120 bp, synthetic construct
  source 1..120: mol_type = other DNA
aaacctttaggagtttaatggatgcactgagtcttagagggatgaagtacttgggccagtgtcctacattcagtgagtggcagaatgtgaatctcaattcagatctgtttaccaccaaaa

SEQ ID NO: 13696 - DNA, 120 bp, synthetic construct
  source 1..120: mol_type = other DNA
cgttttcccttgagccttgtatggctggttcagtgcatgttcttttcattcagatgtgagctcttgtgacacttttttaaagaaagctttcctggatgactcagtccatagaagcttgtt

SEQ ID NO: 13697 - DNA, 120 bp, synthetic construct
  source 1..120: mol_type = other DNA
tcattattacacaagccaggcaaatcctgctccagtacacagagcgcatctaaccagcaggaaggaaataagccaaaatcctcccgacaccacacacacacacacacacacacacacaca

SEQ ID NO: 13698 - DNA, 120 bp, synthetic construct
  source 1..120: mol_type = other DNA
cacttataaaaacagaccactgagccacaaaataagagttaacaaatacatatcccaaagaactgactttcaacagagtattttctgacaactaaaatggggggagagaacttaatcctt

SEQ ID NO: 13699 - DNA, 120 bp, synthetic construct
  source 1..120: mol_type = other DNA
acccttcttcaggaacaaaattccctattatgacatatgagaaaacatattctgtttcacctctgtaatgttgtgctttatgttcaatttccaagggcaaaggtggcaaaagatgtctgg

SEQ ID NO: 13700 - DNA, 120 bp, synthetic construct
  source 1..120: mol_type = other DNA
ttcattcatccacttaactttttagttttacacatcatgcattttggttccagaacatctctgcgtgtctgtgtgtgctgtatttgaatcttgtttccccacccccctccccaactttgt

SEQ ID NO: 13701 - DNA, 120 bp, synthetic construct
  source 1..120: mol_type = other DNA
gtaaataaggtgtaggttactgttaggattgtctggaggctcatatatctaatcttcacttttgcagatttctaacttatctgaccattttgaattttcttgctgtttctaccatagtgg

SEQ ID NO: 13702 - DNA, 120 bp, synthetic construct
  source 1..120: mol_type = other DNA
ctctttctggaaatagctttttccatgggtctgcacaatggagagaagatatgactgtatctcttcttgctaaaacatagttacatgggtaattgagtgccctggagcagcagagatatc

SEQ ID NO: 13703 - DNA, 120 bp, synthetic construct
  source 1..120: mol_type = other DNA
atgaagccagatctagtgtggacccatatttcacatacatgcttacattgcttcacactatgttagctgttttgcatggatactgctggagtatttactgatcatgggcctagagtgaat

SEQ ID NO: 13704 - DNA, 120 bp, synthetic construct
  source 1..120: mol_type = other DNA
tagctcttgcttttagcacatcaccccacattttctttctactgggatctcctatttgattacccagcagtctcttgtggcatctgcttggcccaaaggaaacacacaatgggaatgata

SEQ ID NO: 13705 - DNA, 120 bp, synthetic construct
  source 1..120: mol_type = other DNA
gtcacaggtctagtctggccttccttagcttgagcttgagctcagatgacatctgtttgcccttttgcttgagaatttagaagtgctttttacctattgtcttcagttttgaggcttaaa

SEQ ID NO: 13706 - DNA, 120 bp, synthetic construct
  source 1..120: mol_type = other DNA
gcactgtgacctagagatccagaatccttgatttctaaattttgaccttaccttgggcaaactctgccctgaactttaagatggatatgacatgcccttttgaccttatgaagagttttc

SEQ ID NO: 13707 - DNA, 120 bp, synthetic construct
  source 1..120: mol_type = other DNA
aggaagtttatattaatggcagaagtcggaggggaaacaggcatgtcacgtggtgacaataggagcaagaggaaggaggaggtcccatgccctttttaaacaagcagatctcttgtgaac

SEQ ID NO: 13708 - DNA, 120 bp, synthetic construct
  source 1..120: mol_type = other DNA
actggggagcacacttcaacacgagtcatcttctaccaaacctcacctccagcactggggagcacacttcaacacgagtcatcttctaccaaacctcacctccagcactggggagcacac

SEQ ID NO: 13709 - DNA, 120 bp, synthetic construct
  source 1..120: mol_type = other DNA
ttactgaggggtagaagttaaaaaggattggtctctcaggatgctcctggaagctgcatgcttgtggctataaagctattctctgatatacctgaattcttttgctcccagtagtgaaat

SEQ ID NO: 13710 - DNA, 120 bp, synthetic construct
  source 1..120: mol_type = other DNA
taaataaataatctacttttttgtttttgctctagccccctaccttgtcaccaatacctcacattcctcgaagcccttacaagtttcctagttcacccttacggattcctggagggaaca

SEQ ID NO: 13711 - DNA, 120 bp, synthetic construct
  source 1..120: mol_type = other DNA
gtttcaaaacacttttatattttttaaatagccaatctgctaaacaaagcaggttactttaggttgagtacttttagtttgcagtttattggatgtcctgtaagttttgcttcctgtgga

SEQ ID NO: 13712 - DNA, 120 bp, synthetic construct
  source 1..120: mol_type = other DNA
gacacttacacttcagtgtggggctctacccaggatggcagccaagctgagcaaacatgatacacaaatcattagctgttgaaaaacaggagcacagggaaaatagctttaatatttttt

SEQ ID NO: 13713 - DNA, 120 bp, synthetic construct
  source 1..120: mol_type = other DNA
ctatggctatccaattgctccagtgcctctgaaaagcctatctttcctccactgtattgtttttgcacttctgtaaacaattaagttgggcatagttatgtgggtctgtttctgggtttc

SEQ ID NO: 13714 - DNA, 120 bp, synthetic construct
  source 1..120: mol_type = other DNA
tgagcctggggggttgagtctgcaataagctgtgattatgcaactgtgttccagtctgggcaacagagtgagacccagtctcatattttcaacatttctaagataatgatatatttttcc

SEQ ID NO: 13715 - DNA, 120 bp, synthetic construct
  source 1..120: mol_type = other DNA
tcaaattgcttttcttcagtttttctaataggcttattcactgtcttttgaagctatcttgtactatgtgttctgtttcccttatctggaattcacccttatcaccactgccccccccac

SEQ ID NO: 13716 - DNA, 120 bp, synthetic construct
  source 1..120: mol_type = other DNA
agccagatattatatagtgtaatttagtgttctacacaaacacttcttactttctctcaaccacttcagtcttatccctactttctcttcccctccccacctcttctgtcctttccctcc

SEQ ID NO: 13717 - DNA, 120 bp, synthetic construct
  source 1..120: mol_type = other DNA
tgggatcccctgcaatagtttaaaggtcacccccacccccaaacaaagggaggtgcacacacacaaacacacacatttctcatgagaaaaatcaggaaaacaagaatatttgtttattta

SEQ ID NO: 13718 - DNA, 120 bp, synthetic construct
  source 1..120: mol_type = other DNA
ttggctttattttcatttccagctagctgcatcgtcttttaatctcttgccagattctgtttcagtgtaatcctggcagtattttagaaaagcaaaatttcggtatatacccaaaggact

SEQ ID NO: 13719 - DNA, 120 bp, synthetic construct
  source 1..120: mol_type = other DNA
attctttggcataaaggagatgtgcggaagagtgaatctagatactctgacacgtagtctttatttttagtaggtaatacctgggcctaacccttcaagtactaattacagggaagtttc

SEQ ID NO: 13720 - DNA, 120 bp, synthetic construct
  source 1..120: mol_type = other DNA
gccactaggcccagcctcctttttgatttttttaatgaggctcctagaaagttttcagtgatatctgtggctcacatttgtgtcttgttatatgtttcttgttggacagcatcggtctag

SEQ ID NO: 13721 - DNA, 120 bp, synthetic construct
  source 1..120: mol_type = other DNA
caagttctgtaagaaatctagtataacagaagtgcttaagaacaggctacccaaaaacttatacaagaacagtcatgacagcactacccacgagagtcaaaggtgggaacaacccacatg

SEQ ID NO: 13722 - DNA, 120 bp, synthetic construct
  source 1..120: mol_type = other DNA
attgaaatgaaagcacttatgagagaaaatttaaagttcatggtaatattttataatatatgaatacatttgattatgcacatctattttgacggaacgtatgaaagctaatagagaata

SEQ ID NO: 13723 - DNA, 120 bp, synthetic construct
  source 1..120: mol_type = other DNA
tatcaatcacaggtggttatttcagagagctacataagaatcatatcaacctcatgttcattctggctactactcaaaacacttttgcataggccaggcacggtggggctcatgcctata

SEQ ID NO: 13724 - DNA, 120 bp, synthetic construct
  source 1..120: mol_type = other DNA
aaaaaaagaaagaaagaaaagaaaaacgtaccaaaggaaccctgaaagttgcattgcagaacaaagaccagtgagctattaaggaataggattgcagctgtcccgctcccgctcccattc

SEQ ID NO: 13725 - DNA, 120 bp, synthetic construct
  source 1..120: mol_type = other DNA
ctttgggaggtcacctgttctacaacaactggatcctggctattaacagaaaaaaatattttttaatgcagtgctgatgtcatataagtagtagagaagagggtccctctccctctccct

SEQ ID NO: 13726 - DNA, 120 bp, synthetic construct
  source 1..120: mol_type = other DNA
gtcggtcaagttgaacctaagagggaagtcataaaaagtaattaagtgaaatgaaaactatgaaggtagctgcctatttcatactgggaacaaattaagtcctgacccctgatgccaggt

SEQ ID NO: 13727 - DNA, 120 bp, synthetic construct
  source 1..120: mol_type = other DNA
gtctaatgttccaggatatcaggaaaatgggagtgtagttgagttacagttatcgtaataatcttatttaatctggaaaaggaaatacattttgatctgatcttgagctaatttccttgt

SEQ ID NO: 13728 - DNA, 120 bp, synthetic construct
  source 1..120: mol_type = other DNA
ggccctgtcctgttactgcgaacccagggctttatgtgggggatgaaaggacactttccctgcatttcagcggtcagactttttttttttttttaaatactttaagttttagggtatatg

SEQ ID NO: 13729 - DNA, 120 bp, synthetic construct
  source 1..120: mol_type = other DNA
cataggcatttgaccggagaggaaaaaggcacgtaccctctgggttcctgggtgaaacaatgtcccattgtttggtagccagtgaaacctcttttcataattataaacaaacaagaataa

SEQ ID NO: 13730 - DNA, 120 bp, synthetic construct
  source 1..120: mol_type = other DNA
gaaaataaaaaacaaatggacaatgtccaatttgccctgactgttgtctttgatgtaggattataaccaccacagctcctcccttcgagcatctccaggagtcatcctcattttgtgact

SEQ ID NO: 13731 - DNA, 120 bp, synthetic construct
  source 1..120: mol_type = other DNA
ccaaggcaacaagtgacagactaaatcagattgaattcagcctttattcctcttctttcaggcgtcttagtggagaagtaaatatgcaatgaaaataaccaaaattcaagtagaaaagta

SEQ ID NO: 13732 - DNA, 120 bp, synthetic construct
  source 1..120: mol_type = other DNA
tcaaatggtgttctttcggactggagatcattggtgttcagtttctgaaccaacattcctcctgaggagacggttatctgcaataaaggtaacagagatttacaaactaaagcctgtgac

SEQ ID NO: 13733 - DNA, 120 bp, synthetic construct
  source 1..120: mol_type = other DNA
tctcctacagtattctcctacagtacatgtattctcctacatgtattctcctacagtacatgtattctcctacagtattctcctacatgtattctcctacagtattctcctacagtattc

SEQ ID NO: 13734 - DNA, 120 bp, synthetic construct
  source 1..120: mol_type = other DNA
attctcctacatgtattctcctacatgtattctacagtattctcctacatgtattctacagtattctcctacatgtattctcctacatgtattctacagtattctcctacatgtactcta

SEQ ID NO: 13735 - DNA, 120 bp, synthetic construct
  source 1..120: mol_type = other DNA
tttatcccttcaagccagggatctaagctcaaatacaggcatctctcagagatatccatgggtttggttctagatcatcacaataaagcaaatatcctaataacgtgagtgacacaaagg

SEQ ID NO: 13736 - DNA, 120 bp, synthetic construct
  source 1..120: mol_type = other DNA
tacacaaatggcgtcagtagacttgctcagtgcagggttgccacaaaccttcaactggtaaaaaaaaaaaatacagcatctgcaaaagggcaataaagcaaaggtttgcctgtactgtca

SEQ ID NO: 13737 - DNA, 120 bp, synthetic construct
  source 1..120: mol_type = other DNA
aggaataaataaatgtaatgaaataagaggtttttgtttgtttgtttagagttggagtctcactctgtcacactaactggagtgcagcagcacaatcatggctcatggcagcctccaact

SEQ ID NO: 13738 - DNA, 120 bp, synthetic construct
  source 1..120: mol_type = other DNA
gctaaattaaatgataggtattcattatctagatcatctccaaataacatataatgctaagatattaatgactaattatgagtttataatcttaaacttttggcttcatacttcagagaa

SEQ ID NO: 13739 - DNA, 120 bp, synthetic construct
  source 1..120: mol_type = other DNA
tctcgaaatcttgtagagatagctactcttttaattcttattttactggtggaaaaaaaaatgacccgacaacaatgacaacagcagcagctaccactactatggctattactgtgctca

SEQ ID NO: 13740 - DNA, 120 bp, synthetic construct
  source 1..120: mol_type = other DNA
tatgaaatcgcaaaaaaagttgttgagctggccttggaaggtaaatcaagtcagctgtccttcctcacgcattttccctcactctgaggaaggtggcatcctggatttttcctcctttat

SEQ ID NO: 13741 - DNA, 120 bp, synthetic construct
  source 1..120: mol_type = other DNA
tcatagtcctgatttcagacttcatactactgcaaggcagaaaaacccttcccaagtttgcagggcaaatagctaataatgcttcaaactgacacaggctggtgtatgaagtacttggaa

SEQ ID NO: 13742 - DNA, 120 bp, synthetic construct
  source 1..120: mol_type = other DNA
acttaaagaaataaaaaatatgtcatttaaaaaaaaaaaaggtaatctgagacatttagagctttgggtatgtttgggggaaatgtgagcaatgaggctggaacattctgttaggaacaa

SEQ ID NO: 13743 - DNA, 120 bp, synthetic construct
  source 1..120: mol_type = other DNA
tcagatctaagctaatcgcatcttcctgtcagccgctttcagggcaccacacctcattgtgctgacactcagaggtcattatgcaattttttttcctcgatgattagattaatcaatcaa

SEQ ID NO: 13744 - DNA, 120 bp, synthetic construct
  source 1..120: mol_type = other DNA
tccactgaaaggaaattctttaacatcttgcttgtctgaaacatcttcattctcccctcccagattcttcagcgaaacttcggttggacaggaaattttaggtgggaaattcatttccct

SEQ ID NO: 13745 - DNA, 120 bp, synthetic construct
  source 1..120: mol_type = other DNA
accggacgtgcacatccaactggaccaccatggagagccaggccaccagggggaaccggaaatcacggagaccgcagccttctccctttctgaaacaggtcctccgcctggaactgtgca

SEQ ID NO: 13746 - DNA, 120 bp, synthetic construct
  source 1..120: mol_type = other DNA
gctaaaccaggaatcagtaatttgacggcagtgtccttggcttcctcctggctttaatgggaatattttgaatgtttcaccattaaccaagatgttggctgtaggtgtctcttagatgtt

SEQ ID NO: 13747 - DNA, 120 bp, synthetic construct
  source 1..120: mol_type = other DNA
gctcgggtgatcctccaacatcaggttgccaagtagctcagactgcaggcaggcaccaagagcccttggtaattcctcctggtttatttattcgttcatttatttatttatttattttga

SEQ ID NO: 13748 - DNA, 120 bp, synthetic construct
  source 1..120: mol_type = other DNA
tcctaaatccgttcttgctctcttgtttttctccccagcccctcccgccgattgctcatggaggaaccaaggccttcgaagcgacttcgctccatggcccctaatcaaggtacatcaaac

SEQ ID NO: 13749 - DNA, 120 bp, synthetic construct
  source 1..120: mol_type = other DNA
ttaacttcagaaatccctcttttctctgagtatttatttgtaaaagtatcctataactgcttgacgggtgaagttccttctgtctctctctgctcacgctccgcttctcttttagcctca

SEQ ID NO: 13750 - DNA, 120 bp, synthetic construct
  source 1..120: mol_type = other DNA
ccaacccagacaacctggaagaagtgggatgcaacaaggatcactaagcatggaaattaggaaactgtattcttaagtccagagaagtacgattctggaaaaaggattgatgacctagaa

SEQ ID NO: 13751 - DNA, 120 bp, synthetic construct
  source 1..120: mol_type = other DNA
ggtagaaaaatggctccagtctctgttctccattcatatcgcatctttccccatagtcacacaagtctacaccaacaaacgtgtacattgagagcatcgtttgtggctcgcttttacaaa

SEQ ID NO: 13752 - DNA, 120 bp, synthetic construct
  source 1..120: mol_type = other DNA
aagataaaagttttgaagagaaacttcacagaagaatctatgggttcggtcagtgagcacacgaaatcccaataaggatgagaatatgcaaataagcatggagcatcctgtggtgccagg

SEQ ID NO: 13753 - DNA, 120 bp, synthetic construct
  source 1..120: mol_type = other DNA
tccaaagttatgttaatgttatgagtcacggaatagataagactgaggagcaaatcagtaaaaactaggggcttaggcaagagagagatggacagtgtgatggaacagtcgtcctgcgga

SEQ ID NO: 13754 - DNA, 120 bp, synthetic construct
  source 1..120: mol_type = other DNA
cagcaaagttgggctaatggattaattagtacaggcttccacccgtaccaattaggagaagcatcacctggataacagagcattaaagaagagaccatgtagtttgggttatgtgagaaa

SEQ ID NO: 13755 - DNA, 120 bp, synthetic construct
  source 1..120: mol_type = other DNA
ctaaccatagagcgcatcttgctggttctaacctcaaaatgcattcgttttccaaatacttcttaccaccctcactactcttcccgatccaagccaacattattcctcctctagattatt

SEQ ID NO: 13756 - DNA, 120 bp, synthetic construct
  source 1..120: mol_type = other DNA
acattttttttcaggcaactcctctgcccttcagtaataaagtatacccgttgctattgtctgaggatatcagaagggccaggtctgtgatctgcaatttaagcagaatgggagatacta

SEQ ID NO: 13757 - DNA, 120 bp, synthetic construct
  source 1..120: mol_type = other DNA
taatgccacatagcttaccataagaagatgacacataatgctacaacaaggaacaaaatattgacagaataaaaactgacctaatgacagtttcagcataaagccacaaactgagaaccc

SEQ ID NO: 13758 - DNA, 120 bp, synthetic construct
  source 1..120: mol_type = other DNA
taaaacctccaagtagatttcatgttgtcattacagttaagtctagtccatctacactggtcataggtgaaacatcccttaagattttgaaaggatcaacaaaattgatagatcgctagc

SEQ ID NO: 13759 - DNA, 120 bp, synthetic construct
  source 1..120: mol_type = other DNA
ttagttgagcatgagtaggtatttattgctttctttttggccagaaacttgttagtgaaataaggctaatggtagaaatatttcctcttgtaaagcataatcatctcttcttgagaagac

SEQ ID NO: 13760 - DNA, 120 bp, synthetic construct
  source 1..120: mol_type = other DNA
atagccacaggcagctagtggctaccatattgaataacaggaaagaaaacagagctgcctgcattacttacctccgtggtatcaatatcaaagagaaaggaagaaaagagagaaagaaaa

SEQ ID NO: 13761 - DNA, 120 bp, synthetic construct
  source 1..120: mol_type = other DNA
acactgaaatttcactcaaaactagcatacaagtgaaaaaagattttaaagtattctttggttcaagagaagagatattgcttacttttgtacctttgaagtacatgcaagttaaatttc

SEQ ID NO: 13762 - DNA, 120 bp, synthetic construct
  source 1..120: mol_type = other DNA
agcaatcaaaccttgcattcttggcatagccagcaagtagatgtagggaaactcaggacccatggaagactgcctctcccaatgatacatttcataaaggactagtattcagaataaaga

SEQ ID NO: 13763 - DNA, 120 bp, synthetic construct
  source 1..120: mol_type = other DNA
aggcacagaagcagagctattaaatttggtgtgtttggctggaggataggattaaaaggaggcaacattttaaatagggcagcaagtagatttaaccaataaacactgggaaagacagac

SEQ ID NO: 13764 - DNA, 120 bp, synthetic construct
  source 1..120: mol_type = other DNA
gttcaagcatacatatttaatgataatgtgaaatatgaataagaaagttgcacagcgacaccagagagggaaagaataaaatagaaatcgttcaggagaggaaaattttgactccctctt

SEQ ID NO: 13765 - DNA, 120 bp, synthetic construct
  source 1..120: mol_type = other DNA
tactaaccaagatataatttacatggactaaaaggcaaaagagaaactttgaaagtgtttgtttattttccatagtagaatgccagagaaagtggcatatagagactgacttatggctgc

SEQ ID NO: 13766 - DNA, 120 bp, synthetic construct
  source 1..120: mol_type = other DNA
tggaattatacatgtattctagatgccaaacatttacaaatgttataaacacttataaaatttgaccacaccttctttaaatttgtggtttgtctcttgatacatagttaccatgttcag

SEQ ID NO: 13767 - DNA, 120 bp, synthetic construct
  source 1..120: mol_type = other DNA
gccacaggccaaagttagcaaaggcccaggtacacaggtgggcagagggaatcaaaaaccctgtggaggtatgaagcctggaaattgtggtgtccatgctgagaaggatgcaggaagcca

SEQ ID NO: 13768 - DNA, 120 bp, synthetic construct
  source 1..120: mol_type = other DNA
taccacagtggctgaaaaagaattaaactcaaagcactaagttagtcattacacaatcccaggctgtttcattaggcagttgatggtaacacatggggaaagcaaagggacatcaagaca

SEQ ID NO: 13769 - DNA, 120 bp, synthetic construct
  source 1..120: mol_type = other DNA
aacttctttgccagacttctttctccaactcactctgcacttccacacctaccccttgtccaacctccctcaaatcccaagaaacatattcacatctgatcattcaaagccagactgtat

SEQ ID NO: 13770 - DNA, 120 bp, synthetic construct
  source 1..120: mol_type = other DNA
ctgggacactatcttccatattctagcaagatgcagcttctaaagtcgcagggggtatacacccttcagtattattcgtaattttgcaggggaatgttaaacctgatgtcacaggactct

SEQ ID NO: 13771 - DNA, 120 bp, synthetic construct
  source 1..120: mol_type = other DNA
tggggtctattatttcaacaaatttccaaggtagctgctatggggatattttaaaatgaacctaaacataagaacaattttgattaatttcaatatgcctttctcttctaaattattatt

SEQ ID NO: 13772 - DNA, 120 bp, synthetic construct
  source 1..120: mol_type = other DNA
cagtgtatatacaatctgctctttaaatggccctaatttttgcagaccgcctttaacattgcctttagaacagagcaaaatgtacaatcagcttgtagtcaggcttccatctcaaatctc

SEQ ID NO: 13773 - DNA, 120 bp, synthetic construct
  source 1..120: mol_type = other DNA
tggtggttctcaccaaaagtgggctacccacatgagttggcagtctatttacttttgttgaattaatgtaaattaaaatttggaagaggggggaggagccaagatggccgaataggaaca

SEQ ID NO: 13774 - DNA, 120 bp, synthetic construct
  source 1..120: mol_type = other DNA
catgttggaggccccatgcaactgcttctgcttttgtctcaggtcatttgacacactgctgttgttcaggatctcactctgtttaccctattctttaaaatgtcattaccaaattccatt

SEQ ID NO: 13775 - DNA, 120 bp, synthetic construct
  source 1..120: mol_type = other DNA
tcataacaggagagattttgtagctgttttcgtgtcccagtgccaggtatctcaagctgcagggtatttctcttaccagcataggtgctaaattgtgaatcagggttaaactatgcaaga

SEQ ID NO: 13776 - DNA, 120 bp, synthetic construct
  source 1..120: mol_type = other DNA
ttctagtttctcacacatccaacaactactctacatgaatgcagtgattcaagaatatggctgatagacaaacagcttgatgcaataaatggtgccgaaataactcacaaactacatggc

SEQ ID NO: 13777 - DNA, 120 bp, synthetic construct
  source 1..120: mol_type = other DNA
caaagtcctgttcacacacgatactcttaaattcctcttcacacagaggagaaattgaacataaagcataagaatagtaagatgatcatgatggtctaccgtagttagtccctctgttac

SEQ ID NO: 13778 - DNA, 120 bp, synthetic construct
  source 1..120: mol_type = other DNA
cttcccaagcaaattgggttcttgcctatctctctgcctttgctcagattgtgcatgttattcatttgtcctcagtctcacaaacacacacttacacttcaaggcccagttaaaatgtca

SEQ ID NO: 13779 - DNA, 120 bp, synthetic construct
  source 1..120: mol_type = other DNA
caggagaacgagacattttggcatcctcaaagagctttgttctttcttaacctaatgtagactgccagagttgaattgcaccaaaaaagagttctggcaaaatcacgttttctgtcatga

SEQ ID NO: 13780 - DNA, 120 bp, synthetic construct
  source 1..120: mol_type = other DNA
cgtcaaatttcaatgcttagttgccacctgtggatcacagctaccctatcggatagcacatacttcattagtgtgaaaaaatcatctgtcttcccaaagtagacactctgtaaccatgtg

SEQ ID NO: 13781 - DNA, 120 bp, synthetic construct
  source 1..120: mol_type = other DNA
tcacccacaatcaatatttgtttcagttactgcagctcttttgtcacacctgagaataagaaagctatatgcagccatgtcctttaaacaacactggaaaaataaactagtaatagaatg

SEQ ID NO: 13782 - DNA, 120 bp, synthetic construct
  source 1..120: mol_type = other DNA
aatggtgcaataaattatatttaaagacaatatttgttagagaaaaatgacatggacatacatttttttagatgatggtgataatgaatgttaagaggctcagtaaacaacaattatgta

SEQ ID NO: 13783 - DNA, 120 bp, synthetic construct
  source 1..120: mol_type = other DNA
cagcttcatacttaaacaatgcctactatgtctatatcacgtatagtttaatttatgtaagaagtaatttcccacaaaaacccacaagaggccttcagcatttggagttcaagcatatcc

SEQ ID NO: 13784 - DNA, 120 bp, synthetic construct
  source 1..120: mol_type = other DNA
tgaaaaaaccaggtagaaactgaaagttttactattactttctatattctagtactttccactttagcctatatacctaagattaacaaattataagtggcatacagactgaaaggcaat

SEQ ID NO: 13785 - DNA, 120 bp, synthetic construct
  source 1..120: mol_type = other DNA
ggtccttcaactaatggtgacttaattttttgggctaatagaatggagcccatagctatttaatattaagaagaacataaaatgtttaagttactgatgcttaagatttcagaccacagt

SEQ ID NO: 13786 - DNA, 120 bp, synthetic construct
  source 1..120: mol_type = other DNA
acgtataccccatatatatgtatatcccatatacgtataccccatatacatatacgtatatcccatatacatatatgtatatcccatatatgtatatatacatatatataaacacacaca

SEQ ID NO: 13787 - DNA, 120 bp, synthetic construct
  source 1..120: mol_type = other DNA
acagagtagaaatttgtcttagataatgacaaggatttgaaccagattgtggcagtcggtaaaatcaaaggcaccctgcatggcatttttggcagctgcaaatgattgctggctatttca

SEQ ID NO: 13788 - DNA, 120 bp, synthetic construct
  source 1..120: mol_type = other DNA
gactgtggtggggaggggggaggggggagggaaaaaaaaaaaaaaagaagtgccaacctacaaatggcttggatagcttaaacttcaaaaccatgttgatactgcatttaattattagtg

SEQ ID NO: 13789 - DNA, 120 bp, synthetic construct
  source 1..120: mol_type = other DNA
aatactacatagaattgttaagataaagatatagtgaaaccaaattctggtatcaatcccttgaaacaatcgtatcacccaaaacaatgtgcatgattgtttataagccatctggtgtga

SEQ ID NO: 13790 - DNA, 120 bp, synthetic construct
  source 1..120: mol_type = other DNA
ggtataccaaggcatagctaaaggttgtggctacttaaccccccacctccacacacacacacatatatatatatctttaatgatagagaccactagagcagtattgacttaaatggctca

SEQ ID NO: 13791 - DNA, 120 bp, synthetic construct
  source 1..120: mol_type = other DNA
aaagcggggggggggggtcataaacaaagtcaagtaagaggtaaactggaaaaattgccactcatattaaagacaaagggctaatttccctaacatataaagagctccttgaaatgtata

SEQ ID NO: 13792 - DNA, 120 bp, synthetic construct
  source 1..120: mol_type = other DNA
tgcttcaagaattgtttcaaacacttatcaaataaatcacccaaatctgacacaaactcttccacggaacaaaaaaagaagaaacacatagtgaatggttttatgaagctggcatacttg

SEQ ID NO: 13793 - DNA, 120 bp, synthetic construct
  source 1..120: mol_type = other DNA
ttggtaaggtactctaaatagcttagctgaagaaccactataatcaagtggccagagaatgaaaatgtgtaaacagggaagagaaaaagaagaagggagggagggagcagacgtgggaga

SEQ ID NO: 13794 - DNA, 120 bp, synthetic construct
  source 1..120: mol_type = other DNA
tctcagttttttcctcttaatctcccctggtagttgtaccagttaaatggatgctgatggtagagcaacaaatgctccctaatccattgcttgtgtttctccttgcacagaatgcagttt

SEQ ID NO: 13795 - DNA, 120 bp, synthetic construct
  source 1..120: mol_type = other DNA
cataatccagccaaatacataatccagccaaatttcctaaattggaaatgagtgaaatttaggaaataagctagatttcttgtgcgtcccaatagaagtctttgtatttgtcctgtagct

SEQ ID NO: 13796 - DNA, 120 bp, synthetic construct
  source 1..120: mol_type = other DNA
ataatgagctcatactggggtaaggagggcccctaatcttaatatgactggtgtccttctaaaaagatggcctgtgaaaacacagacacacaggaagaatgccatataaagataggattg

SEQ ID NO: 13797 - DNA, 120 bp, synthetic construct
  source 1..120: mol_type = other DNA
gagttccataagaagacagtcgtcttggccaaatgagctgtggtcaggagtgttgttttttttttggctcattcagttcaggttgacgtgggtactgtgaaggaggtttgtgtaaggtag

SEQ ID NO: 13798 - DNA, 120 bp, synthetic construct
  source 1..120: mol_type = other DNA
aaacccctgatacatatcatgttcacagatacgaagactcaatattattgacatggcgattctccctaaactatcaatttggtgttaattccagtcaaaattccatccccaccgcccccc

SEQ ID NO: 13799 - DNA, 120 bp, synthetic construct
  source 1..120: mol_type = other DNA
taccttaattttagcagtatattctcctctacctccaaacagaccaagaccaccaagtaaaatatcagtgtcggcactgaaacgtatagcttctactgaatgggcagaataaccccagcc

SEQ ID NO: 13800 - DNA, 120 bp, synthetic construct
  source 1..120: mol_type = other DNA
taaatgaaaggatacatgctaaaaggacagaaaaagatgtatctcaagcacactctccagtgtcccaaaaaaagttggagtggctattttaatatttgacaaagtaatttttaaggcaac

SEQ ID NO: 13801 - DNA, 120 bp, synthetic construct
  source 1..120: mol_type = other DNA
catggcctttcctctggtgtctctttgtgtttcgaaattttctcttcttacaaggtcaccagtcaggttgaattagtacccaccctaagggcctcgtttttttgtttgtttgtttgtttg

SEQ ID NO: 13802 - DNA, 120 bp, synthetic construct
  source 1..120: mol_type = other DNA
ggggtggagggaaagtttgttataggacagcttagtaagtaacgcttgaacttcatgtatccttttaagagcctgttggaactaagtattgtagtggctatctagtttgatcctagcagg

SEQ ID NO: 13803 - DNA, 120 bp, synthetic construct
  source 1..120: mol_type = other DNA
ctgtatatacagaggttttatatgtatatatacacacataaaatatatacttgtgtgtatacatatgtgactgtaccatttgttttttgtattatctgcaaaaagatgactttagaacca

SEQ ID NO: 13804 - DNA, 120 bp, synthetic construct
  source 1..120: mol_type = other DNA
aaagttaagtaacttgtaaaaggttgtatgagtggtaagtggtagattagattagaacccggctagcctgaatgtagaactcaggccctcagtcacatatcctttctgcttccatggtac

SEQ ID NO: 13805 - DNA, 120 bp, synthetic construct
  source 1..120: mol_type = other DNA
tagatgagatatgaaatccctgccatgaaagatgaagttgagtgctgttcatacgttttgtcatctctttcttcagttctgaattttatgttgtatttttgcttttttagggcatataat

SEQ ID NO: 13806 - DNA, 120 bp, synthetic construct
  source 1..120: mol_type = other DNA
aaaagagcataacaacataatagaaaatcagctatgaatcaggaggattgggctcagatcatgtttgctcactagcaatgtggctttggtgaagttacttatcctccatttgagtttata

SEQ ID NO: 13807 - DNA, 120 bp, synthetic construct
  source 1..120: mol_type = other DNA
ggctttttgagccttgaaggttgagacaaagactggaataccagttcacagttgatactggaatctttcctgtaagaagcaggagtagcataaggctaccactaatattccctataagtc

SEQ ID NO: 13808 - DNA, 120 bp, synthetic construct
  source 1..120: mol_type = other DNA
ttgagtacacaagattactctttagatataaaatgaattaataatttagttgtagtatttctgatcctacctggtaataaatgtcattacctaagcaagccaatatggtttgtcattatc

SEQ ID NO: 13809 - DNA, 120 bp, synthetic construct
  source 1..120: mol_type = other DNA
actgtgcaattatattaacagttaatatgcagctcaaaaatatgcaaaaaaaatctgtggcgtttgacccaaaatagtggttgtgtttggggggtggagggagcagctgcaagaaggacc

SEQ ID NO: 13810 - DNA, 120 bp, synthetic construct
  source 1..120: mol_type = other DNA
cccaaatgatgcaggtgttattgctgaatttactgaaatttgtatgtataggttaataggatctaaatcgtaaacacaggctgattacacatataattttgatatgaagttttgaaggga

SEQ ID NO: 13811 - DNA, 120 bp, synthetic construct
  source 1..120: mol_type = other DNA
atgtgatgctcagcttcttgcatatattacatacatattgttgcaggtagaaccatagtgtccactcacacacttatttgtcccttatgggtgctttgtgactgcagcagcagcagatag

SEQ ID NO: 13812 - DNA, 120 bp, synthetic construct
  source 1..120: mol_type = other DNA
caatttctgttaaggttccttaatctgccaggttttgcacaaacccagctgccagaggtttcacataaacccagcatatgagtcgaatgaaacaggatattcactcaagatgtcaggcaa

SEQ ID NO: 13813 - DNA, 120 bp, synthetic construct
  source 1..120: mol_type = other DNA
acgcaggaagatatattatgggagccccatgttcttctgaagtcctgcctttgccctgtccagttgctctggcggtcgatatcacatgaagttacattctaaaataatgtttttagacat

SEQ ID NO: 13814 - DNA, 120 bp, synthetic construct
  source 1..120: mol_type = other DNA
gtccttggcctgaaaaaatgacacactggggagatctctaattgggttgaatcttgaaacaggtacttgaaatataaaataaagtttgtctacttggactcattgaagttttgtaagatg

SEQ ID NO: 13815 - DNA, 120 bp, synthetic construct
  source 1..120: mol_type = other DNA
tctttcacttccacatcttattccattgaaaggtcgtcagggcaaatgacatgtatagagctttcatttcctatgataatagtaccttctttaaaaatacttctggaagatcctaggtgt

SEQ ID NO: 13816 - DNA, 120 bp, synthetic construct
  source 1..120: mol_type = other DNA
atgaggctttattattaagtcagtgccccctttggcatattattgtcctctcatgaattggttatttcataattatgagatgcccccattttctctgataatgcatccccttttccagtt

SEQ ID NO: 13817 - DNA, 120 bp, synthetic construct
  source 1..120: mol_type = other DNA
aagaagggaggatatctcagtgtattggaaaattttcaagtgctcatagtcacaatacattttatgtctcccctgttcatctactgcttctttcatttaacttatgtgtcaccttgaaaa

SEQ ID NO: 13818 - DNA, 120 bp, synthetic construct
  source 1..120: mol_type = other DNA
tgggttcttagggtctgagaacctgaaggtcacttgagttgttaatataatcctttccccatctttaagaatgatataaactaaattatcccacattctttctactggaaaaatgctgag

SEQ ID NO: 13819 - DNA, 120 bp, synthetic construct
  source 1..120: mol_type = other DNA
aatctctagcaattgattatgccactcctttaccatccagtcatttgactttaacttccaaaaacttactaggaaaaaaaaaaaatcagcaacagaaggaaaatctcgatgactcgcagg

SEQ ID NO: 13820 - DNA, 120 bp, synthetic construct
  source 1..120: mol_type = other DNA
agtgatgccagaattctcttacccatcaccacctttgactttgaaagcactcctaaggaaaattgcacacaagatctgatctacctggaccttcaatgtaaagacgtaatgacttggtga

SEQ ID NO: 13821 - DNA, 120 bp, synthetic construct
  source 1..120: mol_type = other DNA
caatttgtctttgttatggaactttgagagattcctgcttaatggtataagagaaattcttcattaaagaagcccacacagttataccccacaaaaagctaatgctattgggcactgtag

SEQ ID NO: 13822 - DNA, 120 bp, synthetic construct
  source 1..120: mol_type = other DNA
aaatatttcagagtaacataatcccaagtcaggattctctattggaattgtagacaacccaaagatacctgggcttgatctgttttaacaaagtgaagaagacaggaagaatatgagaaa

SEQ ID NO: 13823 - DNA, 120 bp, synthetic construct
  source 1..120: mol_type = other DNA
acagttgaagatagtgaatctgacacatttagtaatgagcaaatcctattgtgtgccccagtatttaggcacacctatgcaaaaaagtcatttcaggaaactatggctttatatctgagt

SEQ ID NO: 13824 - DNA, 120 bp, synthetic construct
  source 1..120: mol_type = other DNA
ttacaggttgagtatctcttatttgaaatgcttgggataagaagtgtctcagacttcaggtttttggggggtttgggaatgtgtgcatatgcataaagagatatcttggggttcggatcc

SEQ ID NO: 13825 - DNA, 120 bp, synthetic construct
  source 1..120: mol_type = other DNA
tgtgacggagatgcaaaagtacagatgaggaacaagtgtaagaaagaatcaagagatgtgttcactcatgcttgctaaatttaaggcaatataattctggaatttgagtgagtggtcagg

SEQ ID NO: 13826 - DNA, 120 bp, synthetic construct
  source 1..120: mol_type = other DNA
tttctttcttcccttctctttccttccttttatctatccctttctacctccctccttcctgtcctactcttttctttctgtctcctttctttccctctctcttgcttcactccttcattc

SEQ ID NO: 13827 - DNA, 120 bp, synthetic construct
  source 1..120: mol_type = other DNA
ctagaatccagaccaggccaagggactttatgattttaaggaggttggctaacgcacaactttaggtatttgcagtgctacaacggtcagttatatacatgtttctggctcttgaaaact

SEQ ID NO: 13828 - DNA, 120 bp, synthetic construct
  source 1..120: mol_type = other DNA
ggagtacaaatatttccattaaccagatggtgagcataatatggaacagttaatttttcaacccttgtccctctccttccctcccccatctaatagtcttcagtgtctattgttcccacc

SEQ ID NO: 13829 - DNA, 120 bp, synthetic construct
  source 1..120: mol_type = other DNA
catctcaaattgtaatacccaggtattgagggagagacctggtgggaggtgattaaatcatgggggtggtttccctcatactattctcatgacaatgagtgggttctaataatatctgat

SEQ ID NO: 13830 - DNA, 120 bp, synthetic construct
  source 1..120: mol_type = other DNA
acatgggaatgtgtttcctgagttttttgtgtgatatccaagaaatcattgccaagaccagtgtcaaggggatttcgcctatattttcatctaggagttttatgatttccagtctcatat

SEQ ID NO: 13831 - DNA, 120 bp, synthetic construct
  source 1..120: mol_type = other DNA
cctaagactattttgctaaaattgtccttagcatggagaaaggtccttatctaagggggatccatcagaataacttggggaaaattttcataccaaaccccctcatcctctcttcccaga

SEQ ID NO: 13832 - DNA, 120 bp, synthetic construct
  source 1..120: mol_type = other DNA
ctattgattgcctgctatggtggaagagggtttagcactgctcatccctgcttgaacagccttcccatctgctctattttttcctatcttatttatctttagttagccttgaacaaggaa

SEQ ID NO: 13833 - DNA, 120 bp, synthetic construct
  source 1..120: mol_type = other DNA
cattgcttagcaagtacaaatgtgagtctcccagattccatcgccccactgacttctgccaaacagtgctagtattaatttttaggtgaaaagacaggtcagaacagtctgaattcaaca

SEQ ID NO: 13834 - DNA, 120 bp, synthetic construct
  source 1..120: mol_type = other DNA
gaatgtcatttcctctttgaagcctttaccacctctcccaggttgggctaagggcagaaacttcttcctcacttagagcccattgtactgatatataattacatgtttacatgtctgtct

SEQ ID NO: 13835 - DNA, 120 bp, synthetic construct
  source 1..120: mol_type = other DNA
tcattttatgcccacatatacacgaatatcttcaattactggtcttgatcttaatggccattaccctgtaatgaatgaatttgggctttgaattcaaagatattccacagattagttcac

SEQ ID NO: 13836 - DNA, 120 bp, synthetic construct
  source 1..120: mol_type = other DNA
tgcagaagcattttaaaaattaagtcccttttgtctcctagattttattgtctgatcttttaaggtcttagtcgtaagttctttgtctagaacaatatacaggaggggtttccttaggtt

SEQ ID NO: 13837 - DNA, 120 bp, synthetic construct
  source 1..120: mol_type = other DNA
ccttatcaaagacctcttactttcctctacccttcccagcctctagtatcctctgttctgctttcaacttccaagagatcctttttttagcttccacatatgaatgagaacatgcaatgt

SEQ ID NO: 13838 - DNA, 120 bp, synthetic construct
  source 1..120: mol_type = other DNA
aataaaatggtattaggatttggggaatgaggagcaaattcaaatgtgtaagagagcttgtgggcaactgaggtaagctttccagggtagggactgttgagaactagagagtatatgtgc

SEQ ID NO: 13839 - DNA, 120 bp, synthetic construct
  source 1..120: mol_type = other DNA
gtcccacttaacaaacattcacagtggtaaattacatagcaccctaaagctacagaaatacaggacaattaatgaaatgcaaaggtatctgatctgattctagtgctgacctcttaaaag

SEQ ID NO: 13840 - DNA, 120 bp, synthetic construct
  source 1..120: mol_type = other DNA
gttaggaccagggaagaatcctcccttccattaatgccctcaaaaacatcctcgtaatatatacaactagacattgaagccaaaatgtaccaaaatgtatagcaagcacaggcttagaat

SEQ ID NO: 13841 - DNA, 120 bp, synthetic construct
  source 1..120: mol_type = other DNA
tttgtatacattagagatcattttgtgtgatgtaaagttctatgggttttgacaaatgcttagagttatgtaaataccaccccagtttcaaatagaacattttttaaaagatctgtatct

SEQ ID NO: 13842 - DNA, 120 bp, synthetic construct
  source 1..120: mol_type = other DNA
cttgtttggggcttcaaagaatttagaggtgggaaagggaagtgggttaatgaatgcctattctatcaggctaaatgttagatgctgggtgggcattgagagattaaaaagtccttgaag

SEQ ID NO: 13843 - DNA, 120 bp, synthetic construct
  source 1..120: mol_type = other DNA
cagatcttttaacagtaagtaaaatagaggaaaccaaaccaaaacaaaacaaaatgtgacccacataatgtgcttgaagagagatgagatttatgccggtgatgcaggtggttggtatat

SEQ ID NO: 13844 - DNA, 120 bp, synthetic construct
  source 1..120: mol_type = other DNA
aaatgttaacactctctgggaccaccagcctgagcaatatagaaaaacccgtctctagaaaaaataaaaaaattaacccagcatgttgatgcatgcctattgtcccagctactagggagg

SEQ ID NO: 13845 - DNA, 120 bp, synthetic construct
  source 1..120: mol_type = other DNA
gaccacttgacactatacaattctatggcattcagtacattttcagtgttgcaaccaccacctctacctagtctgaaagattttcatcgctgcaacagggaaatgcatttcattgagcag

SEQ ID NO: 13846 - DNA, 120 bp, synthetic construct
  source 1..120: mol_type = other DNA
ttccgtctcttgggtattgtgaatggtgctttaatgaacatggggagtacagatattttttggagatactgatatttcctttagatatagacctagaaccgggattgctaaaccatatgg

SEQ ID NO: 13847 - DNA, 120 bp, synthetic construct
  source 1..120: mol_type = other DNA
aatagaaagcaaaccaagatagtacaatatgtggagggcaagagaggagatcatttggaatggtgaatctttaccgggacagttttgccccctaggaacattcagcaatgtctggaaaca

SEQ ID NO: 13848 - DNA, 120 bp, synthetic construct
  source 1..120: mol_type = other DNA
ctctttgtttctttcttgcttgcttactttcttgctttcttctttcacttgccctcttttgaagcattaaggccagttgtctcatataatatctcatcactggggggaggagccaagatg

SEQ ID NO: 13849 - DNA, 120 bp, synthetic construct
  source 1..120: mol_type = other DNA
ggccctgtttttaattttttgaggaattgccatgcagttttctgcagcaactacaccatgtcacattcccaagagcagtgcacagggttccaatctctccacatttttaccaacacttgt

SEQ ID NO: 13850 - DNA, 120 bp, synthetic construct
  source 1..120: mol_type = other DNA
tggctctctcatgtatttatttaacaaacaatttattgaacagctactatctaaaaggtagccaacactaaacatgcactgacagtgagggagatgtgagtgtgtgagggcagggggttg

SEQ ID NO: 13851 - DNA, 120 bp, synthetic construct
  source 1..120: mol_type = other DNA
atgacctatatcctcctatgttccagcatcctatgagaagagaagtaaaaagtatttttaaaaggaaaaagtcttctgcaaccacccagcctacaacagtgtccaagggctttcctgagg

SEQ ID NO: 13852 - DNA, 120 bp, synthetic construct
  source 1..120: mol_type = other DNA
acatctttgactgacctatgtacattggtgaggtcctgacagaagacagattgcaattgcccaattctgtaagctaaggaggaagaaaggcaaaacatgcactctcaatttcacatacac

SEQ ID NO: 13853 - DNA, 120 bp, synthetic construct
  source 1..120: mol_type = other DNA
gcagggttcacttcttggtgagagactatggcaagattttcttctgatttagagagaaaaaaattgcccactagtttttgatcagtaaggtgtttactgatagggtggcagaagaaattc

SEQ ID NO: 13854 - DNA, 120 bp, synthetic construct
  source 1..120: mol_type = other DNA
ctatattgaaatcccctaagccttggggtctgttgaacttttcccatgcacttagtcttgatccatgcagagacaaattccttatgggcaagaatgaaatctgaacttgtctctctctca

SEQ ID NO: 13855 - DNA, 120 bp, synthetic construct
  source 1..120: mol_type = other DNA
caaatggtaggcataattcagtgagagaagctacagtggcttagaaacagaataaacaacctagatcacccccaccccatccaaaattttgtagatgtggcaaaaactgtcagctctcct

SEQ ID NO: 13856 - DNA, 120 bp, synthetic construct
  source 1..120: mol_type = other DNA
cagggagtgggtaaagaagggacagtgaggacatacatggggacaaatacatggtctagggttaggtcagagaagatcatcttaaggagaatataaatgcagtatacccccattgaagag

SEQ ID NO: 13857 - DNA, 120 bp, synthetic construct
  source 1..120: mol_type = other DNA
ctccatggctaccagacaacttctctgaggttgcacagccaaactgggccaggaaatcctgcacacactggccacattgacaccgacttgtcattctatttctttccaactgaaactgat

SEQ ID NO: 13858 - DNA, 120 bp, synthetic construct
  source 1..120: mol_type = other DNA
tccttgaggtgtggtgtgtggttgttcatttgcgatctttctatctttttgatgtaggcatttaatgctgtaaacatgcttcatagcacagcttttgtggtatcccagaggttttggtat

SEQ ID NO: 13859 - DNA, 120 bp, synthetic construct
  source 1..120: mol_type = other DNA
caacttttaagaaatgtaaaaaacattcttaattgaagtctgtaggtcggatgtggcttgggctgtactttgctgacccctattctaggtctatttgcactgatcttgctaggcaacatg

SEQ ID NO: 13860 - DNA, 120 bp, synthetic construct
  source 1..120: mol_type = other DNA
cagtttgattgctatgtgccatggagaagtcctttttgaactgtatctattttgggttatctgagctttctgtctatcgacgtctaaatcttttgctagacttgggatgttttcagctat

SEQ ID NO: 13861 - DNA, 120 bp, synthetic construct
  source 1..120: mol_type = other DNA
tctgcacagcaaaggaaaaaaaatcaacagagtgaagagcaagcctgttcgatgggagaaaatatttgcaaactattgctacaggggctaatattaagaatatacaaggaagttgaacaa

SEQ ID NO: 13862 - DNA, 120 bp, synthetic construct
  source 1..120: mol_type = other DNA
aatgtttcttatctcctctactcgaaggtcatatcctctttatctccttaagtaaagccaggagctctgcagtacccccaagtgagaaaaattatgcttaagacacttttgttggccggg

SEQ ID NO: 13863 - DNA, 120 bp, synthetic construct
  source 1..120: mol_type = other DNA
tatcccagcacagagaaaaacactcaccacttttattcaatgcataggagatttccatcagaattaggagataaaccttaatcctgagagggttgaaagtggaaatgtgagagatccaag

SEQ ID NO: 13864 - DNA, 120 bp, synthetic construct
  source 1..120: mol_type = other DNA
gtagcttattttcacagttcctgctggaagagctcagttggaatcagccaaagaaagtgatgtcatttcaggtttctaaggtatgaagatatggaaaactcaaagggaaggacagactcc

SEQ ID NO: 13865 - DNA, 120 bp, synthetic construct
  source 1..120: mol_type = other DNA
tggatggagggagggaaatatatgaatgaacatcagttctactgacatgacatgtatggagttgttttggtctagctcatgtaggctacaatacttcatagccttcaaattctttttaga

SEQ ID NO: 13866 - DNA, 120 bp, synthetic construct
  source 1..120: mol_type = other DNA
atggtctcttttctaatgtcctgttctctcttcgaagtctgtacctggcacccctactaaatggcacacacagacacctcatatttctggggttctagtcacacctgagtcttagctggt

SEQ ID NO: 13867 - DNA, 120 bp, synthetic construct
  source 1..120: mol_type = other DNA
cagggtgcgatttaaatgtagcataaagcataaatctgatcttgttattctcctgcttaaaaactttcaacagcaggaacttcataccccttggctcgtctcccattgtgtggcttcttc

SEQ ID NO: 13868 - DNA, 120 bp, synthetic construct
  source 1..120: mol_type = other DNA
agaatgaatgagatcgtagcctggaagtatatgaccacctgctggttccatacctggcatgtcccacgtgggatgagcaaaggccctgagggcttatgtgacccatgagctggtccctgg

SEQ ID NO: 13869 - DNA, 120 bp, synthetic construct
  source 1..120: mol_type = other DNA
acccttggctaagcccccttgctgctacaaaatagcaaagaatgtgcatgtttgcgtgagagtgtgttgagtacgtaagtatgaatgtgtagttagtgtatatgtgcaagtgtgtatatg

SEQ ID NO: 13870 - DNA, 120 bp, synthetic construct
  source 1..120: mol_type = other DNA
catataaaagtatcccaatttttttttttctagatgacaagaggtacttctttgcttttgtaacctgttcttttctgtaactcaaaatggatgtcaaatatgaagaaccctatatagggt

SEQ ID NO: 13871 - DNA, 120 bp, synthetic construct
  source 1..120: mol_type = other DNA
cagtctgaataaacaattcacaggtcttaaacggtgtgctgttacgagtagcttgatgaaatctcttagcgtcccactctgtcccttcttcattatgagaaggtgagtacagtgcattaa

SEQ ID NO: 13872 - DNA, 120 bp, synthetic construct
  source 1..120: mol_type = other DNA
ttctgtaggggaatggataaactgtggtatatccatacagatgggatattattaagcaatacaaagacatgagctagcaagctacaaaattcatggaggccaggcgcggtggctcatact

SEQ ID NO: 13873 - DNA, 120 bp, synthetic construct
  source 1..120: mol_type = other DNA
tgccttgaacagtcatctctgagttacctgttctcttgcctgatagattatgcatctcataaagacaaaacgatattgtgccacattattactttgtgtcctatagggtgtgaaatgtag

SEQ ID NO: 13874 - DNA, 120 bp, synthetic construct
  source 1..120: mol_type = other DNA
ttgttttatgcatgcggcgcctgtttcaggttctcaagaaacatggtattcagttcattgagagcactggttcttcatgccagctgcctattagaatcatctagaaatctcttggaaaac

SEQ ID NO: 13875 - DNA, 120 bp, synthetic construct
  source 1..120: mol_type = other DNA
tgcctcttgaggaagtgagaaggaaccatcagtcatttactgagagagctttctagagagatggagcagtcagtactctgcccaaggcgggaatcagctccaagcattcaaatacataaa

SEQ ID NO: 13876 - DNA, 120 bp, synthetic construct
  source 1..120: mol_type = other DNA
ggatatttgtcacctaaggcaggtaactcactgaaaatggtgactacaacacagcacgcttgctcctaaagtgctgttaattcttcctgtttactgtcagtctcccccatatgaatttaa

SEQ ID NO: 13877 - DNA, 120 bp, synthetic construct
  source 1..120: mol_type = other DNA
tggattgcctttgaacctctgtcaaaaatcaactgatcataagtgtgtgggtccatttctggactctctgttttgttccattgatatatgtgcccatccttgtgtcaaaccacaggattt

SEQ ID NO: 13878 - DNA, 120 bp, synthetic construct
  source 1..120: mol_type = other DNA
aaaaccatagtataagaatgaagaagttaatttttgtatactaatcttgtatcctgtgatcttgctaaatggacttaacagttttagtagcttattttccaagttcttcgggattttctc

SEQ ID NO: 13879 - DNA, 120 bp, synthetic construct
  source 1..120: mol_type = other DNA
aaactagaaccacgaacagcaaattgatacaaaccttaaacgccaatgtaaatagagaaagcgtgtccagagctgtcaggcaaacctcagtagcaatgttggcttcaagtaatgactggt

SEQ ID NO: 13880 - DNA, 120 bp, synthetic construct
  source 1..120: mol_type = other DNA
aattcatagagacattaagtagaatagtgtttcctggggctaaggggagagggaacaggaagttagcatggcatttctgtctaggatgatgaagagttctggaaatagatagtggtgatg

SEQ ID NO: 13881 - DNA, 120 bp, synthetic construct
  source 1..120: mol_type = other DNA
aaattattgcacatttgtctacaaattctgcatccaaacaatctgatactacatttgtcttccatgggcagtgagagaaggagggttagtgcacatcaggctaaaacctcaggcctgatc

SEQ ID NO: 13882 - DNA, 120 bp, synthetic construct
  source 1..120: mol_type = other DNA
cctctgggagtccaggggccctggattgtggagatgtttctggagcactgctttacctttttcttctgcaaaccaaggctcagttattttagggtcttgaacaagttttaatttttaatt

SEQ ID NO: 13883 - DNA, 120 bp, synthetic construct
  source 1..120: mol_type = other DNA
agtcacaggacatatgggcatcctaatgacaagagtctttcctaaacaatctgttgaactgagattaacccggtgtttcccaaatagaagtgacacagaaaccttttccccccacataat

SEQ ID NO: 13884 - DNA, 120 bp, synthetic construct
  source 1..120: mol_type = other DNA
ctttgctcatactcagaccatggtgttttcctttcattcctctccataggaatacctggtggtaatcatttgctttttgcaacagtgaaatctctctctgtctctgtctctctctctctt

SEQ ID NO: 13885 - DNA, 120 bp, synthetic construct
  source 1..120: mol_type = other DNA
aagggctgggattacaggtgtgagctaaattcctccctaatgttaccatagccttagctacttatctttgggtccttctcatctttctgttttccttcccagccaggaaaatctgtgtaa

SEQ ID NO: 13886 - DNA, 120 bp, synthetic construct
  source 1..120: mol_type = other DNA
gtctctgctacttagcatctctactgggtttctaatcggtttctcaacttcatgtatcggaaactgagctcgaaaagtttctccctcagtttttcctctctctgaaaatggcaacttgaa

SEQ ID NO: 13887 - DNA, 120 bp, synthetic construct
  source 1..120: mol_type = other DNA
gtgtcgaatcacaccgtccatgaagagagatagcttgacttcttcttttcctatttacatgccttttatttatttttcttgcccgactgctctggctaggacttccagtaccatgttgaa

SEQ ID NO: 13888 - DNA, 120 bp, synthetic construct
  source 1..120: mol_type = other DNA
ttgtacttttaattgggattgctgcttgagtttgaggtgatcatgaatttgtaatatactgtccctttggtagtttcagtgtcacctctttttctggcctgagcccaaggctgattccta

SEQ ID NO: 13889 - DNA, 120 bp, synthetic construct
  source 1..120: mol_type = other DNA
ttttgaatctcatggctgaggcactgaatcaaacctcctaaaagcaaggacttgttcttctggacagcagttcccatgcactctttgctgttattaagagagaagcagcatcaactaaaa

SEQ ID NO: 13890 - DNA, 120 bp, synthetic construct
  source 1..120: mol_type = other DNA
atatatatatagaaatgtcacagggatgctccgggtgaaaacacagagaaaagcagtgaacaagcatctttcagtcaccaaaagagccagagcactgcactacagagccacaaaatccaa

SEQ ID NO: 13891 - DNA, 120 bp, synthetic construct
  source 1..120: mol_type = other DNA
agatattttgtgaaagatgattttcagtggtgtggcagactgagggagggtaaagctgaggctatgacattcaaagaggacacaatatcctcaatgcaaacaaaggcaaaagactgtgag

SEQ ID NO: 13892 - DNA, 120 bp, synthetic construct
  source 1..120: mol_type = other DNA
atactgtatgagtaattacaatctgtaaaggtaagttttataaacctttaatattttcattataaaccgttgttgagcaaacacttagccttatcgacaaggaagagaaacacttgggat

SEQ ID NO: 13893 - DNA, 120 bp, synthetic construct
  source 1..120: mol_type = other DNA
tcattaggcattagctagctgcatcaatcagagacacggaaaacaaacatatgagtacatgtgaaattttggagcaagggccagactaatgtaggaataggtggcattttcctaatatgc

SEQ ID NO: 13894 - DNA, 120 bp, synthetic construct
  source 1..120: mol_type = other DNA
aaagtagatactgatttaaaaggtgagatcataaatatagatgtgaaaaatcatctttatatgtaaaaacaataattttattttaggtttcagcttctttggcagttcattatggtcttc

SEQ ID NO: 13895 - DNA, 120 bp, synthetic construct
  source 1..120: mol_type = other DNA
tccataggaagtaatttaattgttttgtttggaatgtcttctgccttggacttttcagaaacatatagtggcattcctgtgtcaccaacaagctcagcacatgctagatggtatgcagtg

SEQ ID NO: 13896 - DNA, 120 bp, synthetic construct
  source 1..120: mol_type = other DNA
taggacttcattttctcatatgtaatctttagtcaccagtgagaatgagctgctttcattccctcaaatttctaatacagggtacaggggagcaatttgagaaccagctggatccactgt

SEQ ID NO: 13897 - DNA, 120 bp, synthetic construct
  source 1..120: mol_type = other DNA
cattacctcattgcattccttttaacagaatacagtgctgcaggtgaatatcttgatgagagtttgtacagttagtaagtggcgaagcaggttctaatgccaacctgagtctacagcctt

SEQ ID NO: 13898 - DNA, 120 bp, synthetic construct
  source 1..120: mol_type = other DNA
ccaaaacagtttcatttattcagtcatttctttcaacatgtttttgagtctctgagatgcagaaggtgttacatatcatttatgagggataggaagttaaataagatgcgcattatggat

SEQ ID NO: 13899 - DNA, 120 bp, synthetic construct
  source 1..120: mol_type = other DNA
agcttgacagctgcacttttccaatcaacattgtaaggaaacatagacatacacgtattctctcataagaccctgtgaggttctacaacgataaagaaacatatgtttttgtgcctgaaa

SEQ ID NO: 13900 - DNA, 120 bp, synthetic construct
  source 1..120: mol_type = other DNA
tagccggctgtcccaaagacagctgtgcattgaaaagcaatctacaaaagaacgactataatctactgactgactgttactagttcagcacatctatgatctacatcgcatgttcgtaat

SEQ ID NO: 13901 - DNA, 120 bp, synthetic construct
  source 1..120: mol_type = other DNA
gtgatttatttaactgaaataagggatagtcaaaagggaaggagaaaaatcatgtgctcatttgtgaagctcagaaacccttaaaatagaatataggtcacacaaagtaaagcctcagac

SEQ ID NO: 13902 - DNA, 120 bp, synthetic construct
  source 1..120: mol_type = other DNA
aatcatgagacctcaggactcacattcaggcgggtctccaacttcctaagccagtgcttgggttttagagagaaagtgtacttcatttgaaggctaataaaataagcataaagtacatgc

SEQ ID NO: 13903 - DNA, 120 bp, synthetic construct
  source 1..120: mol_type = other DNA
ggctgctgtgttctcagcacccagtgcagtgactgccatagagtaccgacccaatacaccatgtgttatagaacaaagaaataagtgattgaacagtaaaatgtggttttaagtaaagga

SEQ ID NO: 13904 - DNA, 120 bp, synthetic construct
  source 1..120: mol_type = other DNA
aacggttccattaacccttatataatccaccagtccctgattaaatcaccagctgtggaaagttttgctgtctgagcctaaagtataatgggttaccatcaccacttagagaattccatc

SEQ ID NO: 13905 - DNA, 120 bp, synthetic construct
  source 1..120: mol_type = other DNA
ttccaatggatttaagaagactgatacatggcagcagtaatccagtgtcaatttaaatatgtgtatttgtatttaggtgcataggtgtgttacagagctccaattctgcatatcatgcta

SEQ ID NO: 13906 - DNA, 120 bp, synthetic construct
  source 1..120: mol_type = other DNA
atatgcaaagcttcagtgctaggtagtggggatggaaagtggagaaaatagctcttttttgttcttacggagtctctgggaatggatcactattaaattagccatgctatgaaggagctg

SEQ ID NO: 13907 - DNA, 120 bp, synthetic construct
  source 1..120: mol_type = other DNA
tgcattattgcttagttggtgataaaaattgtaaggaaaggctaagttacacttctgtgcaatggttttataagaaaatcttctctccctctccctctccctcctctccctctccccacg

SEQ ID NO: 13908 - DNA, 120 bp, synthetic construct
  source 1..120: mol_type = other DNA
tgagaaactgtcacagaccagaggagactggggagatatgacaactaaatgcaatgtggtactctggatgagatccaatgacagaaagagtacataatagggtgactagtgtaatccaaa

SEQ ID NO: 13909 - DNA, 120 bp, synthetic construct
  source 1..120: mol_type = other DNA
agtgtgccaccagatttgagaaaaaatattgggtctgacaaggcccagggtattacgattaatgccagtgagagagacatcaagttaaggaatcagagaatgttgttagtggtagagatc

SEQ ID NO: 13910 - DNA, 120 bp, synthetic construct
  source 1..120: mol_type = other DNA
atatccccagtactttttccacttagaattcagtccactccaaatatttgtaagtttcaagtctaaagactgtatttgaattgcatgtaaaatcaatcagccatctcagaacttcttata

SEQ ID NO: 13911 - DNA, 120 bp, synthetic construct
  source 1..120: mol_type = other DNA
cagcaaagaagttaaagccgaaaagctcaaacaataccaaaccagacttttaaactccaccacagcctacatttttctagttgtttcatttccagcagaaaataatcgattaatcaagga

SEQ ID NO: 13912 - DNA, 120 bp, synthetic construct
  source 1..120: mol_type = other DNA
ttctgttttaaagttggcagtgaatctaatatttatgcaaccatttgtctccagcacttttttgggtaataaacatcagtgtggccaaatgtcacctcattccacttgtgtgtcaatgac

SEQ ID NO: 13913 - DNA, 120 bp, synthetic construct
  source 1..120: mol_type = other DNA
tggctcagacaacaggggtagaatggtagtgcaattggacctcctaataaatgtgttgtgtgattagaatgactccaagcatttttagcttaaactaccagtgtgatggagatggcatca

SEQ ID NO: 13914 - DNA, 120 bp, synthetic construct
  source 1..120: mol_type = other DNA
catacctgcgatggaatgccagttgtggttcaaaattaggcataaattttcacagtgttaaattgttatgtgcaaaagagaggaaactaacaacaaaaggctcaatgggaataaaattct

SEQ ID NO: 13915 - DNA, 120 bp, synthetic construct
  source 1..120: mol_type = other DNA
aattaaaactctcaagtcaggagttgtagaagttttgtgccatacttcccagtgacccttgggtggaacccatggatcacctttcaaaataatgtttaaaatgcaataaaaatggtgcct

SEQ ID NO: 13916 - DNA, 120 bp, synthetic construct
  source 1..120: mol_type = other DNA
tgtttctgttagtaataatatttttattacaaattcaaattcagctggacccatttctcatgaacagtgccttcacagtgtcctcacatggtggaagagggacacagtgatctcggggca

SEQ ID NO: 13917 - DNA, 120 bp, synthetic construct
  source 1..120: mol_type = other DNA
agaacttagagaattgaagaattggagacagaacacatttgttcaaaataaaagctccctttgcagaagatagaattgtgatacataggccgggcccagtggctcacacctgtaatccca

SEQ ID NO: 13918 - DNA, 120 bp, synthetic construct
  source 1..120: mol_type = other DNA
tatgtgcaagtccattcctagacttcagttgaaactctgacttcccaggcaacgttgtcatgctttattttggtagactaattggttggaaactccctgagtcaatactttcccaatctg

SEQ ID NO: 13919 - DNA, 120 bp, synthetic construct
  source 1..120: mol_type = other DNA
aatggaaaacgccaagctaccaactatataaagttcatttactggagaagcaaataaaataagacagcagcagctgatcaccagtccttgcccaaggatgtggagacagaggaaatccac

SEQ ID NO: 13920 - DNA, 120 bp, synthetic construct
  source 1..120: mol_type = other DNA
tccaccctgactccaactccccaccaagcatgtagatatcccagcctcatccaccttggctctgactcccctgcatgtgacccactggcactgaaacagtgcacaagtcatattcagtta

SEQ ID NO: 13921 - DNA, 120 bp, synthetic construct
  source 1..120: mol_type = other DNA
aggagcctcacacaccagaggacccagatctgcgaaatgctttggtcagggacatggagggaggtttggatgagtgggcagcctagaaacgtgggccccaacttctcctggagggtccag

SEQ ID NO: 13922 - DNA, 120 bp, synthetic construct
  source 1..120: mol_type = other DNA
cacttgagacaagaatgcagtggcagaacttacatgcacaaatggctgcattgtgtggttaatgctctatcgataagtcctgaggtagcaatggctttaagatgtagcctctttaacata

SEQ ID NO: 13923 - DNA, 120 bp, synthetic construct
  source 1..120: mol_type = other DNA
tgacagtgaaataggaacttggaggagacctggtcacagacagtcctgcaaggcctgcagatgcttccaaaatatggaggaacacaggtcaaaactagacaaaaagaggggaagaaatag

SEQ ID NO: 13924 - DNA, 120 bp, synthetic construct
  source 1..120: mol_type = other DNA
tatgtatgtgtgtgtgtatatatataaagtataatgtgctgtcttcatgcccatcaacatgattaattggagtaggagaaggtttgtaaaagaaatgcgctacaggttgaatattcctaa

SEQ ID NO: 13925 - DNA, 120 bp, synthetic construct
  source 1..120: mol_type = other DNA
ccacctcattttctagcaggccttgggtagggtctaaaagtttagagatgagggagacctatcccattcgctggattttggtggcattcatctgtgagacttgtgtcaagtgtattagca

SEQ ID NO: 13926 - DNA, 120 bp, synthetic construct
  source 1..120: mol_type = other DNA
ttctaccttcgggcatattctagtccggggggaaaaacacatcaaaaaaactaaatgactccacaggatgattgcaacaaacctacaagatgctggagaaggaaaaatggttttggacga

SEQ ID NO: 13927 - DNA, 120 bp, synthetic construct
  source 1..120: mol_type = other DNA
tctatccagcctgcaccaggatatcgcttagaaatcaatatgccacatgggactttttatcttcacggtgtcgagaagcttctggaatccagtaaatatgtgacatttctcagttgagat

SEQ ID NO: 13928 - DNA, 120 bp, synthetic construct
  source 1..120: mol_type = other DNA
gggacagaaaagctgcactagtggaaaaactggtgagattctagcggaggctgcagttcaatgtgataatgttgatttctgtaccaatgttgatttcttagttttcacagaaatgtgcca

SEQ ID NO: 13929 - DNA, 120 bp, synthetic construct
  source 1..120: mol_type = other DNA
ggctgtggtaaaatacaatttgcttaacattggaaagggttctgtcatctggtaagttttacttgcatgataaggtttcaatcagtgaacaccagaagccagccttgtccagggtccctt

SEQ ID NO: 13930 - DNA, 120 bp, synthetic construct
  source 1..120: mol_type = other DNA
acgtttaatactgtcacgatttgaaaggaagagctaaggtacttgtccagtagcccaatctccaagtccatctttgatctgaatgttgagatcaaggatgagaaacacctttttgcccca

SEQ ID NO: 13931 - DNA, 120 bp, synthetic construct
  source 1..120: mol_type = other DNA
ctgtggtccagtttccctgcaaataggggtttagaaggagctgagaaaagaggagatgagggtacactgtagggaagaagtgatattcacaactgacagcaaggaacaaaaaagttaaac

SEQ ID NO: 13932 - DNA, 120 bp, synthetic construct
  source 1..120: mol_type = other DNA
agtgtgtggatagaccgtggctgcagtgtgtggataggccgtggttacagtgtgtggataggccgtggctacagtgtgtggataggccgtggctacagtgtgtggatagaccgtggctgc

SEQ ID NO: 13933 - DNA, 120 bp, synthetic construct
  source 1..120: mol_type = other DNA
gcattgttattatttctccactttggcccacaaacctgaattcagccacttctatgtagagagtactcagataaaaaagaaaagtgagatgcttacgctctagaagaccatgatgtggga

SEQ ID NO: 13934 - DNA, 120 bp, synthetic construct
  source 1..120: mol_type = other DNA
aagcacctgcaccatttcacatgcccaccagcagcgcacggagattctgatttctccacatcctcaccaatacttataactttttttaataacagccatcctatttagtgtggacaaaca

SEQ ID NO: 13935 - DNA, 120 bp, synthetic construct
  source 1..120: mol_type = other DNA
caaccctgaaggctatcgccacaaaatagtctaagttttcttttgaaaaaatgtgcttttgtttatgaaattgggtttatggatcatttggggaggcttggctgaaagccaccctgggct

SEQ ID NO: 13936 - DNA, 120 bp, synthetic construct
  source 1..120: mol_type = other DNA
ctccatctgccatcctcgtcactgaccttcctagcagcagtgagcctgatgctgagtcctgtgctgggttaaaagggaaaacagttatttcttaggctgcactcaggtagtgtctcaagg

SEQ ID NO: 13937 - DNA, 120 bp, synthetic construct
  source 1..120: mol_type = other DNA
acacacattcacggtcacactcatgcacatgcatgctcacacatgatcacatacacacatgcagatacctacacacgtgcctatgcatgctcacacatgatcacactccttacacacgta

SEQ ID NO: 13938 - DNA, 120 bp, synthetic construct
  source 1..120: mol_type = other DNA
cgtcttattgtaaatatcaccatctgcacagggaaatttgtggagaggtccactcaggggcctagattcagatccagaggttatttggtgaatttgaaaccaaagcaaagcaaagtggtt

SEQ ID NO: 13939 - DNA, 120 bp, synthetic construct
  source 1..120: mol_type = other DNA
gacacactgctctgtccctccgtgctggagacacactgttctgtccttccgttgctggagacacattggtcggtccttccattgctggagacacatgggttggtctttccattactagag

SEQ ID NO: 13940 - DNA, 120 bp, synthetic construct
  source 1..120: mol_type = other DNA
tgaggatctagggtcagcacaccagcacaagctccactgaggagtgagaatctaaggtcagtcccaccagcacagcctcagtcaggggtaaggatctaggacagtctaccagcataacct

SEQ ID NO: 13941 - DNA, 120 bp, synthetic construct
  source 1..120: mol_type = other DNA
gggaggatacaatgagatactacaggtaaagctcttgcacacaggaggccagcaataaatgtttgctatctttaaaggccttgaaacatagcgttgttttcagagtgtcatgatgatcag

SEQ ID NO: 13942 - DNA, 120 bp, synthetic construct
  source 1..120: mol_type = other DNA
caggaattattactcgtctatgtagcaaatccgtaagtgatctgctcagctttatgtcaccaacacatacagacgaagaggtcaattacccctggtggtgagggaaacctgaatctgtaa

SEQ ID NO: 13943 - DNA, 120 bp, synthetic construct
  source 1..120: mol_type = other DNA
tccactcactttatgaggtttaagttctgtctaaacaagagaaatggaagccagaacaggacttcgtaatttatagcagggaatgagctgttaacttccacgatcccgtcctgtatcaag

SEQ ID NO: 13944 - DNA, 120 bp, synthetic construct
  source 1..120: mol_type = other DNA
gctcgcttcctgaaacaagtcacagctcacagaaatcacatgcacaggaatatctaaaatggcttttttttggggcggtgggggggggttgtttttatgtttattttacttgtacttttt

SEQ ID NO: 13945 - DNA, 120 bp, synthetic construct
  source 1..120: mol_type = other DNA
gatgacaaacggtacatcagtgggaagaagctcagtcaccccaccacggatgctcagacattcacccccaccacagaaacccagacagtcacccccaccatggaaacacagaaaatcacc

SEQ ID NO: 13946 - DNA, 120 bp, synthetic construct
  source 1..120: mol_type = other DNA
tgcaccagcgcacagggagagctgggcggccgggaacccacagaggctcatttctcaggaatgtactgtggaccaggtggggttttcccatttttccttattctgtcttacgagaaatac

SEQ ID NO: 13947 - DNA, 120 bp, synthetic construct
  source 1..120: mol_type = other DNA
gccagaggaaaatatggaagccaactccttgttctgaaaactggtaagttaaggaaaaggtcctgcctttcttatacaaactgtaccactgagtaaccagatgacagtctgcctgtataa

SEQ ID NO: 13948 - DNA, 120 bp, synthetic construct
  source 1..120: mol_type = other DNA
aaggcaatcagacacagcaatcaagagaagaaagtgctttccggtggaaaatgaagactgggaaatcctgggggctccacagcaacacttcttttttttttttttttttttgagacggag

SEQ ID NO: 13949 - DNA, 120 bp, synthetic construct
  source 1..120: mol_type = other DNA
gtacatggtgtgttgccatcaaggagctctttgcaggggccacacggaatccataggtgtattagggtgctttagagggacagaactaatagtattctcctgttagttatatatatagat

SEQ ID NO: 13950 - DNA, 120 bp, synthetic construct
  source 1..120: mol_type = other DNA
cctctaaagaaccctcatacacctatggattcatatatgtatgtatatgtgtacgtgtacgtatatgtgtatatgtatacaaggtcccacgataggccatctacaggctgaggagcaagg

SEQ ID NO: 13951 - DNA, 120 bp, synthetic construct
  source 1..120: mol_type = other DNA
tgtagctcaagttgaaccattgtggtgctggttcatgggtgctattagtttagagggcaaggtggtggtgaattccatctccagtcctttactcagattgttctaatatgttgtacattt

SEQ ID NO: 13952 - DNA, 120 bp, synthetic construct
  source 1..120: mol_type = other DNA
aggccgggcccagaagaggattcgggctaaggcgctgagtcgctaacgtgaaggccgggcccagaagaggattcgggctaaggcgctgagtcgctaacgtgaaggccgggcccagaagag

SEQ ID NO: 13953 - DNA, 120 bp, synthetic construct
  source 1..120: mol_type = other DNA
tttatgaataaaaataatgcttcgttcagtggcatatttcctgcccagtctgtttgctgaaattaaacatccgctgtcacctggagcaagtcttcagaaacctttgttctcctggctctg

SEQ ID NO: 13954 - DNA, 120 bp, synthetic construct
  source 1..120: mol_type = other DNA
gtttgctgtgcagctgctgtcatcacctgcgtcagaaagtggaggcagtggcggactctgtgggtagtgtttgtgaagttctggcgctgtgtccaccctggaattgcactccaggaaaaa

SEQ ID NO: 13955 - DNA, 120 bp, synthetic construct
  source 1..120: mol_type = other DNA
ttgccttttcttcatcttcttccttttctatttacctggatcgaaatgacttcaaatcccaccatttttcagtttacatccacgtgttctctgccttgattgtgatcatcgctggggcct

SEQ ID NO: 13956 - DNA, 120 bp, synthetic construct
  source 1..120: mol_type = other DNA
gatgaacatcataacccgtgtttagtgagcacctgtgcttgttgatgaacatcataacccgtgtttagtgagcacctgtgcttgttgatgaacatcataacccgtgtttagtgagcacct

SEQ ID NO: 13957 - DNA, 120 bp, synthetic construct
  source 1..120: mol_type = other DNA
gtgagcacctgtgcttgttgatgaacatcataacccgtgtttagtgagcacctaagactcttaagagctctgctcagccttttcagcccttgaagccactgacgatgtaagtgaacttac

SEQ ID NO: 13958 - DNA, 120 bp, synthetic construct
  source 1..120: mol_type = other DNA
gatttaaaagcattagtttggggattctaactcataaagaatttataatttagtctaaactgcccaaaaaaaccttaagaagcactaacagcaatgtactataggttttttggaagcata

SEQ ID NO: 13959 - DNA, 120 bp, synthetic construct
  source 1..120: mol_type = other DNA
aaagatggtggaaactacagaccccctggcctcaccccggggatgcaggccgtgctggtttggctgagcctggtgcctctgtgcttctctagggctctgcaggtgatgctaaagtacagc

SEQ ID NO: 13960 - DNA, 120 bp, synthetic construct
  source 1..120: mol_type = other DNA
gctgtcagaagtcaggctttgctccctttccacatctgggtgggagaggcctgggaaaagctctgcctgcctgcgtgtttgatgggttaggtggatggatgagtgagcgctccagtgaat

SEQ ID NO: 13961 - DNA, 120 bp, synthetic construct
  source 1..120: mol_type = other DNA
aattggaagcgaggacaaaagccagaggagctgtcgatgatggatgcattcctggccctctggggccggctggtccaggggttgcgcttcggctgcctgagtcgttgctagaggaggtct

SEQ ID NO: 13962 - DNA, 120 bp, synthetic construct
  source 1..120: mol_type = other DNA
tgtgtggaaacctgaccagacaagtccaattcaaggagtcaaggcccgtgtcattgaaggagtgctctcccttttcagctgaatggaacaggggactagtcccccttttcccaagaataa

SEQ ID NO: 13963 - DNA, 120 bp, synthetic construct
  source 1..120: mol_type = other DNA
cgttcaagctacggccaatatcccagattgtgccactgtccaggacaacctctgctgctttagatacaatttcatgattgaccttgtcaagattccagttccctgggacctgactgttct

SEQ ID NO: 13964 - DNA, 120 bp, synthetic construct
  source 1..120: mol_type = other DNA
accagcacacaaacccacgatgttggagggctggaggcttgatgctccatgattagtgatcagcgactgaacagaaatatttttcatgaaatcttttcatctctactatcactaagatca

SEQ ID NO: 13965 - DNA, 120 bp, synthetic construct
  source 1..120: mol_type = other DNA
cacaggggagcacaggggccacgcccaggtccccacaccccaacacaggggagcacaggggccacgcccaggtccccacaccccaacacaggggagcactggggccacccccgggtgccc

SEQ ID NO: 13966 - DNA, 120 bp, synthetic construct
  source 1..120: mol_type = other DNA
tatcacaagatgaatatgcgcatgtcacccccatgcagatgcaagcgagggcatctcagcacccagatgttcctgtggccccttccaatgaccacctctccccccagaggagccctggct

SEQ ID NO: 13967 - DNA, 120 bp, synthetic construct
  source 1..120: mol_type = other DNA
ctctagctatgggaatgggacctggtgtgcctgagacactctacctttgggaacagggcctggtgtccctgaaacgctctagctataggaacatggcctggtgtgcctgagatgctctgg

SEQ ID NO: 13968 - DNA, 120 bp, synthetic construct
  source 1..120: mol_type = other DNA
caaatcagacttcagaacctaagctcttgagctcaaacccacagagataaagtagtcagatgagttacaatgagataaaccggtaggtggtatatgcccactggtattgcagtactaaac

SEQ ID NO: 13969 - DNA, 120 bp, synthetic construct
  source 1..120: mol_type = other DNA
ttgggaaaggacacctgggaatgaggacgtcaatgtagtagccctatgagcattcagatgatcttgggaaaggacacctgggaatgaggatgtcaatatagtagcctatgagcattcagg

SEQ ID NO: 13970 - DNA, 120 bp, synthetic construct
  source 1..120: mol_type = other DNA
gggagaagaatgttccccactacaatctcagcagcaaaagaacgtcaagggtcaggaagaaatctttcagaaagcctccaccttccgaaagcaatcacttcaataagtggattggagctg

SEQ ID NO: 13971 - DNA, 120 bp, synthetic construct
  source 1..120: mol_type = other DNA
ttcaagtgggcactctgagctcacagtgtgacttcccctgcccaatccatagacaatccaaaatccccagaaatgtaacaaaggatttaaggaagatataaacaaaaccagaaaagtgga

SEQ ID NO: 13972 - DNA, 120 bp, synthetic construct
  source 1..120: mol_type = other DNA
ccatttgtttcaggcagagtggacatttcactcgcggtttaatttgcgggaagatcacattctggccgtttaatcttctgatgacagacagctaactgttgataaggataaaatgaaacc

SEQ ID NO: 13973 - DNA, 120 bp, synthetic construct
  source 1..120: mol_type = other DNA
cctgtatgactccgccgttcctttgcatggatataccacgttttgctcacacattcacctgttgaaggacacttgggttgtttcctgcggcagcttttcctgaccgaaagcttctcaaaa

SEQ ID NO: 13974 - DNA, 120 bp, synthetic construct
  source 1..120: mol_type = other DNA
agagaagacacagatatgctttggggaaagtactgaacctagatattaatcagagaaaagctgggaacgttgattcctaggaatgtggatactgtgttaggaagagaaagggaaggagag

SEQ ID NO: 13975 - DNA, 120 bp, synthetic construct
  source 1..120: mol_type = other DNA
cgcctgctgaaggacgcggggttgaatccctcttcagcctctcgtgaatttctgtcttagggaaggagagtctccatcctcccacgtggggacacgcctgctgaaggatgcgggtttgaa

SEQ ID NO: 13976 - DNA, 120 bp, synthetic construct
  source 1..120: mol_type = other DNA
ttgcatgtaaaattgacacaagaagagcctccctgcaggactgcagccaaggttagccagaaccatttccagtcacggaaccgtcactcagagcagctcccagaaccatttccaatcatg

SEQ ID NO: 13977 - DNA, 120 bp, synthetic construct
  source 1..120: mol_type = other DNA
cagaagcacctgagggagtctgcctcttccctccatattcactgtgctgaaagctgcagcaggtgcccagttctgcaggaaacaggctttgaacatggattcctgtgaggaggatgtggg

SEQ ID NO: 13978 - DNA, 120 bp, synthetic construct
  source 1..120: mol_type = other DNA
tttgaaaggggtgtgtgactcttttactctgaagagaggacattcttctgatacccagtctcacaataaaaagttgctacctttactttccccacttggccaatgatatcagtagccaca

SEQ ID NO: 13979 - DNA, 120 bp, synthetic construct
  source 1..120: mol_type = other DNA
tccagctcccatgcagttatgctgtgtaagaaatggcaacagggccaaaaccttgtaactctcttcagagttggacgtaaaacactgaggtagctagaaatacattctaagttgaggtaa

SEQ ID NO: 13980 - DNA, 120 bp, synthetic construct
  source 1..120: mol_type = other DNA
tgagtagccgctggagtgaggagtagccgctggagtgaggagtagccgctggagtgagtagccgctggagtgaggagtagccgctggagtgagtagccgctggagtgaggagtagccact

SEQ ID NO: 13981 - DNA, 120 bp, synthetic construct
  source 1..120: mol_type = other DNA
aagcgtgtttctctccatggactagagcgtggaagtgcacacacatttcccacgttcagagagtgacctggaaacaggtcttaagaacaaggtggaaatttagctgctgccattaaacat

SEQ ID NO: 13982 - DNA, 120 bp, synthetic construct
  source 1..120: mol_type = other DNA
caccattcacacgtgtgccctcacctgtagacgcatttaatttacattgggtgtcctgccgtgtaaacttctgtggagacctacttaattcacaccaagtgtcctgatgtgtagacccct

SEQ ID NO: 13983 - DNA, 120 bp, synthetic construct
  source 1..120: mol_type = other DNA
atttaattcacaccgggtgtcctggcgtgtaaacccctgtgtagatctacttaattcacacccagcatcctgacctgtagacccctgtggcgacctacttaattcacacccggcatcctg

SEQ ID NO: 13984 - DNA, 120 bp, synthetic construct
  source 1..120: mol_type = other DNA
attcacaccgagtgtcctgacgtgtagacccctgtggagacctacttaattcacaccggtgttctgacatgtagacccctgtggagacctacttaattcacaccggtatcctgacatata

SEQ ID NO: 13985 - DNA, 120 bp, synthetic construct
  source 1..120: mol_type = other DNA
tcctgacgtgtagtagacccctgtggagacctacttaattcacaccggtgtcctgatgtgtagacccctgtggagacctacttaattcacacctggcatcctgacgtgtggactcctatg

SEQ ID NO: 13986 - DNA, 120 bp, synthetic construct
  source 1..120: mol_type = other DNA
tgacaaaattcactacccactcatgtactgcagcaaactaaaaacagaggggaatttcctgagcttcataaagagcatctccgaaaagccctacagctgacgtcatacttaatggtgaaa

SEQ ID NO: 13987 - DNA, 120 bp, synthetic construct
  source 1..120: mol_type = other DNA
tgtgagaccttcttcaggtttcggtagactgtcttcattacggcgtaaaaacatgtcagatgaaatttcagaaactatttccaaactcagtgaaggttcgtgacatctgggacgttgttg

SEQ ID NO: 13988 - DNA, 120 bp, synthetic construct
  source 1..120: mol_type = other DNA
aagcccctgtgcctgagctgtggacaagaaacacgcctgcctcagaagctgcctggagctgggtgaaggcttccattcagctcgctgtcatgctctcactcagaggagagatcatgcaga

SEQ ID NO: 13989 - DNA, 120 bp, synthetic construct
  source 1..120: mol_type = other DNA
taccagtaaacggtaattggatttttcggaagaaatagcgattttgaaggatattttagcaaacaaggccactttagacaggtagctgaaatctccatctcgctcccagatgacagcctg

SEQ ID NO: 13990 - DNA, 120 bp, synthetic construct
  source 1..120: mol_type = other DNA
gtgtcctgtgtcttacagtggaattcacaagctgagacagtgggaaagttaagccattcacatgctcttggcatgagttgtgagccatgaaacatgaattttctagtaaaaaatgtgctg

SEQ ID NO: 13991 - DNA, 120 bp, synthetic construct
  source 1..120: mol_type = other DNA
tcagccacatgagcgtcaagtgtagccatgttcccacagcttccctgttggtgtctcaggagttagtgcttcctggcatccaggaaggaaggcaaggcggacccctgttcctactcctga

SEQ ID NO: 13992 - DNA, 120 bp, synthetic construct
  source 1..120: mol_type = other DNA
gaagagaaactcgctttatctgaggcctgagaagcccacgttcacagcacaagtatgtccacagcgatcacagtgttactggacgtgtgggaaaaaatgacgcaaacgtttcccctgact

SEQ ID NO: 13993 - DNA, 120 bp, synthetic construct
  source 1..120: mol_type = other DNA
gtgttagtggtactaaccagtccagttgccgggcactaacagtactaatcagtccagttgccgactgctagcggtactagtccagttactgggcactagccatactaaccagtccagttg

SEQ ID NO: 13994 - DNA, 120 bp, synthetic construct
  source 1..120: mol_type = other DNA
gcagcactcgttcatttgccgggcactcgcagtgctagttctttctacggatggaccagtttcttgattcttccgcctgttggcagacattgggttgtttccagttggggctgttttgga

SEQ ID NO: 13995 - DNA, 120 bp, synthetic construct
  source 1..120: mol_type = other DNA
tctcagtggctttttcgtgatgatacttgcttataaattatttccttataatctccagtcagcaagtgcgaaacatctctgagcctcagcttccttttgaatcgaattgtagggccaggc

SEQ ID NO: 13996 - DNA, 120 bp, synthetic construct
  source 1..120: mol_type = other DNA
tggtgcttatttcgtgtttgaaaatacaactgtgacaagcaacgggcaggtcagtacagagctcgattgcgctgacttagctgcttaggaataaagcctcccaagcccatatgatgattt

SEQ ID NO: 13997 - DNA, 120 bp, synthetic construct
  source 1..120: mol_type = other DNA
cggggtccatcaccacgtgcgcaataattcagcatagcacgtgcagcttcccagcgggatccatcaccacatgggcagtaattcagtgcggcccatgcagcttctcagcggggtccatca

SEQ ID NO: 13998 - DNA, 120 bp, synthetic construct
  source 1..120: mol_type = other DNA
ttcagtgcaggccatgcagcttctcagcggggtccatcaccacatgtgcatagctctgggtcactttaaagatcgcattacctgagtgctcagtgttgctgtaaggaaatgtcctgctga

SEQ ID NO: 13999 - DNA, 120 bp, synthetic construct
  source 1..120: mol_type = other DNA
gaataattcctgaatgccaccaggccatgaacgtcatcaaacagagctacctgttgattcttttgtatcttttatgagattttcttccgagttgggcttacgtaagcatctcgcgtagcc

SEQ ID NO: 14000 - DNA, 120 bp, synthetic construct
  source 1..120: mol_type = other DNA
agtaactttcttcagtagagacataaagaacaccttaatctgaatgactttcttcggtgacgatataaacaacaccttggtctgtggcccgcatgctgccatctgggaaatacatccatg

SEQ ID NO: 14001 - DNA, 120 bp, synthetic construct
  source 1..120: mol_type = other DNA
tcctgcccatcacgatcattctcactgctcagatgacaccgttaactgcccttttttttttccttttagcttgcattggacacacactactggacttggatcaaccattttgtcatctgg

SEQ ID NO: 14002 - DNA, 120 bp, synthetic construct
  source 1..120: mol_type = other DNA
ggatgcatgatgctctctgtggtcctcgtctactgtgttttttttttttaattctacatggtgagccaaaaaggttgttaagcacctttggggtacagccctgccatgataagaatgtat

SEQ ID NO: 14003 - DNA, 120 bp, synthetic construct
  source 1..120: mol_type = other DNA
gcaggggatggagctaccacaccggagtcctccctgagcaggggatggagctaccacaccggagtcctccctgagcaggggatggagctaccacaccggagtcctccctgagcaggagat

SEQ ID NO: 14004 - DNA, 120 bp, synthetic construct
  source 1..120: mol_type = other DNA
agtgaccacttcagatgtagcgatattttagagtttatttgtatgagggcttagctgtgtgcagtttctgatcacacacagggggatccctgcttttcatacccaaaatgaggcatttga

SEQ ID NO: 14005 - DNA, 120 bp, synthetic construct
  source 1..120: mol_type = other DNA
ggacaggcagtgtggacggtggacactgtgatgcggacggtggacaggcagtgtggacggtggacactgcagtgcggatggtggacaggtggtgtggatggtggacaggcggtgtggacg

SEQ ID NO: 14006 - DNA, 120 bp, synthetic construct
  source 1..120: mol_type = other DNA
ccagacacacattccagagaggtgtgcaccagtggaagtcaccttgccaggagcatgagatagtatttcatgctttactgattgactgtttctgtctttctcccacaaaagaagccatcg

SEQ ID NO: 14007 - DNA, 120 bp, synthetic construct
  source 1..120: mol_type = other DNA
ttcttcaagcagcacacatttctttcaaataaaaattatgcaacgatgaagaacatgcctcagttttaactgaaatactgggtgctgatgaaaacgggccgacatctgtggaacccccgg

SEQ ID NO: 14008 - DNA, 120 bp, synthetic construct
  source 1..120: mol_type = other DNA
tgtgaggtttccccattgtggggtccctgcaactatgggatgaggcagagtccctgtgagatttccctgtcatggggtccccgtgactgtgggtcggggcagagtccctgtgagatttca

SEQ ID NO: 14009 - DNA, 120 bp, synthetic construct
  source 1..120: mol_type = other DNA
gaggagcccatctgcacgggacctgatgctcatgggagcagagcccgtccacgtggcctctctgtgtcgtggtcaggccctgggggcgtggccgcctcctgccctttccaggaaagaact

SEQ ID NO: 14010 - DNA, 120 bp, synthetic construct
  source 1..120: mol_type = other DNA
catttcgtggtccccactgtttccctgttggggtcactgctgtaaagggtcgccccgccatggtgttctgtctgtgagattgtgccctgtttctggcagttctcaaatgctccagctggg

SEQ ID NO: 14011 - DNA, 120 bp, synthetic construct
  source 1..120: mol_type = other DNA
cttagtttatgcacaaggggcaggggcacatctctggttttaattcctacaaggcaggtgacctggtccatgtttgggtgctgagtgtttgggtgctgtgtgtttgggtgctgagtgttt

SEQ ID NO: 14012 - DNA, 120 bp, synthetic construct
  source 1..120: mol_type = other DNA
tgtgtgtttgggtgctgagtgggtgctgaatgtttgggtgctgagtaggtgctgtgtgttttggtgctgagtgtttaggtgctgtgtgtttgggtactgagtgggtgctgtgtttaggtg

SEQ ID NO: 14013 - DNA, 120 bp, synthetic construct
  source 1..120: mol_type = other DNA
tgagtgttttggcactgtttgggtgctgagtgttgggtgctgagtgtttgggctctgagtgtttggacactgaatgggtgctgagtgtttaggtgctgagtgtttgggtgctgagtgttt

SEQ ID NO: 14014 - DNA, 120 bp, synthetic construct
  source 1..120: mol_type = other DNA
ctgaggacagacttgtcaaggtcttgctactaggattccacaactgtggaaaaggcattgtataatcctaagtgaggtcccagccacttatgttgcaatcccagagctgggttggaactt

SEQ ID NO: 14015 - DNA, 120 bp, synthetic construct
  source 1..120: mol_type = other DNA
gaggcagaggctgcagcacagcccatgagggtgggccctgccctggcctgtgtcaggcaccttgtcagcttcccaaagactcagtttcctcatctgtaaagtgacgctgatccgtgcaca

SEQ ID NO: 14016 - DNA, 120 bp, synthetic construct
  source 1..120: mol_type = other DNA
aaaaaagtttttaaacttttaaaaaataaaaatgaacaaactcggcggctcagcctagtcgcagtgacctagagggagagaagcaggaaggaaaggacacagcccctgatgctttctcca

SEQ ID NO: 14017 - DNA, 120 bp, synthetic construct
  source 1..120: mol_type = other DNA
tccgtttttagtatttgcactgaatatgtttgcaagagacgcttggaaccacgtctccccctttcaccatcaaaactccaaaatcaggaaagaagaaaaggctcttcctgatgtgttgac

SEQ ID NO: 14018 - DNA, 120 bp, synthetic construct
  source 1..120: mol_type = other DNA
cagctgtcttagaacaagcttgctgaacaacctcaacccaggaccagccccctggctccagtttctgtgcatcacataagcaggcagggccgtaggctgctgaaaggtgctcacacccac

SEQ ID NO: 14019 - DNA, 120 bp, synthetic construct
  source 1..120: mol_type = other DNA
actggggattccagctatgagtttgccatgtgggtccctctaaccttcaggcaggaaactgcaactccatgcctttggccagggttagggtggcgagaggaaactccccagggagcaggt

SEQ ID NO: 14020 - DNA, 120 bp, synthetic construct
  source 1..120: mol_type = other DNA
cacacgtgggcacgtttcagactccgaccctgaccgtggcttcgtcgtgtctcttctgcccttgttttttctttattttgttcatccacttatttttttcactttatcctgtttcttata

SEQ ID NO: 14021 - DNA, 120 bp, synthetic construct
  source 1..120: mol_type = other DNA
tttctggcggctcctgttcaatttctttccttctagaaaccagcatccaggcacaggaggggaggcccttcttggtggcccaggctttggcgggattatttttcaaagaactttaggagt

SEQ ID NO: 14022 - DNA, 120 bp, synthetic construct
  source 1..120: mol_type = other DNA
aggagggtgttccctgctcgagaggaagtgaccgctccagcttggccttccctgggactggggtgcaggcgattttatcttctttgctccattctgttccttccagataatcgtgtgttc

SEQ ID NO: 14023 - DNA, 120 bp, synthetic construct
  source 1..120: mol_type = other DNA
tgtgagtgtcccaggggcgtgggtgtcccgggggtgtgggtgtcccgggggcgtgggtgtcccgggagtgtgggtgttccggaggtgagggtgtcccgggagtgtgggtgttccggaggc

SEQ ID NO: 14024 - DNA, 120 bp, synthetic construct
  source 1..120: mol_type = other DNA
ggggtgtgggtgtcccgggagtgtgggtgtcccgggggagtgggtgtcccgggagtgtgggtgttccggaggcgagggtgtcccaggagcgtgggtgtcccggaggcgagggtgtcccgg

SEQ ID NO: 14025 - DNA, 120 bp, synthetic construct
  source 1..120: mol_type = other DNA
ccgcgcatgccggttttcacatcagaaaatacgatttgcaaagcacacttagggtgtcccccttaacttcccaagggagtccccccagtccccgaagggtccagggcagcctgcgcatcg

SEQ ID NO: 14026 - DNA, 120 bp, synthetic construct
  source 1..120: mol_type = other DNA
tcacagaggtcacctcacacaggacacctcacactcagggtgcacttcaaacccacaggtcatttcacctcacactcacaggacacctcacacaagataccacacggggcacacttcaca

SEQ ID NO: 14027 - DNA, 120 bp, synthetic construct
  source 1..120: mol_type = other DNA
atctcattctcacaggacacctccctctcacaggtcaccttacactcatctcacactcacaggtcgccacacctcacactcacaggatgcctcacactcacagaaccacatctcatatgc

SEQ ID NO: 14028 - DNA, 120 bp, synthetic construct
  source 1..120: mol_type = other DNA
acactttcatttacatgacatgctcaataggttgttatcattgtgataaagaatagattagtggtgggacagggtttgccaagggttggcaggtgggggagatggcatggggtatttggg

SEQ ID NO: 14029 - DNA, 120 bp, synthetic construct
  source 1..120: mol_type = other DNA
aactcgtctcaaattttggaaagtcatggccccgatggagactttggttaggagactcctcccaagggaggagctctaggtgggcaactgcagaagagcatgggacagaagtaacacaga

SEQ ID NO: 14030 - DNA, 120 bp, synthetic construct
  source 1..120: mol_type = other DNA
cacctcctcacatcctcctcctgctcaggtccccgtccctgccacctccccacatcctcctcctgctcaggtccccgtccctgccacctccccacatcctcctcctgctcaggtccccgt

SEQ ID NO: 14031 - DNA, 120 bp, synthetic construct
  source 1..120: mol_type = other DNA
gatttggctcaccccaggggattcctctcatcccaaccagattctcctccagaaaccacgccgggggctggctgcattctgagctgccccttccagacaggcccccatacttttcatagc

SEQ ID NO: 14032 - DNA, 120 bp, synthetic construct
  source 1..120: mol_type = other DNA
gctgtgtgaccatggaggttactgtgtgcctatggaggtcgctatgtgactatggaggttgttgtgtgactatggaggtctcgtccatgtggctgtggaggtctctttgtgactatggag

SEQ ID NO: 14033 - DNA, 120 bp, synthetic construct
  source 1..120: mol_type = other DNA
caggaactaataacatttgatccccattttaacagttcaggaaggaaaggcacagagacattaagcttctcacccagggtcacacagctagcaagtagtagggccaggattcaaacccag

SEQ ID NO: 14034 - DNA, 120 bp, synthetic construct
  source 1..120: mol_type = other DNA
gcagctgaaccatcttcctaacattcctcaggccatgagctgaggactgcgatgaactctgaaagctgtgcatcaccttctcttctcaggggaaagcagcaaacatttggtaggagagct

SEQ ID NO: 14035 - DNA, 120 bp, synthetic construct
  source 1..120: mol_type = other DNA
tacgtgcccttactgatggcagatgatgtatgtacatttcacaagtttcacgtttccctcaggaaaccacactctgaccataaactcacatggacgctttttttatcaagagataacgtt

SEQ ID NO: 14036 - DNA, 120 bp, synthetic construct
  source 1..120: mol_type = other DNA
ttcttcaggttaataattacttttaagatagactattttttagagcagtcttaggtttctgtgtattctctgccgctgcgcatgtacagccttcctctgtgtccagatcctggacgttgg

SEQ ID NO: 14037 - DNA, 120 bp, synthetic construct
  source 1..120: mol_type = other DNA
ggagggagtcagtgtggagatgcccgtgtgcctggggcgtggcctcctggagggagccagtgcggagatgccagtgtgcctggggcggggcctcctggagggaaccagcgtggagatgcc

SEQ ID NO: 14038 - DNA, 120 bp, synthetic construct
  source 1..120: mol_type = other DNA
acccccactgataggggtagtgggcggttccgatctttatctagacttctccctcttcttcagtattaacacaatggaagtgactcataaaagataatcagaaaatggttacgtgaatga

SEQ ID NO: 14039 - DNA, 120 bp, synthetic construct
  source 1..120: mol_type = other DNA
tcaggtgcgtgcatggagcccaggtgcgtggatggaaacccaggtgtgtgcatgggagcccaggtgtgtggaaggaaacccaggtgtgtgcatggaagcccaggtgtgtgcatggaaacc

SEQ ID NO: 14040 - DNA, 120 bp, synthetic construct
  source 1..120: mol_type = other DNA
taggtactgtaaaatttaattaaaaaacaaacaaacatgcaaagggttcctcaccctctaggtgtaagattcagtcccaagtcctcctctgaaagcaaagtgccctcggtgtgccgagca

SEQ ID NO: 14041 - DNA, 120 bp, synthetic construct
  source 1..120: mol_type = other DNA
ctttgtcactcatttgtaatttctaaagtaagtatttctctagtaataagggaaaagaatccagcttctgccagcccacaagatcaattcacgtgatcggaagtgcggaggggcagctgc

SEQ ID NO: 14042 - DNA, 120 bp, synthetic construct
  source 1..120: mol_type = other DNA
acccgggaggacctctgtggcaaagagcagacccgggaggacctctgtggcaaagagcagacccaggaggacctctgtggccgagaacagacccgggaggacctctgtgcctgacagtgg

SEQ ID NO: 14043 - DNA, 120 bp, synthetic construct
  source 1..120: mol_type = other DNA
gagagcagacccgggaggacctctgtggcagagagcagacccgggaggacctctgtggccaagaacagatccgggaggacctctgaagccgagagcagacccgggaggacctctgtggct

SEQ ID NO: 14044 - DNA, 120 bp, synthetic construct
  source 1..120: mol_type = other DNA
cacagctgaaagcagggacccagcagaatccacactctgggtaggaacccacagctgaaagcagggacccagcagaatccacatacccaggctcacggccatgccacccataacagccgt

SEQ ID NO: 14045 - DNA, 120 bp, synthetic construct
  source 1..120: mol_type = other DNA
atgccactaatgggctgctcccaggcccgaggcgccatcccacttgtcaaggcctgttcccgaccctgttcccaagcccgttcctgagcccctttctgggtctgcctctgagtctctatc

SEQ ID NO: 14046 - DNA, 120 bp, synthetic construct
  source 1..120: mol_type = other DNA
acagctctataattttctaagatccgagtgcacttttcaacaagtcacccctgtttctgcccagctccccactagagcagagcccctgcatgggcgggacccctgttggttctggtctct

SEQ ID NO: 14047 - DNA, 120 bp, synthetic construct
  source 1..120: mol_type = other DNA
acgagctcctattcatccttcacaacccggctcagatgcccccacctcagggagcctttcccagaggcccagctctgtgagccccacggtgacccacacagacctctatgtccccacaaa

SEQ ID NO: 14048 - DNA, 120 bp, synthetic construct
  source 1..120: mol_type = other DNA
agccacattgctgcagcatagaaggccacggattcctccatcagcatggactacacttcccacaaaacgaacggggcatctctatggaaaaagcaaagcgtgtccctatccctgggacac

SEQ ID NO: 14049 - DNA, 120 bp, synthetic construct
  source 1..120: mol_type = other DNA
acacaggaatcctaagtgggagcataaagacatcaccactttcccctttcaaatcatcccatagaagaagacgcccgtgggggtagggcttgtattttggatgcccacagagattccaac

SEQ ID NO: 14050 - DNA, 120 bp, synthetic construct
  source 1..120: mol_type = other DNA
agtgtcaatgttgatggtggaggacggaaaatattctcgcaggacaaacaatgtattttatgcaacagttaggattctgaaattggaaacagagagttagatgtggccagtcaggcacag

SEQ ID NO: 14051 - DNA, 120 bp, synthetic construct
  source 1..120: mol_type = other DNA
gctaattttttgtatttttagtagagatggggttagccacccacccatccattcaccatccattcatctatccacccatccattcatccatttacccacacatttacctacccatccatt

SEQ ID NO: 14052 - DNA, 120 bp, synthetic construct
  source 1..120: mol_type = other DNA
gagatgttttccctgtaaaaacagcttcattgagttataactacatacaacaaactaggcataatgaaacatgcacgaccctaagatttttatactggtgtaccgcgggacccagcaccc

SEQ ID NO: 14053 - DNA, 120 bp, synthetic construct
  source 1..120: mol_type = other DNA
ccccgggacccggcacccacgcatagagtgaacataggtgtaccctgtgacccagcacccaggcgtagagtgaatataggtgtagcccgtgacccagcacccaggcgtagagtgaacata

SEQ ID NO: 14054 - DNA, 120 bp, synthetic construct
  source 1..120: mol_type = other DNA
gggacccagcacccaggcgcagggtgaacacaggtgtaccccatgacccagcacccaggtgtagagtgaacataggtgtaccccaggacccagcacccaggcgcagggtgaacacaggtg

SEQ ID NO: 14055 - DNA, 120 bp, synthetic construct
  source 1..120: mol_type = other DNA
acacacatggtattgtctgtcctgcatgtatgatattgtcataaatgcatagcattgcgctgtgtaaacacagggtgtttacatgcaccgtgttgtcatacaggcatggctttgtctata

SEQ ID NO: 14056 - DNA, 120 bp, synthetic construct
  source 1..120: mol_type = other DNA
gtctacactcacggtgttttgtgtgcatggtgtctacatgcacattgtatgtgtatggtgtctacacacatgttgtctgcacacatggtgttgtgtgcatgcacagtattgttttacatg

SEQ ID NO: 14057 - DNA, 120 bp, synthetic construct
  source 1..120: mol_type = other DNA
atccggcctttctgagcagcctgcacctctggcacccaacaccaggagacagaaagacttccttctgggatcatcccagctcacaaacagaaagggcaggacaggctctcatcagttggc

SEQ ID NO: 14058 - DNA, 120 bp, synthetic construct
  source 1..120: mol_type = other DNA
cgtgtctgctcatttccctgattctcaaaaaaaaagttgtaattttgcaagaagtgttatttttcactaagaactaggtggggagggaaaggctcacatgctccaaagcacccaaggtac

SEQ ID NO: 14059 - DNA, 120 bp, synthetic construct
  source 1..120: mol_type = other DNA
ttggttgatgtatcgtatttatgtttatatgtcggtagtttttattattttacgattgaagcgtgctttcttccaccttcccgtctggtttaacacagtgctgagtgcaccccgaggcac

SEQ ID NO: 14060 - DNA, 120 bp, synthetic construct
  source 1..120: mol_type = other DNA
cacctgtgaagaaatctgtggctggaaaagagctgacggactcagcagtcacagcgtgaactgcccttatggacagagaagcttcacaaagacttcaaaatcagtgcacggtgtatatac

SEQ ID NO: 14061 - DNA, 120 bp, synthetic construct
  source 1..120: mol_type = other DNA
gagtgtaaacggagagagtcagtatatatagatttggagccccaggtgctgggactggaagggggctggagtgtagatggagagagtcagtatatatagatttggagccccaggtgctgg

SEQ ID NO: 14062 - DNA, 120 bp, synthetic construct
  source 1..120: mol_type = other DNA
ttatcgttagagtgtactccttctacttataaagagaagtagaactgtcaaaacagcctcaggcaggttcttcaggagctattctagaacaagccatcatcatcataggagacgacagct

SEQ ID NO: 14063 - DNA, 120 bp, synthetic construct
  source 1..120: mol_type = other DNA
agcagccgtgagcccccagacgcacaggctctacctttggagatgtggctggaatttgaggaatgcagctaagcctgttgggagaagagtctagggtagggacctcccaggcaaggggct

SEQ ID NO: 14064 - DNA, 120 bp, synthetic construct
  source 1..120: mol_type = other DNA
cttcattccatcccttcattccatccctctctgcttcaagcccagctctgctgtggttccccgaaggaatcatggcagtttgagatttgcgtttccagcacttctgctttaagccagact

SEQ ID NO: 14065 - DNA, 120 bp, synthetic construct
  source 1..120: mol_type = other DNA
agtttctaagggattctggtctgatgaatgaaaaccttgtgtgtcccctgtggctttgggatacagtatcttttaacacaggtgcttgccctgtgcaccctggtcttctgttcattaaca

SEQ ID NO: 14066 - DNA, 120 bp, synthetic construct
  source 1..120: mol_type = other DNA
gtgacagttgtgctgtgtgtgggtcctcaccctgcccaggtgacagttgtgctgtgtgcaggtcctcacccacccaggtgacaggtgtggtgtacacgggtcctcagccgtgcccaggtg

SEQ ID NO: 14067 - DNA, 120 bp, synthetic construct
  source 1..120: mol_type = other DNA
ccgcccgttcccagtggacatggaatccttgtgttactgagtgacctgcgtgtgctggttgctgcaccagcgggcttttctgtcgcagttgctttttaattgtatccattaagtagactt

SEQ ID NO: 14068 - DNA, 120 bp, synthetic construct
  source 1..120: mol_type = other DNA
agaaagaacccaggaccgtgaaagagaacccttgtgcttagggcttcaggactgccagagagaatccttgtatgtagggctccagaaccgtgagagagaacccaggactgtgataaagaa

SEQ ID NO: 14069 - DNA, 120 bp, synthetic construct
  source 1..120: mol_type = other DNA
gagaatccttgcacgtagggctacaggaccgtgagagacaaccctcacacgtagaactccaggaccgtgatagagaactcaggactgcaagagagaacccaggacccagaaccgtgagag

SEQ ID NO: 14070 - DNA, 120 bp, synthetic construct
  source 1..120: mol_type = other DNA
agtcctcttaaaaggattgaacacctccgggtgggatgagaacctgtccgttcactgtcaccaggtgtctctcaggcatacccaggtgtcctcacgtgtctctcgggtgtcctcaggtgt

SEQ ID NO: 14071 - DNA, 120 bp, synthetic construct
  source 1..120: mol_type = other DNA
gtgtctctcaggtgtctctcacgtgtcctcaggtgtctctcaggtgtctctcacgtgtcctcaggtgtctctcacttgtcctcagctgtttctcaggtgtctctcacatgtccccaggtg

SEQ ID NO: 14072 - DNA, 120 bp, synthetic construct
  source 1..120: mol_type = other DNA
ggcatcctcaggtgtccctggccctgtggagagctctctgtactgagctgttttttgttgtctagggcatctccctttggtctaatcatgttttcttcagagaacatgaccacataccag

SEQ ID NO: 14073 - DNA, 120 bp, synthetic construct
  source 1..120: mol_type = other DNA
tggcacctgcttttcgtgagatgatccaagcctctttctgggtgggtagaaacggttggcgctgcggccctcgagtctttgggacccttgccaagcctgggtgtgagcgcgtgggtggaa

SEQ ID NO: 14074 - DNA, 120 bp, synthetic construct
  source 1..120: mol_type = other DNA
agttcaggggcgggatccaggggcgtgcacagggcggggccggtcatgcgcggccctagtttgaggtcaggggcgggatccaggggcgtgcacagggcggggccggtcatgcgcggtcct

SEQ ID NO: 14075 - DNA, 120 bp, synthetic construct
  source 1..120: mol_type = other DNA
ccggtcatgcgcggtcctagtttgagttcaggggcgggagaatttgtgaacagagcaggtagagctgtctccctcacgctttctgtcaatatttactggccgctgcgtggctgcaggtcc

SEQ ID NO: 14076 - DNA, 120 bp, synthetic construct
  source 1..120: mol_type = other DNA
tacccatggcgatgaggagtacccatggcgatgaggacccatggcaatgaggagtacccatggcaatgaggagtacccatggcgatgaggagtacccatggcgatgaggagtacccatgg

SEQ ID NO: 14077 - DNA, 120 bp, synthetic construct
  source 1..120: mol_type = other DNA
tgaggagtacccatggtgatgagtacccatggccagctcatggcgtatagtggactgctgtgcctggcactcagggcaggctggagcaagtgctgtgctcatcaccatggcagcattgca

SEQ ID NO: 14078 - DNA, 120 bp, synthetic construct
  source 1..120: mol_type = other DNA
tgacacaaggaagcagaatgctaagctgctgccagagccctgaagctgcacagaactgtcagtgcccagtgcctggtgtccgtgcaaaggtgaccttggcagatgaatgactgcatgaga

SEQ ID NO: 14079 - DNA, 120 bp, synthetic construct
  source 1..120: mol_type = other DNA
gctgagcccagacctgcccctctatcctgacacagtctctgcagctgagaccagacccatcatcccatcctgaggcagtctccgcggctgcacccagagccgtccctccatcccgagaca

SEQ ID NO: 14080 - DNA, 120 bp, synthetic construct
  source 1..120: mol_type = other DNA
tgtgcatacgtgtgtgtgcatgtgtgcgcatgtgtatgtgtgtgcatacgtgtgtgctcatgtatgtgtgcatacgtgtgtgtgcgtgtgtgcacgtgtgtgcatgtatgtgtgcataca

SEQ ID NO: 14081 - DNA, 120 bp, synthetic construct
  source 1..120: mol_type = other DNA
ctcttcctgttggggagaagaggaccctggcaatccacaattttggagatttgctggctgcagccaaaatggggacccaactccctcctatgtggttttagagcttctggagggaagata

SEQ ID NO: 14082 - DNA, 120 bp, synthetic construct
  source 1..120: mol_type = other DNA
tgtatctgggtaggattatgggtctttttgtttggagctggtcttttactaaaatgtataaagcattggtgtgtctggggttggattatggtctttctgctttggtgtgtcggggtggat

SEQ ID NO: 14083 - DNA, 120 bp, synthetic construct
  source 1..120: mol_type = other DNA
acacaatacactacacacaccacatatatgacacacacactacacaatgcacaccacatacactacacaaaccacacaccacacatactacaacaccacacacaccacacatactataca

SEQ ID NO: 14084 - DNA, 120 bp, synthetic construct
  source 1..120: mol_type = other DNA
gtcagacgtgaagaagggaagctggagaggaaattgttaatgagctgaaattgtacatggcttagaactgtgagcagggacctgcttgtgaagtgaattaggttgtgcctgggaaagcag

SEQ ID NO: 14085 - DNA, 120 bp, synthetic construct
  source 1..120: mol_type = other DNA
gtctcctcctgccacacgtggccatcctagtgctggatttatggcgtacacagccatcttagccgtcatcgtgtgggtgataacagacctgtgagatggaagtggctgctcttgcccatc

SEQ ID NO: 14086 - DNA, 120 bp, synthetic construct
  source 1..120: mol_type = other DNA
tgtacatagacatcctaatgctgaactgaccgtgtacatggacatcctagccctggactgactgggcacgtgaacatcctagcactggactgaccatgtacgtggatgtcctagtgctga

SEQ ID NO: 14087 - DNA, 120 bp, synthetic construct
  source 1..120: mol_type = other DNA
ctggactgaccggacacgtagacatcctagcattgaactgactggacacatggatatcctagctctggactgaccggacacgtagacatcctagcactgaacttgctgcgcgtggccaca

SEQ ID NO: 14088 - DNA, 120 bp, synthetic construct
  source 1..120: mol_type = other DNA
catcgtggacggcgtatttgcagcacagcacattgtgagtacattgtcattgtgtgcacagtcgctttccggggctgaaagagtcgacgtgaaaaaagtacaatttcattttgcagatct

SEQ ID NO: 14089 - DNA, 120 bp, synthetic construct
  source 1..120: mol_type = other DNA
agagtacacacctcacacaccacacagagcacacgcctcacacaccacacagagtacacacctcacacaccacacagagcacataccacacagagtacacacctcacaccacacagagta

SEQ ID NO: 14090 - DNA, 120 bp, synthetic construct
  source 1..120: mol_type = other DNA
catcgtgtgtgtgtgtgtgtttatgtgtgtgtgtgtgggggggggtaggcaggaggcgtcccgtgtgtgtttaggggggaggtgtcctgtgtgtgtatgtgtatgtgtgtgtggaggtgt

SEQ ID NO: 14091 - DNA, 120 bp, synthetic construct
  source 1..120: mol_type = other DNA
cttctccaagtttgcattctgacttgggaccttggagacagtgaggctttgtggagggaggggctggtgactccctcaggcaggtgtgtcctccctgcctgtgagccccacggaggtgta

SEQ ID NO: 14092 - DNA, 120 bp, synthetic construct
  source 1..120: mol_type = other DNA
gcttaatatacgcacgctgataattggatttcagagatggcaaatcagatgaggctcatgtgctcctcagaagaacaatggaggaggggccctgcttccacagagatggagagaaaatat

SEQ ID NO: 14093 - DNA, 120 bp, synthetic construct
  source 1..120: mol_type = other DNA
actctggttcctggggctttactccatggttcctcggggtttactctgtggtttttggggggaggttatgctgtgtttcctgggggtttactctgtggttcctgggggtttactccatgg

SEQ ID NO: 14094 - DNA, 120 bp, synthetic construct
  source 1..120: mol_type = other DNA
aggttggcaggtgtccctgaaccactggatcccatgagcctgggctgtcaacctcaacattgcagtccctctgaggaagggccccattctcagccttacctacacctgtgcagaaattct

SEQ ID NO: 14095 - DNA, 120 bp, synthetic construct
  source 1..120: mol_type = other DNA
acccagatgcgtgtgtgagccgctgagtcagccacggtgacactgaaccagccacacgctgctggacgtgtggacgtgtggggttcatacgtggggcctttcccaaatatgaagagttgg

SEQ ID NO: 14096 - DNA, 120 bp, synthetic construct
  source 1..120: mol_type = other DNA
ccaagcagctctggctctgggcttcccggccaggctccaccgtgctacgcacccacctactttcccccgggggagaagccacccccctacgcaccctgatagaggcgtggagtaaaagat

SEQ ID NO: 14097 - DNA, 120 bp, synthetic construct
  source 1..120: mol_type = other DNA
ctgacgtatgccaggaagggaaggacgcttcggctccaacgcccagcgctgtgtctaaccgcctgtgagttgttagaatccaggggcccggttgtctttcccagccccggatgcaaatct

SEQ ID NO: 14098 - DNA, 120 bp, synthetic construct
  source 1..120: mol_type = other DNA
gcctacgataaacaagtaccgctcttctcccgtgtgggtctgaggtctccagcttacttcacggaacagtgcccacctgggaggtggagcggggactttctcccctgcccagtcctggat

SEQ ID NO: 14099 - DNA, 120 bp, synthetic construct
  source 1..120: mol_type = other DNA
acttggggaccccgtggccaccagaccccgcggtgggagcagagatgcctccgaaactctggagacccacagaggcagaagaggattccacgaggccggggcccgtcagcagatcctcag

SEQ ID NO: 14100 - DNA, 120 bp, synthetic construct
  source 1..120: mol_type = other DNA
tccttcctcagagcgtgcgtggcctcgtgcctcgcatctcacctgcagctttcaggtagcagcacagggcccagtgggggctgagagtttaagatagcatgcggacaggagctgtcatga

SEQ ID NO: 14101 - DNA, 120 bp, synthetic construct
  source 1..120: mol_type = other DNA
ttcaggcctaggttcactgtcccccaggcagcttcacggctgtttttacacacctcccattgtagctgtctcaccgggtcatcggtgaccacggtgtccaccatgttaccgagagcttct

SEQ ID NO: 14102 - DNA, 120 bp, synthetic construct
  source 1..120: mol_type = other DNA
ttgaccttgatgaccagattccgcgccagctcctcaacagagatctgaagagaggcagcgccatgagaaaagatgggagtgcacgttctgaaggggctcccaactgagaaaaaccacact

SEQ ID NO: 14103 - DNA, 120 bp, synthetic construct
  source 1..120: mol_type = other DNA
aagagggtcccaacttcagagagaccacctgatccacacctgagccaagagggtcccaacctcagagagaccacctgatcctcacctgagccatgagggacctgatctcaaggagaccat

SEQ ID NO: 14104 - DNA, 120 bp, synthetic construct
  source 1..120: mol_type = other DNA
acctcgcctcaggccacctgccccgggcccctcctccccgtggctccatcccctgcaacaccactcccccaggtgacctcgcctcaggccacctgccccgggcccctcctccccgtggct

SEQ ID NO: 14105 - DNA, 120 bp, synthetic construct
  source 1..120: mol_type = other DNA
gcagccctggcttctgttccccactctgctcgggataaacagcatggcctccagacacagcccagggtcccctggggctgagaaccacgggttctacctgagccagggtgaccaaactca

SEQ ID NO: 14106 - DNA, 120 bp, synthetic construct
  source 1..120: mol_type = other DNA
cagcacgatccaggtgctgtcctggtggcctccggcaaagaggaggatgccctcggggtcaaaggtccggaagtcaaactcagctaccagcctgggcacccacaggagaaatgagtcagc

SEQ ID NO: 14107 - DNA, 120 bp, synthetic construct
  source 1..120: mol_type = other DNA
ttgtgtagtctctgcaggatgccccatcccatccagaaccacaggaacccagccagcagcagccgcttgcagaagagcagacatgaccgaaaatagaaggtggggagaggagagaggaga

SEQ ID NO: 14108 - DNA, 120 bp, synthetic construct
  source 1..120: mol_type = other DNA
gagcagagagagatcctagaggtgcacagcccagccctggagcagagagggaccccagggcttggacctcacaccccactcagcagccctagcgtttcatggcccctggtcctggccttg

SEQ ID NO: 14109 - DNA, 120 bp, synthetic construct
  source 1..120: mol_type = other DNA
ttctttctgcgacgcttcgccgtatgcctcacagcgtttcctccgtatgcctcacagtttgctccgtacacccgcgtttcctccgtatgccccagtttcctccatatgcctcaatttcct

SEQ ID NO: 14110 - DNA, 120 bp, synthetic construct
  source 1..120: mol_type = other DNA
gcacaaatgactgacaacagaacacttgtgggtgtggacggagctcgcgtctcgaagtgtttctaagatgctattttcagcaggtcactataaacgctttctactctgaagcacacaggg

SEQ ID NO: 14111 - DNA, 120 bp, synthetic construct
  source 1..120: mol_type = other DNA
gagacgaggagcatctggcggagacgaggagcatctggcggagaggaggagtagtatctggcggagaggagtagtatctggcagagaggagtagtatctggtggagaggaggagtagtat

SEQ ID NO: 14112 - DNA, 120 bp, synthetic construct
  source 1..120: mol_type = other DNA
agcatctggtggagaggaggagcatctggtggagaggaggagcatctggtggagaggaggagcatcttcccgtgcttgtttattgtgtttgttgaaggtcacgtcatcactcacccagtg

SEQ ID NO: 14113 - DNA, 120 bp, synthetic construct
  source 1..120: mol_type = other DNA
tcccctgcactctgcctgcaccccctttcatcaagcacactgggggtctcccctgcactccacatgcaccccctttcatcaagcacactgggggtctcccctgcactctgcctgcacccc

SEQ ID NO: 14114 - DNA, 120 bp, synthetic construct
  source 1..120: mol_type = other DNA
actatgttcttaaaagatcagtgacctgggtccgtgccttttcctgcacacgacgtctgccgcggttcgtgattacgcctctgtaatctacagccaaacatgccctcgcactcaaacctt

SEQ ID NO: 14115 - DNA, 120 bp, synthetic construct
  source 1..120: mol_type = other DNA
ccaattgtaaactatatttgtatgggcatgttatccgtgtgaatattctaaagattatgtgaaaatgtatagaagctgggcagtcctgatgtgacactgtcagtcatgattttggttgtt

SEQ ID NO: 14116 - DNA, 120 bp, synthetic construct
  source 1..120: mol_type = other DNA
aaataactgacccccaggaaggagcttaaacttgccaagaaagaacttcaataaacttccagaatgatgactgttcactacagcaaagacatggaggaacacaccccagatgttagtgtt

SEQ ID NO: 14117 - DNA, 120 bp, synthetic construct
  source 1..120: mol_type = other DNA
tggtcatgatagtgatggtgatgatgatgctggtgatgggaatgatggtggtgatgtgatgatggtattaatgatggtgatgatgatgatggtgatgatggtgattataatggtgatgat

SEQ ID NO: 14118 - DNA, 120 bp, synthetic construct
  source 1..120: mol_type = other DNA
gatttgaaggtggaattgttgagcaaaaaggaaccagaactcaaaggctggttgagttaaaagatttgagaattaaaattccagcctacccatatctcaaaaaaaatgagacagcatgtt

SEQ ID NO: 14119 - DNA, 120 bp, synthetic construct
  source 1..120: mol_type = other DNA
acccatcactcacccatccgtccacccattcatcactcacccatctgtcaatccacccatcactcacccctttgtccatgaactcaacactcatccatctgtccatccacccatcactca

SEQ ID NO: 14120 - DNA, 120 bp, synthetic construct
  source 1..120: mol_type = other DNA
acaacatctcagacagaaaggacggccatgctactggaccgtggagaaaaagccatcctcgtgacaaagtggacctgtgttcatgccctcgtgttctgggagggtggaactcgcgagtga

SEQ ID NO: 14121 - DNA, 120 bp, synthetic construct
  source 1..120: mol_type = other DNA
ctgtcttaggggatatctaagtaaccctgaacagaatggtggcatgagcatgggtggcaaggctgttctaacaacatctcagacagaaaggacggccatgctactggaccgtggagaaaa

SEQ ID NO: 14122 - DNA, 120 bp, synthetic construct
  source 1..120: mol_type = other DNA
cccatccgtccatccatcactcacccatccttccatccacccatctctcacccatccgtccatccacccgtcactcacccatctgtccatccaccatcactcacccatgcttccatccac

SEQ ID NO: 14123 - DNA, 120 bp, synthetic construct
  source 1..120: mol_type = other DNA
ttgacacttctgggttaaatcaggggaatgaaaagaagaaaatctaacaggcataactccaggcacattccgctctatttccattctgagtgggactcaagggccctgtcatatgatctc

SEQ ID NO: 14124 - DNA, 120 bp, synthetic construct
  source 1..120: mol_type = other DNA
acgaagcaggatctaaggtcccacctctgaggctgtgggaggattaaacggtggcccagcatggagcacagctcatcccctgcagggcccttatgcgaaagcatcacgtggccacaacaa

SEQ ID NO: 14125 - DNA, 120 bp, synthetic construct
  source 1..120: mol_type = other DNA
acactcacgtttttcattttgaaagactcctcctccagcttctccactgccaggatgttctcgatgggaatgctgtagagaggctggtcccctgcagcagagatggactgtcagtgggtg

SEQ ID NO: 14126 - DNA, 120 bp, synthetic construct
  source 1..120: mol_type = other DNA
cgtggacagaaaagcaccttactgatgtggtcagctctgcgtttactggttctctggggaagcagatttccctcactttccagcagcaggtctgaaagaccccttcagggatctttgaag

SEQ ID NO: 14127 - DNA, 120 bp, synthetic construct
  source 1..120: mol_type = other DNA
aaaaaatacaggaacatggtccacaccaggcagagcaaagccccgagcgggagtgggagccgggccacaggacggggttggtggaaacgggcagacgtgtcagttatgtaaggaaggttg

SEQ ID NO: 14128 - DNA, 120 bp, synthetic construct
  source 1..120: mol_type = other DNA
ctcctgccctgccggacgccaccttacccttctccccactcctgccctgccggacgccaccttacccttctccccactcctgccctgccggatgccaccttacccttctcccctcctgcc

SEQ ID NO: 14129 - DNA, 120 bp, synthetic construct
  source 1..120: mol_type = other DNA
tacccttctcccctcctgccctgccggacgccaccttacccttctcccctcctgccctgccggacgccaccttacccttctcccccctcctgccctgccgcccccctcctgccctgccgg

SEQ ID NO: 14130 - DNA, 120 bp, synthetic construct
  source 1..120: mol_type = other DNA
attccccccacgcaccgcgttcctgactgtggggaggagcagagccctggggcctggaggttgcccccacgcaccgcgttcctgactgtggggaggagcagagccctggggcctggatat

SEQ ID NO: 14131 - DNA, 120 bp, synthetic construct
  source 1..120: mol_type = other DNA
ccaggacttgggacaaggctgtctggacagcgctgtgaatgcaccgaacgcctttattgtttaaaatcgctaatggccaagtctgtgtcatgtgggttctatctcaattttaaaagagaa

SEQ ID NO: 14132 - DNA, 120 bp, synthetic construct
  source 1..120: mol_type = other DNA
cccctcaaacacacaaggtgctcttagggggaaatggggcagatgcctgagggactcctgacctggtggcaccagatccagtctgaagggacgaggatggaggacggaggttcatatcca

SEQ ID NO: 14133 - DNA, 120 bp, synthetic construct
  source 1..120: mol_type = other DNA
ctgtaccctgagagctgcggccccagcaaccacattggggcctggagaaaatcagtgctaaataggaatctgttgactcaatacacggatgatacgccgatcatcaatactccatatgtg

SEQ ID NO: 14134 - DNA, 120 bp, synthetic construct
  source 1..120: mol_type = other DNA
tccacacacactccccactcactcctcattccacacacactccccactcactcctgattcctcacacactccccacgcattccacactccacacggtcggccccctacagccacgcagat

SEQ ID NO: 14135 - DNA, 120 bp, synthetic construct
  source 1..120: mol_type = other DNA
ctggtcattgtaagagacgttttctgcccggacattcttccatctttggttctaccccacgcagtcacccaggagccctcttctgctctcatttgtgggccaggcagtctaagctctcag

SEQ ID NO: 14136 - DNA, 120 bp, synthetic construct
  source 1..120: mol_type = other DNA
ttcattcagcataggaggaagcctaactcagctcagggggcctgtgcccgtgccgtcttcgtagaatcaaaagacacgcgtgtttcacggtttctgggatggaaacctgccctcacacat

SEQ ID NO: 14137 - DNA, 120 bp, synthetic construct
  source 1..120: mol_type = other DNA
ccattctgcctcggtgtgacgctgaatcacgctggccattcacaaaagcccaaaacaacacctctaaggtgagcatgtgctttagcgtggacgccagcagtgtgtgacagcacatctaaa

SEQ ID NO: 14138 - DNA, 120 bp, synthetic construct
  source 1..120: mol_type = other DNA
cctggggccaggacctctaaaacggcatcatcctggggccaggacctctaaaacggcatcatcctggggccaggacctctaaaacggcatcatcctggaggccaggacctctaaaacggc

SEQ ID NO: 14139 - DNA, 120 bp, synthetic construct
  source 1..120: mol_type = other DNA
agacgaccccagtgtctgtgatgacctcgctcagccgcagctccaggtgcactttgccctgcaaggcacaaggatggggtgtcagaggctgtggcgctgctcccacaggccactagggcc

SEQ ID NO: 14140 - DNA, 120 bp, synthetic construct
  source 1..120: mol_type = other DNA
agagccaacattcttttctgctgatctcaattgtttggacaaagcttctcctccttaaccaatcacaaatcaaaaacgctctatatccgacccatgggccacacgtcgtgatgtctgcct

SEQ ID NO: 14141 - DNA, 120 bp, synthetic construct
  source 1..120: mol_type = other DNA
ctgacaccacaccccacagcacccctacacttgacaccacgttccatggcacccccacacttcataccatgttccacggcacccccacactgacaccacgccccacggcacccccacact

SEQ ID NO: 14142 - DNA, 120 bp, synthetic construct
  source 1..120: mol_type = other DNA
ttctcttgggcctcaatgacgcgtgcctgtcctttcccaccgtgtttgttttcacagcttcctcagttgtgcatgacaaagggcggcagtaggcaaagggaaaacccaaaatccatgcac

SEQ ID NO: 14143 - DNA, 120 bp, synthetic construct
  source 1..120: mol_type = other DNA
caccttccctgcaacacaagcagagaagacttcaccacgggcacaggccccagagccaggacgcctgtgagcagaagccagcccatcatcaccgcagcttatttccaacagtttaattca

SEQ ID NO: 14144 - DNA, 120 bp, synthetic construct
  source 1..120: mol_type = other DNA
ctgactgtgcttagagtcctggctcctggggaagagacccccactgctgactgtgcttagagtcctcgctcctgggggagaggcccccgccgctgactgtacttaaagtccttgctcccg

SEQ ID NO: 14145 - DNA, 120 bp, synthetic construct
  source 1..120: mol_type = other DNA
tagtgggaaagagggaagaagagaagctgagttccgcctttccttcctcacacattccatttgcagcttcctgctaagtcagacggcgatattgggcaacagcaaatcaaacttgaccca

SEQ ID NO: 14146 - DNA, 120 bp, synthetic construct
  source 1..120: mol_type = other DNA
acttggggactgggagactcggggagccgggagacttggggggaccgggaaactggggggccaggagactcgggggctgggagactcaggcggccgggagactcgggggttgggagactc

SEQ ID NO: 14147 - DNA, 120 bp, synthetic construct
  source 1..120: mol_type = other DNA
gtccacgctaaacggtgccacagttttactctcttggaactgtcccacatgggtttctctttctttgctatcagtcttttgttgtgtgtgttttgggtttttttgagacaaggtcttgct

SEQ ID NO: 14148 - DNA, 120 bp, synthetic construct
  source 1..120: mol_type = other DNA
aaatgggaaggtgatgtacatgctcaggacataatctacatacagaaaaattctctacacgcgggaaaataggatggtgacgtacacgctcgggacactgtctacacacagaaaaattct

SEQ ID NO: 14149 - DNA, 120 bp, synthetic construct
  source 1..120: mol_type = other DNA
tttggcttcacctaaaaagtaaaagcgacatacatcatcagcagcgtagaaatgtttgttccctgctacatcgcagacacgtttccagcctttgcttgtgtgcattcactagctctctat

SEQ ID NO: 14150 - DNA, 120 bp, synthetic construct
  source 1..120: mol_type = other DNA
ttcaaagatgccagtttgcaaactggcatgccagcaactccaaagggcagagataaactcagtttgaagctttttaaagacttttcatccacaatattaacctgaggcactgtgagaagg

SEQ ID NO: 14151 - DNA, 120 bp, synthetic construct
  source 1..120: mol_type = other DNA
aaaagcaagagacacagcagctctcgaaggctcctccggctctgagacgcctctaattcaaaaggttctggaaatttttattttgggaatcattaaggaagcatcaatgataatcggttg

SEQ ID NO: 14152 - DNA, 120 bp, synthetic construct
  source 1..120: mol_type = other DNA
gatgttaaaccctcccaaataacgggcatattcaatgtaattgaaacttccaccacagggagaatgagtctatggtgacggggtggcaggaggggtcctagaaggcgcccactgtgctta

SEQ ID NO: 14153 - DNA, 120 bp, synthetic construct
  source 1..120: mol_type = other DNA
aacgcaccctctgctagctggttctcaaaaagtgcgtcatcactgagtgtgatatgtgtcgaccattaaaacatttctcccactcatacaaattatattaagctgacatctcttctggct

SEQ ID NO: 14154 - DNA, 120 bp, synthetic construct
  source 1..120: mol_type = other DNA
gaaatcacggggaagtggtgagtctggagtatttattcccttcgtcctcagcgtatgtgatgggattctgaatgggggctgtgtttatctgggcataaaactcctgaagattggcagcag

SEQ ID NO: 14155 - DNA, 120 bp, synthetic construct
  source 1..120: mol_type = other DNA
ctgttgctgtgtctggcagagaagccaggtgcactggctctgtgcttcaaggagacctagagggtctcccccaagtccaccggaaatgtgtgcacattcgccctaccccactgtgtacct

SEQ ID NO: 14156 - DNA, 120 bp, synthetic construct
  source 1..120: mol_type = other DNA
ccacgctgtccccggccacggacacccacccccgatgcgtccacactgccgccggccacggacacccacccccgatgcgtccacactgccccagccacagacacccactggtgatgcggc

SEQ ID NO: 14157 - DNA, 120 bp, synthetic construct
  source 1..120: mol_type = other DNA
ggtcaggaaagacatcgccagacacctgtcataatccagggctgctcaaagtaaaaaaaaaaaaaacctaaaactgcaacatggaacggcacaaacgagctgcaggccgagttctaacgg

SEQ ID NO: 14158 - DNA, 120 bp, synthetic construct
  source 1..120: mol_type = other DNA
ccatcaacttaaaatagcttctgtttatgctggtgaaggaggcacagacttcaccctatctaattccaaggaacaggcgagggtgggagctgtagcggaagagacaaaagcaaaaggcag

SEQ ID NO: 14159 - DNA, 120 bp, synthetic construct
  source 1..120: mol_type = other DNA
tggcaaggaacggaaggagaattggagaaatgtatctaaaatgtcaagcagacctctgctacactcactgggaagaaccatgttgcttctgacgaatttcttaaaaagagagaaagatgc

SEQ ID NO: 14160 - DNA, 120 bp, synthetic construct
  source 1..120: mol_type = other DNA
ggagtgcaaaacgaatttcctcctgtcacacgctaactttctgttctggatttcctggggtttcctttattagacttgagtccagaactcctctagaaacattctctgggatatcttgac

SEQ ID NO: 14161 - DNA, 120 bp, synthetic construct
  source 1..120: mol_type = other DNA
tggcagcctaataattttgcttaatgaaaaattaactctgcaaatacagtttccactattcacatggagcctgcaggtttggagaatcctctgcatcagtgtgggtgagcacgtgtgtga

SEQ ID NO: 14162 - DNA, 120 bp, synthetic construct
  source 1..120: mol_type = other DNA
gcacatctgtgggtgagcacgtgcgtgaggggtgcacatctgtgggtgagcatgtgcgtgaggggtgcacatgtgtgaggggagcacgtgtgtgaggggtgcatgcaatgcttctgtatg

SEQ ID NO: 14163 - DNA, 120 bp, synthetic construct
  source 1..120: mol_type = other DNA
cattttcactcagcatttccataaacacattcttgggtccaaatgctgagaaactctttctctaaatactggaggagcgctaaatggagcaggaaatgatggagagagaaaggaatgcca

SEQ ID NO: 14164 - DNA, 120 bp, synthetic construct
  source 1..120: mol_type = other DNA
cagggccctccctcctctctccagccagccaggcgtcgatcagggcccccctcccctctccagccaggcgtcgatcagggcccccctcccctctccagccaggcgtcgatcagggccctc

SEQ ID NO: 14165 - DNA, 120 bp, synthetic construct
  source 1..120: mol_type = other DNA
actcctcaacattgcttctactgtttgctatttgctcactcagccactggccacaggtgctgctgcagtagacacgtctgttcatcgccttcacctatggttcaaagctagaagctctgg

SEQ ID NO: 14166 - DNA, 120 bp, synthetic construct
  source 1..120: mol_type = other DNA
gtgtgtacggtccccgctgaggggtgacggcgcgtccccgtgtgtacggtccccaccgaggggtgacggcgcgtccccgtgtgtacggtccccgctgaggtgtgatggcgcgtccccgtg

SEQ ID NO: 14167 - DNA, 120 bp, synthetic construct
  source 1..120: mol_type = other DNA
cgtaacagggcgtcccctcgcgtacggtccctgctgaggcgtgacagtgggtccctgtgtgttcggtccccgctgaggcgtgatggcgcactcgccgatatgagacgaggcagcgtaaaa

SEQ ID NO: 14168 - DNA, 120 bp, synthetic construct
  source 1..120: mol_type = other DNA
accattataatgtggaagattgctttccttaaaatccagcccatcataaggaaaaatatgtagacaccaaagattaaataaatgctccaggaccatggaccccacccctgcacaaactcc

SEQ ID NO: 14169 - DNA, 120 bp, synthetic construct
  source 1..120: mol_type = other DNA
gtatttgtgctgatgtcagctttgcagtgcttccttccatgcttggtacaacatcgtaagcccagctctgctgcttgctggacatctcttatagaatcccgaagagtgaagagaacaagt

SEQ ID NO: 14170 - DNA, 120 bp, synthetic construct
  source 1..120: mol_type = other DNA
atttcagtaaaacgtgtccgttccgtcaaagaaaaataccaccaacaaagaaacacagatgtggtttacatgaaaaatgcggatgattttcagacggctaacgcttaggaaagcgggtgc

SEQ ID NO: 14171 - DNA, 120 bp, synthetic construct
  source 1..120: mol_type = other DNA
agttgattttctttggacaattcatatcatcaagttctagaaatatagggagatattgacccttctgtgttgctacctcttggaagagtaacatgccctcttatcctggcaggaccggcc

SEQ ID NO: 14172 - DNA, 120 bp, synthetic construct
  source 1..120: mol_type = other DNA
tttttggcactgcgattttaaccatttattaaataaaaattttgttaaagaagtactgaaatattctttgaatctgtgtcagggaaattctgatttgttagttcaaatgcctgacagcat

SEQ ID NO: 14173 - DNA, 120 bp, synthetic construct
  source 1..120: mol_type = other DNA
atacagatccattatttccatgttttcaacatagttttcttatctggagcagcattttcttagctgtgttttctccaagttctgtggtcaagtaagttaggggaatgcgtgtatagggag

SEQ ID NO: 14174 - DNA, 120 bp, synthetic construct
  source 1..120: mol_type = other DNA
aagtcaacctcccccttgactgcccatcactatcagcatgggatggtggtatatttacttaattagctaaacgtgaatagagcttaaagtttagcccttaggtgggattttgccgacata

SEQ ID NO: 14175 - DNA, 120 bp, synthetic construct
  source 1..120: mol_type = other DNA
taatcagaagcttaaagcctttgctttctacagaaaacattgcagctttacaatattaatattaaaaatcaatattggtgagtaacattagataatcacttaagctaacaacagcagcaa

SEQ ID NO: 14176 - DNA, 120 bp, synthetic construct
  source 1..120: mol_type = other DNA
aagagatcattattcagttcaaaaggtaagaatgcatttgtgaattggggcccggacattccaggtagaacaattatttgctcctttcatgtaagacagtatcaagcttttactcaatct

SEQ ID NO: 14177 - DNA, 120 bp, synthetic construct
  source 1..120: mol_type = other DNA
aaaggagagagtggtctttggtagcaaaccctggccttgtggttttcattctagattcttagaacaacaacaacaacaacaacatcaacaacaacaaaagacagagacagagagagagag

SEQ ID NO: 14178 - DNA, 120 bp, synthetic construct
  source 1..120: mol_type = other DNA
ctggattttcactttctctgttttcaggaaacctgaagccggttatgttattcaggcatgactgaaaagattattttgagttgttttggtggcaccaagaaatgtgccaatgtgacggcc

SEQ ID NO: 14179 - DNA, 120 bp, synthetic construct
  source 1..120: mol_type = other DNA
gggtcacagaggaacaaggaaatttagtgtgtgtgtcttctttttgtttcattcaaaatttaatttagtatcaagcaagaggagctttagcttaaccctgcatatcaggcaagatttcag

SEQ ID NO: 14180 - DNA, 120 bp, synthetic construct
  source 1..120: mol_type = other DNA
tctcgttccattcccacctgtgagtgagaacatgctccgtgattttgaggccatttgcagccagctccgccagccggtgctctgagctgcagcagcggccatgcacaacagcaccaccag

SEQ ID NO: 14181 - DNA, 120 bp, synthetic construct
  source 1..120: mol_type = other DNA
taatttccctcctagaacactaatagactgttttgaagtgatttaactcgcaacattgtcgatgcagcagattatttttaatgtacagattttaaaacaatgttctatacgttaaaaaag

SEQ ID NO: 14182 - DNA, 120 bp, synthetic construct
  source 1..120: mol_type = other DNA
ctgctctttcattaatacagcgagtaatgagagataataaatcgtgtgcttttttcatgggaaagttaaatgtttgttttgaaggcacagtaatagcaggctattcagtgtttgcgatta

SEQ ID NO: 14183 - DNA, 120 bp, synthetic construct
  source 1..120: mol_type = other DNA
aaactccaagaaaacttaaacatgtctcagtgaatagagatcctgcttctttggcaagttcctaaaaaacagtaatagatacgaggtgatgcacctctcagtggcaaggcttaagatatt

SEQ ID NO: 14184 - DNA, 120 bp, synthetic construct
  source 1..120: mol_type = other DNA
gagggttttttttttttttgtcccttcctttcaaccttggtggtattttacaaagatgaacacttgagcactgaagatgcttatgtcttttagtgcatgtaaatgtttgattctgcacgg

SEQ ID NO: 14185 - DNA, 120 bp, synthetic construct
  source 1..120: mol_type = other DNA
acagtgactttgatgttttttgttcccatacctatggttatatgctcagccattgttcccaaagcagcagccccctgctctggcccctgggcatcctgactttatccacacacaaaatga

SEQ ID NO: 14186 - DNA, 120 bp, synthetic construct
  source 1..120: mol_type = other DNA
tgtagaatcagtggaagctctgagcttatttttctgcaactagatggtcttatctgggggcaaagtgagacaatgatagatcatctggcattagattctcatacgaagcacacaacctag

SEQ ID NO: 14187 - DNA, 120 bp, synthetic construct
  source 1..120: mol_type = other DNA
gcttggcttcgtgtcatagttctgacttctaataaatcattttctgcaaaatatgctctgtgtttttccctcttgctgcctgcagccaaacagaatccctttagcagggcatttttgtgt

SEQ ID NO: 14188 - DNA, 120 bp, synthetic construct
  source 1..120: mol_type = other DNA
ggtaaagatgccgtagaaaaatcagtaaaatactaaggcagcctcaaggaaggagatacctgtttatttggggaaagacatgcagaatcaaggaagacttcacatagaattgtttcaaaa

SEQ ID NO: 14189 - DNA, 120 bp, synthetic construct
  source 1..120: mol_type = other DNA
tgggaaactttggttcccatgtttcagtgagcaccttcgtgtttttgatatcctaggaacctaatgaaaaaagaatgctcaaaggcagtgggggagaagaatatcttagtgcagaaaagg

SEQ ID NO: 14190 - DNA, 120 bp, synthetic construct
  source 1..120: mol_type = other DNA
caaaaacctcggtgtcattctagactcatctttctctctctcttgacacttcacatctaatctctcagtaaatctcgtcaggtctacctgaagaatatgtccagaagccagtcatatctt

SEQ ID NO: 14191 - DNA, 120 bp, synthetic construct
  source 1..120: mol_type = other DNA
aggcctagcctatcagacgtagctacctaataaataagtattaaatgaatgaatggagtttatcctggctatattgtttgattgattctcacttaaaaagtgtttgacagagttcatttt

SEQ ID NO: 14192 - DNA, 120 bp, synthetic construct
  source 1..120: mol_type = other DNA
actatgttcaaaatgaaactttttaatatttcagaattgtggatttaaagttttggttatgatgacttggttaataatagctctcacggagatttttttttgatacatcgtcttaaccag

SEQ ID NO: 14193 - DNA, 120 bp, synthetic construct
  source 1..120: mol_type = other DNA
gaatgctggataaaatggtaggatctatttttagttctttgagaactctccatactgttgtccatagatttgtatgaatttgcattcccaccagcagtgtatcactgttctcctttcacc

SEQ ID NO: 14194 - DNA, 120 bp, synthetic construct
  source 1..120: mol_type = other DNA
cgactatgtagactgctttgggcactgtggtcattttcactatatcagttctttcagtccatgaacataggatgtattttcatttgtttgtgtcatctgttattttctttggtggtgttt

SEQ ID NO: 14195 - DNA, 120 bp, synthetic construct
  source 1..120: mol_type = other DNA
aatgataatcttttaaagggtctacaactgaatgagctcaccatggatgatgatactgccgtgctcgtcattgacaacggctctggcatgtgcaaggccggctttgcaggtgacgatgcc

SEQ ID NO: 14196 - DNA, 120 bp, synthetic construct
  source 1..120: mol_type = other DNA
tccattgtccaccgcaaatgcttctaggtggacgctgacttagttgcattacaccctttcttgacaaaaccaaacttcgcagaaagccacatgagattggtatggctttaattgttttct

SEQ ID NO: 14197 - DNA, 120 bp, synthetic construct
  source 1..120: mol_type = other DNA
aaaagcaacaagccacctattcgagggtggacctgcagcaggtagaccaaccacaaacctcacttaaccaaggaaatacatggcctggttcccacagcccgagtggctgccacgtgatgg

SEQ ID NO: 14198 - DNA, 120 bp, synthetic construct
  source 1..120: mol_type = other DNA
aaatatatacacatataaaaacatttgaaaataactaaatacctcagaattcattttcagccacttctatctgcttttcttcatgaatcagaatctcatcttgtaatattccagtgttct

SEQ ID NO: 14199 - DNA, 120 bp, synthetic construct
  source 1..120: mol_type = other DNA
atgtgaaataaactcatcattaagcattttccattttacttttatttcatgcatattaagaataaaactgggaagtcctaggcaaagcagttgggcaagagaaataaagggcatccaaat

SEQ ID NO: 14200 - DNA, 120 bp, synthetic construct
  source 1..120: mol_type = other DNA
gactagtatctataacctacaagaaactcaaacaaatcaacaggaaaaacacaaatatttccattagaatgtggccaaattacatgaatagccatttctcaaaagaagatgtacaaacgg

SEQ ID NO: 14201 - DNA, 120 bp, synthetic construct
  source 1..120: mol_type = other DNA
tatatactgtaatatgatagtgttatgtatctagattatctgcttaagtccagttctaatatattctaatatgtactaatgacagtagataaaaattttaatctgtcctgattttctgca

SEQ ID NO: 14202 - DNA, 120 bp, synthetic construct
  source 1..120: mol_type = other DNA
ctccaaggatgtatgacaaggaaaccatagctgactactgcaaaagcttcctttgtctcctggtttctttacatagtaaagaaccttccatcaatcccagcaaactataggctacagact

SEQ ID NO: 14203 - DNA, 120 bp, synthetic construct
  source 1..120: mol_type = other DNA
tcttgtcttttgcacttgctgctctttctgccaaacagacaatctcattagatgttccttctggcaaacacacaacctcgttgcatgttccttctgccaaacattattcttctgcttctt

SEQ ID NO: 14204 - DNA, 120 bp, synthetic construct
  source 1..120: mol_type = other DNA
gaaaaaaatgtagggtgaaatactcataaatcgagggcatgtgacccagtaaattaggttgcattaacctgacataatagaaagtgtcccaactctgcataagtcctagctccataatga

SEQ ID NO: 14205 - DNA, 120 bp, synthetic construct
  source 1..120: mol_type = other DNA
agcaacattaacgcacattcatcttcccggcattgtacggcctgtcagtattacaccataaacaaattacaaatcctaggatttcaaaataacattccacagctttcaccaactagttat

SEQ ID NO: 14206 - DNA, 120 bp, synthetic construct
  source 1..120: mol_type = other DNA
ccaagccaagcgctacaggccagccaagccgtcacgcacgtgcagtgtgcgcatgccgactgttacagaccagccaagccgttaacgcgcgtgcagcatgcgcgtgcaagccattacagg

SEQ ID NO: 14207 - DNA, 120 bp, synthetic construct
  source 1..120: mol_type = other DNA
tcccacgtgagtgagaacctacacaactccagaatcgttattaaaatcaggaattattgttattattttttgagacgggctgtcacccaggctggaatgcagtggtgcaatcttgtctaa

SEQ ID NO: 14208 - DNA, 120 bp, synthetic construct
  source 1..120: mol_type = other DNA
ttgtataatttgagtagttattaccttaagactactggaaagaaatcccttagttcttctactgcactcatttcttctctacagcattaatttctggggtaaatccagctctttggcttg

SEQ ID NO: 14209 - DNA, 120 bp, synthetic construct
  source 1..120: mol_type = other DNA
aactgtaatgttcaacaaaaagattggtggtagaaggaaggaagatgttggagtgttcagtaaccttaccccagaatgctgcagtacaaattctgtgagaagtcattcttgtgtagtaga

SEQ ID NO: 14210 - DNA, 120 bp, synthetic construct
  source 1..120: mol_type = other DNA
agaaaacacccaaatatgtgtattcctcagttaatactcagtctaggtgccaaagggaaaccacacgcttccatttatctatatgatttggcaactttaatttgtaaggggtccaacagg

SEQ ID NO: 14211 - DNA, 120 bp, synthetic construct
  source 1..120: mol_type = other DNA
agaaaccattcttccataaaaccaaaaccatatctctttaagaggatgttggaaaatcagcctttctcataaagtggtttcccccacaaatttaaacacattactccattataagtttag

SEQ ID NO: 14212 - DNA, 120 bp, synthetic construct
  source 1..120: mol_type = other DNA
gcaaactctggtatttttctttgccttatttatttgataactaatatagcttgcctaataactccctttggaagcattcagtgggtcatggtagtctcaaatctcaaaagaactttctcc

SEQ ID NO: 14213 - DNA, 120 bp, synthetic construct
  source 1..120: mol_type = other DNA
gcaactaccattatcccaggggttactcaaagacattgacaaaagatctagcagcattctgtccattcaatataactacttttaacatctaaatattttcaggattaactttggttgaag

SEQ ID NO: 14214 - DNA, 120 bp, synthetic construct
  source 1..120: mol_type = other DNA
ggggcagttagacattctggaagacttctgcataggtgagagttgtaggaactttttttttccttctttccatggcctttgtccatataaaaacatggatcaatcaagtgcagtaggtga

SEQ ID NO: 14215 - DNA, 120 bp, synthetic construct
  source 1..120: mol_type = other DNA
gggaacgagaggacacaagaatctctgcagctgcttatgcatgtacgtaagtcacagaggtgttgggtgcctcaaggaacaacatggaagtcctctctcttttttaaaataaataatttt

SEQ ID NO: 14216 - DNA, 120 bp, synthetic construct
  source 1..120: mol_type = other DNA
agggtaggacaaagaaagagctccagtgccagacaagaaaaagtaaaactctgattgattcacccatgaaacagtgtctgtgtttagaaaccccaaaagaatatatagacaaatcataag

SEQ ID NO: 14217 - DNA, 120 bp, synthetic construct
  source 1..120: mol_type = other DNA
tgctgatcctaagctgcagaggagtttagcatgaggacttagaagaaaccccagaatcaagattcatggaaacagacctgggaggatgaccagaagtcatctagtctacctttctgcctc

SEQ ID NO: 14218 - DNA, 120 bp, synthetic construct
  source 1..120: mol_type = other DNA
gtcgccattttcctgaaatcttgatgtttttgagcctctcctatttaaggacaaaaccatttagcacaaaacacaaacctcagaaagggtgccagctggaccacaaagcactgatgaaaa

SEQ ID NO: 14219 - DNA, 120 bp, synthetic construct
  source 1..120: mol_type = other DNA
tcctcagcctctttttcatcatccttgatcaactccagctgtgagaaacagacacaaacaggatggagttagaggcactccatgtgtccctgagcccccctccaccacctttttctttcc

SEQ ID NO: 14220 - DNA, 120 bp, synthetic construct
  source 1..120: mol_type = other DNA
aggagaggggaggggagaaaggaaagaaaggaagaaagaaagagaacaactgcacaaatattgttgggagagacaagagaatgttaatgactgtgaagaactggagaacctatatccatt

SEQ ID NO: 14221 - DNA, 120 bp, synthetic construct
  source 1..120: mol_type = other DNA
tcttaatggctacgttgaagcattgtgttgttgacagacaatatgacaattttgcacgtgttcctctgtatggctgattcctgcacaagcagttccatttgggctcattggaaagatatt

SEQ ID NO: 14222 - DNA, 120 bp, synthetic construct
  source 1..120: mol_type = other DNA
atcaattctcctcaaaagcaatttttctgcttccttaattctcgttctccaagccaattctcatctcattcttctccccagtggttcagatttatgtagtcagggagtgggagtgatgag

SEQ ID NO: 14223 - DNA, 120 bp, synthetic construct
  source 1..120: mol_type = other DNA
cagcttcttctgaggcagagagaaaaagaaaggaacatagaaacatagaacatagaaaggaagagagcaaggatgagcccccaaagggacttgatgatcaaagcagcataaaggtctacc

SEQ ID NO: 14224 - DNA, 120 bp, synthetic construct
  source 1..120: mol_type = other DNA
tctttgtctttcagaccagcttttaatctttctgcctcttgcccctgtgcagccactgagcacgctctctgggctagacactgggctaggggtctggaaatacaaagacaaatgatgcgt

SEQ ID NO: 14225 - DNA, 120 bp, synthetic construct
  source 1..120: mol_type = other DNA
cccagggctttgcttgagaaactggtacatggcccctagctcagcctcattcccgaggctggaacaggcaagaaggaaggggagaggaaaggggcagcccacaagcctgggaatcacagg

SEQ ID NO: 14226 - DNA, 120 bp, synthetic construct
  source 1..120: mol_type = other DNA
aacaaaaatgaaggctagatgtgggtgggattacgaactagaaggggaggggcagcttctacttggcctattatggccatatggaaattcaggccctgtgtgtcttatttttacaaattt

SEQ ID NO: 14227 - DNA, 120 bp, synthetic construct
  source 1..120: mol_type = other DNA
agcctcatcatcttttctgcagtagaaattggtgataagggctgcatccctcccttggttcaaagaggcttccacccccagccttttttttcttgggagttggtggcatttgaaggtgtt

SEQ ID NO: 14228 - DNA, 120 bp, synthetic construct
  source 1..120: mol_type = other DNA
cgacatcatggtattccccttactaaaaaaagtgtgtattaggaggagagagaggaaaaaaagaggaaagaaggaaaaaaaaaagaattaaaaaaaaaaaaaagaaaaacagaagatgac

SEQ ID NO: 14229 - DNA, 120 bp, synthetic construct
  source 1..120: mol_type = other DNA
atgtccatatactaacgtcagagaatcatcccatctcagtcagagaattttaaaacattctaatgcttcaaccctgcatcatcccttgagtaccccaaagaaacagctggtactggttct

SEQ ID NO: 14230 - DNA, 120 bp, synthetic construct
  source 1..120: mol_type = other DNA
agcagatggtgtacattgttagtaacacccctctgtgtgccaaatccggagcacaaagttgaccgagggcccgtgtactgcaacttgcccaaggcatcaaaattgccagttccgggcaaa

SEQ ID NO: 14231 - DNA, 120 bp, synthetic construct
  source 1..120: mol_type = other DNA
gtagcaattcagtcccatcttccagctccgcttctagttctcttgctatttccaccacatctgcagttccttcctctgatgcagtcttgaacccttccacgtcatccatgagggttggaa

SEQ ID NO: 14232 - DNA, 120 bp, synthetic construct
  source 1..120: mol_type = other DNA
cataatggctgatccttgattgaactctggactttaaaaaacacacacacacatttgggggataattgaggccaatatgttagataaaattatcatcattgtcaaactcttggttgtgat

SEQ ID NO: 14233 - DNA, 120 bp, synthetic construct
  source 1..120: mol_type = other DNA
tagaacagtgtaaacagggtcatacatttgttttagattatggatgtggggattctgattgtagcctgtcccccagcttccccagaaggtgactcctcatgatcccactttctaaccatg

SEQ ID NO: 14234 - DNA, 120 bp, synthetic construct
  source 1..120: mol_type = other DNA
aggagatccctattgagcactgccctctatgtctagttattagaaccaagaatgacctggaaactatgagtctaacacattctcttctttctccagggcttcagtccttacaatgtcagt

SEQ ID NO: 14235 - DNA, 120 bp, synthetic construct
  source 1..120: mol_type = other DNA
tttggtttaagcctctcaaatgattgcaagatacaagtagaatggagaagcattaattcagcccttctaggtttgagttactcactctgcccacctctagagcattctatggcagggaga

SEQ ID NO: 14236 - DNA, 120 bp, synthetic construct
  source 1..120: mol_type = other DNA
cgcattcacccactggcctttcccacctctgctcaccttactgttcacctcatcaaatcagttctgccctgtgaaaagatccagccttccctgccgtcaaggtggcgtcttactcgggat

SEQ ID NO: 14237 - DNA, 120 bp, synthetic construct
  source 1..120: mol_type = other DNA
ctgagcctctcacgccgacgggcctctcacgccggagccggcaagaaaggtcggcgccagcccgcgggctctcaggaggctcggcagcgcgacgcgcatgctcagtcgggcagctctccg

SEQ ID NO: 14238 - DNA, 120 bp, synthetic construct
  source 1..120: mol_type = other DNA
gcaatatttgctgttctgcagcctcctctactgatacccaagaaaataaggtctggaatggacttccagcaaacccccaaagacctgcagctgaggggcctgttagaaggaaaactaaca

SEQ ID NO: 14239 - DNA, 120 bp, synthetic construct
  source 1..120: mol_type = other DNA
agcctgagcctccttccctgctttcctagacagcagcacatttttactgtgtgcctttctattatgtccatatactaacgtcagagaatcatcccatctcagtcagagaattttaaaaca

SEQ ID NO: 14240 - DNA, 120 bp, synthetic construct
  source 1..120: mol_type = other DNA
ccctgcaataagaaaagccactgccctgagaatggatactacccagtggcctcctcatctgcacaccacgaagcttctcactggtgttgtaagtggaaaccagagtagctgcctatctgc

SEQ ID NO: 14241 - DNA, 120 bp, synthetic construct
  source 1..120: mol_type = other DNA
tgttcaatcaaaacccagcctcctcccatctctgtgctgacagacctggaaggagaggagtatggggtatacagcagagtagaaaatgtctccaggtgattctagagcaatccattgtct

SEQ ID NO: 14242 - DNA, 120 bp, synthetic construct
  source 1..120: mol_type = other DNA
accagtgtttcatacacataaagaccaaactgccaaaatgttcttcagtgagctagtttttgattctagtttgagctagtttgagagaaggctgggcaacacagcgagaccttttctcta

SEQ ID NO: 14243 - DNA, 120 bp, synthetic construct
  source 1..120: mol_type = other DNA
tttattgctaaaaaaatgctgacaatcatctgagcctttacaacttgtaatctttttgctggtggaggatcttgcctcaacattgatggtggctgacttagggtggtgttgctgaaggct

SEQ ID NO: 14244 - DNA, 120 bp, synthetic construct
  source 1..120: mol_type = other DNA
aataataatggaaaggtctgaaatattccaagaattaccaaaatgtgacccagagacaaagtgagcacatgcaattggaaaaatggctcgaattaatgcagggttgccacgaaactccaa

SEQ ID NO: 14245 - DNA, 120 bp, synthetic construct
  source 1..120: mol_type = other DNA
tctagaacagtgtaaacagggtcatacatttgttttagattatggatgtggggattctgattgtagcctgtcccccagcttccccagaaggtgactcctcatgatcccactttctaacca

SEQ ID NO: 14246 - DNA, 120 bp, synthetic construct
  source 1..120: mol_type = other DNA
gagatccctactgagcactgccctctatgtctagttattagaaccaagaatgacctggaaactatgagtctaacacattctcttctttctccagggcttcagtccttacaatgtcagtaa

SEQ ID NO: 14247 - DNA, 120 bp, synthetic construct
  source 1..120: mol_type = other DNA
ttttttggtttaagcctctcaaatgattgcaagatacaagtagaatggagaagcattaattcagcccttctaggtttgagttactcactctgcccacctctagagcattctatggcaggg

SEQ ID NO: 14248 - DNA, 120 bp, synthetic construct
  source 1..120: mol_type = other DNA
acaggacaggcctgctgacaaggctgagtctaccttggcaaagaccaagatattttttcctgggccactggggaatctgaggggtgatgggagagaaggaacctggagtggaaggagcag

SEQ ID NO: 14249 - DNA, 120 bp, synthetic construct
  source 1..120: mol_type = other DNA
gagccggcaagaaaggtcggcgccagcccgcgggctctcaggaggctcggcagcgcgacgcgcatgctcagtcgggcagctctccgggccggcgtgggagcccgcgctccaaagcccggt

SEQ ID NO: 14250 - DNA, 120 bp, synthetic construct
  source 1..120: mol_type = other DNA
cagatttgtgttcggaaggatcacgtatgtcagcactttgtgtttgtggaggaaggcaacaatgaaataagagtcagattagaggactaatgccgtaaccaagttgagcctgaggaatat

SEQ ID NO: 14251 - DNA, 120 bp, synthetic construct
  source 1..120: mol_type = other DNA
gttaagcactaaatgctgttagaggaggattcttcagcagatcaactaccggaagaggcataggtgttttttgtttggttggttgattgttttttgtgtgtgtgtgacggagtttcgctt

SEQ ID NO: 14252 - DNA, 120 bp, synthetic construct
  source 1..120: mol_type = other DNA
aatcaataaataaagatcccgattttccaggctggataacccagaaaccacggaatcctaaagtctcaataaacgttaaagcacagatagtaagtaatctggcaatagaggatgggcgcc

SEQ ID NO: 14253 - DNA, 120 bp, synthetic construct
  source 1..120: mol_type = other DNA
gtctcccgtaaggcactgctgccagcccagtactactgcgtcttggcaaggctggaggtgctcccaccttcactttaattagcatcttctttccagtttggggctgcacacggataaatt

SEQ ID NO: 14254 - DNA, 120 bp, synthetic construct
  source 1..120: mol_type = other DNA
tggtgacctgttaggggaagaaatgctctgtacttgattctctgtgaactaaataaatcactttattattccggtgatgacacccagggttgctgccatcacaatgaactgataacactg

SEQ ID NO: 14255 - DNA, 120 bp, synthetic construct
  source 1..120: mol_type = other DNA
aagtgtactctcttctggagtttatattatagtgaggagagggtaagaatgagaagggtaagtccaaatggtgataagggcaatgaaatccaagatccaatgcacattacccaaggctgg

SEQ ID NO: 14256 - DNA, 120 bp, synthetic construct
  source 1..120: mol_type = other DNA
atctccatcctgggaacactgttccactggcttttcccatagcagcccctttctcatcataaaagacttagctcaataataccttatcagagaagactttcttaacagccataaacagcc

SEQ ID NO: 14257 - DNA, 120 bp, synthetic construct
  source 1..120: mol_type = other DNA
tcagggtaagagaagtatggagaagggggtttggactgcaattttaaatagggtgttagagtagtgctcatgtatctgtagagagtgatatttgagcaaggactcaaagtaggtgagctt

SEQ ID NO: 14258 - DNA, 120 bp, synthetic construct
  source 1..120: mol_type = other DNA
tatttcattttgtaaagattccactgctcatccattcaccagctgaattctttcagcggcatcagtttactcattcacctgggaattagggtagacggtcagctaggatttgtggaaagt

SEQ ID NO: 14259 - DNA, 120 bp, synthetic construct
  source 1..120: mol_type = other DNA
gggagggagggaagggtaaacacagaaaaagactagtaataagaaagaagagaggccttgtgattgttgttaatgttatgttcctggtggtaggtgaaggacagagaaagaaaggcagaa

SEQ ID NO: 14260 - DNA, 120 bp, synthetic construct
  source 1..120: mol_type = other DNA
gactggaaaccaagttggatgttcaacagctataaacaacgtctcaaattataagacagaggtcctatcactgacagtgacacaccagtttaccccctcaatatttccaagacaagcctc

SEQ ID NO: 14261 - DNA, 120 bp, synthetic construct
  source 1..120: mol_type = other DNA
tatacaggcaggcaagcccctgctttccattgttttgagggttctatttttcccccaccaaaacaaaaatgaacacctatacttgggttttgctctctaaaaccaaggcttcttgagagt

SEQ ID NO: 14262 - DNA, 120 bp, synthetic construct
  source 1..120: mol_type = other DNA
tatcccccaattagaatgaaagctacttgaggacaggcgattttattcactgttttgttcagttgctagatccccaataactacagtgcctgtggtgagcactcatcaaacgtgttgaat

SEQ ID NO: 14263 - DNA, 120 bp, synthetic construct
  source 1..120: mol_type = other DNA
tctttattgcctggaggtggaggaagagctctgcaaatgcacagtgggagagttaatcctgaaaccccctccgtgcttcctgtgttatttcagttttaagtgttaaactgtttttttgtt

SEQ ID NO: 14264 - DNA, 120 bp, synthetic construct
  source 1..120: mol_type = other DNA
ttggtgagagaagggacaaactagttttagaaagtgctccctttgttctttccaaaccctgtgggctatagccagtcaaatgtcttacacaatctgtatatgtatgtatgtgcgcacagc

SEQ ID NO: 14265 - DNA, 120 bp, synthetic construct
  source 1..120: mol_type = other DNA
tctatattaatgattctccagcttacattttttccttccttgcatttagctaacaagtagatatacagttagccctcaatatgcgtgggttcctcatccatgggttcaaccaatcagggt

SEQ ID NO: 14266 - DNA, 120 bp, synthetic construct
  source 1..120: mol_type = other DNA
agagaggcggtggtggggaaagaggcagagagacagagagtcagagagagagaaagagacaaagtcaaacagagaaagagaaaaatagtagtagtaaagagaaaaacagtgtaccctatt

SEQ ID NO: 14267 - DNA, 120 bp, synthetic construct
  source 1..120: mol_type = other DNA
taatgtgaagtatgcctacactatgaggtgcctgcgctgcctgtgaagcaatataatattatgtgaaaggtaacttcattcagcagtcccactactggttatctacccagaggaaaagaa

SEQ ID NO: 14268 - DNA, 120 bp, synthetic construct
  source 1..120: mol_type = other DNA
ctaagtaaggaataactacagagaatccaagtgagtaaggcagcatctcaggtgagaaagtacttaaagttgacgatgggaaataaaacttcacaggtcagtcccaagtcactgtgcacc

SEQ ID NO: 14269 - DNA, 120 bp, synthetic construct
  source 1..120: mol_type = other DNA
atttttaatgtaaaacatcacaaaagcagctatgcacaccttgtagctctggacctaacgtggtaataagggcattcaaacagcgaccaaggctttggtgaacttcagcatgagtaggag

SEQ ID NO: 14270 - DNA, 120 bp, synthetic construct
  source 1..120: mol_type = other DNA
tatattattgactactaatagaaaaaggaaccagcagggcaccaatattctagggccagagttttcttttctttccttttttataaagatggagtcttctttgggaggccgaggcgggcg

SEQ ID NO: 14271 - DNA, 120 bp, synthetic construct
  source 1..120: mol_type = other DNA
tagctttgggatgtggaaggaaactagagtacccgaatacccacgcagacctggggagaacatgcaaactttacacaagactgtggtcgtggcttgaaattgatttttttctttattaat

SEQ ID NO: 14272 - DNA, 120 bp, synthetic construct
  source 1..120: mol_type = other DNA
tcccacctgcttagggttcccaggtttgaacgttgtgtccaggcatattctgaagggatatagtgaatgcacttttagtcacccaatataaaatggtgggcaatacagtaaaagaagaaa

SEQ ID NO: 14273 - DNA, 120 bp, synthetic construct
  source 1..120: mol_type = other DNA
ttgggattacaggcgtgagccactgcacccagctgtgaggtgcatttctaataggcagcatatagttgggtcttatttctttgtctcttcagccactttgtcttttaattagagatttga

SEQ ID NO: 14274 - DNA, 120 bp, synthetic construct
  source 1..120: mol_type = other DNA
ttgcatttctcagggtgccaaactcagtgcctttctgcagctactcaggaaatgttgaatcaatgaatgagtgttttatctgtgactgtattatctttccaactaggctggaagctgctt

SEQ ID NO: 14275 - DNA, 120 bp, synthetic construct
  source 1..120: mol_type = other DNA
tttagcgtggtgtctggcacaataagtgcctggcatggtaagcgacaatggtaatttctttctatgcaaattcaacccatcttccagggcttatccagatcttaaacttatcctattgct

SEQ ID NO: 14276 - DNA, 120 bp, synthetic construct
  source 1..120: mol_type = other DNA
gaaattgagattgatggcccttttatttctttgcatctaggtcttgtatgaagcagcagagcttttatatttagaaagggaacacccccttcagcgagtcatgtgctagaacacaaccga

SEQ ID NO: 14277 - DNA, 120 bp, synthetic construct
  source 1..120: mol_type = other DNA
gcctggccaaaaacttgatttgtatgtgatatgaaaatatgcagataatacacatatttaggtctttaaagagttttgctttttaaatttcagatttctcttttgctatatataaatagg

SEQ ID NO: 14278 - DNA, 120 bp, synthetic construct
  source 1..120: mol_type = other DNA
ccagctcatgcgccgaatagtaggtacagtgttccaatgtctttgtggtttgtagagaacaatcaacggtcggcgaacatcagtgggataaggtaaaatggctgagtgaagcattggact

SEQ ID NO: 14279 - DNA, 120 bp, synthetic construct
  source 1..120: mol_type = other DNA
agagcattagcaaaaagaaattgagaacagctggacaacatctggtaggaagtgacaacctaatgggtatgctgggttgttcctaattgtgggcaatcactcaaaaagcctggaaagaaa

SEQ ID NO: 14280 - DNA, 120 bp, synthetic construct
  source 1..120: mol_type = other DNA
gcaagttctgggctaagcactttacacaattatctctttgggccatcctcagcaggtagtgaagtagatctttttattgttcccatttttcacatgaggaagctgaggttaaaagagact

SEQ ID NO: 14281 - DNA, 120 bp, synthetic construct
  source 1..120: mol_type = other DNA
cttttcaacaaaggctgtgacagtgagaatgtgccataccgtacattactggtgtttgaataacttcataccttgggtttaccccacccccaacaacaaaaccaaacactttttggtctt

SEQ ID NO: 14282 - DNA, 120 bp, synthetic construct
  source 1..120: mol_type = other DNA
cacgaagcccttttgatgttataagtagtatatgtactagaagggagaggatcatggaattgcaacacaaagcctgagagatgtcgctgggatagagtaggtcttattctctactcaaca

SEQ ID NO: 14283 - DNA, 120 bp, synthetic construct
  source 1..120: mol_type = other DNA
gaggactgacactatctaatttcaataattattaaaaatccacagtaatcaagacagcgtgatattggcataatatttgacaagtatatcaaaggagcagacccacacatttataggcag

SEQ ID NO: 14284 - DNA, 120 bp, synthetic construct
  source 1..120: mol_type = other DNA
tagctaagcaaagctgaaacagttcaaccaggaggatttaaatctctcccagttcatctctatagtattcttctcacaagtggaaggtcacctctgtcctctgaagagcacagcttataa

SEQ ID NO: 14285 - DNA, 120 bp, synthetic construct
  source 1..120: mol_type = other DNA
cgaaattttggttcacagccttccttggattatctcttggggcaaagtaaaaccgccaagcttgtattattatctcatggctaaggttccaagctattggatcttcctttgtgtgtgtgt

SEQ ID NO: 14286 - DNA, 120 bp, synthetic construct
  source 1..120: mol_type = other DNA
gggaaaaccaccttcgtgatcatggtatctcccctgccaggtaagtatggactggccgtgcggcttcctctcataccctcgcgcccaccacactctcaacacacggtcacttctctcgtg

SEQ ID NO: 14287 - DNA, 120 bp, synthetic construct
  source 1..120: mol_type = other DNA
gggggaatcaagcctcttactttgagggaaaaaaaaatcaggacaaagtacaaagttgtccactatgcaaaccgtgcaccggtcgagttaagtgtataacgctggacaacaaaccatttt

SEQ ID NO: 14288 - DNA, 120 bp, synthetic construct
  source 1..120: mol_type = other DNA
ccgatttttttggacagtagcctgagaagtttcttatctttactacttctcccatcgagaagtagagtccaattcccctctccttggatctggtttggccttagtgactaccttgcacaa

SEQ ID NO: 14289 - DNA, 120 bp, synthetic construct
  source 1..120: mol_type = other DNA
ccaacagccccaaactgctaccccttaaattctgggtaggtgagaaaaataagtcctgtctaagctgctcattgttttagttacctgtagccaaagttaaatcctgcctaaaagggttct

SEQ ID NO: 14290 - DNA, 120 bp, synthetic construct
  source 1..120: mol_type = other DNA
gtaacttgaagcaagaaaagtgaaactacagaaaagggaggaccactggacggctgctttcattctacgcccactttttagagtgcattcctacaataagcaccctaataatgtaaacca

SEQ ID NO: 14291 - DNA, 120 bp, synthetic construct
  source 1..120: mol_type = other DNA
ctcaagtattctgcttttctttccccacagacaaacaagtgttgttctttacagcagacctctttccctctacataccaatctatccactcgcataactactaagtggctcaatggccta

SEQ ID NO: 14292 - DNA, 120 bp, synthetic construct
  source 1..120: mol_type = other DNA
tctagaagcctgggaagacctacttgaaataagagaccgaccctctgtttgggtctctaaaaattgaatatgctgaatctatagcatacttcacaactgctccccattctgcctcattaa

SEQ ID NO: 14293 - DNA, 120 bp, synthetic construct
  source 1..120: mol_type = other DNA
cagttttacagattaggaaagaagattcccaaaactagcaagtcagtttggccccaaagactctttctactatatcaagccatctttgcatgccattctctgaggttttaggctctggtg

SEQ ID NO: 14294 - DNA, 120 bp, synthetic construct
  source 1..120: mol_type = other DNA
cactgtacattttgctacaatctccagtgtttttgagaacacccttagccttggacttttctaggtgtgttgcaaatgaagtcagttcctttgggaagagattaggagttgtctgctttg

SEQ ID NO: 14295 - DNA, 120 bp, synthetic construct
  source 1..120: mol_type = other DNA
gcacctgcctcaggctcccaaagtactgggattacaggcagaattcttgattatatttgcaatagttactttatagctcttgtctgctaactcaggcatctacactttggattggtttct

SEQ ID NO: 14296 - DNA, 120 bp, synthetic construct
  source 1..120: mol_type = other DNA
ctctccaaaacagccataggtaaataaaagcctcttaatgacaaaagaggacctatacgttttacagccttgttctttcagcacggttgtactggtagagtggcatacctaaggttcact

SEQ ID NO: 14297 - DNA, 120 bp, synthetic construct
  source 1..120: mol_type = other DNA
ttttgatgattagctaagataatctaggttcatgctttaaatctcctcactactcatatagccctgcttattgaaaatatatgaaacatagaagacaaatcaacactcatggataggaag

SEQ ID NO: 14298 - DNA, 120 bp, synthetic construct
  source 1..120: mol_type = other DNA
ttggctcacagttaaccatgaaattaaagataaaactacttagacataattatctaggaaggtaaagggtgtagaataaaactccccctgccctcaaaatatggcagcttggattgtggg

SEQ ID NO: 14299 - DNA, 120 bp, synthetic construct
  source 1..120: mol_type = other DNA
caacagataatattcatgttatgaagctgggtataacctcaattctaaaaacataacaggaacaggacaaaaaataactacataatctgctaatagtggactataaccgaactcaaaatg

SEQ ID NO: 14300 - DNA, 120 bp, synthetic construct
  source 1..120: mol_type = other DNA
tgctggattattttattcccctgaatcccaatataactcagtggtctcaaaaaaaaatctgcaaaaaaatgagtcaaagaactaattggtagataaaatttagtgaggaaaagaacagaa

SEQ ID NO: 14301 - DNA, 120 bp, synthetic construct
  source 1..120: mol_type = other DNA
tgtaataacagtgcgggctgctatagagattaatccatgctgcatttgagttttcactggaaataaaaaatataaatgaatgggaatattgctgcttcctagggaatcatatgacaatga

SEQ ID NO: 14302 - DNA, 120 bp, synthetic construct
  source 1..120: mol_type = other DNA
ggttttcttatataggctccatgagattgaagcacaagctgccacgcgtgaagaacgaggtaatagtaacagaagggattccagatttatgcacactcacccacactccaaaaaaaaaaa

SEQ ID NO: 14303 - DNA, 120 bp, synthetic construct
  source 1..120: mol_type = other DNA
tgtgtttcttgaagcctggtattgctatctttgcatttgaagatgcagtcacctcctcaagtatttaataactgaatttaggaaagaaacaccctcaccagtcagcccagctagggattc

SEQ ID NO: 14304 - DNA, 120 bp, synthetic construct
  source 1..120: mol_type = other DNA
agaataggaaatggagaatcaaaatggaaaattagagggtatatgtgtagaagtttaatatgtgaaaaaggcagcagcattggctgggtgtggtggctcacacctgtaatcctagcactt

SEQ ID NO: 14305 - DNA, 120 bp, synthetic construct
  source 1..120: mol_type = other DNA
ggtttataatatatgtagaagcaaggtgcctgacagcagtagcacaaaggatgggatgtgaaaaatggaaatacagtcagccttccatatccatgggttcgcatcctcagattcaaccaa

SEQ ID NO: 14306 - DNA, 120 bp, synthetic construct
  source 1..120: mol_type = other DNA
tactcctcaatccatgggctgcagaataaatgttgtgttggcaggcatgaaaacaacatgaatctctttatacacctcaattaaggctcttgagtgaccaggtgcattgtcaatgagcaa

SEQ ID NO: 14307 - DNA, 120 bp, synthetic construct
  source 1..120: mol_type = other DNA
gatctggtttctagtcccagctctgccactaactcactgggaaatgttaggcaggatatttcacctctctgggcctcaagtcttttaacagtctacagaataagaagttaaccatgattt

SEQ ID NO: 14308 - DNA, 120 bp, synthetic construct
  source 1..120: mol_type = other DNA
aacgcatggaagtagagtagaaaaatagataacagaggctgggaagggtgagagaggcaggagggcaaggataaagagaagtaggttaaagagtacaaacatacagtgagatagtagaaa

SEQ ID NO: 14309 - DNA, 120 bp, synthetic construct
  source 1..120: mol_type = other DNA
ggaccatagcttgagatatggaccataaatttgagaaacacaatatgagaaaaatacaatagaatgtctgttgtgggttggtcccagaaaaagatatgctgaagttttaactcctggtac

SEQ ID NO: 14310 - DNA, 120 bp, synthetic construct
  source 1..120: mol_type = other DNA
aatctaatattaaaaaaaaaattaaaaagatagggagagaacaccaagtaatgagggaggcagagattggagtaatgtgtccacaggccaaggaataccaagcgttgctggcaactgcca

SEQ ID NO: 14311 - DNA, 120 bp, synthetic construct
  source 1..120: mol_type = other DNA
ttttatatttctagaacagttgtgaagatcatacagatagttgctgcataatcctcacgactttctcttattgttaacatcttaaattaccatgatacttttgtcacggggagaattcag

SEQ ID NO: 14312 - DNA, 120 bp, synthetic construct
  source 1..120: mol_type = other DNA
aatatctgtgggttttgacaaatgggtagtatcatgtatccacattagttctgccactttaaaatccctactgcttcttctactcaaatcttcctccctccccaactctgtggcaactac

SEQ ID NO: 14313 - DNA, 120 bp, synthetic construct
  source 1..120: mol_type = other DNA
ttatcagatatgtggcttgcacatattttcttctagttgatgtcttgtttttttgagtctcttagtgtgtttggcagaacacaagttttaaattttgataacacttaaattttgataaca

SEQ ID NO: 14314 - DNA, 120 bp, synthetic construct
  source 1..120: mol_type = other DNA
atgctaagcagcttttgaacttgcgggtacaatccaaacatgtccatctgagagaaaaatcaaaatcaggtataaatttgccccctaaaaattaaatgatagaagactagaaagtgagga

SEQ ID NO: 14315 - DNA, 120 bp, synthetic construct
  source 1..120: mol_type = other DNA
cggtcctttgaccacgcttggctgcctcagcttacacttcccagcaggatctggctgggagccccttcctcagatattcaccaggcaggtagaagcagagggagacgacggcgaaaggtg

SEQ ID NO: 14316 - DNA, 120 bp, synthetic construct
  source 1..120: mol_type = other DNA
gaagaatgccattgagattttggctgcgtttccatttctttgtgtgctcctcaatttctttcatcaatgttttatacttttcagtgtgcagatctttcacctccttggttgaatttgttc

SEQ ID NO: 14317 - DNA, 120 bp, synthetic construct
  source 1..120: mol_type = other DNA
tctactaaaggctttgggattcttttaaagataacaagaatgagatgctaacctcaagctctgctcaaaggtataggccatgttatttgtgcctggaactctgaagagagggaggagatc

SEQ ID NO: 14318 - DNA, 120 bp, synthetic construct
  source 1..120: mol_type = other DNA
ctctcaaccaaaatgtctctctgtttttacatgaaactcattgaatctcccttaaatataggaatccttaccctgggatttgtggatgggtttcaagaggcacagaaagcctctgaaact

SEQ ID NO: 14319 - DNA, 120 bp, synthetic construct
  source 1..120: mol_type = other DNA
agccctggtggaggcagtaatggaagaaaaaacttatggggtgtgttcacccccttgaatgtgagcatttcaaactttcactctctgaaccatttattgaacatgttttgatcacccaat

SEQ ID NO: 14320 - DNA, 120 bp, synthetic construct
  source 1..120: mol_type = other DNA
ttgaaacctcttcaaattttgcttcaccttccaaaacaaccgatcctaattttactgctggaattcctgccacctgcggtgactgaaattctgtagacacattctctaccagagcctcat

SEQ ID NO: 14321 - DNA, 120 bp, synthetic construct
  source 1..120: mol_type = other DNA
tctatagctgctagaagctgaatttcagcagaggcctcttctgcagtggtctcttcagctaatggagattgaacttcagcatgagcctcttctgcagaagtctcctcagatagtggagac

SEQ ID NO: 14322 - DNA, 120 bp, synthetic construct
  source 1..120: mol_type = other DNA
aagagcatagaacttggagtcagaagacctgggttcaagtactaattctgtatacctagggctgaacgaaccttaaccctactgctgtggatttgtgtaatcctgaataagtcatttcct

SEQ ID NO: 14323 - DNA, 120 bp, synthetic construct
  source 1..120: mol_type = other DNA
ctgggtaatgtttctgaaagaactccaggatagaatccattagaccaaaatcattgaagaagagttgatgcactgcagcaagactttcaagataatcaaatttaaaatacttaacctttt

SEQ ID NO: 14324 - DNA, 120 bp, synthetic construct
  source 1..120: mol_type = other DNA
tatatggggccagatcagttttccattttggtatttatctagtttaacatgagaactacaacatttcctacaacctgcctagctttttttcagtggttgcaggactcccctcccctcccc

SEQ ID NO: 14325 - DNA, 120 bp, synthetic construct
  source 1..120: mol_type = other DNA
cagctcacagtttggtagttattccctaatatctaaatggagaacactaaggagccttatctatcccctcagccacctaagagttgtcttcttcaaggaacttaattctgagaatttatc

SEQ ID NO: 14326 - DNA, 120 bp, synthetic construct
  source 1..120: mol_type = other DNA
agttcctagtttaaaatccttgaatgccagcatatctgttagaaagcattaatccattcttgcaaaactcttgattaatccacatgattatctcaatagatgcagaaaaggcctttgaca

SEQ ID NO: 14327 - DNA, 120 bp, synthetic construct
  source 1..120: mol_type = other DNA
tgcttgttctccctagtgcaataggttccctacccattcattcataagtatttctacagcatctactagatatcaggccctgtgacagtaagctgtgatatatcagcgaacaaaagagtc

SEQ ID NO: 14328 - DNA, 120 bp, synthetic construct
  source 1..120: mol_type = other DNA
atcctttcccccattgcttgtttttcgagcattctctagtttaagacaatttaaatcttagccaaaatcagtgttcctccattgctgaaccataggagggtcccaataagtttctgatga

SEQ ID NO: 14329 - DNA, 120 bp, synthetic construct
  source 1..120: mol_type = other DNA
ccatgatctctattagcaagagccaaaataaaagccaaatgaggatgcctacctgattattttcttcgcccttcacctggctacttttaccaggaggttatagttcagtaagtgctctac

SEQ ID NO: 14330 - DNA, 120 bp, synthetic construct
  source 1..120: mol_type = other DNA
gacagatggctaatttgactaaaccaacctttgtttacactggaactgatccattgatcctgtgcaaaagaattgtggtttaaacttccccctacttcagctaccacattaattccaggg

SEQ ID NO: 14331 - DNA, 120 bp, synthetic construct
  source 1..120: mol_type = other DNA
taaaacttggaaggaatatttgtaaccttcatgttggcagttcaaatgtcactttctcctttccttcccacctccatccctttctctcccctccaccactctcatcccatgtttattatt

SEQ ID NO: 14332 - DNA, 120 bp, synthetic construct
  source 1..120: mol_type = other DNA
gtcactaaatcacgaggggtccctttttccaatgagggtccctttttccaggatcgggaaggtggatgggatatgccttatgctttacaggatcactttcacactgcgttaagaatagaa

SEQ ID NO: 14333 - DNA, 120 bp, synthetic construct
  source 1..120: mol_type = other DNA
ctttctcattaaaccaaagtagtccttccagcagacaaaactgcaggcctatatagatgtaccctcaaaaggagtcactcacaatgtgatagatttgtgcccatataagggtttgggtga

SEQ ID NO: 14334 - DNA, 120 bp, synthetic construct
  source 1..120: mol_type = other DNA
ctcaatttctggatttttccccattgttcgttgttcataacaacatataatacaagtttcaaatccgctgatatcttttagagttttcagcaatggctccaaagactatttaaaaaagaa

SEQ ID NO: 14335 - DNA, 120 bp, synthetic construct
  source 1..120: mol_type = other DNA
tacgtaacatgaaacaccaaaaatatacttgctggtacatcaagagttcctcacaaacactctgaagttaaaatctaaaatgctccactttttacccaaaatataaatgactcaacctca

SEQ ID NO: 14336 - DNA, 120 bp, synthetic construct
  source 1..120: mol_type = other DNA
tgaactcatagaaaaagagagtacaatgatggttgctacagactgggaggggggtgggcaggaatgggatgatagcagtcaaagggtacaaactttcaattataggatgaataagttcta

SEQ ID NO: 14337 - DNA, 120 bp, synthetic construct
  source 1..120: mol_type = other DNA
attcctaactttaggggaatttttttaaaatcaaagattcttgttacttgtaaaaatgtttccatctctcctggccgaaattgggaatgatttactagctaagacttgagtggttttctg

SEQ ID NO: 14338 - DNA, 120 bp, synthetic construct
  source 1..120: mol_type = other DNA
ttaggtcctcccacagtatttatcaaaccttaagagtcctaagatgagtcagtgcacactcatgataggagatgcttcaactcaaatgcagaaaagttcattcagtactcagtttgtatc

SEQ ID NO: 14339 - DNA, 120 bp, synthetic construct
  source 1..120: mol_type = other DNA
tctgtattggggccaagaatttccatttcttaaaattcccaggtgaagttgatgttgctggtctgaggaccactatttgagaacccctgtcttagagaaagtggttaccaatgggaaaat

SEQ ID NO: 14340 - DNA, 120 bp, synthetic construct
  source 1..120: mol_type = other DNA
tcccctttatgagaatgcaagccgatccacatcctgacttaagagatctgattctgacgaactgcctggaggaggggaatatataaaaataaaattggtgtcacttcttttctgctatcc

SEQ ID NO: 14341 - DNA, 120 bp, synthetic construct
  source 1..120: mol_type = other DNA
atatcaggtgcaacatctggtcacacctgacaggaatatccatggagaaaaagggcaccaactgcaattgtttttaatggcaaagatgccattgctttgaatcttccagtttccagtaac

SEQ ID NO: 14342 - DNA, 120 bp, synthetic construct
  source 1..120: mol_type = other DNA
attctgaagccaactagcaaatggtaatgtctgcaggtggattttaattagaaaagtaaaagagagatggaatttacaaatctcttctaccctaaacctcccccaccccagaaaaggacc

SEQ ID NO: 14343 - DNA, 120 bp, synthetic construct
  source 1..120: mol_type = other DNA
gctaggtatgagtcctaatcttacccccgatggtgaaggacaaaatcctgagaattcttaataatactcaactattcgaagagaaggaagtgaacctggagggaaatagtgaagaactat

SEQ ID NO: 14344 - DNA, 120 bp, synthetic construct
  source 1..120: mol_type = other DNA
aaagataaaatcttccaaggcagacagaaaacatacagaggaacaataacagacttctctgaaattatgcaaaccagaagacaactgagggacatcaattattggggggggggggggaat

SEQ ID NO: 14345 - DNA, 120 bp, synthetic construct
  source 1..120: mol_type = other DNA
gggggaggggggaagtactgttgaataaaatgaatgaatgaatagaaataggacccattggaaggggaatgggattgggtgattgataaggaaagctttacattatctgtatcagcggtc

SEQ ID NO: 14346 - DNA, 120 bp, synthetic construct
  source 1..120: mol_type = other DNA
ccttaaagccattagtttagcaaattaactgatattcctagaaaagctccttgcttgtgccaataaatatttaccgagttagtgacacctctaacagcacccccaaatcgctgggccact

SEQ ID NO: 14347 - DNA, 120 bp, synthetic construct
  source 1..120: mol_type = other DNA
attttgcataaggatttcattgctaagtgttatggtaaaagagtgatttcttcccttctttctggagcagccttgaggattcattcatatcctccatcactgaggaagcgcacccacctg

SEQ ID NO: 14348 - DNA, 120 bp, synthetic construct
  source 1..120: mol_type = other DNA
tccgagagcgagaagcatatttaatggctaaattcacagcattttgagtcattagatcagcaagttccacacaacggaattctcgctccagtttacaagaaagctaatccaaaaaggggg

SEQ ID NO: 14349 - DNA, 120 bp, synthetic construct
  source 1..120: mol_type = other DNA
acctctgaaatacgcccttcttcaagtgttcctgttatttgcaagtggaagcatcactttctcaaccgtaacattcagaaatgtagacgttatccctgttgcctctttctccatccttaa

SEQ ID NO: 14350 - DNA, 120 bp, synthetic construct
  source 1..120: mol_type = other DNA
ttacgagaaacacccacaagtgtggaggggcaacccgcccctacacaaactaatacaggtatcttctaacagtctttctgcatccatgagtgctccttttccaattcatcctccatgcat

SEQ ID NO: 14351 - DNA, 120 bp, synthetic construct
  source 1..120: mol_type = other DNA
cgtgtatcaatcaatcctgttgcagaatgattgtacttaatgagaagttcctagagagtggagtagcctaaaggcccaggaaagggctgagggagatttgtgaaaaatgtctttaaaacg

SEQ ID NO: 14352 - DNA, 120 bp, synthetic construct
  source 1..120: mol_type = other DNA
gagactggctagaaatttctcccttctttgtggtttttattgaatttctctggtaaaaatatattaatggcttttcctatgccactctcatcctctcctgcactgaataatttctgttct

SEQ ID NO: 14353 - DNA, 120 bp, synthetic construct
  source 1..120: mol_type = other DNA
ctgtccttcaaagtgtcgttatgtaaaaatgaactgatttttaaaaggtctgcctaagtgtgaaccgaggtctggagctatcacctcttcataagatcccaggtaatgcagattaacttc

SEQ ID NO: 14354 - DNA, 120 bp, synthetic construct
  source 1..120: mol_type = other DNA
gtacaatatgatcataaccatattaagtaatatatactgacattcaggaatttccctagggtaggacttgtaactgctcctttaatcacctgcccccccccccaatcctggatctatgct

SEQ ID NO: 14355 - DNA, 120 bp, synthetic construct
  source 1..120: mol_type = other DNA
gtaattaactttaaaaaaaaaaaaaaaagccacaggtgtttctagttgacatttggcaaaccctgcaaccaccagctccaccagagacttgacttctagagggaggcctagtactggcat

SEQ ID NO: 14356 - DNA, 120 bp, synthetic construct
  source 1..120: mol_type = other DNA
gtcctcacagtaatcatgtcacacaccactcccaattcggcagtctttatagctggtaaaattcagctcctttctttggaaggggtgatgcaaaccagcttctttactaaaaaaaaaagg

SEQ ID NO: 14357 - DNA, 120 bp, synthetic construct
  source 1..120: mol_type = other DNA
ccaattccttctagaatggatgttctcaacctatagtaaataactgatgatccggcattttaagtgtgcagatagattcatcggcaggttccatgatggttgatctttctctgacccttt

SEQ ID NO: 14358 - DNA, 120 bp, synthetic construct
  source 1..120: mol_type = other DNA
gtcagtttgatccaggctttaatagaggtgaatttcaagatagaggtacaaagaccctgactacctacacaaatacaagtaaagtatatcagtctggttgggccagaagaagcccaacca

SEQ ID NO: 14359 - DNA, 120 bp, synthetic construct
  source 1..120: mol_type = other DNA
cactcaacaaggaatccatgtcccccaaaagttcaagaaccagaactcgatagcacgcagtaattgctaaaagaactattagagctggatggaacttcagagattctctcattcaaaata

SEQ ID NO: 14360 - DNA, 120 bp, synthetic construct
  source 1..120: mol_type = other DNA
tccgagtcaaaaggactgacaatttcatcccaatgttgctgttttcccctttattctttagaaatgggctcaacctcagctcagttggaatgtccactaggctgataaagatctcaattc

SEQ ID NO: 14361 - DNA, 120 bp, synthetic construct
  source 1..120: mol_type = other DNA
ataattaggcaacaggtcatttcagctgtatctcatggatttcccctgagaatgaacagtgatgataacagcacaagaagcataaaaacagtcacatggagaagggcaagtgcccaggaa

SEQ ID NO: 14362 - DNA, 120 bp, synthetic construct
  source 1..120: mol_type = other DNA
ctatcccaccttttagctcattgttactggcttaattcaagtccacaccattacctagagaattccaagagtcgcccaagaaagagccatctcaaatgctaaactgcttttaggaatgag

SEQ ID NO: 14363 - DNA, 120 bp, synthetic construct
  source 1..120: mol_type = other DNA
ttgtgctcagccagctccctcactgtttctgcctcccagagtcttcacttagggcaaaatatggaaattcttccattaatttgagaacaatagcactgttcctcagcatactaagtattt

SEQ ID NO: 14364 - DNA, 120 bp, synthetic construct
  source 1..120: mol_type = other DNA
tcattgctgcagctccagcaccagagaaggcctggcatgcagaagacactactggttaaatcaatgaatcatcttctaccataatatattctaatgagaactgaggctgttgttctcata

SEQ ID NO: 14365 - DNA, 120 bp, synthetic construct
  source 1..120: mol_type = other DNA
ttttgctaatacttttaattgctgtccgttccagaatgcattttccctacccccccccccccaaaaaaccctgaaattttaaacaaagagggtaaaaagagctttgtaggaagtggcaga

SEQ ID NO: 14366 - DNA, 120 bp, synthetic construct
  source 1..120: mol_type = other DNA
gaggagtgtgaggacttgtgatggagtttcagagttggggtgagaagggtagcccatgaagagggccagaagagggactatagacagcatcataaagaaatttaaatttctttatatttg

SEQ ID NO: 14367 - DNA, 120 bp, synthetic construct
  source 1..120: mol_type = other DNA
aacagcggcagcagagaacatcttaatgggacattctctctatatgcagccacctgtcactaatacacagtctttggatcaacaatgtgatcctaaaccattatctcggcaatttgacac

SEQ ID NO: 14368 - DNA, 120 bp, synthetic construct
  source 1..120: mol_type = other DNA
tatttccttcttagtactcccaggcctcatgggtgtcatacacagagaggaaacactggtgaaatagtgggtatgacagtgctttggaaagtgatcataattaccatactaagcactgtt

SEQ ID NO: 14369 - DNA, 120 bp, synthetic construct
  source 1..120: mol_type = other DNA
aaaagattatttccataaaaatcacaagagatcaataaatggatatcattttatatctgctattttcatgtgcaaatgcatgtattaagtaaaatctgcaaatgagaaaaataatggcta

SEQ ID NO: 14370 - DNA, 120 bp, synthetic construct
  source 1..120: mol_type = other DNA
cccatgccttcctctctccacaagaaatcattatcctaacctctgcagtaatcgtcttcctggattttttcctgatagttctgtcaaccaaatgtacatccctagcacaatagtttggtt

SEQ ID NO: 14371 - DNA, 120 bp, synthetic construct
  source 1..120: mol_type = other DNA
tgttttcattaaagacaattccacaaacaacctggtaagctagaaattaaggcactttatagattagaagcctccaaagctgaaccgaatacaggcagtgtgaaattagtctgatttcta

SEQ ID NO: 14372 - DNA, 120 bp, synthetic construct
  source 1..120: mol_type = other DNA
gacccacttttctccaaagaaccctattcccccaagttatccttccagttctctagcatcaaaacaaaattcgctttcatttggcagttgttagtccaaactgcaccattttgtaagtcc

SEQ ID NO: 14373 - DNA, 120 bp, synthetic construct
  source 1..120: mol_type = other DNA
acagctacagagactgcgactttccaaacacaggatacttatgaaattattcctcttatgagacctctttatatttttttctttgtttctgtggatctggcacacaggtaaaaacctacc

SEQ ID NO: 14374 - DNA, 120 bp, synthetic construct
  source 1..120: mol_type = other DNA
cttggttaatgaagttgtgcagtatttgggattcctgctttaaaaggagaaagcccaatcacttgccatagttttgtagcactgctgtggcgtccatgttgtgtatttttcgtgaactca

SEQ ID NO: 14375 - DNA, 120 bp, synthetic construct
  source 1..120: mol_type = other DNA
gtttctggagggagtgttatagttgaatgcttctgtgagcagtcaattagaggagggctaaaaatgtcccttagattaagtgacttggaggaacttgatttagtaaaatggccagacagc

SEQ ID NO: 14376 - DNA, 120 bp, synthetic construct
  source 1..120: mol_type = other DNA
ctttggcagttttagagatttagaaaagaaaatatatagacttgtaggcagaagaagatatggcactgagggaagttttagttttgttctgtgacagtcttccttatcttgtatgttgtc

SEQ ID NO: 14377 - DNA, 120 bp, synthetic construct
  source 1..120: mol_type = other DNA
gtaattgatgaaagtggacgtccttgtcttggggtcaggcaaaaactgaaaacttttcctctgttgattataatgttaggcataggcctttcataaatgacctcaattttgttcaggaca

SEQ ID NO: 14378 - DNA, 120 bp, synthetic construct
  source 1..120: mol_type = other DNA
gcaggttccctcatctgcacgaaagcatctgatgtaaacacttgtggggctgttcagagattctccggagaccccttttttgtgtgtgtgcattttttttattatactttaagttttagg

SEQ ID NO: 14379 - DNA, 120 bp, synthetic construct
  source 1..120: mol_type = other DNA
tcaaaagcccagtgctttaaattttaatgaccacagggagaaggaactgacacatatttgtgtatgttataatcagaaaaaaatatgtacagttaggtgatacaggtgacagaattgtca

SEQ ID NO: 14380 - DNA, 120 bp, synthetic construct
  source 1..120: mol_type = other DNA
ctttgggcatttttgaagaacacgttaagtatcttcttagagcagaggggctcagagtggtccccagattatcatcattggtaacacctagttggtgcattactaacttgttagaaatgc

SEQ ID NO: 14381 - DNA, 120 bp, synthetic construct
  source 1..120: mol_type = other DNA
ttttcttctaagttgtctctgtgccattctctgatgtgccttgtccatagtcatgccccatgccaaaccatgcatcacactggttttgttgctttttaatacagaggttgttgcacaatt

SEQ ID NO: 14382 - DNA, 120 bp, synthetic construct
  source 1..120: mol_type = other DNA
tacgacctgcaaatacattaaaccataaagaaatccaaaacttgatagaccaacaagaagtaattagaagcagtaactaaaaagtctcccagcaaaaaacagctgggacacaatggcttc

SEQ ID NO: 14383 - DNA, 120 bp, synthetic construct
  source 1..120: mol_type = other DNA
tctctggtcttctttcatcaaaattagtcagctgtttttgacaagctgaagcacacctgaggattgaatagtcccactgtctgaaatccagactaaagtagcagttttctaaattaggca

SEQ ID NO: 14384 - DNA, 120 bp, synthetic construct
  source 1..120: mol_type = other DNA
acaagtaaacatatcctcccacagaagaaagaactgaacgtggactaaagtttacctcctggactttcattcccaaagaagtgaggtttttgcgggacactttgtatatctgtttactac

SEQ ID NO: 14385 - DNA, 120 bp, synthetic construct
  source 1..120: mol_type = other DNA
gataattggacttcttgacaatttaaactttctccacttccaaatatcattagacaaaaaattcacaccacagtctgaggcgaggagggcaaatattcacaatacatgtggtgtatgaga

SEQ ID NO: 14386 - DNA, 120 bp, synthetic construct
  source 1..120: mol_type = other DNA
gaatctcagaaaggacagcttagacacacacacacacacacacacaaaaaccgatgaccatgatccaaaggctcaagaggcgctaataatgctaatcacaccttcagtacaatctttttt

SEQ ID NO: 14387 - DNA, 120 bp, synthetic construct
  source 1..120: mol_type = other DNA
cagagcacatggtctttgttcctttagggggtattctacttccaagaacttggtacccaggtatacctgttaaatcctagacacttctcattgctgaatgggcttatattcagtaatcct

SEQ ID NO: 14388 - DNA, 120 bp, synthetic construct
  source 1..120: mol_type = other DNA
agaataattactcttcatgtatttcaagacctagaaaattctcatccctgtcatcctcagatgatacacccagatccttctcactcccccatagctacttgacctattctttcccgcttt

SEQ ID NO: 14389 - DNA, 120 bp, synthetic construct
  source 1..120: mol_type = other DNA
cactgcaagtcaatcacaaatgacttgcatttcaaatctacagcaagcacacagtcactcttgcactttttggtgggaatagatatcttgtcgacacgattacttgcaggcctaacagga

SEQ ID NO: 14390 - DNA, 120 bp, synthetic construct
  source 1..120: mol_type = other DNA
ggagagatggcaagacacctggagaaaggggaatgtgggctagcaaaactcaggaaagaattagaaggaaatataaagccatcagagaaatgtaggtaaaattggaaacatcacagaaac

SEQ ID NO: 14391 - DNA, 120 bp, synthetic construct
  source 1..120: mol_type = other DNA
gagtaactagcctgaccacaattagatgtaccatctttctagtaatgaatgaactgtcagctctttcagtcattccagtggaaatggcaatgcatacttgtggaacaaggggaacaggaa

SEQ ID NO: 14392 - DNA, 120 bp, synthetic construct
  source 1..120: mol_type = other DNA
agaaaaggagggaagagaggagtcggggaggagaggagaaggggggaagagaggaggggagcgggaagatgggggagggagaggtgggggaagagaggaggacagggaggagaagaggag

SEQ ID NO: 14393 - DNA, 120 bp, synthetic construct
  source 1..120: mol_type = other DNA
actgtttttaagtagtcccgttcccgagggtcttcgctgtcaaatagctccagaagctgttgtaaatgaaagacattatagctgtcaaaggcggtttcagaaaaggatttaggaattcta

SEQ ID NO: 14394 - DNA, 120 bp, synthetic construct
  source 1..120: mol_type = other DNA
agtaaatcaattaccgtgttttaactaatttacccagtcttagcattggaggcaggaatacatatgcataacacgcctgagtaagagctgagaaaacagagcccccaaaagctctctacg

SEQ ID NO: 14395 - DNA, 120 bp, synthetic construct
  source 1..120: mol_type = other DNA
tcagcggggacagtgattacccaacaggcaggatcatcttggaattagagaacttaagaaccactgtggcaatggaataaaacacatctcagtgacggagtattttaagtacaaagaagt

SEQ ID NO: 14396 - DNA, 120 bp, synthetic construct
  source 1..120: mol_type = other DNA
ttcaatctgctttccagtccttttgatttttgctcacaaactgggggaaaacaccactccttctgatgcatggctatcttcctgaaaaattaatttgatgaggttgtgcaaccagaggct

SEQ ID NO: 14397 - DNA, 120 bp, synthetic construct
  source 1..120: mol_type = other DNA
attgatgatttggttacaaagactctctgttggtgatggtttctgagaactggaaggtaagcttgttccttgggtgagtcatcatgttgtcttgcagtcggtcatgtgttttcttagcaa

SEQ ID NO: 14398 - DNA, 120 bp, synthetic construct
  source 1..120: mol_type = other DNA
atgagtagggcttttatgggtggagagtggaggagagtgattctcctgccttagcctcccaagtagctggaggctactcccaagtggaggagagtagattttgtatttttagtagagatg

SEQ ID NO: 14399 - DNA, 120 bp, synthetic construct
  source 1..120: mol_type = other DNA
ttgtaattggactcctgcctctctaatacatctttcaaaacattattgcgaaacacagctcacaccaaacacctgctttggttccccattggccatgagaatatagtctgaacacttgtg

SEQ ID NO: 14400 - DNA, 120 bp, synthetic construct
  source 1..120: mol_type = other DNA
taaccagttagaatgctaagatttgatggttaaataagaccaagtatcaaatatttagtacgaactctccatttatcaatgcggttgcacagaaatggatggttctttggaggcagagtt

SEQ ID NO: 14401 - DNA, 120 bp, synthetic construct
  source 1..120: mol_type = other DNA
gaacagagactggaagtgtcagttggagttaacagagctcagggctgggtgtggggagcatttttgacagaaatactgtctcctcttttttttttttttttaattgatcattcttgggtg

SEQ ID NO: 14402 - DNA, 120 bp, synthetic construct
  source 1..120: mol_type = other DNA
acaaactgatcgtcagctctagtaaacttccacaagagacctcattctatatattgtttgactccctgcttttttcatttagtctttatgaacattttaaagctctcgagacatacagcc

SEQ ID NO: 14403 - DNA, 120 bp, synthetic construct
  source 1..120: mol_type = other DNA
cccatgtaactcaaactttcttattggccgaagacttaaggtcggaatatacttaccctgggtcaagttcagggaggcaatagtcacaggagttggggaaaaaaaaaaaatcccaagaat

SEQ ID NO: 14404 - DNA, 120 bp, synthetic construct
  source 1..120: mol_type = other DNA
ttcttttatgggaggaaaggagtgcttatagctattttcaagacactcctgaatttcacgtgagttatgtacagctcctgaacggatattgaggttgcctgtttatgtcctaaccaagcc

SEQ ID NO: 14405 - DNA, 120 bp, synthetic construct
  source 1..120: mol_type = other DNA
tccagactttcaggatggtttctttattggcattctctttcatagagttgacagtactttctgtagtgtactgtgtccagtgatcctcgtgaccccctgatttagaagctgaattagaga

SEQ ID NO: 14406 - DNA, 120 bp, synthetic construct
  source 1..120: mol_type = other DNA
gctatggaaaacctccttgctgtggaagaactccttgcatctagaatcagattgcttggttgaaattcctgtttgacagtactagctttgtgattttctccctctcccgacttttccttt

SEQ ID NO: 14407 - DNA, 120 bp, synthetic construct
  source 1..120: mol_type = other DNA
ctggtttgatatccagataatactaactttatagaaagaagtagtccctctaggtttttttgcccagtgtggctacaataggggttggcaaactatggctcatgggtcacatcctaccaa

SEQ ID NO: 14408 - DNA, 120 bp, synthetic construct
  source 1..120: mol_type = other DNA
gactgattccttttatttttagtgttacgtaggaatggtgagaggggccatccttgtgttgttcccaacttaggaagaaggtatcaagtttctcaccattatgcagtttgctagctgtag

SEQ ID NO: 14409 - DNA, 120 bp, synthetic construct
  source 1..120: mol_type = other DNA
gaggattttgcatctacattaatgagagctattagtctgttttctttctcatgatgtctttatgtggttttggtattagtgtaatattagcctcatagaatgatttaggaaggattcctt

SEQ ID NO: 14410 - DNA, 120 bp, synthetic construct
  source 1..120: mol_type = other DNA
aagtgcttcagctatctttttgttaatgatttctagttccattgtggtttgagagcatactttgtatgatatctgttcttttaaatttatatttgacccagccatcccattactgggtat

SEQ ID NO: 14411 - DNA, 120 bp, synthetic construct
  source 1..120: mol_type = other DNA
gacggggcggccaggcagaggcgctcctcacctccttctttgtccctttttatagtttttttttcttgaaatctattttgtctattacaggtatagctactcctgctcttttttggtttt

SEQ ID NO: 14412 - DNA, 120 bp, synthetic construct
  source 1..120: mol_type = other DNA
agagatgaagaatgacttgtaccatcttctgagaacaaatggactgaaagcttgtgactagaatccactacttttcaacctcttactcctagagcccatccttttggccaagggctttta

SEQ ID NO: 14413 - DNA, 120 bp, synthetic construct
  source 1..120: mol_type = other DNA
ctcctcgtttgaataagtttcacttgttagaagggcaggattttcatctattaggtttgtttaccgatatatttcaagtacctagaatagtgccttgcacattgtaagtgcccaatgaat

SEQ ID NO: 14414 - DNA, 120 bp, synthetic construct
  source 1..120: mol_type = other DNA
ggagagggccgcgtgtaacctttgtaacttcacttcagcctctgaatgcaagcctttcaagattgaatagatattaaatgtgataatgtacttgtatgggcctcaaacaatgactgacat

SEQ ID NO: 14415 - DNA, 120 bp, synthetic construct
  source 1..120: mol_type = other DNA
atatagcatcattctcctaacctgccattatcctcttggattagtctagtatgtaagaatgtcagcattcatggagaaagagtttgtttttactcctgcctgcttggctttctaaggaat

SEQ ID NO: 14416 - DNA, 120 bp, synthetic construct
  source 1..120: mol_type = other DNA
cctctgcatataccaaaatctgcatatactcagtccctccattcggctctggggaacctgcatgtatacaaaacattggccctccatatatgcgggttttgcatttcattaatttgatct

SEQ ID NO: 14417 - DNA, 120 bp, synthetic construct
  source 1..120: mol_type = other DNA
ggtcaatgtggaagatgtctggtattttaaagtattctgttttagaacaaaatccagctttttaatagcgcatgcaagaccagtaatgatctgattacttcctggctcttcaacttcacc

SEQ ID NO: 14418 - DNA, 120 bp, synthetic construct
  source 1..120: mol_type = other DNA
aaacgcagaatttcatatctagccaaactaaacttcataagcaaaggagatcctttccagagaagcaaatgctgagggattttgttaccaccaggactgccttgcaagagctcctgaaag

SEQ ID NO: 14419 - DNA, 120 bp, synthetic construct
  source 1..120: mol_type = other DNA
aaggcagaattcaagatgttctttgaatccattgagaacaaagacacaacgtaccagaagctctggtacacagctaaagaagtgtgagagagagaaacttacggcactaaatgcccacat

SEQ ID NO: 14420 - DNA, 120 bp, synthetic construct
  source 1..120: mol_type = other DNA
ggctaaaggcaaatagtaatacctaatacttatttacatgcatactatatactgtcagccgtccacatctgtgggttcctccacatccatgggctccacatctgtgaattcaaacaactg

SEQ ID NO: 14421 - DNA, 120 bp, synthetic construct
  source 1..120: mol_type = other DNA
ctggcacaagggcaggtaaattgcccagtagaatagaatatagccagaaagagatcaaggcatatgtggatgctggacttacggccaaggtggcattgcaaaattgcaatttttttttat

SEQ ID NO: 14422 - DNA, 120 bp, synthetic construct
  source 1..120: mol_type = other DNA
ttttctgggttcctttgaaaacacgatatgccaattgcaattaaaaatttacattacagtaatgaaaaattgacttactctttaaaaattagagcattatgacattattctgtctctaac

SEQ ID NO: 14423 - DNA, 120 bp, synthetic construct
  source 1..120: mol_type = other DNA
ccacttacttatggattatttttgcatttaatttttctaccaggcacagacttacccaaaacatacatcctctattttttatgcatgaaaaaagaaaagctccatagtaaaatggtgcca

SEQ ID NO: 14424 - DNA, 120 bp, synthetic construct
  source 1..120: mol_type = other DNA
atggtgtaaggcaaggcttcaacttcattcttttgcatatggatatgcagttgttctagcataatttattgaaagaatgtcctttccagttaattgccttggcactcttgtctcaaatca

SEQ ID NO: 14425 - DNA, 120 bp, synthetic construct
  source 1..120: mol_type = other DNA
agctcttctaatccagtaggaaaaagtaaaaaaaggatgagtaaaaggtaagcatagtcatttaataaaataaatacatgcagcacagaaatatgtggggggggggggagtacactctca

SEQ ID NO: 14426 - DNA, 120 bp, synthetic construct
  source 1..120: mol_type = other DNA
tattcagtttgatcttatagtgctctgctcctcaaaaagggtaatccatggaccagcagcctcagcatcagcttgttagaatttagaatctcactgttggtgggactgtaaactagttca

SEQ ID NO: 14427 - DNA, 120 bp, synthetic construct
  source 1..120: mol_type = other DNA
ttgagaacatagtgcaagtgagcacatattctctccacaattggtatactttccctgataacaaagaccttgctccttagaatcgcttcagagtactttcacatatggacctccctggaa

SEQ ID NO: 14428 - DNA, 120 bp, synthetic construct
  source 1..120: mol_type = other DNA
attgaacatttatttaacacctattgtacagcaagtgccagggattagcaaatactgtaaatatatttagaagccataattgatttcaggctacactggggaaacaaaagaggatgcacg

SEQ ID NO: 14429 - DNA, 120 bp, synthetic construct
  source 1..120: mol_type = other DNA
agtcaccaggaagtattgattgtgtacctgtgagtcgtctggagatcttattgaaaatgttgattatactttaacaaatctggggtgggctgagattttgcatctctgacaagctccaaa

SEQ ID NO: 14430 - DNA, 120 bp, synthetic construct
  source 1..120: mol_type = other DNA
ttacaggcatgagccaatgcgcctggcctctaagagagttttcatcagaccatgctctcactcaaaatcttcaatggctctccattacctccatctggcccaaaccaaactcctatcact

SEQ ID NO: 14431 - DNA, 120 bp, synthetic construct
  source 1..120: mol_type = other DNA
gcccatacagtgctctaatacaccgtgaccttcatggtcctcaccacaaccatgtgagacactcaggggtaattatttcatcccattttacagatgaggaacgaaggctcagagaggttt

SEQ ID NO: 14432 - DNA, 120 bp, synthetic construct
  source 1..120: mol_type = other DNA
gaatcaaagtccgttgccccaactcactcatttccttgcctagtatggattcatatcaaaggcccttttagttctcaatctctggtgctatgattctattccacactcagcacgtactaa

SEQ ID NO: 14433 - DNA, 120 bp, synthetic construct
  source 1..120: mol_type = other DNA
aaagaaaacaagaagaaaacccaggagatgatatacttaaaagcactttggaaaggtcagttctatttttagaagcaatgcactaaccaatttattttacatgtcttttagaagatagta

SEQ ID NO: 14434 - DNA, 120 bp, synthetic construct
  source 1..120: mol_type = other DNA
ccatcattatttttttttcctgggcccccttacctatatcctctccccactctcattagtcactccaactttgaagcacccaattctctggagtattaatggagacagttcaagtatcta

SEQ ID NO: 14435 - DNA, 120 bp, synthetic construct
  source 1..120: mol_type = other DNA
tacatagcagatactgtgaagaatattttatgtaccatctcatttaatcatcttagtaatttttagtatgaaactaggttttcttaaaaagtcaggaaacaacaggtgctggagaggatg

SEQ ID NO: 14436 - DNA, 120 bp, synthetic construct
  source 1..120: mol_type = other DNA
atacaaaacttgagaaagcaaagtcttcaacagcagatgccaaagtggtttctttgtctttacagactagctctgtgcatcacagagtggggcatggtgttccacatgggaaactgttaa

SEQ ID NO: 14437 - DNA, 120 bp, synthetic construct
  source 1..120: mol_type = other DNA
taatttcgcagtgtaaatgctgaatgaatgtgattagctatatttgcaggcttagagcatctgtgaatacttcctggtttttggttagttgtgtttattcctagttctatgtcctattga

SEQ ID NO: 14438 - DNA, 120 bp, synthetic construct
  source 1..120: mol_type = other DNA
agagatctttgttacccagtgcctggaaaggtgcctaacaaaaactggccctcaatacatattcattgaatgaaaaaatgaatgaatggggaagacccttgtcccctgccttttttttcc

SEQ ID NO: 14439 - DNA, 120 bp, synthetic construct
  source 1..120: mol_type = other DNA
aaaaatgagaagctgctgcagaacctgcctcaggtgtcagcatcaattaatgtttcatggttataatgagaaggagcagaagatgagagtctaagctccccttaaagggcttatagttca

SEQ ID NO: 14440 - DNA, 120 bp, synthetic construct
  source 1..120: mol_type = other DNA
ttttgtggtgagaacatttacaatctactcagccctggaaatcactggtctatacttcccattccttttgtgatccttcttcacacagcagctgggttgaacctctttagaagtggatat

SEQ ID NO: 14441 - DNA, 120 bp, synthetic construct
  source 1..120: mol_type = other DNA
gtaagatgtgactctcacatgtgtgtccatcttttttcctttagtagattggagggctcttgaggggaggaaccatgattgtccctagattttgtgtgggcagcacccaaggttgacatt

SEQ ID NO: 14442 - DNA, 120 bp, synthetic construct
  source 1..120: mol_type = other DNA
ttgaggacccctgctttctagcaacacaaatggactaagacaaacttgaattttaaaaaggctatggagagatgctaacacagagataaatcagagattagaattatctgacaaagatga

SEQ ID NO: 14443 - DNA, 120 bp, synthetic construct
  source 1..120: mol_type = other DNA
acttcttctggctcctcatttttcctcctgttgcaccccagctctttgtctcctcccagtacgaaaaggagagatgcaaatttggaatctggtaggtcgcccagacaatggagacatcct

SEQ ID NO: 14444 - DNA, 120 bp, synthetic construct
  source 1..120: mol_type = other DNA
catgcagtccaatggaccataaacattactgggcagcaactgtattgagaatgtcctttaaaatactgccgaatgtttaagtattatacaacttctgcaatcctgatggctccccttggc

SEQ ID NO: 14445 - DNA, 120 bp, synthetic construct
  source 1..120: mol_type = other DNA
gaatttgagtgggggtggggcggggatgaaaatcatcatgataaagagacaggaaaatggcaaagggaaaaagagaaaccagattttttacgtaacttaaatacttcacatgcatcatat

SEQ ID NO: 14446 - DNA, 120 bp, synthetic construct
  source 1..120: mol_type = other DNA
tcacccccactctcaacacacacatccctcttagcacattaatcagtgagactcctaaaggtacaacttctgagatataagaaataggatccaagaaatcaacccgacattttacaggca

SEQ ID NO: 14447 - DNA, 120 bp, synthetic construct
  source 1..120: mol_type = other DNA
cgccggacacctgcgagtccttggacagcacctccaccacgtcgcccagccgcagggtcagctcgtcctcgcccgccgcctcgtactcgaacacggccgtccagtagggcagcggcgcgt

SEQ ID NO: 14448 - DNA, 120 bp, synthetic construct
  source 1..120: mol_type = other DNA
gcctccttctgttatctgagttaaatgattttcctgtgtctcttaggaaagctggaggggctaagaattttttggcaggtgagttgagacacctgagagtaataacactagaatagcaca

SEQ ID NO: 14449 - DNA, 120 bp, synthetic construct
  source 1..120: mol_type = other DNA
gactggacagtagagcccacccctaaacctgagggtggggtcaacattacccaaaaacctatgagagtttgagatgaggtggttcacctgaagaatttggggttgctttttttttttttt

SEQ ID NO: 14450 - DNA, 120 bp, synthetic construct
  source 1..120: mol_type = other DNA
agggctggatttggcttcatgggacttagtttgtcaacccctggtttaagtcctcttctaagcattttatatgcatttacccagttaatcttcactataaacgtttgaagttggcactgt

SEQ ID NO: 14451 - DNA, 120 bp, synthetic construct
  source 1..120: mol_type = other DNA
ccctaaagcaagagcatgcctgtcaggtttgagaaatattgtggctggctcagagtaagtgaagggccaaacagtatggagttttgcaagccattttaaaggtgctaattttaattctga

SEQ ID NO: 14452 - DNA, 120 bp, synthetic construct
  source 1..120: mol_type = other DNA
tgcttaatcatgcagaggcaatcttggacaagtacagcaactctgtttcagcattgaagaactgttcaactgtggcatattcaaccttaaatgaaattaaaatgtgtatcctgtttccac

SEQ ID NO: 14453 - DNA, 120 bp, synthetic construct
  source 1..120: mol_type = other DNA
tacctatattgccccatggcagatcacatggggttctgctttccatgcttttgctcagccttttgcagtgcctcgtatccttctaattaaagttttataagaatggacagtcatatccta

SEQ ID NO: 14454 - DNA, 120 bp, synthetic construct
  source 1..120: mol_type = other DNA
aagacaggtgtgtgcattgcttaagtgtaactcctttagtgtgactgctgtataattgcccttcagtagtaacaccaacacaacagtaaggggcagtacttatttttggtggctactaag

SEQ ID NO: 14455 - DNA, 120 bp, synthetic construct
  source 1..120: mol_type = other DNA
aaaaaaaaaaaagaaaatcctaaagaagagaaaatatatttgctattcattaatggaagtggatcataaaggtctttatcctcattgtctttgcattgggtaagctgatgaggaggaggg

SEQ ID NO: 14456 - DNA, 120 bp, synthetic construct
  source 1..120: mol_type = other DNA
cttttaaaggtctgatcatcaattgtctctctgggcggccacctatgagacttcatctgtgtggtaagaacttttgtctccatagctccttatcttaactcagacactcctttctgttta

SEQ ID NO: 14457 - DNA, 120 bp, synthetic construct
  source 1..120: mol_type = other DNA
tctacttgtttccagatggtagacaaggcttattctgacacatggactgaaaacagggcagaccagcagtcggaatcttccctgcttagtgtcttaatctatagtaagacctcaaagaat

SEQ ID NO: 14458 - DNA, 120 bp, synthetic construct
  source 1..120: mol_type = other DNA
gtctcttgcatcagaatgtcctgaactgcttgttgggaatgcagtatcctgatcctaccctccagattctgattcagtaagcctggactgagccttggaaatctgcattttatttagcat

SEQ ID NO: 14459 - DNA, 120 bp, synthetic construct
  source 1..120: mol_type = other DNA
ggtgaaaatagaccagtgagcccccgcattggaacagattattccaaaaattgtgagcaaaggtctttttctgtattgtgcaagttaatctcctttgcccctttttgtggctgaaatgca

SEQ ID NO: 14460 - DNA, 120 bp, synthetic construct
  source 1..120: mol_type = other DNA
tcaggattagaggtgcaaaactaatgggagtttaagaaggaagtttgagcctttactgctgggagaatcacaagccaagtttatttctcttccattatttgtatggtagctaaaactgcc

SEQ ID NO: 14461 - DNA, 120 bp, synthetic construct
  source 1..120: mol_type = other DNA
atggccttttggatttatgcactagagaggtgctaaagctgatgtgttgattcaagtgaggagtaagaggggtgagaaactgtgagaaaaaaaagtactataaagacacatgcacacgta

SEQ ID NO: 14462 - DNA, 120 bp, synthetic construct
  source 1..120: mol_type = other DNA
tagagtaagtccttcaactttgttcttctatttcaagaatgtttgggctattctaggtcctttgcatttctgtataaattttagaatcagcttatcgatttctacaaaacgtcttcagaa

SEQ ID NO: 14463 - DNA, 120 bp, synthetic construct
  source 1..120: mol_type = other DNA
ttctgacccatgaaactaggtagattgtagattacagtgaaacttagatgagaaagactgtagaaggattgcagggaccacatagaggaagaggattccttctgtgttgagcatgctgaa

SEQ ID NO: 14464 - DNA, 120 bp, synthetic construct
  source 1..120: mol_type = other DNA
gttcctcttctcttccttttgccaataaatatgaaaattgaggacatcaactctgctcctgtcaaaaagaccccctcccctcagaaaagagacaatccgtctaacttcctatttctatgg

SEQ ID NO: 14465 - DNA, 120 bp, synthetic construct
  source 1..120: mol_type = other DNA
aaaaaagaaaaagaaaaagaaaaagaaacggtaggtgtgcacccttataatcctattcagtgagagttttagaagtggcatggatagagggtagtggacccatggggacagagcagccat

SEQ ID NO: 14466 - DNA, 120 bp, synthetic construct
  source 1..120: mol_type = other DNA
cacagctgcccctgaaacttcctttcaatggagaatttattatgtcacaggacacagtgtcccactgtcggccaactcttactgtgataaagagattcaccatgaccttattttgaatca

SEQ ID NO: 14467 - DNA, 120 bp, synthetic construct
  source 1..120: mol_type = other DNA
agtgttcacgatactacataggtttgaaattttccatactatacagtaaaaaaggaactcctttcaaggccaacagggaagcaacatttccccaaagctaagctaagcacccagctggca

SEQ ID NO: 14468 - DNA, 120 bp, synthetic construct
  source 1..120: mol_type = other DNA
gagccaccacgcctggcatggattgttttatttcttaacctgggtggtgggtacatggctatatttagtttgtgataactcactgaactgtatccttacaatctgtacgttctatcaatg

SEQ ID NO: 14469 - DNA, 120 bp, synthetic construct
  source 1..120: mol_type = other DNA
cagggaaaaaacacccaggtaagcaccaacatgtatgtcattaagcattttagatgaatcagaagattcctcaagacaagtcttctgagtgttcgttttccctgcttgcggcaaatgacc

SEQ ID NO: 14470 - DNA, 120 bp, synthetic construct
  source 1..120: mol_type = other DNA
attgtggctgtgggcgtgacccagtgggactctagctttcagaattccccctggatcctgaagtggacacatgtcaaaaataatttgattatagtcacatgatagaaaaattggaacaca

SEQ ID NO: 14471 - DNA, 120 bp, synthetic construct
  source 1..120: mol_type = other DNA
ctaggactacaggtgcatgtcaccatacgtaggtaatcaaatatcagtttttatatccttagttgggctatttggagtctgccttgaatctacatggctaaaagggtcagagatttgggc

SEQ ID NO: 14472 - DNA, 120 bp, synthetic construct
  source 1..120: mol_type = other DNA
aattactactattcagtgtggaaaaaactaaactaatgaatgccagtggtgtaagtagccacaagggggcaatatcactttccaactattgtataaaacaattaaatacatagctttcaa

SEQ ID NO: 14473 - DNA, 120 bp, synthetic construct
  source 1..120: mol_type = other DNA
tagcagtgaattgctgggtcatatggtaattctatacttagctttttgaagtaccaccaatctgcttttcacagaagctgaaccactttacattcccaccagcaatgtatgagagctcca

SEQ ID NO: 14474 - DNA, 120 bp, synthetic construct
  source 1..120: mol_type = other DNA
acgatttaatggcttcccacgtacaaaatccttagtatggatacaaagccctgccctgctttcctacagggtcatctcaaacaactttctgcattacagttttcctttaccattctttcc

SEQ ID NO: 14475 - DNA, 120 bp, synthetic construct
  source 1..120: mol_type = other DNA
aggtatgcatctgataccaattggcataataaaaactctgataactgagataatgagtagacctacacccagatcccagactgaccaatgggtggaacacttgtgggacagatctgaata

SEQ ID NO: 14476 - DNA, 120 bp, synthetic construct
  source 1..120: mol_type = other DNA
acctttagatttgctctgaatcaattctttcctttgagcaaggaagacataacatttctttcttctaatgtaaaaagagtcctgtgaggcggggtgcagtggctcatgcctgtaatccca

SEQ ID NO: 14477 - DNA, 120 bp, synthetic construct
  source 1..120: mol_type = other DNA
ccctcctgaagagatgagaagtagctgaattaaccccatttctcctatatccctctgctcaaggagttaaaatggatttgcggtgagcaagtcttagatctctgatatttaacctcatag

SEQ ID NO: 14478 - DNA, 120 bp, synthetic construct
  source 1..120: mol_type = other DNA
ctcttgtgtcctactcccagaatgctgattcagtagcctgcaagtgaggcctagaaatctgcattttcacaagctctcaggtttaatacacaatacatttaaagaaagcacagcccaaag

SEQ ID NO: 14479 - DNA, 120 bp, synthetic construct
  source 1..120: mol_type = other DNA
ttctacttctgggtacatatccaaaagaattgaaagcagggactttaacagatatttgtatacccatgttcatagcagcatactcacaatagccaaacggtggaaagaacccaaatgtcc

SEQ ID NO: 14480 - DNA, 120 bp, synthetic construct
  source 1..120: mol_type = other DNA
aaggtacataatctaagtggtaatactatgaagaaaaccaagagtgatacacagaaagtccaggatactggaaagagaggaaagggcacaggggtctgtgggacgttgatggtttgcggg

SEQ ID NO: 14481 - DNA, 120 bp, synthetic construct
  source 1..120: mol_type = other DNA
cagttgctcatagctggcctggccaagtcccaccccaagatgccaggccacaacacaaaatttcaagtcatattgttttatcttttcccttgcaattatatagtatatgactctcttaga

SEQ ID NO: 14482 - DNA, 120 bp, synthetic construct
  source 1..120: mol_type = other DNA
tcattatttaatgttttaaacacccccaggaagtagagaacattcctgtcacattctgcagaaaaagaaattgaggcaaggggcaaagccatttgccaaggtcatagatcctgcaagcca

SEQ ID NO: 14483 - DNA, 120 bp, synthetic construct
  source 1..120: mol_type = other DNA
gcgctcattcaagcaaagctgtcttcattagggaatttcccccatagacagcatgagcattttgattttacctgtcctcaaactgacattttgctcattataatagtagaagacagccct

SEQ ID NO: 14484 - DNA, 120 bp, synthetic construct
  source 1..120: mol_type = other DNA
tcttcaaggagatggatttgagggtctcctcccatctccttgctaggtgccctgtgatcatgaagctctttctgtgctgcaaaccctgctgtctcagtgtaattggtctgtaacagcaga

SEQ ID NO: 14485 - DNA, 120 bp, synthetic construct
  source 1..120: mol_type = other DNA
caaatagccctctagaaccaaaagcagagtggcaggtccggggtccttttgtacatagacagcataaaaaattgactaagtcaatcctggcataactgcagaccaggccctggaatgagc

SEQ ID NO: 14486 - DNA, 120 bp, synthetic construct
  source 1..120: mol_type = other DNA
caacagagtacatttcacaccctcagaagtggcccacttttagaagctagcattatcaattgctgaccagtatgtggaggaaatgaaactcactgctagaaggagcaacatattcatctg

SEQ ID NO: 14487 - DNA, 120 bp, synthetic construct
  source 1..120: mol_type = other DNA
tcttctttttcctttgtccctttctcaggtaaaaggtccaggagttgggctgcttggaatttccaaagggggtgagctctgcctttccatggcctctttcctgaagggcatcacggctgc

SEQ ID NO: 14488 - DNA, 120 bp, synthetic construct
  source 1..120: mol_type = other DNA
ccttacctgccacattttttacaggggaaagtgttctcctgattctgggtcttactgaatgtctctgtttttttcttcttctctgaaaaaggtagtgcccttcgtgacttccctgtccct

SEQ ID NO: 14489 - DNA, 120 bp, synthetic construct
  source 1..120: mol_type = other DNA
cacttggcaaaaaacagagaattaaattcaggaaaaaaagaaaaccaccattcaggaacatttgaaatacatttataaatttaagctagtggagatattaccttacatctggatacaagt

SEQ ID NO: 14490 - DNA, 120 bp, synthetic construct
  source 1..120: mol_type = other DNA
ctatcagaagcagcagcagtacaaacaccagatgctccaccaccaacgagacgggcctcctggtttggttccaatggagctggaatccccccctgaatctccccctgtgccgcctgggtc

SEQ ID NO: 14491 - DNA, 120 bp, synthetic construct
  source 1..120: mol_type = other DNA
tatttgattatactgcatattcaaaagcaaactaaattttaaaatcaaaacagcatactgggccttctgagctgccactggtctctgcctgatggagtgtgggaaggcatgccaagatca

SEQ ID NO: 14492 - DNA, 120 bp, synthetic construct
  source 1..120: mol_type = other DNA
atgcatcctctgtaacttagtatatgtaatactacagatagactttctcaacatttgctgcctatgctaaggatctgcagccaggttctcagaagcagtacctaccaattctcaacagca

SEQ ID NO: 14493 - DNA, 120 bp, synthetic construct
  source 1..120: mol_type = other DNA
tcccaaagcgctgggattacaggtgtgagtgagcctattaataactagcctggtcgtttccttagacatttctgtagaaccttgtacttcctttttataactctcattgcctgtaattac

SEQ ID NO: 14494 - DNA, 120 bp, synthetic construct
  source 1..120: mol_type = other DNA
gggttgcagaagaatttaataaaataatgcttgcaaaatgcttttatgcagggtactgtcagcctcacaaaccagagatgccccaagcattctctgtaaacacggctatgaccattcaaa

SEQ ID NO: 14495 - DNA, 120 bp, synthetic construct
  source 1..120: mol_type = other DNA
ctttgaggggaaggatgccgtggcgacggtcttcctccttaatatagtatgtacattttatctctgcagacttcttgcagacttggtttaaagatctcagctcaataccattagtgtata

SEQ ID NO: 14496 - DNA, 120 bp, synthetic construct
  source 1..120: mol_type = other DNA
tgcatgccctgaagcacaaaaaccctggtgttagaccacaggggttcaaataaatcctggctccaccccagctgtgaccttaaccaaattattttgctcccgagtttcttcatctataaa

SEQ ID NO: 14497 - DNA, 120 bp, synthetic construct
  source 1..120: mol_type = other DNA
attaaaaggaggccctgatcaggttcccactgcatgggatttaatggccttgtatttatagagtattctgcctctagcccatgccagaaatatcactttttttctggccctgtgaatgaa

SEQ ID NO: 14498 - DNA, 120 bp, synthetic construct
  source 1..120: mol_type = other DNA
ggaacaaagagcaagggccccagggctgaaccctgaggaaatgcttcgtgagaaggacgttgccagaaatagctatcgatacagtaggacgctgtctgggagtttctgagagtgagagga

SEQ ID NO: 14499 - DNA, 120 bp, synthetic construct
  source 1..120: mol_type = other DNA
atgggcagggagctttttccagcccctccatgctgtggaatcagtttcccctgagctctcaatcagatgccctccatggtcccaagagtgaggcattgtgtggggtgtgtgtgttggggg

SEQ ID NO: 14500 - DNA, 120 bp, synthetic construct
  source 1..120: mol_type = other DNA
agcagatctttatgccctggtgaggtgagaggagccgtaggggtgtgtaccaggcgcccttgcagcccaaagaggaagtgtcgctcaggcgggaggcggcaatgtttcagccgagtctgg

SEQ ID NO: 14501 - DNA, 120 bp, synthetic construct
  source 1..120: mol_type = other DNA
ctgactctgaatcaaggcctcacctcccatttcacatagaagattctagtcatgtggtagggattccctcagcctcaggcttcccagccctgtttagtggagcgcagtctgctgtttcct

SEQ ID NO: 14502 - DNA, 120 bp, synthetic construct
  source 1..120: mol_type = other DNA
actcatgcctcacctcccactcacgcctcccattcatgcctcctctcccactcacgcctcccctccccactcacctcccactcacacctcccctcccactcacgcctcccattcacgcct

SEQ ID NO: 14503 - DNA, 120 bp, synthetic construct
  source 1..120: mol_type = other DNA
ttccctatgagtgaagtgaagataaccacatgcatggctatgtgtgtggttgagtctagtgagaaaatgcacaccatgcactaagtcccacttggatctggctcagagtaaacactcaat

SEQ ID NO: 14504 - DNA, 120 bp, synthetic construct
  source 1..120: mol_type = other DNA
gggagactgtgatgggtggggagtctagggagactgtgatgggtgggggtctggggagactgtggtgggtggggggtatggggagactgcgatgggtgggggcatggggagactgtgatg

SEQ ID NO: 14505 - DNA, 120 bp, synthetic construct
  source 1..120: mol_type = other DNA
gaatagctgaggggtgtgatttgggacaggaagaggtccccaaacaggaaacctggagttacgttgtgtggagaggaaagccctttctctctctctctctctctctctctctctctctct

SEQ ID NO: 14506 - DNA, 120 bp, synthetic construct
  source 1..120: mol_type = other DNA
tgctcaagtaacctctacttagattaaatctgggctccgctatctgtcttcaaaatgacagctctaagagcaagttcttacctgttttgctcaatgcttatcccctatgccaacaacagt

SEQ ID NO: 14507 - DNA, 120 bp, synthetic construct
  source 1..120: mol_type = other DNA
aaacgaaaacaaattaagtgagtttatgttccaaccaaatctagtgaccatgtgatccaatttctcttcagcccttgagtgggacatgctcctgagaggtcactcagattgtgcaccttt

SEQ ID NO: 14508 - DNA, 120 bp, synthetic construct
  source 1..120: mol_type = other DNA
catgagccaccacacccgacctgaaactctatacaatttttctctctccccagcccctggaaactaccattctactttctgttccactactttagatacctcatataagtagaattatgc

SEQ ID NO: 14509 - DNA, 120 bp, synthetic construct
  source 1..120: mol_type = other DNA
ggtatgatttgaatcttcttaaatttgttaggacttattttgtgacctaacgtgatctatcctggaaaatgttccatgtgcacttgaaaagaacgtgtattctgctgctgagtggagtgt

SEQ ID NO: 14510 - DNA, 120 bp, synthetic construct
  source 1..120: mol_type = other DNA
cagtaatttggggctgttttatctatcttctagttttatgtcccttgtgtatgacattaggaaaaaattgaggtcatgcgtatgaccgttttggacagtcctgactgtcgggagcctgaa

SEQ ID NO: 14511 - DNA, 120 bp, synthetic construct
  source 1..120: mol_type = other DNA
caggtaaaggcaataaaaaaagaaagaaaaagaacggagccagtcttgccgatcaccctatatgtacagactcactggattctcacaacaacactttaggtaggtgtgagcatcatcttc

SEQ ID NO: 14512 - DNA, 120 bp, synthetic construct
  source 1..120: mol_type = other DNA
caggtgggtttaaatctcctatcttgctgtttgttttctatttgtcccatctgtaccttacagacccatacactgcataactaaaaaggactttagagttaatctagctcaaccacctca

SEQ ID NO: 14513 - DNA, 120 bp, synthetic construct
  source 1..120: mol_type = other DNA
ctattacctattttggtcaacagcatcaccatccagtctacccagtctcccaagtttggagtcatctttggctccaccttattttctggcttccagatagaattagtaatgactttctgt

SEQ ID NO: 14514 - DNA, 120 bp, synthetic construct
  source 1..120: mol_type = other DNA
tgagatgcattattgatacggtgatgtagtttctaaaaccaaaatcggcctgacgtgaccgagtatgggaacagcaggctgcaatatttgaaagtgggctatcttggaagaattcagccg

SEQ ID NO: 14515 - DNA, 120 bp, synthetic construct
  source 1..120: mol_type = other DNA
acaatgatagctaaaattcgttgagcactcaccgtctgcaggccctgctgcaagggcttcacaagtatcacctcatttaattttcacaatgggtcttggagaagagctaatgttattatt

SEQ ID NO: 14516 - DNA, 120 bp, synthetic construct
  source 1..120: mol_type = other DNA
ggcctccagcttgaaagatttgttagatcccagaaagaactttctggcattcagaatggttaaatgctggacatagagaaggcaacaaaggttgtggaaattgcattctggaggtcttta

SEQ ID NO: 14517 - DNA, 120 bp, synthetic construct
  source 1..120: mol_type = other DNA
agggaacaatggagaagctttcatgggtggatctctactccaaatctacctatgtcacatatcactcatgccatcacattttacgttgattcagtagagggaaaaggttctagtctactg

SEQ ID NO: 14518 - DNA, 120 bp, synthetic construct
  source 1..120: mol_type = other DNA
ttgaccagtacaacttgcttagataaagtggcccaaatatattgaaagagaatagtctgcaaggggccaagagggagatgcggatgaaatggatgatttaatgggtcatctctcctgtag

SEQ ID NO: 14519 - DNA, 120 bp, synthetic construct
  source 1..120: mol_type = other DNA
agtttctgcttgctcataacttctttcagattcctccttttgaaacacatttttttttttcaactggggttaggttttcagtgagatcaaattcaggcatgggaactagagatacgcata

SEQ ID NO: 14520 - DNA, 120 bp, synthetic construct
  source 1..120: mol_type = other DNA
aggcagaatagtcaagaacttggactctagaatccaaattggatgagcgccttaagcactttaatccacagtttcctcatctttcaaatggaaacaacagtgcctaggattcgttgctgt

SEQ ID NO: 14521 - DNA, 120 bp, synthetic construct
  source 1..120: mol_type = other DNA
attttgaagaaaagagttagcaaaagagaaagtaaatctgatcattaacattatatacaataaactgaactgggaaccaggagacctgtgtgctagactggattacattgagtaagcaat

SEQ ID NO: 14522 - DNA, 120 bp, synthetic construct
  source 1..120: mol_type = other DNA
tcaggcttatggctaaaataacatcatttccatgcacctgcattctgacatgctctctggagattctttgctatgggagtgtgccttgtgtataaatagcatttatgatgttggttgcac

SEQ ID NO: 14523 - DNA, 120 bp, synthetic construct
  source 1..120: mol_type = other DNA
tgtgtctgtccccggaagggtggactgattgtttttggatgtctgcagctgttaccttgaaggatgcaatttcatctttcatttatttttccccatctagactgtatcaggataaactgt

SEQ ID NO: 14524 - DNA, 120 bp, synthetic construct
  source 1..120: mol_type = other DNA
tgacaggatgagtgtcaaagtgtgggaagggccgtaatacagaggaaggaatataggctttggaatttcagctgaatcatttaatgtctggtgtcatcagtaaactgtcttagccttgtt

SEQ ID NO: 14525 - DNA, 120 bp, synthetic construct
  source 1..120: mol_type = other DNA
tgccctgagtaatccaatgagggaaaccaagacaggactgtaaccagagagagaaatggattgaaaggggagttagactttcatctgaaagacttggttatgtgtctggtagagaaaaaa

SEQ ID NO: 14526 - DNA, 120 bp, synthetic construct
  source 1..120: mol_type = other DNA
tgctaaaaaatgcgaatgattatctgaggcttcagtgagtctttttttttttttattttttgctggtggagggagggtcttgcttggatgttcacagctgctgactgatcagggtggtgg

SEQ ID NO: 14527 - DNA, 120 bp, synthetic construct
  source 1..120: mol_type = other DNA
agaggtggagagaaatatgaagttggaatgggatgggatcagggacacatcatgccaagtcttctatgccacattgggaatggaaagtcatgaaaagattttaagctggagagttaccta

SEQ ID NO: 14528 - DNA, 120 bp, synthetic construct
  source 1..120: mol_type = other DNA
aacagtgtcagaattgagatgtgctgtaagtataaaatacacatcaaattttgaagacttcatatgggaaataggatgtaaaatagcacatttacaattttaaattttgatcacattttg

SEQ ID NO: 14529 - DNA, 120 bp, synthetic construct
  source 1..120: mol_type = other DNA
caaagtctaagaacatctaagctgcgggttcaggtataaaattagggccctgtggcttatctcaagacagtaactttcaaaggggggtttgaatagtctttccaactgtagctacattac

SEQ ID NO: 14530 - DNA, 120 bp, synthetic construct
  source 1..120: mol_type = other DNA
tggccagagtacccaagtgtgatgcttgtagcatttaagcatacagataaattctttttgaaaaatttcaaacaagtgtaccatgagcggagtcagagcccctcttgaaagcaggttggt

SEQ ID NO: 14531 - DNA, 120 bp, synthetic construct
  source 1..120: mol_type = other DNA
tcagtcgagaacatggatgacaacccaacactgtaacccagcagcttgtgtcttggtgtaacattggtaggttttgtttgcctttacatttttaccataagaggtcaactagagtttcta

SEQ ID NO: 14532 - DNA, 120 bp, synthetic construct
  source 1..120: mol_type = other DNA
ggccatttcttccctaaaacaaagccaacaaggcaattgagccaagtaacttcaaactccccagaggggacagcagccattcttaaatccaccatacttttgaatagctatcattggtca

SEQ ID NO: 14533 - DNA, 120 bp, synthetic construct
  source 1..120: mol_type = other DNA
aaaaaagtccctttcttctttatctcttcctccctgcccctttcactgttctgcccaacacaaagttcaagtcgtctagagacgaatatggcttttgcttttgtagggactttttcctga

SEQ ID NO: 14534 - DNA, 120 bp, synthetic construct
  source 1..120: mol_type = other DNA
gccctgttggtggcattgcctttggtgcatccttttctttcacctcttatactttcgtgttaatacttccctacatggattgttttcttactttgtcatgtgtacactttccctacatgg

SEQ ID NO: 14535 - DNA, 120 bp, synthetic construct
  source 1..120: mol_type = other DNA
gacctttttaatggaactgatgttagtgatctcctagacctctgacagttcttgagagatagcaaaagctttccctgaagtgctagccatgtagcttatccctttaggcactctattgta

SEQ ID NO: 14536 - DNA, 120 bp, synthetic construct
  source 1..120: mol_type = other DNA
tgctaaattctctgccaacctccgttcatgctgagtggagtgtaagtaacaagtatcagatagttcctccagatgtcagctatttaaagagtcacatgctagaagttctgtggatagcaa

SEQ ID NO: 14537 - DNA, 120 bp, synthetic construct
  source 1..120: mol_type = other DNA
gggtctgtgcatctttcttaacccttttcctggctgccctgtagatattccagaaagatttgatgtcttgtggaatggtctgagaaccagatggaagctagatgaagaacaaaatcaaaa

SEQ ID NO: 14538 - DNA, 120 bp, synthetic construct
  source 1..120: mol_type = other DNA
gacctgagagattattaataacaggtttcaatgcctgacactcttggacttaaatgttcacctacactcaatctgatcatggacaaactacttaatctcactgagcccatgtcctcatcc

SEQ ID NO: 14539 - DNA, 120 bp, synthetic construct
  source 1..120: mol_type = other DNA
aggtgttagagtcatgggctgagcactcagacttgggcaccatccttgtgacagtgagtgagttctcacaaggtttggctgtttaaaagtgtgtggccatttacctatataacaaacctg

SEQ ID NO: 14540 - DNA, 120 bp, synthetic construct
  source 1..120: mol_type = other DNA
gtattcaatgccatcttgtcttattgactgagtcatacatctctcattccgcaaagtcagggtcctaaaatacttctgtggagtcgcaaggactcttcctcattagccatctttgacttt

SEQ ID NO: 14541 - DNA, 120 bp, synthetic construct
  source 1..120: mol_type = other DNA
aataaaaataaaaatacaaaaaaaaaaaaagaaatcaggcagactggatctggaatctgttctcttaacctctctctctgctcaccggtaggttatagacctaacataaagtagttgctc

SEQ ID NO: 14542 - DNA, 120 bp, synthetic construct
  source 1..120: mol_type = other DNA
agacagacagggagagagatggaggaagggcaggttggtgaagaagaacacagacaatattaagttcactatcttatgagtgtggttcatggcaccccaaaatagttataatagtaacat

SEQ ID NO: 14543 - DNA, 120 bp, synthetic construct
  source 1..120: mol_type = other DNA
aaaatggcatcttcaaaagttttatttttcattgagatgaacctctaagctgtcctctcccctgccagcctcctttaattcaagatggattaaagacttaaacgttagacctaaaaccat

SEQ ID NO: 14544 - DNA, 120 bp, synthetic construct
  source 1..120: mol_type = other DNA
actaaagcaaagggatctcacattcggaaacgtaaaaccgcttacaacctataatcctggtctacctttggttttcttgaaggagatatgaacgccttttcttttctctttctctctctc

SEQ ID NO: 14545 - DNA, 120 bp, synthetic construct
  source 1..120: mol_type = other DNA
cctaggaggtttctccccacacgtacataaggcctcctgatggtgcagtattttcatggtctgatagtaataaagaaaataaataccctatcagagactaccgatgtattagaagactgc

SEQ ID NO: 14546 - DNA, 120 bp, synthetic construct
  source 1..120: mol_type = other DNA
tcaaggaacagagtacctgacaaagctgtaaactctctccatcagtgtccaagctatatgcaacaattaaactaaacaaacaaatccttcacccccactaaggcttctaaacttccaggt

SEQ ID NO: 14547 - DNA, 120 bp, synthetic construct
  source 1..120: mol_type = other DNA
catgtgacttcaatagcacatgagtagctgaggctcaaaaaaggaagtggattcctgggcgtgcatggcccttttgttcaaatcaggacaagaaacagaaatgagtgaacaattctttaa

SEQ ID NO: 14548 - DNA, 120 bp, synthetic construct
  source 1..120: mol_type = other DNA
atccctgctcttcgccctattccctccatagttaaccctctatccattttcttccactcatgccataaacagaaaaccatttgtcattagttaccattgactactcttcaactggctgaa

SEQ ID NO: 14549 - DNA, 120 bp, synthetic construct
  source 1..120: mol_type = other DNA
ttccagccaataaaaatttacagctactctttattgtccaccatactctgttatgagccatgggctttagtaagttctcatgacattgggcactgacttcctgggagtgtaagtgactca

SEQ ID NO: 14550 - DNA, 120 bp, synthetic construct
  source 1..120: mol_type = other DNA
tttcatcttaacagtactgacattgggtctgtgacctagaattgtcattcccaaaacaaaaagctattcattcaataaatacagtatgtttaacacagttaaacctgtgaccatggcatc

SEQ ID NO: 14551 - DNA, 120 bp, synthetic construct
  source 1..120: mol_type = other DNA
catgctggtcagtctttcctatcatcttttgctggctgcttccccttccccagctataattattgggctttcatatggcccaatcctgtgtagtcttctcttttcactctaacttctcct

SEQ ID NO: 14552 - DNA, 120 bp, synthetic construct
  source 1..120: mol_type = other DNA
gcttcccataggcctcccttacaaacaagaacagacatccaagaaccagcagaccttcgaggaaatccattgacatgaaaaacgtcaatgtcttagagttttcagtgtacagatctttca

SEQ ID NO: 14553 - DNA, 120 bp, synthetic construct
  source 1..120: mol_type = other DNA
agcaaagaagagagggcagcttttggtgcaagggagaataaaagaactgagggaggaaacagaaattctcaagagacaaccaaattcacccagaggacatggttttacccatatatatat

SEQ ID NO: 14554 - DNA, 120 bp, synthetic construct
  source 1..120: mol_type = other DNA
tgaattctgttggctaaagtaagtaaaaaggccaagcccacattcacaggctagggaaagagactccaacccttgataagaggagctgcaaagtcctatctcaaggaaatagatttaaag

SEQ ID NO: 14555 - DNA, 120 bp, synthetic construct
  source 1..120: mol_type = other DNA
aacattacaggaaaagataacacacaagaccagcaaataaccccaaggagcaggaaactggagctccttaaagactacaggctgatgctaattagattttaggcaccagctgttttctag

SEQ ID NO: 14556 - DNA, 120 bp, synthetic construct
  source 1..120: mol_type = other DNA
tcaatttctcagcagaaactgtaggtctggagagaatgagatgatatattcaaagtgcagaaggaaaaaagaaacctgccaaccaagaatacttcgttcaacaaagctgcctctgaaatg

SEQ ID NO: 14557 - DNA, 120 bp, synthetic construct
  source 1..120: mol_type = other DNA
aaccataaggtgtggggggagggaggagtaaatgtgtagagttgttatatacaatcaaaattatcatcaacttgaaataggcgatctgatgtataagatgttctacgtaagcctcttggt

SEQ ID NO: 14558 - DNA, 120 bp, synthetic construct
  source 1..120: mol_type = other DNA
cttcttggccaatgacagactgtgtataccatggtggtcccataagattatatcgctgacaaattcctatcacctagtgatgtcctagtcattacaacactgtagcacaatccattactc

SEQ ID NO: 14559 - DNA, 120 bp, synthetic construct
  source 1..120: mol_type = other DNA
ctcacccacagcaacttccagtcctgcaagttccattcatgggaagtgccctagacaagcgtaccatttaaaaatcttttataccatatttttatgtgctttttctatgtttagataggt

SEQ ID NO: 14560 - DNA, 120 bp, synthetic construct
  source 1..120: mol_type = other DNA
aaatggtttcaggctacggggtggctattgatatatgtttccctaaattcctttgctaatccccacaccttggtcagctaactataggactctcctgattattgtgcaaacagtagagaa

SEQ ID NO: 14561 - DNA, 120 bp, synthetic construct
  source 1..120: mol_type = other DNA
tttaattcattctgcacataattatttaaaaccttaaatgtcagggaccattctagttgcaagggacatggcagttcgagggaaggagggagggaaggaaggaagaaacagaaggaagga

SEQ ID NO: 14562 - DNA, 120 bp, synthetic construct
  source 1..120: mol_type = other DNA
ttgggattaaaagtaatacaagcagtcatagttctcaaaatatcccctttccctggggccaagggttttaaatcttattgtcaacgccattccttccagatgtctttcccaggtgtcttg

SEQ ID NO: 14563 - DNA, 120 bp, synthetic construct
  source 1..120: mol_type = other DNA
acaccctaaaccttgttaccacaagaactgtctcaatactcagttgaagcgattactgctacggtctgaatttttgtgtcccccaaaattcacacactgaaatctaaccctcaatgtgac

SEQ ID NO: 14564 - DNA, 120 bp, synthetic construct
  source 1..120: mol_type = other DNA
tctcttggtccagttctctcataggaactattaatttggctgtacccacgggtaattggaaattagtttgttaccctgaggaactacattcgcatgttaacaagatgtgttctggagctg

SEQ ID NO: 14565 - DNA, 120 bp, synthetic construct
  source 1..120: mol_type = other DNA
gtgagtgttcagggtaccaccagactctttgctccattggcacataattgatgaacccttttctgatttcagaactttacagtgatctgctgttcatgttttgggattctaccagtgtgt

SEQ ID NO: 14566 - DNA, 120 bp, synthetic construct
  source 1..120: mol_type = other DNA
ccgtagttgcagagtcactgtcctctttccttttcacagtgagaactgttgtcttcttcctggcaaccttttataggattctatggccagtgttaatcccataatttgagctcacttatt

SEQ ID NO: 14567 - DNA, 120 bp, synthetic construct
  source 1..120: mol_type = other DNA
cccccatctcaccctgcaagtatcatctcaccctgcaagtgagtaccatccccccatctcatcctgcaagtaccatcccccatctcaccctgcaagtaccatcccccatctcaccctgca

SEQ ID NO: 14568 - DNA, 120 bp, synthetic construct
  source 1..120: mol_type = other DNA
actcaatggtggaagactagatgctttcactctaagatcaggaacaagacaaggatgttctgttctcaccacttacatttaacaatgtactggaggttctagtcaagactattggacaag

SEQ ID NO: 14569 - DNA, 120 bp, synthetic construct
  source 1..120: mol_type = other DNA
ttcatgggtcctttattttctgataagaaattactcaaaatattggcaattattccatagaagaatatgtatatttactgacacccaatcatttcattataaccaaattaaaattttttc

SEQ ID NO: 14570 - DNA, 120 bp, synthetic construct
  source 1..120: mol_type = other DNA
ggggtttaaagcctgtgcttattcattgtattattctttagcacgtacttagtgaagaaaaaaataagactctctcgttttttttaaccaatagcattaatggtgaacttcatttgctcc

SEQ ID NO: 14571 - DNA, 120 bp, synthetic construct
  source 1..120: mol_type = other DNA
gggtcctaaaagaagcaagagaaaagaaacaacacacaacggagctccaatacatctggcagaagactttacagtggaaaccttacaagcctggagacagtggcataacatatttaaagt

SEQ ID NO: 14572 - DNA, 120 bp, synthetic construct
  source 1..120: mol_type = other DNA
gggcatagagtttttgttttctctttgtttatacaaacagtgttaagttgttatcagcttaaaataatggatgatagtatttgcaagtctcatggtaacctcaaaccaaaagacataaaa

SEQ ID NO: 14573 - DNA, 120 bp, synthetic construct
  source 1..120: mol_type = other DNA
gatacagtgagcagtgattgcaccattgcactatagcctgtgtgacgcagagcaagggcctgtctcagtttaaaaaaaaaaaaaagctatcgcattcttgtaacaactggcaaaagtttc

SEQ ID NO: 14574 - DNA, 120 bp, synthetic construct
  source 1..120: mol_type = other DNA
aaaggtggaaacaaaacagatgatgaaaacagcactgactttttattactaaagctaaggttacagcaacattggttttcactatgcatcacatttgtgaatattacatcttctgctgtg

SEQ ID NO: 14575 - DNA, 120 bp, synthetic construct
  source 1..120: mol_type = other DNA
tcatctctgttccctccctctcctcacgcatcatatcctgagccacagtactgggtgtttttgttttaaagtttccctccacttggatggaagatcatattcttttagagatttctcttt

SEQ ID NO: 14576 - DNA, 120 bp, synthetic construct
  source 1..120: mol_type = other DNA
tctcaccttgactctttatgcctgcaccacaggatttaagagcagttcaagcaaacatcgcagaattccctccctttgctacagtggacttccaaatcaaagtctagggcgttcttcaga

SEQ ID NO: 14577 - DNA, 120 bp, synthetic construct
  source 1..120: mol_type = other DNA
tctgctcttttactaactggaaactcagctttcacaactctgttaggatcgtgtgtaacataaaggttaacaggatgtgagtgaaggcccatcaggctctctgaaagggtttatttcaca

SEQ ID NO: 14578 - DNA, 120 bp, synthetic construct
  source 1..120: mol_type = other DNA
gagggcaatgcaccaatcaagataagaaatggaattgctctgtaaacttagccaaatgttgacactggagactcaactgatttcaaaggtatcagcctgcacatagttcttgtatgccca

SEQ ID NO: 14579 - DNA, 120 bp, synthetic construct
  source 1..120: mol_type = other DNA
gattagttacatgaagactaaaggaaactaaaaatgcaattccatgggcacactgggtgcatctcaggtgctcaacaagccacatgtggctagtgactacacagcggacagcatagacac

SEQ ID NO: 14580 - DNA, 120 bp, synthetic construct
  source 1..120: mol_type = other DNA
gagaaagaggggaaggaaagaggaagggagggaaaaacggtgagagagagaaggaaaaaaagggacacagagggagtgacggaaggaggtgaggagagagagagagagaagaagaaaggg

SEQ ID NO: 14581 - DNA, 120 bp, synthetic construct
  source 1..120: mol_type = other DNA
gaagctgaggtcatcagtttgacacctttattctttcctaaacatagaaagttagtgctaccactttccaagtattgctttcaatccatcctacaaaatttgaaatgtggtcttttcatt

SEQ ID NO: 14582 - DNA, 120 bp, synthetic construct
  source 1..120: mol_type = other DNA
ccatctgtttctctaaatgctagaatcacgcttgacccagagagatattctcaccataagaggcacatggactgagatctcccatgtcacctccttatactcactgtgggtacacacaca

SEQ ID NO: 14583 - DNA, 120 bp, synthetic construct
  source 1..120: mol_type = other DNA
attcagaaatatatttaaccttagggaagaagacagtttttgaagtaacttggaaaacccagaaaccataagagaaaaggttgacatatttatctgtaaaaatgatacaattcccagcac

SEQ ID NO: 14584 - DNA, 120 bp, synthetic construct
  source 1..120: mol_type = other DNA
gctgcaggcaccaagcccctcatatggacagatcacaattcgcttctcctttgatctgttggtggacatttggattgtgatcagtttttggctattacaaataaagctgctataaacatt

SEQ ID NO: 14585 - DNA, 120 bp, synthetic construct
  source 1..120: mol_type = other DNA
cattccctccaacaacgtatgagggttccaatttccccacgtcctcacaaacatttgttattgtctgtctttttgattatagacatcctagtgggtgtaaggtggtatctcttggagttt

SEQ ID NO: 14586 - DNA, 120 bp, synthetic construct
  source 1..120: mol_type = other DNA
gttatagcaaatgccccaaataggcaaatccatagaaacagaaagtaaattagtggttgccagggactagggggaggggaaaatggggattgactactaacgagtatagagtttcttttg

SEQ ID NO: 14587 - DNA, 120 bp, synthetic construct
  source 1..120: mol_type = other DNA
gagtggtattattttataatgcttttgtcatggcataagtctagcataatattaattgacatcaacccttatttatatataatttatgtttgagggctcaaatctaaccagtggcaaatc

SEQ ID NO: 14588 - DNA, 120 bp, synthetic construct
  source 1..120: mol_type = other DNA
agccagcttgaggcacttaataaagccaccgttattgtatttccctccaaccacaaagacagggtagaaagcagaggtctctatgatctttccagaaaatgtgttatttcttgctaaggt

SEQ ID NO: 14589 - DNA, 120 bp, synthetic construct
  source 1..120: mol_type = other DNA
cttgtgataaagggattttgcagatgtaattatggtcctaaatcaactgaccttacgataagaaaattatccaagtaggcaggacgcagtggctcacgcctgtaataccagcacttttgg

SEQ ID NO: 14590 - DNA, 120 bp, synthetic construct
  source 1..120: mol_type = other DNA
ccctggaggtcctgagaacatgtgcctgacatggttgggatacagcttggttttatgcagtttaggaagacatagacatcaatcaatacatgtgaagtacacattggtttgattgattca

SEQ ID NO: 14591 - DNA, 120 bp, synthetic construct
  source 1..120: mol_type = other DNA
tccctttggtagattccagaaatgtttgctgatgccaacttctgcttctagcccctggtcccttcttggaggaagcccagttagcctcttggttctgaagaactcgagtcccaggccatg

SEQ ID NO: 14592 - DNA, 120 bp, synthetic construct
  source 1..120: mol_type = other DNA
atataacaaaaaaagactgagaaggaaagccttccagctgtgggcccccccaatttctggagtgttcttgttcagtccattagaccagcagttcttttttttttttttggagacagagtc

SEQ ID NO: 14593 - DNA, 120 bp, synthetic construct
  source 1..120: mol_type = other DNA
tcctttgtttttctccagctttggcttctccagctccttgcacagagtaagtgcttgggaaagagaaatgtttaaatgaaggaaggccagggccatgttttatatttctctcgtgtcaac

SEQ ID NO: 14594 - DNA, 120 bp, synthetic construct
  source 1..120: mol_type = other DNA
tatttctggaagcttccctggccctgccagagtagtatcccttccaaaacaactccaggaatccaacatctttagctggacatggaagctaccacagctgagcgcccacctccttttcca

SEQ ID NO: 14595 - DNA, 120 bp, synthetic construct
  source 1..120: mol_type = other DNA
cttcctgtcccctcgcctgccacggcccaccttcctgtcccctcgcctgccatggcccacctcctgtgggcctcccccagaccccctggggtagctgtggacttcaactccccctgtttt

SEQ ID NO: 14596 - DNA, 120 bp, synthetic construct
  source 1..120: mol_type = other DNA
aggcgtgtgttagtgcagggagggctaggaataaaggaaaaggaagacacagaaggtgcccccatcttgtgtctctggctacagtcccacgatgaaggacaactgagaaccagatgtgca

SEQ ID NO: 14597 - DNA, 120 bp, synthetic construct
  source 1..120: mol_type = other DNA
tctggtatctgttgttgttcccttctttatttccatgtgtactcaaagtttagttcccacttacaagagagaacacacaacagccatgcgtattttaaaagcatgtcacaggccgggtga

SEQ ID NO: 14598 - DNA, 120 bp, synthetic construct
  source 1..120: mol_type = other DNA
ttttagtcatttaacctccaacctgcaaaatggaggaagagagatttgtggctatttccaaaatggtaaaaatataaatggaggttcggcgcagtggctcacgcctgtaatcctagcact

SEQ ID NO: 14599 - DNA, 120 bp, synthetic construct
  source 1..120: mol_type = other DNA
aacatagtaaagtcatatttcagtagaggaggtggttctttgtctttgggagaaactggacgtggagaagaactcagtatcatagctaatcattgcctggagcagagcttcttaacctga

SEQ ID NO: 14600 - DNA, 120 bp, synthetic construct
  source 1..120: mol_type = other DNA
atttcttaagtggaatggatcatcataaagatcttcatcctagtcatcttcttgattaggctgaggaggccttactgactcaggggtggcagaggcagaaaaatttccatgtataagtgg

SEQ ID NO: 14601 - DNA, 120 bp, synthetic construct
  source 1..120: mol_type = other DNA
cctaccaagggccccacctcctaatactaccaccttgagggttaggatttccacatatgaatttttggggaaaacagatatttagaccacagcagtgagtttctggtaatctgaaattgt

SEQ ID NO: 14602 - DNA, 120 bp, synthetic construct
  source 1..120: mol_type = other DNA
gataattcccaaatttaagtctaccatctagtgctcttccctgaagtctaggcttatgtagctaactgccttccaacagcttcattcgatgttggttaggcctctcaaagtgaactcatt

SEQ ID NO: 14603 - DNA, 120 bp, synthetic construct
  source 1..120: mol_type = other DNA
aagtgcaggtcgcaaacatacagaaataaattgagaatcatgtccctttatcactctagggtcctaggctggttagcaaaattcaactgagttggaaaggagtgggcaactatcattaag

SEQ ID NO: 14604 - DNA, 120 bp, synthetic construct
  source 1..120: mol_type = other DNA
taaagctcccagatgattctaatgtatacccagagttaagaagcacttccagtcaccttaaatatttttggaaacaggtaaaatataaatcccatacaaatttaaaaccgcatataggtt

SEQ ID NO: 14605 - DNA, 120 bp, synthetic construct
  source 1..120: mol_type = other DNA
tttgcagacagggtactggcctagagtttagggcaagttctgtggcttaaacacagataatcttgggcaacttactttaccctgggcttgattttccttatttcctatagaaactggaag

SEQ ID NO: 14606 - DNA, 120 bp, synthetic construct
  source 1..120: mol_type = other DNA
ctttttaaactcacctctcccttctgagaggaggctgctattccttgcaacgtatttttgtgcagctgaggatctggaggggttctgacctgaacaatgggctgggagctgagtttggga

SEQ ID NO: 14607 - DNA, 120 bp, synthetic construct
  source 1..120: mol_type = other DNA
gcttttgggcctcacctactccaaattataaaaatgcttatctgtattttcttttcctgattggtgatttttaaccagtttgattgtttggttgattgagacagggtcttgctctgtcag

SEQ ID NO: 14608 - DNA, 120 bp, synthetic construct
  source 1..120: mol_type = other DNA
aggaaatgtgcagtttaaacaactggccctggagttcaggctagggaggggtgttaggatgctggaagtttaagggcttgcaggagtggggagtgtcccagtaagatcaacaaagggtct

SEQ ID NO: 14609 - DNA, 120 bp, synthetic construct
  source 1..120: mol_type = other DNA
tccctgggagagatagggcatgaccacatgtgtggttgctacatccagaaaaatgtgacctactaaaagtgttaacatgggccaggtattaccagctccattgtacaaataagaaactgt

SEQ ID NO: 14610 - DNA, 120 bp, synthetic construct
  source 1..120: mol_type = other DNA
acaaacccccttaacgtctctgaaataactctaatgacatcttacatagccttctggaaattatttctatgtatatttctatgtcactgtgtgtgtttgtgtgtattcccaagtggaata

SEQ ID NO: 14611 - DNA, 120 bp, synthetic construct
  source 1..120: mol_type = other DNA
ctgtcaggtaggcattagtgtgttcccattttcagatgaggaaacagaggcacagagaagtcaactcacttgcctgaagtcacacagctggtgaaagcagagtctgtgtggtgtgatctt

SEQ ID NO: 14612 - DNA, 120 bp, synthetic construct
  source 1..120: mol_type = other DNA
agtgtgagcaagggagggtagaacaggttgtgaagaaaatagtggtggctgccaggtcttgataaccactgctgggcaccctctcatccattcctgtcttcacagaggaggaaatggctt

SEQ ID NO: 14613 - DNA, 120 bp, synthetic construct
  source 1..120: mol_type = other DNA
atgcctgactgtgtgttcatcgggggctgcctgtgtgtttgctgggagatgcctgactgtgtgttcatcgggggctgcctgactgtgcgtttgctgggagatgcctgactgtgtgttcgt

SEQ ID NO: 14614 - DNA, 120 bp, synthetic construct
  source 1..120: mol_type = other DNA
acccagacatgacttctgcccctcgtgtcttcacagagacttactgcccttcacactgcggctaccccaggccatccttgaggccagcagcttcacggaccttgagaccatcgccaacct

SEQ ID NO: 14615 - DNA, 120 bp, synthetic construct
  source 1..120: mol_type = other DNA
catctgactcacacgtgctcagcaggaatgagctaggtaccattttcagtcagttctgctcctgggccacttccacctgctcagcttttctttttttttttttttttttttgttcgttct

SEQ ID NO: 14616 - DNA, 120 bp, synthetic construct
  source 1..120: mol_type = other DNA
tcataaaccattctccagggcttagactttaacctaaagacaatgaaaggccaggaaaggttagatcagtggagtgactcagatattctcgatgaaagatcattctgccaggtgggggct

SEQ ID NO: 14617 - DNA, 120 bp, synthetic construct
  source 1..120: mol_type = other DNA
cagcaacagaaggaatgaagggctgagcccctgttagggccctgggcctgcaagcccatcagctcccttaaaggatcaatcataaattgatgacagaaatgagccatggggtgatggcca

SEQ ID NO: 14618 - DNA, 120 bp, synthetic construct
  source 1..120: mol_type = other DNA
atcatgaggcaggggtggaggggggtgtgggtctcgaggcaggggtggagggtgtgtgggtctcgaggcggggatgggtgctggtcatgaggcaggggtggagggagtatgggtgacgaa

SEQ ID NO: 14619 - DNA, 120 bp, synthetic construct
  source 1..120: mol_type = other DNA
tttagtcccctctctctccctgcttcagtgacatgcctgggcagtggctgtggcttgctatgactaccatcacagagcttctgcgacactttcttcaccttacctgcggcccaagaagca

SEQ ID NO: 14620 - DNA, 120 bp, synthetic construct
  source 1..120: mol_type = other DNA
accaaactctaatatgtctttgctaagagattaacattaaatgccaaagggagaaaggaatacaactgaggatgttctagaaactttctgacaagacatctatgcctgctctgtctgaaa

SEQ ID NO: 14621 - DNA, 120 bp, synthetic construct
  source 1..120: mol_type = other DNA
gacggacaggaagcctttggccgcctattaaatcccacccatttctccgggggcgatttcctaaccttccgggaccgaattctgcaatttgatgtgcgttttgtccgaatggtagcgaca

SEQ ID NO: 14622 - DNA, 120 bp, synthetic construct
  source 1..120: mol_type = other DNA
tacaggcatgagccactgcatccggccaatgtaactcttaagatgagccttgaagggtgaaaggggtctgatttttcaagaaagtaaagggcaggactagtgaagtaaatgttttgtttt

SEQ ID NO: 14623 - DNA, 120 bp, synthetic construct
  source 1..120: mol_type = other DNA
ttaatgatgaagcagggacaacaggtatgagtccaggctgttttggacaaacaagaaagtatgttcagtctagcacgatcaggccttgactgatctcttcgatcagggcagagacagtta

SEQ ID NO: 14624 - DNA, 120 bp, synthetic construct
  source 1..120: mol_type = other DNA
tgaatatctacactaagttagtacacatcagtggttcctgaacactttaaactgagccatttgaagctcattccagagggcccctaaccccaaaagtggtttttcctacgcatataaggg

SEQ ID NO: 14625 - DNA, 120 bp, synthetic construct
  source 1..120: mol_type = other DNA
tgcttgtggtttgggaccttcctaattcagcaattctgccctgttcaacccatccaaaatgcataaccaccaggacttggcacttgctcgctcaggacaggaacaattcctatccccctc

SEQ ID NO: 14626 - DNA, 120 bp, synthetic construct
  source 1..120: mol_type = other DNA
acacacacacacacaccctcacccctagatacctcataaactgctgaaaataaaaaggataatcttggaagtagccagagacaaaggtgacaattgaacaggcttctgatcagaaactat

SEQ ID NO: 14627 - DNA, 120 bp, synthetic construct
  source 1..120: mol_type = other DNA
agttatttttgggtgggattcaccacttttcccatgaagaggggagacttggtattttgttcaatcattaagaagacaaagggtttgttgaacttgacctcgggggggatagacatgggt

SEQ ID NO: 14628 - DNA, 120 bp, synthetic construct
  source 1..120: mol_type = other DNA
ccagcctggatgacagagtgagaacctgttttaaaaacaaccaccaccacaacagcaaaacaacttccatagtctagcctccctccctctttctttctttctattctttctttctttctt

SEQ ID NO: 14629 - DNA, 120 bp, synthetic construct
  source 1..120: mol_type = other DNA
aggggaggtacagaaagaggagaggagagaaagagagagagagaggaaaaaaagacaggaaagaaaagaaagaaaaggaaagaggaaaggaaagggaagggaaaaggaaaggaagaaaga

SEQ ID NO: 14630 - DNA, 120 bp, synthetic construct
  source 1..120: mol_type = other DNA
tcttctcaaagcagtaccactgagagacaataggctcatatccagttacacacactaggaaactgcggaagaatttgtttaattcaagggtttgaacaggaactaactcttctgaccaaa

SEQ ID NO: 14631 - DNA, 120 bp, synthetic construct
  source 1..120: mol_type = other DNA
aagttgatatttaaaaaggaaattaagcaaagcactacactctgtgatatctagtcccaaatgtactctgaaaagtactgcccccactcatgactgcctgacttctgccgacctgtaacc

SEQ ID NO: 14632 - DNA, 120 bp, synthetic construct
  source 1..120: mol_type = other DNA
tagtaatcatagcactagtactattattatagaatatatctgctggctccctaaagaaccaaggttcaccctccagggcaccaaaagccacagtcccgtgatgatgatagtgatagtgac

SEQ ID NO: 14633 - DNA, 120 bp, synthetic construct
  source 1..120: mol_type = other DNA
gatgtattttttcagttgattttggagagggagagggatgggacgatctgagctggcctgtggtttagctaataggtgagaagtgcccatggatgtaatgatggagtgatattgtcatta

SEQ ID NO: 14634 - DNA, 120 bp, synthetic construct
  source 1..120: mol_type = other DNA
aagagctcacgcagtctgaagacagtgcataaccacaggcgtggaaggaggtgacagggagagtcacctatgagacggtgcagaaagccacaggtgtgagaggagatgccaaggagaaaa

SEQ ID NO: 14635 - DNA, 120 bp, synthetic construct
  source 1..120: mol_type = other DNA
ccatctgctgctgttttcttttacagggaacgaagtttgaggggacacttgctttttccccaagcttcacctgtagtggaagcctgtttaaaaagtgacagcaaaatccagactgtgtgt

SEQ ID NO: 14636 - DNA, 120 bp, synthetic construct
  source 1..120: mol_type = other DNA
gaacactaagctgaatcaagagacatactggctttaagagactcacagattagattttagattcttctacagcagtacctcagaattactcatccttacaggtacccagggcctagtaca

SEQ ID NO: 14637 - DNA, 120 bp, synthetic construct
  source 1..120: mol_type = other DNA
ggaggagacatacaataaatgagtgaataatatgctttgtggtgataagggctgttggaaaaacgaaagcaatgtaaagggagtggagatggggaagagagaagggacttgccattttta

SEQ ID NO: 14638 - DNA, 120 bp, synthetic construct
  source 1..120: mol_type = other DNA
tggattcagggttaggaagctcatcatcatggctcacctaaggcatggcctccagcagaactcatatcaataataaagatggtattttgagcttatctggttaaatattgaggcagagag

SEQ ID NO: 14639 - DNA, 120 bp, synthetic construct
  source 1..120: mol_type = other DNA
tatacaaaaatctaggcttctcaaagcaataaaattgaagatgcttaacacagcacctccgaaggaggcttctccaggatccctttggctaccaattgcactggtatttcaacatgatcc

SEQ ID NO: 14640 - DNA, 120 bp, synthetic construct
  source 1..120: mol_type = other DNA
tggtccaaggtcagggagggacataaaggagagacagagaagtgggaaccaaccttcctgcagggcccccaaagtgtgatgggttttagataaccctggcgagcatcacaaaggggtctc

SEQ ID NO: 14641 - DNA, 120 bp, synthetic construct
  source 1..120: mol_type = other DNA
tgcttaataaacacacactgaataggcaaccatatcactaccatttcagaaccgactgcaggccactatgcgcctccggtttcacagctctgcaggagtgtcctagagcccacttagcag

SEQ ID NO: 14642 - DNA, 120 bp, synthetic construct
  source 1..120: mol_type = other DNA
gtgtgtgtacacatctctacacccatacagcccatcctgtatccatcggtgtgtttgtgtgtgtgagtgtacacctctccacgcccatacagcccatcctatatcccccatcagagtgtg

SEQ ID NO: 14643 - DNA, 120 bp, synthetic construct
  source 1..120: mol_type = other DNA
ttttccattgtgaaatgacatccaaggagaccgtgatcttgttttgtgtgtttggctcatgcgtggaaggctgagttttaggggcccttatcttcctttaggataatcctggaggtcaaa

SEQ ID NO: 14644 - DNA, 120 bp, synthetic construct
  source 1..120: mol_type = other DNA
tttttaagttatttttaaaattccggtaaaactgacataacattcaccattttccccaccttagagggtacagtctagtggaattcagtgccttcacaatgtggcgcaaccgtcgccacc

SEQ ID NO: 14645 - DNA, 120 bp, synthetic construct
  source 1..120: mol_type = other DNA
gacttgtttcttgtggatggtgagaaggaagagcctgtttgctctgcatagaggtatctagttgtcccaagcactttttgttgaaaacacagtctttccctgttgaattatcaatgacac

SEQ ID NO: 14646 - DNA, 120 bp, synthetic construct
  source 1..120: mol_type = other DNA
tacaggcgtgagccacggcgcccggccttccttgcctttttcattgtaatgactatccatgttgttactaagtatattctatcctgtcaatgtatcatatcatttaaccattctctagcc

SEQ ID NO: 14647 - DNA, 120 bp, synthetic construct
  source 1..120: mol_type = other DNA
ttagtgttttggatgttgttgctgttattactgtcattagtatttgcttagacctgcagaagcagaacttttgacctctctatggcccgacaggtggtgccacgccagcccccaccaagt

SEQ ID NO: 14648 - DNA, 120 bp, synthetic construct
  source 1..120: mol_type = other DNA
gattgatggatctccttacatgtttccgtggctgatttgggagttcccctggacaagaattcaaacattccagtttgctgcttttggccttggacttcatagagttcaagttttttgtaa

SEQ ID NO: 14649 - DNA, 120 bp, synthetic construct
  source 1..120: mol_type = other DNA
tagaaaatagttttgagaattaagagagagagagaatgtttgtaaagggtatagcacagtgtcaggcacggggaatgcttctgtgctttaactgtcattaccaccaccaccatcaacatc

SEQ ID NO: 14650 - DNA, 120 bp, synthetic construct
  source 1..120: mol_type = other DNA
attgttatcatcaccaccaccaccaccactgctaccgtcatcattgtcaccactaccaccgccatcatcagcatcatcttttgagatttcaactaacccaagactaatctctgaatttaa

SEQ ID NO: 14651 - DNA, 120 bp, synthetic construct
  source 1..120: mol_type = other DNA
agccttctaactgatcacttggagtggacagctttctaagatgttttacatggtaccctgccttgtgacattcatttggcaaacactgactgtgtgcagagccctgttctgggggattca

SEQ ID NO: 14652 - DNA, 120 bp, synthetic construct
  source 1..120: mol_type = other DNA
ttaaatttaagattctgagtgacaggagagtcgggtgcagagaataaggagcctgacgcggaggcgccacgtgctaatgccttgccggtgccgtcccgtaaagataaatcctctttatgt

SEQ ID NO: 14653 - DNA, 120 bp, synthetic construct
  source 1..120: mol_type = other DNA
ccctaactgatttttaaccagctctcatccagcatccactgggtctctgttaccaacattagaataacatacctgaattactccaggcagcaagaatgcctaccagatggataaggctga

SEQ ID NO: 14654 - DNA, 120 bp, synthetic construct
  source 1..120: mol_type = other DNA
aagttagctggggcacaggtgcatggcaacatgcttggctacgtatattttgcctgctgggttttgatggtgaaaacaaaaattgaaagacggcaagatatttgtttaaaacctggaatt

SEQ ID NO: 14655 - DNA, 120 bp, synthetic construct
  source 1..120: mol_type = other DNA
atgagctaagaataaccaatcaggtaatctacttgaatccaccaattgaagagtgcagatacaagctgtatcaggaaatgtttgcctggaagatggttgtactgtctctccccaggatcc

SEQ ID NO: 14656 - DNA, 120 bp, synthetic construct
  source 1..120: mol_type = other DNA
gtctggagagtaatttgtcagctgttttctgctaaactgtgagtggtgtaagaccagttagctatgccctgtgtacttttcagtttaagacatagttgcctgtatcttcccaaagatctt

SEQ ID NO: 14657 - DNA, 120 bp, synthetic construct
  source 1..120: mol_type = other DNA
tcttaaaatccatgcacagaggcgtcctagtcacactgctaaagatcgctgtcttaaaatccatgcacagaggcgtcctagtcacactgctaaagatcacagtcttaaaatccatgcaca

SEQ ID NO: 14658 - DNA, 120 bp, synthetic construct
  source 1..120: mol_type = other DNA
gccagagaacaatgacgtattacctgtagaggaacaatgatttaaatgactgtggatttctcatcagaaactgtattagcccgttctcatgctgctatgaagaaatacccaagcctgtat

SEQ ID NO: 14659 - DNA, 120 bp, synthetic construct
  source 1..120: mol_type = other DNA
gactacctcataaagcaaatggtagttgctttaaaggttacggtgacaaatgacaaatggtagtttctttaaaggttagtaaaaatgtggaatctgaaaccacatggatgaatttttcct

SEQ ID NO: 14660 - DNA, 120 bp, synthetic construct
  source 1..120: mol_type = other DNA
aggtactattcctggaattttcatttgaatgttttcagaccacagttgatcatgggtaactgaaatcacagaaagcaaattccaatgcggggcaccactggagtttcatataccaccacc

SEQ ID NO: 14661 - DNA, 120 bp, synthetic construct
  source 1..120: mol_type = other DNA
tgagattacaggcatgaaccaccacaccctcctggtacctgcattttgaaaatgtttcattgccaagcctgcagggaagtctgccctttttttattagaaaatgaagagctaattctgaa

SEQ ID NO: 14662 - DNA, 120 bp, synthetic construct
  source 1..120: mol_type = other DNA
actcatagataatccattccacaggccttccactcaattcatagataatccgttccacaggccttaggctcaattcatagataatccgttccacagaccttgtgctcgattcatagataa

SEQ ID NO: 14663 - DNA, 120 bp, synthetic construct
  source 1..120: mol_type = other DNA
ccctcaactcatagataatccgttccacaggccttccgctgagttcataaataatccattccacaggccttctgctcaattaatatatacttcttccactgtacagcttcttaaagacta

SEQ ID NO: 14664 - DNA, 120 bp, synthetic construct
  source 1..120: mol_type = other DNA
acaagtaaaactagtttttaaaaacaacgaaaaccaaaacaaaccacaggactgaatctttgagtctcaggacaagagggatgtgaagatgtggactcagtggctgagtcactggggagc

SEQ ID NO: 14665 - DNA, 120 bp, synthetic construct
  source 1..120: mol_type = other DNA
ttgggagctctgaaaggagtcttttaacaattaaacgtggtttccataaaatatatcagaagccggttacctgtgcacgtaatgaagctgatggatggagtcaatggccagcaccatttc

SEQ ID NO: 14666 - DNA, 120 bp, synthetic construct
  source 1..120: mol_type = other DNA
gaggttttgatcccgggttgtgctggggggtcggtgagtcatccaagcctttggaaatcccagctcgaatctctccaagtccattcttttggagattctgggatgtggagctcacagaaa

SEQ ID NO: 14667 - DNA, 120 bp, synthetic construct
  source 1..120: mol_type = other DNA
aagcccagctatggtgtcccccaggcccacgccctgccccctcccccagcacagctcttcctggcctcagtcaatctgacctccctgaccatcctggaatgcagagtgactcatactaac

SEQ ID NO: 14668 - DNA, 120 bp, synthetic construct
  source 1..120: mol_type = other DNA
gttatctggaaaggaaaaagggcatttagaaggaataaacatagggctgaatatggagttgaattttaacctcttcagactgatgggtgcagacgaggttgtgtggggcctctgtggagc

SEQ ID NO: 14669 - DNA, 120 bp, synthetic construct
  source 1..120: mol_type = other DNA
gagggaaaggaggggaagggaagagaagggagagaagggaagaaaagggaagagaagtgaggaaaggaaagaaaaggaaagaaaaggaaaaaacactactgatctggttaggttttatgt

SEQ ID NO: 14670 - DNA, 120 bp, synthetic construct
  source 1..120: mol_type = other DNA
ttatcaatgtaacaatctttacaggacctaatacataccatttcccctccacacttcagctaaatggcagctgccttctccaggttccttgcaaaattctacaacatctcgacaggttgt

SEQ ID NO: 14671 - DNA, 120 bp, synthetic construct
  source 1..120: mol_type = other DNA
caaaaatatcagaacatattggatatggaacttaagccaaatttctgttcaaggccctctgcagtctcacattatccctccttcaaggccctctacagtcttacgttatccctccttacc

SEQ ID NO: 14672 - DNA, 120 bp, synthetic construct
  source 1..120: mol_type = other DNA
tactgtaattgctggctttcagtcacttaacagatatctattgactgtctgccagggcctgaatagttaggggctggggtgtagcagtgaacaagaaagacctagttcctactcccaagg

SEQ ID NO: 14673 - DNA, 120 bp, synthetic construct
  source 1..120: mol_type = other DNA
ccaatagctgggtgcactgtcttctagatcttatgttgtggatatttacattagaggtacgtatggaagttctacgttagagatacgtatggaggttctgcgttagagatgcatatggag

SEQ ID NO: 14674 - DNA, 120 bp, synthetic construct
  source 1..120: mol_type = other DNA
aatcagcataatctgagcctgactggaaaacaggccctgtctgccctcagcctgtgcaggggccagttctgggttctacatgtagacctgtgtgcccactggccgcatcagcagagctaa

SEQ ID NO: 14675 - DNA, 120 bp, synthetic construct
  source 1..120: mol_type = other DNA
tttctgcctggtacactgtctagtcaccacacagcgaccagcacaagctcgcccttctcccttggtctccaggcctggtggtgtttccaggggcagacagaggtgcagagaccccgtagt

SEQ ID NO: 14676 - DNA, 120 bp, synthetic construct
  source 1..120: mol_type = other DNA
ggaatggatttataattagacagcagtccgggcgatcgatagggagattattagaaccataaatagaactttaggattcagatgaggtaatttcccctgaaccagggcatcgatcattag

SEQ ID NO: 14677 - DNA, 120 bp, synthetic construct
  source 1..120: mol_type = other DNA
tatcaggacttcattccatttcatggctgaagcacattccattgcatgcagggaccacattttgtttgtctgctcttctgtccatggacatctgggttgcttccagtttggggcttctgt

SEQ ID NO: 14678 - DNA, 120 bp, synthetic construct
  source 1..120: mol_type = other DNA
cctgtggatgctgctgtggacgtctgcgtcgtcctcgtgtggatgctgctgtggacgtctgcgtagtctcgtgtggatgctgctgtggacgtctgcgtagtctcgtgtggatgctgctgt

SEQ ID NO: 14679 - DNA, 120 bp, synthetic construct
  source 1..120: mol_type = other DNA
gcacatccatctcccggcccgggactttcctgaccacctctctggcaggcttggggaggtcttcatgagcctggccccacgctaggtgaattattcacatgtcagaaaagttgttggtgt

SEQ ID NO: 14680 - DNA, 120 bp, synthetic construct
  source 1..120: mol_type = other DNA
gaccaaggcacggaaacaggaggaggacgacagcctcagtgacgcagggacatacaccatcgagaccgaggcgcaggacacggaggtggaggaggcccggaagatgatcgaccaggtgca

SEQ ID NO: 14681 - DNA, 120 bp, synthetic construct
  source 1..120: mol_type = other DNA
gcatcttcggccacctttcgcccagtcatcagaggggacagagatgagtctgatgacgggggcgtggcccagcggatggcgctactgcaggagtttgcctcccggccactgggtgcggcc

SEQ ID NO: 14682 - DNA, 120 bp, synthetic construct
  source 1..120: mol_type = other DNA
cttcggcgcagacacatccaccgaggcctggatggacttgcctggggcagacgccctgtacgacggcatcttgaatttgggcattttgaacttgctgtctttggcagtcacatccttgtc

SEQ ID NO: 14683 - DNA, 120 bp, synthetic construct
  source 1..120: mol_type = other DNA
ttgacatctatctggggtcccttgcgatctactttgggcatcttgaaactgggcatctgcaacttgggcaggtgccctttgaggccagctccctcgggaacgtggccctctgggagcttc

SEQ ID NO: 14684 - DNA, 120 bp, synthetic construct
  source 1..120: mol_type = other DNA
cttgaggtccacttcaggcatcttgaaactgggcatctgcagcttgggcaggtgccctttgaggccggctccctcgggaacgtggccctctgggagtttcacatccacctggccagcctg

SEQ ID NO: 14685 - DNA, 120 bp, synthetic construct
  source 1..120: mol_type = other DNA
ttcaacgcagacacatccgctgaggcctcgatggacttgccaagggcagacaccccaaacgacagcatcttgaacttgggcattttgaacttgctgtctttggcagtcacgtccttgtcg

SEQ ID NO: 14686 - DNA, 120 bp, synthetic construct
  source 1..120: mol_type = other DNA
tggcagtcatgtccttgtcggccagggacaggtctccctccagccgcgcaccatccagcttagccttctgggcctggacatccacctccatgctgggcagagacacctcgacatcggggg

SEQ ID NO: 14687 - DNA, 120 bp, synthetic construct
  source 1..120: mol_type = other DNA
cggcggaaggggactgaatgctgaggtcagtggtcttcaggtccccctgcatggaggggaggctcacatcagcttccaccttcggctcagacacatccaccgaggcctcgatggacttgc

SEQ ID NO: 14688 - DNA, 120 bp, synthetic construct
  source 1..120: mol_type = other DNA
aggccggctccctcgggcacggggccctctgggagtttcacgtccaattggccagcctggagctccaggtcagtggaagggggctgaatgctgaggtcagtggtcttgaggtccccctgc

SEQ ID NO: 14689 - DNA, 120 bp, synthetic construct
  source 1..120: mol_type = other DNA
ggcctccaccttgggtgcagacacatccaccaaggccttgatggacttccctggggccgataccccgaacgacggcatcttgaacttgggcattttgaacttgctgtctttggcagtcac

SEQ ID NO: 14690 - DNA, 120 bp, synthetic construct
  source 1..120: mol_type = other DNA
tggggctgacgccccgaacaatggcatcttgaacttgggcattttgaacttgctgtctttggtggccacttccttttctgtcagaatttgttccttttttaagcgtttttcatcgtgtat

SEQ ID NO: 14691 - DNA, 120 bp, synthetic construct
  source 1..120: mol_type = other DNA
gcacaggatggaagtggggggccatccccaacccgctcctagaaccctccctagccacgtcgagctgacaacagaccctcaatcccacctcttaagctccccttaaacccgttttcccac

SEQ ID NO: 14692 - DNA, 120 bp, synthetic construct
  source 1..120: mol_type = other DNA
ctggcatttggctccttccttcgttccttccttccttcgttcacatcaagtgtacagcaggcatgcctctgccaccaaggacggcaacctatagccagcggggctcggggaaagcaacag

SEQ ID NO: 14693 - DNA, 120 bp, synthetic construct
  source 1..120: mol_type = other DNA
ggctgcacccattccattttcaaatcaaggaaaattaaaatgaaggcttccgagagcttcacgtaatccctcaaagcaaacaaactaactctaagatgactgtgcgggaaacacagcttg

SEQ ID NO: 14694 - DNA, 120 bp, synthetic construct
  source 1..120: mol_type = other DNA
ccaggccagagtcagccccgggaggctggaggcagctctcagtgctctgcaaacatacggcccagcccaccagcactcaggagtcaggaaagtgtgaggccaggacccagaccagcatcc

SEQ ID NO: 14695 - DNA, 120 bp, synthetic construct
  source 1..120: mol_type = other DNA
cctgtcaagaggccgaaggcagctcctgacccatgtgtgtgtctgcagatggcagcagtgggcacaggaccagatgcacagagaccagtgcaagagaacaccagacactggatctccacg

SEQ ID NO: 14696 - DNA, 120 bp, synthetic construct
  source 1..120: mol_type = other DNA
gtcagaatgtctgactcctaaaattcctatgttgaaatcctatcccctacggggatggtattaagatgcagggcctttgcgggagactaggtcaggaggcagagcactaatgatgagctc

SEQ ID NO: 14697 - DNA, 120 bp, synthetic construct
  source 1..120: mol_type = other DNA
ctagagagctggggaggaggccacagtgagaaggagccgagaggcggccctcactagagagctggggaggaggccacagtgagaaggagccgagagggggccctcactagggagctgggg

SEQ ID NO: 14698 - DNA, 120 bp, synthetic construct
  source 1..120: mol_type = other DNA
ccaaaagtgtgagaaacacattcctgctgttttgcctttctggtctatggtgttctgttacagcagcccaaaaggactaaaatgggggcttatgatgactgcagtaagttattttttacc

SEQ ID NO: 14699 - DNA, 120 bp, synthetic construct
  source 1..120: mol_type = other DNA
aagcactctgtatgaaactgtaacagtggttacccgtcactacgcattcatctaaacccatagaacacgcaccgcccagcgtgagcctgggtgtgtggtggaagctgcgtgatcctgagc

SEQ ID NO: 14700 - DNA, 120 bp, synthetic construct
  source 1..120: mol_type = other DNA
agcctgtgtgaccctgagcccgggtgtgtggatacaggctgcgtgatcctgagcccaggtgtgaggtggaggccgtgtgatcctgagcccgggtgtgtggatacagcctgcgtgaccctg

SEQ ID NO: 14701 - DNA, 120 bp, synthetic construct
  source 1..120: mol_type = other DNA
ttagagtgcaggagtcacggtgtctttgcctggtttcctgctgatatgcagtcctttgagctagaacaggtcttgcttaatcacagggctccaaacgaatcctgcggtcccatgagattg

SEQ ID NO: 14702 - DNA, 120 bp, synthetic construct
  source 1..120: mol_type = other DNA
gctgtcccctggggtgacgggcccccccatcactgtcccctggggtgatgggccccctcgtcactgtcccctggggagacgggcgccctcatcactgtcccctggggtgatggccccccc

SEQ ID NO: 14703 - DNA, 120 bp, synthetic construct
  source 1..120: mol_type = other DNA
ctccaggtcacccgctgggtctctgctgaagtagaagtcgtgaataccctggaagtcggaaagtcattttcagggggatgtaaccattagtttgtgtgtttttttttttataaatagact

SEQ ID NO: 14704 - DNA, 120 bp, synthetic construct
  source 1..120: mol_type = other DNA
agagcaggcacatgtctcttcacagctctgtcccagtgcttaggacagtgtctggcacatagtaggtgctcaatgaatgtatatggaataaatgaagttgtatgtaaataaaagaagatt

SEQ ID NO: 14705 - DNA, 120 bp, synthetic construct
  source 1..120: mol_type = other DNA
aggaccatgcaccttccctgccagcagcctgggaggtggagaaaaccccaaaagaagccccaaggcggctgccaatctatcgggatgccctcagttagacgcacacgggttctggggtgg

SEQ ID NO: 14706 - DNA, 120 bp, synthetic construct
  source 1..120: mol_type = other DNA
tccctagggagctgtgtgcctggggggagtccgtgctgcccatggcccctggtccctggcgcctggggagctgtgtgcctgggggcagtccgtgctgcccatggcccctggtccctggtc

SEQ ID NO: 14707 - DNA, 120 bp, synthetic construct
  source 1..120: mol_type = other DNA
gaggtgctgtcccacctggactggcctttcctatccaccccaaactcggccagactgtgctgagggtgcagggagggttgtgctgctgggcctgcagtaggggatccttgaggtactgag

SEQ ID NO: 14708 - DNA, 120 bp, synthetic construct
  source 1..120: mol_type = other DNA
cctctggagagcccgggcactctgcaggaggggcagcaggcagcaggtgcaccaggagcatgtttcacaaggtgcccaatatcgcatctgctcagataggcagcgagttggaaagtggat

SEQ ID NO: 14709 - DNA, 120 bp, synthetic construct
  source 1..120: mol_type = other DNA
cgaccatgagcttctcctcctcatcctcccagccccaccctactctctcccccagcttgctcaacaggtgaccttataggctccctactctttgcagggaataagaaccagactggggga

SEQ ID NO: 14710 - DNA, 120 bp, synthetic construct
  source 1..120: mol_type = other DNA
ttacatttctgaaagcctgggaatacagtaaatattaggctgtgggctgctgggccaggaagagttgtttatttttcagggtttgtttatctattgacttgatgagggagggttataggt

SEQ ID NO: 14711 - DNA, 120 bp, synthetic construct
  source 1..120: mol_type = other DNA
ccctggaagggccacccctgggagtccaaatgaataaaacatagaccagccatcagaaaacctaaaacctgctttgaaccagcttagtcccaaagtagatgaaggcgatctgcccttact

SEQ ID NO: 14712 - DNA, 120 bp, synthetic construct
  source 1..120: mol_type = other DNA
tcctttgttaactcctcaatgtactgcaaatagagaaaggttaagtcaggatagagcaggcacagcagtagctggacgaccaggaacaactgctacagtgactactccacagtaacactt

SEQ ID NO: 14713 - DNA, 120 bp, synthetic construct
  source 1..120: mol_type = other DNA
taccaacactagggttggtctggggatgatggtctgtcaactgtggaaaggaagagcagtgatactcatgagaactacaagctcctacagtcacatcctgctttacagtttatactaaat

SEQ ID NO: 14714 - DNA, 120 bp, synthetic construct
  source 1..120: mol_type = other DNA
cacacacacacacacacacacacaaggctttccatttaataagcactcaaagttctttacaaggttaaagcaaatacaggacccttctaaagtaaggctaaatgctaagtgatgggggag

SEQ ID NO: 14715 - DNA, 120 bp, synthetic construct
  source 1..120: mol_type = other DNA
gaaggcggaacctggagctctgtccctgttggtgggagcgtaaactcaaccaattttcctataggatgatttgaacatttgttttaaaaatcctaaaactgttttatattattttcttct

SEQ ID NO: 14716 - DNA, 120 bp, synthetic construct
  source 1..120: mol_type = other DNA
gtgctgtcacttcccccacatgcagccaaggcttttttctaacaactctttttctaaagatgtaatttttgtcattcatctaagaaagagaagaaaagaattagtatacatttagaaaat

SEQ ID NO: 14717 - DNA, 120 bp, synthetic construct
  source 1..120: mol_type = other DNA
aacagtggtcactcagggtataagaaggtcccttttcctctgcacagcattacctcaagggtgagatgctagcaggggtggggtttttggttctgtgcccaccatggcttcatcttcagt

SEQ ID NO: 14718 - DNA, 120 bp, synthetic construct
  source 1..120: mol_type = other DNA
gagttgctactggcttgaaggctcaagtggggggctggctggagacccaggccaggaagacctgcccatcatggcccacccctctctctgggaactctgtcccaggaaggtttcaaatct

SEQ ID NO: 14719 - DNA, 120 bp, synthetic construct
  source 1..120: mol_type = other DNA
caggtggtaatgtgacagagagtggctgtaaacagatgaagcttcacttgctcatctaccactaacttcttgctgtgtggcccaggtcctaacaggccagggactggtactggtctgtgg

SEQ ID NO: 14720 - DNA, 120 bp, synthetic construct
  source 1..120: mol_type = other DNA
catacacagatcaatggaacagaatagacaactcagaaaaaaggccacttacaaccaaatgatctctgagaaaggatacaaaaacatacactggagaaagtacacgttattcaacaaatg

SEQ ID NO: 14721 - DNA, 120 bp, synthetic construct
  source 1..120: mol_type = other DNA
gacgacataaggttaacggcattgatgtcaagatacaaatgggtttgaagttagagatgttaaatcactttgtttcactgaaccttcccttcattacgttagagagcatccctggtaggc

SEQ ID NO: 14722 - DNA, 120 bp, synthetic construct
  source 1..120: mol_type = other DNA
caaggagagtatttcttgcttgataaaaatcagccaattctaggacagttgatgctcatcgaatatacaaagtaattgatcaccataaaatactgaattctattaacaggaataaagtgg

SEQ ID NO: 14723 - DNA, 120 bp, synthetic construct
  source 1..120: mol_type = other DNA
tttaattgtgaaataatcagtatactctagatctaacctcatttgtaaaaaatgtttgcataccgtattattttctgggtatgaaaattgagccatttcctattggtaaggatttacttt

SEQ ID NO: 14724 - DNA, 120 bp, synthetic construct
  source 1..120: mol_type = other DNA
cagtgttacattgttcacagttctattgcttaataatataatccaataattgatggtactttatcatgttagggtgttgtaaaaataaaagaacaaacaaaggtctggaatatgtttttg

SEQ ID NO: 14725 - DNA, 120 bp, synthetic construct
  source 1..120: mol_type = other DNA
gtctgactctaaggatagtaacaagcaggcccaggaaaggtcatggtgaccctgtctgagaagccagagcccacaggtatgggctccagacatcccagagcaaggttaagaaaacaaatt

SEQ ID NO: 14726 - DNA, 120 bp, synthetic construct
  source 1..120: mol_type = other DNA
ttgccttaggacctcactgatttttctactgcacctttaccacctgaactgtacactattcctccacatgtctgtcccctctgctccaagactgcagaggacagtcttgcacatcatctt

SEQ ID NO: 14727 - DNA, 120 bp, synthetic construct
  source 1..120: mol_type = other DNA
ccagtccataaattctaagtataatcctagtactcgctctcaagtttaagttaaatgctagcctatacaaaaaatactctttctcttacttcttttttgttatttatatgttgctttgtt

SEQ ID NO: 14728 - DNA, 120 bp, synthetic construct
  source 1..120: mol_type = other DNA
gaatatgccttaatattcaaatttaatcttgtaactcccctgctcaaatttctccaatgagcccctgcagcacacattgttggctcctatcaatagccattccttattctttcttgcaga

SEQ ID NO: 14729 - DNA, 120 bp, synthetic construct
  source 1..120: mol_type = other DNA
aagacatttgatagttatttgttaagtggacaagtgaaaacatagaaatgttttctttgtaaattctgttgaaaaaacacagaaatgaaatagagacacctctattatgagcaccttaaa

SEQ ID NO: 14730 - DNA, 120 bp, synthetic construct
  source 1..120: mol_type = other DNA
cagactcaaactctgagccagcagatgtttgttaagataatgctttatgttgatgttcaattccagctgacatgggagaccaaaactctacttttattttttttcagttttcatgaagaa

SEQ ID NO: 14731 - DNA, 120 bp, synthetic construct
  source 1..120: mol_type = other DNA
aaactgaaagttaaagttcaaacttcataaaattaatatgaaatccctttagctaacataagatcatgtaaccaaaaacatcatacaacaaataacatcagtcaatataataagagaaga

SEQ ID NO: 14732 - DNA, 120 bp, synthetic construct
  source 1..120: mol_type = other DNA
ctaatgccacattaatgattcatgtagttgcaaacactgaatagcctattactctgccttcaaaacaaactcaattttcctttgaagaaagcacactacttattacctctcattagtcac

SEQ ID NO: 14733 - DNA, 120 bp, synthetic construct
  source 1..120: mol_type = other DNA
gaaatatttataaattaagaaactcagtatccagtccaccctgtgataaatactgcaatgtgcccaagcattccaatttgagtatggctttgtgctttgccaatcataacaatggaagat

SEQ ID NO: 14734 - DNA, 120 bp, synthetic construct
  source 1..120: mol_type = other DNA
ttccttgagtagctgaggttggtggctgctccacatgtcccaggtgcacccttgcagaggtgactggttcctatttgagtcagcctggccttgcctggcatgcatagtctccagctactg

SEQ ID NO: 14735 - DNA, 120 bp, synthetic construct
  source 1..120: mol_type = other DNA
ctcagtttggccttggctagcaaaagatgcaaccacttatgtaaaaaataaaaataaaaaagttaaaaaaatcatttctgctaactggaatttttttttttttttgcagccacatgagtt

SEQ ID NO: 14736 - DNA, 120 bp, synthetic construct
  source 1..120: mol_type = other DNA
atgtcccaaaactagcaaatctgttgttagtagcaaaacttatttttgatattggaaagataatcaattcttatgaaaaatatcaaatgcttttcctttggattgaggccattgtgaagg

SEQ ID NO: 14737 - DNA, 120 bp, synthetic construct
  source 1..120: mol_type = other DNA
gcagcttacttctgaaatacagccacgcagcagcacctgctccaccagaatagacagtgcctgaccagtattcctcttactataggaagcaaaaaattccaactctgtatctttatttca

SEQ ID NO: 14738 - DNA, 120 bp, synthetic construct
  source 1..120: mol_type = other DNA
acagaactataaccgtataattttaagatgtaattatcatgtcattagtatatcactgaaatttttgtagtttgcttgattccagctgtttgactgaataaaacagaattttccaaaatt

SEQ ID NO: 14739 - DNA, 120 bp, synthetic construct
  source 1..120: mol_type = other DNA
agaaactgtaataaagttattttaaaagctaatttgatatactttaccaatttgacatcttgcctgtccatgcagaatcaaacatttacatgcgctaaaagacataagcatcttgggtgc

SEQ ID NO: 14740 - DNA, 120 bp, synthetic construct
  source 1..120: mol_type = other DNA
attgaaaaaaaaaaagtattaccttttacaaattccgtgttttttttttttaaaagcattaaccacaagtgcactgaaaaaaactgtaccctctaatgcttctttaaaagtaacaatatt

SEQ ID NO: 14741 - DNA, 120 bp, synthetic construct
  source 1..120: mol_type = other DNA
gctgttgcttagcctttttgtgtctcaatttcctcatcaataaaatgggaatgaaaatagtcagtttctcagaggaaaccactgtaatgcttaaataagactctacacaaaatatagaat

SEQ ID NO: 14742 - DNA, 120 bp, synthetic construct
  source 1..120: mol_type = other DNA
actttgcagatgttcattgcagaaatcacagataagagaaagggaaaaacttcacttacaaatccccagaaataagtttgattatattttccacatatttccagctaacacaagagcaga

SEQ ID NO: 14743 - DNA, 120 bp, synthetic construct
  source 1..120: mol_type = other DNA
atctgctgcatcgacttaattttgcgagttaaatcactttaaaaccgtctattagtgttctataagggaaattataattggattggaaatcagctaaagttttgtttttgtgttgctgtt

SEQ ID NO: 14744 - DNA, 120 bp, synthetic construct
  source 1..120: mol_type = other DNA
ccagcagagaaaaggtcaagtccagcaaaggaatgcgagggaggaaacgccaatccaagcaagaaacaccaggcaaagctactaacagccaagccaagctaggaacgcaaggccaagcga

SEQ ID NO: 14745 - DNA, 120 bp, synthetic construct
  source 1..120: mol_type = other DNA
ctactttgcattgtgcagagagaaaaaaatatattccaggcattcgccaaatcaaaagtgcatgaacaagtccctaaatttcttcctgtcctcagatttccaccataaagtttcagacca

SEQ ID NO: 14746 - DNA, 120 bp, synthetic construct
  source 1..120: mol_type = other DNA
atcattgttgatggactgacaacatccaacttacatctcctgaattaaacctgatattttcttggagagtagtgaggagtagttgagggtagataggaaagagagtgtattttgagaaat

SEQ ID NO: 14747 - DNA, 120 bp, synthetic construct
  source 1..120: mol_type = other DNA
ttgtctttgctttagtggaacataggagacacttattcctaaaatgaaaacaacaaaggccaagaccacaatagggtgtatttaagaatacatctctttgtgaggaattagtccttcaat

SEQ ID NO: 14748 - DNA, 120 bp, synthetic construct
  source 1..120: mol_type = other DNA
acttggtcctaaacctatagctattaactgaaagacgtgagggaacagaagtcatatccaatgcagaaatgctaggctgcagaagaaatcttcaccaacttcacgattttgcaggagact

SEQ ID NO: 14749 - DNA, 120 bp, synthetic construct
  source 1..120: mol_type = other DNA
taggtatttttaacccttacaaaaattggagtgaagaaacttcatgtgctgtccttactactgtttcaaaagaaaacaatagtgatgcttctcagaattaatgggaaggcaaacatgaga

SEQ ID NO: 14750 - DNA, 120 bp, synthetic construct
  source 1..120: mol_type = other DNA
tgatggtagagggttccagatgttacagagtcagtaggagaacagaagtggataacagggaataaaatgcaaggtacagtgcaagaacctgaaactcccaatctcagagatacttgaaag

SEQ ID NO: 14751 - DNA, 120 bp, synthetic construct
  source 1..120: mol_type = other DNA
taaaatgttcaaaaataaaacttcaaacaataggatacaataatgtaagtgtagaaattctcctattattgctttcataccaataaattatcatgcacatccccaagcatgagcacagtc

SEQ ID NO: 14752 - DNA, 120 bp, synthetic construct
  source 1..120: mol_type = other DNA
cttgcacttccttggaggaggggagggattactccttgttgtgatggcctttgaccgctacatcgccatctgccggcctctgcactgttcaactgtcatgaaccctagagcctgctatgc

SEQ ID NO: 14753 - DNA, 120 bp, synthetic construct
  source 1..120: mol_type = other DNA
gtaagaacccattttaatgttttaagcaaaggagcagttcatctacaatgctttcctctactggttagagcaacatcagcaagattttaggcagagattaataaactgtaaaatatcaaa

SEQ ID NO: 14754 - DNA, 120 bp, synthetic construct
  source 1..120: mol_type = other DNA
cttgtggggaaagcagtcagttatattgggaggctcagggaggtagtgtctgatttgcatagggcccaggggattcctttgaccaggtgtgtcattcacacaacccatgaaaagactggc

SEQ ID NO: 14755 - DNA, 120 bp, synthetic construct
  source 1..120: mol_type = other DNA
acgctgaaaatatttctatggcatatagatgtggagattattttctgcatgattataaggtttgcatgtaaattgaatattttttccctactccaagattgtatgagagggcatccatga

SEQ ID NO: 14756 - DNA, 120 bp, synthetic construct
  source 1..120: mol_type = other DNA
agaaacccacactcccagagcaccgagaggggtaaccgcatgagttcctgggctgctgtgggagcggggcgcgcctccctctgcaggaggagcctggaaaaggtgtggcctatctccctg

SEQ ID NO: 14757 - DNA, 120 bp, synthetic construct
  source 1..120: mol_type = other DNA
gagcatatataagcataggtaagggaactaaaaaatgttgtaacttcaaagtcactgtgtgaatccccatgaagacttgagggatctgaatcagtaagggcaccttggtgtcaaaggtca

SEQ ID NO: 14758 - DNA, 120 bp, synthetic construct
  source 1..120: mol_type = other DNA
atgtattcttaataactccatggttttgagtgtttaaacctgccatcctgattaagccaaagctctacaaacttaagagacatactggatagcccacaatatagcttcaattgacaaaaa

SEQ ID NO: 14759 - DNA, 120 bp, synthetic construct
  source 1..120: mol_type = other DNA
aatgttaaattactattaggtttgcgcaaatgtagttgtgattaatggcaaaaatcgcaattatttttgcaccaacctaatagtaacattgaaacacaatattagttattcaacatcaga

SEQ ID NO: 14760 - DNA, 120 bp, synthetic construct
  source 1..120: mol_type = other DNA
aagcctgacctcccggggctctttggggtcacgtctccaaggacctggctcccaattttgtgaccccctccccagtctcaaagcggcaacttgggcattgcactcatgtgtcccccccaa

SEQ ID NO: 14761 - DNA, 120 bp, synthetic construct
  source 1..120: mol_type = other DNA
tgaggtagagttagagagtatcagaggtttctgttagctctgagagcccgagagttaaaggcccactagaatggaaacctcggggccaagggctcctgtctgccttttctgacctctatt

SEQ ID NO: 14762 - DNA, 120 bp, synthetic construct
  source 1..120: mol_type = other DNA
ttcaacctggcactttgacaggcctttagggggagtcctttgggccacatctgaatgtctctcattccaggagaggccagggatctgatcagccgcctgcatgattcatggaagtttgca

SEQ ID NO: 14763 - DNA, 120 bp, synthetic construct
  source 1..120: mol_type = other DNA
ctcaagaaaggttcgaacagtggtagtactaacagtaatagcaataacaatattatctgatcgctctgggcccctgttagccagctctaaattcaatctctttccctgtcccttccacat

SEQ ID NO: 14764 - DNA, 120 bp, synthetic construct
  source 1..120: mol_type = other DNA
tgatgtgggagaaggaggagaagatacgggagctggaagagaagatgcacgagcaggagaagatacgggagcaggaagagaagaggcaggaggaggagaagatacgcgagcaggagaaga

SEQ ID NO: 14765 - DNA, 120 bp, synthetic construct
  source 1..120: mol_type = other DNA
caggaagagaagatgggggagcaggaagagaagatgcaagaacaggagaagatgcggaggcaggaggagaagataagggagcaggaggagaagatacgggagcagaaggagaagatacga

SEQ ID NO: 14766 - DNA, 120 bp, synthetic construct
  source 1..120: mol_type = other DNA
cactaccctgtttatgggcccagaatctggaagccagccactacctaccctgacgcctatcctgcaggtggagctgaagagccaagaggctgagtctgcagcagcagcgagaccattacc

SEQ ID NO: 14767 - DNA, 120 bp, synthetic construct
  source 1..120: mol_type = other DNA
gaaaagccacctctaggggtcagtcataatctagtgattctgatgaggagggccccaccaacctctgtccagggtcttgtctgggaaaaactgctccctggcagaaagaggctaataatt

SEQ ID NO: 14768 - DNA, 120 bp, synthetic construct
  source 1..120: mol_type = other DNA
ttatattgacagggattgcattgaatctcgtagcattatctgcaacaacctagcaaccaggtgtcatcaactgaaggatgatagcaaaagtcagttctcacacatgctgcaacatggagg

SEQ ID NO: 14769 - DNA, 120 bp, synthetic construct
  source 1..120: mol_type = other DNA
acagcctcgagaacgcggagtgtggaatgatggaatgagcctgtcccatgttctccaggcattggcgaccctggccctcatgtgtcagcgaggctcccagccctgacatttttctcccca

SEQ ID NO: 14770 - DNA, 120 bp, synthetic construct
  source 1..120: mol_type = other DNA
gcccattgtcagggtctccacatgtggacgtgtgcagaggtgggggtgctgagggaggaggggcagggaatttctcatcttctctctactgcctctgagttggagatgtcagagggagcc

SEQ ID NO: 14771 - DNA, 120 bp, synthetic construct
  source 1..120: mol_type = other DNA
agaccagcctggaaaacatggtgacatcctgcctctattaaaggtataaaaaaaaattagccaggcatggtggcacacgctacgcgggaagctgaggcaggagaattgcttgaacccagg

SEQ ID NO: 14772 - DNA, 120 bp, synthetic construct
  source 1..120: mol_type = other DNA
ccagcctccgcatcttctcctccttctcccacatcatctcctcctgcctccgcatcttctcctccttctcccacatcatctcctcctgcctccgcatcttctcctcctgctcccgtatct

SEQ ID NO: 14773 - DNA, 120 bp, synthetic construct
  source 1..120: mol_type = other DNA
attattacctctattgtgtagatgaaaaacatgcggtattaaaggttaagtgctgcctaagatcacttggagctgggatttcaacacccaggtatatctgattctctaagcccattcttc

SEQ ID NO: 14774 - DNA, 120 bp, synthetic construct
  source 1..120: mol_type = other DNA
acatcataggatgggtagggaggtggggatgggtagggaggtggggatgggtagggaggtggggatgggtagggaggtggggatgggtagggaggtggggatgggtagggaggtggggat

SEQ ID NO: 14775 - DNA, 120 bp, synthetic construct
  source 1..120: mol_type = other DNA
caaaaatcctgactcgagtccattaaaatatatatagaaggaaatccacctctggggtggcaatgactcacttaacatacatccagtgatgatgccagggtatatttctccatagaaaca

SEQ ID NO: 14776 - DNA, 120 bp, synthetic construct
  source 1..120: mol_type = other DNA
ccttccttacctaagagctgactttcttgaagagtgggcacagaggagccggcaacctgggctgtgtaggcacccaggagaaaatctgcagctcagtatcagaagtctccaccagcacgg

SEQ ID NO: 14777 - DNA, 120 bp, synthetic construct
  source 1..120: mol_type = other DNA
cctttccgataagattctgttaactgctgctttctgcagtttgtattccaaaacaaggggaatatgtttccattttttcaatacaaatgtttaagtcggatatgctttctcaaactggac

SEQ ID NO: 14778 - DNA, 120 bp, synthetic construct
  source 1..120: mol_type = other DNA
cttcacagggaaagcaccacctcagacccagttctgcaccaaacccacatttgagtcacgaggctcctgccctgcactgtgagcactctggataagccagtgctgagggggaaagagctc

SEQ ID NO: 14779 - DNA, 120 bp, synthetic construct
  source 1..120: mol_type = other DNA
atgagcttctcatcctgatcctcccatccccaccctacttttctcccccagcttgctcaacaggtgaccttacaggctccctactctttgcagggaataagaaccagactgggggaactg

SEQ ID NO: 14780 - DNA, 120 bp, synthetic construct
  source 1..120: mol_type = other DNA
acatcttcgcctcctgctcctgcctcttctcctgctcgcgtatcttctcctcctcctgcctcttctcttcctgctcccgtatcttctcctgctcgtgcatcttctcttccagctcccgta

SEQ ID NO: 14781 - DNA, 120 bp, synthetic construct
  source 1..120: mol_type = other DNA
ggggctgcagctgctcacctgtggcagcaggagcttggccctctccagtttcctttttagctcctttacgttgagctggatctcagacttttcagattctacaagttgaagtttttcttg

SEQ ID NO: 14782 - DNA, 120 bp, synthetic construct
  source 1..120: mol_type = other DNA
tgctctaactctcctgcaaacttccatgaatcatgcaggcggctgatcagatccctggcctctcctggaatgagagacattcagatgtggcccaaaggactccccctaaaggcctgtcaa

SEQ ID NO: 14783 - DNA, 120 bp, synthetic construct
  source 1..120: mol_type = other DNA
agtgcgagaaaagcccacccttccgccagcttgtgatttagaaaggtgcattcactcagcaaacgttgagcacatacgggccagggacggttcttcacagcgggaatagaggtcagaaaa

SEQ ID NO: 14784 - DNA, 120 bp, synthetic construct
  source 1..120: mol_type = other DNA
gtcacaaaattgggagccaggtccttggagacgtgaccccaaagagccccgggaggtcaggcttggggcggcaggaggtgagggccaattaaggagcaaggagctccaggagtcacatcc

SEQ ID NO: 14785 - DNA, 120 bp, synthetic construct
  source 1..120: mol_type = other DNA
aaaatttaagaaaattgtatgatttcctcagcaaatacatattgatcatctgttatacagccatgagaagtggttctgttgaacacgtttattttatcagatcccaattctaaaccaggc

SEQ ID NO: 14786 - DNA, 120 bp, synthetic construct
  source 1..120: mol_type = other DNA
cattaaggccacgcccctattctgccttctactgcatccctggttacgcctcctctggctcagtcgcacagctacctggtaggtgactggaggtgttgatcagtgcttggtgggattttg

SEQ ID NO: 14787 - DNA, 120 bp, synthetic construct
  source 1..120: mol_type = other DNA
acagttaaaagaatattggcagagaaacagccctggtgttccagcaggagccaagaggaacaggaaaacaaatggcagcatccatgagacagccacttctggtggttgccactcacctgg

SEQ ID NO: 14788 - DNA, 120 bp, synthetic construct
  source 1..120: mol_type = other DNA
tttgtgctcagactatattcacacagtgacatggcggcttatgcttctgtaggccttgttgacagtgccaacttttagatattgatgatcttcatctttctcttgtctcctcggtagaag

SEQ ID NO: 14789 - DNA, 120 bp, synthetic construct
  source 1..120: mol_type = other DNA
tgcatcttctcgtgttcccacagcttctccttctgttccggcagcctctgctgctcccacatcttcttcttcctgctcccacatcttctcctcctgctcccacatcttctcctcctgctc

SEQ ID NO: 14790 - DNA, 120 bp, synthetic construct
  source 1..120: mol_type = other DNA
catcttctgctcctgctcccgcatctgcttctcctgctcccacagcctctcctcctgtctccacatcttctcttcctgctcccgcatcttctcctcctgctcccacatcttctcctcctg

SEQ ID NO: 14791 - DNA, 120 bp, synthetic construct
  source 1..120: mol_type = other DNA
ctcagacccaatgggaacatgaagtggtaaactctcaactcccaaagaagagatttgggtctttgttggtttttgccctcagccacggaactgaaagtctgaaactagattatctcaaaa

SEQ ID NO: 14792 - DNA, 120 bp, synthetic construct
  source 1..120: mol_type = other DNA
aactcagtcttctgattctgagctctggggttttgccacaaatcgcagctgccaggggccaaaaccagaggcagaggtagaaaagtaaaaagtagacaggaaagtgtacactgtttggtt

SEQ ID NO: 14793 - DNA, 120 bp, synthetic construct
  source 1..120: mol_type = other DNA
accagtgcatagggattttaggcggaggtaggtatattggagtgattgtggcggggcgaaggtacgtgaagtgatcggtatttagggggtgttgagcgcaggtaggtgtataatagtgac

SEQ ID NO: 14794 - DNA, 120 bp, synthetic construct
  source 1..120: mol_type = other DNA
agagcaattctatctaattcaaaggttatttagaggttttcttcaaaatatagatttaaggaggaaatagaaaaaaggcagaaaggagcagtaaataggagagatgagaaaaaaggtgta

SEQ ID NO: 14795 - DNA, 120 bp, synthetic construct
  source 1..120: mol_type = other DNA
cctcaggtagaaggcataggacaaaatggaaggtttaagcaagatgtaggtttgtgcaagattaatctcatgaaaataattttatgtgtgatcagattgactaaaattagaaaatttaag

SEQ ID NO: 14796 - DNA, 120 bp, synthetic construct
  source 1..120: mol_type = other DNA
tgcctactcacttaaacaacccagttagttgaaattactgataaagggagatcatcagtgctcaaaatgtttcacgtgacttccagtttcagaacatgcatgggcttcttgggatgtgac

SEQ ID NO: 14797 - DNA, 120 bp, synthetic construct
  source 1..120: mol_type = other DNA
atcaaagatttccacggtagaagatctagaatgccagtaataattgacttataggaaaattaagaatattttttaaagtgagatatacttgcttatttactatcaataatatttgaaact

SEQ ID NO: 14798 - DNA, 120 bp, synthetic construct
  source 1..120: mol_type = other DNA
tcaacacacacccacagacacaaactcacatatcagcttctttcactttagtttttttgggtgtgggggcaggtaaatggctcctcattctacattcccaggacttctgaatagtctttt

SEQ ID NO: 14799 - DNA, 120 bp, synthetic construct
  source 1..120: mol_type = other DNA
cagcaagtctcttctatttctttaagaatcatccaattatttttatcaccaactgcctttctctttcacaggccatccagctcacatggcatatatccagtaacagcccagctctgagga

SEQ ID NO: 14800 - DNA, 120 bp, synthetic construct
  source 1..120: mol_type = other DNA
aattaggacacttaaagaactgtgatgttctcagatcttaatcttattcttattcatgtgaaatgttagtaccgcacatgccaaagtttttgatatctgtagtaaatgcttctgtgagat

SEQ ID NO: 14801 - DNA, 120 bp, synthetic construct
  source 1..120: mol_type = other DNA
gagtgtatatggtgtgttgtgtgtgtatggtgtgtgtgtatggcatatggcgtgtgtgtatatggtgtgttgtgtgtatatggcgtgttgtgtgtctatggagtgtcgtgtgtgtgtatg

SEQ ID NO: 14802 - DNA, 120 bp, synthetic construct
  source 1..120: mol_type = other DNA
tcatacttcatctatattttaaataacaatacacgtgtttacaacaaaaatagcctttggccttggcagatttggacagcacacagtcggcagtaagaatagagaccccccactggtagg

SEQ ID NO: 14803 - DNA, 120 bp, synthetic construct
  source 1..120: mol_type = other DNA
gaatcgatcgttagtcaccaaatttcaatggaactcaaagcagagctcatgctgtgatgaatgccttttctgtttctaccagtgtgatcttccaggctttaaacttgccattacttctga

SEQ ID NO: 14804 - DNA, 120 bp, synthetic construct
  source 1..120: mol_type = other DNA
ggttctagaaatgaaagctctgcccagcccagcagggagcctccaggatcctgctccgtgctgtggcctcagaattttgtatctcaccctttcttactccatgtagtgctttgtatttta

SEQ ID NO: 14805 - DNA, 120 bp, synthetic construct
  source 1..120: mol_type = other DNA
aaatagagagtcatactgtcttcaaggaatagaagacccaacgtggtaaacatgtcaacatgtaaattctccataaatttatatatggattgtgtgtgtgtggtctgtgtgttttttata

SEQ ID NO: 14806 - DNA, 120 bp, synthetic construct
  source 1..120: mol_type = other DNA
catatttgcataattaaagaggttactgggtggcagcctaatccatttagaggctttagcaatgggtgtgattatttctgccaggttgtttcaatggactttggcactgcaaagtcccct

SEQ ID NO: 14807 - DNA, 120 bp, synthetic construct
  source 1..120: mol_type = other DNA
attcttaagatagcaaaacactttctcaggagcttgcttctcacatgcagaccaacttatcagaagcccacacctcaaccttttaaaacactttacactcgaatttctcacagccctgag

SEQ ID NO: 14808 - DNA, 120 bp, synthetic construct
  source 1..120: mol_type = other DNA
tggtttcatttggtgtatctccaggacttgatacacatgtgtgaatatgttttcttccagattcctcctttttaggtggcagcaaagagatggaagcagagactctttgctgttgtttgc

SEQ ID NO: 14809 - DNA, 120 bp, synthetic construct
  source 1..120: mol_type = other DNA
tgcaccaactaaataccatgggccccaagaaacagatcaatgcacaaaatagaaaaccttctggagagtctgcctgtgagttaagaccccatggaagaagaagagctaagaaatgaaggt

SEQ ID NO: 14810 - DNA, 120 bp, synthetic construct
  source 1..120: mol_type = other DNA
ggctataaatccaccaatactgagtgttctaagatatccattggagtgggctgcgtatccatcaatactgttttaaggcatccatgggagtgggctataaatccaccaatactgagtgtt

SEQ ID NO: 14811 - DNA, 120 bp, synthetic construct
  source 1..120: mol_type = other DNA
ttttaaggcatccatgggagtgggctataaatccaccaatactgagtgttctcaggcatccatgggagttggctgtaaatccaccaatactgagtgttctgaggcatccatgcagtgggc

SEQ ID NO: 14812 - DNA, 120 bp, synthetic construct
  source 1..120: mol_type = other DNA
aagaagccaagcaaggctgttctttctcacaatgggattctatgtatgccacttaaatcaagacggcgtaggagattcacagtaaatccattgtgatagtatcctgtatcacaggctgat

SEQ ID NO: 14813 - DNA, 120 bp, synthetic construct
  source 1..120: mol_type = other DNA
aaccctgctagtcacagggggcataggcacaaaaatctccatctgccaagataatgctttttctccacactcatgaatggccttgttgggaattaattaggaacttagcagttttaatta

SEQ ID NO: 14814 - DNA, 120 bp, synthetic construct
  source 1..120: mol_type = other DNA
ggttctgtctataggaatactgaagagaggttccccttatgctgctaaatccttgttataagaagagactgctacaacctgaaagaaagtggggccaaaactgccatgaaaatcttcaca

SEQ ID NO: 14815 - DNA, 120 bp, synthetic construct
  source 1..120: mol_type = other DNA
caaagattcaatggtggtttaatacagaaggagaagtcttttccacatatggtgctggaacagttggatatccacatgcaaaagaacttttactttgatctgctcactaatcatatacga

SEQ ID NO: 14816 - DNA, 120 bp, synthetic construct
  source 1..120: mol_type = other DNA
agctatagtccatgggtcaaatctgaccccctgcttgtttctataaatataatcttattgaaatacatccacagccacccatttacatactttctatgactgctttaccacaacccagtc

SEQ ID NO: 14817 - DNA, 120 bp, synthetic construct
  source 1..120: mol_type = other DNA
ctcaacaaataaggtatagaataaatgtaccacaacgtaataaagaccatatataacaagcccacagctaacattatactccatagtgaaaagctgaaagcttttcttccaaggtcagga

SEQ ID NO: 14818 - DNA, 120 bp, synthetic construct
  source 1..120: mol_type = other DNA
ccaaaaaaagagaccaaattgccaaggcaatcttaaagcaaaaagaacacagctgaaggcatcacgttacccaacttcaaactacacaatagagccacagaaaccaaacagcttggtatg

SEQ ID NO: 14819 - DNA, 120 bp, synthetic construct
  source 1..120: mol_type = other DNA
ggaaagcatcactcctgaagaaatcatcacatagttttgtttaaaatctgtgttgaagaccttcttaaggacagaaaactgccagttcccttttctcaagttgtgagggtgcaggggaac

SEQ ID NO: 14820 - DNA, 120 bp, synthetic construct
  source 1..120: mol_type = other DNA
cctctctgtggagcactgccggtcaaattctaccctgagtccttctgcacctgaaggacaggcaagcacaaaacatagcaaccactccagatcagcacccaaagtagaaacagtgaaact

SEQ ID NO: 14821 - DNA, 120 bp, synthetic construct
  source 1..120: mol_type = other DNA
gccagcagtaacctctcagcctcagtttcctcatccatatataaaggtaacccctaccctctctactgagaatgtggggatgtgcatggcaaatgctcagcattattttatatatatatt

SEQ ID NO: 14822 - DNA, 120 bp, synthetic construct
  source 1..120: mol_type = other DNA
cttctacacaaagtttctgaaataaaacaggacagaatccaaagccaagatcacagagccctagaataacctgatttattaccagaactactaccccccacttctgtctatataacgtgc

SEQ ID NO: 14823 - DNA, 120 bp, synthetic construct
  source 1..120: mol_type = other DNA
tttgttaggtaatgctggtaaacagaaatgtcattatgttaagattctttattagtgatactcactgacatatatacaggtgaaatgagatgatttgggggattttctctaaaatatact

SEQ ID NO: 14824 - DNA, 120 bp, synthetic construct
  source 1..120: mol_type = other DNA
cagcaccagtagactgcaagaaataaatacattcaaacaaaaaaacaggagaacatgataaacctactcaaaaagaaataagtctgtgaaatctataatattaaaaagtagaggatgaaa

SEQ ID NO: 14825 - DNA, 120 bp, synthetic construct
  source 1..120: mol_type = other DNA
ccagtgcagcagcctgggcagacaagagggtcctgggagatttgggaagtgccctcagctagcttacacagtctaggaacacaggggtgatggccttctactgtgaactgcagtatgcaa

SEQ ID NO: 14826 - DNA, 120 bp, synthetic construct
  source 1..120: mol_type = other DNA
actaacctttggctgataataatcatgaactctggataaaatattttttaaaactgcttgagggcactggagaacagctgacgcaatcagcaataaaacgagtacaacccctgaccccga

SEQ ID NO: 14827 - DNA, 120 bp, synthetic construct
  source 1..120: mol_type = other DNA
cccagcttagggaaactgcagaaaaccaaagataatagaaaatacgaaaagcaaccacagaaaaaagacatttcatgaaaaagaagagaacaacaactctccatcagaatccatggagac

SEQ ID NO: 14828 - DNA, 120 bp, synthetic construct
  source 1..120: mol_type = other DNA
gctgtggattaaaaactgtcaaggctgcatggctgtacctcaagttcctgtttatcaaatatggccttcacaggagacggctgggtggccgaggccagcagctgctgcaagaggatcatg

SEQ ID NO: 14829 - DNA, 120 bp, synthetic construct
  source 1..120: mol_type = other DNA
ccattgcagagcaaaagcatccagagacgatgtgtaaacaagtggtgtgtctgtgttcccataaaaatttacaaaaacaggtgcacggcagttttgtcaatctagctctgttaggagtcc

SEQ ID NO: 14830 - DNA, 120 bp, synthetic construct
  source 1..120: mol_type = other DNA
ccagcaaagtgcttgtctgctggcatctgtctgccacagccttcaaaggctgcccgtccagtgctcagctgccactggctccagatgcctgtggaaccactcacatgcctcaccgcctcc

SEQ ID NO: 14831 - DNA, 120 bp, synthetic construct
  source 1..120: mol_type = other DNA
ggctgaggcttggaggctgggccccctgagggaccccgcccacagccccacaggacctgctctccctcccacctcccccaccctgccctcagctatccaagcttatgaggacacctgcct

SEQ ID NO: 14832 - DNA, 120 bp, synthetic construct
  source 1..120: mol_type = other DNA
cgaccgctaacacactcactctcatcaatatgtgcggacgctccagcacaccactaatacacgcatgctctcacacacactggaggacgcccacatacccacccacactcacatgtgctc

SEQ ID NO: 14833 - DNA, 120 bp, synthetic construct
  source 1..120: mol_type = other DNA
aaggaaccacccttgatctcagccttccagccgccagaaccgtgagaatttctactgtgtaagcccccaagtttgtatactttgttacagcagccacaggaaaggaatccacacacatcc

SEQ ID NO: 14834 - DNA, 120 bp, synthetic construct
  source 1..120: mol_type = other DNA
acagccactccacacacctgcatcggaggtgcctgggagcttatttaaattgcaggctccgaggacagagcgccagctgcaggtgcgtcctgacatcccattctaaggcccagatgacag

SEQ ID NO: 14835 - DNA, 120 bp, synthetic construct
  source 1..120: mol_type = other DNA
gccttgcaagagcggaaacctgaaacaagcaccagcacctccacattccctttgcttcagtttcccctgggccccagggggaagctctgtctctcacttctgcaggagaaagctgtttct

SEQ ID NO: 14836 - DNA, 120 bp, synthetic construct
  source 1..120: mol_type = other DNA
ctactctctctacttctaggaattactccccccaaaaaagcaaaataactaagttagaaagatattcatcatattttttattaatagaaaaacaaagataactacctaaatatctaacag

SEQ ID NO: 14837 - DNA, 120 bp, synthetic construct
  source 1..120: mol_type = other DNA
gctcataggtttaaattggttaaatttagtaatacatggttttaaaactatgctataaatatacttataagtgattttataatctctatactaatatatgttggaacaggctagcttggc

SEQ ID NO: 14838 - DNA, 120 bp, synthetic construct
  source 1..120: mol_type = other DNA
tgtaattttcatgtgccaaaataatatacttcttttaatttttaaaaaacaatttcaaactgaaaaaaaaaaaggtcttagtccatgggcaacacaaagcaagcaagaggtagaatttgg

SEQ ID NO: 14839 - DNA, 120 bp, synthetic construct
  source 1..120: mol_type = other DNA
cactcaattcctaaactgtctcattgtctgattacttggaaaaacaagcgagatttctgtatttaatcgtaactgtaataaaaatgatggcagcaggtagaaatgtcacatggaatcaac

SEQ ID NO: 14840 - DNA, 120 bp, synthetic construct
  source 1..120: mol_type = other DNA
gcaggcctagctcaccttcacgttgtgatcctgaatgttgttgtctgcaatggcttgcagaaatgcctgggaatggtcccccagggcccgtctgtgggagcagagtcgagatttgctggc

SEQ ID NO: 14841 - DNA, 120 bp, synthetic construct
  source 1..120: mol_type = other DNA
aatgaaaaggagaaaatatttaagaaacacacaatctgtaatgaaggatagatccttggagatgggagggccgatggactggaaaggagacctgtgcgtggtgcaaggcatgggatcaac

SEQ ID NO: 14842 - DNA, 120 bp, synthetic construct
  source 1..120: mol_type = other DNA
cctgtaatgagttgatgctgctgtgcccaagtaacagcagataccacataaacccacatgcccagtaaagcaggcagcaactgcacagccctactgtagaaaaactaaaccacagataca

SEQ ID NO: 14843 - DNA, 120 bp, synthetic construct
  source 1..120: mol_type = other DNA
catttatgcctttaaatgtgtatattagagggaaaaagctaaaaaagaaaaacaccaaatcaataaaagtctattagttcataaaaatactcaaaaaaagaaaacctgagtggtggtcac

SEQ ID NO: 14844 - DNA, 120 bp, synthetic construct
  source 1..120: mol_type = other DNA
actttccaaaatttttgtgaggtgataactatgtttgtgtctattctttttattttgtattttttaagtacgtacatccttattacaaatctgctgtagaaccaatgtcccatacaggac

SEQ ID NO: 14845 - DNA, 120 bp, synthetic construct
  source 1..120: mol_type = other DNA
aacactgccaaccaagaacatgtcagaagcaggaagctacagtcagagcactgccccgcagctcaggcagtgtaataccatttgagagtggacagtgacaagtgaaagatgtaactgaaa

SEQ ID NO: 14846 - DNA, 120 bp, synthetic construct
  source 1..120: mol_type = other DNA
acaaataatgactatctaaaaatctcgaaggaaacagttcctctgtttacaacatttctgacaccaaatgcatggacttttgcaccaagtaattctccagttctctgcgacatccagctg

SEQ ID NO: 14847 - DNA, 120 bp, synthetic construct
  source 1..120: mol_type = other DNA
actcacagaggatacaagagtggcaaaaaagaacatgatattcagcattgttagccattacagaattgcaaattaaaaccacaatgagatcccactagacttgttagaatggctcaacta

SEQ ID NO: 14848 - DNA, 120 bp, synthetic construct
  source 1..120: mol_type = other DNA
gtgtccataaataaagtttacagaatgaacgtcccctgcccgctgacatagtactgtctgtggctactctggcactacagctgcaaggtcccatggctatgacagagaccatagggtcca

SEQ ID NO: 14849 - DNA, 120 bp, synthetic construct
  source 1..120: mol_type = other DNA
cactgtcatatggacactcttagcctcagcatccagaggtccagaaagggaaaatttcaagtcagagagaattctatatataccacttacttggaacattcagccctcaaaatcccaaca

SEQ ID NO: 14850 - DNA, 120 bp, synthetic construct
  source 1..120: mol_type = other DNA
aaagaagccagacacagaagaacccgactacgtgattccatgtatggagttctagaacaggcgcaatttgtcaaatgctggagaaacatcaggccaactattgcctctgggaagaagggg

SEQ ID NO: 14851 - DNA, 120 bp, synthetic construct
  source 1..120: mol_type = other DNA
gaattacaggcatgatccaccacgcccgatccccatgtactttcaagtggacaccatccccattcattccacaaaagaagaagaaatacttgccaggcacggtggctcacgcctataatc

SEQ ID NO: 14852 - DNA, 120 bp, synthetic construct
  source 1..120: mol_type = other DNA
caaaacttcaaagagttaagctcaaagctcctgttcctatagcacattacaaaatttctataaaatgcattttataatggtctttaccaaataaaaaacactagttaaaggcccttacct

SEQ ID NO: 14853 - DNA, 120 bp, synthetic construct
  source 1..120: mol_type = other DNA
actacctacggggaaatggggaggggacatggacaaaggcagcaggaccagaaaaagcaacaacattgtgagtatactttagatgtctttacttctgaaacatacatgactttcatcctc

SEQ ID NO: 14854 - DNA, 120 bp, synthetic construct
  source 1..120: mol_type = other DNA
ggaaaataagtagattcaagggccagggcagacaaagatgagcctgtttcctcaaagaaaaagctgtttcctcaaacatggccaggtgcggtggctcacgcctataatcctagcattttg

SEQ ID NO: 14855 - DNA, 120 bp, synthetic construct
  source 1..120: mol_type = other DNA
cacttcacccccactttatccttcccagtctctgataaccatcattctactctatctccatgagttcaattactttcatttgcttagcacctacaaataagtgagaacatgcaaagttcg

SEQ ID NO: 14856 - DNA, 120 bp, synthetic construct
  source 1..120: mol_type = other DNA
ttacccagtgcaatgtcctggagagtctccccaatgttttcttttagcactttcatagtctgaagtcttaggtttaagtctttactccattttgatgtgattttcgtatatggtgagaga

SEQ ID NO: 14857 - DNA, 120 bp, synthetic construct
  source 1..120: mol_type = other DNA
gacccacagaaactgtgagagtgtaaatgcttgttgttacaagctgccaaatttgtgtttggtaacttgttctgtagcgacagaaaccaagccagcatccttcagtttttgtagaaggaa

SEQ ID NO: 14858 - DNA, 120 bp, synthetic construct
  source 1..120: mol_type = other DNA
ttaggcactcaagggaatacgacatttgacccgtgtcttaaagtgtttcagaaaacagaaacagagaaggtgaactaagaagctattactggccacgcacggtggctgacgcctgtaatc

SEQ ID NO: 14859 - DNA, 120 bp, synthetic construct
  source 1..120: mol_type = other DNA
ccagacctgaaagcactctaagatcgccccagactggctgggctccacacatcagtgttctgcggtacagcctagattgagaaacattagtgttacagaggtaccatttttaaaaaaaaa

SEQ ID NO: 14860 - DNA, 120 bp, synthetic construct
  source 1..120: mol_type = other DNA
taaagaaaaagaaaaaaatgaatgggactttccatttgtaaagtgagagtatttatttctacaactgtctccaattagctttttattagtagctgacttacctaaacgtgcccagtagat

SEQ ID NO: 14861 - DNA, 120 bp, synthetic construct
  source 1..120: mol_type = other DNA
atggctttttttcttaaacctacagaaaaatactaaacatctattgaacgtaggacaacatataaaaaatgttaagaacaggttcctagaacaattagaaaggtcagacaggaacattaa

SEQ ID NO: 14862 - DNA, 120 bp, synthetic construct
  source 1..120: mol_type = other DNA
cactgttggagcctttattgggtgcttcaccaggcactatgctaacaatcccatttaatcctcacaacctccataggagacggttaccattattacctctattgtgtagatgaaaaacat

SEQ ID NO: 14863 - DNA, 120 bp, synthetic construct
  source 1..120: mol_type = other DNA
tattacattctgtcctgctcctgtttccactaaaatcactaacttaaaatgtgttcattcagcaggataaaaattaagtgaaatttgactttggtgctttgctagcaaaaaataaataaa

SEQ ID NO: 14864 - DNA, 120 bp, synthetic construct
  source 1..120: mol_type = other DNA
ggtattgtgattatataggagaagtcctggttcctagaagatatctgcgaaagtacttaacagtgaaatgctctgatactgccaacttactttgaaatgattcagagggaaaaagggcac

SEQ ID NO: 14865 - DNA, 120 bp, synthetic construct
  source 1..120: mol_type = other DNA
acccagtctcaggtgttttgttatagcactatgaagggactaagacaaatataaaaattacccagggacttaaaggaagaactgactaaactgaaatacatgccatatatattatgaatc

SEQ ID NO: 14866 - DNA, 120 bp, synthetic construct
  source 1..120: mol_type = other DNA
catttgagaacagtgagtcacagagggattaagtatcttactcaagatcttcaagtgtttggtttgaacccaatcttttcactctgcagaactcagagtcactcttatttggaaactttt

SEQ ID NO: 14867 - DNA, 120 bp, synthetic construct
  source 1..120: mol_type = other DNA
tgttatacagccatgagaagtggttctgttgaacacgtttattttatcagatcccaattctaaaccaggcatagaatggaaaccatgaaggtaggatgaaataacttctgaatgtttgaa

SEQ ID NO: 14868 - DNA, 120 bp, synthetic construct
  source 1..120: mol_type = other DNA
agacccaccgggccctgcaggaagtcacggagaagctggcccatgccggaactcacctccgccttctccatgacttgaaaatgccacctgagggcaggtcgctggcgagatgtgacccca

SEQ ID NO: 14869 - DNA, 120 bp, synthetic construct
  source 1..120: mol_type = other DNA
tttattaaaagaacacaaaataaaaaagttatgggattaacaaaagttatggggtgaaaaagttatgggataaaaaatgtaaaaaagttgtggcaaaaaaatcttgtgaccaaaaagtag

SEQ ID NO: 14870 - DNA, 120 bp, synthetic construct
  source 1..120: mol_type = other DNA
tatgccaaatatattttgatttagcgctttattaagtgcatgattacagtctctgtatcttttgatttacctttctatctttacaattttcagccgagatacttagaggtcacatgataa

SEQ ID NO: 14871 - DNA, 120 bp, synthetic construct
  source 1..120: mol_type = other DNA
tggagggactcctcttgcagtttgaagttttttcttacactaagcatctggttagaagatcatctccattttatgtcagtttaagtttagacattgttcagtaaggaatgtaaatatgag

SEQ ID NO: 14872 - DNA, 120 bp, synthetic construct
  source 1..120: mol_type = other DNA
atcacataaatactgcacaaaatatgcccgtaagtgaaacccagaggtacagaaacacatttcactcttcacaaagaagtttgtgaggaaatataactctgtgattgtatagacatgttt

SEQ ID NO: 14873 - DNA, 120 bp, synthetic construct
  source 1..120: mol_type = other DNA
gacttttacggacctcgagtctgggactactgctagttcttggcacgggctctgaggcgcatgcagagaggaggaggtggaggaggagtggggggagaggtagagagagcaatcattagg

SEQ ID NO: 14874 - DNA, 120 bp, synthetic construct
  source 1..120: mol_type = other DNA
accagaagtggctgtctcatggatgctgccatttgttttcctgttcctcttggctcctgctggaacaccagggctgtttctctgccaatattcttttaactgtcagaaataagagcagta

SEQ ID NO: 14875 - DNA, 120 bp, synthetic construct
  source 1..120: mol_type = other DNA
aaaaaatttgttaaaatctctctggaaagtagaagcctgggagaaaaccaaaccaagtcaaacccattctccagttgccatccagaggtactgtcaatgttttgagctcacaggggaagt

SEQ ID NO: 14876 - DNA, 120 bp, synthetic construct
  source 1..120: mol_type = other DNA
atcaagcacactataaaatttccattttaataggacttgtacctcaattgaggtaataaagttttaaagtttttaaagtgaaagccagccccgcccctctcctggagtgggcggggacag

SEQ ID NO: 14877 - DNA, 120 bp, synthetic construct
  source 1..120: mol_type = other DNA
ggagtagaatgtagtgatgtcacagtcccgctacaaactgtcattactaccacaagaccggcctttggtcttaggacccagtcccctaagtgttcttgcccacttctgtttcctctggtt

SEQ ID NO: 14878 - DNA, 120 bp, synthetic construct
  source 1..120: mol_type = other DNA
agtcgtgtgatttctttgctcacgacatgaccgctgggtttgggggcactcagatgtagaggccccaggctcatctcacccactcccagcctggggaagagggctcacccccaagattcc

SEQ ID NO: 14879 - DNA, 120 bp, synthetic construct
  source 1..120: mol_type = other DNA
gtgttactgtggagtagtcactgtagcagttgttcctggtcgtccagctactgctgtgcctgctctatcctgacttaacctttctctatttgcagtacattgaggagttaacaaaggaga

SEQ ID NO: 14880 - DNA, 120 bp, synthetic construct
  source 1..120: mol_type = other DNA
ttgatgagttttaactcatttaacattactatggaacccacctcctttgaagatacagagtatttctatcatccagaaagttctcctgtgctttcatgctgtcccgcactcccccagcag

SEQ ID NO: 14881 - DNA, 120 bp, synthetic construct
  source 1..120: mol_type = other DNA
ccccagtctggttcttattccctgcaaagagtagggagcctataaggtcacctgttgagcaagctgggggagagagtagggtggggctgggaggatgaggaggagaagctcatggtcgtg

SEQ ID NO: 14882 - DNA, 120 bp, synthetic construct
  source 1..120: mol_type = other DNA
ctctccacccacactctgcccgtgccatccatgtgccatacagtggcagactggtctttctacagcaaactggacttgggcccttccctacccacagctctcagagctggaggtggagtt

SEQ ID NO: 14883 - DNA, 120 bp, synthetic construct
  source 1..120: mol_type = other DNA
acacgagaatgttctccctggcaaaccaatggaaattattaaatgtgcaaaatggaactgttggaataaattctaatgccttcatatgatcgtatatttaaccttttaaaatgatattga

SEQ ID NO: 14884 - DNA, 120 bp, synthetic construct
  source 1..120: mol_type = other DNA
cttggccagttcagccatccttaggcaacttggtgaccccccgctcacaggaggtcaccacactgatgccgaacttagtgcaggcacccagtcggcataatgaccagctgttctaaaggt

SEQ ID NO: 14885 - DNA, 120 bp, synthetic construct
  source 1..120: mol_type = other DNA
ccagtccctcctggaggaggaggttggagggctgacccgaagggtcactgcacctctgcccagagcctcttacctccagatctttcagggtagcagatgatgtagggccttccctgtgaa

SEQ ID NO: 14886 - DNA, 120 bp, synthetic construct
  source 1..120: mol_type = other DNA
tctgccatcgcagggtggggagggaggcagggttggggccacagcagcaaaatcgcaatgagaaccgatcaaggcctccagtcaccttccaggcagctgtgtgactgagccagaggaggc

SEQ ID NO: 14887 - DNA, 120 bp, synthetic construct
  source 1..120: mol_type = other DNA
gggtatttatttaaaccagaatttgtcagcctcagcaatattgatatattgggccagataattctttgtggagggttctcctggtgtgttgtcgggcatttagtaacattccgtctaccc

SEQ ID NO: 14888 - DNA, 120 bp, synthetic construct
  source 1..120: mol_type = other DNA
catctccttgaacagaacccaagcaaacgtatctacctcaggcaagagaatgtagattttacatccagaggaatggagtagtcatccagccatcatttaagattgcaacaggagataaga

SEQ ID NO: 14889 - DNA, 120 bp, synthetic construct
  source 1..120: mol_type = other DNA
catacctcctgtcatcatgtccttagacaggcccatcccatagtcaatctgggttggccccaacactcactttaacctatagcatgtggtagaaatgacactggacctgttccaggtcta

SEQ ID NO: 14890 - DNA, 120 bp, synthetic construct
  source 1..120: mol_type = other DNA
tttcttgtctcctccgtagaagaatgggatgcaggaggtgctgcctaagcctgggcgctcctgggcgttcttcattccagggggcagctgcatgatctgtgcagtgcggttgtcatggga

SEQ ID NO: 14891 - DNA, 120 bp, synthetic construct
  source 1..120: mol_type = other DNA
ctcctgctcccgcagctccttctcctggtcccgcagcctctgctcctgtctccacatcttctcctcgtgcttccgtagcttctcctgatcccgtagctcctcctgatcccgtagctcctc

SEQ ID NO: 14892 - DNA, 120 bp, synthetic construct
  source 1..120: mol_type = other DNA
ttctgggcaggacactgcatcctgcagaagggacctttaggctcattcctccatctgcgaagctgggctcccaggggaccgggtaggtggttggactcaccttgtccgccctctcgtgct

SEQ ID NO: 14893 - DNA, 120 bp, synthetic construct
  source 1..120: mol_type = other DNA
ttccttaacgcccaaagaaaaaggatttgggtctttgttggcttttgcccacagccacagaactgaaagtctgaaactagattctctggaaaagacagtaacataaaccttccgacataa

SEQ ID NO: 14894 - DNA, 120 bp, synthetic construct
  source 1..120: mol_type = other DNA
ataccatgcctacctcacacacaccacacacataccccatatacaccacacaccacaaacataccatacccacctcacacacaccacacacttaacccatatataccacacacataccca

SEQ ID NO: 14895 - DNA, 120 bp, synthetic construct
  source 1..120: mol_type = other DNA
aggatctgggattgcttcgggtacttttaaaatctaggtaaagccggggtttctaaaacattgttctaaaacattgtcagggcagagcatgtaaagctctcccactaccactaatagtga

SEQ ID NO: 14896 - DNA, 120 bp, synthetic construct
  source 1..120: mol_type = other DNA
gggtggggaggggagttgatctggtcagtgtctgtatgggtggggaggggagttgatctgggtcagtgtctgtatgggttgggagggaagttgatctggtcagtgtctgtatgggtggtg

SEQ ID NO: 14897 - DNA, 120 bp, synthetic construct
  source 1..120: mol_type = other DNA
ttccagcgattatggaaaatgtgagttaaaattttaggctggtggctcaaggcaaactttgaagacactttgctaacagattttatgtggatcgtaagtgtcaggacctggtgctgctcc

SEQ ID NO: 14898 - DNA, 120 bp, synthetic construct
  source 1..120: mol_type = other DNA
gagtccagataacagccttagaatcctactcaacacactgttctgggcacttaatgccaggcagaggaagctggcacacaacgtgaaacctacttgccatccctgtcctacctataagta

SEQ ID NO: 14899 - DNA, 120 bp, synthetic construct
  source 1..120: mol_type = other DNA
cattaataactacaactaggaatggatcaaattctcctacacaaagcaaaagaataaagccattaaacttggcgtggcaggcagaattctaaaatgacccctggtgacccctggccttac

SEQ ID NO: 14900 - DNA, 120 bp, synthetic construct
  source 1..120: mol_type = other DNA
taacacacacccactgaggctttgggacctgcaaacactcaaccctagacgatgccgtggagatggagccccaaaacactccccaaaacctacccatcttcatgttcccccttggagttt

SEQ ID NO: 14901 - DNA, 120 bp, synthetic construct
  source 1..120: mol_type = other DNA
cagggattacaggcgtgagccactgtgcccggcctgtaatagttttatttcatgcttttaaaaaccttattctgagaagggatccacaggcttcactagattgtcatgacaaaagttatg

SEQ ID NO: 14902 - DNA, 120 bp, synthetic construct
  source 1..120: mol_type = other DNA
caacagtgcctcaaagggcaggttaaagaagaaaggaggggagagcaagaaagcagtgagagagactacacaagagaacaatgatgtctgctttatgtttctgtcatggtcactctggct

SEQ ID NO: 14903 - DNA, 120 bp, synthetic construct
  source 1..120: mol_type = other DNA
ctgcggcaaagcgatgggcagggctaaaggaaaaggagaaatcgagatgcctctcaggctattggagtgaacaatggacaagaaaggaagccatgttttaaagatgtgcttaggtagtgt

SEQ ID NO: 14904 - DNA, 120 bp, synthetic construct
  source 1..120: mol_type = other DNA
caaaagaagtttgaggatgattggtgccattggtgaggcaggttaagcatggttaggactggctagtttgaagaatccagcagcctctgggctggaggggctgtcatgagttgtctggta

SEQ ID NO: 14905 - DNA, 120 bp, synthetic construct
  source 1..120: mol_type = other DNA
agattccaccagcatatatattagccaagtttgcatccatgtatattagcaaaaattcagttcaagtggcacgtggcatgtaagctttctccctgtggactttataatggcagctgcacc

SEQ ID NO: 14906 - DNA, 120 bp, synthetic construct
  source 1..120: mol_type = other DNA
acggctgaccctgaaaaacccaggtttgaattgtataggtgcatttatacatggatttttttcagtcaaagttacaccaagtgtgccagcctctcctgactccctctgcagttgaaaatc

SEQ ID NO: 14907 - DNA, 120 bp, synthetic construct
  source 1..120: mol_type = other DNA
tagaccagaggtcaacaaactatgatccctaggccaaatctggcctgctgcttttgcaaacaaagttatactggaacacagttatacccattcatttataaatggtctatggttgcctcc

SEQ ID NO: 14908 - DNA, 120 bp, synthetic construct
  source 1..120: mol_type = other DNA
tttaaggggcactgtgtggaaatgcccaggctctccagattgaaacttctcactcttcaccatccagttgtccagccgcagcaaagcacgtacggagtggaagttagagcagtccatgcg

SEQ ID NO: 14909 - DNA, 120 bp, synthetic construct
  source 1..120: mol_type = other DNA
tgtgtttccgtttccctcactgggtcctggagtttgtgccaccaaacaaggagtcccagagtgtcttgagcatgtccagctaggctgttggggaccttccaggcgtgttacctgtatgct

SEQ ID NO: 14910 - DNA, 120 bp, synthetic construct
  source 1..120: mol_type = other DNA
acaaggttctgggtggtttccatttgccgctccagctatgggtccatggagtgcatgaagctgtcggagccattctcctcagccttgctgtcctgtcatggagaacacagtggcatcagg

SEQ ID NO: 14911 - DNA, 120 bp, synthetic construct
  source 1..120: mol_type = other DNA
catgtgaagtaatctgggacctgcttgtcaccctgggtgatgtgctgcccttgttctactggtacttgctgttgcggctgctgcactcccacttggagagtttggcccagcagttcctgg

SEQ ID NO: 14912 - DNA, 120 bp, synthetic construct
  source 1..120: mol_type = other DNA
gatgaaggtagggtgtgcaacatctctgtgggggtgggggtgggggtgggtgtgagggtgggcgcaagcagcggcatggcagctgagcacccctccctccaggtgaagctgctggagctg

SEQ ID NO: 14913 - DNA, 120 bp, synthetic construct
  source 1..120: mol_type = other DNA
ttccattgcacccaggcagtgtacccacaggtcagaccaacgctcggcccctttgggcttccctcttctctggtcaccaaccaacttgtcttccaagtcgtcttccaacctgtcttccaa

SEQ ID NO: 14914 - DNA, 120 bp, synthetic construct
  source 1..120: mol_type = other DNA
cccaggctcagccatgggggctggggagacttggggccataggggccagccctggtacctgcgtctggcaaggacgctctgcacctgcagccaggagctgtccacgggcccccatgtgcg

SEQ ID NO: 14915 - DNA, 120 bp, synthetic construct
  source 1..120: mol_type = other DNA
aaaccaactatgaggtcccacacagtcttgttgacaatggccttgtaggagtccacaaggttctgggtggtttccatttgccgcttcagctgtgggtccatggagtggacttaagattga

SEQ ID NO: 14916 - DNA, 120 bp, synthetic construct
  source 1..120: mol_type = other DNA
ctgcttaaagcttctgtcagtcttttctccaactcactggggtccccgtgagtgcaatgaccagctacatctaacccaccatgctgccccgactagtttgtcccacaggctcccagggcc

SEQ ID NO: 14917 - DNA, 120 bp, synthetic construct
  source 1..120: mol_type = other DNA
caaggaaaatacatgtcttcatacaagttaaacgctgagacattaaaacgtcccactgatgtcacgaacaagataagcatgccacctgaatcactgtgactcaacactgatctcaaatca

SEQ ID NO: 14918 - DNA, 120 bp, synthetic construct
  source 1..120: mol_type = other DNA
gcgagtaagtctatttataatctcagaatgaggaaggcttttaaaaactggaaacaaatcccacgatcgacaaagaaaaatactcacaaattgacaacataaaaatttaaactctatgcc

SEQ ID NO: 14919 - DNA, 120 bp, synthetic construct
  source 1..120: mol_type = other DNA
ggcctcttatcttcttttcttcctttctagaaatgcccttagaagctcattagtggtcccctctgagagagaaaacaggcagtatgggagactgttgtttttaaccactcatacttttct

SEQ ID NO: 14920 - DNA, 120 bp, synthetic construct
  source 1..120: mol_type = other DNA
gcctgggcgataatctaagggaagagctgtatcatcacttaggtttaaaaattaaagtttctcttgttttaagttgcccatctccagtgaatccacccaaggactttgagccagcttttg

SEQ ID NO: 14921 - DNA, 120 bp, synthetic construct
  source 1..120: mol_type = other DNA
tagtgagtctggtttattttagcttcaatctgggtttgtacacaagcaaaaagcaaatgttgaattttcaggtagaccttcatgcagacatgcaaaaccaactgtctcggtggtgaggag

SEQ ID NO: 14922 - DNA, 120 bp, synthetic construct
  source 1..120: mol_type = other DNA
gcaccagttcagaaggatgactctggtctggggagacaacagaacgttaagagcagccctgaggcggacacgggctgatcccaacagcagtaagatcctacaatacaagccctgcttcat

SEQ ID NO: 14923 - DNA, 120 bp, synthetic construct
  source 1..120: mol_type = other DNA
tacaaaaacacttggtggactggatttggccacctaggccataatttgctaacttctggtctaaagtgtgtcctagagtgcatgaaagaagctggagaaaaatcaccatggagtttatcc

SEQ ID NO: 14924 - DNA, 120 bp, synthetic construct
  source 1..120: mol_type = other DNA
gggtctacacgtcccccagtgcacatctcaagctcatacgatacactctgccaagtccattttgaattccatggcctgaatcattaactttcaaagccaaagcatttaaaagataaaatt

SEQ ID NO: 14925 - DNA, 120 bp, synthetic construct
  source 1..120: mol_type = other DNA
agccacacaccactgtggtgggctcacaggtaagtctttactaaatagtgtataaggggaatgggccatgtgggtgaaactctgagaagaaacagtaattttgtaaagcatttcttaaga

SEQ ID NO: 14926 - DNA, 120 bp, synthetic construct
  source 1..120: mol_type = other DNA
gtgagtttggagtggatgctcagcctcttcgggcctcagctctccaatgggggtggtacaaaggatgacgtttgtgtccccacgaagttcatgggttaaaaccctagtcctaactgggat

SEQ ID NO: 14927 - DNA, 120 bp, synthetic construct
  source 1..120: mol_type = other DNA
gtcctgagggtgcagccctcatgaatgggattagagtccttcataaaaagaggctaaagagctaattcactctctttttgccacgtgaggccacagcgagaagagggccagctgtaaacc

SEQ ID NO: 14928 - DNA, 120 bp, synthetic construct
  source 1..120: mol_type = other DNA
aaataaatttctgttagttatttaagcccctaagtccatagtattttgtcacggcagcctgagcagaccaaccacctctggagagatgggggtcaaaggattgcccagactgaatttcca

SEQ ID NO: 14929 - DNA, 120 bp, synthetic construct
  source 1..120: mol_type = other DNA
agagagtaagactgttatccctaaaacataaacacacagcggttcctcagacaaaaacagacaagaaggcctcaattctgtctaacgagggctcctaacctgacactcaaaagaaaggga

SEQ ID NO: 14930 - DNA, 120 bp, synthetic construct
  source 1..120: mol_type = other DNA
ctctttgcagcactcatagaacctttcactcctcttgccggggattcctccatagggaggaggagagaaggagccattgttagaatacaataaattaccctgtttatttcaatgtgtata

SEQ ID NO: 14931 - DNA, 120 bp, synthetic construct
  source 1..120: mol_type = other DNA
acagaatctcagctaagcttcactgtcttttaaaatccaaacgtaacactgacatgctctctcaaagactgttttgtgggctttttgtgcaaaaagttagctctataatctgcatttacc

SEQ ID NO: 14932 - DNA, 120 bp, synthetic construct
  source 1..120: mol_type = other DNA
ccacaaccgagttgggaaaagatacacattttgtcccctgaagttcctttaagtatgctttgcgtccttacatgaaatgtttataggaatctggaatcatcacagacaatccccctccat

SEQ ID NO: 14933 - DNA, 120 bp, synthetic construct
  source 1..120: mol_type = other DNA
gagaagcctgaacagctggacttcttcaatctcttccaatattattgggaggtgtctaccattgacaggttcactcgctcctttgttcattcagggataaatgctaaggtgagcaaaggc

SEQ ID NO: 14934 - DNA, 120 bp, synthetic construct
  source 1..120: mol_type = other DNA
acattaaaaatcttctaaaagatcaaaaaccccagctgttcctatcaatatgctagtgcgcactctgcatgcacctttaggccataaacccatttcccttgccctgtgaatcgactgaaa

SEQ ID NO: 14935 - DNA, 120 bp, synthetic construct
  source 1..120: mol_type = other DNA
gtctgtctttgatggagcagcaaagaccttgagaggggcccctgtctgtcctcacaaccccacacgctgcctgagagcaccactgggactggcctgggaggtcttccccgggcacagctt

SEQ ID NO: 14936 - DNA, 120 bp, synthetic construct
  source 1..120: mol_type = other DNA
atttcagcaatttttcagaagtcacaaagatatttactgccttctacccatttgttctagttctatgaatctttcctaaagggaaaaagaaaaagcgggcacgaagatttaatctcaaaa

SEQ ID NO: 14937 - DNA, 120 bp, synthetic construct
  source 1..120: mol_type = other DNA
tgggcaacatagtgagagaccttgtctctacgaaaataaaaaaacaacaacagttaataaagtttccaggagtagcttagataatcccagaatcgtatctatattaggagaagggctatt

SEQ ID NO: 14938 - DNA, 120 bp, synthetic construct
  source 1..120: mol_type = other DNA
acacttcaatggaaaactatgctttcaaaccaagcagatgtctaaagcagaattgtctcacaacctagattataacaaaatgcaaagttcaatacaactggagtaaaagacaaaaaagcc

SEQ ID NO: 14939 - DNA, 120 bp, synthetic construct
  source 1..120: mol_type = other DNA
gcccagatctacaggaacctccccactcacaagaggacagggcagcccagactcagctgagaaatgtcaacagctggcacaaatgaattacagattatttacaattcacataacactgac

SEQ ID NO: 14940 - DNA, 120 bp, synthetic construct
  source 1..120: mol_type = other DNA
accgggtttacggaagaggtagaaggtgggttgcggtcttgaaggatggctagaactttatgattatatcagagaagacaccattcaaggaagccataatagcatgaattggaaagtgca

SEQ ID NO: 14941 - DNA, 120 bp, synthetic construct
  source 1..120: mol_type = other DNA
attatcccgcctgactaacactataccaatgttaattcccaggttttgctaactatactatagacctataagatgtgaacattaagagcagctgggcaaaagctatacaggagttctcaa

SEQ ID NO: 14942 - DNA, 120 bp, synthetic construct
  source 1..120: mol_type = other DNA
caggtcctgctgactcaggtgtccacttgtaatctgaaatgagaacaaaaatttgactttgtttctgtgactaatatagagctttaaaacactgaactaatatgatgctgaggaagacac

SEQ ID NO: 14943 - DNA, 120 bp, synthetic construct
  source 1..120: mol_type = other DNA
atcagtgaagtaaggaagaaggaaaataaattatccaaaactagtgaggaagggtcatagataaaggaacagagttagctaagaaaattcctggaaacccaaggtgccccttgcaactca

SEQ ID NO: 14944 - DNA, 120 bp, synthetic construct
  source 1..120: mol_type = other DNA
acagctacagtaatcaagagtgtgctactggtataaggacagatgaacagagaaaagaatagaatccagaaataaactttcacatatacagtcaattgatcttcaataagcgttccaaga

SEQ ID NO: 14945 - DNA, 120 bp, synthetic construct
  source 1..120: mol_type = other DNA
caccgaggacttggcgggagctatgtggcggcctgcggggctgctccctttataaccgactccaccgacaggaggcgcggctcccgtcaagccgcagtttaaaagggcaacagcaccact

SEQ ID NO: 14946 - DNA, 120 bp, synthetic construct
  source 1..120: mol_type = other DNA
ccaaacgattccaaaaatagagaaggagggaatacttgcaaactcattctacagggctagcattaccctgataacaaaatcaaacacacagaccaaaaaagaaaactacaggccaatatc

SEQ ID NO: 14947 - DNA, 120 bp, synthetic construct
  source 1..120: mol_type = other DNA
tggtgtaagggctgagagcttagagggggtggtgtgtggggctgtactctgaggcggccagagtcctaggatagtcctcctgtgcacaccgcacctgttgggcagtctgagtcatgctgc

(The sequence listing continues in the following parts.)

What is claimed is:

1. A method for preparing a nucleic acid library, comprising:
(a) obtaining a plurality of transposomes comprising transposon adaptors, wherein the plurality of transposomes is immobilized on a solid support;
(b) contacting a plurality of nucleic acid fragments with the plurality of transposomes to obtain a plurality of polynucleotides;
(c) amplifying the plurality of polynucleotides to obtain amplified polynucleotides; and
(d) adding library adapters to each end of the amplified polynucleotides, thereby obtaining the nucleic acid library.

2. The method of claim 1, wherein the solid support comprises a bead.

3. The method of claim 2, wherein the plurality of the transposomes is immobilized on the bead at a density such that an average length of the plurality of polynucleotides is greater than about 1 kbp, 2 kbp, 5 kbp, 10 kbp, 15 kbp, 20 kbp, or 40 kbp; and/or wherein the average length of the plurality of polynucleotides is in a range from about 1 kbp to about 40 kbp, 1 kbp to about 30 kbp, 1 kbp to about 20 kbp, 5 kbp to about 20 kbp, 5 kbp to about 15 kbp, or 7 kbp to about 12 kbp.

4. The method of claim 2 or 3, wherein the number of transposomes immobilized on the bead is no more than about 100 transposomes, 50 transposomes, 40 transposomes, 30 transposomes, 20 transposomes, or 10 transposomes.

5. The method of claim 4, wherein the number of transposomes immobilized on the bead is no more than about 30 transposomes.

6. The method of any one of claims 2-5, wherein the plurality of the transposomes immobilized on the bead comprise a total activity such that an average length of the plurality of polynucleotides greater than about 1 kbp, 2 kbp, 5 kbp, 10 kbp, 15 kbp, 20 kbp, or 40 kbp; and/or wherein the average length of the plurality of polynucleotides is in a range from about 1 kbp to about 40 kbp, 1 kbp to about 30 kbp, 1 kbp to about 20 kbp, 5 kbp to about 20 kbp, 5 kbp to about 15 kbp, or 7 kbp to about 12 kbp.

7. The method of any one of claims 2-6, wherein the plurality of the transposomes immobilized on the bead comprise an activity in a range from about 0.05 AU/μl to about 0.25 0.05 AU/μl.

8. The method of any one of claims 2-7, wherein the plurality of the transposomes immobilized on the bead comprise an activity of about 0.075 AU/μl.

9. The method of any one of claims 1-8, wherein the transposon adapters comprise the same sequence.

10. The method of any one of claims 1-9, wherein the transposomes of the plurality of transposomes are the same.

11. The method of any one of claims 1-10, wherein the transposomes of the plurality of transposomes are B15 transposomes.

12. The method of any one of claims 1-11, wherein the transposon adapters comprise the nucleotide sequence: SEQ ID NO:01 (GTCTCGTGGGCTCGG).

13. The method of any one of claims 1-12, wherein the step (c) comprises a mutagenesis PCR, such that mutations are introduced into amplified polynucleotides.

14. The method of claim 13, wherein the mutagenesis PCR comprises amplifying the plurality of polynucleotides with a low bias DNA polymerase, and/or with a nucleotide analogue.

15. The method of claim 14, wherein the nucleotide analogue comprises dPTP, and/or 8-oxo-dGTP.

16. The method of claim 14 or 15, wherein the low bias DNA polymerase is a Thermococcal polymerase, or a functional derivative thereof.

17. The method of claim 16, wherein the Thermococcal polymerase is derived from a Thermococcal strain selected from the group consisting of T. kodakarensis, T. siculi, T. celer and T. sp KS-1.

18. The method of any one of claims 13-17, wherein the mutagenesis PCR comprises no more than 12 cycles, 10 cycles, 9 cycles, 8 cycles, 7 cycles, 6 cycles, 5 cycles, 4 cycles, 3 cycles, or 2 cycles.

19. The method of any one of claims 13-18, wherein the mutagenesis PCR comprises no more than 6 cycles.

20. The method of any one of claims 1-19, wherein a first end of a polynucleotide of the plurality of polynucleotides is capable of annealing to a second end of the polynucleotide of the plurality of polynucleotides; and/or, wherein a first end of an amplified polynucleotide is capable of annealing to a second end of the amplified polynucleotide.

21. The method of any one of claims 1-20, wherein step (c) further comprises a suppression PCR.

22. The method of claim 21, wherein the suppression PCR comprises use of a single amplification primer.

23. The method of any one of claims 1-22, wherein the amplified polynucleotides have an average length greater than about 1 kbp, 2 kbp, 3 kbp, 4 kbp, 5 kbp, 10 kbp, 15 kbp, or 20 kbp.

24. The method of any one of claims 21-23, wherein the suppression PCR comprises no more than 16 cycles, 14 cycles, 10 cycles, 9 cycles, 8 cycles, 7 cycles, 6 cycles, 5 cycles, 4 cycles, 3 cycles, or 2 cycles.

25. The method of any one of claims 21-24, wherein the suppression PCR comprises no more than 6 cycles.

26. The method of any one of claims 13-25, further comprising enriching for target nucleic acids in the amplified polynucleotides.

27. The method of any one of claims 13-25, further comprising enriching for target nucleic acids in the plurality of polynucleotides.

28. The method of claim 27, wherein the enriching for target nucleic acids in the amplified polynucleotides is performed after performing the mutagenesis PCR, and before performing the suppression PCR.

29. The method of claim 27, wherein the enriching for target nucleic acids in the amplified polynucleotides is performed after performing the suppression PCR.

30. The method of any one of claims 26-29, further comprising amplifying the target nucleic acids.

31. The method of any one of claims 1-30, wherein step (d) comprises contacting the amplified polynucleotides with an additional plurality of transposomes comprising the library adapters.

32. The method of claim 31, wherein the library adapters comprise (i) indexes, (ii) bridge amplification primer binding sites, and/or (iii) sequencing primer binding sites.

33. The method of claim 31 or 32, further comprising enriching for target polynucleotides in the nucleic acid library.

34. The method of any one of claims 26-33, wherein the enriching comprises hybridizing a plurality of selection probes with the amplified polynucleotides, the plurality of polynucleotides, and/or the nucleic acid library, wherein the selection probes of the plurality of selection probes comprise different nucleotide sequences from one another.

35. The method of claim 34, wherein an average distance between two adjacent nucleotide sequences of the selection probes on a reference sequence of a genome is in a range from about 300 consecutive nucleotides to about 7,000 consecutive nucleotides; optionally, wherein the range is from about 500 consecutive nucleotides to about 5,000 consecutive nucleotides; optionally, wherein the range is from about 750 consecutive nucleotides to about 2,500 consecutive nucleotides; optionally, wherein the range is from about 750 consecutive nucleotides to about 1,500 consecutive nucleotides; and optionally, wherein the range is from about 900 consecutive nucleotides to about 1,200 consecutive nucleotides.

36. The method of claim 34 or 35, wherein an average distance between two adjacent nucleotide sequences of the selection probes on a reference sequence of a genome is about 750, 1000, 1500, or 2000 consecutive nucleotides.

37. The method of any one of claims 34-36, wherein an average number of sites in a genome that each selection probe of the plurality of selection probes is capable of hybridizing to is no more than 50 different sites in the genome, to no more than 40 different sites in the genome, to no more than 30 different sites in the genome, to no more than 20 different sites in the genome.

38. The method of any one of claims 34-37, wherein each selection probe of the plurality of selection probes is capable of hybridizing to no more than 50 different sites in a genome, to no more than 40 different sites in a genome, to no more than 30 different sites in a genome, to no more than 20 different sites in a genome.

39. The method of claim 37 or 38, wherein a selection probe capable of hybridizing to a site in the genome comprises at least 50, 60, 70, or 80 consecutive nucleotides complementary to at least 90% of a nucleotide sequence at the site in the genome.

40. The method of any one of claims 34-39, wherein the plurality of selection probes lack sequences capable of hybridizing to a repetitive genomic DNA element.

41. The method of claim 40, wherein the repetitive genomic DNA element is selected from a tandem repeat, an Alu repeat, a short interspersed nuclear element (SINE), a long interspersed nuclear element (LINE), an integrated viral sequence, a viral long terminal repeat (LTR), and a transposon.

42. The method of any one of claims 34-41, wherein the plurality of selection probes comprise at least 50, 100, 200, 500, 1000, 5000 different selection probes.

43. The method of claim 42, wherein each selection probe of the plurality of selection probes comprises a nucleotide sequence capable of hybridizing to a region in a human genome represented in a RefSeq database and having a MAPQ score less than 50.

44. The method of claim 42 or 43, wherein each selection probe of the plurality of selection probes comprises a nucleotide sequence having at least 90%, 95%, or 100% sequence identity to any one of SEQ ID NOs: 02-122770.

45. The method of any one of claims 42-44, wherein each selection probe of the plurality of selection probes comprises a nucleotide sequence having at least 90%, 95%, or 100% sequence identity to any one of SEQ ID NOs: 02-39954.

46. The method of any one of claims 34-45, wherein the plurality of selection probes is attached to a substrate.

47. The method of claim 46, wherein the substrate comprises a plurality of beads; optionally wherein the beads are magnetic.

48. The method of any one of claims 33-47, further comprising amplifying the target polynucleotides.

49. The method of any one of claims 1-48, wherein an amount of the plurality of nucleic acid fragments is less than about 100 ng, 50 ng, 30 ng, 20 ng, 10 ng, 5 ng, or 1 ng.

50. The method of any one of claims 1-49, wherein the plurality of nucleic acid fragments is mammalian.

51. The method of any one of claims 1-50, wherein the plurality of nucleic acid fragments is human.

52. The method of any one of claims 1-51, wherein a plurality of nucleic acid fragments comprises genomic DNA.

53. A method for preparing a nucleic acid library, comprising:
(a) obtaining a plurality of transposomes comprising transposon adaptors, wherein the plurality of transposomes is immobilized on a bead, wherein the transposomes of the plurality of transposomes are the same;
(b) contacting a plurality of nucleic acid fragments with the plurality of transposomes to obtain a plurality of polynucleotides, wherein the plurality of the transposomes immobilized on the bead comprise a total activity such that an average length of the plurality of polynucleotides greater than about 1 kbp, 2 kbp, 5 kbp, 10 kbp, 15 kbp, 20 kbp, or 40 kbp;
(c) amplifying the plurality of polynucleotides to obtain amplified polynucleotides by:
(i) performing a mutagenesis PCR, such that mutations are introduced into amplified polynucleotides, and
(ii) performing a suppression PCR; and
(d) adding library adapters to each end of the amplified polynucleotides by contacting the amplified polynucleotides with an additional plurality of transposomes, thereby obtaining the nucleic acid library.

54. The method of claim 53, further comprising enriching for target nucleic acids in the amplified polynucleotides, and/or enriching for target nucleic acids in the nucleic acid library.

55. The method of claim 54, wherein enriching for target nucleic acids in the amplified polynucleotides is performed prior to performing the suppression PCR.

56. The method of claim 54, wherein enriching for target nucleic acids in the amplified polynucleotides is performed after performing the suppression PCR.

57. The method of any one of claims 54-56, wherein the enriching comprises hybridizing a plurality of selection probes with the amplified polynucleotides and/or the nucleic acid library.

58. The method of claim 57, wherein an average distance between two adjacent nucleotide sequences of the selection probes on a reference sequence of a genome is in a range from about 300 consecutive nucleotides to about 7,000 consecutive nucleotides; optionally, wherein the range is from about 500 consecutive nucleotides to about 5,000 consecutive nucleotides; optionally, wherein the range is from about 750 consecutive nucleotides to about 2,500 consecutive nucleotides; optionally, wherein the range is from about 750 consecutive nucleotides to about 1,500 consecutive nucleotides; and optionally, wherein the range is from about 900 consecutive nucleotides to about 1,200 consecutive nucleotides.

59. The method of claim 57 or 58, wherein an average distance between two adjacent nucleotide sequences of the selection probes on a reference sequence of a genome is about 750, 1000, 1500, or 2000 consecutive nucleotides.

60. The method of any one of claims 57-59, wherein an average number of sites in a genome that each selection probe of the plurality of selection probes is capable of hybridizing to is no more than 50 different sites in the genome, to no more than 40 different sites in the genome, to no more than 30 different sites in the genome, to no more than 20 different sites in the genome.

61. The method of any one of claims 57-60, wherein each selection probe of the plurality of selection probes is capable of hybridizing to no more than 50 different sites in a genome, to no more than 40 different sites in a genome, to no more than 30 different sites in a genome, to no more than 20 different sites in a genome.

62. The method of claim 60 or 61, wherein a selection probe capable of hybridizing to a site in the genome comprises at least 50, 60, 70, or 80 consecutive nucleotides complementary to at least 90% of a nucleotide sequence at the site in the genome.

63. The method of any one of claims 57-62, wherein the plurality of selection probes lack sequences capable of hybridizing to a repetitive genomic DNA element.

64. The method of claim 63, wherein the repetitive genomic DNA element is selected from a tandem repeat, an Alu repeat, a short interspersed nuclear element (SINE), a long interspersed nuclear element (LINE), an integrated viral sequence, a viral long terminal repeat (LTR), and a transposon.

65. The method of any one of claims 57-64, wherein the plurality of selection probes comprise at least 50, 100, 200, 500, 1000, 5000 different selection probes.

66. The method of claim 65, wherein each selection probe of the plurality of selection probes comprises a nucleotide sequence capable of hybridizing to a region in a human genome represented in a RefSeq database and having a MAPQ score less than 50.

67. The method of claim 65 or 66, wherein each selection probe of the plurality of selection probes comprises a nucleotide sequence having at least 90%, 95%, or 100% sequence identity to any one of SEQ ID NOs: 02-122770.

68. The method of any one of claims 62-67, wherein each selection probe of the plurality of selection probes comprises a nucleotide sequence having at least 90%, 95%, or 100% sequence identity to any one of SEQ ID NOs: 02-39954.

69. The method of any one of claims 57-68, wherein the plurality of selection probes is attached to a substrate.

70. The method of claim 69, wherein the substrate comprises a plurality of beads; optionally wherein the beads are magnetic.

71. The method of any one of claims 55-70, further comprising amplifying the target polynucleotides.

72. A method for determining a sequence of a target nucleic acid, comprising:
performing the method of any one of claims 1-71;
sequencing the nucleic acid library to obtain sequence reads; and
assembling sequence reads to obtain the sequence of a target nucleic acid.

73. The method of claim 72, wherein the assembling comprises comparing the sequence reads to a reference sequence.

74. The method of claim 73, wherein the comparing comprises determining mutations introduced into the amplified polynucleotides during the mutagenesis PCR.

75. The method of claim 72 or 73, wherein the reference sequence is obtained from the same nucleic acid sample as the plurality of nucleic acid fragments.

76. A kit comprising:
a first bead-linked transposomes (BLT-1) reagent, wherein the BLT-1 transposomes comprises a first adaptor sequence;
a mutagenesis reagent comprising a first primer, dPTPs, dNTPs, and a polymerase;
a second bead-linked transposomes (BLT-2) reagent, wherein the BLT-2 transposomes comprise the first adaptor and a second adaptor;
an amplification reagent comprising a first primer, a second primer, dNTPs, and a polymerase;
wherein BLT-1 has a lower transposome density as compared to BLT-2; and
wherein the first primer hybridizes to the first adaptor sequence and the second primer hybridizes to the second adaptor sequence.

77. The kit of claim 76, wherein BLT-2 has more than 10, 20, 50, 100, or 1000 times the transposome density as compared to BLT-1.

78. The kit of claim 76 or 77, wherein the first adaptor is B15 and the second adaptor is A14.

79. A system for preparing a nucleic acid library, comprising:
(a) a first plurality of transposomes comprising transposon adaptors for tagmenting a plurality of nucleic acid fragments, wherein the first plurality of transposomes is immobilized on a first plurality of beads at a first density;
(b) reagents for amplifying the plurality of polynucleotides to obtain amplified polynucleotides, wherein the amplifying comprising a mutagenesis PCR and/or a suppression PCR, wherein:
(i) the first reagent for performing mutagenesis PCR comprise a low bias DNA polymerase and/or a nucleotide analogue; optionally, wherein the nucleotide analogue comprises dPTP, and/or 8-oxo-dGTP; and/or the low bias DNA polymerase is a Thermococcal polymerase, or a functional derivative thereof, optionally, wherein the Thermococcal polymerase is derived from a Thermococcal strain selected from the group consisting of T. kodakarensis, T. siculi, T. celer and T. sp KS-1, and
(ii) the first reagents for performing suppression PCR comprise amplification primers having the same nucleotide sequence capable of hybridizing to the transposon adaptors;
(c) a plurality of selection probes for enriching for target polynucleotides in the amplified polynucleotides; and
(d) a second plurality of transposomes comprising library adaptors for adding library adaptors to each end of the amplified polynucleotides, wherein the second plurality of transposomes is immobilized on a second plurality of beads at a second density, wherein the first density is less than the second density.

80. A system for preparing a nucleic acid library, comprising:
(a) a first plurality of transposomes for tagmenting a plurality of nucleic acid fragments to obtain a plurality of polynucleotides, wherein the first plurality of transposomes comprises transposon adaptors, wherein the first plurality of transposomes is immobilized on a solid support, optionally, wherein the solid support comprises a first plurality of beads; wherein:
the first plurality of the transposomes is immobilized on the first plurality of beads at a density such that on contacting the first plurality of transposomes with the plurality of nucleic acid fragments the plurality of polynucleotides has an average length of the plurality of polynucleotides is greater than about 1 kbp, 2 kbp, 5 kbp, 10 kbp, 15 kbp, 20 kbp, or 40 kbp; and/or wherein the average length of the plurality of polynucleotides is in a range from about 1 kbp to about 40 kbp, 1 kbp to about 30 kbp, 1 kbp to about 20 kbp, 5 kbp to about 20 kbp, 5 kbp to about 15 kbp, or 7 kbp to about 12 kbp;
the number of transposomes immobilized on the bead is no more than about 100 transposomes, 50 transposomes, 40 transposomes, 30 transposomes, 20 transposomes, or 10 transposomes, optionally, wherein the number of transposomes immobilized on the bead is no more than about 30 transposomes;
the plurality of the transposomes immobilized on the bead comprise a total activity such that on contacting the first plurality of transposomes with the plurality of nucleic acid fragments the plurality of polynucleotides has an average length greater than about 1 kbp, 2 kbp, 5 kbp, 10 kbp, 15 kbp, 20 kbp, or 40 kbp; and/or wherein the average length of the plurality of polynucleotides is in a range from about 1 kbp to about 40 kbp, 1 kbp to about 30 kbp, 1 kbp to about 20 kbp, 5 kbp to about 20 kbp, 5 kbp to about 15 kbp, or 7 kbp to about 12 kbp; and/or
the plurality of the transposomes immobilized on the bead comprise an activity in a range from about 0.05 AU/μl to about 0.25 0.05 AU/μl, optionally, wherein the plurality of the transposomes immobilized on the bead comprise an activity of about 0.075 AU/μl;
(b) first reagents for amplifying the plurality of polynucleotides to obtain amplified polynucleotides; and
(c) second reagents for adding library adaptors to each end of the amplified polynucleotides.

81. The system of claim 80, wherein the transposon adapters comprise the same sequence, optionally, wherein the transposon adapters comprise the nucleotide sequence: SEQ ID NO: 01 (GTCTCGTGGGCTCGG); and/or wherein the transposomes of the plurality of transposomes are the same, optionally, wherein the transposomes of the plurality of transposomes are B15 transposomes.

82. The system of claim 80 or 81, wherein the first reagents comprise reagents for performing mutagenesis PCR comprising a low bias DNA polymerase and/or a nucleotide analogue; optionally, wherein:
the nucleotide analogue comprises dPTP, and/or 8-oxo-dGTP; and/or
the low bias DNA polymerase is a Thermococcal polymerase, or a functional derivative thereof, optionally, wherein the Thermococcal polymerase is derived from a Thermococcal strain selected from the group consisting of T. kodakarensis, T. siculi, T. celer and T. sp KS-1.

83. The system of any one of claims 80-82, wherein the first reagents comprise reagents for performing suppression PCR comprising amplification primers having the same nucleotide sequence; optionally, wherein the amplification primers are capable of hybridizing to the transposon adaptors.

84. The system of any one of claims 80-83, wherein the second reagents comprise a second plurality of transposomes comprising the library adaptors; and optionally, wherein the second plurality of transposomes has an activity such that on contacting the second plurality of transposomes with the amplified polynucleotides a library of nucleic acids is obtained and comprises the library adaptors and having an average length less than about 1 kb, 900 bp, 800, bp, 700 bp, 600 bp, 500 bp, 400 bp, 300 bp, 200 bp, or 100 bp.

85. The system of claim 84, wherein the first plurality of the transposomes is immobilized on the beads at a density less than a density at which the second plurality of transposomes are immobilized on the second plurality of beads.

86. The system of any one of claims 80-85, further comprising third reagents for enriching for target polynucleotides in the amplified polynucleotides, comprising a plurality of selection probes; optionally, wherein the plurality of selection probes is attached to a third plurality of beads.

87. The system of claim 79 or 86, wherein an average distance between two adjacent nucleotide sequences of the selection probes on a reference sequence of a genome is in a range from about 300 consecutive nucleotides to about 7,000 consecutive nucleotides; optionally, wherein the range is from about 500 consecutive nucleotides to about 5,000 consecutive nucleotides; optionally, wherein the range is from about 750 consecutive nucleotides to about 2,500 consecutive nucleotides; optionally, wherein the range is from about 750 consecutive nucleotides to about 1,500 consecutive nucleotides; and optionally, wherein the range is from about 900 consecutive nucleotides to about 1,200 consecutive nucleotides; and optionally, wherein an average distance between two adjacent nucleotide sequences of the selection probes on a reference sequence of a genome is about 750, 1000, 1500, or 2000 consecutive nucleotides.

88. The system of claim 86 or 87, wherein an average number of sites in a genome that each selection probe of the plurality of selection probes is capable of hybridizing to is no more than 50 different sites in the genome, to no more than 40 different sites in the genome, to no more than 30 different sites in the genome, to no more than 20 different sites in the genome.

89. The system of any one of claims 86-88, wherein each selection probe of the plurality of selection probes is capable of hybridizing to no more than 50 different sites in a genome, to no more than 40 different sites in a genome, to no more than 30 different sites in a genome, to no more than 20 different sites in a genome; and optionally, wherein a selection probe capable of hybridizing to a site in the genome comprises at least 50, 60, 70, or 80 consecutive nucleotides complementary to at least 90% of a nucleotide sequence at the site in the genome.

90. The system of any one of claims 86-89, wherein the plurality of selection probes lack sequences capable of hybridizing to a repetitive genomic DNA element; optionally, wherein the repetitive genomic DNA element is selected from a tandem repeat, an Alu repeat, a short interspersed nuclear element (SINE), a long interspersed nuclear element (LINE), an integrated viral sequence, a viral long terminal repeat (LTR), and a transposon.

91. The system of any one of claims 86-90, wherein the plurality of selection probes comprise at least 50, 100, 200, 500, 1000, 5000 different selection probes.

92. The system of claim 91, wherein each selection probe of the plurality of selection probes comprises a nucleotide sequence capable of hybridizing to a region in a human genome represented in a RefSeq database and having a MAPQ score less than 50.

93. The system of claim 91 or 92, wherein each selection probe of the plurality of selection probes comprises a nucleotide sequence having at least 90%, 95%, or 100% sequence identity to any one of SEQ ID NOs: 02-122770.

94. The system of any one of claims 91-93, wherein each selection probe of the plurality of selection probes comprises a nucleotide sequence having at least 90%, 95%, or 100% sequence identity to any one of SEQ ID NOs: 02-39954.

95. The system of any one of claims 79-94, wherein the plurality of nucleic acid fragments is mammalian; optionally, wherein the plurality of nucleic acid fragments is human.

96. The system of any one of claims 79-95, wherein the plurality of nucleic acid fragments comprises genomic DNA.

97. A kit comprising: a plurality of at least 50, 100, 1000, 2000, 3000, 4000, 5000, 10000, 20000, 30000, or 40000 selection probes, wherein the selection probes are different from one another, and comprise a nucleotide sequence having at least 90%, 95%, or 100% sequence identity to any one of SEQ ID NOs: 02-122770; and optionally:
(i) a first plurality of transposomes comprising transposon adaptors for tagmenting a plurality of nucleic acid fragments, wherein the first plurality of transposomes is immobilized on a first plurality of beads at a first density; and
(ii) a second plurality of transposomes comprising library adaptors for adding library adaptors to each end of the amplified polynucleotides, wherein the second plurality of transposomes is immobilized on a second plurality of beads at a second density, wherein the first density is less than the second density.

98. The kit of claim 97, wherein each selection probe of the plurality of selection probes comprises a nucleotide sequence having at least 90%, 95%, or 100% sequence identity to any one of SEQ ID NOs: 02-39954.
